United States Patent Application Publication US 2008/0034453 A1 - sequence listing, part 29

SEQ ID NO: 234836 - DNA, 402 bp, Glycine max
gaaggtgcaagagtttgttgtgagctataagctagtttatcgtgaggagaatatgaagttgtttgttttctttgttgctgcagtagttttggtagcatggccatgccatggcgcaggctaccaaaggttccctctccgaatgaaaactggctatggtgagcgttcttcggaggtaaaatgcgcaagttttaggcttgctgtggaagcacacaacatccgagcctttaaaaccattcctgaagagtgcgttgaaccagcataggactacattaatggcgaacactttagatcagactctaaaacagttaaccaacaagctttcttttatgctagtgaacgcgaagtccatcacaacgacatatttatattcggcatagataccaccgtactctctaatatccc

SEQ ID NO: 234837 - DNA, 370 bp, Glycine max
ggccattgttgctgtcatcatccgcagctgctgttattcgcaccgcaaacaaacagtgagccatggccgtcggaaagaacaagcgcatctccaaagggaaaaagggtggtaagaagaaggcagctgatccctttgccaagaaggattggtatgacattaaggccccttctctttttcaagtgaaaaatgttggcaaaaccctcgtctctcgtacgcagggtaccaagattgcttctgaaggacttaaacatagagtgtttgaggtctccttggctgatcttcaaggggatgaggatcatgcattcaagaagattaggttgagagctgaagatgtgcaagggaagaatgtcctgacaaatttctggggaat

SEQ ID NO: 234838 - DNA, 402 bp, Glycine max
  unsure (1)..(402): unsure at all n locations
ggagagtggagagagagagagaagtgagagtgtgagagggagcacagtgaagaagagaacgaaggaacgaagatggagactcctcctccgcaacaaggcgtggtgaagaagaaggagacaaggggccgaaaacccaagccgaaagacgaacacgccaaggcgttgaaggaagggagaaaaacacagcaacaacaacatgatcagcagcaacaacaacaacagcaacatcaaccttcggtggacgagaaatacacgcagtggaagtcncttgttcctgtcctctacgactggctcgccaaccacaacctcgtctggccctctctctcttgccggtggggccctcagcttgaacaagccacttacaagaatcgtcaaagactctacctttctgagcagactgat

SEQ ID NO: 234839 - DNA, 387 bp, Glycine max
gcagcagaagaacaagtagttgagaactaagaaggagaagcaaatggcttcctcaatgatctcttccccagctgttaccactgtcaaccgtgccggtgccggcatggttgctccattcactggcctcaagtccatggctggcttccccaccagaaagaccaacaatgacattacctccattgctagcaacggtggaagagtgcaatgcatgcaggtgtggccaccagttggcaagaagaagtttgagactctttcctacctgccagaccttgatgatgcacaattggcaaaggaagtagaataccttcttaggaagggatggattccttgcttggaattcgagttggagcacggtttcgtgtaccgtgagcacaacaagtcaacaag

SEQ ID NO: 234840 - DNA, 358 bp, Glycine max; identical to SEQ ID NO: 234733

SEQ ID NO: 234841 - DNA, 350 bp, Glycine max
ggatcctttgtattctattcttcaagattcaggtactgcgtttcggaagcagacacagatggctcgtacgaagcaaaccgctcgtaagtccacaggaggaaaggctcctaggaagcagcttgcaaccaaggctgcacgtaagtctgcaccaactactggtggtgtgaagaagccccaccgttatcgtcctggtaccgttgctcttcgtgagattaggaaataccagaagagtaccgagcttttgatccggaagctccccttccagaggctggttcgtgaaattgctcaggacttcaagactgatctgcgtttccagagccacgccgtgcttgcattgcaagaagctgctg

SEQ ID NO: 234842 - DNA, 323 bp, Glycine max
ggcacaagtgagtttgttgatcgagataactagaaacagtgtgatgaaaatgaaggtccttgttttcttcgttgctacaattttggtagcatggcaatgccatgcgtacgatatgttccctctccgaatgaacactggctatggtgcccgtactccggaggtgaaatgcgcaagttggaggcttgctgtggaagcacacaacatctttggctttgagaccattcctgaagagtgcgttgaagcaacaaaggaatacatccatggcgaacaatatagatcagactccaaaacagttaaccaacaagcttacttttatgccagag

SEQ ID NO: 234843 - DNA, 346 bp, Glycine max
  unsure (1)..(346): unsure at all n locations
ggagttcaaacaaatcaaagccatggccacctccaacttctctattgttctctccgtctccctagccttctttttggtgctacttaccaaggcacactcgaccgataccgtttctttcaccttcaacaagttcaacccagtccaaccaaacattatgctccaaaaagatgctggtatttcatcctctggggtgttacaactcaccaaagttggcagcaacggcgtgcccacctcgggatctctcggtcgtgccctttacgctgccccaatccagatttgggacagcgaaaccggcaaggtagccagctgggctacatcctttanattcaacatttttcgcaccaac

SEQ ID NO: 234844 - DNA, 380 bp, Glycine max
  unsure (1)..(380): unsure at all n locations
ggcagcaagaagaggaagcactgtgttcgacttcgtcaaaagcatcatgagccgctacgacagccgctccggcgacccagcttcctatcgtgatcggaggagtgattctgggctaggtgcacctacagggtttggtggctctgtacaacactcttcatcaaacaggagggattatgatgatggtgggtcaccaaagaggaacctcagtttggatggtttacctcattttgagaaaaacttctacattgagtcaccagctgtaagggcaatgacagatgctgaagttaatgagtatcggcagcagagggaaataactgttgaagggcgagatatcccgaaacctgtcanagactttcacgatgctggttttccagaatatg

SEQ ID NO: 234845 - DNA, 360 bp, Glycine max
ggcacaagtgagtctgttgatcgagataactagaaacagtgtgatgaaaatgaaggtccttgttttcttcgttgctacaattttggtagcatggcaatgccatgcgtacgatatgttccctctccgaatgaacactggctatggtgcctgtactccggaggtgaaatgcgcaagttggaggcttgctgtggaagcacacaacatctttggctttgagaccattcctgaagagtgcgttgaagcaacaaaggaatacatccatggcgaacaatatagatcagactccaaaacagttaaccaacaagcttacttttatgccagagacctcgaagtccatcccaaggacacatttgtgttcag

SEQ ID NO: 234846 - DNA, 403 bp, Glycine max
ggcaagagtttgttgtgagctataagctagcttatcgtgaggagaatatgaagttgtttgttttctttgttgctgcagtagttttggtagcatggccatgccatggcgcaggctaccaaaggttccctctccgaatgaaaactggctatggtgagcgttcttcggaggtaaaatgcgcaagttttaggcttgctgtggaagcacacaacatccgagcctttaaaaccattcctgaagagtgcgttgaaccaacaaaggactacattaatggcgaacaatttagatcagactctaaaacagttaaccaacaagctttcttttatgctagtgaacgcgaagtccatcacaacgacatatttatattcggcatagataacaccgtactctcctatatcccatacta

SEQ ID NO: 234847 - DNA, 345 bp, Glycine max
ggtcgtcgaagcgcgagcaagcatcccaaaaccctagctcgcgttctgctttcgtcttttacatcagcaggatggagtctcaggtgaagcacgcacttgttgtcaaagttatgggtcgtactggatccagaggacaagtaacccaggttagagtgaaatttttggatgatcagaaccgtcacatcatgaggaatgtgaaaggacctgtgcgagaaggagacattctcaccctactcgagtctgaaagggaagcaagaagattgcgctagatggtttcttttggcttgcctccaaattccaacaaaacagtgtgattttgttgattttaatggtagttggtggatg

SEQ ID NO: 234848 - DNA, 396 bp, Glycine max
ggcacaagtgagtttgttgatcgagataactagaaacagtgtgatgaaaatgaaggtccttgttttcttcgttgctacaattttggtagcatggcaatgccatgcgtacgatatgttccctctccgaatgaacactggctatggtgcccgtactccggaggtgaaatgcgcaagttggaggcttgctgtggaagcacacaacatctttggctttgagaccattcctgaagagtgcgttgaagcaacaaaggaatacatccatggcgaacaatatagatcagactccaaaacagttaaccaacaagcttacttttatgccagagacctcgaagtccatcccaaggacacatttgtgttcagtatagatggcaccgtactctctaataatcaatacta

SEQ ID NO: 234849 - DNA, 349 bp, Glycine max
gattcactgtgtctgaaaatgaagaggagaaaaaagattagcgacggaggaaaacgacaaggtggaatagcgttgccgccgccgccaagaggccctccgcctcctctaccctctcgccctcgcctcgaacccgtcgatcgcgaaaagacatgtccgttactgctgcgagtgttcactaagattgggagtcaccattccatggaacactttgccgtcagaggcatagagcccaatgactaggttcagatttacacctggaacgacgctactctccgagatctcaccgatcttgtcatagaagttgctccggctgcaatgacatgaaacgccaaactcaccttcacctttg

SEQ ID NO: 234850 - DNA, 360 bp, Glycine max
  unsure (1)..(360): unsure at all n locations
ggcacaagtgagtttgttgatcgagataactagaaacagtgtgatgaaaatgaaggtccttgttttcttcgttgctacaattttggtagcatggcaatgccatgcgtacgatatgttccctctccgaatgaacactggctatggtgcccgtactccggaggtgaaatgcgcaagttggaggcttgctgtggaagcacacaacatctttggctttgagaccattcctgaagagtgcgttgaagcaacaaaggaatacatccatggcgaacaatatagatcagactccaaaacagttaaccaacaagcttacttttatgccagagacctcgaagtccatcncaaggacacatttgtgttcag

SEQ ID NO: 234851 - DNA, 397 bp, Glycine max
  unsure (1)..(397): unsure at all n locations
ggcacaagtgagtttgttgatcgagataactagaaacagtgtgatgaaaatgaaggtccttgttttcttcgttgctacaattttggtagcatggcaatgccatgcgtacgatatgttccctctccgaatgaacactggctatggtgcccgtactccggaggtgaaatgcgcaagttggaggcttgctgtggaagcacacaacatctttggctttgagaccattcctgaagagtgcgttgaagcaacaaaggaatacatccatggcgaacaatatagatcagactccanaacagttaaccaacaagcttacttttatgccagagacctcgaagtccatcccaaggacacatttgtgttcagtatagatggcaccgtactctctaatattccatactac

SEQ ID NO: 234852 - DNA, 354 bp, Glycine max
gggagctgggtttgttttcggcctttgatcttcgattctctctctttttctctcgcgaaaaccgtatcagcaatgtctggagaatcagccagcgctattcacaagggtcaagtcgatctcttagacttcattgactggtctggggttgaatgcctcaatcaaagctccacccactctctccccaatgctatcaaacagggttatagagaagacgatggtttgcatctggagagtgatgcagacgagcagcttttgctctatattcctttcactcaagtcgttaaactttattcctttgttatcaaaggtcctgaagaagaaggccccaagacagtgaagctcttttctaacaag

SEQ ID NO: 234853 - DNA, 347 bp, Glycine max
gacagcactgcactcttcgcaacacagcaaaaaaagacaacccagagagcgcgtcttaataaacgctcttctctgaaaacccccatttcttttcttctttcttcttctctttcgcttcttcgatcttcgatcttcgtcgctgaaaatgagagagtgcatttcaatccacatcggccaggccgggattcaggttggaaacgcctgctgggagctttactgcctcgaacacggcattcagcctgatgggcagatgccaagtgacaagaccgttggtggaggtgatgatgctttcaacaccttcttcagtgaaactggggcaggaaagcacgtggcccgtgcgatttttg

SEQ ID NO: 234854 - DNA, 424 bp, Glycine max
ctcacgggtcgacgcacgcctctaacagcagtcataatacaacagaaggggagaaggatggagaagaggttcacttcggataaaaaagtggaaacagtggaagcgaaggtgaaggaagttggagagaaattagggtttaggattgagatagggaagaacggtgctattgggttgggaaaggggaaggtgggtgttgtggttgaggtgtttgagattgtggctgacttgttgcttgtggcggtcaaagtggtggatggtgggctggagtttgaggagcttcattgggatgattggagaattggccttcaagatcttgttctctcatggcatgatgttggattggagctttagagaatacagtctaaggttttgtacagatggtcctagtagtcctttatgtttatgtgtttggttccttttgaat

SEQ ID NO: 234855 - DNA, 407 bp, Glycine max
  unsure (1)..(407): unsure at all n locations
ctcacgggtcgacgcacgcgtctagactgagtcatgcaacaccaccgcatcctcttcgacaagtaccatcccggtttcttcggaaaggtgggtatgcgctacttccacaaactccgcaacaaattctactgccccatcgtcaacattgataagctatggtccctcctaccccaggaggccaaggacaaggccaccgccgacaaggcgccattgctcgatgtcacccagttcggttactttaaggttttgggtaaaggggttttgcctcagaaccagcctctggtcgtgaaggccaagcttgtttccaagatcgccgagaagaagatcaaggangccggtggagccgtcgttctcaccgcctgatttttttggggtaattttatttaaaaggattttgagatctgttg

SEQ ID NO: 234856 - DNA, 396 bp, Glycine max
gactcacccaaaaccaacctactccaaggaagtcccctaatcagaaccagagatggacaccaaacccaccgagatcagcagcggcaagatgttcggaggttacaacaagagattcaagcatttcagccttaccctgggatgctccatgaacttccacatctacttccctccatctccttctccctctcacaaattccctgtgctgcactttctctctggcctcacttgcaccgacgagaacttcatattcaggtcgggtgctcagcgtgccgcttccgccgagggtgttgccttggttgcccccgacacttctccgagaggcttgaatgtggaaggagaagcagacagctgggaccttggagtaggtgcaggattttatctcaatggccacacaga

SEQ ID NO: 234857 - DNA, 289 bp, Glycine max
ggctccgccatttttcgtagctgctgttcttgcgcgtgaacaagcctcaggtaagccaaaaccatggttaagcataacaatgttatcccaaacggacacttccgtaagcactggcagaactatgtgaagacttggttcaatcagccagcacggaagacaaggagacgattggctcgtcagaagaaagctgtgaagatattcgccagacctactgctggacctctcaggcccattgtacatggtcaaactttgacatacaacatgacagtgacacgtggaaggggatttt

SEQ ID NO: 234858 - DNA, 361 bp, Glycine max
ggtgcacaagtgagtttgttgatcgagataactagaaacagtgtgatgaaaatgaaggtccttgttttcttcgttgctacaattttggtagcatggcaatgccatgcgtacgatatgttccctctccgaatgaacactggctatggtgcccgtactccggaggtgaaatgcgcaagttggaggcttgctgtggaagcacacaacatctttggctttgagaccattcctgaagagtgcgttgaagcaacaaaggaatacatccatggcgaacaatatagatcagactccaaaacagttaaccaacaagcttacttttatgccagagacctcgaagtccatcccaaggacacatttgtgttca

SEQ ID NO: 234859 - DNA, 386 bp, Glycine max
ggaaacagagagtggtttcagtgagtgatcggtgttcacttgatccttcataagtcgtcatcatcatcatcatcatcaccgttgattgaagaagatgccgatcagaaacatcgccatcggaaggcctgaagaggctactcaccccgacacgttgaaggcggggttggctgagttcatctccaccttgatcttcgtgttcgccggttcaggttccggcatcgcctacaacaagctcaccgacaacggcgccgccactcccgccggcctcatctccgcttccatcgcccatgctttcgccctcttcgtcgccgtctccgtcggcgccaacatctccggcggccacgtcaaccccgccgtcaccttcggcgccttcgtgggcggcaaca

SEQ ID NO: 234860 - DNA, 400 bp, Glycine max
  unsure (1)..(400): unsure at all n locations
gaaggtgcaagagtttgttgtgagctataagctagtttatcgtgaggagaatatgaagttgtttgttttctttgttgctgcagtagttttggtagcatggccatgccatggcgcaggctaccaaaggttccctctccgaatgaaaactggctatggtgagcgttcttcggaggtaaaatgcgcaagttttaggcttgctgtggaagcacacaacatccgagcctttaaaaccattcctgaagagtgcgttgaaccaacanaggactacattaatggcgaacaatttagatcagactctaaaacagttaaccaacaagctttcttttatgctagtgaacgcgaagtccatcacaacgacatatttatattcggcatagataacaccgtactctctaatatc

SEQ ID NO: 234861 - DNA, 380 bp, Glycine max
gaaggtgcaagagtttgttgtgagctataagctagtttatcgtgaggagaatatgaagttgtttgttttctttgttgctgcagtagttttggtagcatggccatgccatggcgcaggctaccaaaggttccctctccgaatgaaaactggctatggtgagcgttcttcggaggtaaaatgcgcaagttttaggcttgctgtggaagcacacaacatccgagcctttaaaaccattcctgaagagtgcgttgaaccaacaaaggactacattaatggcgaacaatttaaatcagactctaaaacagttaaccaacaagctttcttttatgctagtgaacgcgaattcaatcacaacgacatatttatattcggcatagata

SEQ ID NO: 234862 - DNA, 396 bp, Glycine max
ccgggccgacccacgcgtccacccacgcgtccggaggcctccaagtgctttcttcgttttcatggaggagttcaggaaggtattcaacaaagaacatcctgaaaacaaagcagtgtctgctgtgggcaaagctgctggagcaaaatggaagaccatgtctgatgctgaaaaagcaccttatgtggcaaagtctgagaaaaggaaagtggagtacgagaagaacatgagagcctataacaagaaacaggcggaaggtcctactggtggggatgaagaagaatctgagaagtctgtatctgaggtgaatgatgaagatgatgatgaggaaggcagtggcgaggaagaggatgacgattagagaatggactgataattgcatttatgtaggttctgatg

SEQ ID NO: 234863 - DNA, 312 bp, Glycine max
  unsure (1)..(312): unsure at all n locations
ggcacaagtgagtttgttgatcgagataactagaaacagtgtgatgaaaatgaaggtccttgttttcttcgttgctacaattttggtagcatggcaatgccatgcgtacgatatgttccctctccgaatgaacactggctatggtgcccgtactccggaggtgaaatgcgcaagttggaggcttgctgtggaagcgcacaacatctttggctttgagaccattcctgaagagtgcgttgaagcaacaaaggaatacatccatggcgaacaatatagatcagactccanaacagttaaccaacaagcttactt

SEQ ID NO: 234864 - DNA, 348 bp, Glycine max
caacatatgtcatcgaaaggatctcgaagacccaccaacgcacgaaagccgggatctttcagaaaatggattcctattcgaagggtgcataaccgcatggataagctcacactaacccgtcaatttgggatccaattcggttccttaagaggtatcgggaaggaattttggaatgtaataatatcgattcatacagatacagaagaaagggttctctattgattcaaacgctctacctacgagatagggatagagaaagaggaaaaaaccgaggatttcacatagtacttttggtcgaaaaatcgatctgatttttttcgtacttttcgctcaatgatgaaatgggtc

SEQ ID NO: 234865 - DNA, 304 bp, Glycine max
ggtgcacaagtgagtttgttgatcgagataactagaaacagtgtgatgaaaatgaaggtccttgttttcttcgttgctacaattttggtagcatggcaatgccatgcgtacgatatgttccctctccgaatgaacactggctatggtgcccgtactccggaggtgaaatgcgcaagttggaggcttgctgtggaagcacacaacatctttggctttgagaccattcctgaagagtgcgttgaagcaacaaaggaatacatccatggcgaacaatatagatcagactccaaaacagttaaccaac

SEQ ID NO: 234866 - DNA, 388 bp, Glycine max
  unsure (1)..(388): unsure at all n locations
gacggcactcgttttcgttctcgttctggtttatagatctttgcgaaggaggtttacagcgctcaaccaaagatgcagaacgaggaaggacagatcactgagctttacattcctaggaagtgctccgccacaaacagattgattaccgctaaggaccatgcttcggttcagatcaacattgggcatgtggatgagaatggcgtctacaatggccatttctccacttttgccctctgcggattcatccgtgctcaaggtgatgctgacagtgctctagaacgcttgtggcagaagaagaaagttgaagttaagcaacagtagacanccatgatagtttgttacttcgttatgtattaatttctactcttgctagagatatttgagtact

SEQ ID NO: 234867 - DNA, 400 bp, Glycine max
  unsure (1)..(400): unsure at all n locations
ggcacaagtttgttgagatagctagaagcaataagatgaaaatgaaagtgcttgttttgtttgttgctacagttttggtagcatatgaatgccgtggctcagactaccagaagttccctctccaaatgaaaactgggtttggtgggcaatacagcaatgaggtggcatgtgccagttggaggcttggcgtggaagcaaacaacgtagtcaagtggcaaactgttcctgcagcttgcggagagtacatagctgactacgttctaggagaccaatatagatcagattccaaaacagttaaccaacaagcttatttctatgctaaatccctcanactcancaacaaagatgtctttgtctcggacgttgacgacactactctctctaatctccagtattttgc

SEQ ID NO: 234868 - DNA, 388 bp, Glycine max
  unsure (1)..(388): unsure at all n locations
gattatatttgagttcaaacaaatcaaagccatggccacctccaacttctctattgttctctccgtctccctagccttctttttggtgctacttaccaaggcacactcgaccgataccgtttctttcaccttcaacaagttcaacccagtccaaccaaacattatgctccaaaaagatgctagtatttcatcctctggggtgttacaactcaccaaagttggcagcaacggcgtgcccacctcgggatctctcggtcgtgccctttacgctgccccaatccagatttgggacagcgaaaccggcaaggtagccagctgggctacatcctttaaattcaacattttcgcacccaacaaatcanactcagctgacgggcttgccttcttc

SEQ ID NO: 234869 - DNA, 395 bp, Glycine max
ggtattccttacgctctctcactcacaaacacacactgaactaaaaaacatcaaaagagacatggctgagcaaaccttcatcatgatcaagcctgatggcgtccaaagaggccttattggcgagatcattagcagatttgagaagaaaggtttctacttgaaaggtttgaaacttgttgctgtggaccgtccttttgctgagaagcactatgctgatttgtctgccaagcctttctttagtggtttggtggattacattatctctggccctgttgttgccatgatctgggagggcaagaatgttgttacaactggccgaaagattatcggagccacaaacccagctcaatctgagcctggaactatccgtggtgacttttgcattgacattggaa

SEQ ID NO: 234870 - DNA, 404 bp, Glycine max
  unsure (1)..(404): unsure at all n locations
ggcacaagtttgttgagatagctagaagcaataagatgaaaatgaaagtgcttgttttgtttgttgctacagttttggtagcatatgaatgccatggctcagactaccagaagttccctctccaaatgaaaactgggtttggtgggcaatacagcaatgaggtggcatgtgccagttggaggcttggcgtggaagcaaacaacgtagtcaagtggcaaactgttcctgcagcttgcggagagtacatagctgactacgttctangagaccaatatagatcagattccanaacagttaaccaacangcttatttctatgctaaatccctcaaactcaacaacanagatgtctttgtcttggacgttgacgacactactctctctaatctccattattttgctaac

SEQ ID NO: 234871 - DNA, 354 bp, Glycine max
gacaagtgagtttgttgatcgagataactagaaacagtgtgatgaaaatgaaggtccttgttttcttcgttgctacaattttggtagcatggcaatgccatgcgtacgatatgttccctctccgaatgaacactggctatggtgcccgtactccggaggtgaaatgcgcaagttggaggcttgctgtggaagcacacaacatctttggctttgagaccattcctgaagagtgcgttgaagcaacataggaatacatccatggcgaacaatatagatcagactccaaaacagttaaccaacaagcttacttttatgccagagacctcgaagtccatcccaaggacacatttgtgt

SEQ ID NO: 234872 - DNA, 401 bp, Glycine max
gatacaatagagaccagcttttgcttctttgtgaacatggagatgaggaaatcatgtggcttcttcgtcttgctcctcctccttgtctttgcttcccaggtggtggtgcagacggagggaagagtgtgtgagtcacaaagccacgggttccatggtttgtgtaatagagaccacaactgtgctttggtctgcaggaacgaaggtttctccggtggcaggtgcaaaggcttccgccgtcgctgcttttgcaccaggatttgttgagatctcatcagacactactcttgctatgcaaattaataaatcatagctaggccaaataaattgcatctactctttatccatttgggagctagctaccacaactaactcatacttggacattggattgcttccctttg

SEQ ID NO: 234873 - DNA, 254 bp, Glycine max
ggcacaattgattttgttgatcaaaataactagaaacattgtgatgaaaatgaaggcccttgtttccttcgttgcaacaattttggaagcatggaaatgccatgcgtacaaaatgttccctctccgaatgaaaactggcaatggtgcccgtactccggaggtgaaatgcccaatttggaggcttgctgtggaagcacacaaaatctttggctttgagaccattcctgaaaattgcgttgaaccaacaaaggaat

SEQ ID NO: 234874 - DNA, 358 bp, Glycine max
ggcacaagtgagtttgttgatcgagataactagaaacagtgtgatgaaaatgaaggtccttgttttcttcgttgctacaattttggtagcatggcaatgccatgcgtacgatatgttccctctccgaatgaacactggctatggtgcccgtactccggaggtgaaatgcgcaagttggaggcttgctgtggaagcacacaacatctttggctttgagaccattcctgaagagtgcgttgaagcaacaaaggaatacatccatggcgaacaatatagatcagactccacaacagttaaccaacaagcttacttttatgccagagacctcgaagtccatcccaaggacacatttgtgttc

SEQ ID NO: 234875 - DNA, 406 bp, Glycine max
  unsure (1)..(406): unsure at all n locations
ggcatcaattcaaaatatatcatcaattataagcatgggtttgtggaacacaacgaatgcagtgtcttgccgctttcacaagtttggtgatgaccaaaagaatctggtcttccaaggtgatgccacgtcttcttccaggggcatagaactcacaaagttagacggtggaggaaaaccagtgggtggcagtgtggggagagtgttatactcttctccagtgcacctttgggaaagctctacagtggtcgcaagctttgaaaccgacttcaccttttccatctcatcagactctactactccaggtgatggccttgccttcttcattgcaccatttgacactaaaatccctccaanactctggtgggagcaaccttggactcttcccatcagacaatgttgttgctgt

SEQ ID NO: 234876 - DNA, 403 bp, Glycine max
  unsure (1)..(403): unsure at all n locations
gactccgaagtcaccctacaacaacacatacactcacacaataatggaaaaagggcaaagaaaaacaacaccactactactatgctctcacattgtggttctccatttgctctccctagtggccgagactagtgccaaggtttccgcggtgatcgtcttcggtgactcctccgtcgacgccggcaacaacaacttcatccccaccattgcacggagcaatttccagccatatgggcgtgactttgaaggtggaaaagccactgggaggttctgcaatgggagaatacctacggattttatatcagagtcttttgggctgaaaccttatgttgcagcatacttggatcctaagtatantatttcagattttgcaagtggggtcacttttgcttctgcagcaact

SEQ ID NO: 234877 - DNA, 400 bp, Glycine max
gggagctgggtttgttttcggcctttgatcttcgattctctctctttttctctcgcgaaaaccgtatcagcaatgtctggagaatcagccagcgctattcacaagggtcaagtcgatctcttagacttcattgactggtctggggttgaatgcctcaatcaaagctccacccactctctccccaatgctatcaaacagggttatagagaagacgatggtttgcatctggagagtgatgcagacgagcagcttttgctctatattcctttcactcaagtcgttaaactttattcctttgttatcaaaggtcctgaagaagaaggccccaagacagtgaagctcttttctaacaaggagcacatgggatttagtaatgtcaatgattttcccccaagtgatg

SEQ ID NO: 234878 - DNA, 397 bp, Glycine max
gactcaccacttcaaaacactcataacacaaagcacaaagcaaagctcatccttgagttaaaaaatggcagcagcttcttccatggctctctcatccccatccttggctggcaaggccgtgaagctgggcccatcagccccagaagtgggaagggtgagcatgaggaagaccgtcaccaagcaggtctcctcaggaagcccatggtacggcccagaccgagtcaagtacttgggcccattctctggcgagcccccgtcctacctaaccggtgagttcccaggcgactacggctgggacactgctgggctttccgcagacccagaaaccttcgccaagaatcgtgaactcgaagtgatccactccaggtgggccatgctcggagccttgggctgcgtc

SEQ ID NO: 234879 - DNA, 390 bp, Glycine max
ggttcccacaaagcaaggtatagctcaatggcatcatcatttgtgggtactttattacccaaccacttcacacaaaccaaacactcagctgttcctgcaagtagatcaggtgctccaagaaggaggagagtgcacttagcaacaacaagagcagagaccatgactactgtcatagaaaaactgggcattaagattgagaggaaccctcctgagtccaagctcactcaactgggtgttaggcaatggcccaaatggggttgccctccaagtaagttcccatggacatatgaagccaaagagacttgctatcttctggaaggaaaagtgaaggtctttcctaatgggtcgaatgagtcagttgaaattgctgctggtgacttggttgtgttt

SEQ ID NO: 234880 - DNA, 367 bp, Glycine max
  unsure (1)..(367): unsure at all n locations
ggaaaacctggtcagacagaaattactctgaaagatgatcttcctgaaagggataggactgatctttacaagacatacttactttattgtctaactggtgaagtgacaagggttccatttggtgctcagatcactactaagaaggatgattctgagtatcttcttctaaatcagcttggtgggatcctgggattgagtagtcaagaaatagtggaagtgcacaggggtctagctgagcaggcttttangcaacaagctgaggtaattttagccgatggacagttgacaaaggccaaagtggagcagcttaataacctccagaaacaagtaggcttacctcaagaatatgctcaganaataatcaaga

SEQ ID NO: 234881 - DNA, 192 bp, Glycine max
ccacggggaaaacctgatcacacagaaattactctgaaagatgatcttcctgaccaggatatgactgatctttacaagacatagggaccttactgtccaactggtgaactgacaacggttccatttggctgctcacatcactactaataaggatgattctgagtatcttcttcaaaatcagcttgctgggat

SEQ ID NO: 234882 - DNA, 386 bp, Glycine max
  unsure (1)..(386): unsure at all n locations
ggcacaaatctcggaagcaaacgcagcattgggagatagaaagagagagagaaagagagagagagaaagacccttacccttctctatcgctcgctttcctttgacgcttctgacccttgctttgtctgcgtcttccttctttctttctttctttctctgtgtgtcgtaatggctctcccagactcttcttcccgtcgcaactccctgatcccctccttcatctactcctcttcctccaaaacgctccctctccaccacatgctcaacaccgcctccgctgccgccgccgccgctccctcnccgccgccggccaatctcgacgccggatcgcgtggcctcatgattcgctctcccagcgagtcacgcaagatcgagttgtactcccc

SEQ ID NO: 234883 - DNA, 390 bp, Glycine max
gatgtaagaaaacacaaacaacacaaaattcattgcacagtgttattttcagtatcggcatcatggctccaattgcagtgggagatgtcattccagacggcattttggcttacttggatgaagaaaacaaaccccaaactgtctctattcactctctcgccgccggcaagaaagtcatcatctttggggttcccggtgccttcactcctacatgcagcttgaagcacgtgcctggcttcattgagagagcagaagagctgaaaggaaagggtgtggacgaaataatctgtatcagcgtgaatgatccctttgtgatgaactcatgggccaaaacgttcccagagaacaagcatgttaagttccgtgctgatggtgcagccaaatacacca

SEQ ID NO: 234884 - DNA, 397 bp, Glycine max
  unsure (1)..(397): unsure at all n locations
ggcacaagtgagtttgttgatcgagataactagaaacagtgtgatgaaaatgaaggtccttgttttcttcgttgctacaattttggtagcatggcaatgccatgcgtacgatatgttccctctccgaatgaacactggctatggtgcccgtactccggaggtgaaatgcgcaagttggaggcttgctgtggaagcacacaacatctttggctttgagaccattcctgaagagtgcgttgaagcaacanaggaatacatccatggcgaacaatatagatcagactccaaaacagttaaccaacaagcttacttttatgccagagacctcgaagtccatcccaaggacacatttgtgttcagtatagatggcaccgtactctctaatattccatactac

SEQ ID NO: 234885 - DNA, 400 bp, Glycine max
gaaaaataaaatatcttgtcattcaattccactcacattcgccatatcgtcttctcccatggccgccaccgatgaatccctccgcaaatccctcgccgagaagcacgccgcagtggaagcccaaggcaacgccgtccgcgccctcaaggccgccaaagccgccaaacccgaaatcgacgccgcaatcgaagccctaaacgcgctgaagctcgaaaaaagctccatcgagcactccctcctcggcggctccgacagccgcgaggccttccgtcagtccgtggtgaacacccttgaacggcgcctcttctacatcccctccttcaagatctaccgcggcgtcgccggcctcttcgactacgggcctcccggctgctccgtcaagtccaacgtgctctcgttc

SEQ ID NO: 234886 - DNA, 397 bp, Glycine max; identical to SEQ ID NO: 234774

SEQ ID NO: 234887 - DNA, 445 bp, Glycine max
cccgggccgacccacgcgtcaggaagacgacagaaggggacacactagtaactaaacaccatcctttttttccggtgcgcgactccatctattattcatccacactccctcccttccagatccgatcctcgatggcggcggcgtcgcggaggctccgggacctgcagtccgaggccgggaacaagatctgcgttgactgctcccagaagaacccgcagtgggcctccgtctcctacggcgtcttcatgtgcctcgaatgctccggcaagcaccgtggcctcggcgtccacatctccttcgtccgatcggtcaccatggactcctggtccgacatccagatcaagaaaatggaagccggcggcaacgacaagctcaacgcattcctcgcacagtactccatccccaaagaaaccgacatcgttacgaagtacaacaccaacgccgc

SEQ ID NO: 234888 - DNA, 370 bp, Glycine max
ataaggggatactattatcagtcattctcatctttctctcttctctctccacacaaaccctaattcacgaccctgttcccctctcgtatccgtcatgaaaggaggaaagtccaagaccgaatctaagagagccgatcccaaacttgctgtgaataagaagggagccgccaccatcgctatgaaacccgccggcaaggggaaggcatcgaaagaccctaacaagccaaagaggcctccaagtgctttcttcgttttcatggaggagttcaggaatgtattcaatacagaacatcgtgaaagcaaaccagtgtctgctgtgggcaaatctgctggagcaaaatggactactatttccgatgctgaaaaagca

SEQ ID NO: 234889 - DNA, 401 bp, Glycine max
ggggcgaggtagccagagagtgatacaatacagagtgcgttgttgctccttcgccacaactccctgccaacatgggtatctccagagattctatgcacaagaggcgtgccactggtggcaagaagaaggcatggaggaagaagagaaagtatgagcttggtcgccagcctgctaacactaagctgtcaagcaacaagacagtcaggaggatccgggttagaggtggaaatgtgaagtggagggcactgagattggatactggaaattactcctggggaagtgaagctgtaactcgcaagactcgtatactagatgtggtttacaatgcctcaaacaacgagcttgtgcgtactcagactcttgtaaaaagtgctattgttcaagttgatgctgctccattc

SEQ ID NO: 234890 - DNA, 402 bp, Glycine max
ggcacaagtgagtttgttgatcgagataactagaaacagtgtgatgaaaatgaaggtccttgttttcttcgttgctacaattttggtagcatggcaatgccatgcgtacgatatgttccctctccgaatgaacactggctatggtgcccgtactccggaggtgaaatgcgcaagttggaggcttgctgtggaagcacacaacatctttggctttgagaccattcctgaagagtgcgttgaagcaacaaaggaatacatccatggcgaacaatatagatcagactccaaaacagttaaccaacaagcttacttttatgccagagacctcgaagtccatcccaaggacacatttgtgttcagtatagatggcaccgtactctctaatattccatactacaaaaa

SEQ ID NO: 234891 - DNA, 211 bp, Glycine max
gaaggtgcaagagtttgttgtgagctataagctagtttatcgtgaggagaatatgaagttgtttgttttcgttgttgctgcagtagttttggtagcatggccatgccatggcgcaggctaccaaaggttccctctccgaatgaaaactggctatggtgagcgttcttcggaggtaaaatgcgcaagttttaggcttgctgtggaagcacac

SEQ ID NO: 234892 - DNA, 268 bp, Glycine max
ggtacgcagcttcatccctaacgcgtgcatagcagagtcagtcacagagacgcagccatggggcgggcacctgcgaggtgtgagatgcaagttaagaacaagccatacaccaagtcacgtttctgccgtggtgttcctgatcgcaagatcaagatttatgaagttggtatgaataagaaaggtgttgatgagtttcctttctgtgtctatctggctagttgggagaaagaaagtgtttcaagtgagggcctggcagctgctcgcattg

SEQ ID NO: 234893 - DNA, 241 bp, Glycine max
ggtacgcaccttcatccataactcgtgcatactaaactcagttacagacacgcagccatggttcggggaccggccaggtatgacacgcaaattatttacaaaccataccccacgtcaattttctgccgtcctgttcctcatcccatgatcagtatttatgaagttggtatgaataagaaaggtgtagatgactttcctttctttctctatctggctcattgagagatagacatccatttca

SEQ ID NO: 234894 - DNA, 399 bp, Glycine max
gatgagtatcgatggagaagaagatgggtgagctaaagtcaactttccttcctttcctttccactagtcacataatcccgcgagtggagatggccacactcttcgccttgcacgacgtctacgtcaccatcatcacgaacgcacataaagcgaccgttttccataagtccatcgatttacatgccagtcgcggtcgctccatcagaacgcacgttgtcaacttccccgccgcataagtgggtctccccgtatggatcgaagccttcaacgtcgatacgcctcaggaaatgacacccacaatctagatgggcctatcccttctccaataagtcatcgaaaaactcattcattacttgcagccggatttcaccgtcaccgacatgttccacgcttggagtg

SEQ ID NO: 234895 - DNA, 396 bp, Glycine max
  unsure (1)..(396): unsure at all n locations
ggttctagtgtgtgattgtttgttgttgtaactcgttcttcttcttttgttgttctgtgtttgtgtttgttttttctctcacctgaaaatgtcttgctgcggtggtaactgtggttgcggaagctcctgcaagtgcggcaacggctgcggaggctgcaagatgtacccagacttgagctacactgagtcaaccaccaccgagaccttggtcatgggagtggcacctgttaaggctcaatttgagggtgctgaaatgggtgtgcccgctgagaacgatggctgcaaatgtggaccaaactgctcctgcaacncctgcacttgcaagtgaggtgttgggagagcaagcttcaagcagagatagcccttaaataggaataatgataaactattaatgtg

SEQ ID NO: 234896 - DNA, 396 bp, Glycine max
ggcacaagtgagtttgttgatcgagataactagaaacagtgtgatgaaaatgaaggtccttgttttcttcgttgctacaattttggtagcatggcaatgccatgcgtacgatatgttccctctccgaatgaacactggctatggtgcccgtactccggaggtgaaatgcgcaagttggaggcttgctgtggaagcacacaacatctttggctttgagaccattcctgaagagtgcgttgaagcaacaaaggaatacatccatggcgaacaatatagatcagactccaaaacagttaaccaacaagcttacttttatgccagagacctcgaagtccatcccaaggacacatttgtgttcagtatagatggcaacgtactctctaatattccatacta

SEQ ID NO: 234897 - DNA, 397 bp, Glycine max
ggcacaagtgagtttgttgatcgagataactagaaacagtgtgatgaaaatgaaggtccttgttttcttcgttgctacaattttggtagcatggcaatgccatgcgtacgatatgttccctctccgaatgaacactggctatggtgcccgtactccggaggtgaaatgcgcaagttggaggcttgctgtggaagcacacaacatctttggctttgagaccattcctgaacagtgcgttgaagcaacaaaggaatacatccatggcgaacaatatagatcagactccaaaacagttaaccaacaagcttacttttatgccagagacctcgaagtccatcccaaggacacatttgtgttcagtatagatggcaccgtactctctaatattccatactac

SEQ ID NO: 234898 - DNA, 400 bp, Glycine max
ggagttacagccgcagcttgaaacagagcagagcgaccttgaagagctatggctgtcggaaagaataagaggatttccaagggaaagaagggtggcaagaagaaagccgctgatccctttgccaagaaagactggtacgatatcaaggccccttccctcttccaggtcaagaatattggcaaaaccctcgtctctcgtacccagggaaccaagattgcatccgaaggactcaaacatcgggtttttgaggtctcattggctgatctccaaggggatgaagaccactccttcaagaagattcgtttgagagctgaggacgttcaagggaagaatgttctgacaaacttctggggaatggatttcacaactgacaagttgaggtctttggtgcgaaaatggc

SEQ ID NO: 234899 - DNA, 376 bp, Glycine max
  unsure (1)..(376): unsure at all n locations
ggctcagatcgaagaagcaaaacatagccaaaactacagttctctcaatgaagctcccagcacattgttttctggcttcaacttttaagtcacttgtccgtttgacagtactattactagttgtttccagcaacaaaacaaagggtgccgtgaaacttccaccaaatatctcagttccagcagtgttggtatttggagattcgatcatggacactggcaacaacaacaacaacttgataacatcagctcggagcaacttcccaccatatggccaagattttaagggagggatcnctactggtcgattttgcaatggaaaggttccttcagatattccagtttaagaattaggcattaaagagtttctacccgcata

SEQ ID NO: 234900 - DNA, 359 bp, Glycine max
  unsure (1)..(359): unsure at all n locations
gaaacacattaatgtttggctgtaacccagagctccttcgcctcatcgatagtttaaagtctcgttttgacaatggtgagggttagtgtgttgaatgatgctctgaagagcatgtacaacgccgagaagcgcgggaagcgccaggtcatgattaggccatcctccaaggtcatcataaaattcctattggtcatgcagaagcacgggtacattggtgagttcgagtatgttgatgaccacagggctgggaaaatcgtggttgaattgaatgggcggctgaataagtgtggggttattanccctcgctttgatgttggtgtcaaagagattgaaggttggactgcaagactactaccctc

SEQ ID NO: 234901 - DNA, 366 bp, Glycine max
gaatcccaatcccatttcaacctctctttcttttcttctcgcagagcgaaatcccaatcccacacaaatggcatgctcagccacctctgcttctctcttctccgcaaaccccacacctctcttctctcccaaatcctccctctccctccctaacaactctctccacctcaaccctctccccacgcgcccttctctctccctcacgcgcccctcgcacactcgccgctccttcgtcgtcaaagcctcctccagcgagcttccgctagttggaaacaccgcaccggatttcgaagcagaggctgtgtttgaccaggagtttatcaacgtgaaactatctgattacattgggaaagaaatatgttgtgc

SEQ ID NO: 234902 - DNA, 382 bp, Glycine max
gggcgactgaaaatgcgaaggtgtgaccgaaagagaagagatagcaatgtcagggctgaaggaattgctgaagaaagggttaggtttaggcgacatggcgttcaacgccggcggcggagccatcacctggttccccggccacatggccgccgccacacgcgccatccgccaccgcctcaaactcgccgacctcgtcatcgaagtccgcgacgctcgcattcccttctcctccgccaacgccgatctccagccccacctctccgccaaacgacgcctcctcgcactcaataaaaaaacctcgccagccctaacatcatgcataaatggacgcattattttgagagttgtaatcagaattgcgttgcgataaacgcgcacagca

SEQ ID NO: 234903 - DNA, 394 bp, Glycine max
  unsure (1)..(394): unsure at all n locations
ggcacaaaacaaaaccaccacactcttattgttttcttcatatcttccttgtcactgcccgtgtgtcgccgccatggccaccgtcaccacccaagcctccgccgcaattttccggccatgtacctcgaaatcgaggtttttgaccggctcttccggtaaacttaaccgggaagtgactatgcggccaatggggtgccctccttctgcctctttcaaggttgaagccaagaagggagagtggttacctggcttggcctcnccaacttacctcaatggcactcttcctggtgacaatggatttgaccctctggggctagctgaggacccagagaacttgaggtggtacgttcaagccgagcttgtgaatggacgttgggccatgttgggtgttgca

SEQ ID NO: 234904 - DNA, 367 bp, Glycine max
ggttctagtgtgtgattgtttgttgttgtaactcgttcttcttcttctgttgttctgtgtttgtgtttgttttttctctcacctgaaaatgtcttgctgcggtggtaactgtggttgcggaagctcctgcaagtgcggcaacggctgcggaggctgcaagatgtacccagacttgagctacactgagtcaaccaccaccgagaccttggtcatgggagtggcacctgttaaggctcaatttgagggtgctgaaatgggtgtgcccgctgagaacgatggctgcaaatgtggaccaaactgctcctgcaacccctgcacttgcaagtgaggtgttgggagaagcagcttcaagcagagatagccctta

SEQ ID NO: 234905 - DNA, 218 bp, Glycine max
gatctggcagcagaagaacaagtagttgagaactaagaaggagaagcaaatggcttcctcaatgatctcttccccagctgttaccactgtcaaccgtgccggtgccggcatggttgctccattcactggcctcaagtccatggctggcttccccaccagaaagaccaacaatgacattacctccattgctagcaacggtggaagagtgcaatgcatgc

SEQ ID NO: 234906 - DNA, 403 bp, Glycine max
gattgtaaagcattcttcgcctttctctctcttctttttactctctctctgtctctctctacgctttctcgttcgagatccctcaagggatccactaactgaaggagaaatggggttgacattcaccaagcttttcagccggcttttcgccaagaaggaaatgcgaattctgatggtgggtctcgatgcagctggtaagaccaccatcctgtacaagctcaaacttggagagatcgttaccacaattcccaccattgggttcaatgtggagactgtggaatacaagaacattagtttcactgtctgggatgttggtggccacgacaagattcgtcgcttgtggatgcactacttccagaacacacagggtctcatttttgtggttgacagcaacgacagggac

SEQ ID NO: 234907 - DNA, 394 bp, Glycine max
gacagctattcctcttaagcttgctactgagtttccacactgcataccttaggtcttccgaattcgaagttaatttgcaagatggctaaggaaaaggctcagatcaacattgtggtggttggtcatgtggaccctgaggaggcaaccaccattaacgagctgaagaagcctgttgtggagaaagaagctccagggcatgccatatgagggcatgcacgtacggcctcggaggggaaccagaaaattatgttaacaaaataatctggaaccctaatgtatcagtgtcatcatcagtgtgtagtttaagctagctttgctatggttacgttctttgagatgagagtcttgatgaacagtaccattctgatgtattgctttccttgaaagttaatgc

SEQ ID NO: 234908 - DNA, 366 bp, Glycine max
ggcagttcaattccaatatattccattctctctgtgtatttccctacctctcccttcaagatgcagatcttcgtcaagaccctcaccgggaagacgatcacccttgaggtggaaagctctgacaccatcgacaacgtcaaggccaagatccaggacaaggaaggaatccccccggaccagcaacgtctcattttcgccggaaagcaacttgaggacggccgtacccttgctgactacaacattcagaaggagagtactcctcagctcgtcctccgtctccgtggtggcatgcagatcttcgttaagacactcaacggcaagaccataaacctagaggttgaaagctccgacaccatcgataacgtc

SEQ ID NO: 234909 - DNA, 379 bp, Glycine max
gggacgagtcaaacggcagcccaaacgacacagaatggggtattcggcagccgcgagatcatcttcttacagccactcgaaaatgaccaagagaaccaagaatgccggtattgttggaaaatacggcacccgagatggtgctagtttaaggaaacaaatcaagaagatggaagttagtcagcacagtaaattcttctgcgagttctgtggaaagtatgctgttaagaggaaggctgtgggtatttggggctgcaaagattgtggaaaagtgaaggctggaggtgcttacacattgaacactgccagtgctgtcactgtccggagcaccattcggaggctgagaaaacatactgaaagttgaaagcaatttaaacttttc

SEQ ID NO: 234910 - DNA, 256 bp, Glycine max
ggcacaagtgagtttgttgatcgagataactagaaacagtgtgatgaaaatgaaggtccttgttttcttcgttgctacaattttggtagcatggcaatgccatgcgtacgatatgttccctctccgaatgaacactggctatggtgcccgtactccggaggtgaaatgcgcaagttggaggcttgctgtggaagcacacaacatctttggcttttagaccattcctgaagagtgcgttgaagcaacaaaggaatac

SEQ ID NO: 234911 - DNA, 361 bp, Glycine max
  unsure (1)..(361): unsure at all n locations
gatcgaagcaaaaaatgaaaacccaaagtgcttctctcctctgtctttttctctctcttgctatccttttggctagtggcactgctgcaagtgcaactccaagaagcgcagtgccaagccaccatgtttcaacattcaacagaagcctttttccttccacttttctctttggaattggttcttctgcttaccaggcagaaggagcagcaagtgtagatgggagaggaccaagcatatgggacacctacactagacagcatactgaaaagatttgggatcatagcaccggtgacatgggagctgatttttatcatcgatacaagggtgacatanaaatagcgaaagaaattgggctggactc

SEQ ID NO: 234912 - DNA, 409 bp, Glycine max
gaatgtgcaagagtttgttgtgagctataagctagtttatcgtgaggagaatatgaagttgtttgttttctttgttgctgcagtagttttggtagcatggccatgccatggcgcaggctaccaaaggttccctctccgaatgaaaactggctatggtgagcgttcttcggaggtaaaatgcgcaagttttaggcttgctgtggaagcacacaacatccgagcctttaaaaccattcctgaagagtgcgttgaaccaacaaaggactacattaatggcgaacaatttagatcagactctaaaacagttaaccaacaagctttcttttatgctagtgaacgcgaagtccatcacaacgacatatttatattcggcatagataacaccgtactctctaatatcgcatactag

SEQ ID NO: 234913 - DNA, 408 bp, Glycine max
ggcacaagtgagtttgttgatcgagataactagaaacagtgtgatgaaaatgaaggtccttgttttcttcgttgctacaattttggtagcatggcaatgccatgcgtacgatatgttccctctccgaatgaacactggctatggtgcccgtactccggaggtgaaatgcgcaagttggaggcttgctgtggaagcacacaacatctttggctttgagaccattcctgaagagtgcgttgaagcaacaaaggaatacatccatggcgaacaatatagatcagactccaaaacagttaaccaacaagcttacttttatgccagagacctcgaagtccatcccaaggacacatttgtgttcagtatagatggcaccgtactctctaatatttcatactacaaagaacatgg

SEQ ID NO: 234914 - DNA, 397 bp, Glycine max; identical to SEQ ID NO: 234774

SEQ ID NO: 234915 - DNA, 393 bp, Glycine max
gacacaccgtttgttctattcttaactcaacttctgctacccactctcttcttccaagtccaaccacgcttttctctacagtcatgggcaaggtcaagatcggaatcaacggatttggaagaattggccgtttggttgccagagtcgctctgcaaagagacgatgtggagctcgttgccgttaacgaccctttcattaccaccgattacatgacatacatgtttaaatacgacagtgttcacggacactggaagcatcacgatgtcaccgttaaggacgagaagacccttctcttcggtgacaagccagtcactgtttttggacacaggaaccctgaagagatccatgggggtcaactggagctgatatcattgttgagtccaccggagtttt

SEQ ID NO: 234916 - DNA, 378 bp, Glycine max
gaggtgcaagagtttgttgtgagctataagctagtttatcgtgaggagaatatgaagttgtttgttttctttgttgctgcagtagttttggtagcatggccatgccatggcgcaggctaccaaaggttccctctccgaatgaaaactggctatggtgagcgttcttcggaggtaaaatgcgcaagttttaggcctgctgtggaagcacacaacatccgagcctttaataccattcctgaagagtgcgtttgaacaacaaaggactacattcatggggaacaatttagattagactccaaaccagtttaccaacaagctttcttttaagctagtgaacgcgaagtccatcacaacgacataattatattcggcatacat

SEQ ID NO: 234917 - DNA, 413 bp, Glycine max
attcacgggtcgacgcacgcgtccactgatcacttatcagatacaattagttacacagatatatatgatatagctaaggaaattcttgaagggtcacctcaaaaccttctggagtcagtggcacaaaaaattgcagtgactactctgacaaatcataagcaaatatctgctgttcgagtgaaggttgaaaagcctcatgtggcagttcaaggtccacttgattacttaggcgttgagatacttagacgcagaagcgatttgtcagaatagaaatttcatagttttgttctctctggtttttgttgctctcattctgatttgtattgtttgttttcattgaatgtttcttcttgccattcagtttgataaatcgtcaagttcaatttgatataaaagtaactcctttcctgaac

SEQ ID NO: 234918 - DNA, 380 bp, Glycine max
ggcacaagtgagtttgttgatcgagataactagaaacagtgtgtagcatgtgacagcccatgtggtcctcgtcgccacaatttcggtagcatggtaatgccatgcgtacgatatgttccctctccgaatgaacactggctatggtgcccgtactccggaggtgaaatgcgcaagttggaggcttgctgtggaagcacacaacatctttggctttgagaccattcctgaagagtgcgttgaagcaacaaaggaatacatccatggcgaacaatatagatcagactccaaaacagttaaccaacaagcttacttttatgccagagacctcgaagtccatcccatagacacatttgtgttcagtatagatggaaccgtactct

SEQ ID NO: 234919 - DNA, 350 bp, Glycine max
ggcacaagtgagtttgttgatcgagataactagaaacagtgtgatgaaaatgaaggtccttgttttcttcgttgctacaattttggtagcatggcaatgccatgcgtacgatatgttccctctccgaatgaacactggctatggtgcccgtactccggaggtgaaatgcgcaagttggaggcttgctgtggaagcacacaacatctttggctttgagaccattcctgaagagtgcgttgaagcaacaaaggaatacatccatggcgaacaatatagatcagactccaaaacagttaaccaacaagcttactttttatgccagagacctcaaagtccatcccaaggacaca

SEQ ID NO: 234920 - DNA, 395 bp, Glycine max
  unsure (1)..(395): unsure at all n locations
gagccacgtacgcaactgaaaaggaaaaccctaagagatgaagagaactcctatcttgttccctctcttctttcttctttgtgccttcacctcatatctaccttcagccaccgctgatgatgatcatgtgtacgacactgacggcgataagcttcaatacggtgtcaattatttcgtgttgccagtgataagaggaaatggcggtggaatacaagtagcaaaagcaggaaacgaaacttgccctctgactgtggtgcaatctggcaatgagctctctgaggggttaccggataaagattgcatctcgataagcangagtcgctttcatcacccaaggccagcttttcaagagcattcagttcggtgtgtttcatccacactcaggacagggtgtc

SEQ ID NO: 234921 - DNA, 318 bp, Glycine max
ggttgtgtgagtgaagaagcagagggagtagcggcattaaaaatgcagatcttcgtgaaaactctgacagggaagactataaccctcgaggtcgagagcagcgacaccatcgacaatgtcaaggccaagattcaagacaaggaatgcattcctccggatcagcagcgtttgattttcgccggaaagcagcttgaagatggaaggaccctggccgattacaacatccagaaggaatcaacccttcatctcgtcctcaggcttccttgtggcatcattgagccttccctcatggctttggctcgcaaatacaaccaggac

SEQ ID NO: 234922 - DNA, 358 bp, Glycine max
ggcacaggtgagtttgttgatcgagataactagaaacagtgtgatgaaaatgaaggtctttgttttcttcgttgctacaattttggtagcatggcaatgccatgcgtatgatatgttccctctccgaatgaacactggctatggtgcccgtactccggaggtgaaatgcgcaagttggaggcttgctgtggaagcacacaacatctttggctttgagaccattcctgaacagtgcgttgaagcaacaaatgaatacatccatggcgaacactatacatcagactccaaaacagttaaccaacaagcttacttttatgccacagacctcgaagtccatcccaaggacacatttgtgttc

SEQ ID NO: 234923 - DNA, 384 bp, Glycine max
gaattgagcggcggggcagaggaaggggcagagttttggagtttgaaagagaaaatattgattgcagttgagttctaatgagtaacgaatacgattacctgttcaagcttctcctaatcggagactcttccgttggaaaatcctgcttgcttctcagattcgctgtgagtcatcacttcccttcactttcatctctcttgttcttgttcttcacctcctttgtttcttcatttcgtttcaggatgactcctatgtcgacagctacataagtaccattggagttgatttcaaaatcagaacggtggagctggaagggaaaaccgtcaagctgcagatttgggatacagctggacaggagcgattcaggactataacaagcagtta

SEQ ID NO: 234924 - DNA, 358 bp, Glycine max
ggcacaagtgagtttgttgatcgagataactagaaacagtgtgatgaaaatgaaggtccttgttttcttcgttgctacaattttggtagcatggcaatgccatgcgtacgatatgttccctctccgaatgaacactggctatggtgcccgtactccggaggtgaaatgcgcaagttggaggcttgctgtggaagcacacaacatctttggctttgagaccattcctgaagagtgcgttgaagcaacaaaggaatacatccatggcgaacaatatagatcagactccataacagttaaccaacaagcttacttttatgccagagacctccaagtccaacccaaagacacatttgtgttc

SEQ ID NO: 234925 - DNA, 388 bp, Glycine max
  unsure (1)..(388): unsure at all n locations
gagaaaaaggttggttgggcattcgccgtaaacagaagagagagagagagagagagagagtcctgaaacttgggtgcgattccttcactcacaacagcaacacatcactatggctcttctgagtcgagcctcttcacgcttccctcagctggtttcccctcaaagggtagtttcactccacacaacgctcccatctctgaacgcatccccatccacagccacgcctacaccatatgccccgccaccgcctccgtccgcttcctctcccgccggcgtttcgaaggcggcggagttcgtgatctcgaaggtggacgatctgatgaactgggcccgccgcggctccatctggcccatgaccttcgngctcgcctgctgcgccgtcgaaatg

SEQ ID NO: 234926 - DNA, 406 bp, Glycine max
tctcacaacccatctttcatatccaaattccaatgcttcttcttccttcttatttcaatttcaatcactactattattactctttcacgcttttgcttctcgatttttaaaccctaaatctatctatctgtctaatagataagatagggcaaaaacaaaacaaaacaaaataaaaccctagccaaagaaagaccttgttgagcagcagcagcagagagagagaggcttatggaaggagtaccgcacccaatacccagaactgtcgaagaggttttcaccgattttaagggcagacgcgctggtttgattaaggccctcactactgacgttgaaaagttttaccagcagtgcgattccgagaaggagaatttgtgtctatatgggtttccaaatgaaacatgggaag

SEQ ID NO: 234927 - DNA, 373 bp, Glycine max
ggaagccttgaacttgaactatcgggtcttcatcttggctctctctgtttaagatcgatatggatttgtattttcctttggcaatacttgtgctgatattaggcacaccatactctagtgcttttgggaagagtgaaagtaatgtgaaaacagctgtttttctgtctcccaagtttgaacttggaccgggttcggtagccaataaatttgattatgatattgattttccaagaggtcgtattgccctcaagagtttcaatgctgaagtagttgatgaagcatggaactctgtgggtctccatgagacttatctccatcactgggttgttgcaagatactatcaacctaaatatgttaagacagacaaaagcta

SEQ ID NO: 234928 - DNA, 355 bp, Glycine max
  unsure (1)..(355): unsure at all n locations
gacaaaacacaaacctagtgcatagcatattccagtgtttttcatttcatcgtgcattcaatggccaccacagcagctctatccggaaccatggtgagcacctccttcatgaggaggcaacctatgaccaccacaagcctaaagacattccccaacgttggtgaagctctttttggtctgaaaagtggacgaggtggtcgtgtcacttgcatggcctcgtacaaggtgaagctcataaccccagaaggagaagtggagtttgaatgcccagatgatgttttcattgttgacaaggcaaacgacgaaggcattgaacttccctactcgtgcanggccggttcttgcgtttcctgtg

SEQ ID NO: 234929 - DNA, 303 bp, Glycine max
ggcacaagtgagtttgttgatcgagataactagaaacagtgtgatgaaaatgaaggtccttgttttcttcgttgctacaattttggtagcatggcaatgccatgcgtacgatatgttccctctccgaatgaacactggctatggtgcccgtactccggaggtgaaatgcgcaagttggaggcttgctgtggaagcacacaacatctttggctttgagaacattcctgaagagtgcgttgaagcaacaaaggaatacattcatggcgaacaatatagattagacccaaaacagttaaccaacaa

SEQ ID NO: 234930 - DNA, 346 bp, Glycine max
  unsure (1)..(346): unsure at all n locations
gccccacaccaaacgagccatttgggagttaggttctgcacgctctgcttccagcgagtgttctttcttcgtttcaacaccttaatttgcacacgctgcttcttcagcttgagaaatggcacaagaaacctttctattcacatctgaatctgtaaacgagggtcaccccgacaagctgtgcgaccagatctctgatgcagtgctcgatgcgtgccttgaacaggaccctgacagcaaggttgcctgtgagacatgcaccaagaccaacatggtcatggtctttggagagatcacaaccaaagccaacgtanactatgagaagattgtccgtgacacatgccgcgaa

SEQ ID NO: 234931 - DNA, 385 bp, Glycine max
  unsure (1)..(385): unsure at all n locations
gacggacgagggtttcgtttcgggtttgacgttgttcacaatcactttctgcgcttcactcactcccttcgtgcggttttctttctttgtcgaactcgtgcgaaaatgcgtgagattcttcacatacagggagggcaatgcggaaaccagatcggagcgaagttctgggaggtggtgtgcgcggagcacgggatcgattccacggggaggtactacggggacaacgagttgcaactcgagcgagtcaacgtctattacaatgaagcgagttgcggaaggttcgtgccganggcggtgctcatggatctagagccagggaccatggacagcgtcagatctggtccctacggtcagattttccgacctgataacttcgtcttcgggc

SEQ ID NO: 234932 - DNA, 388 bp, Glycine max
aggggcacaagtgagtttgttgatcgagatacctacacacaatgtgatgaaaatgtaagtccttgatttcttcgatgctacaattttcgtagcatgggaattccatgcgtacgatatgttccctctccgaatgaacactggctattgtgcccgtactccggacgtgaaatgcgcacattggaagcttgctgtggaagcacacaacatctttggctttgagaccattcctgaagagtgcgttgaaacaacaaaggaatacatccatggcgaacaatatagatccaactctagtacagttaaccaacaggcttactttttatgccagagacctcgaaaatccatccccaagaaacatttgtgttcagtatagatggcaccgtactctcta

SEQ ID NO: 234933 - DNA, 373 bp, Glycine max
ggcgcacccagagaggaggaagctttgagagagagagagggaggagggagagtgttgacgctccatcaagatgggtatttctagggattccatgcacaagaggcgtgccactggtggcaagaagaaggcatggagaaagaagagaaagtatgagcttgggcgtcaggccgcaaacaccaagttatcaagcaataaaactatccggaggattcgtgttcgaggtggcaatgttaaatggagggcattgaggttggataccggcaattactcatggggtagtgaagcagttactcgcaagactcgtattctagatgttgtttacaatgcctcaaacaatgagcttgtgcgaactcagaccctggtcaagaatgct

SEQ ID NO: 234934 - DNA, 320 bp, Glycine max
  unsure (1)..(320): unsure at all n locations
ggcacaagtttgttgagatagctagaatcaataagatgaaaatgaaagtgcttgttttgtttgttgctacagttttggtagcatatgaatgccatggctcagactaccagaagttccctctccaaatgaaaactgggtttggtgggcaatacagcaatgaggtggcatgtgccagttggaggcttggcgtggaagcaaacaacgtactcaagtggcaaactgttcctgcagcttgcggagagtacatagctgactacgttctangagaacaatatagatcagattccacaacagttaaccaacaagcttatttctatgct

SEQ ID NO: 234935 - DNA, 364 bp, Glycine max
gacagacagacacacactcgggtctgccgtcacaaaaaaattatcgagatcccctttttctcctaagaaaagccatggctaagggtcccggtctctagtctgacatcggcaagaaagccagggatctgctgttcaaggactaccacagtgaccagaagttcaccatcaccacctactcacccactggagttgctataacagcatcaggaaccaggaaaagtgaactgtttgtggctgatgtcaaaacccagttgaagaacaaaaacatcactactgatatcaaagttgatacagattctaatctcttcacaactatcactgttaatgaacctgctcctggtctgaaggctatttttagcttcaa

SEQ ID NO: 234936 - DNA, 230 bp, Glycine max
ggttccaaaagacgacagaaggggatacagtagtgagtatgttgagcgtcattgtgagcatcaatatgatgaaatcatgtggcctcgtcttcttcctcgtcatcattgtcgttgcatcgcaattggatgcgtacgaggtgttcacactctgtgtgtcaaatggccatggggtccatggtctggatgtgaaatacccaagttgtgcgtttgccggggggacacacagtatc

SEQ ID NO: 234937 - DNA, 290 bp, Glycine max
ggcacaagtgagtttgttgatcgagataactagaaacagtgtgatgaaaatgaaggtccttgttttcttcgttgctacaattttggtagcatggcaatgccatgcgtacgatatgttccctctccgaatgaacactggctatggtgcccgtactccggaggtgaaatgcgcaagttggaggcttgctgtggaagcacacaacatctttggctttgagaccattcctgaagagtgcgttgaagcaacaaaggaatacatccatggggaacaatatagatcagactcaaaaa

SEQ ID NO: 234938 - DNA, 295 bp, Glycine max
catcgccggtgggctcgtcagggagaagatgaagtacttgcgtttcctccgcaagcgcatgaacaccaagccctctcacggcggcatccagttccgtgcacccggcaagatcttctggcgcaccgttcgtgggatgataccacacaagacaaagcgcggggaagctgctcttgcgcgattgaaggtgtatgagggcattcctcctccttatgacaagaccaagacgatggttgttcctgatgctctcaaggtgttgaggcttcagaacggacacaaatactgtcatctgggccaa

SEQ ID NO: 234939 - DNA, 206 bp, Glycine max
gccaaaagctaagcacaacaagaccacaatccaaataagtgttgacaaaaaaatgcgtttggttggttggaaattagttattaaggattttggaatcatccgaggaaacaaagggcacaagataaatgggaacttggtgattaagccaaaaaatgtgttggatatcaacagcatcaccaatgttaaaggtgtcaatgggaaccgga

SEQ ID NO: 234940 - DNA, 364 bp, Glycine max
gaaggtgcaagagtttgttgtgagctataagctagtttatcgtgaggagaatatgaagttgtttgttttctttgttgctgcagtagttttggtagcatggccatgccatggcgcaggctaccaaaggttccctctccgaatgaaaactggctatggtgagcgttcttcggaggtaaaatgcgcaagttttaggcttgctgtggaagcacacaacatccgagcctttaaaaccattcctgaagagtgcgttgaaccaacaaaggactacattaatggcgaacaatttagatcagactctaaaacagctaaccaacaagctttcttttatgctagtgaacgcgaagtccatcacaacgacatattt

SEQ ID NO: 234941 - DNA, 298 bp, Glycine max
ggtggtgtagactgtcgagcagtgaataccagttgctcctatagccggcgctcaacaacatggcggacaaggcagtcaccatccgaaccagaaagttcatgacgaacaggcttctctccagaaagcaattcatcgttgatgtccttcatccagggagggctaatgtttccaaggctgaactgaaggagaaattgggcagaatgtatgacgtgaaagacactaacactgtatttgtcttcaagtttcgaactcattttggtggtggcaagtccactgggtttggtttgatctatgattc

SEQ ID NO: 234942 - DNA, 210 bp, Glycine max
ggaccgagaaagatattaggggttttgagtgcggtgcggggatcctagcactctcttctgcagctttcgccgacagcttcattcaccatggctgagcgaaacgaaaaggcttttttgaaacaaccaaaagtgtttctcaacctccaagaaaactgggaaaggaaagagacccggaaaaggtgggaaccgcttttgggaaatccattgggc

SEQ ID NO: 234943 - DNA, 360 bp, Glycine max
gaaggtgcaagagtttgttgtgagctataagctagtttatcgtgaggagaatatgaagttgtttgttttctttgttgctgcagtagttttggtagcatggccatgccatggcgcaggctaccaaaggttccctctccgaatgaaaactggctatggtgagcgttcttcggaggtaaaatgcgcaagttttaggcttgctgtggaagcacacaacatccgagcctttaaaaccattcctgaagagtgcgttgaaccaacaaaggactacattaatggcgaacaatttagatcagactctaaaacagttaaccaacaagctttcttttatgctagtgaacgcgaagttcatcacaacgacat

SEQ ID NO: 234944 - DNA, 337 bp, Glycine max
ggatagctaaaattccgaatcaggaaagaaaaagcctactaatgccgccgatggggaggaagcgaaaggtagcacccagatcttctctatcgagcgagccacctctcaagcagcagcaaccaaaacccgaaaatccccctcaagaatacgaagaagtcgaagaggaagttgaggaagaagaggtataggaagaggtcgaagaggaagaagaagaagaagatgaggacgaggaagaagaggaggaggaagaagaagaataagaagaaaacgacgtcgtcaaacaacagcagcagcaacagcaagacgaagacgacatcgcgatatcgaaacttctgga

SEQ ID NO: 234945 - DNA, 351 bp, Glycine max
gaaccaagtttgcttgcgtgtatattcattttagcatcaaggttgaatctcagagaaaaggaaacatcgacaagcatgtctggaagaggaaagggaggcaagggtctcggaaagggaggagccaaacgacaccgtaaggttctgagggataacattcagggaatcaccaagcccgcgattcgccgtctggccagacgtggtggcgtcaagcgtatcagtggtcttatctatgaagaaactcgcggtgttctcaagatctttctacggaacgtcattcgcgacgctgtcacctacactgaacacgctcgccgcaagaccgtcactgccatggacgttgtttacgccctcaag

SEQ ID NO: 234946 - DNA, 366 bp, Glycine max
ggcacaagtgagtttgttgatcgagataactagaaacagtgtgatgaaaatgaaggtccttgttttcttcgttgctacaattttggtagcatggcaatgccatgcgtacgacatgttccctctccgaatgaacactggctatggtgcccgtactccggaggtgaaatgcgcaagttggaggcttgctgtggaagcacacaacatctttggctttgagaccattcctgaagagtgcgttgaagcaacaaaggaatacatccatggcgaacaatatagatcagactccaaaacagttaaccaacaagcttacttttatgccagagacctcgaagtccatcccaaggacacatttgtgttcagtataga

SEQ ID NO: 234947 - DNA, 299 bp, Glycine max
ggcacaagtgagtttgttgatgcagatagctagaaacagtgtgatgaaaatgaaggtccttgttttcttcgtggctacaattttggtagcatggcagtgccatgcgtacgatatgttccctctccgaatgaacactggctatggtgcccgtactccggaggtgaaatgcgcaagttggacgcttgctgtggaagcacacaacatctttggctttgagaccattcctgaagagtgccttgaagcaacaaaggaatacatccatggcgaacaatatagatcagactccaaaacagttaacc

SEQ ID NO: 234948 - DNA, 236 bp, Glycine max
aaatgaaagtgcttgttttgtgtgttgctacagttttggtagcatatgaatgccatggctcaaactaacacaagttccctctccaaatgaaaactgggtttggtgggcaatacagcaatgaggtggcatgtgccacttggaaggctggcgttggaacaaacaacgtactcaactggcaaactgttccctcagcttgcggagagtacataactgactacgttctaggataccaatat

SEQ ID NO: 234949 - DNA, 318 bp, Glycine max
cggggagtcaagatgcgttctttgtgaaagaagggactcaacaagtacgtcaaacagctccagcaacaccctttgagaaccaacgtaatcactgcacgggtactatcagcgatcagcgatgttgtgtctcagaaacttaccgggatacagaaaattcaactcaaacgacttcttttcagagtgatttttggagccgcttatcttggaccctttggacacttttttcatttaatactggataaaattttcaaaggaaagagagattcaaacactgtggctaaaaaagttctgacttaacagttaacatccaatccttgg

SEQ ID NO: 234950 - DNA, 349 bp, Glycine max
gatcgcaagccacttcagagaaaatggcggtacctctgctctcgaagaagatcgtgaagaagagggtgaagaagttcaagaggcctcagagtgacaggaaaatttccgtcaagacaaactggcgtagaccaaagggtatagattcccgtgttaggagaaagttcaagggatgcactttgatgccaaacatcggttatggttctgacaagaagacccgccactatctccctaatggttttaagaaatttgttgttcacaatgtgaaggacttggaactgctcatgatgcacaacaggacttactggtctgagattgctcacaatatatccacaggaaagagaaaagatat

SEQ ID NO: 234951 - DNA, 264 bp, Glycine max
taatgggatcgcaagccacgtcagataaaatcagggtacctctgctctcgagcaatatcgtcgacaagacgatgaaggggttcaggaggcctcagggtgacaggaaaagttccgtcaacacaaactggcgtagaccaaagggtatacattcccgtgtgaggacaaagttcaatggatgcactttggggccaaacatcggttatgggtctgacaacaagaccgccagtatctccctaagggttttaagaaatttgttgttcacaa

SEQ ID NO: 234952 - DNA, 358 bp, Glycine max
  unsure (1)..(358): unsure at all n locations
gacacacagctattcctcttaagcttgctactgagtttccacactgcataccttaggtcttccgaattcgaagttaatttgcaagatggctaaggaaaaggctcagatcaacattgtggtggttggtcatgtggaccctgaggaggcaaccaccattaacgagctgaagaagcctgttgtggagaaagaagctccagggcatgccatatgagggcatgcacgtacggcctcggaagggaaccagaaaattatgttaacanaataatctggaaccctaatgtatcagtgtcatcatcagtgtgtagtttaagctagctttgctatggttacgttctttgagatgagagtcttgatgaac

SEQ ID NO: 234953 - DNA, 355 bp, Glycine max
  unsure (1)..(355): unsure at all n locations
ggcacaagtttgttgagatatgtagaagcaataagatgaagatgaaagtgcttgttttgtttgttgctacagttttggtaccatatgaatgccatggctcagactaccagaagttccctctccaaatgaaaactgggtttggtgggcaatacagcaatgaggtggcatgtgccagttggaggcttggcgtggaaggcaacaacgtagtcaagtggcaaactgttcctgcagcttgcggagagtacatagctgactacgttctangagaccaatatagatcagattccaaaacagttaaccaacaaacttatttctatgctaaatccctcagactcaccaacaaagatgtccttgt

SEQ ID NO: 234954 - DNA, 355 bp, Glycine max
gaacacctcctaaagttttatagagagaaattttcccaacagaaattcccattccctaacaaaattttagaaaaattatgttactataattgtctttgtgtacagatttgagagactaacactatattttactacaattatcttattttggttcaacccgattttgccttgtatgtactccatatctgccgtattagttgttggatttgggaacatcctttccttctctggatcagcttttggctcaatggcaacatttatcccatcctggttgaacccgattctggcttgtatgtcctccatatcttcagtaactgttgcattttaggacatccatttcatctcttgatcagca

SEQ ID NO: 234955 - DNA, 384 bp, Glycine max
gatagctattcgcagttcccagattcagtttaatcctaattctgcacttcttgatcattcgatttttctcctcaagatgcagagattcggaaaaacgttgaccggcaagaccatcacccttgacgtggaatcctccgacaccattgacaacgtaaaagctaagattcatgacaaggaagggatctcacctgaccagcagagacttatctttgcgggtaaacaacttgaggatggtcgcacccttgccgattacaacatccacaaggaatcaaccctccatctcgtgcttcgcctcaagggtggcatgcagatctttgtcaagactttgaccgggaagaccatcacccttgaggtggaatcctcggagagcattgagaatgttaa

SEQ ID NO: 234956 - DNA, 183 bp, Glycine max
ggtgtgattgtttgatggtgtgacgcggtcatcctctcttgttgttctgtggctgtgtgtgtgtgttcgctcacccgaacatgtcatgctgtcgtggtaactgtggatgcggaagctcctgcaagtgcggaaatggctgcagaggctgcaagatgtacccatacttgaactacactgagtcaa

SEQ ID NO: 234957 - DNA, 360 bp, Glycine max
ggcaagagtttgttgtgagctagaagctagtttatcgtgaggagaatatgaagttgtttgttttctttgttgctgcagtaattttggtagcatggccatgccatggcgcaggctaccaaaggttccctctccgaatgaaaactggctatggtgagcgttcttcggaggtaaaatgcgcaagttttaggcttgctgtggaagcacacaacatccgagcctttaaaaccattcctgaagagtgcgttgaaccaacaaaggactacattaatggcgaacaatttagatcagactctaaaacagttaaccaacaagctttcttttatgctagtgaacgcgaagtccatcacaacgacatattta

SEQ ID NO: 234958 - DNA, 386 bp, Glycine max
aagacgacagaagggtggaggcatctggcatattggttaagcggactgatgaagagctgttaaaaacattggattcgttcattgttgtggaaagagaaggtcacataattgcttgtgctgccctttttcctcactttgaggagaagtgcggagaggttgcttgtattgcagtatctcctgattgccgtggccaatgacagggtgacaaattgcttgattatatggagaagaaagcatcatctcttggattgaatatgcttttccttcttacaacacgtacagcagattggtttgtaaggcgtggattttcggaatgttcaattgattatcttcctgaaaagaaaatgagaatgatcaatctttcccgcaattctaagtattatatg

SEQ ID NO: 234959 - DNA, 358 bp, Glycine max
gaactcttcctctttttacttcccctatggctcgtcactccttgctcttagccctcctcctcttcgccgccgtggccaccgccgcgatggcggtggccgcgtccgacgccgacgacatcctgatccgtcaggtggtgccagatgttggcgaagccgaagaggaggacaacctgctgaacgccgagcaccacttcgcgagcttcaaggccaagttcgccaagacctacgccaccaaggaggagcacgatcatcgcttcggcgtcttcaagtccaacctccgcagagccaggctgcacgccaagctcgacccctccgccgtccacggcgtcaccaaattctccgatttaactccgggcga

SEQ ID NO: 234960 - DNA, 258 bp, Glycine max
gacaacactcatagtagagtaaccaaaaggagagtgcaataactcgttgtacattcctagtgtgtgggagagacatggctaagatgtgtgttttggtgttggttcttgctctggctgtggccacaagtgccagaaacgttcccaaccccaaggatgctggtcttaaggaccagaagaacttcatcagctatggtggagttggtggttattccgggattgggaacaatggactgccttttggaggagctggtgccggaa

SEQ ID NO: 234961 - DNA, 360 bp, Glycine max
  unsure (1)..(360): unsure at all n locations
gacaacaatctaagagtgagttgtgtgtagttgaaattaacaagtatcaaagatgtttggaatcatcggaggaaacaaaggtcacaagataaacgggaacttggtgattatgcgaaagaatgtgttggatatcaacagcattaccagtgttaagggtgtcatcggaaccggcattaacatcattggangagtcgtcggaaccgttactgctttggcgtcccacatctccatccagctcattagtgccaccaacgctgaatgacatgggaaaggaaaagttggaaaggctacaaatttaagaggacaagtgtcgttaccaaccttgggagctggcgaagatgcatacgatgttcattttga

SEQ ID NO: 234962 - DNA, 367 bp, Glycine max
ggcacaagtgagtttgttgatcgagataactagaaacagtgtgatgaaaatgaaggtccttgttttcttcgttgctacaattttggtagcatggcaatgccatgcgtacgatatgttccctctccgaatgaacactggctatggtgcccgtactccggaggtgaaatgcgcaagttggaggcttgctgtggaagcacacaacatctttggctttgagaccattcctgaagagtgcgttgaagcaacaaaggaatacatccatggcgaacaatatagatcagactccagaacagttaaccaacaagcttacttttatgccagagacctcgaagttcatcgcaaggacacatttgtgttcagtatagat

SEQ ID NO: 234963 - DNA, 237 bp, Glycine max
gaaggtgcaagagtgtgtgtgtgagctataagctagtttagcgtgaggagaatatgaagttgtttgttttctttgttgctgcagtagttttggtagcatggccatgcgatggcgcatgttaccaaatgttccctctccgaatgaaaactggctatgagtgagcgttcttcggatgtaaatatcgcacgttagaggcatgctgtggaagcacataacatccgagcctttaagaccatt

SEQ ID NO: 234964 - DNA, 347 bp, Glycine max
gagtgaagaacaagtcttgcattgggtggagcatacttagaaacagcaactatgtctctcatgcagcttactagctcccctgttggctcactggtccgtttcattgtaatatttgctttatggtacagaaccatggctttggccaagttgccaccaaacgcttcatcagttccagcagttttagcgtttggagattccatcgtggacccaggcaacaacaacaacataaaaacattgatcaagtgcaacttcccaccttatggaaaggattttcagggaggaaacccaacgggtcgattttgcaatggaaaaattccttctgacttaatagttgaacaattgggtat

SEQ ID NO: 234965 - DNA, 371 bp, Glycine max
ggtctgaaacagagagtgagagagagggcaaaaccctagctttggagtcttccctcccatctcccacttcttgcaatctctgcagccatggcgagtaccaaagttcagagggttatgacccaacctattaacttgattttcaggtttcttcagagcaaagcgcgcattcagatttggctttttgagcagaaggatttgaggattgaaggccgaatcatcggttttgatgaatacatgaatttggttcttgatgatgctgaagaagtgaacgtcaagaagaaaagcagaaagacattagggaggatccttcttaaaggagacaacataaccttgatgatgaacacggggaaatgattaacactctggcacag

SEQ ID NO: 234966 - DNA, 240 bp, Glycine max
gctgccagaagaccactgaaagggaagcaaaaccctaagccctctttcttcctcttcctcaatagtgcgattttcgattctcttccctgcatctatgcctaaccccaaggtcttcgtcgacatgaccatcggcggtcaatctaccggccgcatcgtgatcgaactctactccgatttaactctcatcaccgccgagaacttacgcgcgctctgcattttcaacaaaggcacctggcggat

SEQ ID NO: 234967 - DNA, 368 bp, Glycine max
gaaggtgcaagagtttgttgtgagctataagctagtttatcgtgaggagaatatgaagttgtttgttttctttgttgctgcagtagttgtggtagcatggccatgccatggcgcaggctaccaaaggttccctctccgaatgaaaactggctatggtgagcgttcttcggaggtaaaatgcgcaagttttaggcttgctgtggaagcacacaacatccgagcctttaaaaccattcctgaagagtgcgttgaaccaacaaaggactacattaatggcgaacaatttagatcagactctaaaacagttaaccaacaagctttcttttatgctagtgaacgcgaagtccatcacaacgacatatttatat

SEQ ID NO: 234968 - DNA, 361 bp, Glycine max
gacttgtaataattcttataacacaacacaacccatggacaccacctccgcattcctcctccttcccctcctcctgctgctccacctcgccatcgccgctcacggcatcggcatcaactacggcacgctcggcgacaaccttccaccgcccgcggtggtggcgaacttcctgaagactaagacgatcatctaccgcgtgaagatctacgacgtgaacccggacatcctgcgggccttcgccggcagcggcatctccgtgacggtgaccgcccccaacggtgacatcgccgccttaaccaaaatcgactcggcgatgcagtgggtggcgacgcacatcaaaccctttcaccctcatgccaaa

SEQ ID NO: 234969 - DNA, 356 bp, Glycine max
gacttgtaatagttcttataacacagcagaacccatggccaccacctccgcattcctcctccttcccctcctcctgctgctccacctcgccatcgccgctcacggcatcggcatcaactacggcacgctcggcgacaaccttccaccgcccgcggcggtggcgaacttcctgaagacgaagacgaccatcgaccgcgtgaagatctacgacgtgaacccggacatcctgcgggccttcgccggcagcggcatctccgtgacggtgaccgcccccaacggcgacatcgccgccttaaccaaaatcgactcggcgaggcagtgggtggcgacgcacatcaaacccctttcacctcaga

SEQ ID NO: 234970 - DNA, 315 bp, Glycine max
tcactctgcgaaggtgcaacctgacagcctccaaatccaatggcttcagagaagagactttcgaacccaatgagggagataaaagtgcagaagctcgtcctcaatatctctgttggcgagagtggggatcgtctcaccagagccgccaaggtgttggaacaacttagtggccaaaccccagtgttttccaaagcacggtacactgttcgttcccttgggattagaagaaatgagaagattgcatgctatgtcactgtcaaacgtgacaacggaatgcaacttttggagacttgtttgaaggtgaaggaatatgaa

SEQ ID NO: 234971 - DNA, 345 bp, Glycine max
gacaacacaacgcaacacaacgcgcactctctcttttctctcttaacacaaaaaccctattgttcttcgcggtttcgccgattctcgccatgccgaaagccaaatccgacgccaaagccgccgatagccggttgaagcgcaagggcgctggtgctggaaggaagcaatcgaagaaagctgctaaggatcctaacaagccaaagagacctccaagcgctttcttcgtttacatgtccgagttcagagagcagtttaagagggagcatcctaacaacaaatccgtcgctgttgtcggtaaagctggtggtgacaaatggaaatcgctgtctgatgctgaaaaggccc

SEQ ID NO: 234972 - DNA, 342 bp, Glycine max
ggaagctttgcattcgagtcatgcaagattcagcaagtgcgttttggaagcagagaccgaaatacttcgagatggcccgtacagagcaaactgctcgtaagtcaactggaggaaaagctcccaggaagcagcttgcaaccaaggctgcacgtaagtctgcacgaacaactggtggtgtgaagaagcctcagcggttagcgccctggaactgttgctcttcgtgagattaggacataccagaagagcactgagcttctaatcaggaagcttcctttccagaggttggttcgtgaaattgcccaggatttcaagactgatcggcgtttccagagccatgcggtg

SEQ ID NO: 234973 - DNA, 285 bp, Glycine max
gaccaagtgaaccaatatagcccaagccctatacaaccaaaccctaacacacacccatttgattcagtttccatggctagcctcaaggttgcatttttggctgcagtgctctgcatggttgtggtgagtgcacccatggcacatgcagctatcacgtgcgggcaggtgacgaatagcctgatcaattgcatcggttacctccagaacggaggaacgccgccgtcgggatgctgcaacggagtgaagagcctcaatgccgccgccaagaccaccgccgaccgccag

SEQ ID NO: 234974 - DNA, 403 bp, Glycine max
ggcattatatttgagttcaaacaagtcaaagccatggccacctccaacttctctattgttctctccgtctccctagccttctttttggtgctacttaccaaggcacactcgaccgataccgtttctttcaccttcaacaagttcaacccagtccaaccaaacattatgctccaaaaagatgctagtatttcatcctctggggtgttacaactcaccaaagttggcagcaacggcgtgcccacctcgggatctctcggtcgtgccctttacgctgccccaatccagatttgggacagcgaaaccggcaaggtagccagctgggctacatcctttaaattcaacattttcgcacccaacagatcagactcagctgacgggcttgccttcttcttggcacccgtcg

SEQ ID NO: 234975 - DNA, 378 bp, Glycine max
gaattcagcaaaacactcaagcacaacatctctatcgagtaaattaactatgaagcctaccctactattatccctttccttcctgcctcgctttgctttcctggctctttcagaagatgttgaacaagttgtggacataagtggcaaccccattttcccaggtggcacatattacattatgccatcaacttggggcgctgccggtggtggattgaaactaggccggacaggaaactcaaactgcccagttactgttttgcaagattactcagaaatcttccgtggcacaccagtcaaattcagcatacctgggataagccctggaatcatctttacaggtactccacttgaaatcgagttcgcagagaaaccttaatg

SEQ ID NO: 234976 - DNA, 376 bp, Glycine max
  unsure (1)..(376): unsure at all n locations
agaacgggaggtttgtgatagtgattgcctccctctgctgccgtccctaatctgaaggctcccgccatctgcgatcggatttcatggctccaaagaaggacaaggctcccccaccttcatccaagcctgccaagtctggcggtggcaagcagaagaagaagaagtggagcaagggtaagcaaaatgaaaatgtgaataacatggtgctcttcgatcagggtacctatgacaagctcctctctgaggcacccaaatacaagctcattactccttccattctctctgaccgtgtgaggattaatggatcacttgcaangaaggctattaaggaattgatggctagaggttcaatcangatggtgtctgcccatgcaag

SEQ ID NO: 234977 - DNA, 361 bp, Glycine max
gaaggtgcaagagtttgttgtgagctagaagctagtttatcgtgaggagaatatgaagttgtttgttttctttgttgctgcagtaattttggtagcatggccatgccatggcgcaagctaccaaaggttccctctccgaatgaaaactggctatggtgagcgttcttcggaggtaaaatgcgcaagttttaggcttgctgtggaagcacacaacatccgagcctttaaaaccattcctgaagagtgcgttgaaacaacaaaggactacattaatggcgaacaatttagattagactctaaaacagttaaccaacaagctttcgtttatgctagtgaacgcgaagtcgatcacaacgacata

SEQ ID NO: 234978 - DNA, 324 bp, Glycine max
  unsure (1)..(324): unsure at all n locations
aagagaggagttgcggttaaggatccatctgctccccatggagttcggcttttgattgaggactatccttatgcttctgatgggctagagatatgggatgccatcaagtcctgngtgcatgaatatgtctcattctactacaagtcagatgcagcaattcaacaagatcccgagctccaagcttggtggaaagaacttgtccaagtgggtcatggtgatttgaaagataagccatggtggcaaaagatgcaaactcgtgaagagttgattgaagcctcggctaccctcgtatggatcgcttcaacccttcatgcaactgttaac

SEQ ID NO: 234979 - DNA, 338 bp, Glycine max
gacagacaaacactcgcattctctctctctctctctctctccgacctagcgagaccgagcgatccgagcctaatctcgcgatgctccgccgcgcaacctcgtccctcctcaccggcgcctcccgccgccgcctctcctccgacgtgccggcgacccccgccgcggattccgccttcgcggaggcgtggaaggaagtgagccccaacatcgacccgccgaagacgccgctggcgtacatgaagccccgaccacccactcgctcggctctcccttccaagctcacagtcaacttcgtcttgccctactcttctcaattggacgcaaaagaggttgatatg

SEQ ID NO: 234980 - DNA, 370 bp, Glycine max
agcagtgccaccactcaagtctccaccgtcgactgccagcccgccggcgtcaacgccggcatgcccgtcttcgtcagcggaaaccttcagctcgccggcgaacagcacagtctcaagtggagccagatgttccatttgataccaacacctcagggaagctattatgtgttgaatgacatattccgtttaaactatgcatgaagatgtcatatgaccggcaaggccatagaagaagtttgcctatagcaagctgtttcagattgcacatttgaaattgaaattgggttctttttggttggttgtgttgaacgcttaattgtgcctgttgtgtttagaactttctgttgtgactggttaaaaaccctccttc

SEQ ID NO: 234981 - DNA, 279 bp, Glycine max
ggcacaagtgagtttggtgatcgagataactagaaacagtgtgatgaaaatgaaggtccttgttttcttcgttgctacaattttggtagcatggcaatgccatgcgtaagatagtgttccctctccgaatgaacactggctatggtgcccgtactccggaggtgaaatgcgcaagttggaggcttgctgtggaagcacacaacatctttggctttgagaccattcctgaagagtgcgttgaagcaacataggaatacatccatggcgaacaatatagat

SEQ ID NO: 234982 - DNA, 387 bp, Glycine max
ggcagcaacagcagcattcactgaaagcactcagtagggtttgcggtttcagagtttgtgacgcacgcatccatggccaccaccaccaacgccgccgcagccccgccgcgccagctctcccagaaggaagccgacatccagatgatgttagccgccgacgtccacctcggcaccaaaaactgcgacttccaaatggaacgttacatcttcaagcgccgcaacgacgggatttacattattaaactttgggaagacatgggagaagcttcagttagcagctagggttattgttgcaattgagaaccctcaggatatcattgtccattccgcaaggccttatggtcaaagagcggttctgaagtttgctcagtacactggtgctcatgc

SEQ ID NO: 234983 - DNA, 347 bp, Glycine max
gaagcacaccattattttattatgaatgagtggcaatagcagcaacaacaacaatataagtaaaagaatctctgtgttgtcatcacactgggctagatccagccccatcatggcttcagagaagcaagcggctcttgccgtcactccctctgatgctgatgctcctaccatatttgacaagatcatcaataaggagattccttctactgtggtttatgacgatgacaaggtgcttgccttcagggacataactcctcaagctcctacacatattcttatcattcctaaattcaaagacgggttaagtggtctatccaaagctgaggaaaggcactttgagattcttg

SEQ ID NO: 234984 - DNA, 289 bp, Glycine max
ggattcggcaaagttgatttcaattcaatttgatttccccctttttcttctccacgtttgtgcctgcaacctcaaataccgattagggttcatgctacactgaacttggtttcggtgttccaagttagttagaggcattgttgcttgcatagatctctgatctgaaaatgaatgcgtccaggttcaataagtgcgtcaccgtcggcgacggtgctgtcggcaaaacctgcttgttgaattcctacaccagcaacacttttcccacagactatgtgcccaacgtttttga

SEQ ID NO: 234985 - DNA, 360 bp, Glycine max
ggtcgacggacgcgtccgtccagacgtcagacgactacaaaacggggacaaaatgaggatgctgatcgatgtgaattcaattcagtttgatttcccactattgtcttcgccacctttgtgcgctgcaacctcaggttggcgaggagggttcatgctacaatgaacttggtttcggtgttcaaagttagttagatgcattgatgcttgcagagatctctgatcttaagatgagtgcgtcgaagttcagtaagttcatcagcgtcggggacagtgctgtcgacaaaacctgcttgttgagttcctacaccagcagcaattttcccacatactatgtgcccaccgtttttgaaaatttcaatg

SEQ ID NO: 234986 - DNA, 284 bp, Glycine max
  unsure (1)..(284): unsure at all n locations
ggcacaagtttgttgagatagctagaagcaataagatgaaaatgaaagtgcttgttttgtttgttgctacagttttggtagcatatgaatgccatggctcagactaccagaagttccctctccaaatgaaaactgggtttggtgggcaatacagcaatgaggtggcatgtgccagttggaggcttggcgtggaagcaaacaacgtagtcaagtggcaaactgttcctgcagcttgcggagagtacatagctgactacgttctangagaacantatagatcagat

SEQ ID NO: 234987 - DNA, 318 bp, Glycine max
gactgatacaggaacagctagcagagaaacagagttacaagtaaagtaaatgaagaagatcattaatggcttctcttgcaacctgagctgctgttcaaccagctgcgctcaatggccttgctggaagttccctctctggaactaagctctctttcaagccctctcgccacactgtcaaatccaagaacttcacgagtggtgccgtggtagcaaagtatggtgacaagagtgtgtactttgatttggaggatctgggcaacactacggggcagtgggacttgtatggctcagatgcacctttaccctacaaacctcctc

SEQ ID NO: 234988 - DNA, 371 bp, Glycine max
gatggcgttgagctctgcgctcgctctctctgtctcctacgattcgttttgccccttttgttgccctaatttcaaccatgcctcgccgtagctccggtggaagatctgcccgtcctgctcctcgggcagctcctcgtcctgctccagttcaccatgctcctcctccagcccctgctcagagtggtggtggatctatgcttggtggcattggttcaaccatatctcaacgtatggcttctggcaccggaagtgcagtggcacacagggctgtggatgcagtcatgggtcctcagtacattcaacatgaaatagttgttacagatgctgctgctgctgcccctgcacccactgcatatacttttggtggcgat

SEQ ID NO: 234989 - DNA, 398 bp, Glycine max
  unsure (1)..(398): unsure at all n locations
gtgcggtcaagaattcacgggtcgagggacccatcagacgtcgatacggatgccagaagacgagggagggggaattcacttgcggctgcagtagagaagcactcgtcgttcttcgactgtctacgatctgctttctctgaattgtgaaaatgtcgctcggagaaactgcttgttcatacgcagctctcatccttcatgaatatggaattaatgtaactgctgacacgatcagcagcttgttgaaaactgcaaaggttccagtagactcgtattggccaaccttgtttgctaaacttgctgagaagtaaaatcttggcgatttgatatcaaatgcggcatgcngtggtgcaacagttgctgtttcaactggcccaatttgctgtgctgctggtggttct

SEQ ID NO: 234990 - DNA, 358 bp, Glycine max
gaaggtgcaagagtttgttgtgagctataagctagtttatcgtgaggagaatatgaagttgtttgttttctttgttgctgcagtagttttggtagcatggccatgccatggcgcaggctaccaaaggttccctctccgaatgaaaactggctatggtgagcgttcttcggaggtaaaatgcgcaagttttaagcttgctgtggaagcacacaacatccgagcctttaaaaccattcctgaagagtgcgttgaaccaacaaaggactacattaatggcgaacaatttagattagactctaaaacagttaaccaacaagctttcttttatgctagtgaacgcgaagtcgatcacaacgac

SEQ ID NO: 234991 - DNA, 318 bp, Glycine max
gactcaagcacagcatctctatcgagtaggttaacgatgaagcctaccctactattatccctttccttcctgcctctctttgcgttcctggctctttcagaagatgttgaacaagttgtggacataagtggcaaccccattttcccaggtggcacatattacattatgccatcaacttggggcgctgccggtggtggattgaaactacgccggacaggaaactcatactgcccagttactgttttgcaagattactcagaaatcttccgtggcacaccagtcagattcagcatacctgggataagccctggaatcatc

SEQ ID NO: 234992 - DNA, 381 bp, Glycine max
  unsure (1)..(381): unsure at all n locations
gcacaagtttgttgagatagctagaagcaataagatgaagatgaaagtgcttgttttgtttgttgctacagttttggtagcatatgaatgccatggctcagactaccagaagttccctctccaaatgaaaactgggtttggtgggcaatacagcaatgaggtggcatgtgccagttggaggcttggcgtggaagcaaacaacgtagtcaagtggcaaactgttcctgcagcttgcggagagtacatagctgactacgttctangagaacaatatagatcagattccaaaacagttaaccaacaagcttatttctatgctaaatccctcaaactcacaancanagatgtctttgtcctggacgttgacgacactactctctc

SEQ ID NO: 234993 - DNA, 303 bp, Glycine max
gagcgaaacagagagtgatttcagtgagtgatcggtgttcacttgatctcatcataatcgtcagcgtcaattgaagaagatgccgatcagaaacatcgccgtcggaaggcctgaagaggcgacccaccccgacacgttgaaggcggctttggctgagttcatctcaaccttcatcttcgtgttcgccggctcaggctccggcatcgcctacaacaagctcaccgacaacggcgctgccacccctgccggcctcatctccgcctccatcgcccatgcattcgccctcttcgtcgccgtctccgt

SEQ ID NO: 234994 - DNA, 381 bp, Glycine max
gacacacattagtagttaaagttctcacttgagttctgaactcctctgcattccttagtgaggctaatggaactacagttaatattggtgaaaatgatactatcactagcaatggccatgatgatgatgatgccatgttattcagttgctgtggacattaatcaacaagtgaagcaagtggtagcaaagcataacgtgtcttgcctcctagtttttggagactcaagtgttgattctgggaacaacaatgctcttcacaccactatgaaaagcaactttcctccttatgggaaagacttctttgacagccgcccaactggaaggtttagtaatgggagactttgcatagagctcgttgctgaagcattgaggtacataaaa

SEQ ID NO: 234995 - DNA, 340 bp, Glycine max
ggcacaagtgagtttgttgatcgagataactagaaacagtgtgatgaaaatgaaggtccttgttttcttcgttgctacaattttggtagcatggcaatgccatgcgtacgatatgttccccctccgaatgaacactggctatggtgcccgtactccggaagtgaaatgcgcaagttggaggcttgctgtggaagcacacaacatctttggctttgagaccattcctgaagagtgcgttgaagcaacaaaggaatacatccatggcgaacaatatagatcagactccataacagttaatcaacaagcttacttttatgccagagatctcgaagtccaatcc

SEQ ID NO: 234996 - DNA, 406 bp, Glycine max
  unsure (1)..(406): unsure at all n locations
ggcacaagtgagtttgttgatcgagataactagaaacagtgtgatgaaaatgaaggtccttgttttcttcgttgctacaattttggtagcatggcaatgccatgcgtacgatatgttccctctccgaatgaacactggctatggtgcccgtactccggaggtgaaatgcgcaagttggaggcttgctgtggaagcacacaacatctttggctttgagaccattcctgaagagtgcgttgaagcaacanaggaatacatccatggcgaacaatatagatcagactccaaaacagttaaccaacaagcttacttttatgccagagacctcgaagtccatcccaaggacacatttgtgttcagtatagatggcaccgtactctctaatattccatactacaaaaaacat

SEQ ID NO: 234997 - DNA, 401 bp, Glycine max
  unsure (1)..(401): unsure at all n locations
ggtgcacaagtgagtttgttgatcgagataactagaaacagtgtgatgaaaatgaaggtccttgttttcttcgttgctacaattttggtagcatggcaatgccatgcgtacgatatgttccctctccgaatgaacactggctatggtgcccgtactccggaggtgaaatgcgcaagttggaggcttgctgtggaagcacacaacatctttggctttgagaccattcctgaagagtgcgttgaagcaacaaaggaatacacccatggcgaacaatatagatcagactccaaaacagttaaccaacaagcttacttttatgccagagaactcgaagtcaatcncaaggacacatttgtgttcagtatagatggcaccgtactctctaatattccatactacaa

SEQ ID NO: 234998 - DNA, 408 bp, Glycine max
  unsure (1)..(408): unsure at all n locations
ggagataactagaaacagtgtgatgaaaatgaaggtccttgttttcttcgttgctacaattttggtagcatggcaacgccatgcgtacgatatgttccctctccgaatgaacactggctatggtgcccgtactccggaggtgaaatgcgcaagtcggacgcttgctgtggaagcacacaacatctttggctttgagaccattcctgaagagtgcgttgaagcaacataggaatacatccatggcgaacaatatagatcagactccaaaacagttaaccaacaagcttacttttatgccagagacctcgaagtccatcncaaggacacatttgtgttcagtatagatggcaccgtactctctaatattccatactacaataaacattgatatggggttgaaaaatttaa

SEQ ID NO: 234999 - DNA, 241 bp, Glycine max
ggaggcaagaagttgtattttggcatccccgtggcttcaagaagagaatctcaatggaggcccacgagctgaagcgcgtgttccagatgttcgaccgcaacggcgacgggagaataacgaagaaggagctgaacgactcgctggagaacctgtgcatcttcatctctgacaaggacctgagccaaatgatccagaggatcgacgtcaccggcgaacgttgcatggacatggaagattttgg

SEQ ID NO: 235000 - DNA, 363 bp, Glycine max
ggaggcaagaagttgtattttggcatccccgtggcttcaagaagagaatctcaatggaggcccacgagctgaagcgcgtgttccagatgttcgaccgcaacggcgacgggagaataacgaagaaggagctgaacgactcgctggagaacctgtgcatcttcatctctgacaaggacctgagccaaatgatccagaggatcgacgtcaacggcgacggttgcgtggacatggacgagtttggggagctgtatcagaccataatggacgagcgcgacaatgaggaggacatgagggaggccttcaacgtcgtcgaccagaacgccgacggcttcatcaccgtccgacagttgaggaccgtcttgt

SEQ ID NO: 235001 - DNA, 381 bp, Glycine max
  unsure (1)..(381): unsure at all n locations
ggcgtacacagcctcaacaaccctaacgcgtgcagagcagagagagacgcagccatggggcgaagacccgcgaggtgttataggcaaattaagaacagaccataccccaagtcacggttttgccgtggtgttcctgatcccaagatcaggatttacgatgttggtatgaagaagaagggtgttgatgagtttcctttctgtgtccatctggttagttgggagaaggaaaacgtttctagtgaggccctggaagctgctcgtattgcttgcaacaagtacatggccaaatttgctggaaaggatgctttccacttgagagtcagggtgcacccattccatgttcttaggatcaacangatgctttcgtgtgctggagctgat

SEQ ID NO: 235002 - DNA, 412 bp, Glycine max
gaaggtgcaagagtttgttgtgagctataagctagtttatcgtgaggagaatatgaagttgtttgttttctttgttgctgcagtagttttggtagcatggccataccatggcgcaggctaccaaaggttccctctccgaatgaaaactggctatggtgagcgttcttcggaggtaaaatgcgcaagttttaggcttgctgtggaagcacacaacatccgagcctttaaaaccattcctgaagagtgcgttgaaccaacaaaggactacattaatggcgaacaatttagatcagactctaaaacagttaaccaacaagctttcttttatgctagtgaacgcgaagtccatcacaacgacatatttatattcggcatagataacaccgtactctccaatatcccatactaagaa

SEQ ID NO: 235003 - DNA, 230 bp, Glycine max
ggcacaagtgagtttgttgatcgagatcactaggaacagtgtgatgaaaatgaacgcccttgttttctccgttgctagaattttggtagcatggcaatgccatgcgtacgataggttccctctccgaatgaacactggctatggtgcccgtactccggaggtgaaatgcccaagttgaaggcttgctgtggaaccacacaaaatctttggttttgaaacaatccctaaaa

SEQ ID NO: 235004 - DNA, 358 bp, Glycine max; identical to SEQ ID NO: 234733

SEQ ID NO: 235005 - DNA, 333 bp, Glycine max
gctccgaaacccgccccgagaatgcgatccatatcggatcccccggtgccccctcgctcctcctccggcggaagcgactcctcctcgggcgcatccatcgatccgatcttccacctcctccgcgtcctccccttcagcttcctccgccctgctcgcctccgcctcaagcttcccgccttcagcctcccctccccgaacgccgtcttcgcactcctcctcctcacctacttcatggtcgtctccggcattgtttacgatatcatcgacgagccccccggaatcggatccactcaggacacctacactggtgccgtccgacccgtcggcttcatg

SEQ ID NO: 235006 - DNA, 316 bp, Glycine max
ggaacctttgcattctattcattcaagattcagcaagtgcgttttggaagcagagaccgaaatacttcgagatggcccgtacagagcaaagtgctcgtaagtcaactggaggaaaagctcccaggaagcagtttgcaaccaaagctgcacgtaagtctgcaccaacaactggtggtgtgaagaaacctcatcgttatctccctggaactgttgctcttcgtgagaataggagataccagaagagcactgatctcctaatcaggaaacttcctttccaaaggttggttcgtgaaattgcccaggatttcaagactga

SEQ ID NO: 235007 - DNA, 237 bp, Glycine max
acccaaaggggcacaactgagtttgttgatcaccataactaaaaacagtgtgattaaaatgaatatctttatattcctcgatgtcacaaatttggcacgggggcaatactatgcgtacaatatgtgccctctccgaatgtctcacgtcaaaggtgcatgtacttcggccgtgtaatgctcaagttggcacgcttgctgtgctactacacactatctttggatatgggactattcctg

SEQ ID NO: 235008 - DNA, 390 bp, Glycine max
gaagcacaacatctctatcgagtaaattaactatgaagcctaccctactattatccctttccttcctgcctctctttgctttcctggctctttcagaagatgttgaacaagttgtggacataagtggcaaccccattttcccaggtggcacatattacattatgccatcaacttggggcgctgccggtggtggattgaaactaggccggacaggaaactcaaactgcccagttactgttttgcaagattactcagaaatcttccgtggcacaccagtcaaattcagcatacctgggataagccctggaatcatctttacaggtactccacttgaaatcgagttcgcagagaaaccttattgtgctgaatcctccaaatgggtggcgtttg

SEQ ID NO: 235009 - DNA, 385 bp, Glycine max
gggtgcaagagtttgttgtgagctataagctagtttatcgtgaggagaatatgaagttgtttgttttctttgttgctgcagtagttttggtagcatggccatgccatggcgcaggctaccaaaggttccctctccgaatgaaaactggctatggtgagcgttcttcggaggtaaaatgcgcaagttttaggcttgctgtggaagcacacaacatccgagcctttaaaaccattcctgaagagtgcgttgaaccaacaaaggactacattaatggcgaacaatttacatcacactctcacagtattcgaagtactccatcaacaccctcaggtggaaactgtggatcatcacctccacaacatcatgatccaacaacaccctcaac

SEQ ID NO: 235010 - DNA, 338 bp, Glycine max
ggagtacaacttcacattttagactaataccccctcttttgctgcatcagaagagttgtgaatgaagaccatggctgcacaagctcttgtagcatcatcttctcttaccgtctcaggggaggctgcgatacacactcttggaacaagatcataccaatctcgatctggcgtcgccaaatgagcctcctttcttgttaatgtagctgctaacccccctgtcaagcttggatcagatcgacctttgtggtttgcatcaaagcaagatcattcttacgtggatggcatcctatcaggtgactatggaattgaccctctgggaccttcataccctgaaggaa

SEQ ID NO: 235011 - DNA, 403 bp, Glycine max
gacagacaagggtttcttccgggttcacgtttcacaatcactttttgcgcttctctcactcactcactcttcttcttcctcttcgtgtggttttctttctcgaactcgaacgaagatgcgtgagattcttcacatccagggagggcaatgcgggaaccagatcggagccaagttctgggaggtggtgtgcgcggagcacgggatcgattcaacggggaggtaccaaggggacaacgagttgcaactcgagcgagtcaacgtctactacaatgaagcgagttgcggaaagttcatgccaagaggggtatcagtggataaagtgcgaagtggaaagtattaagcagacttggcttggagtggtggttctaaatgatatcaaagaatatagctgagtatagatttg

SEQ ID NO: 235012 - DNA, 340 bp, Glycine max
gagcatagcgaaacagagagtggtttcagtgagtgatcggtgttcacttgatccttcataagtcgtcatcatcatcatcatcatcaccgttgattgaagaagatgccgatcagaaacatcgccatcggaaggcctgaagaggctactcaccccgacacgttgaaggcggggttggctgagttcatctccaccttgatcttcgtgttcgccggttcaggttccggcatcgcctacaacaagctcaccgacaacggcgccgccactcccgccggcctcatctccgcttccatcgcccatgctttcgccctcttcgtcgccgtctccgtcggcgccaacatct

SEQ ID NO: 235013 - DNA, 405 bp, Glycine max
  unsure (1)..(405): unsure at all n locations
ggcacaagtgagtttgttgatcgagataactagaaacagtgtgatgaaaatgaaggtccttgttttcttcgttgctacaattttggtagcatggcaatgccatgcgtacgatatgttccctctccgaatgaacactggctatggtgcccgtactccggaggtgaaatgcgcaagttggaggcttgctgtggaagcacacaacatctttggctttgagaccattcctgaagagtgcgttgaagcaacaaaggaatacatccatggcgaacaatatagatcagactccaaaacagttaaccaacaagcttacttttatgccagagacctcgaagtccatcncaaggacacatttgtgttcagtatagatggcaccgtactctctaatattccatactacaaaaaaca

SEQ ID NO: 235014 - DNA, 386 bp, Glycine max
  unsure (1)..(386): unsure at all n locations
ggcagcaacagcagcattcactgaaagcactcagtagggtttgcggtttcagagtttgtgacgcacgcatccatggccaccaccaccaacgccgccgcagccccgccgcgccagctctcccagaaggaagccgacatccagatgatgctagccgccgacgtccacctcggcaccaaaaactgcgacttccaaatggaacgttacatcttcaagcgccgcaacgacgggatttacattattaaccttgggaagacatgggagaagcttcagttagcagctanggttattgttgcaattgagaaccctcaggatatcattgttcaatccgcaaggccttatggtcaaagagcggttctgaagtttgctcagtacactggtgctcatgc

SEQ ID NO: 235015 - DNA, 392 bp, Glycine max
gacaatacagagtgcgttgttgctccttcgccacaactccctgccaacatgggtatctccagagattctatgcacaagaggcgtgccactggtggcaagaagaaggcatggaggaagaagagaaagtatgagcttggtcgccagcctgctaacactaagctgtcaagcaacaagacagtcaggaggatccgggttagaggtggaaatgtgaagtggagggcactgagattggatactggaaattactcctggggaagtgaagctgtaactcgcaagactcgtatactagatgtggtttacaatgcctcaaacaacgagcttgtgcgtactcagactcttgtaaaaagtgctattgttcaagttgatgctgctccattcaaacagtggtacct

SEQ ID NO: 235016 - DNA, 360 bp, Glycine max
ggcacaagtgagtttgttgatcgagataactagaaacagtgtgatgaaaatgaaggtccttgttttcttcgttgctacaattttggtagcatggcaatgccatgcgtacgatatgttccctctccgaatgaacactggctatggtgcccgtactccggaggtgaaatgcgcaagttggaagcttgctgtggaagcacacaacatctttggctttgagaccattcctgaagagtgcgttgaagcaacaaaggaatacatccatggcgaacaatatagatcagactccaaaacagttaaccaacaagcttacttttatgccagagacctcgaagtccatcccaaagacacaattgtgttcag

SEQ ID NO: 235017 - DNA, 414 bp, Glycine max
  unsure (1)..(414): unsure at all n locations
ggaacccttatctatatcttcttatagcttcatcccaaaaagctcttttccttctaaatttgattccttagttcagcattctattattatatatggcttcttcaccttcctcagaaaacaaaaacctagagggagtagctggtggtaccggagagaaacccattccacttggtgagaacgttctgcagaagcatgctgcattctttgacttgaataaagatggtgtcatctacccatgggagacttttaaagggttgcgtgaaatcgggactggggttttgctgtccgttggaggtgctattttcatcaatgtgtttctcagtcagagtactcgtcccggaaagtttccatctatactttttccaattgaaattaanaatatccaacgcggcaaacacggcagtgacactggag

SEQ ID NO: 235018 - DNA, 407 bp, Glycine max
agttctagtgtgtgattgtttgttgttgtaactcgttcttcttcttttgttgttctgtgtttgtgtttgttttttctctcacctgaaaatgtcttgctgcggtggtaactgtggttgcggaagctcctgcaagtgcggcaacggctgcggaggctgcaagatgtacccagacttgagctacactgagtcaaccaccaccgagaccttggtcatgggagtggcacctgttaaggctcaatttgagggtgctgaaatgggtgtgcccgctgagaacgatggctgcaaatgtggaccaaactgctcctgcaacccctgcacttgcaagtgaggtgttgggagagcaagcttcaagcagagatagcccttaattaggaataatgataaactattaatgtgtagctaaaaac

SEQ ID NO: 235019 - DNA, 389 bp, Glycine max
ggagtgcagagagatggcttgcagacagttgtgggcttcaagagctgcttcctacctcaggatctccgtgtttcacagaagcttctctaacgttttgaatgatctgaagtatgctgattctcatgagtgggtgaaggttgatggaaattctgcaactgttggcataactgatcatgcccaagatcatttgggtgaggttgtgtatgttgaattgcctgaagtgggagccaccgtgacacaaggagaaggttttggtgcagctgaaagtgtgaaggcaactagtgatattaactctcctgtttcaggaaaagtggtcgaagttaatgaaaaacttaacagttctcctgctttggtcaacacaagcccttacaaagatggatggataatta

SEQ ID NO: 235020 - DNA, 398 bp, Glycine max
gaggtgcaagagtttgttgtgagctataagctagtttatcgtgaggagaatatgaagttgtttgttttctttgttgctgcagtagttttggtagcatggccatgccatggcgcaggctaccaaaggttccctctccgaatgaaaactggctatggtgagcgttcttcggaggtaaaatgcgcaagttttaggcttgctgtggaagcacacaacatccgagcctttaaaaccattcctgaagagtgcgttgaaccaacaaaggactacattagtggcgaacaatttagatcagactctaaaacagttaaccaacaagctttcttttatgctagtgaacgcgaagtccatcacaacgacatatttatattcggcatagataacaccgtactctctaatat

SEQ ID NO: 235021 - DNA, 409 bp, Glycine max
ggcacaagtgagtttgttgatcgagataactagaaacagtgtgatgaaaatgaaggtccttgttttcttcgttgctacaattttggtagcatggcaatgccatgcgtacgatatgttccctctccgaatgaacactggctatggtgcccgtactccggaggtgaaatgcgcaagttggaggcttgctgtggaagcacacaacatctttggctttgagaccattcctgaagagtgcgttgaagcaacaaatgaatacatccatggcgaacaatatagatcagactccaaaacagttaagcaacaagcttacttttatgccagagacctcgaagtccatcccaaggacacatttgtgttcagtatagatggcaccgtactctctaatattccatactacaaaaaacatgga

SEQ ID NO: 235022 - DNA, 404 bp, Glycine max
agaaggggatagcgaaacagagagtggtttcagtgagtgatcggtgttcacttgatccttcataagtcgtcatcatcatcatcatcatcaccgttgattgaagaagatgccgatcagaaacatcgccatcggaaggcctgaagaggctactcaccccgacacgttgaaggcggggttggctgagttcatctccaccttgatcttcgtgttcgccggttcaggttccggcatcgcctacaacaagctcaccgacaacggcgccgccactcccgccggcctcatctccgcttccatcgcccatgctttcgccctcttcgtcgccgtctccgtcggcgccaacatctccggcggccacgtcaaccccgccgtcaccttcggcgccttcgtgggcggcaacatcacct

SEQ ID NO: 235023 - DNA, 396 bp, Glycine max
ggcacaagtgagtttgttgatcgagataactagaaacagtgtgatgaaaatgaaggtccttgttttcttcgttgctacaattttggtagcatggcaatgccatgcgtacgatatgttccctctccgaatgaacactggctatggtgcccgtactccggaggtgaaatgcgcaagttggaggcttgctgtggaagcacacaacatctttggctttgagaccattcctgaagagtgcgttgaagcaacaaaggaatacatccatggcgaacaatatagatcagactccaaaacagttaaccaacaagcttacttttatgccagagacctcgaagtccatcccaaggacacatttgtgttcagtatagatggcaccgtactctctaatattccatacta

SEQ ID NO: 235024 - DNA, 348 bp, Glycine max
ggcacaagtgagtttgttgatcgagataactagaaacagtgtgatgaaaatgaaggtccttgttttcttcgttgctacaattttggtaacatggcaatgccatgcgtacgatatgttccctctccgaatgaacactggctatggtgcccgtactccggaggtgaaatgcgcaagttggaggcttgctgtggaagcacacaacatctttggctttgagaccattcctgaagactgcgttgaagcaacaaaggaatacatccatggcgaacaatatagatcatactccaaaacagttaaccaacaagcttacttttatgccagagacctcgaagtcgatcccatcgacac

SEQ ID NO: 235025 - DNA, 394 bp, Glycine max
ggttctagtgtgtgattgtttgttgttgtaactcgttcttcttcttttgttgttctgtgtttgtgtttgttttttctctcacctgaaaatgtcttgctgcggtggtaactgtggttgcggaagctcctgcaagtgcggcaacggctgcggaggctgcaagatgtacccagacttgagctacactgagtcaaccaccaccgagaccttggtcatgggagtggcacctgttaaggctcaatttgagggtgctgaaatgggtgtgcccgctgagaacgatggctgcaaatgtggaccaaactgctcctgcaacccctgcacttgcaagtgaggtgttgggagagcaagcttcaagcagagatagcccttaattacgaataatgattaactattaatg

SEQ ID NO: 235026 - DNA, 375 bp, Glycine max
gacacacagtctcttcttcttgcaattccttcctcgttatggagtcgcgagtgctgtcacgcgccggaaccttgtcctccctccctcacctccgcaagccgccgcgggaggccgtctccagcgcctccctcgtcgccgtgaaggccgtgggctccgtcgcggacggcggaaacctgatttgggggaggcagctgcgcccggagctctgctcgccggtgctgaagaaggaggctgtcctcctccggccatgcctcgccgccgcctcctcgccggccgaaggtagtgattccgcccgagaaagcaaaggttgctccggcggggttcttcgacaagttaccggctctggtcaccggatttttcttcttcacgtggtac

SEQ ID NO: 235027 - DNA, 329 bp, Glycine max
gactcaccacttcaaaacactcataacacaaagcacaaagcaaagctcatccttgagttaaaaaatggcagcagcttcttccatggctctctcatccccatccttggctggcaaggccgtgaagctgggcccatcagccccagaagtgggaagggtgagcatgaggaagaccgtcaccaagcaggtctcctcaggaagcccatggtacggcccagaccgagtcaagtacttgggcccattctctggcgagcccccgtcctacctaaccggtgagctcccaggcgactacggctgggacactgctgggctttccgcagacccagaaacct

SEQ ID NO: 235028 - DNA, 367 bp, Glycine max
gaaggtgcaagagtttgttgtgagctataagctagtttatcgtgaggagaatatgaagttgtttgttttctttgttgctgcagtagttttggtagcatggccatgccatggcgcaggctaccaaaggttccctctccgaatgaaaactggctatggtgagcgttcttcggaggtaaaatgcgcaagttttaggcttgctgtggaagcacacaacatccgagcctttaaaaccattcctgaagagtgcgttgaaccaacaaaggactacattaatggcgaacaatttagatcagactctaaaacagttaaccaacaagctttcttttatgctagtgaacgccaagtccatcacaacgacatatttata

SEQ ID NO: 235029 - DNA, 341 bp, Glycine max
agggggcacacgtttgtggaggtagctagacgcagtaacatgacattccaagtgcttgtatttgtttgttgccacagttttggtcccacatgaatgccatggtccatattaccatcagttccttctccaactgaaaactgggtttggtgggcaatacatcaatgacgtggcatgtgccacttggaagcttggcgtgagagacacaaccgtagtcaagtcgcaagctgttcctgcagcttgctgagagtacatagctgactacgttctacgagaccaatagacatcacattccacgacagttaaccatgacgcttatatctatgctatatcctcatactcac

SEQ ID NO: 235030 - DNA, 216 bp, Glycine max
ggcacaagtgagtttgttgatcgagataactacaaacagtgtgatgaaaatgaaggtccttgttttcttcgttgctacaattttggtagcatggcaattccatgcgtacgatatgttccctctccgaatgatcactggccatggtgtccgtaatccggacgtgaaatccgcaagttcgacgcctactgtagaaacagaccatgatctctggctttg

SEQ ID NO: 235031 - DNA, 402 bp, Glycine max
gaaggtgcaagagtttgttgtgagctataagctagtttatcgtgaggagaatatgaagttgtttgttttctttgttgctgcagtagttttggtagcatggccatgccatggcgcaggctaccaaaggttccctctccgaatgaaaactggctatggtgagcgttcttcggaggtaaaatgcgcaagttttaggcttgctgtggaagcacacaacatccgagcctttaaaaccattcctgaagagtgcgttgaaccaacaaaggactacattaatggcgaacaatttagatcagactctaaaacagttaaccaacaagctttcttttatgctagtgaacgcgaagtccatcacaacgacatatttatattcggcatagataacaccgtactctctaatatccc

SEQ ID NO: 235032 - DNA, 393 bp, Glycine max
ggagagaaactagggttagggtttaacttacaattgcgtgatcgagtccgattcgattgattcgcttctctcgcagacgaagtagaaacacgaaactcagaatccatggcgacgcgagcgacgacgaagcgaaaaccggtgttcgtgaaggtggatcagttaaaacctggcaccaacggccacacactgacggtgaacgtggtcagttccaagccggtgaagacggtgagcacccgcggcggtcgaccgacggtgctagccgcgcgcccgtcgcgcattgccgagtgcctcgtcggcgacgaaaccggaaccataatcttcgccgctcgcaacgaacaggtggatcatatgaatgctggcgcaactgtaattctgcgtaatgcaaagaatgac

SEQ ID NO: 235033 - DNA, 405 bp, Glycine max; identical to SEQ ID NO: 234594

SEQ ID NO: 235034 - DNA, 408 bp, Glycine max
gcttccatcggcgcggcacacacagacacacacatttcgtcggaatgggaagggtgattcgcgcacagcgtaagggtgcggggtcggtgttcaagtcccacacccaccaccgcaagggtccggcgaggttccgcagcctcgacttcggcgagcgcaacggctacctcaaaggggtcgtcaccgatatcatccacgaccctggtcgcggtgctcctctagccaacgtggcgttccgccaccccttccgctacaagaagcagatggggctcttcgtcgccgccgagggcctctacaccggccagttcatctactgcggcacgaaagcaacctcgtcgtcggcaacgtcattgccctccgattcatcccacgaagtgccgttatctgcaacgtcgagcaacacgttggcga

SEQ ID NO: 235035 - DNA, 401 bp, Glycine max
  unsure (1)..(401): unsure at all n locations
agaacggaaaagcactggcgcagctaccctgaggcttctcttctcttctcttctctgtcgtgagtcaccatggtgagggctagtgtgctgaacgatgctctgaagagcatgtacaatgctgagaaaaggggaaagcgccaagtcatgattaggccatcctccaaagtcattatcaaattccttttggtgatgcaaaagcacggatacatcggagagtttgagtatgttgatgaccacagggctggtaaaatcgtggttgaattgaacggtagactgaacaagtgtggggttattagtccccgttttgatgtgggcgtcaaagagattgaaggttggactgctaggcttctcncctcaagacagtttgggtatattgtattgactacctctgctggcatcat

SEQ ID NO: 235036 - DNA, 375 bp, Glycine max
gatagcgacacacacagctgctggctacggatacataaaatcgttcccagattcaaaacctgagatgcttttcttgagctggggtcgcccctctccccaagaccaaaagacttgcatcaacaagtcaggtactttcaactatgatgacaaatataaaggagctactgctaaatcagtggcttcccttaaagcagacgagggactctccaaagatggatttttactaaacgaggcgcgagttctggttggttctggtattgagacctttgaaaagggcaagagtgctcttagaagttggaggcattttggattgaattgggcatttgttgattcgaagacaccagtccaacaaggagtgaagttctgtgtttgtgt

SEQ ID NO: 235037 - DNA, 370 bp, Glycine max
gacagctattcctcttaagcttgctactgaatttccacactggataccttaagtcttccgaattcgaacttaatttgcaagatggctaaagcaaaggctcagatcaacattgtggtggttggtcatgtggaccctgaggaggcaaccaccattaacgagctgaagaagcctgttgtggagaaagaagctccagggcatgccatatgagggcatgcacgtaaggactcggaggggaaccataaaattatgttaagaaaataatctggaaccctaatgtatcagtgtcatcatcagtgtgtagtttaagctaactttgctatggttacattctttgacatgagagtcgtgatgaacagtatcattctgaagt

SEQ ID NO: 235038 - DNA, 389 bp, Glycine max
gacacacagctattcctcttaagcttgctactgagtttccacactgcataccttaggtcttccgaattcgaagttaatttgcaagatggctaaggaaaaggctcagatcaacattgtggtggttggtcatgtggaccctgaggaggcaaccaccattaacgagctgaagaagcctgttgtggagaaagaagctccagggcatgccatatgagggcatgcacgtacggcctcggaggggaaccagaaaattatgttaacaaaataatctggaaccctaatgtatcagtgtcatcatcagtgtgtagtttaagctagctttgctatggttacgttctttgagatgagagtcttgatgaacagtaccattctgatgtattgctttccttgaa

SEQ ID NO: 235039 - DNA, 383 bp, Glycine max
  unsure (1)..(383): unsure at all n locations
gaatagaaatagaactgtcttttcatatagatatcccttcaacacaacataggtcatcgaaaggatctcgaagacccaccaacgcacgaaagccgggatctttcagaaaatggattcctattcgaagggtgcataaccgcatggataagctcacactaacccgtcaatttgggatccaattcggttccttaggaggtatcgggaaggaattttggaatgtaataatatcgattcatacagatacagaagaaagggttctctattgattcanacgctctacctacgagatagggatagagaaagaggaaaaaaccgaaggatttcacatagtacttttggtcgaaaaatcgatctgatttttttcgtacttttcgctcaatgat

SEQ ID NO: 235040 - DNA, 403 bp, Glycine max
  unsure (1)..(403): unsure at all n locations
gattgttggcttgtgctctgctcgtgcctctagggttatcatatctccatttccatttcctctctctcagtttccaagaatcttaagctatgggaaagtcttacccaaccgtgagcgctgattaccagaaggccgttgagaaggcgaagaagaagctcagaggcttcatcgctgagaagagatgcgctcctctaatgctccgtttggcatggcactctgctggaactcacgacgtgagctcgaagaccggtggtcncttcggaaccataaagcacccctccgaactcgctcacggcgctaacaacggtcttgacatcgctgttaggcttttggagccactcaaagcggagtttcctattttgagctacgccgatttctaccagttggctggcgttgttgccgt

SEQ ID NO: 235041 - DNA, 412 bp, Glycine max
  unsure (1)..(412): unsure at all n locations
ggcagttcaattccaatatattccattctctctgtgtatttccctacctctcccttcaagatgcagatcttcgtcaagaccctcaccggcaagaccatcacccttgaagtggaaagctctgacaccatcgacaacgtcaaggccaagatccaggacaaggaaggaatccccccggaccagcaacgtctcattttcgccggaaagcaacttgaggacggccgtacccttgctgactacaacattcagaaggagagtactcttcacctcgtcctccgtctccgtggtggcatgcagatcttcgttaagacactcaccggcaagaccataaccctagaggttgaaagctccgacaccatcgataacgtcaaggccaagacccaggacaaagagggtatcnccccggaccagcaac

SEQ ID NO: 235042 - DNA, 397 bp, Glycine max; identical to SEQ ID NO: 234774

SEQ ID NO: 235043 - DNA, 401 bp, Glycine max
  unsure (1)..(401): unsure at all n locations
gaagcaaagtcgcaaattctcctcctacaccaacaaaaatggcaccttctccacaagaaatcatcttccgatccccactccccgatattcccatccccacacatctcccattgtactcttactgcttccaaaacttgtcaaagttccatgaccgtccatgcctcatcgacggcgacaccggcgagaccctcacctacgccgacgtcgacctcgctgctcgccgcatcgcctccggcctccacaaaatcggcatccgccagggtgacgtcatcatgctcgtcctacgcaactgcccgcagttcgccctcgccttcctcggcgccacccaccgtggcgccgtcgtcnacacagccaaccccttctacacgccggcggaacttgcgaagcaggcgacggccacg

SEQ ID NO: 235044 - DNA, 366 bp, Glycine max
gattgttggcttgtgctctgctcgtgcctctagggttatcatatctccatttccatttcctctctctcagtttccaagaatcttaagctatgggaaagtcttacccaaccgtgagcgttgattaccagaaggccgttgagaaggcgaagaagaagctcagaggcttcatcgctgagaagagatgcgctcctctaatgctccgtttggcatggcactctgctggaacttacgacgtgagctcgaagaccggtggtcccttcggaaccataaagcacccctccgaactcgctcacggcgctaacaacggtcttgacatcgctgttaggcttttggggccaatcaaagcggagtttcctaatttgagct

SEQ ID NO: 235045 - DNA, 400 bp, Glycine max
  unsure (1)..(400): unsure at all n locations
gacacaccgtttgttctattcttaactcaacttctgctacccactctcttcttccaagtccaaccacgcttttctctacagtcatgggcaaggtcaagatcggaatcaacggatttggaagaattggccgtttggttgccagagtcgctctgcaaagagacgatgtggagctcgttgccgttaacgaccctttcattaccaccgattacatgacatacatgtttaaatacgacagtgttcacggacactggaagcatcacgatgtcaccgttaaggacgagaagacccttctcttcggtgacaagccagtcactgtttttggacacaggaaccctgaagagatccatggnggtcaactggagctgatatcattgttgagtccacgggagttttcaacgat

SEQ ID NO: 235046 - DNA, 395 bp, Glycine max; identical to SEQ ID NO: 234808

SEQ ID NO: 235047 - DNA, 415 bp, Glycine max
aaaagacgacagaaggggaaaatgaaaatagtagaaaagaaggcattaggttaagagtgaaggcagtgagcgaaagagagcatagtaatacttactgagtgcttacagttgctgcgtcgcaaggtaccggcggcgacggagaactatcttctcaattttcgatcactgcattggttctgttgacaagggttttgttcttcctgacttgcatacttgatggcttcaaagttgcagaagttgcaggccacagcatctcaagcgtctcaatttgtatccagttgtggaactaactactacaagcaattgctggaacagaacaagcaacacattcaggagcctcctacagtagagaaatgcaacctgttggcaaagcaattgttttacactcgccttgctagtattccgagtcgtaatg

SEQ ID NO: 235048 - DNA, 348 bp, Glycine max
gcacaagtttgttgagatagctagaagcaataagatgaaaatgaaagtgcttgttttgtttgttgctacagttttggtagcatatgaatgccatggctcagactaccagaagttccctctccaaatgaaaactgggtttggtgggcaatacagcaatgaggtggcatgtgccagttggaggcttggcgtggaagcaaacaacgtagtcaagtggcaaactgttcctgcagcttgcggagagtacatagctgactacgttctaggagaccaatatagatcagattccaaaacagttaaccaacaagcttaattctatgctaaatccctcaaactccacaacaaaagatg

SEQ ID NO: 235049 - DNA, 372 bp, Glycine max
  unsure (1)..(372): unsure at all n locations
gacagcatatatatcaataatctattttatactatacctacattttgataattttctttgtagttgatagccatggctacccgtggaaagcttgaggttgacattgatctcaagtccaacgcagacaagtactggcaaacccttaggaattctactgaaatattccctaaggccttcccacatgattacaaaagcattgaggttcttgagggtgatggcaagtctcctggttctatccgccacataagttatggtgaaggttcaccacttgtgaaatcatcctttgagaagattgaggctgttgatgangaaaagaaggtantgtcgtacactatcattgatggggaactcctccagcactacaanacattc

SEQ ID NO: 235050 - DNA, 423 bp, Glycine max
acggctgcaaaaaacaacaaaagggcaaggacaaaacgttgaaaaaccgcagtgggccggctaaaatgccttacgctttgctctatccttctagtgaggagggattgactttcagaggaattcccaacagtatctccatctatgggctctatggttgttgcagtactttccctggttttcaataaaagtgaatagaaggaatatgattccttcatctacctatgtatggttaagttatgtatttggggtgattgaatgttctcgtgtttgctgttaagtgttaatgaagaaattctgtctgtataaattgctgttaagtgttctcgcgcatgtttcaacaatgatagctggcatggcaaagtgcaaactagaataaatcatcatcttatgtaaacgatttccattacagcaagggttgtccct

SEQ ID NO: 235051 - DNA, 399 bp, Glycine max
gaaggtgcaagagtttgttgtgagctataagctagtttatcgtgaggagaatatgaagttgtttgttttctttgttgctgcagtagttttggtagcatggccatgccatggcgcatgctaccaaaggttccctctccgaatgaaaactggctatggtgagcgttcttcggaggtaaaatgcgcaagttttaggcttgctgtggaagcacacagcatccgagcctttaaaaccattcctgaagagtgcgttgaaccaacataggactacattaatggcgaacaatttagatcagactctaaaacagttaaccaacaagctttcttttatgctagtgaacgcgaagtccatcacaacgacatatttatattcggcatagataacaccgtactctctaatat

SEQ ID NO: 235052 - DNA, 306 bp, Glycine max
  unsure (1)..(306): unsure at all n locations
cggatgcaaaaaaacaacaaaaggggatcgttctcaaacttgtgattattcctccctttaacaatccacacccaaattctaaggttccgaaatggacgctggcggaaagatcaagaagggcgccggaggtagaaagggcggcggcccaaagaagaagccggtttcaaggtccgtcaaagccggtctccaattccccgtcggaagaattggccgttatttgaagaaaggaaggtacgctcagcgtgtcggtaccggtgctcccgtatacttggctgcagttctcgaatacctagctgccgangtgct

SEQ ID NO: 235053 - DNA, 397 bp, Glycine max
  unsure (1)..(397): unsure at all n locations
ggcacaagtgagtttgttgatcgagataactagaaacagtgtgatgaaaatgaaggtccttgttttcttcgttgctacaattttggtagcatggcaatgccatgcgtacgatatgttccctctccgaatgaacactggctatggtgcccgtactccggaggtgaaatgcgcaagttggaggcttgctgtggaagcacacaacatctttggctttgagaccattcctgaagagtgcgttgaagcaacaaaggaatacatccatggcgaacaatatagatcagactccaaaacagttaaccaacaagcttacttttatgccagagacctcgaagtccatcccaaggacacatntgtgttcagtatagatggcaacgtactctctaatatttcatactac

SEQ ID NO: 235054 - DNA, 406 bp, Glycine max
gattgttggcttgtgctctgctcgtgcctctagggttatcatatctccatttccatttcctctctctcagtttccaagaatcttaagctatgggaaagtcttacccaaccgtgagcgctgattaccagaaggccgttgagaaggcgaagaagaagctcagaggcttcatcgctgagaagagatgcgctcctctaatgctccgtttggcatggcactctgctggaacttacgacgtgagctcgaagaccggtggtcccttcggaaccataaagcacccctccgaactcgctcacggcgctaacaacggtcttgacatcgctgttaggcttttggagccactcaaagcggagtttcctattttgagctacgccgatttctaccagttggctggcgttgttgccgttga

SEQ ID NO: 235055 - DNA, 374 bp, Glycine max
gacctatcaagttaatttgcgtctatattcattttggcatcgaggttgaatctcatcggagagagaaaaaccataaccatgtctggaagaggaaagggaggcaagggtctcggaaagggaggagcgaaacgacaccgtaaggttctgagggataacattcagggcataacgaagcccgtaattcgccgtctcgcgagacgtggcggcgtgaagcgtatcagtggtctcatctacgaagaaacccgcggtgttctcaagatcttcctcgagaacgtcattcgcgacgctgtcacctacactgagcacgctcgccgcaagaccgtcactgccatggacgttgtttacgccctcaagaggcaaggcaaagacctcta

SEQ ID NO: 235056 - DNA, 421 bp, Glycine max
tctgcaaaaagacaacagaaggggaggaacaagaagcgaaaatataacaaataatttgtactttcatcaaaacaaaatcccgttgtatttttctcagatggctcgaacgaagcaaacggcccgcaagtccaccggcggcaaggcgccgcggaagcagctggcgactaaggcggctcgcaagtcggctccggcgaccggcggcgtgaagaagccgcacagattcaggccgggaaccgtggcgctgcgcgagatccggaagtatcagaagagcacggagctactcatccggaagcttccgttccagcgcttggtccgcgagatcgcgcaagacttcaagaccgacctccggttccagagctccgccgtctccgcgctccaggaggccgccgaggcttacttggtcggtctcttcgaagacacg

SEQ ID NO: 235057 - DNA, 398 bp, Glycine max
  unsure (1)..(398): unsure at all n locations
gcacaagtttgttgagatagctagaagcaataagatgaaaatgaaagtgcttgttttgtttgttgctacagttttggtagcatatgaatgccatggctcagactaccagaagttccctctccaaatgaaaactgggtttggtgggcaatacagcaatgaggtggcatgtgccagttggaggcttggcgtggaagcaaacaacgtagtcaagtggcaaactgttcctgcagcttgcggagagtacatagctgactacgttctaggagaccaatatagatcagattccaaaacagttaaccaacaagcttatttctatgctaaatccctcaaactcaccaacanagatgttcttgtcttggacgttgacgacactactctctctaatcctcagtattttg

SEQ ID NO: 235058 - DNA, 390 bp, Glycine max
  unsure (1)..(390): unsure at all n locations
ggcacaattttgttgaaatacctaaaagcaataagataaaaatgaaagtgcttgttttgtttgttgctacagttttggtagcatatgaatgccatggctcagactaccagaagttccctctccaaatgaaaactgggtttggtgggcaatacagcaatgaggtggcatgtgccagttggaggcttggcgtggaagcaaacaacgtagtcaagtggcaaactgttcctgcagcttgcggagagtacatagctgactacgttctangagaccaatatagatcagattccaaaacagttaaccaacaagcttatttctatgctaaatccctcaaactcaccaacaaagatgtctttgtcttggacgttgacgacactactctctctaatctcc

SEQ ID NO: 235059 - DNA, 377 bp, Glycine max
ggaacttctcacgttcatttctacacatccctagctctgtcgttccgtcgttgacgatggcgtttcgggtgcgaagccctgacctccgctctctctttcttctctctctcttgtccatcgcttccgccaatgtcttcttcgaagagcgtttcgatgacgggtgggaaaatcgatgggttaaatcagattggaaaaaagatgagaacgtggctggggagtggaaccacacctctggtcaatggaatggagacgctaatgacaaaggtattcaaaccagtgaggattacagattctatgctatttcagctgagtaccctgaattcagcaacaagggtaagacactagtctttcaattttctgttaagcacgaacagaag

SEQ ID NO: 235060 - DNA, 328 bp, Glycine max
ggcacaagtgagtttgttgatcgagataactagaaacagtgtgatgaaaatgaaggtccttgttttcttcgttgctacaattttggtagcatggcaatgccatgcgtacgatatgttccctctccgaatgaacactggctatggtgcccgtactccggaggtgaaatgcgcaagttggaggcttgctgtggaagcacacaacatctttggctttgagaccattcctgaagagtgcgttgaagcaacaaaggaatacatccatggcgaacaatatagatcagactccagaacagttaaccaacaagcttacttttatgccagagacctc

SEQ ID NO: 235061 - DNA, 295 bp, Glycine max
gacccacacgtcaagctgggagaacaacagaagggggaacctttgcattcaattcattcaaaattcagcaagtgctttttggaagcatagaccgagatacttcgagatggcccgtataaagcagggtgggcgtaagtcaactggaggaaaagctctcacgaagcatcttgcaacaaatgctgcacgtaagtcggcagcaataatcggtggtgtgatgaaccctcatcatgattgccgtggaagtgtagaacatcctaacattaagaactattccagtagcactgatctcctaatc

SEQ ID NO: 235062 - DNA, 407 bp, Glycine max
gaagatggttgaagaagtacgcaggcaattcaacaccattccagggttgatggagggaactgctaagcctgactatgccacatgtgttaagatctccactgatgcttccattaaagaaatgattccacctggtgctcttgtcatgcttacaccgcttgttgttggaatcctttttggtgttgaaacactttctggtgtcctagctggatctttggtgtctggtgtacagattgctatttctgcatccaacaccggtggtgcttgggataatgccaagaagtacattgaggctggtgcttctgagcatgcaagaagccttggtccaaaagggtcagattgtcacaatgcagctgttattggtgacaccattggagaccctctaaaggatacatctggaccttcactta

SEQ ID NO: 235063 - DNA, 388 bp, Glycine max
  unsure (1)..(388): unsure at all n locations
gagagaaccaaagttccaattttttggtttggggatagatagagtgatacacatcacattttctcaaagtaatttattaattaataaataaatggcggcggcggcggcagtgacggtgctactcccacctaggattccgancgccaccaacgttacccgctgctctgctttgccttctctgcctcctcgcggcaccaacacgaaaaacactttgctcttatcctccctaaacacttcccagtgtnccgaagatcttctctgcttcagaacatagcttctccagaggaatcatcctcagtagatgccaatgaggtgttcacagaatttaaaggaaaattgggatgctcttgaaaacaagtccaaagtacttttttatggtggtgggggc

SEQ ID NO: 235064 - DNA, 385 bp, Glycine max
  unsure (1)..(385): unsure at all n locations
ggctgtgagtgagacaccgatagatagagagcgcggcataacctaaacctatctttcttctctctctgtgtgtgcgcttcaacgggaaccagaagcagccatggccactgcaaggactgtgaaggatgtttcacctcatgagttcgttaaggcgtactcctctcacctcaagcgatccggcaagatggagctgccagagtggactgatattgtgaaaactgcaagatttaaggagttggctccttatgatcctgactggtactatgtcagagctgcttccatggcaagaaagatctacttgagaggaggacttggtgttggtgcctttcaaangatttatggtgggagcaagaggaatggtagtcgccctcctcatttttgcaag

SEQ ID NO: 235065 - DNA, 394 bp, Glycine max
cagggaaggtgcaagagtttgttgtgagctataagctagtttatcgtgaggagaatatgacgttgtttgctctctttgttgctgcagtagttttggtaacatggccatgccatggtgcaggttaccaaaggttccctctccgactgaaaactggctatggtgagcgttcttcggtggtaaaatgcgcaagttttaagcttgctgtggaagcacacaacatccgagcctttaaaaccattcctgaagagtgcgttgatccaacacaggactacattaatggcgaacactttagatcagactctaaaacagttaaccagcaagctttcttttatgctactgaacgctaagtccatcacaacgacatatttatattcggcatagataatatcgtact

SEQ ID NO: 235066 - DNA, 237 bp, Glycine max
tccaaaagggtgcactcgtcactctgctgctcgcgatatctagtaacagtgtgatgcgaatgaaaggccttgttctcatcgttgatactcttttggtagcatggcaatgccatgcgtacgacatgtaccctcccccgatgaatgctggctgaagtgcccgtacaccagaggtgacatgcgcaagttggaagcgtgctgttgtagcacacaacatctttggctttgagaccattcctg

SEQ ID NO: 235067 - DNA, 394 bp, Glycine max
ggcacaagtgagtttgttgatcgagataactagaaacagtgtgatgaaaatgaaggtccttgttttcttcgttgctacaattttggtagcatggcaatgccatgcgtacgatatgttccctctccgaatgaacactggctatggtgcccgtactccggaggtgaaatgcgcaagttggaggcttgctgtggaagcacacaacatctttggctttgagaccattcctgaagagtgcgttgaagcaacaaaggaatacatccatggcgaacaatatagatcagactccaaaacagttaaccaacaagcttacttttatgccagagacctcgaagtccatcccaaggacacatttgtgttcagtatagatggcaccgtactctctaatattccatac

SEQ ID NO: 235068 - DNA, 358 bp, Glycine max
  unsure (1)..(358): unsure at all n locations
ggccgaaaaccctaacaacacaggcgcagagcgtgatccattgacgaagatggtgcagcgtctcacctaccgcaagaggcacagctatgccaccaaatccaaccaacacagggtcgtcaaaacccctggtgggaagctcgtttatcagaccaccaagaagagggccagcgggcccaagtgccccgtcactggcaagaggattcaggggattccacacttgaggcctgcagagtacaagagatcaaggttacccagaaaccgtaagactgtcaaccgtgcatatggcggagttttgtctggaagtgctgtcanggagaggattatccgagctttcttagatgaagagcacaagattgtg

SEQ ID NO: 235069 - DNA, 390 bp, Glycine max
  unsure (1)..(390): unsure at all n locations
ggagcaaaaccctaatccctatttttcttcctcagtagtgtcatttacgcttctcttctctgcagcaactatgcctaaccctaaggtcttcttcgacatgaccatcggcggtcaatctgctggccgcatcgtgatggagctctacgccgacgtcactccccgcaccgccgagaacttccgcgcgctttgcaccggcgagaagggcgtatggcggagcggcaagcccctccactacaagggctcgtccttccaccgcgtgatcccgagcttcatgtgtcagggtggcgacttcaccgccggaaacggaaccggcggcgagtcgatttatggcgccaagttcgccgacgagaacttcgtgaagaagcacaccggtcncggcatcctctccat

SEQ ID NO: 235070 - DNA, 341 bp, Glycine max
ggggcacaagtgcaatttgcttgatcgtagataactacaatacagtgtgattaaaatgcacgtccctgcattcatcattgctacaactttggtcgcatggcactgccatacctacgataagttccctctccgaatgaacactggctacggtgcccgtattccggaggtgaaatgcgcaaattggaggcttgctgtgaaagcacacaacatctttggctttgagaccattcctgaagagtgcattgaatcatcatacgaatacatccatggcgaccaatatagataggctccaacataattaaccaacaagcttacttttatgccacagacctcgaagtcca

SEQ ID NO: 235071 - DNA, 411 bp, Glycine max
  unsure (1)..(411): unsure at all n locations
aacgacagaaggggacagcatatatatcaataatctattttatactatacctacattttgataattttctttgtagttgatagccatggctacccgtggaaagcttgaggttgacattgatctcaagtccaacgcagacaagtactggcaaacccttaggaattctactgaaatattccctaaggccttcccacatgattacaaaagcattgaggttcttgagggtgatggcaagtctcctggttctatccgccacataagttatggtgaaggttcaccacttgtgaaatcatcctttgagaagattgacgctgttgatgangaaaagaaggtantgtcgtacactatcattgatggggaactcctccagcactacaaaacattcaagggagacatttcagtgactccaat

SEQ ID NO: 235072 - DNA, 358 bp, Glycine max
gatcgaagcaaaaaatgaaaacccaaagtgcttctctcctctgtctttttctctctcttgctatccttttggctagtggcactgctgcaggtgcaactccaagaaacgcagtgccaagccaccatgtttcaacattcaacagaagcctttttccttccacttttcactttggaattggttcatctgcttaccaggcagaacgagcagcatgtgtagatgggagaggaccaagcatatgggacacctacactatacagcatactgaaaacatttgggatcattacaccggtgacatgggaactgatttttatcatcgatacaagggtgacataaaaatagcgaaagaaaatgggctgga

SEQ ID NO: 235073 - DNA, 399 bp, Glycine max
  unsure (1)..(399): unsure at all n locations
gattgttggcttgtgctctgctcgtgcctctagggttatcataactccatttccatttcctctctctcagtttccaagaatctgaagctatgggaaagtcttacccaaccgtgagcgctgattaccagaaggccgttgagaaggcgaagaagaagctcagaggcttcatcgctgagaagagatgcgctcctctaatgctccgtttggcatggcactctgctggaacttacgacgtgagctcgaagaccggtggtcncttcggaaccataaagcacccctccgaactcgctcacggcgctaacaacggtcttgacatcgctgttaggcttttggagccactcaaagcggagtttcctattttgagctacgccgatttctaccagttggctggcgttgttg

SEQ ID NO: 235074 - DNA, 385 bp, Glycine max
ggccattgttgttgctattatcatccgcagctgcttttattcgcaccgcaaacagtgagccatggccgtcggaaagaacaagcgcatctccaaggggaagaagggtggcaagaagaaggcagctgatccctttgccaagaaggattggtatgacattaaggctccttctgtttttcaagtgaaaaatgttggcaaaaccctcgcctctcgtactcagggtaccaagattgcttctgaaggactcaagcatagagtgtttgaggtctccttggctgatcttcaaggggatgaggatcatgcattcaagaagattaggttgagagctgaagatgtgcaagggaagaatgttctgacaaatttctggggaatggatttcacaacagac

SEQ ID NO: 235075 - DNA, 396 bp, Glycine max
gaaggtgcaagagtttgttgtgagctataagctagtttatcgtgaggagaatatgaagttgtttgttttctttgttgctgcagtagttttggtagcatggccatgccatggcgcaggctaccaaaggttccctctccgaatgaaaactggctatggtgagcgttcttcggaggtaaaatgcgcaagttttaggcttgctgtggaagcacacaacatccgagcctttaaaaccattcctgaagagtgcgttgaaccaacagaggactacattaatggcgaacaatttagatcagactctaaaacagttaaccaacaagctttcttttatgctagtgaacgcgaagtccatcacaacgacatatttatattcggcatagataacaccgtactctctaa

SEQ ID NO: 235076 - DNA, 420 bp, Glycine max
  unsure (1)..(420): unsure at all n locations
ggtcaggaattcccgggccgacccacgcgtccagacgacagaagggggaaccgaaacgaacctcaacaacgctgagcgcagaaaggggaaaaggggattagggtttaggaagcagcgacaacaatggatttcacagtggagaagaaggaatcagagaacaacgccgaaaatgctcacccaacaacgttagattcttcttctcaattggcatcggcacttgattccaacaacaaagaaatcgaagaacgacaagctcgtgaactcaaagccggacttcaccccctaaagcacaagtttgtcttctggtacactcgtcgaacacctgnagttcgaaatcaaacatcatatgaggacaacataaagaaaaattgttgatttagtacggttgaaggattttgggtctgctactgccatcttgct

SEQ ID NO: 235077 - DNA, 392 bp, Glycine max
  unsure (1)..(392): unsure at all n locations
ggcattatatttgagttcacacaaatcagagccatggacacctccaacttctctattgttctctccgtctctctaaccttctttttggtgctacttaccaaggcacactcgaccgataccgtttctttcaccttcaccacgttcatcccagtccaaccaaacattatgctccaaaaagatgctagtatttcatcctctggggtgttacaactcactaaagttggcagcaacggcgtgcccatctcgggatctctcggtcatgccctttacgctgctccaatccagatttgggacagcgaaaccggcattgtanccagctgggctacatcctttatattcaacattttcgcactcaacacatcacactcatctgacgggcttgccttcttctt

SEQ ID NO: 235078 - DNA, 391 bp, Glycine max
ggtcacttaatccaaatacaaaagctatcctcacaccccataaaatcacaatgacaacaaaaacaacttctctcctcctccttcatgtaattctcctcgccacggcggaagccgccgccgccggcggccactggaaggtcctccagcaaagcatcggcattgtggccatgcacatgcagctcctctacaccgacacggtggtgatcttcgaccgcaccgacttcggcctctccaacctctccctccctgacggcctctgccgccacgacgccgccgagatggccgtgaaaaccgactgcaccgcccactccctcgaatacgacgtctcctccaacaccttccgccccctcttcctccagaccaatgtctggtgctcctccgcctccgttgc

SEQ ID NO: 235079 - DNA, 358 bp, Glycine max
ggagcaaaaccctaatccctatttttcttcctcagtagtgtcatttacgcttctcttctctgcagcaactatgcctaaccctaaggtcttcttcgacatgaccatcggcggtcaatctgctgggcgcatcgtgatggagctctacgccgacgtcactccccgcaccgccgagaacttccgcgcgctttgcaccggcgagaagggcgtatggcggagcggcaagcccctccactacaagggctcgtccttccaacgcgtgatcccgagtttcatgtgtcagggtggcgacttcaccgccggaaacggaaccggcggcgagtcgatttatggcgccaagttcgccgacgagaacttcgtg

SEQ ID NO: 235080 - DNA, 392 bp, Glycine max
ggcacttcaattgcaatcaaattagttcattctctttgcgcagttccctacctctcctttcaagatgcagatcttcgtcaagaccctcaccggaaagagcatcacccttgaggtggaaagctctgacaccatcgacaacgtcaaggccaagatccaggacaaggaaggaattcccccggatcagcaacgtctcatcttcgccggaaagcagctcgaggacggccgtaccctcgccgactacaacatccagaaggagtcaacccttcaccttgtccttcgtctccgtggtggcatgcagatcatcgtcaagactctcactggcaaaaccataaccctagaggtcgaaagctctgacaccattgacaacgtcaaggccaagatccaggacaagg

SEQ ID NO: 235081 - DNA, 381 bp, Glycine max
  unsure (1)..(381): unsure at all n locations
gactcatccttcattaccaagcatatctcatttgaatacattccttgtagtttatactgaaagatgggtttgaagatggcgttactgatcctaggcctttccctcatgctccttttggtctcctctgaggtggcatccacgaatacaaaagaggaggcaaatggagtggatgatgccaaatatcccggtggaagctatggagggggttacccaggtcatggcggtggcggttatcctggccatggcggtggcggttatcctggccatggcggtggtggtggctatcctggtcatggtggtggccaccctggtcatggtggcggctaccctggccgtggtggtggatactgtangcatggctgttgcngtggccggacatac

SEQ ID NO: 235082 - DNA, 374 bp, Glycine max
ggaaggcagtaaaatgggctggctgtaaggcccaatttgaatagaaggaacagtcgcggagaggttgcagtcggcgacgaaggaagcggggttaactctccggaccagaaggaacaagaaagatcatctttaatgatttgttactagtgagaagacctcaaagctcttataccagacatttgcgagttatgaacaatattttgtctttgggaatatgcatggattctcccctgttgatggttttgtggagataagcaattgcttggcagaagtgattaaatatgtgggtaatgaatcgtctactggtctcttctttatccaacatcacacccaaaacgcagtccccaatgtcatcaaacttaagaacaacatta

SEQ ID NO: 235083 - DNA, 390 bp, Glycine max
ggaagcagcggaaacaaacatgtcgtggtgttactgcgctaagcctatgactttgcagttgccgttgcaatcaagagcagcatcatcgttccattcccacgttggaggagtaacagtaacattctcaacactgtctcttcgaccctcttctcctcttgttctgacccataacctccacttccaacccaaactcaaacgcgcttccacaaccattcgctgctcctctgcgttgactcctcaattgaagtctaccttggatcaagttattgcttcaaataaagtagttgtgtttatgaagggaactaaagactttccacagtgtggattctcaaacacagtggtgcaaatattgaagtccctaaatgtgcctttttgaaccataaatgtgct

SEQ ID NO: 235084 - DNA, 356 bp, Glycine max
gaccacattccaaaacacagacacatacattgtagtatcacttttgtctcggaatttgttcttttgagttatggcaagcttaaaggttgcatgtgtggttttgatgtgcatggctgtgatgagtgcaccaatgatggtgcaagccgtgtcatgcaatgatgtttctgtgaacctagcaccgtgcctatcttacctgatgcagggtggagatgttccagaatcgtgctgtagcggagtgaggaacattctgggttctgccagcaccacctttgacaaacaaaccgtgtgcaaatgtcttcagcaagctgctaataactatggcatcaacgacgaatacgctcaggcactccccgccc

SEQ ID NO: 235085 - DNA, 321 bp, Glycine max
ggcacaagtgagtttgttgatcgagataactagaaacagtgtgatgaaaatgaaggtccttgttttcttcgttgctagggttttggtagcatggcaatgccatgcgtacgatatgttccctctccgaatgaacactggctatggtgcccgtactccggaggtgaaatgcgcaagttggaggcttgctgtggaagcacacaacatctttggctttgagaccattcctgaagagtgcgttgaagcaacagaggaatacatccatggcgaacaatatagatcagactccagatcagttgagcaacaggcttacttttatgccag

SEQ ID NO: 235086 - DNA, 359 bp, Glycine max
gacactaaacaagttaaaagaagagcatcactgaactaacaaagcaaccctatgtcgaaggtggtttgtgtcaccggagccagcggcgccatcggatcatgggtggtcctactcctcctccagcgtggttacaccgtccatgccaccgtccaagatatcaaggatgaaaatgagacgaaacatttggaggaaatggaaggagcaaagagtcatctccatttttttgaaatggatcttcttgacatcgactccattgccgctgccataaagggttgttccggcgtaatccaccttgcatgtcctaacatcattggtcaagtcgaagatcccgagaaacagatattggaaccggcgataaa

SEQ ID NO: 235087 - DNA, 390 bp, Glycine max
ggagcgaagaagatattagggtttttgagtgcggtgcggcgatcctagcactctcttctgcagctttcgccgacagcttcattcaccatggctgagcaaaccgagaaggcttttttgaaacaaccaaaagtgtttctcagctcgaagaaaactgggaagggaaagatacccggaaagggtgggaaccgcttttggaaatccattgggcttggatttaagactcccagggaagccatcgaaggaacctacattgacaagaagtgccccttcactggcaatgtttccatccgtggccgtatcttggctggaacatgtcacagtgctaagatgaacaggactattattgttaggaggaattatctccattttatcaagaagtaccagaggtac

SEQ ID NO: 235088 - DNA, 359 bp, Glycine max
ggagcgaagaagatattagggtttttgagtgcggtgcggcgatcctagcactctcttctgcagctttcgccgacagcgtcattgggcatggatgagcaaaccgagaaggcttttttgaaacaaccaaaagtgtttctcagctcgacgaaaactgggaagggaaagatacccggaaagggtgggaaccgcttttggaaatccattgggcctggatttaagactcccagggaagccatctaaggaacctacattgacaacgatcatgccccttcactgggaatgtttccatccgtggccgtatcctggctggaacatgtcacagtcctgacatgaacaggactaatagtgttaggaggaat

SEQ ID NO: 235089 - DNA, 387 bp, Glycine max
ggcacaagtttgttgagatagctagaagcaataagatgaaaatgaaagtgcttgttttgtttgttgctacagttttggtagcatatgaatgccatggctcagactaccagaagttccctctccaaatgaaaactgggtttggtgggcaatacagcaatgaggtggcatgtgccagttggaggcttggcgtggaagcaaacaacgtagtcaagtggcaaactgttcctgcagcttgcggagagtacatagctgactacgttctaggagaccaatatagatcagattccaaaacagttaaccaacaagcttatttctatgctaaatccctcaaactcaccaacaaagatgtctttgtcctggacgttgacgacactactctctctaatc

SEQ ID NO: 235090 - DNA, 346 bp, Glycine max
  unsure (1)..(346): unsure at all n locations
ggcacaagtttgttgagatagctagaagcaataagatgaaaatgaaagtgcttgttttgtttgttgctacagttttggtagcatatgaatgccatggctcagactaccagaagttccctctccaaatgaaaactgggtttggtgggcaatacagcaatgaggtggcatgtgccagttggaggcttggcgtggaagcaaacaacgtagtcaagtggcaaactgttcctgcagcttgcggagagtacatagctgactacgttctangagaccaatatagatcagattccaaaacagttaaccaacaagcttatttctatgctaaatccctcaaactcaccaacaaaga

SEQ ID NO: 235091 - DNA, 397 bp, Glycine max
caacaaaagggggatccacaattttgttgaaatacctaaaattaatgaaatgaaaatgaaattgcttgttttgtttgttgctacagttttggtagcatatgaatgccatggctcagactaccagaagttccctctccaaatgaaaactgggtttggtgggcaatacagcaatgaggtggcatgtgccagttggaggcttggcgtggaagcaaacaacgtagtcaagtggcaaactgttcctgcagcttgcggagagtacatagctgactacgttctaggagaccaatatagatcagattccaaaacagttaaccaacaagcttatttctatgctaaatccctcaaactcaccaacaaagatgtctttgtcttggacgttgacgacactactctctct

SEQ ID NO: 235092 - DNA, 342 bp, Glycine max
gcagccaaagaaaagaaaatcctcaattttctgagcagccaaacactctctctctgtctctcgaaaattctcagtttgcagagaggatcggaatcatgtcgtggcaagcgtatgtcgacgatcaccttctgtgtgacatcgaaggtaaccacctcactcacgctgctatcatcggccaagacggcagcgtttgggctcagagtaccgacttccctcagttcaaacctgaggagataactgccatcatgaatgactttaatgagcctggatcacttgctccaactggattgtatctcggtggcaccaaatatatggtcatccaaggtgaacccggtgctgtca

SEQ ID NO: 235093 - DNA, 446 bp, Glycine max
ttcccgggccgacccacacgtccatacgagacgacagaagggattgataagagtgtaaatggtgaacatcaagcagaagaaaatagtaatgacctcatatgggctgatccagtttcatgctgttatgcactgtatgcaaagttgaaccccgatacagttctcttgcagcaatcacctttagcccttgcaaaagctttaaagaactcggtggagttggatgggttaaaaaaggcacatattcgggatggtgcagcaattgtgcaataacctggccgggtggattagaagattcaaggtaattaaggagcttccgggtactttttggagaaaaggattctgtgaaaagggagatccatttgcaactctttaaaattgactgaggtgactgtaagtgaccagcttgaaggttttcgagcatcaaaagaggtcctaaagggtcacattgc

SEQ ID NO: 235094 - DNA, 393 bp, Glycine max
gactctgcagcagcacctttaaacgccgaaggttcatccaatctccgaaggccttcaccggattgcaaccatgtcgaggagaaaggttagagagccaaaggaggaaaacgtgactctgggcccagctgttagagatggtgaacatgtttttggagtcgctcgcatctttgcctccttcaatgacaccttcattcatgtcactgatctgtctgggagggaaacacttgtccgcatcactggcgggatgaaggttaaagctgacagagatgaatcatctccatatgctgctatgcttgctgcgcaagatgttgctgctaaatgcaaggaactgggcataactgctcttcatatcaagctccgtgccacaggtggaaacaagacaaaaacaccagg

SEQ ID NO: 235095 - DNA, 383 bp, Glycine max
gaaggtgcaagagtttgttgtgagctataagctagtttatcgtgaggagaatatgaagttgtttgttttctttgttgctgcagtagttttggtagcatggccatgccatggcgcaggctaccaaaggttccctctccgaatgaaaactggctatggtgagcgttcttcggaggtaaaatgcgcaagttttaggcttgctgtggaagcacacaacatccgagcctttaaaaccattcctgaagagtgcgttgaaccaacaaaggactacattaatggcgaacaatttagatcagactctaaaacagttaaccaacaagctttcttttatgctagtgaacgcgaagttcatcacaacgacatatttatattcggcatagataaca

SEQ ID NO: 235096 - DNA, 395 bp, Glycine max
gattcccaaaatttctcattctccctttcctctccgaaccctcgatcactctcacgcgctcctatattcgctcctccagcgtcgctctctcgaacaaccacaacaccatcttcatcacatggcaaacgcagcatctggtatggcagtccatgatgactgcaagttgaggtttttggagctgaaggcaaaaaggacacaccgtttcatagtttttaagattgaggagcagcagaagcaggtcattgtggagaagcttggtgagcctgcccagggctatgaagatttcactgccagccttcctgctgacgagtgccgttatgctgtttatgattttgagtatctgactgaagggaatgtccctaaaagcagaatttttttcattgcgtggtcccctg

SEQ ID NO: 235097 - DNA, 392 bp, Glycine max
gacattgactgaagccagcgagtgagcgagcgagcgaggtagggttttcgttgttcccccgtctttgaattcagttcgcgacgatggggtccatccccgatccaggcgagttgagcgagttgactcagccgagcttcgacgagttccagcgccaaacttccctcatgaccagctgcaccctcctctggaaggagctctccgaccacttctcctccctcgagcaagacctcaaccacaaatccgaagccctcaaacgcaagattcgcaccctcgacaacactacttccgactccctccgcctcctcgatcgccgcgaaacctccctcgacgccacgctccagatcgccctccgcacgctcgacacgcgccgcaccgctgccctctccgccctc

SEQ ID NO: 235098 - DNA, 387 bp, Glycine max
  unsure (1)..(387): unsure at all n locations
ggcacaagtgagtttgttgatcgagataactagaaacagtgtgatgaaaatgaaggtccttgttttcttcgttgctacaattttggtagcatggcaatgccatgcgtacgatatgttccctctccgaatgaacactggctatggtgcccgtactccggaggtgaaatgcgcaagttggaggcttgctgtggaagcacacaacatctttggctttgagaccattcctgaagagtgcgttgaagcaacaaaggaatacatccatggcgaacaatatagatcagactccaaaacagttaaccaacaagcttacttttatgccagagacctcgaagtccatcncaaggacacatttgtgttcagtatagatggcaccgtactctctaatat

SEQ ID NO: 235099 - DNA, 358 bp, Glycine max
ggcacaagtgagtttgttgatcgagataactagaaacagtgtgatgaaaatgaaggtccttgttttcttcgttgctacaattttggtagcatggcaatgccatgcgtacgatatgttccctctccgaatgaacactggctatggtgcccgtactccggaggtgaaatgcgcaagttggaggcttgctgtggaagcacacagcatctttggctttgagaccattcctgaagagtgcgttgaagcaacaaatgaatacatccatggcgaacaatatagatcagactccacaacagttaaccaacaagcttacttttatgccagacacctcgaagtccatcccaaggacacatttgtgttc

SEQ ID NO: 235100 - DNA, 382 bp, Glycine max
  unsure (1)..(382): unsure at all n locations
ggttctagtgtgtgattgtttgttgttgtaactcgttcttcttcttttgttgttctgtgtttgtgtttgttttttctctcacctgaaaatgtcttgctgcggtggtaactgtggttgcggaagctcctgcaagtgcggcaacggctgcggaggctgcaagatgtacccagacttgagctacactgagtcaaccaccaccgagaccttggtcatgggagtggcacctgttaaggctcaatttgagggtgctgaaatgggtgtgcccgctgagaacgatggctgcaaatgtggaccaaactgctcctgcaacccctgcacttgcaagtgangtgttgggagagcaagcttcaagcagagatagcccttaattaggaataatgat

SEQ ID NO: 235101 - DNA, 385 bp, Glycine max
ggaacttctcacgttcatttctacacatccctagctctgtcgttccgtcgttgacgatggcgtttcgggtgcgaagccctgacctccgctctctctttcttctctctctcttgtccatcgcttccgccaatgtcttcttcgaagagcgtttcgatgacgggtgggaaaatcgatgggttaaatcagattggaaaaaagatgagaacgtggctggggagtggaaccacacctctggtcaatggaatggagacgctaatgacaaaggtattcaaaccagtgaggattacagattctatgctatttcagctgagtaccctgaattcagcaacaagggtaagacactagtctttcaattttctgttaagcacgaacagaagcttgactg

SEQ ID NO: 235102 - DNA, 402 bp, Glycine max
ggcacaattgattttgttgatcgagataactagaaacagtgtgatgaaaatgaaggtccttgttttcttcgttgctacaattttggtagcatggcaatgccatgcgtacgatatgttccctctccgaatgaacactggctatggtgcccgtactccggaggtgaaatgcgcaagttggaggcttgctgtggaagcacacaacatctttggctttgagaccattcctgaagagtgcgttgaagcaacaaaggaatacatccatggcgaacaatatagatcagactccaaaacagttaaccaacaagcttacttttatgccagagacctcgaagtccatcccaaggacacatttgtgttcagtatagatggcaacgtactctctaatattccatactacaaaaa

SEQ ID NO: 235103 - DNA, 290 bp, Glycine max
ggttcagtcgatgattagccagatggaatatcagtattaagtttccacatcatcgtcatcacactgacaggtaacactacacccttccaggtccagagcatagataccaccgacacagtgactgacaagattcaagtgacggaatgcattcctccggatcagcagcgtttgattttcgccggaaagcagcttgaagatggaacgaccctgaccgattagatcatccagacagagtcaacacttcatctcgtgctcacgcatcatggtggcatcatatgaacttctctcat

SEQ ID NO: 235104 - DNA, 400 bp, Glycine max
gattgggagagaggatgggtgcagaagcaaatggcggcgagaagcaattgaaatttctgatctacggtcgcagcggttggattggtggtctactgggtaagctctgcgaagagcgcgggatccaatatgagtacggcaccggcagattggagaaccgctcgtcgttggaggcggacatagcggcagtgaagcccagccacgtgttcaacgccgcgggtgtcacgggtagacccaatgtggactggtgcgaatctcacaaagttgaaaccatccgaaccaacgtcgtcggcactctcaccctcgccgacgtctgccatcataaaggcctcatcctcatcaactacgccaccggctgcatcttcgagtacgattcttcccacactctcggatccggcatcgc

SEQ ID NO: 235105 - DNA, 397 bp, Glycine max
gaaggtgcaagagtttgttgtgagctataagctagtttatcgtgaggagaatatgaagttgtttgttttctttgttgctgcagtagttttggtagcatggccatgccatggcgcaggctaccaaaggttccctctccgaatgaaaactggctatggtgagcgttcttcggaggtaaaatgcgcaagttttaggcttgctgtggaagcacacaacatccgagcctttaaaaccattcctgaagagtgcgttgaaccaacaaaggactacattaatggcgaacaatttagatcagactctaaaacagttaaccaacaagctttcttttatgctagtgaacgcgaagtcgatcacaacgacatatttatattcggcatagataacaccgtactctctaat

SEQ ID NO: 235106 - DNA, 389 bp, Glycine max
gatcctttgtattctattcttcaagattcaggtactgcgtttcggaagcagacacagatggctcgtacgaagcaaaccgctcgtaagtccacaggaggaaaggctcctaggaagcagcttgcaaccaaggctgcacgtaagtctgcaccaactactggtggtgtgaagaagccccaccgttatcgacctggtaccgttgctcttcgtgagattaggaagtaccagaagagtaccgagcttttgatccggaagctccccttccagaggctggttcgtgaaattgctcaggacttcaagactgatctgcgtttccagagccacgccgtgcttgcattgcaagaagctgctgaggcataccttgttgggctctttgaggacactaacctgtg

SEQ ID NO: 235107 - DNA, 380 bp, Glycine max
  unsure (1)..(380): unsure at all n locations
ggcacaagtgagtttgttgatcgagataactagaaacagtgtgatgaaaatgaacgtccttgttttcttcgttgctacaattttggtagcatggcaatgccatgcgtacgatatgttccctctccgaatgaacactggctatggtgcccgtactccggaggtgaaatgcgcaagttggaggcttgctgtggaagcacacaacatctttggctttgagaccattcctgaagagtgcgttgaagcaacaaaggaatacatccatggcgaacaatatagatcagactccaaaacagttaaccaacaagcttacttttacgccagagacctcgaagtcnatcccaaggacacatttgtgttcagtatagatggcaccgtactct

SEQ ID NO: 235108 - DNA, 391 bp, Glycine max
ggtaccaagatggcttcacttccatgtctcctcttttccatccatttcattgttatcatgtcaagttccttacccacaaatagtgatgaagtgtttgcaaaacagtctccaatgtctccatccacaaaacccgtggaaaaaatcacccaactacacttctatttccataacaacgtaacggagaaaaacccaactgctatgagaattgttgggcctcccaagggcttcattactcagtttgggactgttgtgatgatggatgaccctctaactgaaggaccaagtccaagttcaaagcttgttggaagatctcagtgaatctatgctttggcttctcaacatgagtttgggtcgttgctcatggtgacgaattttttcttcactgaaggta

SEQ ID NO: 235109 - DNA, 367 bp, Glycine max
gaaggtgcaagagtttgttgtgagctataagctagtttatcgtgaggagaatatgaagttgtttgttttctttgttgctgcagtagttttggtagcatggccatgccatggcgcaggctaccaaaggttccctctccgaatgaaaactggctatggtgagcgttcttcggaggtaaaatgcgcaagttttaggcttgctgtggaagcacacaacatccgagcctttaaaaccattcctgaagagtgcgttgaaccaacaaaggactacattaatggcgaacaatttagatcagactctaaaacagttaaccaacaagctttcttttatgctagtgaacgcgaagtccatcacaacgacatatttata

SEQ ID NO: 235110 - DNA, 399 bp, Glycine max; identical to SEQ ID NO: 234834

SEQ ID NO: 235111 - DNA, 291 bp, Glycine max
gaaaagttattttgttgatccaaataactataaacagtgtgatgaaattcatggtccgtgttttcctcgatgctacaaatttggtaacatggcaatgtcatgcgtacaatattttcctcccccgattgaacactggttatggtgcccgtacaccggaagtgaaatgcgtcaaatttgaggcttgctgtgtaagcacacaacatctttggctttgagaccattcctgaaaacttcgttgaagcaacaaacgaatacatctatggcgaacaatatatatctgactctaaaaca

SEQ ID NO: 235112 - DNA, 393 bp, Glycine max
ggtgttctattatcttcaaaatgacaaaatccttaaaaaaaagaaaactcagcattgacttaagctaccgcaccattagttcttcttggtctgaaccattaaactagactcacacgcgcacccatcaccgtctgatctcgatcgcacggacaatggcgtaccgcagcgccatcgtgcgcagagcccaagaggccagccaccgcgacacatggcgagccgctctctccgaattcatctccacactcatcttcgtcttcgccggctccggctcctccgtggccgtcaacaagctcaccgtcgacaagccctccgccctcgtcgtcgccggcgtcgcacacgccttcgccctattcgtcgccgtctctgtaagcactaacatctcaggcggccacg

SEQ ID NO: 235113 - DNA, 384 bp, Glycine max
ggatgcacaagtttgttgagatagctagaagcaataagatgaaaatgaaagtgcttgttttgtttgttgctacagttttggtagcatatgaatgccatggctcagactaccagaagttccctctccaaatgaaaactgggtttggtgggcaatacagcaatgaggtggcatgtgccagttggaggcttggcgtggaagcaaacaacgtagtcaagtggcaaactgttcctgcagcttgcggagagtacatagctgactacgttctaggagaccaatatagatcagattccaaaacagttaaccaacaagcttatttctatgctaaatccctcaaactcaccaacaaagatgtctttgtcttggacgttgacgacactactctct

SEQ ID NO: 235114 - DNA, 415 bp, Glycine max
acccacgcgtccgagacgacagaagggggtttctaaaacactatcccttttactgtttattgacaaagagaaacaatcggaggatctgttctgttccataagatggctggacttttaggatataggagccttccacctaaggcaaagaatctggtagttgctgggggtttgacagcttttgtctttggtgcatacttctacaccatgagggctgttggaggcactgatgaactgcaggtagcaattgataagtttgaagctgacaagagcaagaatgagggtgatgccaacatgccatcaaaggtctaaagcttgtacaataaagcaatactttgggtgtattcactgttttggtttgggatcaagctttttacttagtatgagaatgttctaaaaggaatgatattgaatctag

SEQ ID NO: 235115 - DNA, 339 bp, Glycine max
ggagcgaagaagatattagggtttttgagtgcggtgcggcgatcctagcactctcttctgcagctttcgccgacagcttcattcaccatggctgagcaaaccgagaaggcttttttgaaacaaccaaaagtgtttctcagctcgaagaaaactgggaagggaaagagacccggaaagggtgggaaccgcttttggaaatccattgggcttggatttaagactcccaggggagccatcgaaggaacctacattgacaagaagtgccccttcactggcaatgtttccatccgtggccgtatcttggctggaacatgtcacagtgctaagatgaacaggact

SEQ ID NO: 235116 - DNA, 391 bp, Glycine max
  unsure (1)..(391): unsure at all n locations
caaaaaaacaacagaagggggaaaaattttgttgaaatacctaaaaccattaaaatgaaattgaaattgcttgttttgtttgttgctacagtttttggtagcatatgaatgccatggctcagactaccagaagttccctctccaaatgaaaactgggtttggtgggcaatacagcaatgaggtggcatgtgccagttggaggcttggcgtggaagcaaacaacgtagtcaagtggcaaactgttcctgcagcttgcggagagtacatagctgactacgttcangagacaatataatcaatcaaaacattacaaaagctattcatgcaaatccccaactcacagcanagatgtctttgtcttggacgttgacgacactactctctctaatct

SEQ ID NO: 235117 - DNA, 386 bp, Glycine max
  unsure (1)..(386): unsure at all n locations
ggcacaagtgagtttgttgatcgagataactagaaacagtgtgatgaaaatgaaggtccttgttttcttcgttgctacaattttggtagcatggcaatgccatgcgtacgatatgttccctctccgaatgaacactggctatggtgcccgtactccggaggtgaaatgcgcaagttggaggcttgctgtggaagcacacaacatctttggctttgagaccattcctgaagagtgcgttgaagcaacaaaggaatacatccatggcgaacaatatagatcagactccaaaacagttaaccaacaagcttacttttatgccagagacctcgaagtcaatcncaaggacacatttgtgttcagtatagatggcaacgtactctctaata

SEQ ID NO: 235118 - DNA, 390 bp, Glycine max
ggcacaagtttgttgagatagctagaagcaataagatgaaaatgaaagtgcttgttttgtttgttgctacagttttggtagcatatgaatgccatggctcagactaccagaagttccctctccaaatgaaaactgggtttggtgggcaatacagcaatgaggtggcatgtgccagttggaggcttggcgtggaagcaaacaacgtagtcaagtggcaaactgttcctgcagcttgcggagagtacatagctgactacgttctaggagaccaatatagatcagattccaaaacagttaaccaacaagcttatttctatgctaaatccctcaaactcaccaacaaagatgtctttgtcttggacgttgacgacactactctctctaatctcc

SEQ ID NO: 235119 - DNA, 350 bp, Glycine max
  unsure (1)..(350): unsure at all n locations
gaacctttgcattctattcattcaagattcagcaagtgcgttttggaagcagagaccgaaatacttcgagatggcccgtacaaagcaaactgctcgtaagtcaactggaggaaaagctcccaggaagcagcttgcaaccaaggctgcacgtaagtctgcaccaacaactggtggtgtgaagaagcctcatcgttatcgccctggaactgttgctcttcgtgagattaggaaataccagaagagcactgagctcctaatcaggaagcttcctttccagaggttggttcgtgaaattgcccaagatttcaagactgatctgcgtntccaagagcatgctgtgcttgcattgc

SEQ ID NO: 235120 - DNA, 386 bp, Glycine max
ggcacaagtgagtttgttgatcgagataactagaaacagtgtgatgaaaatgaaggtccttgttttcttcgttgctacaattttggtagcatggcaatgccatgcgtacgatatgttccctctccgaatgaacactggctatggtgcccgtactccggaggtgaaatgcgcaagttggaggcttgctgtggaagcacacaacatctttggctttgagaccattcctgaagagtgcgttgaagcaacaaaggaatacatccatggcgaacaatatagatcagactccaaaacagttaaccaacaagcttacttttatgccagagacctcgaagtccatcccaaggacacatttgtgttcagtatagatggcaccgtactctctaata

SEQ ID NO: 235121 - DNA, 391 bp, Glycine max
ggtgctctgctcgtgcctctagggttatcatttctccatttccattttctctctcacttttcaagaatcgtaagctatgggaaagtcttacccaactgtgagtgctgattaccagaaggccgttgagaaggcgaagaagaagctcagaggcttcatcgctgagaagagatgcgctcctctaatgctccgtttggcatggcactctgctggaacctttgacaagggcacgaagaccggtggacccttcggaaccatcaagcaccctgccgaactggctcacagcgctaacaacggtcttgacatcgctgttaggcttttggagccactcaaggcggagttccctattttgagctacgccgatttctaccagttggctggcgttgttgccgtt

SEQ ID NO: 235122 - DNA, 420 bp, Glycine max
aaaaaacaacaaaagggggaaaaattgatttggttgttcaaaataactaaaaacattgtgataaaaatgaaggtcccttgtttttcttccgttgctacaattttggtagcatggcaatgccatgcgtacgatatgttccctctccgaatgaacactggctatggtgcccgtactccggaggtgaaatgcgcaagttggaggcttgctgtggaagcacacaacatctttggctttgagaacattcctgaagagtgcgttgaagcaacaaaggaatacatccatggcgaacaatatagattagactccaaaacagttaaccaacaagcttacttttatgccagagacctcgaagtccatcgcaaggacacatttgtgttcagtatagatggcaccgtactctctaatattccatactacaaa

SEQ ID NO: 235123 - DNA, 408 bp, Glycine max
  unsure (1)..(408): unsure at all n locations
agggggcaacttcaattgcaatcaaattagttcattctctttgcgcagttccctacctctcctttcaagaaattgttcagatccgttgataaaagccttattcgttgattctgtatggtatttcaagagatattgctcagatgcagatcttcgtcaagaccctcaccggaaagaccatcacccttgaggtggaaagctctgacaccatcgacaacgtcaaggccaagatccaggacaaggaaggaattcccccggatcagcaacgtctcatcttcgccggaaagcagctcgaggacggccgtaccctcgccgactacaacatccagnaaggagtcaaccttcaacttgtccttcgtctccgtggtggcatgcagatcttcgtcaagactctcactgggcaaaacataa

SEQ ID NO: 235124 - DNA, 390 bp, Glycine max
ggcacaagtttgttgagatagctagaagcaataagatgaaaatgaaagtgcttgttttgtttgttgctacagttttggtagcatatgaatgccatggctcagactaccagaagttccctctccaaatgaaaactgggtttggtgggcaatacagcaatgaggtggcatgtgccagttggaggcttggcgtggaagcaaacaacgtagtcaagtggcaaactgttcctgcagcttgcggggagtacatagctgactacgttctaggagaccaatatagatcagattccaaaacagttaaccaacaagcttatttctatgctaaatccctcaaactcaccaacaaagatgtccttgtcctggacgttgacgacactactctctctaatctca

SEQ ID NO: 235125 - DNA, 398 bp, Glycine max
gatagcgaaacagagagtggtttcagtgagtgatcggtgttcacttgatccttcataagtcgtcatcatcatcatcatcatcaccgttgattgaagaagatgccgatcagaaacatcgccatcggaaggcctgaagaggctactcaccccgacacgttgaaggcggggttggctgagttcatctccaccttgatcttcgtgttcgccggttcaggttccggcatcgcctacaacaagctcaccgacaacggcgccgccactcccgccggcctcatctccgcttccatcgcctatcctttcgccctcttcgtcgccgtctccgtcggcgccaacatctccggcggtcacgtcaaccccgccgtcaccttcggcgccttcgtgggcggcaacatcacctt

SEQ ID NO: 235126 - DNA, 365 bp, Glycine max
gatcactctgctgcctcgctctgtttctgtctctgtgtttgcggctgaggattccgaacgagcgaccttcttcgtttctcgcaaagtttaagtcatcatgggtaaggaaaagactcacatcaacattgtcgtcattggacatgtcgactctgggaagtcaactaccactggtcatttgatctacaagcttggaggtattgacaagcgtgtgattgagaggttcgagaaggaggctgctgagatgaacaagaggtcattcaagtatgcctgagtgcttgacaagctcaaggctgagcgcgaaagaggaatttacattgatattgctttgtggaagttttgaacaacaagtactactgcacagtcat

SEQ ID NO: 235127 - DNA, 396 bp, Glycine max
gacagcagcagagcaaaagaaagaaagaaagaaagtgcaacttcctctgttttgctcccctgtttaagccttatcataagcttagaatggcacacaaggaattttccattgccctagtgactctcattgttctctttgtcaacacgaacctccaaggtgccacggctgactatggtggtggttggcagagtgctcatgccactttctatggtgggggtgatgcttctggcacaatgggtggagcatgtgggtatggaaatttgtatagccagggatatggaactgacactgtggctctaagcactgctttgttcaacaatggcttaagctgtggatcttgctatgaaatgagatgtgatgatgacccaagatggtgcaaacctggctctattaccg

SEQ ID NO: 235128 - DNA, 284 bp, Glycine max
gacggttcaagagtttgttgtgagctactagctactttatcgtgaggataataggcctttgtttcttctctgcgttgcttttggtgtcatggtagcaccgtgcttccaaggtgtccgctctcgaaagttccatcgcctatgtgagcccgtgctcaggtggtggtacctccgaggtagaagcctcctgttgtaggcctgctgatcattgcgcattgcaaccaatcctttagaatgcttcgtggaaagtgcgttgtacctccatgggaattcatttatgtcaaacc

SEQ ID NO: 235129 - DNA, 274 bp, Glycine max
  unsure (1)..(274): unsure at all n locations
ggcacaagtgagtttgttgatcgagataactagaaacagtgtgatgaaaatgaaggtccttgttttcttcgttgctacaattttggtagcatggcaatgccatgcgtacgatatgttccctctccgaatgaacactggctatggtgcccgtactccggaggtgaaatgcgcaagttggaggcttgctgtggaagcacacaacatctttggctttgagaccattcctgaagagtgcgttgaagcaacanaggaatacatccatggcgaacaatat

SEQ ID NO: 235130 - DNA, 366 bp, Glycine max
gattgttggcttgtgctctgctcgtgcctctagggttatcatatctccatttcaatttcctctctctcagtttccaagaatcttaagctatgggaaagtcttacccaaccgtgagcgctgattaccagaaggccgttgagaaggcgaagaagaagctcagaggcttcatcgctgagaagagatgcgctcctctaatgctccgtttggcatggcactctgctggaacttacgacgtgagctcgaagaccggtggtcccttcggaaccataaagcacccctccgaactcgctcacggcgctaacaacggtcttgacatcgctgttaggcttttggagccactcaaagcggagtttcctattttgagct

SEQ ID NO: 235131 - DNA, 373 bp, Glycine max
aaggggaaggtgcaatagtttgttgtgagctataagctagtttaccgtgaggagaatatgaacttgctttgttttctttgttgctgcagtagttttggtagcatggccatgccatggcgcaggctaccaaaggttccgtctccgaatgagaactggctatggtaagcgttcttccgaggtaaaatgcgcaagttttatgcttgctgtggaagcacacaacatccgagcctttaacaccattcctgacgagtgcgttgagccaccacaggactacattaatggccaacaatttagatcagactctaaaacagttaatcaacatgctttcttttatgctagtgaacgcgaagtcgatcacaacgacatatttata

SEQ ID NO: 235132 - DNA, 392 bp, Glycine max
  unsure (1)..(392): unsure at all n locations
gacagcatatatatcaataatctattttatactatacctacattttgataattttctttgtagttgatagccatggctacccgtggaaagcttgaggttgacattgatctcaagtccaacgcagacaagtactggcaaacccttaggaattctactgaaatattccctaaggccttcccacatgattacaaaagcattgaggttcttgagggtgatggcaagtctcctggttctatccgccacataagttatggtgaaggttcaccacttgtgaaatcatcctttgagaagattgaggctgttgatgaggaaaagaacgtagtgtcgtacactatcattgatggggaactcctcnagcactacanaacattcaatggagacatttctgtgac

SEQ ID NO: 235133 - DNA, 400 bp, Glycine max
gcacaagtgagtttgttgatcgagataactagaaacagtgtgatgaaaatgaaggtccttgttttcttcgttgctacaattttggtagcatggcaatgccatgcgtacgatatgttccctctccgaatgaacactggctatggtgcccgtactccggaggtgaaatgcgcaagttggaggcttgctgtggaagcacacaacatctttggctttgagaccattcctgaagagtgcgttgaagcaacaaaggaatacatccatggcgaacaatatagattagactccaaaacagttaaccaacaagcttacttttatgccagagacctcgaagtccatcccaaggacacatttgtgttcagtatagatggcaccgtactctctaatattccatactacaaaa

SEQ ID NO: 235134 - DNA, 307 bp, Glycine max
  unsure (1)..(307): unsure at all n locations
gggtgtcaggttctggaatctgcgcaaagcgagtggtggtggacgctcgccagcacaggttgggtcggctatcgtcgaacgtggcgaatgagcttctgcatgggcacaaggttgccgtcgtgcgctgcgaacagatttgcatctccagcagtctggtgaggcagaatatgacatacgtgagattcctctgcanacgcatgaacaccatcacctcgcatggtgctatcgacttctgcgccgaatccataatcgtctaggtcaccgttcatggaatgatatcacactcgacaacacgtggggaagctgc

SEQ ID NO: 235135 - DNA, 389 bp, Glycine max
gacaagtttgttgagatagctagaagcaataagatgaaaatgaaagtgcttgttttgtttgttgctacagttttggtagcatatgaatgccatagctcagactaccagaagttccctctccaaatgaaaactgggtttggtgggcaatacagcaatgaggtggcatgtgccagttggaggcttggcgtggaagcaaacaacgtagtcaagtggcaaactgttcctgcagcttgcggggagtacatagctgactacgttctaggagaccaatatagatcagattccaaaacagttaaccaacaagcttatttctatgctaaatccctcaaactcaccaacaaagatgtctttgtcttggacgttgacgacactactctctctaatctcca

SEQ ID NO: 235136 - DNA, 393 bp, Glycine max
  unsure (1)..(393): unsure at all n locations
gggggattttttgggtgccattgttgttgctattatcatccgcagctgcttttattcgcaccgcaaacagtgagccatggccgtcggaaagaacaagcgcatctccaaggggaagaagggtggcaagaagaaggcagctgatccctttgccaagaaggattggtatgacattaaggctccttctgtttttcaagtgaaaaatgttggcaaaaccctcgtctctcgtactcagggtaccaagattgcttctgaaggactcaagcatagagtgtttgaggtctccttggctgatcttcaaggggatgaggatcatgcattcaagaagattaggttgagagctgaagatgtgcaagggaagaatgttctgacaaatttctgangaatggatttcac

SEQ ID NO: 235137 - DNA, 341 bp, Glycine max
gagcgaaacagagagtgatttcagtgagtgatcggtgttcacttgatctcatcataatcgtcagcgtcaattgaagaagatgccgatcagaaacatcgccgtcggaaggcctgaagaggcgactcaccccgacacgttgaaggcggctttggctgagttcatctcaaccttcatcttcgtgttcgccggctcaggctccggcatcgcctacaacaagctcaccgacaacggcgctgccacccctgccggcctcatctccgcctccatcgcccatgcattcgccctcttcgtcgccgtctccgtcggcgccaacatctccggcggccacgtcaaccccgccg

SEQ ID NO: 235138 - DNA, 379 bp, Glycine max
gagggttttgcgctgttgttgctgctcatcctccgtaacctccgagctctgcaccgaagaacgaagccatggggaagacacatggaatgggatctgctcgcaagctcaagtcccaccgcaggaggcaaaggtgggctgacaagtcatacaagaaatcacatcttggaaatgaatggaagaaaccttttgctggttcatcccatgccaagggaattgtccttgaaaagataggtattgaggctaagcagcccaactctgccattcgtaagtgtgccagggttcaacttatcaagaatgggaagaagattgccgcttttgtccctaatgacggttgcttgaactacattgaagagaatgacgaagtcttgattgctggatt

SEQ ID NO: 235139 - DNA, 346 bp, Glycine max
ggcacaagtgagtttgttgatcgagataactagaaacagtgtgatgaaaatgaaggtccttgttttcttcgttgctacaattttggtagcatggtaatgccatgcgtacgatatgttccctctccgaatgaacactggctatggtgcccgtactccggagttgaaatgcgcaagttggaggcttgctgtggaagcacacaacatctttggctttgagaccattcctgaagagtgcgttgaagcaacaaaggaatacatccatggcgaacaatatagatcagactccaaaacagttaaccaacaagcttacttttatgccagagacctcgaagttcatcccaaggac

SEQ ID NO: 235140 - DNA, 368 bp, Glycine max
aagccaaatggaagattcttcagctataatccagcaacaaagaagacaaccctgcttgcccaagacctctactttgccaatggggttgcagtttcagcagatcaacaatttgtggtcttctgtgaatctgtcttgatgagatgcaataaatatttcgtcctgagccctaaaacaggaaccatagagaagttctgtgacctgcctggcatgcctgataacattcattatgatggacaggggcactatttgattgcaatgttcacggccctttctcccgaattggaattggcatatagataccctttcattacgaaggcttttgcaatgtttacaaagtatgtacggagtctatctatctccaagaatgg

SEQ ID NO: 235141 - DNA, 339 bp, Glycine max
ggtacacagcctcaacaaccctaacgcgtgcagagcagagagagacgcagccatggggcgaagacccgcgaggtgttataggcaaattaagaacaaaccataccccaagtcacggttttgccgtggtgttcctgatcccaagatcaggatttacgatgttggtatgaagaagaagggtgttgatgagtttcctttctgtgtccatctggttagttgggagaaggaaaacgtttctagtgaggccctggaagctgctcgtattgcttgcaacaagtacatggccaaatttgctggaaaggatgctttccacttgagagtcagggtgcacccattccatgt

SEQ ID NO: 235142 - DNA, 388 bp, Glycine max
  unsure (1)..(388): unsure at all n locations
ggcacaagtttgttgagatagctagaaccaataagatgaaaatgaaagtgcttgttttgtttgttgctacagttttggtagcatatgaatgccatggctcagactaccatcagttccctctccaaatgaacactgtgtttggttggcaatacagcaatgaggtggcatgtgccagttggatgcttggcgtcgaagcagacaacatattcaagtggcaaactgttcctgcatcttgcggagagtacatagctgactacgttctacgagaccaatatacatcagattccattacagttaaccaacangcttatttctatgctaaatccctcaaactcaccatcaaagatgtctttgtcatggacgttgacgacactactctctcgaatct

SEQ ID NO: 235143 - DNA, 220 bp, Glycine max
gggggggcacaagtgagtttgatgatcgagataactagtaacaatgtgatgaaaaggaatgtccgtggcttcatcgttgctacaattttggtagcatggcaatgccatgcataagatatgttccctcaccgaatgaacactggctatggtgcccagtatccaggtgtgaaatgcacatttttgacgcatgctgtttgagcacacaatatccttgggtttg

SEQ ID NO: 235144 - DNA, 356 bp, Glycine max; identical to SEQ ID NO: 234809

SEQ ID NO: 235145 - DNA, 390 bp, Glycine max
  unsure (1)..(390): unsure at all n locations
ggagcatggcctcatattggtagatactaagtatgagtttgggaaggcaaatgatggttcaattatgttgattgatgaggtccatactcctgattcaagtagatattggatagccaattcttacctggagcgctttcaaaatggtcttgagcctgaaaatattgacaaggagtttttgaggctgtggtttataagtcactgcaacccttatgaagatgaggtccttcctgatgctcctgaagatcttgtctgtgaattagcctggcgatacattttcttgtatgagactataacaaaatcaaagtttgaggtgccatcgactgaggagcctatacatgaccgaattacacganatgttgcatctgcactgtcatcnctaaagtagcctgg

SEQ ID NO: 235146 - DNA, 379 bp, Glycine max
ggtgcacaagtgagtttgttgatcgagataactagaaagagtgtgatgaaaatgaaggtccttgttttcatcgttgctacaattttggtagcatggcaatgccatgcgtacgatatgttccctctccgaatgaacactggctatggtgcccgtactccggaggtgaaatgcgcaagttggaggcttgctgtggaagcacacaacatctttggctttgagaccattcctgaagagttcgttgaagcaacaaaggaatacatccatggcgaacaatatagatcagactccaaaacagttaaccaagaagcttacttttatgccagagacctcgaagtccatcccaaggacacatttgtgttcagtatagatggcaccgtac

SEQ ID NO: 235147 - DNA, 353 bp, Glycine max
  unsure (1)..(353): unsure at all n locations
ggtgcacaagtgagtttgttgatcgagataactagaaacagtgtgatgaaaatgaaggtccttgttttcttcgttgctacaattttggtagcatggcaatgccatgcgtacgatatgttccctctccgaatgaacactggctatggtgcccgtactccggaggtgaaatgcgcaagttggaggcttgctgtggaagcacacaacatctttggctttgagaccattcctgaagagtgcgttgaagcaacanaggaatacatccatggcgaacaatatagatcagactccanaacagttaaccaacaagcttacttttatgcaagagacctcgaagtccatcccaaggacacatt

SEQ ID NO: 235148 - DNA, 357 bp, Glycine max
  unsure (1)..(357): unsure at all n locations
ggccattgttgttgctattatcatccgcagctgcttttattcgcaccgcaaacagtgagccatggccgtcggaaagaacaagcgcatctccaaggggaagaagggtggcaagaagaaggcagctgatccctttgccaagaaggattggtatgacattaaggctccttctgtttttcaagtgaaaaatgttggcaaaaccctcgtctctcgtactcagggtaccaagattgcttctgaaggactcaagcatagagtgtttgaggtctccttggctgatcttcaaggggatgangatcatgcattcaagaagattaagttgagagctgaagatgtgcaagggaagaatgttctgacaaa

SEQ ID NO: 235149 - DNA, 371 bp, Glycine max
ggagtgagtaattagaaaggggtttccaagggttaccggaaggttgcattgcaataaaacccccccgaataagcccggcggacttttgtaggttttcctccgaaccaaaaatttcccttccggccgttaatccggccccgttgtggaaacgttttctcccttccgattaccattccatcatttccaagtctccttcgcctctcaactatccttccaagaaggagctctatctcgctctctcggatcgccctatcatcatcgatcagggtaaaaagagctttcaattggagaaaaagagtgggaagaagtgttacatgcttgctgctagagctctcagcattatttggggtgacactgagcaatactggaac

SEQ ID NO: 235150 - DNA, 380 bp, Glycine max
  unsure (1)..(380): unsure at all n locations
ggcatctgattcgttcgttcactttcactttaccaactcctaacaatttctctctgtttccttcttcaccgcatcaatggagttggacggcgttctcctcggcatgtgcaaccctctcctcgacatctctgccgtcgtcgacgacgctttcttgcaaaaatacggtatcaagttgaacgatgcgattctcgctgaggataagcacaaacctatgtatgaagaattggctaacaatcctaatgtggagtacattgctggaggtgctactcagaattcaatcagggttgctcagtggatgcttcaagcaccaggtgccacaagttacataggttgcatangaaaagacaaatttggagaagagatgaagaagaaatgttcac

SEQ ID NO: 235151 - DNA, 400 bp, Glycine max
  unsure (1)..(400): unsure at all n locations
ggcgcacccagagaggaggaagctttgagagagagagagggaggagggagagtgttgacgctccatcaagatgggtatttctagggattccatgcacaagaggcgtgccactggtggcaagaaaaaggcttggagaaagaagagaaagtatgagcttgggcgtcaggcagcaaacaccaagttatcaagcaacaagacaatcaggaggattcgtgttagaggtggcaatgttaaatggagggcattgaggctggatactggcaattactcatggngtagtgaagcagttactcgcaagactcgtattctagatgttgtttacaatgcctcaaacaacgagcttgtgcgaactcagaccctggtcaagagtgctattgtccaggttgatgctgctcctttc

SEQ ID NO: 235152 - DNA, 315 bp, Glycine max
gattccaccagtacagaaaacgcagttctcaacaattccctctcgaatgtgagacttgttggtggtaactgaacttttccgagcaagaatgtctgggcgtggaaagggaagcaacggtttgggaaagggatgagcgaaacgacaccgtaaggtgctgcgcgataacattcacggaatcaccaagcccgcgaatcggcgtttggctcctaagggtggcgtgaaacgtatcagtggtctcatctacgaagagacacgtggcatgctcaagatctttttggagaaagtgattcctgacgcccttacctacactgagca

SEQ ID NO: 235153 - DNA, 211 bp, Glycine max
ggcacaagtgagtttgttgatcgagataaccacaaacagtgtgattaaaatgaaggtccttgttttcctcgttgctacaattttggtatcatggcaatgccatgcgtacgatatgttcactctccgaatgaacactggctatggtgcccgtactcaggaggtgaaatgcgcaagttggatgcttgctgtggaagcacacagcatctttggc

SEQ ID NO: 235154 - DNA, 364 bp, Glycine max
ggcacaagtgagtttgttgatcgagataactagaaacagtgtgatgaaaatgaaggtccttgttttcttcgttgctacaattttggtagcatggcaatgccatgcgtacgatatgttccctctccgaatgaacactggctatggtgcccgtactccggaggtgaaatgcgcaagttggaggcttgctgtggaagcacacaacatctttggctttgagaccattcctgaagagtgcgttgaagcaacaaaggaatacatccatggcgaacaatatagatcagactccaaaacagttaaccaacaagcttacttttatgccagagacctcgaagtccatcccaaggacacatttgtgttcagtata

SEQ ID NO: 235155 - DNA, 233 bp, Glycine max
gagtgcacaagtgagtttgttgatcgagataactagaaacagtgtgatgaaaatgaaggtccttgttttcttcgttgctacaattttggtagcatggcaatgccatgcgtacgatatgttccctctccgaatgaacactggctatggtgcccgtactccggaggtgaaatgcgcaagttggaggcgtgctgtggaagcacacaacatctctggggttgagaccatatcctgaa

SEQ ID NO: 235156 - DNA, 386 bp, Glycine max; identical to SEQ ID NO: 235120

SEQ ID NO: 235157 - DNA, 367 bp, Glycine max
ggcacaagtgagtttgttgatcgagataactagaaacagtgtgatgaaaatgaacgtccttgttttcttcgttgcgacaattttggtagcatggcaatgccatgcgtacgatatgttccctctccgaatgaacactggctatggtgcccgtactccggaggtgaaatgcgcaagttggaggcttgctgtggaagcacacaacatctttggctttgagaccattcctgaagagtgcgttgaagcaacaaaggaatacatccatggcgaacaatatagatcagactccaaaacagttaaccaacaagcttacttttatgccagagacctcgaagtccatcccaaggacacatttgtgttcagtatagat

SEQ ID NO: 235158 - DNA, 338 bp, Glycine max
  unsure (1)..(338): unsure at all n locations
ggtattgtagaactgaacaagggtttctctttctctttctctgtctgcttcttcactttctctcgtttcaatcgaaaaaaatcatgggcagaaaattcttcgtcggtggcaactggaaatgcaatgggaccactgaggaggtgaagaagattgttactactttaaatgaagctaaagtccctggagaagatgttgtanaagttgttgtgagccctccttttgtgttccttccttttgtaaaaagtttgctgcgccctgatttccatgtctcggcccaaaattgttgggttcgcaaaggtggtgcttatactggagaagttagtgctgaaatgcttgtt

SEQ ID NO: 235159 - DNA, 299 bp, Glycine max
gattatgaatgagtggcaatagcagcaacaacaacaatataagtaaaagaatctctgtgttgtcatcacacttcgctagatccagccccatcatggcttcagagaagcaagcggctcttgccgtcactccctctgatgctgatgctcctaccatatttgacaagatcatcaataaggagattccttctactgtggtttatgaggatgacaaggtgcttgccttcagggacataactcctcaagctcctacacatattcttatcattcctaaattcaaagacgggttaagtggtctatcc

SEQ ID NO: 235160 - DNA, 390 bp, Glycine max
gaaggtgcaagagtttgttgtgagctataagctagtttatcgtgaggagaatatgaagttgtttgttttctttgttgctgcagtagttttggtagcatggccatgccatggcgcaggctaccaaaggttccctctccgaatgaaaactggctatggtgagcgttcttcggaggtaaaatgcgcaagttttaggcttgctgtggaagcacacaacatccgagcctttaaaaccattcctgaagagtgcgttgaaccaacaaaggactacattaatggcgaacaatttagatcagactctaaaacagttaaccaacaagctttcttttatgctagtgaacgcgaagtccatcacaacgacatatttatattcggcatagataacaccgtact

SEQ ID NO: 235161 - DNA, 384 bp, Glycine max
  unsure (1)..(384): unsure at all n locations
gacttctgaatctattgaatcaacaatcatgtcggacgaagagcaccatttcgagtccaaggccgacgccggagcctccaaaacctacgctcagcaagccggtaccatccgcaagaacggctacatcgtcatcaaaggccgcccctgcaaggttgtggaagtttcgacttccaaaactggaaagcacggtcacgctaagtgtcactttgttggaattgatattttcactgccaagaaacttgaggatattgtgccctcttctcacaactgtgatgttcctcatgtgaatcgtactgattaccagctcattgatattgctgaggatggatttttgagtctgcntactgaaaatggtaacactaaggatgacctcaagcttcccac

SEQ ID NO: 235162 - DNA, 276 bp, Glycine max
ggcacaagtgagtttgttgatcgagataactataagcagtgtgatgaaaatgaaagtccttggtttcttcgttgctacaattttggtagcatggcaatgccatgcgtacgacatgttccctctccgaatgaacactggctacggtgcccgtactccggaggtgaaatgcgcaagttggaggcttgctgtggaagcacactatatctttggctttgagaccattcctgaagagtgcgttgatgcagctaatgaatacatccatggcgaataatatat

SEQ ID NO: 235163 - DNA, 346 bp, Glycine max
gacagcatagcactctttgcaacacaacagagtaagacaacacagagataagcgtcttaataaacgctcttctctgaaaaggctgatttcttctcttcttctcttctctttcgtttcgatcttcgatctctgaaaatgagagagtgcatttcattccacatcggtcatgccggtattcaggtcagaaacgcctgctgggagctctactgcctcgaacacggcattcagcctgatgggcagatgccaagtgataagactgttggtggaagtgatgatgctttcaacaccttcttcagtgaaactggggctggaaagcacgtgcctcgtgcgaattttgtagatctcg

SEQ ID NO: 235164 - DNA, 333 bp, Glycine max
ggcacaagtttgttgagatagctagaagcaataagatgaaaatgaaagtgcttgttttgtttgttgctacagttttggtagcatatgaatgccatggctcagactaccagaagttccctctccaaatgaaaactgggtttggtgggcaatacagcaatgaggtggcatgtgccagttggaggcttggcgtggaagcaaacaacgtagtcaagtggcaaactgttcctgcaacttgcggagagtacatagctgactacgttctaagagaccaatatagatcagattccaaaacagttaaccaacaagcttatttctatgccaaatccctcaaac

SEQ ID NO: 235165 - DNA, 370 bp, Glycine max
gaccacattccaaaacacaaacacatacattgtagtatcacttttgtctcggaatttgttcttttgagttatggcaagcttaaaggttgcatgtgtgggtttgatgtgcatggctgtgatgagtgcaccaatgatggtgcaagccgtgtcatgcaatgatgtttctgtgaacctagcaccgtgcctatcttacctgatgcagggtggagatgttccagaatcgtgctgtagcggagtgaggaacattctgggttctgccagcaccacctttgacaaacaaaccgtgtgcaaatgtcgtcagcaagctgctaataactatggcatcaacgacgaatacgctcaggcactctccggccgctgcaaggtcagc

SEQ ID NO: 235166 - DNA, 377 bp, Glycine max
ggcacaagtgagtttgttgatcgagataactagaaacagtgtgatgaaaatgaacgtccttgttttcttcgttgctacaattttggtagcatggcaatgccatgcgtacgatatgttccctctccgaatgaacactggctatggtgcccgtactccggaggtgaaatgcgcaagttgggggcttgctgtggaagcacacaacatctttggctttgagaccattcctgaagagtgcgttgaagcaacgaaggaatacatccatggcgaacaatatagatcagactccagaacagttaaccaacaagcttacttttatgccagagacctcgaagtccatcgcaaggacacatttgtgttcagtatagatggcaccgtac

SEQ ID NO: 235167 - DNA, 299 bp, Glycine max
ttgttgttagatataactaatttagtgtgatgagaatataagtctgtgtgttctccttcgctacaaatttggggcagggcaatgccatgcctacgagcagtgctctctccgtttcctcaccgactataaagtgcctattctgaacgtgctatgcgcagattatgggcatgttgtaggcgtacacatcaacactagagtatccaccactctataaacattccttaaaactgcgttggaatacatccagggcaaataataggcaataaactccaatcaaattctacaacaatcttacattt

SEQ ID NO: 235168 - DNA, 363 bp, Glycine max
ggcacaagtgagtttgttgatcgagataactagaaacagtgtgatgaaaatgaaggtccttgttttcttcgttgctacaattttggtagcatggcaatgccatgcgtacgatatgttccctctccgaatgaacactggctatggtgcccgtactccggaggtgaaatgcgcaagttggaggcttgctgtggaagcacacaacatctttggctttgagaccattcctgaagagtgcgttgaagcaacaaaggaatacatccatggcgaacaatatagatcagactccaatacagttaaccaacaagcttacttttatgccagagacctcgaagtccatcccaaggacacatttgtgttcagtat

SEQ ID NO: 235169 - DNA, 216 bp, Glycine max
ggttctcatttctctttctgtagccctcaatcaccggagagagagtgagtgcaaagccatcgtcttcgtctcagacaagtagtttggtaaaagatggctgatgctgaggatattcaaccccttgtctgtgacaatggaactggaatggtgaaggcaggatttgctggtgatgatgctcctagggctgtgttcccagtattgttgggcgacctcgtc

SEQ ID NO: 235170 - DNA, 328 bp, Glycine max
gtcagccactgcgatttccagaagcacccgttgtgagttttgcagcaagggatcttataagagggttgcttgtaaaggaacctcagcacagattggcttacaaaagaggcgctaccgagatcaagcaacaccctttttttgaaggtgtgaattgggcattgatcagatgtgccaccccacccgagatccccaaggctgtagagtttgagaagataccctcaccagcttcatcaagtggtggtgaaaaggctgctaaccatatctcaatagctaatcagaaaggttctgataattatctggagtttggattcctctagagagagagaga

SEQ ID NO: 235171 - DNA, 381 bp, Glycine max
  unsure (1)..(381): unsure at all n locations
gagagatgtgtttggcaaagctatggggcttactgaccaagatatcgttgctctatctgggggtcacactattggagctgcacacaaggagcgttctggatttgagggtccctggacctctaatcctcttattttcgacaactcatacttcacggagttgttgagtggtgagaaggaaggtctccttcagctaccttctgacaaggctcttttgtctgaccctgtattccgccctctcgttgataaatatgcagcggacgaagatgccttctttgctgattacgctgaggctcaccaaaagctttccgagcttgggtttgctgatgcctaagcaacgtttaggggattgttgaagangcatggtgcccataatatttctct

SEQ ID NO: 235172 - DNA, 362 bp, Glycine max
ggcacaagtgagtttgttgatcgagataactagaaacagtgtgatgaaaatgaaggtccttgttttcttcgttgctacaattttggtagcatggcaatgccatgcgtacgatatgttccctctccgaatgaacactggctatggtgcccgtactccggaggtgaaatgcgcaagttggaggcttgctgtggaagcacacaacatctttggctttgagaccattcctgaagagtgcgttgaagcaacaaaggaatacatccatggcgaacaatatagatcagactccaaaacagttaaccaacaagcttacttttatgccagagacctcgaagtccatcccaaggacacatttgtgttcagta

SEQ ID NO: 235173 - DNA, 383 bp, Glycine max
gactcaccacttcaaaacactcataacacaaagcacaaagcaaagctcatccttgagttaaaaaatggcagcagcttcttccatggcgcgctcaggcccatccttggctggcaaggccgggaagctgggcccatcagccccagaagtgggaagggtgagcatgaggaagaccgtcaccaagcaggtctcctcaggaagcccatggtacggcccagaccgagtcaagtacttgggcccattctctggcgagcccccgtcctacctaaccggtgagttcccacgcgactaccgctgggacactgctgggctttccgcagacgcaggaacctttcccaagaaacgtgaactcgaagtggatcactccaggtgggccatgctcggag

SEQ ID NO: 235174 - DNA, 373 bp, Glycine max
gacttctcttcacacctttgttcactcttcttctcttgcggctagggttttagcgcagcttcttctagatttaaggaagatgggtaaggaaaaggttcacatcagtattgtggtcattggccatgtcgactctgggaaatccactaccactggtcacctgatttacaagcttggaggcattgacaagcgtgttattgagaggtttgagaaggaagctgctgagatgaacaagaggtctttcaagtatgcctgggtgctggacaaacttaaggctgagcgtgaaagaggaatcaccattgatattgctttgtggaagtttgaaacaacaaagtattattgcacagttattgatgcgcctggacatagggatttc

SEQ ID NO: 235175 - DNA, 385 bp, Glycine max
  unsure (1)..(385): unsure at all n locations
ggcatttccaaatttccttttccttcactttcccgagaaaaaaatagcacttttcactttcttcactacgttctcacttcgatatggctcgtacgaagcaaaccgctcgcaagtccaccggtggcaaggcgccacgtaagcagctcgccaccaaggccgctcggaagtccgctccggcgaccggaggagtgaagaagccccagcgcttcaggccgggaaccgtggcgctgagggaaatcagaaagtaccagaagagcaccgagcttctcatcaggaagcttccatttcagaggctcgtgagagaaatcgcgcaggatttcaagaccgatttgcgtttccagagcagcgctgtttccgcgcttcangaggctgctgaggcttacct

SEQ ID NO: 235176 - DNA, 368 bp, Glycine max
ggcattacatttgagttcaaacaaatcaaagccatggccacctccaacttctctaatgttctctccgtctccctaaccttctttttggtgctacttaccaaggcacactcgaccgataccgtttctttcaccttcatcaagttcaacccagtccaaccaaacattatgctccaaaaagacgctagtatttcatcctctggggtgttacaactcaccaaagttggcagcaacggcatgcccacctctggatctctcggtcgtgccctttacgctgccccaatccatatttgggacagcgaaaccggtaacgtagccagctgggctacatcctttaaattcaacattttcgcactcaacacatcaaactc

SEQ ID NO: 235177 - DNA, 381 bp, Glycine max
  unsure (1)..(381): unsure at all n locations
gatgcacaagtttgttgagatagctagaagcaataagatgaaaatgaaagtgcttgttttgtttgttgctacagttttggcagcatatgaatgccatggctcagactaccagaagttccctctccaaatgaaaactgggtttggtgggcaatacagcaatgaggtggcatgtgccagttggaggcttggcgtggaagcaaacaacgtagtcaagtggcaaactgttcctgcagcttgcggagagtacatagctgactacgttctangagaccaatatagatcagattccaaaacagttaaccaacaagcttatttctatgctaaatccctcaaactcaccaacaaagatgtctttgtcttggacgttgacgacactactct

SEQ ID NO: 235178 - DNA, 302 bp, Glycine max
ggcacaagtgagtttgttgatcgagataactagaaacagtgtgatgaaaatgaaggtccttgttttcttcgttgctacaattttggtagcatggcaatgccatgcgtacgatatgttccctctccgaatgaacactggctatggtgcccgtactccggaggtgaaatgcgcaagttggaggcttgctgtggaagcacacaacatctttggctttgagaccattcctgaagagtgcgttgaagcaacaaaggaatacatccatggcgaacaatatagatcagactccaaaacagttaaacaac

SEQ ID NO: 235179 - DNA, 340 bp, Glycine max
ggcagtaggcagaggtattgtcgatttaaagaagcaaatcctcgatgaggaaagtgcacaagtgagtttgttgatcgagataactagaaacagtgtgatgaaaatgaaggtccttgttttcctcgttgctacaattttggtagcatggcaatgccatgcgtacgatatgttccctctccgaatgaacactggctatggtgcccgtactccggaggtgaaatgcgcaagttggaggcttgctgtggaagcagacaacatctttggctttgagaccattcctgaagagtgcgttgatgcaccataagaatacatccatggcgaacaatacagatcagactcc

SEQ ID NO: 235180 - DNA, 359 bp, Glycine max
ggtgcacaagtgagtttgttgatcgagataactagaaacagtgtgatgaaaatgaaggtccttgttttcttcgttgctacaattttggtagcatggcaatgccatgcgtacgatatgttccctctccgaatgaacactggctatggtgcccgtactccggaggtgaaatgcgcaagttggaggcttgctgtggaagcacacaacatctttggctttgagaccattcctgaagagtgcgttgaagcaacaaaggaatacatccatggcgaacaatatagatcagactccaaaacagttaaccaacaagcttacttttatgccagagacctcgaagtccatccaaagacacatttgtgttc

SEQ ID NO: 235181 - DNA, 354 bp, Glycine max
ggcacaagtttgttgagatagctagaagcaataagatgaaaatgaaagtgcttgttttgtttgttgctacagttttggtagcatatgaatgccatggctcagactaccagaagttccctctccaaatgaaaactgggtttggtgggcaatacagcaatgaggtggcatgtgccagttggaggcttggcgtggaagcaaacaacgtagtcaagtggcaaactgttcctgcagcttgcggagagtacatagctgactacgttctaggagaccaatatagatcagattccaaaacagttagccaacaagcttatttctatgctaaatccctcaaactcaccaacaaagatgtctttg

SEQ ID NO: 235182 - DNA, 132 bp, Glycine max
ttgggtggaagtttgaaacaacaaagtattattgcacggttattgatgctcctggacacaaggatttcattaagaatatgattactgggacatcccaagctgactgtgctgttcttatcaatgattcgacca

SEQ ID NO: 235183 - DNA, 379 bp, Glycine max
gaggtttgtgatagtgattgcctccctctgctgccgtccctaatctgaatgctctcgccatctgcgatcggatttcatggttccaaagagggagaacgctcccccatcttcatccatgcctgccacgtctggccgtggctaacacaagaagaagaattggaacaagggtaaacaaaatgaaaaggtgaataacatggtgctcttcgatcagggtacctatgacaagctcctctctgaagcacccaactacaagctcattactccttccattctctctgaccgtttgaggattaatggatcacttgcaacgaaggctattacggaattgatggctagaggttcaatcacgatggtgtctgcccatgcaagtcagcagatt

SEQ ID NO: 235184 - DNA, 384 bp, Glycine max
gggcacaagtgagtttgttgatcgagataactagaaacagtgtgatgaaaatgaaagtccttggtttcctcgttgccacaattttggtagcaagggaatgccatgcctacgaaaagttccctcccccaatgaacaccgggtaatgggcccgtaatccggaagttaaatgcccaagttgtgaggcttgccgtggaaacacaaaacaacctttgcttttagaacattcctgaagagtgcgttgaagcaacaaaggaatacatccatggcgaacaatatagatcagactccaaaacagttaaccaacaagcttacttttatgccagagacctcgaagtccatcccaaggacacatttgtgttcagtatagatggcaccgtactctct

SEQ ID NO: 235185 - DNA, 392 bp, Glycine max
ggaagaacaagtcttgcattgggtggagcatacttagaaacagcaactatgtctctcatgcagcttactagctcccctgttggctcactggtccgtttcattgtaatatttgctttatggtacagaaccatggctttggccaagttgccaccaaacgcttcatcagttccagcagttttagcgtttggagattccatcgtggacccaggcaacaacaacaacataaaaacattgatcaagtgcaacttcccaccttatggaaaggattttcagggaggaaacccaacgggtcgattttgcaatggaaaaattccttctgacttaatagttgaacaattgggtattaaggagtatttgcctgcatatttggatccgaatctcaaatctagtga

SEQ ID NO: 235186 - DNA, 277 bp, Glycine max
ggttttgtttcccataccatagaagaagcacaatgagaagcattagcactatgagcagcaacaactagtctcagctgaaatggcctcttcagtgatggcatctgtggccctcaaacctgcccctttcactgttgagaagtcctcagtgagaggccttccctctctctcaaggaactcttcttcattcagagttgtggccagtggcaagaagatcaagactgacaaaccttatggaattaatggtggcatggctttgagggatggaactgatgcatct

SEQ ID NO: 235187 - DNA, 325 bp, Glycine max
gagtgcacaagtgagtttgttgatcgagataactagaaacagtgtgatgaaaatgaaggtccttgttttcttcgttgctacaattttggtagcatggcaatgccatgcgtacgatatgttccctctccgaatgaacactggctatggtgcccgtactccggaggtgaaatgcgcaagttggaggcttgctgtggaagcacacaacatctttggctttgagaccattcctgaagagtgtgttggagcaacaaaggaatacatccatggcgaacaatatagattagactccaaaacagttaaccaacaagcttacttttatgccaga

SEQ ID NO: 235188 - DNA, 338 bp, Glycine max
gatgcacaagtttgttgacatagctagaagcaataatatgaaaatgaaagtgcttgttttgtttgttgctacacttttggcagcatatgaatgccatggctcatactaccacaagttccctctccgaatgataactgggtttggtaggcaatacaacactgaggtggcatgtgccagttggaggcttggcgtggcagcaaacaacgtagtcaaatggcaaactgttcctgcagcttgcggacagtacatagctgactacgtactacgagaccattatcaatcagattccagaacagttaaccaacaagcttatttctatgctaaatccctcaaactca

SEQ ID NO: 235189 - DNA, 302 bp, Glycine max
ggcacaagtgagtttgttgatcgatataactagaaacagtgtgatgaaaatgaatgtccttgttttcgtcgttgctacaattttggtagcgtggcaatgccatgcgtacgatatgttccctctccgaatgaacactggctatggtgcccgtactccggatgtgaaatgcgcaagttggaggcttgctgtggaagcacacaacatctttggctttgagaccattcctgaagagtgcgttgaagcatcataggaatacatctatggagaacactatagatcagactccacaacagttaaccaac

SEQ ID NO: 235190 - DNA, 358 bp, Glycine max
ggcacaagtgagtttgttgatcgagataactagaaacagtgtgatgaaaatgaaggtccttgttttcttcgttgctacaattttggtagcatggcaatgccatgcgtacgatatgttccctctccgaatgaacactggctatggtgcccgtactccggaggtgaaatgcgcaagttggaggcttgctgtggaagcacacaacatctttggctttgagaccattcctgaagagtgcgttgaagcaacaaaggaatacatccatggcgaacaatatagatcagactccaaaacagttaaccaacaagcttacttttatgccagagacctcgaagtccatcccaaagacacatttgtgttc

SEQ ID NO: 235191 - DNA, 382 bp, Glycine max
gtaccgtgcgctagttctgagtattctgatcgctccctgagagagctcgtcgcggcggttgcagaagaagattgcaagatgaagttcagcatcgcgaatcccaccactggatgccagaagaagctcgagatcgacgacgatctgaaactgcgagcattttgggacaagaggatctcacaggaggtcatcggagatgcactcggtgaggaatttaagggctatgtcttcaaaattaccggaggttgtgacaaacaaggatttccaatgaagcaaggagtgctgactcctggtcgtgttagacttttgcttcacaggggaactccttgcttccgtggatatggaaggcgtaatggagagcgtaggagaaagtctgttcgtgggt

SEQ ID NO: 235192 - DNA, 355 bp, Glycine max
ggtgcacaagtgagtttgttgatcgagataactagaaacagtgtgatgaaaatgaaagtccttgttttcttcgttgctacaattttggtagcatggcaatgccatgcgtacgatatgttccctctccgaatgaacactggctatggtgcccgtactccggacgtgaaatgcgcaagttggaggcttgctgtggaagcacacaacatctttggctttgagaccattcctgaagagtgcgttgaagcaacatacgaatacatccagggccaacaatatagatcagactcaaaacagtttacaacaagcttaactttatgccagagacctccaagtccatctccaagacacatttgtg

SEQ ID NO: 235193 - DNA, 351 bp, Glycine max
ggtacacatgtgtgtgtggttatagagatctctagacagagtgtggtgaatgtgagtgtctgtgttctcctcggcgctacattttggggaacaggacagtgacatgcataagatatgttctctctccaagtgaacagtggatagggcgcgtatactcggggtgtgatatgcacattttaggcgtgtgctgtggacacacacaatatctgtggttttgacaatactcgagaagagtgtgttgacacaacaggagtatatatatatggagaactatatatatgacactccaacagagttacacaacactcatatttatatgacagagatctcgatctatatcacagagacata

SEQ ID NO: 235194 - DNA, 384 bp, Glycine max
  unsure (1)..(384): unsure at all n locations
ggcacaagtttgttgagatagctagaagcaataagatgaaaatgaaagtgcttgttttgtttgttgctacagttttggtagcatatgaatgccatggctcagactaccagaagttccctctccaaatgaaaactgggtttggtgggcaatacagcaatgaggtggcatgtgccagttggaggcttggcgtggaagcaaacaacgtagtcaagtggcaaactgttcctgcagcttgcggagagtacatagctgactacgttctaggagaccaatatagatcagattccaaaacagttaaccaacaagcttatttctatgctaaatccctcaaactcaccaacanagatgtctttgtcttggacgttgacgacactactctctcta

SEQ ID NO: 235195 - DNA, 419 bp, Glycine max
gtaacggtcaggaattcccgggccgacccacgcgtccgaagacgacagaaggggacaacacaacagagaaagaaaagagtaagagtatgggaggctcatggtcatggcagctcacatgtgccctcttgctactcttctccgccgtagtcaccgccactgaccacattgtgggtgcgaatcgtgactggaaccctggctttaactacactctttgggccaacaaccacactttctatgttggcgatcttatctcattcaggtaccaaaagaaccaatacaatgtgtttgaggtgaaccaaactgggtatgacaactgcactacagaaggggcagtggggaattggagcagtgggaaggatttcataccccttaacaaggccaagagatattacttcatttgtggcaatgggcaatgcttc

SEQ ID NO: 235196 - DNA, 287 bp, Glycine max
cggggctgccgctctctgataaattcagatattgtgggatatagaataccggtatagaaaatgacgaccaggttcaagaagaacaggaagaagagaggtcacgtcagcgccggacacggccgtatcggcaagcacctcatgcatcacggaggtcgcggtaacgccggtggcatgcatcatcaccgtatcctcatcgacaagtaccatcctggtttcttcgggaaggtaagcatgcgctacttccacagacttcgcaacaaattctacaatccgattatcaacatcga

SEQ ID NO: 235197 - DNA, 339 bp, Glycine max
gtcgtcatagcatttctaagccatatccaccattccacctagctcgccaatcacatcttcactacaccataaaccttcttaatttcgcgcttcattttctcctctactgtcataatcatggggaccttccctcgcttcgacccaatcaccacccaagaccggtccaactagaccgtgggctccgaccttgacggcaccctcctcgtctcccggagcgccttcccctactacctcctcgttgccctcgaagccggcagcgtcctctgcgccctcctcctcctaacctccgccccctttgtctacgttacctacctcgtcctctccgaaaccctcgccatc

SEQ ID NO: 235198 - DNA, 315 bp, Glycine max
ggcacaagtgagtttgttgatcgagataactagaaacagtgtgatgaaaatgaaggtccttgttttcttcgttgctacaattttggtagcatggcaatgccatgcgtacgatatgttccctctccgaatgaacactggctatggtgcccgtactccggaggtgaaatgcgcaagttggaggcttgctgtggaagcacacaacatctttggctttgagaccattcctgaagagtgcgttgaagcaacaaaggaatacattcaatgggcgaacaatatagatcagactcccaaaacagtttaacaacaggcttactt

SEQ ID NO: 235199 - DNA, 315 bp, Glycine max
gacaagtgagtttgttgatcgagataactagaaacagtgtgatgaaaatgaaggtccttgttttcttcgttgctacaattttggtagcatggcaatgccatgcgtacgatatgttccctctccgaatgaacactggctatggtgcccgtactccggaggtgaaatgcgcaagttggaggcttgctgtggaagcacacaacatctttggctttgagaccattcctgaagagtgcgttgaagcaacaaaggaatacatccatggcgaacaatatagattagactccaaaacagtttaccaacaagcttacttttatg

SEQ ID NO: 235200 - DNA, 308 bp, Glycine max
  unsure (1)..(308): unsure at all n locations
ggtgcagacgtgagtttgttgatcgagataactagaaacagtgtgatgaaaatgaacgtccttgatttcttcgttgctacaattttggtagcatggcaatgctatgcgtacgatatgttccctctccgaatgaacactggctatggtgcacgtactccggaggtgaaatgcacaagttggaggcttgctgtggaagcacacagcatctttggctttgagaccattcctgaagagtgcgttgaagcaacacaggaatacatccatggcgaacaatatagattagactcaancacagttaaccaacaagc

SEQ ID NO: 235201 - DNA, 329 bp, Glycine max
ggtgcacaagtgagtttgttgatcgagataactagaaacagggtgatgaaaatgaaggtccttgttttcttcgttgctacaattttggtagcatggcaatgccatgcgtacgatatgttccctctccgaatgaacactggctatggtgcccgtactccggaggtgaaatgcgcaacttggaggcttgctgtggaagcacacaacatctttggctttgagaccattcctgaagagtgcgttgaagcaacaaaggaatacatccatggcgaacaatatagatcagactccaaaacagttaaccaacaagcttacttttatgccagagacct

SEQ ID NO: 235202 - DNA, 386 bp, Glycine max
  unsure (1)..(386): unsure at all n locations
gaaggtgcaagagtttgttgtgagctataagctagtttatcgtgaggagaatatgaagttgtttgttttctttgttgctgcagtagttttggtagcatggccatgccatggcgcaggctaccaaaggttccctctccgaatgaaaactggctatggtgagcgttcttcggaggtaaaatgcgcaagttttaggcttgctgtggaagcacacaacatccgagcctttaaaaccattcctgaagagtgcgttgaaccaacanaggactacattaatggcgaacaatttagatcagactctaaaacagttaaccaacaagctttcttttatgctagtgaacgcgaagtccatcacaacgacatatttatattcggcatagataacaccg

SEQ ID NO: 235203 - DNA, 345 bp, Glycine max
gaccaaatcacgctctctaataacatttctaatctcattctccttctgttcaaatactctctctcatggcatcagataagaagattaggatcggcatcaacgggtttggaaggattggccgtttggtggccaaggttgcccttcaaaggagtgatgttgaacttgttgctgtcaacgatcctttcatcaccactgattacatgacatacatgttcaagtacgacaccgttcatggccagtggaagcattttgatgtgaaggtgaaagactctaagacccttctctttggtgagaagcccgtcaccgtttttggaatcagggaacctgaggaaattccatgggggt

SEQ ID NO: 235204 - DNA, 312 bp, Glycine max
gcgtccacggctacgacaaaacgggaaaattcagctacgcattttccttgttgctgttctaaaacaatcatccacatattcaccgtcgccactataacagtagctccaatcaatcgtgctatgggttgagttgtaccagcacttaacaatgttcaggacacggtaaccacccctttgttcaataagcgtccgaatcagttctggatctgaagcccgctgccgccttagcgggacctgacacgcttcgtgaagtggccgattaacgtccaaatccaacgcatgaagcgcatcctcaatcaaaggctcaaggtc

SEQ ID NO: 235205 - DNA, 382 bp, Glycine max
cgacagaaggggaaaattcacacacacatattctttgttgcaatatcacaaacacctcgtccgtcacaatgcagctagctgtggcggccaacgctgtcgtttcaccgtcgccgttccgacctcatccccttctccggtcatccttctccggcgtctccgttaagctcactccccaatccataacgttttcacgcttgaagcccctcaccgtcttcgccgccaccaagaaggccgtcgctgtcctcaaggggacctccgccgtcgaaggcgtcgccactctcatccaagaagacgatggcccgacgacagtttctgttagcatcactggccttactccggggcttcatggttttcacctacatgagtatggtgataccacaaa

SEQ ID NO: 235206 - DNA, 382 bp, Glycine max
gacgttcacattcaggaatcgttttcttcagaaatttgccatcgttgagagaagcgtgagagccttagtcgttcaagatgagagctaagtggaagaagaagcgcatgaggaggttgaagaggaagcgccgaatgatgagacagagatctaagtaggtgcttgagcaggagttgagatgagctttcaatcggctacaagcctaatgacattttaggctgttatggctcttatgatcttgaggtctaatcgctaggggagcttcaatcttgacttaatttgctttactggtcctggtcctggtccaagactattgactgtgggttaagttgtgatgtttaatgttttgtggtatctaattaggtactggtttttaaactttttg

SEQ ID NO: 235207 - DNA, 327 bp, Glycine max
ggcacgagtgagtttgttgatcgagataactagaaacagtgtgatgaaaatgaaggtccttgttttcttcgttgctacaattttggtagcatggcaatgccatgcgtacgatatgttccctctccgaatgaacactggctatggtgcccgtactccggaggtgaaatgcgcaagttggaggcttgctgtggaagcacgcaacatctttggctttgagaccattcctgaagagtgcgttgaagcaacaaaggaatacatccatggcgaacaatatagatcagactccaaaacagttaaccaacaagcttacttttatgccagagaact

SEQ ID NO: 235208 - DNA, 303 bp, Glycine max
ggcacaagtgagtttgttgatcgagataactagaaacagtgtgatgaaaatgaatgtccttgttttcttcgatgctacaagtttggtaccatggcattgacatgcgtacgatatgttccgtctccgaatgaacactggctatggtgcccatactccggaggtgaaatgcgcaagttggaggcttgctgtggaagcacacaacatctttggctttgagaccattcctgaacagttcgttgaagcaacaaaggaatacatccatggcgaacaatataaattagactccaaaacagtttatcaaca

SEQ ID NO: 235209 - DNA, 365 bp, Glycine max
  unsure (1)..(365): unsure at all n locations
gctgcgcaggtagagagagcgagagaacaagaacataagggaaccacagcggcggtaacagaagaacaagcagagaatgggtcgagtgagaacgaagacggtgaagaaatcctctcggcaggtgatagagcgtcactactcgcgcatgaccctggacttccacacgaacaagaagcttctggaggaagtggcgataatcccgtcgaagaggctaaggaacaagatcgcggggttctcgacgcacctgatgaagcgcatccagaagggccctgtgcgcggcatctcnctcaagctccaggaggaggagcgcgagcgccgcatggacttcgtccccgacgtctccgccatcaacaccgaccacatcg

SEQ ID NO: 235210 - DNA, 376 bp, Glycine max
gacaacaattccacaacgcgatctctctctattctttgaaaccaaagttcaaactctgtcttccctgggttctatttcgaaatcaacgaggatgagtttcacagaggcagcagccacagagaagaaaggtggaagagggaaaccgaagacttcaaagtccgtttcccgttcctccaaagctggccttcagtttcccgtcggccgtgtcgctcgctacctcaaggccggtcgctacgcccagcgcgttggctccggttcccttgtttatctctccgcggttctcgaatacctcgctgccgaggttttggagcttgcggggaacgctgcgagggacaacaagaagacgaggatcgttccgaggcacattcaactggcg

SEQ ID NO: 235211 - DNA, 384 bp, Glycine max
ggcacaagtgagtttgttgatcgagataactagaaacagtgtgatgaaaatgaaggtccttgttttcttcgttgctacaattttggtagcatggcaatgccatgcgtacgatatgttccctctccgaatgaacactggctatggtgcccgtactccggaggtgaaatgcgcaagttggaggcttgctgtggaagcacacaacatctttggctttgagaccattccttgaagagtgcgttgaagcaacaaaggaatacatccatggcgaacaatatagatcagactccaaaacagttaaccaacaagcttacttttatgccagagacctcgaagtccatcccaaggacacatttgtgttcagtatagatggcaccgtactctcta

SEQ ID NO: 235212 - DNA, 381 bp, Glycine max
gatagaagaagcagaaagagaagcattagcaaaagcaagaagaactagtctaagcagaaatggcctcttcagtgatggcatctgtggccctcaaacctgcccctttcactgttgagaagtcctcagttagaggccttccctccctctcaaggaactcctcttcattcagagttgtggccagtggtggcaagaagatcaagactgacaagccttatggaattaatggtggcatggctttgagggaaggagttgatgcatctggcaggaaaggaaagggaaaaggcgtttaccagtttgtagacaaatacggtgctaatgtcgatggttacagtcctatctacgacaccaaggactggtctccaaccggtgatgtctacgctg

SEQ ID NO: 235213 - DNA, 388 bp, Glycine max
ggttgtgaatcaacatagatattccgttttgcgtttctctgcctaaaaggattgaaacatgggtcaagcactaggttgctatcaagttgatcagtcaaatgtggctatcaaggagcattttgggaaatttgatgatgtcctacaacctgcatgtcaatgcctgccttggtgtcttgggtaccagattgctggtagtttgtcactgcgtgtgcggcaacttgatgttcgatgtgagacgacacccaaggacaatgtctttgtcactgtggttgcatctgtgcaatacccagctgtgtctgagaaagcatctgatgcattctataggcttaccaacacaagggagcagatccaatcatatgtttttgatgtcatcagggccactgtacca

SEQ ID NO: 235214 - DNA, 394 bp, Glycine max
gacgcacccacaccattctacactcccctctctcactcactcacactctcttctgtcatagctgtaccacgtttttcttctccatctgagcctctgtcccaacaccattctcatggctgctctagctctagcactgcttcttctggctttcactggcgcttcaagtgctacatggtgcgtttgcaaggatggaatcgacgcgatcctgcagaaaaccttggactatgcttgtggagctggtgctgactgtaatcctctccaccaaaacgggccttgtttccagcccaacaccgttagggcccactgtaactacgccgtgaacagctacttccaaaggaatggtcaagctcaagggtcctgcgactttgcgggaacagccattgttactgcatct

SEQ ID NO: 235215 - DNA, 379 bp, Glycine max
ggtgcacaagtgagtttgttgatcgagataactagaaacagtgtgatgaaaatgaaggtccttgttttcttcgttgctacaattttggtagcatggcaatgccatgcgtacgatatgttccctctccgaatgaacactggctatggtgcccgtactccggaggtgaaatgcgcaagttggaggcttgctgtggaagcacacaacatctttggctttgagaccattcctgaagagtgcgttgaagcaacaaaggaatacatccatggcgaacaatatagatcagactccaaaacagttaaccaacaagcttacttttatgccagagacctcgaagtccatcccaaggacacatttgtgttcagtatagatggcaccgtac

SEQ ID NO: 235216 - DNA, 392 bp, Glycine max
  unsure (1)..(392): unsure at all n locations
gagcttaatttgtgccacaactcataaaggaaagctttgagatttgttggacattttagagtggtgagaggatggtgggtgttatttcgttggtaacaggaatggctggtccaagtgggtttggatcagcttcaactgcagaacaggttaatgaaggagttgatgccagcaacctcactgcaattatcacaggaggagcaagtggtataggattggagacagcacgagtgttggctcttcgaaaggtccatgtcatcattgcagtacgaaacatggtgtctgcaaaagaggctaaacaacanatactagaggagaatgagtctgcacgagtggacataatgaagctcgacctttgctcagtgaattctattagatcatttgtggacaacttc

SEQ ID NO: 235217 - DNA, 379 bp, Glycine max
ggcacaagtgagtttgttgatcgagataactagaaacagtgtgatgaaaatgaaggtccttgttttcttcgttgctacaattttggtagcatggcaatgccatgcgtacgatatgttccctctccgaatgaacactggctatggtgcccgtactccggaggtgaaatgcgcaagttggaggcttgctgtggaagcacacaacatctttggctttgagaccattcctgaagagtgcgttgaagcaacaaaggaatacatccatggcgaacaatatagatcagactccaaaacagttaaccaacaagcttacttttatgccagagacctcgaagtccatcccaaggacacatttgtgttcagtatagatggcaccgtactc

SEQ ID NO: 235218 - DNA, 350 bp, Glycine max
ggcacaagtgattttgttgatcaaaataactagaaccagtgtgatgaaaatgaaggtccttgttttcttcgttgctacaattttggtagcatggaaatgccatgcgtacaaaatgttccctctccgaatgaacactggctatggtgcccgtactccggaggtgaaatgcgcaatttggaggcttgctgtggaagcacacaaaatctttggctttgagaccattcctgaaaattgcgttgaagcagcaaaggaatacatccatggcgaacattatagatcagactccaaagcagttaaccaacaagcttacttttatgccagagacctcgaagtccatcccaaggacacat

SEQ ID NO: 235219 - DNA, 339 bp, Glycine max
ggtataggcagctaaaaacaaagagtgtgatagtaagagtagtagaatagcggtctggtccaagtgctgcattatgcacacagagaaatggaacggttgtcatcttcgtccgcgatcgcgcagaagacatgggaactcgagaacaacatcaccccggtggacattccgggctgcgccgccatctcctccacaatcatcacgataagcaccgaccacgcgatcttctactacgacgaggcgggccagaaccagttccagcacgacaagtcctgcgccaacgaagttcactacttcaagcacgtgaagatctccgcactcgcgctcctcacgatggtcgtc

SEQ ID NO: 235220 - DNA, 382 bp, Glycine max
ggcacaagtgagtttgttgatcgagataactagaaacagtgtgatgaaaatgaaggtccttgttttcttcgttgctacaattttggtagcatggcaatgccatgcgtacgatatgttccctctccgaatgaacactggctatggtgcccgtactccggaggtgaaatgcgcaagttggaggcttgctgtggaagcacacaacatctttggctttgagaccattcctgaagagtgcgttgaagcaacaaaggaatacatccatggcgaacaatatagatcagactccaaaacagttaaccaacaagcttacttttatgccagagacctcgaagtccatcccaaggacacatttgtgttcagtatagatggcaccgtactctct

SEQ ID NO: 235221 - DNA, 357 bp, Glycine max
ggtgaaggatcctcaaaaggcatatctgagaacaatcacacccaagttcgagacgcttattgacatttcagtgatagagatattgtcaaggcatgcttctgatgaggtctaccttggccaaagggataatccaaattggactacggattcaaaggcattggaagctttcacaaagtttggaaacacactggcagaaattgagggaaaaatcacacagaggaacaatgatccaagtctgaaaagccgacatgggccagttcagcttccatacacattgctccatcgttcaagtgaggaagggatgagtttcataggaattcccaacagtatctccatctaaaatgtgtgtgtggtttg

SEQ ID NO: 235222 - DNA, 355 bp, Glycine max
gacacaagattgagacacgagacagacaatgccaggactcacagcaccttccgattactcccaagaacccccccgccactcttctcttctcagcaacgccaaggaacctttcaatgcggagccaccgcgtgctgcgttggttgcttcctacgtcacgccttccgatttcttctataagaggaaccacggtccaatccccatcgttgagaacatcaacagatattccgtgaacgtgtccggcttggtggagcgtcccaaacagctcttcatgaaagatatatggatgcttccaaagtataatgtcactgccacgttgcagtgtgcaggttatcgaaggactgctatgagcaagacc

SEQ ID NO: 235223 - DNA, 310 bp, Glycine max
ggttgtgtgagtgacacaacacagggagtaccggcattacaaatgcagatcatcgagaaaactctgacacggaagactactatcttcgaagtcgagagcagggacactatcgagaatgtcaacggcaagattcaatacaatgaatgcaatcctccggatcagcagcgtttgaatttcaccagaaagcatcttgaccatagcaggaccctgatcgattacaacatccagaacgaatcaagccttcatctcgtcctcaagcatcgtggcagcatcaatgaaccttccctcatagctttggctcgcaaataca

SEQ ID NO: 235224 - DNA, 393 bp, Glycine max
ggcacaagtgagtttgttgatcgagataactagaaacagtgtgatgaaaatgaaggtccttgttttcttcgttgctacaattttggtagcatggcaatgccatgcgtacgatatgttccctctccgaatgaacactggctatggtgcccgtactccggaggtgaaatgcgcaagttggaggcttgctgtggaagcacacaacatctttggctttgagaccattcctgaagagtgcgttgaagcaacaaaggaatacatccatggcgaacaatatagatcagactccaaaacagttaaccaacaagcttacttttatgccagagacctcgaagtccatcccaatgacacatttgtgttcagtatagatggcaccgtactctctaatattccata

SEQ ID NO: 235225 - DNA, 348 bp, Glycine max
agggaacagcgaagcagagagtgatttcagtgagtgatcggtgttcacttgatctcatcagaatcgtcagcgtcaattgaacaagatgccgatcagagatatcgtcgtcggaaggcctgaagaggcgactcatcccgacacgttgaatgcggctttggctgatttcatcgtcaaccttcagcttcgtgttcgccggctcaagctccggcatcgcctacattaagctcaccgatcacggcgctgtcatccctgccgggctcatctctgcctcaatcgcccatgcattcgccctcttcgtcgccgtctccgtcggtgccaacatcttcggcggccacgtcatacccgccg

SEQ ID NO: 235226 - DNA, 390 bp, Glycine max
ggcacaagtgagtttgttgatcgagataactagaaacagtgtgatgaaaatgaaggtccttgttttcttcgttgctacaattttggtagcatggcaatgccatgcgtacgatatgttccctctccgaatgaacactggctatggtgcccgtactccggaggtgaaatgcgcaagttggaggcttgctgtggaagcacacaacatctttggctttgagaccattcctgaagagtgcgttgaagcaacaaaggaatacatccatggcgaacaatatagatcagactccaatacagttaaccaacaagcttacttttatgccagagacctcgaagtccatcccaaggacacatttgtgttcagtatagatggcaccgtactctctaatattca

SEQ ID NO: 235227 - DNA, 364 bp, Glycine max; identical to SEQ ID NO: 235154

SEQ ID NO: 235228 - DNA, 336 bp, Glycine max
  unsure (1)..(336): unsure at all n locations
ggcacaagtttgttgagatagctagaagcaataagatgaaaatgaaagtgcttgttttgtttgttgctacagttttggtagcatatgaatgccatggctcagactaccagaagttccctctccaaatgaaaactgggtttggtgggcaatacagcactgaggtggcatgtgccagttggaggcttggcgtggaagcaaacaacgtactcaagtggcaaactgttcctgcagcttgcggagagtacatagctgactacgttctatgagaccaatatagatcagattccaaaacagttaaccaacaagcttatttctatgctaaatcactcanactca

SEQ ID NO: 235229 - DNA, 388 bp, Glycine max
ggcacaagtgagtttgttgatcgagataactagaaacagtgtgatgaaaatgaaggtccttgttttcttcgttgctacaattttggtagcatggcaatgccatgcgtacgatatgttccctctccgaatgaacactggctatggtgcccgtactccggaggtgaaatgcgcaagttggaggcttgctgtggaagcacacaacatctttggctttgagaccattcctgaagagtgcgttgaagcaacaaaggaatacatccatggcgaacaatatagatcagactccaatacagttaaccaacaagcttacttttatgccagagacctcgaagtccatcccaaggacacatttgtgttcagtatagatggcaccgtactctctaatatt

SEQ ID NO: 235230 - DNA, 381 bp, Glycine max
gagacaacgtttgttcgattcttaacacaacttcagctactcactctcttcttccaggtccagccatgctcttcgctacagtcatgggcacagtcaagatcggaatcaacggatttggaacacttggccgtatggttgccaaagtcgctcttcatcgagacgatgtgtacctcgtttccgtgaatgatgctttcattaacaccgactatatgacatacatgtttcaatacgacatgtgttcacggacactggaagcatcacgatgtcaacgtttatgactagaagacccttctcttcagtgacaagccagtcactgattctggacacatgaaccttgatcagatcgcatgatggtcaaccagagctgatagcattgttgac

SEQ ID NO: 235231 - DNA, 355 bp, Glycine max
ggcacaagtgagtttgttgatcgagataactagaaacagtgtgatgaaaatgaaggtccttgttttcttcgttgctacaattttggtagcatggcaatgccatgcgtacgatatgttccctctccgaatgaacactggctatggtgcccgtactccggaggtgaaatgcgcaagttggaggcttgctgtggaagcacacaacatctttggctttgagaccattcctgaagagtgcgttgaagcaacaaaggaatacatccatggcgaacaatatagatcagactccaaaacagttaaccaacaagcttacttttatgccagagacctcgaagtccatcccaatgacacatttgtg

SEQ ID NO: 235232 - DNA, 370 bp, Glycine max
gccgccgagcttattagaagataaaaggaggagcaggaagcatcaccgttaccaaacatggtgaaagggcgccaacgagagcgtgttagactttacgtcaggggttcaatacatggatacaagaggtccaagtcaaatcaatacccaaacacctcattaatccagattgagaatgtaaacactaaggaagaagttgcgtggtactgtgggaagcgtatggcttacatttacaaagccaatgtaaagaaggacggaagccactatcgctgcatttggggtatggtcaccaggcctcatggtaacagtggtatagttcgtgctaagttcaagtccaatctgccgcccagatcaatgggagcacaggttagag

SEQ ID NO: 235233 - DNA, 365 bp, Glycine max
ggcacaagtgagtttgttgatcgagataactagaaacagtgtgatgaaaatgaaggtccttgttttcttcgttgctacaattttggtagcatggcaatgccatgcgtacgatatgttccctctccgaatgaacactggctacggtgcccgtactccggaggtgaaatgcgcaagttggaggcttgctgtggaagcacacaacatctttggctttgagaccattcctgaagagtgcgttgaagcaacaaaggaatacatccatggcgaacaatatagattagactccaaaacagttaaccaacaagcttacttttatgccagagacctcgaagtccatcccaaggacacatttgtgttcagtatag

SEQ ID NO: 235234 - DNA, 380 bp, Glycine max
ggcacaagtgagtttgttgatcgagataactagaaacagtgtgatgaaaatgaaggtccttgttttcttcgttgctacaattttggtagcatggcaatgccatgcgtacgatatgttccctctccgaatgaacactggctatggtgcccgtactccggaggtgaaatgcgcaagttggaggcttgctgtggaagcacacaacatctttggctttgagaccattcctgaaaagtgcgttgaagcaacaaaggaattcatccatggcgaacaatatagattagactccaaaacagttaaccaacaagcttacttttatgccagagacctcgaagtccatcccaaggacacatttgtgttcagtatagatggcaccgtactct

SEQ ID NO: 235235 - DNA, 385 bp, Glycine max
ggagcttttctttctttctctgctctcttttcttttaagtttccactctcacacactctcgctcttctctttctctgcaataatctctcttctcttcttcactctctcaactcctgccaaacccccatttccgcagttcttaaatttggagtctgatgtcaccgccattgctggttatcgaagatgaagggcagtgccatgcctcgatggtagtatctgcatcttcatgatccctgaactgtttctccctaaatgaggctggatttaaagaatgcaattacctgggattgtcagattgctcttcggtggacagttctactgtcacgaatttgtctgatgagaaaaaggagaatctgaatttgatggctaatgagttgaggcttgg

SEQ ID NO: 235236 - DNA, 387 bp, Glycine max
gattgttgttgctattatcatccgcagctgcttttagtcgcaccgcaaacagtgagccatggccgtcggaaagaacaagcgcatctccaaggggaagaagggtggcaagaagaaggcagctgatccctttgccaagaaggattggtatgacattaaggctccttctgtttttcaagtgaaaaatgttggcaaaaccctcgtctctcgtactcagggtaccaagattgcttctgaaggactcaagcatagagtgtttgaggtctccttggctgatcttcaaggggatgaggatcatgcattcaagaagattaggttgagagctgaagatgtgcaagggaagaatgttctgacaaatttctggggaatggatttcacaacagacaagct

SEQ ID NO: 235237 - DNA, 364 bp, Glycine max
ggctcccattatatctgacgaatcaccgccaaaaggtgtgtagtttaagtgtgaatccctttccctctctactcttctttcactttccatttccatttccattttttctggttcactttctcgatggcctccgagaaccccaccgccgacgacgccgtcaacggcttcaatcggccggaaatgttctcggaaaacctcgccggcaccgtcgacgcctacgaccgccacgtgttcctctgctacaagagtcacctgtcctggcccccgcgcatcgaggcctccgacgccgatcccttccccaagcgcgtcgccgccaccttcaaagcccgcaagaacgacttgcccctcaagacgaaaatcaccg

SEQ ID NO: 235238 - DNA, 366 bp, Glycine max
ggccgaaaccaaaacccaaacccacagcacaatatgctatgctatgctctctaatccgtatccgccgtcaggctccgttccaccacactctccgctctctcatgccgattaaccgtttctcctcatcctcctcctcctccgcctccgccgccgccgccgccgccatggttgctcacgcgaaggacgaggcgtaccttagcgcggcgattccgaagcgcgtccgtctcttcgagaccatccaagccgagcaacgcacgcaacccctctcgctttcgccggattctatcaaggtcactctccccgaaggtaacgtcaacgacgccaaaaagtggctctcgacaccgctcgaccttgcgcgcgaaatct

SEQ ID NO: 235239 - DNA, 363 bp, Glycine max
  unsure (1)..(363): unsure at all n locations
ggactaaacccaggctgtaaaccctttttccatctagagttgttgcggctctcttctctgcacactcagaatgcagtccacactcttcagccccacccattcccttatccccacttcaccacactctatcagatccaattctggtcatgcttctctctccgttcgcgcctccatcgccgtggaaacccccacggagacggtgaagctgaacaagtacagctcccgcatcaccgagcccaaatcgcagggcgcctcncaggccgtgctctacagcgtcggtctctccgaggacgacatggccaagccccaggtcggcgtctcctcggtctggtacgaagggaacacctgcaacatgcacctcct

SEQ ID NO: 235240 - DNA, 303 bp, Glycine max
gaaggtgcacaagtttgttgtgagctatccactaatttatcgtgaggagaacatgaagttgtatgcattctttgttgctgcagcacatttggtagcatggccatgccatggcgcaagctaacacaggttccttctccgaatgaaaactggctatggtgatcgttcttcggaggtaaaatgcgcaagttttaggcatgctgtggcagcacacatcatccgagcctttaaaaccattcctgaagagtgcgttgaaccaagacatgactacattaatggcgaacaatttagatcagactccaaaac

SEQ ID NO: 235241 - DNA, 383 bp, Glycine max
ggcacaagtgagtttgttgatcgggataactagaaacagtgtgatgaaaatgaaggtccttgttttcttcgttgctacaattttggtagcatggcaatgccatgcgtacgatatgttccctctccgaatgaacactggctatggtgcccgtactccggaggtgaaatgcgcaagttggaggcttgctgtggaagtacacaacatctttggctttgagaccattcctgaagagtgcgttgaagcaacagaggaatacatccatggcgaacaatatagatcagactccaaaacagttaaccaacaagcttacttttatgccagagacctcgaagtccatcccaaggacacatttgtgttcagtatagatggcaccgtactctcta

SEQ ID NO: 235242 - DNA, 374 bp, Glycine max
ggcacaagtgagtttgttgatcgagataactagaaacagtgtgatgaaaatgaatgtccttgttttcttcgttgctacaattttggtagcatggcaatgccatgcgtacgatatgttccctctccgaatgaacactggctatggtgcccgtactccggatgtgaaatgcgcaagttggacgcttgctgtggaagcacacaacatctttggctttgagaccattcctgaagagtgcgttgaagcaacaaaggaatacatccatggcgaacaatatatatcagactccaaaacagttaaccaacaagcttacttttatgccagagacctcgaagtccatcccaaggacacatttgtgttcagtatagatggcaccg

SEQ ID NO: 235243 - DNA, 389 bp, Glycine max
ggacaaatgatggtaattagaggaagcacagtgtgtgactgtgccccaatttcttgtgcttaaagtgagcatgcatttacaactcacaagacacgatgccttcggctcaggatccattctatgttgtcaagcacgatattcaagagtctattgataagctagaatccacttttcaccaatgggaaaactactgctgatgttggcgatcgatccagtctatcaaaggaagttcttgctagttgtgaaagcagtgcatggcaagtggatgaattggacacagcaatttctgtggctgcaacagatccttcatggcatcgcattgatgaggtggaggttgaaaaccggatgaagtggaccagtgatgctcgcatccaggtgagcaaagcaaa

SEQ ID NO: 235244 - DNA, 389 bp, Glycine max
ggcacaagtttgttgagatagctagaagcaataagatgaaaatgaaagtgcttgttttgtttgttgctacagttttggtagcatatgaatgccatggctcagactaccagaagttccctctccaaatgaaaactgggtttggtgggcaatacagcaatgaggtggcatgtgccagttggaggcttggcgtggaagcaaacaacgtagtcaagtggcgaactgttcctgcagcttgcggagagtacatagctgactacgttctaggagaccaatatagatcagattccaaaacagttaaccaacaagcttatttctatgctaaatccctcaaactcaccaacaaagatgtctttgtcttggacgttgacgacactactctctctaatctc

SEQ ID NO: 235245 - DNA, 383 bp, Glycine max
gactcaccacttcaaaacactcataacacaaagcacaaagcaaagctcatccttgagttaaaaaatggcagcagcttcttccatggctctctcatccccatccttggctggcaaggccgtgaagctgggcccatcagccccagaagtgggaagggtgagcatgaggaagaccgtcaccaagcaggtctcctcaggaagcccatggtacggcccagaccgagtcaagtacttgggcccattctctggcgagcccccgtcctacctaaccggtgagttcccaggcgactacggctgggacactgctgggctttccgcagacccagaaaccttcgccaagaaccgtgaactcgaagtgatccactccaggtgggccatgctcggag

SEQ ID NO: 235246 - DNA, 386 bp, Glycine max; identical to SEQ ID NO: 235120

SEQ ID NO: 235247 - DNA, 379 bp, Glycine max
  unsure (1)..(379): unsure at all n locations
gcacaagtgagtttgttgatcgagataactagaaacagtgtgatgaaaatgaaggtccttgttttcttcgttgctacaattttggtagcatggcaatgccatgcgtacgatatgttccctctccgaatgaacactggctatggtgcccgtactccggaggtgaaatgcgcaagttggaggcttgctgtggaagcacacaacatctttggctttgagaccattcctgaagagtgcgttgaagcaacanaggaatacatccatggcgaacaatatagattagactccaaaacagttaaccaacaagcttacttttatgccagagacctcgaagtccatcccaaggacacatttgtgttcagtatagatggcaccgtactct

SEQ ID NO: 235248 - DNA, 383 bp, Glycine max
gggtaataattcttataacacaacacaacccatggccaccacctccgcattcctcctccttcccctcctcctgctgctccacctcgccatcgccgctcacggcatcggcatcaactacggcacgctcggcgacaaccttccaccgcccgcggcggtggcgaacttcctgaagacgaagacgaccatctaccgcgtgaagatctacgacgtgaacccggacatcctgcgggccttcgccggcagcggcatctccgtgacggtgaccgcccccaacggctacatcgccgccttaaccaaaatcgactcggcgaggcagtgggtggcgacgcacatcaaaccctttcacactcagaccacaattaattacatcctcgtccgcagcg

SEQ ID NO: 235249 - DNA, 359 bp, Glycine max
tgggatagcacaatcgtttctccagtttaatcatcattgtacaacccaattcccttcgtcgtgttcgactaagagagcagtggcacgtaccaagcaaaccgctcgcaagtccagcggaggaaaggctctgaggaagcagttggcaacgagagccgctcgcaagtcagccccggcgaccggcggagtgaagaagccccagcgcttcaggccaggaacggtggctctgagggagattcgaaagtaccagaagagcaccgaacttctgatccgaaaactcccattccagaggctcgtcagagaaatcgctcaggatttcaaacacgatctccgctttcagagcagcgccgtttcggctcttc

SEQ ID NO: 235250 - DNA, 378 bp, Glycine max
ggcatcaattcaaaatatatcatcaattataagcatgggtttgtggaacacaacgaatgcagtgtcttgccgctttcacaagtttggtgatgaccaaaagaatctggtcttccaaggtgatgccacgtcttcttccaggggcatagaactcacaaagttagacggtggaggaaaaccagtgggtggcagtgtggggagagtgttatactcttctccagtgcacctttgggaaagctctacagtggtcgcaagctttgaaaccgacttcaccttttccatctcatcagactctactactccaggtgatggccttgccttcttcattgcaccatttgacactaaaatccctccaaactctggtgggagcaaccttggact

SEQ ID NO: 235251 - DNA, 380 bp, Glycine max
ggcacacgtttgttgagatagctagaagcaataacatgaatatgaaagtgcttgttttgtttgttgctacagttttggtaacatatgaatgccatggctcagaccaccacaagttccctctccaaatgaaaactgggtttggtgggcaatacagcaattaagtcgcatgtgccagttggatgcttggcgtggaagcagcatcgtagtcacgtcgcaaactgttcctgcagcttgcggagagtacatagctgactacgttccaagagaccaattatacattagattccaaaacagtttaacaacatgcttacttcgatgccaaaaccctcaaactcaccaacaaagatgtctttgtcttggacgtttacgacactactctc

SEQ ID NO: 235252 - DNA, 365 bp, Glycine max
aggggcacacgtttgttgagatagcaacaagcaataacatgaaaatgacagtgcttgttttgtctgttgctacagttttggtcacaggggaaggccatggctcagactaccacaagttccctctccacatgaaaactgggtttggtgggcaatacagcaatgaggtggcatgtgccaattggatgcttggcgtggaagcaaacatcgtagtcacgtggcaaactgttcctgcagcttgcggaaagtacatagctgactacgttctaggagaccaatatacatcacattccaagacagttaaccaacatgcttatttctatgctaaatccctcaaactcaccaacaaagatgtccttgtcttggac

SEQ ID NO: 235253 - DNA, 377 bp, Glycine max
ggaatctcaatatcagtctctaatatttttctcactgtcttgtctctccatagaaccgtcgatacagagattgcagctgcaacatctggtgctgtgttaaatgggttgggatcctccttcatgagtggaggaaacacgagtcaaacccttctggccactgctattggaggcaaagttggtgctgctgctgttactgttagtcctagaagactcattgtggtatctgctgctgcaccaaagaagtcatggctccctgatgtcagaagttgtggcaacctcgtcgacccagaatggcttgatggatcgctaccaggtgactatggcattgacccactacgccttgggaaagacccagcattcctcaaatggtacagaga

SEQ ID NO: 235254 - DNA, 358 bp, Glycine max
ggcacaagtgagtttgttgatcgagataactagaaacagtgtgatgaaaatgaaggtccctgttttcttcgttgctacaagtttgggggcatggcaatgccatgcgtatgatatgtgccctcaccgaatgaacactgtctatggtgcccgtactccggacgtgaaatgcgcaagttggaggcttgctgtggaagcacacaacatctttggctttgagaccattcctgaatagtgcgttgaagcaccacaggaatatatccatggcgaacaatatagatcagactccaaaacagttaaccaacaagcttacttttatgccagagacctcgaaatcgatctcaaggacacatttgtgttc

SEQ ID NO: 235255 - DNA, 397 bp, Glycine max
aagacgacagaaggggacagctgaagctataaggagggactacccagatgaagattggttgcacttaactggccttatccatgatctcggcaaggtgctgaatttgcctagttttggaggacttcctcaatgggctgtagtaggggacacattcccagttggttgcagatttgatgaatccattgttcaccataagtattttaaggaaaatccagactacaacaatccagcatacaacactaaatatgggatttactcagagagatgtggacttaacaatgtgatgatgtcatggggacacgatgactacatgtatctagtggcaaaggagaatagtactacactgccctctgcggctttgttcattataagataccattcattctatgcattacat

SEQ ID NO: 235256 - DNA, 365 bp, Glycine max
gagagtggtggggtgtgcagaagagcgtcgcagttgtaaccctaatcagaagaagcgcagcttcaagcgagtgacagccaccagccatgggtcgtatgcacagccgcggtaagggtatatcctcttctgctttgccctacaaaaggacaccccctagctggctcaagatctcttcgcaagatgtcgaagaaaatatctgcaagtttgcgaagaaaggtttgaccccgtctcagattggtgtcattctcagagattctcacggtattgctcatgtcaatagcgtcactggcagcaaaatccttcgcatcctcaaagctcacggacttgcgcctgaaatttcagaggatctgtaccatttgattaag

SEQ ID NO: 235257 - DNA, 383 bp, Glycine max
gatagaagaagcagaaagagaagcattagcaaaagcaagaagaactagtctaagcagaaatggcctcttcagtgatggcatctgtggccctcaaacctgcccctttcactgttgagaagtcctcagttagaggccttccctccctctcaaggaactcctcttcattcagagttgtggccagtggtggcaagaagatcaagactgacaagccttatggaattaatggtggcatggctttgagggaaggagttgatgcatctggcaggaaaggaaagggaaagggcgtttaccagtttgtagacaaatacggtgctaatgtcgatggttacagtcctatctacgacaccaaggactggtctccaaccggtgatgtctacgctggc

SEQ ID NO: 235258 - DNA, 379 bp, Glycine max
gagagagtgttggtacgaaaaatgtcgaagctgatcttcgtgttcctttcgcttattcctcgtctctgcacctccttctcccgagagagaccctcagatcgacgcgtcctcgttttgctcgatgacttcgcgatcaaatcctctcattctctcttcttcaactccctcaaatctcgcggcttcgatctccaattccacctcgcagacgacccccaaattgcgctccagagatacggccagtacctctacgacgccctaattctcctttccgccagcattgaacgtgagttttccacttctcacccccccattgatatgttttttctttttccttttttcctgaaaactatggagatcgtgatttgtgttaaattgtttc

SEQ ID NO: 235259 - DNA, 381 bp, Glycine max
gaacagcgaaacagagagtgatttcagtgagtgatcggtgttcacttgatctcatcataatcgtcagcgtcaattgaagaagatgccgatcagaaacatcgccgtcggaaggcctgaagaggcgactcaccccgacacgttgaaggcggctttggctgagttcatctcaaccttcatcttcgtgttcgccggctcaggctccggcatcgcctacaacaagctcaccgacaacggcgctgccacccctgccggcctcatctccgcctccatcgcccatgcattcgccctcttcgtcgccgtcaccgtcggcgccaacatctccggcggccacgtcaaccccgccgtcaccttcggcgccttcgtcggcggcaacatcacctt

SEQ ID NO: 235260 - DNA, 360 bp, Glycine max
ggcacaagtgagtttgttgatcgagataactagaaacagtgtgatgaaaatgaaggtccttgttttcttcgttgctacaattttggtagcatggcaatgccatgcgtacgatatgttccctctccgaatgaacactggctatggtgcccgtactccggaggtgaaatgcgcaagttggaggcttgctgtggaagcacacaacatctttggctttgagaccattcctgaagagtgcgttgaagcaacaaaggaatacatccatggcgaacaatatagatcagactccaaaacagttaaccaacaagcttacttttatgccagagacctcgaagtccatcccaaggacacatttgtgttcag

SEQ ID NO: 235261 - DNA, 365 bp, Glycine max
ggtgatagtcagtcgagttaatcagataaaggatcttgagaaacaggtcaaggatcggaaagattgggctcatgagaaggcacgccacgcggcataaaagctaagcagtgatctgattgagctgaaaaagttcaagatggaaagagaggagaataaaaaactgccgaaggagacaggggcagctgaggagctggacaacccaaccatgatgagactctcagaaatggagaatgccttgagaaagactagtggtcaaatggaccaagcaactgcagctgtcagaaaacttgaggcggagaaagctgaaatcaaagcagagttagaggcttctaaattaagtgcatcagagtcagtcacaagctgtt

SEQ ID NO: 235262 - DNA, 381 bp, Glycine max
gaacacaacgcaacacaacgcgcactctctcttttctctcttaacacaaaaacccctatcgttcttcgcggtttcgccgattcgcgccatgccgaaagccaaatccgacgccaaagccgccgatagccggttgaagcgcaagggcgctggtgctggaaggaagcaatcgaagaaagctgctaaggatcctaacaagccaaagagacctccaagcgctttcttcgttttcatgtccgagttcagagagcagtttaagaaggagcatcctaacaacaaatccgtcgctgttgtcggtaaagctggtggtgacaaatggaaatcgctgtctgatgctgaaaatgcccccttcgttgccatggccgaaaagaagaaacaagagta

SEQ ID NO: 235263 - DNA, 410 bp, Glycine max
agacgtcagtagagcagagaaagaggaaaccacgctattacacaatgaattaggtggtagagatagatgaacggagggtaaaaaatgtcaacgacgttcaatacgaccatgcaaaagatatggcacgtcagcgcctgtcacggtcgtaacaggaagcatcgcaagcatcccagtggtcagggtaaccccagtcgcatgcaccaccaccgcatcctcttcgacaactatcatcccagtttcttcggaaaggtgtgtaagcactacttccacatactccgcaacaacttctactgccccatcgtcaacattgataagctatggtccctcctaactcaagaagccaacgacaatgtcaccgacgacaatgcaccattactcgatgtcacccagttcggttactttaaagtttt

SEQ ID NO: 235264 - DNA, 384 bp, Glycine max
ggcacgagtttgttgagatagctagaagcaataagatgaaaatgaaagtgcttgttttgtttgttgctacagttttggtagcatatgaatgccatggctcagactaccagaagttccctctccaaatgaaaactgggtttggtgggcaatacagcaatgaggtggcatgtgccagttggaggcttggcgtggaagcaaacaacgtagtcaagtggcaaactgttcctgcagcttgcggagagtacatagctgactacgttctaggagaccaatatagatcagattccaaaacagttaaccaacaagcttatttctatgctaaatccctcaaactcaccaacaaagatgtctttgtcttggacgttgacgacactactctctcta

SEQ ID NO: 235265 - DNA, 357 bp, Glycine max
gacaacacaacgcaacacagcgcgcactctctcttttctctcttaacacaaaaaccctatcgttcttcgcggtttcgccgattctcgcgatgccgaaagccaaatccgacgccaaaaccgccgatagccggttgaagcgcaagggcgctggtgctggaaggaagcaatcgaagaaagctgctaaggatccgaataagccaaagagacctccaagcgctttcttcgatttcgtgtccgagttcagagagcagtttaagaaggagcatcctaacagcaaatccgtcgctgttgtcggtaaagctggtggtgacaaatggaaatcgcagtctgatgctgaaaaagtcaccttcgttgcca

SEQ ID NO: 235266 - DNA, 383 bp, Glycine max
cggggcacaattgagtttgttgatcgagataactagatacagtgtgatgaaaatgaaggtccttgttttcttcgatgctacaagtttggtggcatggcaatgccatgcatacgatatgttccctctccgaatgaacactggctatggtgcccgtacaccggaggtgaaatgctcaaattggaggcttgctgtggaagcacacaacatctttggctttgagaccattcctgaagagtgcgttgaagcaacaaaggaatacatccatggcgaacactatagatcatactccagaacagttaaccaacaagcttacttttatgccagagacctcgaagtccatcgcaaggacacatttgtgttcagtagagatggtaacgtactct

SEQ ID NO: 235267 - DNA, 363 bp, Glycine max
ggcacaaaaatacaatacaaaacaaaacagagcaaagagagagtgtgtgaaaagtgagacaaagaacagaacaacaatgacgacacttaaggttcctcagcctcttccccccgttgcagatgattgtgagcagctccgaaaagccttctcaggttggggaactaacgaggagctgattgtatcgatcttggctcataggaatgctgctcagaggaagcttatcagagaaacttatgcccagacctatggagaagatctcctcaaggccttggacaaagaactcacgagtgattttgagaggctggttcatctttggacacttgattctgctgaacgtgatgcatttttggcagacgaggcgac

SEQ ID NO: 235268 - DNA, 254 bp, Glycine max
gcacaagtttgttgagatagctagaagcaataagatgaaaatgaaagtgcttgttttgtttgttgctacagttttggtagcatatgaatgccatggctcagactaccagaagttccctctccaaatgaaaactgggtttggtgggcaatacaacaatgaagtggcatgtgccaatttgaaggtttgccttgaaacaaacaacgttatccagttgcaaactgttcctgcaacctgccgagaattcataactgacc

SEQ ID NO: 235269 - DNA, 372 bp, Glycine max
gattttcattgggtgctgatcggaacaaccagggaatataagagagaataagatgggtttcagaatggaattcgcggagaacttggtattgaaattgatggaggatccgaaggaaagggatcggaggttccgggagcacgtttatacagtgaaggacaggtgcgagaagacgaaggagatgtggagctaccctatgcgaccctatgggttttggacattcgaacgccacaattctcagcttgcttgggatgcacagattagccaaatagctgggaggatggacccctatgatgatatcctccaacatttctctataccacctaagtgactgttgctgaacttgccacatccattgtatgtgaataaagatat

SEQ ID NO: 235270 - DNA, 380 bp, Glycine max
ggcacaagtgagtttgttgatcgagataactagaaacagtgtgatgaaaatgaaggtccttgttttcttcgttgctacaattttggtagcatggcaatgccatgcgtacgatatgttccctctccgaatgaacactggctatggtgcccgtactccggaggtgaaatgcgcaagttggaggcttgctgtggaagcacacaacatctttggctttgagaccattcctgaagagtgcgttgaagcaacaaaggaatacatccatggcgaacaatatagatcagactccaaaacagttaaccaacaagcttacttttatgccagagacctcgaagtccatcccaaggacacatttgtgttcagtatagatggcaccgtactct

SEQ ID NO: 235271 - DNA, 323 bp, Glycine max
ggcatcaattcaggatatatcatcaattataagcatgggtttgtggaacacaacgaatgcagtgtcctgccgctttcacaagtggtggtgaggaccaaaagaatctggtcttccaaggtgatgccacgtcttcatccatgggcatagaactcacaaagttagacagtggaggaaaaccactgggtggcagtgtggggagagtgttatactcgtctccagtgcaactttggaaaagctctacagtggtcgcaagctttgaaaccgacttcatcttttccatcacaacagactctactactccaggtgatggccttgccttcttc

SEQ ID NO: 235272 - DNA, 387 bp, Glycine max
ggttctagtgtgtgattgtttgttgttgtaacgcgttcttcatccttcgtggttctgtgtttgtgtttggtttttctcgcacctgagaatgtcatgctgcggtgataattgtggttgctgaaactcctgcaagtgcggcaacagctgcggaggctgcaagatgtagccagacttgagctacagtgagtcaaacaccacccatacatggtcacgggagtggcacctgttaacgctcaatttgagggtgctgaaaagggtgtgctcgctgagaacgatggctgcaaatgtggacgaaactgctcctgcaaacgctgcacttgcaagtgaggtgttgggagaacaaacttcaagcatagataacccttaattacgaataatgataaacta

SEQ ID NO: 235273 - DNA, 360 bp, Glycine max
gatcctctgcgagtgagtgtttcgttggagtcagaggcgatgatgtcttcaattacattcctatggatcctggtggtgtgtttgacgggatcatgcgcgctaagccaaccgcagaagctatcagcgtacgatgttctcatggagtacggcttcccggtgggtcttcttccgaagggaggcatagggtattcactgaacagagacagctgcgagttcgctgtgtattttgaaggagcctgcagcttcgacatagaatcctacgcgctcaagtacaagtccacaatcacgggtgtgatctccaatggcaggctctacactctcaaaagtgtcaccgtcagaatcttgctcctgtggctcaac

SEQ ID NO: 235274 - DNA, 380 bp, Glycine max
ggcacaagtgagtttgttgatcgagataactagaaacagtgtgatgaaaatgaaggtccttgttttcttcgttgcgacaattttggtagcatggcaatgccatgcgtacgatatgttccctctccgaatgaacactggctatggtgcccgtactccggaggtgaaatgcgcaagttggaggcttgctgtggaagcacacaacatctttggctttgagaccattcctgaagagtgcgttgaagcaacaaaggaatacatccatggcgaacaatatagatcagactccaaaacagttaaccaacaagcttacttttatgccagagacctcgaagtccatcccaaggacacatttgtgttcagtatagatggcaccgtactct

SEQ ID NO: 235275 - DNA, 350 bp, Glycine max
gataagtgccataacacataaacagaatggcttccacgtttggcgcatcttcaattaccttcctctcttcacgatactactcgtctcaggcccttgccaccgattcaccctctctaaccacagtgcagatatttgggcgcaagttttgcggaggaagaaatggatttcacagcgtcaagggaaggtctctgttcgcggttgcgagtgttcttgccactcaacttaactctgcataataggctcagaagattgcttttaccgagagccagaggtcagtgtacccattttcggctatagttggacaggatgaaatgaagctttgccttctcctaaatgtgattgatcccaaa

SEQ ID NO: 235276 - DNA, 380 bp, Glycine max
gacactaaacaagttaaaagaagagcatcactgaactaacaaagcaaccctatgtcgaaggtggtttgtgtcaccggagccagcggcgccatcggatcatgggtggtcctactcctcctccagcgtggttacaccgtccatgccaccgtccaagatatcaaggatgaaaatgagacgaaacatttggaggaaatggaaggagcaaagagtcatctccatttttttgaaatggatcttcttgacatcgactccattgccgctgccatagagggttgttccggcgtaatccaccttgcatgtcctaacatcattggtcaagtcgaagatcccgagaaacagatattggaaccggcgataaaaggaacggttaatgtgttgaa

SEQ ID NO: 235277 - DNA, 331 bp, Glycine max
ggtctcgctctgcacaaagcctaacaccaaaaccagaagcgacatcgcaatcgcaatccagcgaatatgatagtcgtcactggagacgtgctcgcattgttgggagggaatccttcaccgtctgcagatgacatcaaacacatcctcggcgcaattggcgctgaagctgataatgagttgattgagttgctcatgactgaactcaagggaaaagacatcaggtgagctaattgctaatggaagtgcaaagatgtctgcagtgtctggtggcggtgcagcggttgccgttgctgctgcagtagctggaggtgcagctgcacctgctgccgaa

SEQ ID NO: 235278 - DNA, 388 bp, Glycine max
ggcacaagtgagtttgttgatcgagataactagaaacagtgtgatgaaaatgaaggtccttgttttcttcgttgctacaattgtgggtagcatggcaatgccatgcgtacgatatgttccctctccgaatgaacactggctatggtgcccgtactccggaggtgaaatgcgcaagttggaggcttgctgtggaagcacacaacatctttggctttgagaccattcctgaagagtgcgttgaagcaacaaaggaatacatccatggcgaacaatatagatcagactccaaaacagttaaccaacaagcttacttttatgccagagacctcgaagtccatcccaaggacaaatttgtgttcagtatagatggcaacgtactctcgaatat

SEQ ID NO: 235279 - DNA, 376 bp, Glycine max
  unsure (1)..(376): unsure at all n locations
ggaacctcaaaatcagtctctaatatttttctcactgtcttgtctctccagagaactgtatagagagagatggcagctgcaggatctggtgctgtgttaaatgggttgggatcttccttcttgagtggaggaaacaggagccaaacccttctggccactgctattggaggcaaagttggtgctgctgctgttactgttagtcctagaagactcattgtggtagctgctgctgcacccaagaagtcatggctccctggtgtcagaggtggtggcaacctcgtcgacccagaatggcttgatggatcgctaccaggtgactatggctttgacccactaggccttgggaaggacccagcattcctcanatggtacagag

SEQ ID NO: 235280 - DNA, 304 bp, Glycine max
ggtgcacaagtgcatttgttgatcgacataactagaaacagtgtgatgaccatgaacgtccttgttttcttcgttgctacaattttggtagcatggcaatgccatgcctacgatatgttctctctccgaatgaacactggctatggtgcccgtactccggaggtgaaatgcgcaagttggaggcttgctgtggaagcacacaacatctttggctttgcgaccattcctgacgactgcgttaaagcagcatacgaatacatccatggcgaacaatatacatcagactccacaacagttaaccaac

SEQ ID NO: 235281 - DNA, 383 bp, Glycine max
gaccgcgcaccacactgagaggaagagggagtgagagagagtgttcttcgtttgctaccttctcccagaaatggttacgttcaggtttcaccagtaccaggtggtcgggagggctctcccaacggaagcagatcagcatccgaagatctaccgaatgaagctctgggccaccaacgaggttcgcgccaagtctaagttctggtattttttgaggaagctgaagaaggtgaagaagagcaatggtcaagttcttgctatcaacgagatttttgagaagaacccaaccaagattaagaactacgggatatggttgcggtatcagagtacgactggttaccacaacatgtacaaggagtaccgcgataccactctaaacggttcag

SEQ ID NO: 235282 - DNA, 385 bp, Glycine max
ggcacaagtgagtttgttgatcgagataactagaaacagtgtgatgaaaatgaaggtccttgttttcttcgttgctacaattttggtagcatggcaatgccatgcgtacgatatgttccctctccgaatgaacactggctatggtgcccgtactccggaggtgaaatgcgcaagttggaggcttgctgtggaagcacacaacatctttggctttgagaccattcctgaagagtgcgttgaagcaacaaaggaatacatccatggcgaacaatatagatcagactccaaaacagttaaccaacaagcttacttttatgccggagacctcgaagtccatcccaaggacacatttgtgttcagtatagatggcaccgtactctctaat

SEQ ID NO: 235283 - DNA, 395 bp, Glycine max; identical to SEQ ID NO: 234808

SEQ ID NO: 235284 - DNA, 398 bp, Glycine max
gcgtcaagcggaagtaagatgacacaagacgacagaacggggtacacagttgaatttgttgatcgacataactagaatcagtgtgaagggcctttgtgtccttggtttcatcaattttaggggttgggaacatgcaaatgtcaaacatatgacatgttccctctccgatgtgagcactggctatggtagcccgtactccggaggtgaaatgcgcaagttggaggcttgctgtggaagcacacaagatctttgactttgcgaccattcctgacgtgtgcgttacagcagcatacgtatacatccatggcgaacaatatcgctcagactccataacagttaaccaacatgcttacgtttaagccagagacctcgaagtccatcacaatgacacatttgtg

SEQ ID NO: 235285 - DNA, 380 bp, Glycine max
gctcctttgtttgattagggttttttcgcttcttctattcactctgttacggtgcaacctagcagcctccaaatccaatggcttcagagaagaaactttcgaacccaatgagggagataaaagtgcagaagctcgtcctcaatatctctgttggcgagagtggagatcgtctcaccagagccgccaaggtgttggaacaacttagtggccaaaccccagtgttttccaaagcaaggtacactgttcgttcctttgggattagaagaaatgagaagattgcatgctatgtcactgtcagaggtgacaaggcaatgcaacttttggagagtggtttgaaggtgaaggaatatgaacttctcagaaggaacttcagtgatacg

SEQ ID NO: 235286 - DNA, 379 bp, Glycine max
ggaaacagagagtgatttcagtgagtgatcggtgttcacttgatctcatcataatcgtcagcgtcaattgaagaagatgccgatcagaaacatcgccgtcggaaggcctgaagaggcgactcaccccgacacgttgaaggcggctttggctgagttcatctcaaccttcatcttcgtgttcgccggctcaggctccggcatcgcctacaacaagctcaccgacaacggcgctgccacccctgccggcctcatctccgcctccatcgcccatgcattcgccctcttcgtcgccgtctccgtcggcgccaacatctccggcggccacgtcaaccccgccgtcaccttcggcgccttcgtcggcggcaacatcaccttcctc

SEQ ID NO: 235287 - DNA, 375 bp, Glycine max
gaaggtgcaagagtttgttgtgagctataagctagtttatcgtgaggagaatatgaagttgtttgttttctttgttgctgcagtagttttggtagcatggccatgccatggcgcaggctaccaaaggttccctctccgaatgaaaactggctatggtgagcgttcttcggaggtaaaatgcgcaagttttaggcttgctgtggaagcacacaacatccgagcctttaaaaccattcctgaagagtgcgttgaaccaacaaaggactacattaatggcgaacaatttagatcagactctaaaacagttaaccaacaagctttcttttatgctagtgaacgcgaagttcatcacaacgacatatttatattcggcat

SEQ ID NO: 235288 - DNA, 365 bp, Glycine max
  unsure (1)..(365): unsure at all n locations
gatcacaacatcatagtaagcactatagtaaaaaaaggacattcattcatctatggctacccttattgctcccagcaaccactctccccaagaagatgctgaagctctcagaaaggcttttgaaggatggggaactgatgagaacactgtcatagtaattttgggtcatagaactgtgtatcagaggcagcagatcagaagagtttatgaggaaatttaccaggaggatcttgtgaagcgcctagagtctgagatcaaaggagactttgagaaagccgtgtaccgatggatactggaacctgcagatcgtggtgctgttttggccaatgttgccatcaggagtggcanaaactacaatgtcattg

SEQ ID NO: 235289 - DNA, 385 bp, Glycine max
  unsure (1)..(385): unsure at all n locations
gaaaacaacaaattttcagactcaacaagcttcgaaccaaatcttattgagaaaatgtctggtcgtggaaagggtggaaagggtttgggaaagggaggtgccaagaggcacaggaaggttcttcgtgacaacatccagggcatcacgaaacctgcgattcgtaggttagcgagaagaggtggcgtgaagaggatcagtggtttgatctacgaggaaaccagaggagttctgaagatattcttggagaacgtgattcgcgatgctgtgacctacactgagcacgctangaggaagacggttactgctatggatgttgtttatgctcttaagaggcagggaaggaccctctatggttttggaggctaaaaagttcttagtgttattg

SEQ ID NO: 235290 - DNA, 385 bp, Glycine max
ggttctagtgtgtgattgtttgttgttgtaactcgttcttcgtcttttgttgttctgtgtttgtgtttgttttttctctcacgtgaaaatgtcttgctgcggtggtaactgtggttgcggaagctcctgcaagtgcggcaacggctgcggatgctgcaagatgtagccagacttgagctacactgagtcaaccaccaccgagaccttggtcatgggagtggcacctgttaaggctcaatttgagggtgctgaaatgggtgtgcccgctgagaacgatggctgcaaatgtggaccaaactgctcatgcaacccctgcacttgcaagtgaggtgttgggagagcaggcttcaagcagagatacccttaattaggaatatgataaact

SEQ ID NO: 235291 - DNA, 369 bp, Glycine max
ggttctcacagcatatatatcaagaatctattttatactatacctacattttgacaattttctttgtagttgatagccatggctacccgtggaaagcttgaggttgacattgatctcaagtccaacgcagacaagtactggcaaacccttaggaattctactgaaatattccctaaggccttcccacatgattacaaaagcattgaggttcttgagggtgatggcaagtctcctggatctatccgccacataagttatggtgaacgttcaccacttgtgaaatcatcctttgagaagattgacgctgttgatgaggaaaagaacgtactgtcgtacactatcattgatggggaactcctccagcactac

SEQ ID NO: 235292 - DNA, 389 bp, Glycine max
actacagaagggggaagctggaaaagttagaagtagtgaagaaaatgaaagtcattgttttcttcgttgctataataattttaggtgcagaatggcaatgcaatgggtcagagcatgagcatgagcatggccacagctaccaaattttccctttgcgaatgaaaaccggccccggtggccactacattccggaggtatcgtgcaaaagttggaggcttggtgtggaagcacacaacgtcattgactggagaaccattcctcaagattgcgagggatatataggaaactacatgcttggccaccaatatagattagactccaaaacagtttgccgtgaagcttatttttatgctaaaaccatcaacatcactgccaagaccacattggtg

SEQ ID NO: 235293 - DNA, 401 bp, Glycine max
ggaagctggaaaagttagcagtagtgaagaaaatgaaagtcattgttttcttcgttgctataataattttaggtgcagaatggcaatgcaatgggtcagagcatgagcatgagcatggccacagctaccaaattttccctttgcgaatgaaaaccggccccggtggccactacattccggaggtatcgtgcaaaagttggaggcttggtgtggaaacacacaacgtcattgactggagaaccattcctcaagattgcgacggatatataggaaactacatgcttggccaccaatatagatcagactccaaaacagtttgccgtgaagcttatttttatgctaaaaccatcagcatcactgccaagaccacatgggtgttttatgtagatgagactacactc

SEQ ID NO: 235294 - DNA, 380 bp, Glycine max
gactcaagcacaacatctctatcgagtaaattaactatgaagcctaccctactattatccctttccttcctgcctctctttgctttcctggctctttcagaagatgttgaacaagttgtggacataagtggcaaccccattttcccaggtggcacatattacattatgccatcaacttggggcgctgccggtggtggattgaaactaggccggacaggaaactcaaactgcccagttactgttttgcaagattactcagaaatcttccgtggcacaccagtcaaattcagcatacctgggataagccctggaatcatctttacaggtactccacttgaaatcgagttcgcagagaaaccttaatgtgctgaatcctcaaa

SEQ ID NO: 235295 - DNA, 394 bp, Glycine max
ggcacaagtgagtttgttgatcgagataactagaaacagtgtgatgaaaatgaaggtccttgttttcttcgttgctacaattttggtagcatggcaatgccatgcgtacgatatgttccctctccgaatgaacactggctatggtgcccgtactccggaggtgaaatgcgcaagttggaggcttgctgtggaagcacacaacatctttggctttgagaccattcctgaagagtgcgttgaagcaacataggaatacatccatggcgaacaatatagatcagactccaaaacagttaaccaacaagcttacttttatgccagagacctcgaagtccatcccaaggacacatttgtgttcagtatagatggcaccgtactctctaatattccatac

SEQ ID NO: 235296 - DNA, 403 bp, Glycine max
ggcacaagtgagtttgttgatcgagataactagaaacagtgtgatgaaaatgaaggtccttgttttcttcgttgctagaattttggtaggatggcaatgccatgcgtacgatatgttccctctccgaatgaacactggctatggtgcccgtactccggaggtgaaatgcgcaagttggaggcttgctgtggaagcacacaacatctttggctttgagaccattcctgaagagtgcgttgaagcaacaaaggaatacatccatggcgaacaatatagatcagactccaaaacagttaaccaacaagctttactttatgccagagacctcgaagtccatcccaaggacacatttgtgttcagtatagatggcaccgtactctctaatattccatactacagaaaa

SEQ ID NO: 235297 - DNA, 375 bp, Glycine max
ggagcgaagaagatattagggtttttgagtgcggtgcggcgatcctagcactctcttctgcagctttcgccgacagcttcattcaccatggctgagcaaaccgagaaggcttttttgaaacaaccaaaagtgtttctcagctcgaggaagactgggaagggaaagagacccggaaagggtgggaagcgcttttggaaatccattgggcttggatttaagactcccagggaagccatcgaaggaacctacattgacaagaagtgccccttcactggcaatgtttccatccgtggccgtatcttggctggaacatgtcacagtgctaagatgaacaggactattagtgttaagaggaattatctccattttagcaag

SEQ ID NO: 235298 - DNA, 405 bp, Glycine max
ccgctttcatccaggttgtttacatggctttggttggatcatttccatttaactccttcctatcaggagtactttcttgtgtacgaactgctgttcttgctgtttgcctcaggatgcaagtgaataaagagaataaggaattcaaggatcttgcacctgagcgcgcttttgcggattttgttctctgtaatttggtgcttcatttggtgatcatgaacttccttggataaattgggtttgtgtggcggttgttgtttctgattgaacccttggataataaaaattaaatagtactatacctagacttctgtaagagtacttatagacagtagccggcattctactaattgctttagctttatgttgattacccccaccccccatttctggttccctgttttgaac

SEQ ID NO: 235299 - DNA, 369 bp, Glycine max
gagattgatgagcgtcatgatgttggacagtgtgactagcaagcagagtcattggagacgtcgatgtcacagttgcgggggcatggaaaggacgggagtacaataagtgaacgttcaaaatgttcagtttcaagggtgtggataccgatgcacgtctggaaatgtccatcgatgaatgcttgaaaatcataagtgatcgctcacgtagagagtactacagaggactcagtagaaagcccataggcttgaatacaaggcttcgcatagcgataagagaagctccaccatgatgagaagccagaacctgtacgcacacatctccgcaacacgatcactgtgactgatatgagtggaatcaatattgcagtg

SEQ ID NO: 235300 - DNA, 410 bp, Glycine max
ggcccaccaaacgccattcaatttgcctccctcccaatcccacagcgctccctccaccgtgacaatcactcactccccactcatcaccaggagagaaacgcgtgagaaacattcctctcagagcgcgtggaaacaccccctctcccaccaccaacccttgccgtcgtgccctgtccctccacaaccaaacccttccttctctcaacttgcttattcccacaacacaacacaacgcacaaacacacagaaaatttctagagcgagaaagtgagaggagagagaaagtagctgatcctccatggcctccaccaaggaacgcgaaaactttgtctacaccgccaagctcgccgaacaagccgaacgctatgaagaaatggtggaagcaatgaagaatgtggcgaacctgaacg

SEQ ID NO: 235301 - DNA, 382 bp, Glycine max
gattccattttctaaaatggcaagcaacaccaccatggtagacgagcgtgcaggggcggagatcgtgtatggcgcggaggaatgccaccgcagctccatggagctcctggaagagcttggattccccaaaggggtgatgccattgaaggaccttgtggagtgcggccgggttcgcgaaacggggttcatttggatgaagcagaaggcgccaagccagcacttcttcgaggcaaccaagaccctcgtgagctacgcggcggaggtcaccgcctatgtggaaaagttcaagatgaagaagatgaatggcatcaagagcaagcaagtgttcatttgggtgccaattgctgagatgagcattgatggggacaatgggaaaagatac

SEQ ID NO: 235302 - DNA, 352 bp, Glycine max
aggggcacaagtgaggttgttgatcgagataactagaaacagtgtgatgaagatgaaggtccttgatttcgtcgtagctacaattttgggagcatgggaatgccatgcgtaagagatgttccctcaccgaatgaacactggatatgggggccgtaattcggaggtgatatgcgcaacttgggggcttgctgtggaagcacaaacatctttggcattgggaacaatccctggaaaatgcgttggagcaacagacgaatacgtccatggcaaaaaatgtcaatgagaatcaagaacagttaaccaacaagcttacttttaggccagagacctcgaagtcaatcccaaggacaca

SEQ ID NO: 235303 - DNA, 363 bp, Glycine max
  unsure (1)..(363): unsure at all n locations
ggaacctttgcattctattcattcaagattcagcaagtgcgttttggaagcagagaccgaaatacttcgagatggcccgtacaaagcaaactgctcgtaagtcaactggaggaaaagctcccaggaagcagcttgcaaccaaggctgcacgtaagtctgcaccaacaactggtggtgtgaagaagcctcatcgttatcgccctggaactgttgctcttcgtgagattaggaaataccagaagagcactgagctcctaatcaggaagcttcctttccagaggttggttcgtgaaattgcccaggatttcaagactgatctgcgtnttcagagccatgctgtgcttgcattgcaagaggctgctg

SEQ ID NO: 235304 - DNA, 396 bp, Glycine max
gggtcctcacataggaaaagaagcggtgttcgaatttgaggggtgaatggatcaatcgttccttgtaatggtctcgaatctcctccagctccacaactccctggaccccaccagctccctcctctccaacgccgacggcgcatcctccctcctccactcctcctccgtcgcccctctcctcttcttcaccatcgcctccgtcctctccttcgtcgcctccacgcgcccctctccttcctcggactactctgtctctgccttccgcaccctctccacagaacacatctggtccctggaagcccctcttcgccacgcccactggcgcttcctctacggcctctcctaccccgtcttcaacacggtcgtcgacaagctcaggccccacatcgccctctc

SEQ ID NO: 235305 - DNA, 415 bp, Glycine max
  unsure (1)..(415): unsure at all n locations
gataccacaaacaaaacacaagccaagtgaaagtgagaaagaataaaaatcaaagagcataatgtcagggatcattcacaagattggggagacccttcatgtgggagggcacaagaaggaggaggagcataagggtgagcaccatgctggagaatacaaaggggagcaccatggtgaacacagtagtgagtacaaaggagagcatcatggtgaacacaaagctggagagtaccatggtgagcacaagccagagcacaaagaggggttcctagacaaagtcaaggacaagattcatggtgagggcggcgccgccganggcgagaagaagaagacggagaagaagaagaagagcatggccatgagcatgggcatgacagcagcagcagcagtgacagtgattaaactgctgcatcac

SEQ ID NO: 235306 - DNA, 398 bp, Glycine max
gattttcttcgttgagcagaaagctaaaggctaaagcctagaaccttcttcctttacacctcgctggaaccagcgatggatcctcagcctgagccagtcagctacatatgcggagattgtggaatggagaatacgctgaagcccggtgacgttatacagtgccgtgagtgcggttaccgtattctttacaagaagcgcactcgtcgcattgtccagtacgaggcacgctgaagaaaactgctataacgtttgcaagtaatttccatgaagaaattgttactacatctgtgttgtgtgatattgaagaactacttttaattctacagtagattgctttttgggtgatgtttagcacaagataaaaactttgaatgtgaatatattacaaacatccgtgt

SEQ ID NO: 235307 - DNA, 402 bp, Glycine max
gatacatagagagcgtggcataacgtaaacttatccttcctccctctgtgtgtgtgcgcatcaaacgcaaccagatgcagccatggccactgccagaactgtgaaggacgtttctcctcaggagttcgtcaaggcttactcttctcacctcaagcgatctggcaagatggagctgccacagtggactgatattgtgaaaactgcaagatttaaggagttggctccatatgatcctgactggtactatgtcagagctgcttccatggcaagaaagatctacctgagaggaggacttggtgttggtgcctttcagatgatttatggtgtgagcaagaggaatggtagccggcctcctcatttctgcaagagcagtggtgctgtagctcgtcatattcttcaaca

SEQ ID NO: 235308 - DNA, 380 bp, Glycine max
  unsure (1)..(380): unsure at all n locations
gacacagctattcctcttaagcttgctactgagtttccacactgcataccttaggtcttccgaattcgaagttaatttgcaagatggctaaggaaaaggctcagatcaacattgtggtggttggtcatgtggaccctgaggaggcaaccaccattaacgagctgaagaagcctgttgtggagaaagaagctccagggcatgccatatgagggcatgcacgtacggcctcggaggggaaccagaaaattatgttaacaaaataatctggaaccctaatgtatcagtgtcatcatcagtgtgtagtttaagctagctttgctatggttacgttctttgagatgagagtcttgatgaacagtaccattctgatgtantgcttt

SEQ ID NO: 235309 - DNA, 359 bp, Glycine max
gagacacgtacgcaactgaaacggaaaaccctattacatgaatagaactcctatcttgttcgctctcttctttcatctttgtgccttcagctcatatcgaccatcatgccaacgctgatgatgatcatgtgtacgacagtgacggcgatcagcttcaatacggtgtcaattactgcgtgttgccagtgataacaagagctggcagtggaatagcagtaacataaggacgaaacgaggattgacctctgactgtggtgcaatctggcagcgagctctctgatgggttatcgatacagatgtgcatctcgatcagcatgagtcgctttcatcattcattgccagcatttcagtaacattca

SEQ ID NO: 235310 - DNA, 360 bp, Glycine max
ggtttcagagtggtggggtgtgcagaagagcgtcgcagttgtaaccctaatcagaagaagcgcagcttcaagcgagtgacagccaccagccatgggtcgtatgcacagccgcggtaagggtatatcctcttctgctttgccctacaaaaggacacctcctagctggctcaagatctcttcgcaagatgtcgaagaaaatatctgcaagtttgcgaagaaaggtttgaccccgtctcagattggtgtcattctcagagattctcacggtattgctcaggtcaatagcgtcactggcagcaaaatccttcgcatcctcaaagctcacggacttgcgcctgaaattccagaggatctgtacca

SEQ ID NO: 235311 - DNA, 368 bp, Glycine max
ggacaacgaaactcacagaagaaagaagaaaaagaagcgaaactaaagtcagcattcgaaaaagatgagtagcatcggtacaggttacgatctatcggtcaccactttctcccctgatggccgcgttttccagatcgagtatgccgctaaagccgtcgacaacagcgggactgttattgggatcaagtgcaaagatggggttgtgttgggcgttgagaagcttattccgtcgaaaatgatgcttccgggttccaatagaagaatacactccgttcatcgtcactctgggatggctgtagcaggattagcagctgatggcagacaaattgttggcagggctaagtctgaagctactaactatgacagcg

SEQ ID NO: 235312 - DNA, 319 bp, Glycine max
gggccaaaaaaccacaggaaggggggaacctttctcacagaacaatcaagaattagaagcttgactattgtcagcattcgccgaagatgagtaacatcggtagatgttacgatctagcggtcaccacattcgcacgagatggtcgcattttccagctcgagtatgccgctgcagctgtctctaccagcgggactgttagtgtgatcaagtgcaaacatagcgttgtgttaaccgttgacaagcttattccgatcgaaaatgatgctaccaggttccactagaacaagacactccgttcatcgacactctggcatggctg

SEQ ID NO: 235313 - DNA, 199 bp, Glycine max
gagaacctttgcacaccaaacacacaagaatcacctcctttgtatcgtcatcattcatgcatcttgcatccccatagcctcatgcctcaatggcgcgctaagtactatcgcccgattaagacgccaccactatattggcctccactctacaagtcactactgtacaacccactggtttataaatcaacatcaccggctt

SEQ ID NO: 235314 - DNA, 398 bp, Glycine max
  unsure (1)..(398): unsure at all n locations
ggagttgagaggatcgtgagaggggcagtagccgagattccgtgagttgcaaaaatgaagacgattctttccagcgagaccatgaacatcccggacggcgtgagcatcaaagttcatgccaaggtcatcgaagttgagggcccccgcggaaaattggtgcgagacttcaagcatttgaatctcgattttcagctcattactgacgaaaacggtaaaagaaagctgaaaatcgacgcgtggtttggttctcggaaaacatccgccgccattcgcaccgccttgagccacgtggagaatcttatcaccggcgtcaccaagggctaccgctacaaaatgaggttcgtttatgcccattttcccatcaacgcangcatcggcaacagcaacaggtctattga

SEQ ID NO: 235315 - DNA, 385 bp, Glycine max
gactcaccaggtgcaccaacagagcccacgccctatacaaccaaaccctaacacacacccatttgattcactttccatggctagcctcaaggttgcatttttggctgcagtgctctgcatggttgtggtgagtgcacccatggcacatgcagctatcacgtgcgggcaggtgacgaatagcctgatcaattgcatcggttacctccagaacggaggaatgccgccgtcgggatgctgcaacggtgtgaagagcctcaatgccgccgccaagaccaccgccgaccgccagacggcgtgcaactgcctcaagtcggccgccagccaaatctccggcttcaaagccaacaacgccgcctcgctcgccggcacatgcggagtctccatc

SEQ ID NO: 235316 - DNA, 376 bp, Glycine max
ggtgcacaagtgagtttgttgatcgagatacctagaaacagtgtgatgaaaatgaaggtccttgttttcttcgctgctacaattttggtagcatggcaatgccatgcatacgatatgttccctctccgaatgaacactggctatggtgcccgtactccggaggtgaaatgcgcaagttggaggcttgctgtggaggcacacaacatcatcggctttgagaccattcctgaagagtgcgttgaagcaacaaaggaatacatccatggcgaacaatatagatcagactccaaaacagttaaccaacatgcttacttttatgccagagacctcgaagtccatcccaaggacacatttgtgttcagtagagatggcaccg

SEQ ID NO: 235317 - DNA, 350 bp, Glycine max
ggcagcgcttgagattaagccccactcaaccaccacaccactctctctgctcttcttcgacctttcaagtttttagagtattaagatggcagagacattcctatttacctcagagtcagtgaacgagggacaccctgacaagctctgcgaccatatctccgatgctgtcctcgacgcttgccttgatcaggacccagacagcaaggttgcctgcgaaacatgcaccaagaccaacttggtcatggtcttcggagagatcaccaccaaggccaacgttgactacgagaagatcgtgcgtgacacctgcacgaacatcggcttcgtctcaaacgatgtgggacttgatgctg

SEQ ID NO: 235318 - DNA, 386 bp, Glycine max
ggtcactcaccacttcaaaacactcataacacaaagcacaaagcaaagctcatccttgagttaaaaaatggcagcagcttcttccatggctctctcatccccatccttggctggcaaggccgtgaagctgggcccatcagccccagaagtgggaagggtgagcatgaggaagaccgtcaccaagcaggtctcctcaggaagcccatggtacggcccagaccgagtcaagtacttgggcccattctctggcgagcccccgtcctacctaaccggtgagttcccaggcgactacggctgggacactgctgggctttccgcagacccagaaaccttcgccaagaaccgtgaactcgaagtgatccactccaggtgggccatgctcggag

SEQ ID NO: 235319 - DNA, 414 bp, Glycine max
  unsure (1)..(414): unsure at all n locations
ggcacaagtgagtttgttgatcgagataactagaaacagtgtgatgaaaatgaaggtccttgttttcttcgttgctacaattttggtagcatggcaatgccatgcgtacgatatgttccctctccgaatgaacactggctatggtgcccgtactccggaggtgaaatgcgcaagttggaggcttgctgtggaagcacacaacatctttggctttgagaccattcctgaagagtgcgttgaagcaacaaaggaatacatccatggcgaacaatatagatcagactccaaaacagttaaccaacaagcttacttttatgccagagacctcgaagtccacccaaggacacatttgtgttcagtatagatggcaccgtactctctaatattccatactacanaaacatggatatgggg

SEQ ID NO: 235320 - DNA, 425 bp, Glycine max
  unsure (1)..(425): unsure at all n locations
ccacgcgtcaaacggatgcaagaagacaacaaaagggggccttggtgggtgcaccgataatggcgcaagccatgacatgcaatgatgtaacggtcaacatggcacagtgcctatcctacctgatgcacggaggaacaccttcaacactttgctgcagcggagtcaagaacattcttggctctgctgtcaccaccgttgacaaacaaactgtgtgcaactgtctcaaggcggatgctgctaagtacaacatcaatgaccagtatgctcaggcactccctggtttctgcaaggtcaatgtcacttacaagattagccgctccactaactgtgcaagcatcaggttctgaacaagccatggacagatctgctcatttctgcancgggatactgatgcagcagtgaagcacttactatcacgataagag

SEQ ID NO: 235321 - DNA, 410 bp, Glycine max
  unsure (1)..(410): unsure at all n locations
ggagctggtattcaaggaggacggacaggaatacgcgcaggttctccgaatgctcggaaacggtcgctgcgaagcgatgtgcatcgacggcaccaagcgcctctgccacatccgcggcaagatgcacaagaaggtctggatcgccgccggcgacatcatcctcgtcggcctccgcgactaccaggacgacaaggctgacgtcatcctcaagtacatgcccgatgaggcccgcctcctcaaggcctacggcgagcttcccgacaccaccaggctcaacgagggcatcggcgccggcctcgatgangangangacggttccgggaatgattatattgagttcgaggatgaggatattgataagatttgaaacaaatacaaataattacggttttggttttggttgctgttga

SEQ ID NO: 235322 - DNA, 381 bp, Glycine max
ggaataatacgaagatgactagcaaagggttgctgagaggagcttcgttaactgcaaacgcagtttggcatagaagcagtttcttcccaaaggtaacggttagcgtccaccccaagttggtgaaatttcagagcttctcatcaaccaccgcttgctcctctcttccacccccggatttgcctcgtttggcaaaaactgctcaaatttcacttaccccaaacgaggttgaagaaattgctcccaaaattcaacaagttatagaatggtttggacagctgcagggtattgatcttgaaagtgttgaaccctcgatcagagcagagactgaaaacaatttgcgtggtaatgctcctgaaacatttgaccatagggacgccttga

SEQ ID NO: 235323 - DNA, 400 bp, Glycine max
gacggcactcgttttcgttctcgttctggtttatagatctttgcgaaggaggtttacagcgctcaaccaaagatgcagaacgaggaaggacagatcactgagctttacattcctaggaagtgctccgccacaaacagattgattaccgctaaggaccatgcttcggttcagatcaacattgggcatgtggatgagaatggcgtctacaatggccatttctccacttttgccctctgcggattcatccgtgctcagggtgatgctgacagtgctctagaccgcttgtggcagaagaagaaagttgaagttaagcaacagtagacacccatgatagtttgttacttcgttatgtattaatttctactcttgctagagatatttgagtactatgattgtcgtt

SEQ ID NO: 235324 - DNA, 358 bp, Glycine max
ggcacaagtgagtttgttgatcgagataaccacaatcagtgtgatgaatatgaacgtccgtgttttcttcgttgctacaattttggtagcatggcaatgccatgcttacgatatgttccctctccgaatgaacattggctatggtgcccgtactccggaggtgaaatgcgcaagttggaagcttgctgtggaagcacacaacatcattggctttgagaccattcatgacgagtgcgttgaagcatcaaaggaatacatccatggcgaagaatatagattagactccataacagttatccaacaagcttacttttatgccagagacctcgaagtccatcacaatgacacatttgtgttc

SEQ ID NO: 235325 - DNA, 380 bp, Glycine max
gcacaagtgagtttgttgatcgagataactagaaacagtgtgatgaaaatgaaggtccttgttttcttcgttgctacaattttggtagcatggcaatgccatgcgtacgatatgttccctctccgaatgaacactggctatggtgcccgtactccggaggtgaaatgcgcaagttggaggcttgctgtggaagcacacaacatctttggctttgagaccattcctgaagagtgcgttgaagcaacaaaggaatacatccatggcgaacaatatagatcagactccaaaacagttaaccaacaagcttacttttatgccagagacctcgaagtccatcgcaaggacacatttgtgttcagtatagatggcaccgtactctc

SEQ ID NO: 235326 - DNA, 369 bp, Glycine max
gcacaagtgagtttgttgatcgagataactagaaacagtgtgatgaaaatgaaggtccttgttttcttcgttgctacaagtttggtaggagggcaatgccatgcgtacgatatgttccctctccgaatgaacactggctatggtgcccgtactccggaggtgaaatgcgcaagttggaggcttgctgtggaagcacacaacatctttggctttgagaccattcctgaagagtgcgttgaagcaacaaaggaatacatccatggcgaacaatatagatcagactccaaaacagttaaccaacaagcttacttttatgccagagacctcgaagtccatcccaaggacacatttgtgttcagtataaatggg

SEQ ID NO: 235327 - DNA, 390 bp, Glycine max
  unsure (1)..(390): unsure at all n locations
gccgctgagctccctttctcctcggtccacagagacaaaatgtaagacaggtgccaacagttcatcacgaaagaaaggactagctgagccgagatcactaactaaaacgaatttaatactaatcgaaaatactaatagaatagaaatagaactgtcttttcatatagatatcccttcaacacaacataggtcatcgaaaggatctcgaagacccaccaacgcacgaaagccgggatctttcagaaaatggattcctattcgaagggtgcataaccgcatggataagctcacactaacccgtcaatttgggatccaattcggttccttaagangtatcgggaangaattttggaatgtaataatatcgattcatacagatacagaagaaag

SEQ ID NO: 235328 - DNA, 433 bp, Glycine max
  unsure (1)..(433): unsure at all n locations
gaagacgacagaaggggagtgagaagaagagggggtcagagtgagaaagagaaagagagaattcgtaaaccctaatttcggaaagatcggcgatgactgcctccaaggatcgcgagaacttcgtctacatcgccaaactcgccgagcaggccgagcgttacgaagagatggtggaatcaatgaagaacgttgcgaatctcgacgttgaactgacggtggaggagcggaatttgctttctgttgggtacaagaatgtgattggtgctcgcagagcgtcctggaggatcctgtcttccattgagcagaaggaagaaacanaagggaacgagttgaatgcgaagcggattaaggagtacagacagaaggtttgaatggagctatcgaacatctgtaatgatgttatgagagtgattgatgagcaccttatcccttc

SEQ ID NO: 235329 - DNA, 297 bp, Glycine max
cggagtcggtgttcaagtacgacagacaccatcacacggctgtggcgaggttttccagcctctacttcagcaagcccaccggcgatctcaagagcgtcgtcaacgataccatccacgaccctgatcacggtgctcgtcgaatcatggtgggctacatcaacaacgtcggcatccgcaacgatgaggagctcgtcgtcgacgtcaatgtcgcctatattggctactacaggttcatccgcaaggccgacagcctcctgatcgataccgtcatgcactgcgcatccagcagcgacggta

SEQ ID NO: 235330 - DNA, 370 bp, Glycine max
gaaggtgcaagagtttgttgtgagctataagctagtttatcgtgaggagaatatgaggttgtttgttttctttgtctgctgcagtacttttggtaccatggtcatgccatggcgcatgctaccaaaggttccctctccgaatgaaaactggctatggtgagcgttcttcggaggtaaaatgcgcacgttttaggcttgctgtggaagcacagaacatccgagcctttaaaactattcctgaagagtgcgttgaacctaaaaaggactacatttatggcgaacagtttatatcagactctaaaatagttatccaacaagctttcttttatgctagtgaacgcgaaatctatcacatcgacatatttatatt

SEQ ID NO: 235331 - DNA, 375 bp, Glycine max
  unsure (1)..(375): unsure at all n locations
ggagcgtcttccctcaactccgagcgagagaagttattagggtttttgagtgcggcggtccaaacactcttctctgcagcttttgcctacaactcccttcaccatggctgaacaaaccgagaaagcttttctgaagcaaccaaaagtgtttctcagcacaaagaagactgggaagggaaagagacctggaaaaggtgggaatcgcttttggaagtccattgggcttggatttaagactcccagggaagccatcgaaggaacctatattgacaagaagtgccccttcactggcaatgtttccatccgtggccgtatcttggctggaacatgtcacagtgctaagatgaacaggactattantgttagaaggaatta

SEQ ID NO: 235332 - DNA, 384 bp, Glycine max
ggtgcacaagtgaatttgttgatcgagataactagaaacagtgtgatgaaaatgaaggtccttgttttcttcgttgctacaattttggtagcatggcaatgccatgcgtacgatatgttccctctccgaatgaacactggctatggtgcccgtactccggacgtgaaatgcgcaagttggaggcttgctgtggaagcacacaacatctttggctttgagaccattcctgaagagtgcgttgaagcaacaaaagaatacatccatggcgaacaatatagatcagactctacaacagttaagcaacaggcttacttttatgccagagacctcgaggtccatctcacggacacatttgtgttcagtatagatggcaccgtactctct

SEQ ID NO: 235333 - DNA, 382 bp, Glycine max; identical to SEQ ID NO: 235220

SEQ ID NO: 235334 - DNA, 394 bp, Glycine max
gagaaaattgtggaagccgttggggatttgaagcttgactctttggtcatgggtagcagaggcttgggtgccatacaaagggtattactggggagtgtgactaattatgtcaccgcaaatgcgagttgccctataacgattgtgaaagactctgccccttctactatctgataagctactgaatttggttggcctttgcaatcggttgtttttatcttcatcagtgaccagagtgtgtttccctccgttcttacttcttacacatgtttaattgggattatgaacacacttgaatgattaaggatttggcaagcataatgtatattttcagagtctcttttaagcgcatggttatagccacaaaattgtgcttataaataagctttgtgctgaa

SEQ ID NO: 235335 - DNA, 411 bp, Glycine max
  unsure (1)..(411): unsure at all n locations
ggcacaagtgagtttgttgatcgagataactagaaacagtgtgatgaaaatgaaggtccttgttttcttcgttgctacaattttggtagcatggcaatgccatgcgtacgatatgttccctctccgaatgaacactggctatggtgcccgtactccggaggtgaaatgcgcaagttggaggcttgctgtggaagcacacaacatctttggctttgagaccattcctgaagagtgcgttgaagcaacaaaggaatacatccatggcgaacaatatagattagactccaaaacagttaaccaacaagcttacttttatgccagagacctcgaagtccatccaaggacacatttgtgttcagtatagatggcaacgtactctctaatattccatactacannaaacatggatat

SEQ ID NO: 235336 - DNA, 362 bp, Glycine max
ggagttcaacttcgagggtttccttcacatctctgtaatttccatttccacagttactcttgtgaactaccgagatttgaagcgagtgatggctgcgaacgaagagaatcgaatatttgttggaggtttatcctgggacgttacggagcgtcaactcgagcatgcctttgctcgttacggcaaaattctcgaatgccagatcatgatggaaagggatacaggccgtccacgtggatttgggtttatcacatttgcagaccgtacgggaatggaggatgcaatcaaggaaatgcatggacgggaaaatggtgatcgtatcatctcagtcaacatagcacagcccaagatggggggtgatgatg

SEQ ID NO: 235337 - DNA, 406 bp, Glycine max
gaaggtgcaagagtttgttgtgagctataagctagtttatcgtgaggagaatatgaagttgtttgttttctttgttgctgcagtacttttggtaacatggccatgccatggcgcaggctactaaaggttccctctccgaatgaaaactggctatggtgagcgttcttcggaggtaaaatgcgcaagttttaggcttgctgtggaagcacactacatccgagcctttaagatcattcctgaagagtgcgttgaaccaacagaggactacattaatggcgaacaatttagatcagactctagtacagttaaccaacaggctttcgttgatgctagtgaacgcgaagtccatcacaacgacatatttatattcggcatagataacaccgtactctctaatatcgcatac

SEQ ID NO: 235338 - DNA, 397 bp, Glycine max
  unsure (1)..(397): unsure at all n locations
ggcacaagtgagtttgttgatcgagataactagaaacagtgtgatgaaaatgaaggtccttgttttcttcgttgctacaattttggtagcatggcaatgccatgcgtacgatatgttccctctccgaatgaacactggctatggtgcccgtactccggaggtgaaatgcgcaagttggaggcttgctgtggaagcacacaacatctttggctttgagaccattcctgaagagtgcgttgaagcaacaaaggaatacatccatggcgaacaatatagatcagactccanaacagttaaccaacaagcttacttttatgccagagacctcgaagttcaatcccaagacacatttgtgttcagtatagatggcaccgtactctctaataattcatactac

SEQ ID NO: 235339 - DNA, 361 bp, Glycine max
tgggaaggtgcaagagtttgttgtgagctagaagctagtttatcgtgatgagaacatcaagttgtttgttttcgttgttgctgcagtacttttggtagcatggtcatgccatggcgcaagctaccacaagttccctctccgaatgaaagctggctatggtgatcgttcgtctgatgtaaaatgcgcaagttttaggcttgctgtgaaaacacacaacatctgagcctttacaaccattcctgacgagtgcgttgaaccatcaaaagactacattaatggcgatcaatttagatcagactctaatacagttaaccaacaagcttacttttatgccactgaacgctaagtccatcacaacgac

SEQ ID NO: 235340 - DNA, 381 bp, Glycine max
ggcacaagtttgttgagatagctagaagcaataagatgaaaatgaaagtgcttgttttgtttgttgctacagttttggtagcatatgaatgccatggctcagactaccagaagttccctctccaaatgaaaactgggtttggtgggcaatacagcaatgacgtggcatgtgccagttggaggcttggcgtggaagcaaacaacgtagtcaagtggcaaactgttcctgcagcttgcggagagtacatagctgactacgttctacgagaccaatatagatcagattccaaaacagttgaccaacacgcttatttctatgccaaatccctcagactcaccaacaaagatgtctttgtcgtggacgttgacgacactactctct

SEQ ID NO: 235341 - DNA, 319 bp, Glycine max
ggcacaagtgagtttgttgatcgagataactagaaacagtgtgatgaaaatgaaggtccttgttttcttcgttgctacaattttggtagcatggcaatgccatgcgtacgatatgttccctctccgaatgaacactggctatggtgcccgtactccggaggtgaaatgcgcaagttggaggcttgctgtggaagcacacaacatctttggctttgagaccattcctgaagagtgcgttgaagcaacaaaggaatacatccatggcgaacaatatagattagactccaaaacaatttaacaacaagcctaattttaagcc

SEQ ID NO: 235342 - DNA, 382 bp, Glycine max
gaaggtgcaagagtttgttgtgagctataagctagtttatcgtgaggagaatatgaagttgtttgttttctttgttgctgcagtagttttggtagcatggccatgccatggcgcaggctaccaaaggttccctctccgaatgaaaactggctatggtgagcgttcttcggaggtaaaatgcgcaagttttaggcttgctgtggaagcacacaacatccgagcctttaaaaccattcctgaagagtgcgttgaaccaacaaaggactacattaatggcgaacaatttagatcagactctaaaacagttaaccaacaagctttcttttatgctagtgaacgcgaagtccatcacaacgacatatttatattcggcatagataac

SEQ ID NO: 235343 - DNA, 413 bp, Glycine max
  unsure (1)..(413): unsure at all n locations
ggaacctttgcactctattcattcaagattcagcaagtgcgttttggaagcagagaccgaaatacttcgagatggcccgtacaaagcaaactgctcgtaagtcaactggaggaaaagctcccaggaagcagcttgcaaccaaggctgcacgtaagtctgcaccaacaactggtggtgtgaagaagcctcatcgttatcgccctggaactgttgctcttcgtgagattaggaaataccagaagagcactgagctcctaatcaggaagcttcctttccagaggttggttcgtgaaattgcccaggatttcaagactgatctgcgtttccagagccatgctgtgcttgcattgcaagaggctgctgaggcatnacttgttgggctctttgaggacactaacttgtgtgccattcac

SEQ ID NO: 235344 - DNA, 369 bp, Glycine max
  unsure (1)..(369): unsure at all n locations
gacattccaaaacacaaacacatacattgtagtatcacttttgtctcggaatttgttcttttgagttatggcaagcttaaaggttgcatgtgtggttttgatgtgcatggctgtgatgagtgcaccaatgatggtgcaagccgtgtcatgcaatgatgtttctgtgaacctagcactgtgcctatcttacctgatgcagggtggagatgttccagaatcgtgctgtagcggagtgaggaacattctgggttctgccagcaccacctttgacaaacataccgtgtgcacatgtcttcagcaagctgctaataactatggcatcaacgacgaatacgctcatgcactcnccgtccgctgcaatgtcagcgt

SEQ ID NO: 235345 - DNA, 293 bp, Glycine max
  unsure (1)..(293): unsure at all n locations
ggcacaagtttgttgagatagctagaagcaataagatgaaaatgaaagtgcttgttttgtttgttgctacagttttggtagcatatgaatgccatggctcagactaccagaagttccctctccaaatgaaaactgggtttggtgggcaatacagcaatgaggtggcatgtgccagttggacgcttggcgtggaagcaaacaacgtagtcaagtggcaaactgttcctgcagcttgcggagagtacatagctgactacgttctangagaccaatatagattagattccaaaaca

SEQ ID NO: 235346 - DNA, 366 bp, Glycine max
gactcttcaaattccacttcaacaaaccctaaaccctaatgctctgaaactcacattcccagaaagttgagaaatatgagaattccaagcaattgcgagttcacacgaatcacgccctctgctttcagctaccaccgtctcaaatcctacgtttccgactgcagagccgtgcttctcccctcattcggcggcccgcacgtgctccagcttcgctcgcacgtgccagtccctccgctcaagcctcacgatgtcctcgttcgtgcgcgcgccgtctccgttaaccccttggacacccgaatgcgtgctggctacgggcgttccatcttcgagccgctgttgcctctcattttggggcgcgacgtcagc

SEQ ID NO: 235347 - DNA, 397 bp, Glycine max
agcgacagaaggggcttcttcttatttgtgacgaagcaaacgctgccgaattcgttatcgctttgcactagcagctttgaaacccggttcatccgaagcccttcagcgaaccatgtcgaggagaaaggttagagagccaaaggaggaaaatgtgactctgggtccagctgttacagatggtgaacacgtctttggcgttgctcgcatctttgcctccttcaaggacaccttcatccatgtcactgacttgtctggcacggaaacccttgtccgaatcattggtggtatgaaagtcaaagctgacagagatgaatcatctccttatgctgctatgcttgcagctcatgatgttgctgccagattcaaggaactgggcataactgctcttcataacaag

SEQ ID NO: 235348 - DNA, 382 bp, Glycine max
ggcacaagtttgttgagatagctagaagcaataagatgaaaatgaaagtgcttgttttgtttgttgctacagttttggtagcatatgaatgccatggctcagactaccagaagttccctctccaaatgaaaactgggtttggtgggcaatacagcaatgaggtggcatgtgccagttggaggcttggcgtggaagcaaacaacgtagtcaagtggcaaactgttcctgcagcttgcggagagtacatagctgactacgttctaggagaccaatatagatcagattcgaaaacagttaaccaacaagcttagttctatgctaaatcgctcaaaactcacaaacaaagatgtctttgtcttggacgttgacgacactactctct

SEQ ID NO: 235349 - DNA, 368 bp, Glycine max
gaaggtgcaagagtttgttgtgagctataagctagtttatcgtgaggagaatatgaagttgtttgttttctttgttgctgcagtagttttggtagcatggccatgccatggcgcaggctaccaaaggttccctctccgaatgaaaactggctatggtgagcgttcttcggaggtaaaatgcgcaagttttaggcttgctgtggaagcacacaacatccgagcctttaaaaccattcctgaagagtgcgttgaaccaacaaaggactacattaatggcgaacaatttagatcagactctaaaacagttaaccaacaagctttcttttatgctagtgaacgcgaagtccatcacaacgacatatttatat

SEQ ID NO: 235350 - DNA, 349 bp, Glycine max
ggcacaggtgagtttgttgatcgagataactagaaacagtgtgatgaagatgaaggtccttgttttcttcgctgctacaattttggtagcatggcaatgccatgcgtacgatatgttccctctccgaatgaacactggctatggtgcccgtactccggaggtgaaatgcgcaagttggaggcttgctgtggaagcacacaacatctttggctttgagaccattcctgaagagtgcgttgaagcaacaaaagaatacatccatggcgaacaatatagattagactccaaaacagttaaccaacaagcttacttttatgccacgagacctcgaagtccatcccaaggacac

SEQ ID NO: 235351 - DNA, 360 bp, Glycine max
  unsure (1)..(360): unsure at all n locations
gacagcatatcaataatctattttatactatacccacattttgataattatttttctagttgataagccatggctactcgaggaaagcttgaggttgacgttgatctcaagtctaacgcagacaagtactggcaaacccttaggaactccactgaaatattccccaaggccttccccaatgattacaaaagcattgaggttcttgacggtgatggcaaatcacctggttctatccgccacataagttatggtgaacgttcaccacttgtgacgtcatcctttgagaagattgatgctgttgatgaagaanagaacgtagtgtcgtacactatcattgatggagaaatcctcgagcactac

SEQ ID NO: 235352 - DNA, 381 bp, Glycine max
ggcacaagtttgttgagatagctagaagcaataagatgaaaatgaaagtgcttgttttgtttgttgctacagttttggtagcatatgaatgccatggctcagactaccagaagttccctctccaaatgaaaactgggtttggtgggcaatacagcaatgaggtggcatgcgccagttggaggcttggcgtggaagcaaacaacgtagtcaagtggcaaactgttcctgcagcttgcggagagtacatagctgactacgttctaggagaccaatatagatcagattccaaaacagttaaccaacaagcttatttctatgctaaatccctcagactcaccaacaaagatgtccttgtcttggacgttgacgacactactctct

SEQ ID NO: 235353 - DNA, 367 bp, Glycine max
ggagacacaaactcacacactttgtactctccgtccttccttcttcgatccagatctctctccttctccctcaaatggcttcccttctgcaatgttccatgcccctcgtcactctttcgaatcgagctctagtacccggtaccaggatctccaacccaagttcagtttccctttcaattaagggaagaagtttcccatccgttacattgcagcccagagggcgtcggtttcagcttagatgtgcggcaaaaccagagacagtgaagaaggtgtgtgacatagtcaagaagcaattggcactgccagatgaatcagctgttactggagagtctaaatttgctgcgcttggaactgattctcttgacac

SEQ ID NO: 235354 - DNA, 388 bp, Glycine max
  unsure (1)..(388): unsure at all n locations
ggccagtgccattcccttcacaccattctcacaaaacaactttcagactctgagaaagaatggctgccaacacattgatgagtactgctatctcagccttcccatctctcctttcttcctcaaaatccagatttgccaccgcagttcctctttctagctttggtgtcaccaatgcctcttcttctcgcttttctatgagtgctgactggatgccaggccagcctagacctccttaccttgatggttcagcacctggtgactttggattcgaccctcttcgtcttggtgaagtaccagagaatcttgagaggttcanagagtcagaactcattcactgcagatgggccatgcttgctgttcagggattttggttcagangcattgggct

SEQ ID NO: 235355 - DNA, 320 bp, Glycine max
ggaattaggtttttacggtttacaccgagcagccacacctcccgcagcagccatggttctcaaaactgaactatgccgattcagtggtgccaagatctacccaggaaagggcatcagatttgttcgtggtgattctcaggttttcctgtttgcaaactcaaaatgtaagaggtatttccacaatcgcctgaagccttcaaagctcacctggactgcaatgtacagaaagcaacacacaatggacattgctcaagaagctgtgatgaagaggagacgtgctgccaaaaagccttactctacgtccattgttggtgcgacct

SEQ ID NO: 235356 - DNA, 388 bp, Glycine max
  unsure (1)..(388): unsure at all n locations
gacatctttcactcgttctctgaaattttaattgacttttctcccctcataaaaaaaacctaccaatggctcccgcaaaggcagagaagaagcccgcggagaagaagccggcagagaaggccccagcggagaagaagccgaaggcggagaagaagatatcgaaggaaggaggaagcgagaagaagaagaagagaacaaagaagtgcgttgagacctacaagatctacatcttcaaggtgttgaagcaagtgcaccccgacatcgggatctccagcaaggctatggggatcatgaacagtttcataaacgacatcttcgagaagctcgcccaggagtcatcgcgtctcgctanggtacacaagaagcccacattacttccagggagatc

SEQ ID NO: 235357 - DNA, 382 bp, Glycine max
gacaacacagaacaaaaacaaagaaaaaaaaaaacccttagccaacacaaccatcatggccacctctgctattcagcaatcagcattcactggtcaaactgctctgaagcagctcaatgagttcgtccgcaagaccggtggcgccggcaaaggtcgcactaacatgcgccgcaccgtcaagagtgctcctcagagcatttggtatggccctgaccgtcccaagtacctgggtccattctcggagcagattccatcatacctgaccggagaattccctggtgactacggatgggacactgctggattatcagctgacccggaaacctttcgccaggaacgggagctggaggtgattcacagcagatgggcaatgcttggtgcc

SEQ ID NO: 235358 - DNA, 392 bp, Glycine max
gacagaaaagaaaaaggaaaccctagctggataggtcaaacatcatcatgtcggacgaagagcaccatttcgagtccaaggcagacgccggtgcctccaaaacctaccctcagcaagccggtaccattcgcaagaacggctacatcgtcatcaaaggacgcccctgcaaggttgtggaagtttcgacttccaaaactggaaagcacggtcacgccaagtgccactttgttggaattgatattttcactgccaagaaacttgaggatattgtgccctcttctcacaactgtgatgttcctcatgtgaatcgtactgattaccagctcattgatattgctgaggatggatttttgagtctgcttactgaaaatgggaacaccaaggatgacctc

SEQ ID NO: 235359 - DNA, 383 bp, Glycine max
gagtgcacaagtgagtttgttgatcgagataactagaaacagtgtgatgaaaatgaaggtccttgttttcttcgttgctacaattttgggggcatggcaatgccatgcgtacgatatgttccctctccgaatgaacactggctatggtgcccgtactccggaggtgaaatgcgcaagttggaggcttgctgtggaagcacacaacatctttggcgttgagaccattcctgaagagtgcgttgaagcaacaaaggaatacatccatggcgaacaatatagatcagactccaaaacagttaaccaacaagcttacttttatgccagagacctcgaagtccatcccaaggacacatttgtgttcagtatagatggcaccgtactct

SEQ ID NO: 235360 - DNA, 382 bp, Glycine max
gagggttattggacacattcttcagcgactgcgtttttggatcggaacctcttctgcggcgtagcaatgggacactccaacgtttggaactctcacccaaaaaaactacggtcctggttctcgcacttgccgtgtgtgtgggaatccacatggactgatcaggaagtatggccttatgtgctgcaggcagtgcttccgtagcaatgccaaggaaattggcttcatcaagtatcgctaaaagagcagttgtcaactacggaccaatattgtgttctggcactaggatgttttgaggatgttatgtttgaagaaacttgagactttcttttttcatctaattaattatcagacgtaatttgtggtactaagaatacttttatat

SEQ ID NO: 235361 - DNA, 387 bp, Glycine max
gaaggtgcaagagtttgttgtgagctataagctagtttatcgtgaggagaatatgaagttgtttgttttctttgttgctgcagtagttttggtagcatggccatgccatggcgcaggctaccaaaggttccctctccgaatgaaaactggctatggtgagcgttcttcggaggtaaaatgcgcaagttttaggcttgctgtggaagcacacaacatccgagcctttaaaaccattcctgaagagtgcgttgaaccaacaaaggactacattaatggcgaacaatttagattagactctaaaacagttaaccaacaagctttcttttatgctagtgaacgcgaagtccatcacaacgacatatttatattcggcatagataacaccgt

SEQ ID NO: 235362 - DNA, 324 bp, Glycine max
ggagtagcgatggagaagaagaagggtgagctaaagtcaattttccttcctttcctttccactagtcacataatcccgctagtggacatggccagactcttcgccttgcacgacgtcgacgtcaccatcatcaccaccgcacataacgccaccgttttccaaaagtccatcgatttagatgcgagtcgcggtcgccccatcagaacgcacgttgtcaacttccccgccgcacaagtgggtctccccgttgggatcgaaagcttcaacgtcgatacgcctcgggaaatgacccccagaatctacatgggcctattcccttctcca

SEQ ID NO: 235363 - DNA, 342 bp, Glycine max
ggaagcatttagtgagagtgagagcgatagcaaaaacagcaatatcttcttccttccctaagcctaaaaataaaatatcttgtcattgaggtggactcacattcgccatatcgtcttctcccatggccgccaccgatgaatccctccgcaaatccctcgccgagaagcacgccgcagtggaagcccaaggcaactccgtccgcgccctcaaggccgccaaatccgccaaacccgaaatctacgccgcaatcgaagccctaaactcgctgaagctcgaaaaaagctccatcgagcactcgctcctcggcggctccgacatccgcgaggcctttcgtcagtccg

SEQ ID NO: 235364 - DNA, 340 bp, Glycine max
ggccgacgtacgtatcgatgcgagaagagacagaagggggcacaagtgagtttgttgatcgagataactagaaacagtgtgatgaaaatgaaggtccttgttttcttcgttgctacaattttggtagcatggcaatgccatgcgtacgatatgttccctctccgaatgaacactggctatggtgcccgtactccggaggtgaaatgcgcaagttggaggcttgctgtggaagcacacaacatctttggctttgagaccattcctgaagagtgcgttgaagcaacaaaggaatacatccatggcgaacaatatagatcagactccaaaacagtttaccaac

SEQ ID NO: 235365 - DNA, 396 bp, Glycine max; identical to SEQ ID NO: 235023

SEQ ID NO: 235366 - DNA, 306 bp, Glycine max
gatgggtggcagaaacagaagcacatcaccacgaaccaatcccaacctttcagttcccccacaaataaaatagttaccacaacccactattagttgcttgctgcgagcgaatccctctctctatctctcacacacactttctctctctctctctctctcacccagatcttgtagcaatggcgagcgctcccactccacgcgaagagttcgtgtacatggcgaagctggcggagcaggccgagcgctacgaagaagatggggagttcatggagaaggtctccgcctccgccgagagcgaagagctga

SEQ ID NO: 235367 - DNA, 302 bp, Glycine max
ggtaagagtttgttgtgaccaacactccatctgatcgtgaggacaatataaacttatctgtcatcactgtggctccatcagtgttgctagcacagccacactctcatgcacgatatcacacgttcactcactgagtgaagactggctacgatgatcttactgcgaatgtaatatgcacatgtcctaagcctgctgtgaaagcactgacaatcagattcattatcacaactcatgatcattacgtagatccaagcgaggacttgataaatgacgattcatatacatcagactctgcaccagtt

SEQ ID NO: 235368 - DNA, 372 bp, Glycine max
  unsure (1)..(372): unsure at all n locations
aggccgaggaaaaaaaagaataagaaaaagaagaaaaaaacacagcgtcctagatttcctcttctctgcttcggaagaaagagaaaacaaacaaaacaatggcgttcgcttctttcctcggcagagtcctcttcgcttctgtcttcatactctctgcttaccaacaatttaatgaatatggagttgatgggggacctgctacaaaagcactcagacctaagtttgatgcctttacacatcgggtgcattctcaagtgggctttcaaatttcagagattagtctgaaatttttaattgctggggctattgctctgaagggtcttggangggttcttttcatatttggcagctcttttggagctttgcttctgc

SEQ ID NO: 235369 - DNA, 161 bp, Glycine max
ggggcacaatttagtttgttgatcaaaatacctataaacattgtcataaaaatgacggtccttgttttcttcgttgctacacttttgcaaccatgggaatgccatccgtacaaaacttaccccctccgaataacaactggttatggtgcccgtactccgga

SEQ ID NO: 235370 - DNA, 340 bp, Glycine max
gaccacattccaaaacacaaacacatacattgtagtatcacttttgtctcggaatttgttcttttgagttatggcaagcttaaaggttgcatgtgtggttttgatgtgcatggctgtgatgagtgcaccaatgatggtgcaagccgtgtcatgcaatgatgtttctgtgaacctagcaccgtgcctatcttacctgatgcagggtggagatgttccagaatcgtgctgtagcggagtgaggaacattctgggttctgccagcaccacctttgacaaacaaaccgtgtgcaaatgtcttcagcaagctgctaataactatggcatcaacgaccaatacgct

SEQ ID NO: 235371 - DNA, 384 bp, Glycine max
  unsure (1)..(384): unsure at all n locations
gacagacaccgacacagatctgtcttccgaagcaggaactaaatatggctgacttgttggaatggtcaaagcaagataagaaacgaatgcttcatgtcgtctaccgtgttggtgaccttgatcgcaccatcaaattttacacagaatgtttaggaatgaagcttttgaggcaaagagatatcccagaggagaaatatgctaatgcttttcttggatttggccctgaagaatcccattttgttgttgaattaacatataattatggggttacctcgtatgacattggcgatggctttggacattttgcaattgcaactcaagacatttataaattggttgagcacatcaaggncaaagggtggnaacatcacaagggaacctggt

SEQ ID NO: 235372 - DNA, 403 bp, Glycine max
gaaagtgcaagagtttgttgtgagctataagctagtttatcgtgaggagaatatgaagttgtttgttttctttgttgctgcagtagtgttggtagcatggccatgccatggcgcatgctaccataggttccctctccgaatgaaaactggctatggtgagcgttcttcggacgtaaaatgcgcaagttttaggcttgctgtggaagcacacaacatccgagcctttaaaaccattcctgaagagtgcgttgaaccaacaaaggactacattaatggcgaacaatttagatcagactctaaaacagttaaccaacaagctttcttttatgctagtgaacgcgaagtcatcacaacgacatatttatattcggcatagataacatcgtactctctaatatcccat

SEQ ID NO: 235373 - DNA, 373 bp, Glycine max
agacagatgagaacagacaagagcgtggagacctatatgatctacatcttcaaggtgttgaagcaagtccaccggcgacatcgggatctccatcacggctatagggatcatgagcagtgcataaacgacatcttggagaagctcgcccaggagtcatcgcgtctcgctaggtagatcaggaatcccatcattacttccagggagatccaaacggcggtgcgtttggtcctctctggggagtcggctaagcacgccgtgtccgaaggcactacagccgtctccacattcgccagctcttgattggtctcgtgtgtgtctgtcaaggtattctgtcaaccctatttgattggggtttctccaccttcagattacg

SEQ ID NO: 235374 - DNA, 386 bp, Glycine max
  unsure (1)..(386): unsure at all n locations
ggttctagtgtgtgattgtttgttgttgtaactcgttcttcttcttttgttgttctgtgtttgtgtttgttttttctctcacctgaaaatgtcttgctgcggtggtaactgtggttgcggaagctcctgcaagtgcggcaacggctgcggaggctgcaagatgtacccagacttgagctacactgagtcaaccaccaccgagaccttggtcatgggagtggcacctgttaaggctcaatttgagggtgctgaaatgggtgtgcccgctgagaacgatggctgcaaatgtggaccaaactgctcctgcaacccctgcacttgcaagtgaggtgttgggagagcaagcttcaagcacagatacccttaacttangaaatatgataaac

SEQ ID NO: 235375 - DNA, 353 bp, Glycine max
ggggtctgtccattgaaaccactctccaaaatttctctctctctccatccatccatctattgcacacttccatcatcatggccatcgcaagagagactcaacctcaacctcagcaacacaaggattcttcggaggtttcgggttcagctgcggagcaacgaaggtggacgctaaacgatttcgatatcggaaagcctctcggaaggggaaaattcggtcacgtttatttggccagggagaagactagtaatcatattgttgctttgaaagtactcttcaagagccaattgcaacaatcccaagttgtgcatcaacttcgacgtgaagttgaaatacaaagtcatctccgaaat

SEQ ID NO: 235376 - DNA, 397 bp, Glycine max
  unsure (1)..(397): unsure at all n locations
ggcacaagtgagtttgttgatcgagataactagaaacagtgtgatgaaaatgaaggtccttgttttcttcgttgctacaattttggtagcatggcaatgccatgcgtacgatatgttccctctccgaatgaacactggctatggtgcccgtactccggaggtgaaatgcgcaagttggaggcttgctgtggaagcacacaacatctttggctttgagaccattcctgaagagtgcgttgaagcaacaaaggaatacatccatggcgaacaatatagatcagactccaaaacagttaaccaacaagcttacttttatgccagagacctcgaagtccatcncaaggacacatttgtgttcagtatagatggcaccgtactctctaatattccatactac

SEQ ID NO: 235377 - DNA, 392 bp, Glycine max
ggcacaagtgagtttgttgatctagataactagaaacagtgtgatgaaaatgaaggtccttgttgtcttcgttgccacaattttggtagcatggcaatgccatgcgtacgatatgttccctctccgaatgaacactggctatggtgcccgtactccggatgtgaaatgcgcaagttggacgcttgctgtggaagcacacaacatctttggctttgagaccattcctgaagagtgcgttgaagcaacagaggaatacatccatggcgaacaatatagatcagactcctcaacagttaaccaacaagcttacttttatgccatagacctcgaagtccatcccaaggacacatttgtgttcagtatagatggcaccgtactctcaaaaattccaa

SEQ ID NO: 235378 - DNA, 379 bp, Glycine max
ggcagcaagtgccattttatttggcccaacctcctcgattctagggtttcaacaatggcgctgttccttctcaacaaatccgcttcgggctacagcctgttcgaggttcacggcgtcaatgaaatcggccagaacaccgaagcggttcggaactccgtttcggacctcaacaggttcggcaaagtcgttaagcttcgctccttcaaccctttcacttccgctctcgatgctctcaaacagtgcaacgccgtctccgaaggcatattaactggtgagctgaggactgtcttggagaccaacttgcctaaagtgaaggaaggtaagaagtccaagttcagtttaggtgtgtccgatcctaagattggttcccagatatctg

SEQ ID NO: 235379 - DNA, 400 bp, Glycine max
ggcacaagtgagtttgttggtcgagataactagaaacagtgtgatgaaaatgaaggtccttgttttcttcgttgctacaattttggtagcatgggaatgccatgcgtacgatatgttccctctccgaatgaacactggctatggtgcccgtactccggaggtgaaatgcgcaagttggaggcttgctgtggaagcacacaacatctttggctttgagaccattcctgaagagtgcgttgaagcaccaaaggaatacatccatggcgaacaatatagatcagactcaaaacagtttagcaacaagcttacttttatgccagagacctcgaagtccatcccaaggacacatttgtgttcagtatagatggcaccgtactctctaatattccctactacaaaa

SEQ ID NO: 235380 - DNA, 403 bp, Glycine max
ggagcaaaaccctaatccctatttttcttcctcagtagtgtcatttacgcttctcgtctctgcagcaactatgcctaaccctaaggtcttcttcgacatgaccatctgcggtcaatctgctggccgcatcgtgatggagctctacgccgacgtcactccccgcaccgccgagaacttccgcgcgctttgcaccggcgagaagggcgtagggcggagcggcaagcccctccactacaagggctcgtccttccaccgcgtgatcccgagtttcatgtgtcaaggtggcgacttcaccgccggaaacggaaccggcggcgagtcgatttatggcgccaagttcgccgacgagaacttcgtgaagaagcacaccggtcccggcatcctctccatggcgaacgccggt

SEQ ID NO: 235381 - DNA, 248 bp, Glycine max
ggaacaaatcactaagccctattattcttcctcaataatgtcaattacacttcacgtctctgcagcaactatgcctaaccctaaggtcgtctgggacatgaacatctgcgatcaatctgctggccgcatcatgatggagctctatgcccatgtcactcaccgcacagccgagaatttccgcgctctttgcaacggcgataacggcctatggcggagcgacaatccccaccaatacaatggctcctcct

SEQ ID NO: 235382 - DNA, 391 bp, Glycine max
  unsure (1)..(391): unsure at all n locations
gtcaccacttcanaacactcataacacanagcacaaagcaaagctcatccttgagttaaaaaatggcagcagcttcttccatggctctctcatcggcatccttggctggcaaggccgtgaagctgggcccatcagccccagaagtgggaagggtgagcatgaggaagaccgtcaccaagcaggtctcctcaggaagcccatggtacggcccagaccgagtcaagtacttgggcccattctctggcgagcccccgtcctacctaaccggtgagttcccaggcgactacggctgggacactgctgggctttccgcagacccagaaaccttcgccaagaaccgtgaactcgaagtgattcactcaaggtgggccatgctcggagccttgggctg

SEQ ID NO: 235383 - DNA, 366 bp, Glycine max
ggcacaagtttgttgagatagctacaagcaataagatgaaaatgaaagtgcttgttttgtttgttgctacagttttggtagcatatgaatgccatggctcagactaccagaagttccctctccaaatgaaaactgggtttggtgggcaatacagcaatgacgtggcatgtgccagttggaggcttggcgtggaagcatacaacgtaatcaagtggcaaactgttcctgcagcttgcggagagtacatagctgactacgttctatgagaccagtatagatgagattccaatacagttaagcaacaaacttatttctatgcgaaatccctcatactcaccacgcaagatgtccttgtcctggaccttg

SEQ ID NO: 235384 - DNA, 341 bp, Glycine max
ggcagtttcaaattttcttttccttcactttcccgagaaaaaaataacacttttcactttcttcactacgttctcacttcgatatggctcgtacgaagcaaaccgctcgcaagtccaccggtggcaaggcgccacgtaagcagctcgccaccaaggccgctcggaagtccgctccggcgaccggaggagtgaagaagccccaccgcttcaggccgggaaccgtggcgctgagggaaatcagaaagtaccagaagagcaccgagcttctcatcaggaagcttccatttcagaggctcgtgagagaaatcgcgcaggatttcaagaccgatttgcgtttccag

SEQ ID NO: 235385 - DNA, 260 bp, Glycine max
ggcacaagtgaatttggtgatccataaaactagaaacaatgtgatgaaaattaaagtccttggtttcatcgttgcaacaattttgggagcatgggaatgccatgcgtacgaaatgttccctctcccaatgaacactggctatggtgcccgtaatccggaggtgaaatgcgcaaattggaagcttgctgtggaaacacacaacatctttgggtttgagaccattccccaaaagtgcgtttaagcaacacaggaatacatcc

SEQ ID NO: 235386 - DNA, 343 bp, Glycine max
ggtaatccttacgctctctcactcacaaacgcacactgaattcaaaaccatcgaaagagacaggcatggccgagcaaaccttcagcaggatcaagccagatggcgttcaaagaggccttattggcgagattattagcagatttgagaggaagggtttttacttgaaagggttgaaactcgtaactgtggaccgtccttttgctgagaagcactatgctgatttgtctgcaaagcctttctttagtggtttggtggattacattgtctctggccctgttgttgccatgatctgggagggtaagaatgttgttacaactggccgaaagattatcggagccacaaa

SEQ ID NO: 235387 - DNA, 333 bp, Glycine max
cagtctagagtgactggggctaagtattcataccagtggatggccttggcccaacagaacaactggcatgtcttgctggatgctggatcattgggccccaaggacatggattcccttggcttgtccctatttcgtccagattttatagtcacatcattttacagggtttttgggtatgatcccacaggttttggttgtcttcttatcaagaaatctgtgatgcaaagccttcaaaatcagtctggttgtactggatctggaatggtgaagattacccccgagtttcctatgtaattgagtgattctgtagatggtttggataaatttgttggg

SEQ ID NO: 235388 - DNA, 226 bp, Glycine max
ggcacaagtgagtttgttgatcgagatcactagaatcagtgtgattaaaatgaaagtccttgttttcttccttgctacaattttggtagcatggcaatgccatgcgtacgacatgttccctctccgaatgaacactggctatggtgcccgtactccggacgtgaaatgctcaagttggacgcatgctgtttaagcacacaccaaccttggcgttgagaccattcct

SEQ ID NO: 235389 - DNA, 401 bp, Glycine max
ggcacaagtttgttgagatagctagaagcaatacgatgaaaatgaaagtgcttgttttgtttgttgctacagttttggtagcatatgaatgccatggctcagactaccataagttccctctccagatgaaaactgggtttggtgggcaatacagcaatgatgtggcatgtgccagttggaagcttggcgtggaagcaaacaacgtagtcaagtggcaaactgttcctgcagcttgcggatagtacatagctgactacgttctaggagaacaatatacattagattccataacaggttaaccaacaagcttatttctatgctaaatcactcatactcaccaacacagatgtctttgtcttggacgttgacgacactactctctctaatctccagtagtttgc

SEQ ID NO: 235390 - DNA, 289 bp, Glycine max
tcaatggggatgcgatatctctacatactggcgtccacgtccgtccttctaccaacatcactactctcatttctagctatatgctggtctatggggcgcactggctataattctcgtggcttcgcactagttcctccatactttatcctcacatcaatttacactgtttttgggtatgattccacatcttttgcttgtcttcttatgaggctatctgtgatgccggtccttcaaaatcaatctgattctactggatctcaaatcgtcaaaattacctccgagtttccta

SEQ ID NO: 235391 - DNA, 322 bp, Glycine max
ggaacctttgcattctattcattcaagattcagcaagtgcgttttggaagcagatagcgaaggggggcgagatggcccgtacaaagcaaactgctcgtaagtcaactggaggaaaagctcccaggaagcagcttgcaaccaaggctgcacgtaagtctgcaccaacaactggtggtgtgaagaagcctcatcgttatcgccctggaactgttgctcttcgtgagattaggaaataccataagagcactgagctcctaatcacgaagcttcctttcgagaggttggttcgtgaaacttcccaggatttcaagactgatcagcg

SEQ ID NO: 235392 - DNA, 397 bp, Glycine max
gactcaagcacaacatctctatcgagtaaattaactatgaagcctaccctactattatccctttccttcctgcctctctttgctttcctggcgctttcagaagatgttgaacaagttgtggacataagtggcaaccccattttcccaggtggcacatattacattatgccatcaacttggggcgctgccggtggtggattgaaactaggccggacaggaaactcaaactgcccagttactgttttgcaagattactcagaaatcttccgtggcacaccagtcaaattcagcatacctgggataagccctggaatcatctttacaggtactccacttgaaatcgagttcgcagaaaaaccttaattgtgctgaaaccccccaaattggttgccttttg

SEQ ID NO: 235393 - DNA, 368 bp, Glycine max
gaaacaaaaaccatcaccaaaaaaagaaaatgatgctcggagagcaccatcgcgcgaatccaacggttcacgtgccaccgtggccaacccacgacgatccaacggccgagatgtactccgcgtttttaacaaacgacgtcaatgctggtgagtactctccgtactatcttcaagaagcactaacggctctgcagcgttttctgccgtctaacgaaacggacgctgactcggacacggaggctcaacccgacgcggcggtggacgcgtactcgtgcgaccatttccgcatgtacgagttcaaggtccgtcgatgcgcacgtggcaggtcacacgactggacggagtgtccgtacgcgcatcccggcgag

SEQ ID NO: 235394 - DNA, 380 bp, Glycine max
ggcctcagccctaaaacccaaggctgctgagtgttgcagaggcatgtctgagtcggacacgaagaagaagaagcagcagcagcgcagcggcggagagcatgaacgagaagaagggttgatgatcaagccccagagcttcactccccccatcgacacctcccaatggcccattctcctcaaaaactacgagcgcctcaacgtccgcaccggccactacacccccattccctccggctactcccccctgaagcgccccctctccgagtacctcaaatacagcgtcctcaacctcgacaagcccgccaacccttcctcccacgaggtcgtggcctggatcaagcgcctcctccgcgtcgaaaaaacggccactccggtaccct

SEQ ID NO: 235395 - DNA, 375 bp, Glycine max
gagtgcacaagtgagtttgttgatcgagataactagaaacagtgtgatgaaaatgaaggtccttgttttcttcgttgctacaattttggtagcatggcaatgccatgcgtacgatatgttccctctccgaatgaacactggctatggtgcccgtactccggaggtgaaatgcgcaagttggaggcttgctgtggaagcacacaacatctttggctttgagaccattcctgaagagtgcgttgaagcaacaaaggaatacatccatggcgaacaatatagatcagactccaaaacagttaaccaacaagcttacttttatgccagagacctcgaagtccatcccaaggacacatttgtgttcagtatagatggcac

SEQ ID NO: 235396 - DNA, 291 bp, Glycine max
ggcacaagtgagtttgttgatcgagataactagaaacagtgtgatgaaaatgaaggtccttgttttcttcgttgctacaattttggtagcatggcaatgccatgcgtacgatatgttccctctccgaatgaacactggctatggtgcccgtactccggaggtgaaatgcgcaagttggaggcttgctgtggaagcacacaacatctttggctttgagaccattcctgaagagtgcgttgaagcaacaaaggaatacatccatggcgaacaatatagattagactccaaaac

SEQ ID NO: 235397 - DNA, 318 bp, Glycine max
gagatttacgtttataaggatgacatcaagcatcaaaacctcccgcaacagctatggctctcaccactgatctcagccgattcagtggtgccatgatttatccaagaatcggcatcagatttgttcgtagagatgctcatgtttacccgtatgcaaacccataatctaacacgtaattccacaagcacctgaagccttcactgctcacctgaactgccatctacactgcgctgtacaaaaaggacattgctcaagacactgttcagaagacgatacgtactaccaaaaatccttactctaagtctaatgctaggtcca

SEQ ID NO: 235398 - DNA, 290 bp, Glycine max
ggcagttcaattccaatatattccattctctctgtgtatttccctaactctcccttcaagatgcagatcttcgtcaagaccctcatgggggaaggcatcatccttgaagtggatagctcttagatcatcgacaacctcaaggccaagatccaggacacggaatgaatccccccggatcagcaacgtctcacttcgccggaaagcacctttaggacgggcgttcgcttgctgactacaacattcaaaatgagagtgatcttcagctcgtcctccgtctccatggtagcatg

SEQ ID NO: 235399 - DNA, 403 bp, Glycine max
  unsure (1)..(403): unsure at all n locations
ggaaaaattaattttgttaatcaaaataactaaaaccattttaataaaaataaaggcccttgtttcctccgttgcaacaattttggaagcatggcattgcaatgcgtaacaatatgttcccctctcccaatgaacactggctatggtgcccgtactccggaggtgaaatgcgcaagttggaagcttgctgttgaagcacacaacatctttggctttgagaccattcctgaagagtgcgttgaagcaacaaaggaatacatccatggccaacaatatagatcagactccaaaacagttaaccaacaagcttacttttatgccagagacctcgaagtccatcccaaggacacatttgtgttcagtatagatggcaccgtactctctaatattccatacntacaaa

SEQ ID NO: 235400 - DNA, 386 bp, Glycine max
gggaacatcatcacattacattagattggtggtaatggcagcgtcactacaagcagcagctactttcatgcaacccaccaagttgagcaggagcaacactttgcagcaaaagtctactcagtccatttccaaggcttttggtttggaacctgttggagctaaaaaggtcacatgctcccttcaggctgatcttaaggacttggctcacaagtgtgttgatgctaccaaaattgcaggattcgcccttgccacctctgccctcgttgtctctggggcaagtgctgaaggtgttccaaagaggctaaccttcgacgaaatccagagcaagacctacttggaagtgaaggggacaggaacagcaaaccagtgcccaacaattgatggtg

SEQ ID NO: 235401 - DNA, 340 bp, Glycine max
agacgacataaagggtcactcgttctatctaattcagtttttttctcccatcataaaaaaccgaccctctcctttccctcttcaccaaccaatggctcccccaggggcggataacaaccccgctgataaaaagcccgcagataacgctccggcggagaataatcccaaggcccacaagaagatatcaaatgaatgaagaatcgagaagaagaataagagaacaaacaagagcgtggagacctacaagatttacatcttcaaggtgctgaaacaggttcaccccgacatcggaatctcaagcaaagccatggggatcatgaacagtttcataaacgacatc

SEQ ID NO: 235402 - DNA, 401 bp, Glycine max
ggcacaagtgagtttgttgatcgagataactagaaacagtgtgatgaaaatgaaggtccttgttttcttcgttgctacaattttggtagcatggcaatgccatgcgtacgatatgttccctctccgaatgaacactggctatggtgcccgtactccggaggtgaaatgcgcaagttggaggcttgctgtggaagcacacaacatctttggctttgagaccattcctgaagagtgcgttgaagcaacaaaggaatacatccatggcgaacaatatagatcagactccaaaacagttaaccaacaagcttacttttatgccagagacctcgaagtccatcccaagggcacatttgtgttcagtatagatggcaccgtactctctaatattccatactacaaaa

SEQ ID NO: 235403 - DNA, 383 bp, Glycine max
gaaggtgcacgatttttttgtaagctataagctattttatcgttaggagaatatgaagttgtttgttttctttgttgctgcagtaattttggtagcatggccatgccatggcgcatgctaccaaaggttccctctccgaatgaaaactggctatggttagcgttcttcggacgtaaaatgcgcaagttttaggcttgctgtggaagcacacaacatccgcgcctttaaaaccattcctgaagatgaacgcgaagtctatcacaactacatatttatattcggcatatataacaccgtactctctaatatctcatactatgataaacatggaatatggggtggaggaatttaatgaaaccttatatgatgaatgggttaacaag

SEQ ID NO: 235404 - DNA, 389 bp, Glycine max
ggatcctttgtattctattcttcaaaattcaggcacagatggctccgtacgaagcaaaccgctcgtaagtccacaggaggaaaggctcctaggaagcagcttgcaaccaaggctgcacgtaagtctgcaccaactactggtggtgtgaagaagccccaccgttatcgtcctggtaccgttgctcttcgtgagattaggaaataccataagagtaccgagcttttgatccggaagctccccttccagaggctggttcgtgaaattgctcaggacttcaagactgatctgcgtttccagagccacgccgtgcttgcattgcaagaagctgctgaggcataccttgttgggctctttgaggacactaacctgtgtgccattcacgccaagcg

SEQ ID NO: 235405 - DNA, 366 bp, Glycine max
gaatattggatggtggaaatggaatcagcagctgaaaaccctaactacccggcggtggactacaagcgaccttccatcttgtcatttcctcggaggcccgccctcagagtgacatccgagttcgatagtaaaagcgcagtcttcttccataagatttcctgcaagttgttggacagccttgccaacttcaagttttcgttcaaccacagcggtaagggcggcgacatctccgaacctcaattcagctttgtctccaagcaccttagcctccactacgacctcgaagaccataatgctctcgttaagacctccatcgatcttgctctcagtttgcaactcactgcttctcatgatctcaaggctcaa

SEQ ID NO: 235406 - DNA, 392 bp, Glycine max
  unsure (1)..(392): unsure at all n locations
acccacgcgtccatgcgagangacaaaaaaagggggaacaatttggtggagaaacctaaaaccattaggatgaaattgaaattgctggttttgttggttgcaaaatttttggcaccatatgagggccatggcgcaaactaccaaaatttccccctcaaaatgaaaactgggtttggtgggcaaaaaagcattgaggtggcatttgccatttggaggcttggcttgaaatcaaacaccgtattcaattggaaaactgttcctgcaccttgcggcaattcaaaagctgactactttcaaggaaaccattataatttagattccaaaacatttaaccaacaggctaatttcaatgctaaatccctcaaattcaccagcaaagatttctttgtctt

SEQ ID NO: 235407 - DNA, 355 bp, Glycine max
gtcactcgttctatctaattcagtttttttctcccatcataaaaaaccgaccctctcctttccctcttcaccaaccaatggctcccccaaaggccgagaagaagcccgcggagaaaaagcccgcagagaaggctccggcggagaagaagcccaaggccgagaagaagatatcgaaggaaggaggaagcgagaagaagaagaagagaacaaagaagagcgtggagacctacaagatttacatcttcaaggtgctgaagcaggttcaccccgacatcggaatctcaagcaaggccatggggatcatgaacagtttcataaacgacatcttcgagaaactcgcccaggagtcgtcgcg

SEQ ID NO: 235408 - DNA, 393 bp, Glycine max
  unsure (1)..(393): unsure at all n locations
ggcttaaaaagcctcaacaaccctaacgcgtgcagagcagagagagacgcagccatggggcaaagacccgcgaggtgttatangcaaattaagaacaaaccataccccaagtcacggttttgccgtggtgttcctgatcccaagatcaagatttacgatgttggtatgaagaagaagggtgttgatgagtttcctttctgtgtccatctggttagttgggagaaggaaaacgtttctagtgaggccctggaagctgctcgtattgcttgcaacaagtacatggccaaatttgctggaaaggatgctttccacttgagagtcannggtgcaccattccatgtccctangatcaacangatgctttcgtgtgctggagctgataggctccaaact

SEQ ID NO: 235409 - DNA, 335 bp, Glycine max
gtggttgggttttcagaagagcgtcccaatttgtaaccctaaatcagaaaaaagcgcagcttcaagcgagtgacagccaccagccatgggtcgtatgcacagccgcggtaagggtatatcctcttctgctttgccctacaaaaggacacctcctagctggctcaagatctcttcgcaagatgtcgaagaaaatatctgcaagtttgcgaagaaaggtttgaccccgtctcagattggtgtcattctcagagattctcacggtattgctcaagtcaatagcgtcactggcagcaaaatccttcgcatcctcaaagctcacggacttgcgcctgaaa

SEQ ID NO: 235410 - DNA, 401 bp, Glycine max
  unsure (1)..(401): unsure at all n locations
ggcacaagtgattttgttgatcgagataactagaaacagtgtgatgaaaatgaaggtccttgttttcttcgttgctacaattttggtagcatggcaatgccatgcgtacgatatgttccctctccgaatgaacactggctatggtgcccgtactccggaggtgaaatgcgcaagttggaggcttgctgtggaagcacacaacatctttggctttgagaacattcctgaagagtgcgttgaagcaacanaggaatacatccatggcgaacaatatagatcagactccaaaacagttaaccaacaagcttacttttatgccagagacctcgaagttcatcccaaggacacatttgtgttcagtatagatggcaccgtactctccaatatccatactacaaaaa

SEQ ID NO: 235411 - DNA, 360 bp, Glycine max
ggcacaagtgagtttgttgatcgagataactagaaacagtgtgatgaaaatgaaggtccttgttttcttcgttgctacaattttggtagcatggcaatgccatgcgtacgatatgttccctctccgaatgaacactggctatggtgcccgtactccggaggtgaaatgcgcaagttggacgcttgctgtggaagcacacaacatctttggctttgagaccattcctgaagagtgcgttgaagcaacaaaggaatacatccatggcgaacaatatagatcagactccaaaacagttaaccaacaagcttacttttatgccagagacctcgaagtccatcccaaggacacatttgtgttcag

SEQ ID NO: 235412 - DNA, 367 bp, Glycine max
gattgttggcttgtgcactgctcgtgcttctacggttatcacatctcctcttccatcttcatctcactcagtttccaagaatcataggctgaggggacagtcttagtcatccgtgagtgctgattacgagatggtcgttgagaaggcgatcaacaagctcacatgcttcatcactgtgaagagatccacacctttacagtcccgttcggcatggcactctgtaggatctgacgacgtgagatcgaagagctgtcgtcccttcgtgacacataaatcaccgctgcgaacgttctcacgggtcttacagcagtcttgacatcgctgtgaggcgtttggagccacttagagctgactttcccagtttgag

SEQ ID NO: 235413 - DNA, 336 bp, Glycine max
  unsure (1)..(336): unsure at all n locations
aaggcagcggtggtttacgagagaaagaagcaactcaacaaattaagggtgaaagctgagaaggttgctgaagagaagctcggttcccaacttgatgttcttggccctgttaagttatgaagtatttttggtaatggttggaaatttttaagccaatttaaacaaattgaactaactttcaattttgcctgaaggtgccttggtaatggatctaagaattgaaaaccgaataacctggaaaccgttttttaattaaatgtgtgtgttgtataaattttgtcacccagaaatgttttccattgccttgagaanaaagaaaaactctgtacactgtgt

SEQ ID NO: 235414 - DNA, 65 bp, Glycine max
atgaagacgacagaaggtacagctgcagattcgacacaaggtacgctgcgataacagacagaacg

SEQ ID NO: 235415 - DNA, 390 bp, Glycine max
  unsure (1)..(390): unsure at all n locations
ggttgtatgagcggttcaacaagaaaatccccccgggcaaaaaaaaagtttaattgaaaaaagaaaaaaaaaaaaaaaaagaaaacaaagaagaagaagaaatttgacggggtgtgtgatcgggtcctcaagtgaagatctgangctgttggtgtctcttttcttttctccgagttccaaagatgagcgcttctaagttcatcaagtgcgtcactgttggggatggtgctgtgggcaaaacctgcttgcttatttcctacaccagcaacactttccccaccgattatgttccgactgtcttttacaatttcagtgcaaatgtngttgtcaatgggagcattgtgaatctgggtttgtgggatactgctggacaagaagattacaacagat

SEQ ID NO: 235416 - DNA, 341 bp, Glycine max
ggaacctgatcgatctctttaccagttgcaacactacaccgggattccccctaaacccgtttgcgttgttgtttgcgaagaaatggcgactaagaggagcgtgggaacgttgaaggagggtgatttgaaagggaagagggtgttcgtgagggtcgatctgaacgtgcctttggatgacaaccttaacatcaccgatgacactagagtccgtgctgctgttcccaccatcaagtacttaactggtcatggagccaaagtgatcctttctagccacttgggacgtcctaaaggtgtaacacctaaatacagtttgaagcctcttgttccaaggctgtctcaac

SEQ ID NO: 235417 - DNA, 406 bp, Glycine max
ggcacaagtgagtttgttgatcgagataactagaaacagtgtgatgaaaatgaaggtccttgttttcttcgttgctacaattttggtagcatggcaatgccatgcgtacgatatgttccctctccgaatgaacactggctatggtgcccgtactccggatgtgaaatgcgcaagttggaggcttgctgtggaagcacacaacatctttggctttgagaccattcctgaagagtgcgttgaagcaacaaaggaatacatccatggcgaacaatatatatcagactccaaaacagttaaccaacatgcttacttttatgccagagacctcgaagtccatcccaaggacacatttgtgttcagtatacatggcaccgtactctctaatattccatactacaaaaaacac

SEQ ID NO: 235418 - DNA, 375 bp, Glycine max
  unsure (1)..(375): unsure at all n locations
gaaggtgcaaaagtttgttgtgagctataagctagtttatcgtgaggagaatatgaagttgtttgttttctttgttgctgcagtagttttggtagcatggccatgccatggcgcaggctaccaaaggttccctctccgaatgaaaactggctatggtgagcgttcttcggaggtaaaatgcgcaagttttaggcttgctgtggaagcacacaacatccgagcctttaaaaccattcctgaagagtgcgttgaaccaacaaaggactacattaatggcgaacaatttagattagactctanaacagttaaccaacaagctttcttttatgctagtgaacgcgaagtcaatcacaacgacatatttatattcggcat

SEQ ID NO: 235419 - DNA, 316 bp, Glycine max
ggagagaattatcaaaggtgaaacgaagaagccctaactacgcacgcattcgtgagaaaactcaatattcgtcgctcatggcactctcttctcgtctcttttccaaatccaaattgatctatggcagtcaaatacttctacaaaaggagcatgctattccagttcgtcactttgctaaagagtctgcccctcctgcccttaagggagacgagatgctgaagaacatttttgtggaggtgaagaacaaatttgagaccgccataggaatattaaagaaggagaaaatcaccattgacccagaagattcagctgctgt

SEQ ID NO: 235420 - DNA, 388 bp, Glycine max
ggcacaagtgagtttgttgatcgagataactagaaacagtgtgatgaaaatgaaggtccttgttttcttcgttgctagaattttggtagcatggcaatgccatgcgtacgatatgttccctctccgaatgaacactggctatggtgcccgtactccggaggtgaaatgcgcaagttggaggcttgctgtggaagcacacaacatctttggctttgagaccattcctgaagagtgcgttgaagcaacaaaggaatacatccatggcgaacaatatagattagactccaaaacagttaaccaacaagcttacttttatgccagagacctcgaagtccatcccaaggacacatttgtgttcagtatagatggcaccgtactctctaatatt

SEQ ID NO: 235421 - DNA, 399 bp, Glycine max
ggcgtacacagcctcaacaaccctaacgcgtgcagagcagagagagacgcagccatggggcgaagacccgcgaggtgttataggcaaattaagaacaaaccataccccaagtcacggttttgccgtggtgttcctgatcccaagatcaggatttacgatgttggtatgaagaagaagggtgttgatgagtttcctttctgtgtccatctggttagttgggagaaggaaaacgtttctagtgaggccctggaagctgctcgtattgcttgcaacaagtacatggccaaatttgctggaaaggatgctttccacttgagagtcacggtgcacccattccatgttcttacgatcaacacgatgctttcgtgtgctggagctgataggctccaaactggaatg

SEQ ID NO: 235422 - DNA, 396 bp, Glycine max
ggactctcgcgggtggacaacgaaatttctcagccaaagaacaaggatcagaatcgtttaatcaagttgaggaagatggcactagtctccggaggaagatcaacactgaaccctaacgcccctctttacattcccgccgcgttccgccaagtggaggatttttctccagaatggtggcagctggtgacgacactgacatggtaccatgactactggctaagccagcagcacgatgatggagccttctatggcgaggatgggtttgatggcaatgatgtggttgatttgcttcctgattcgtttgattttgatgctggtgaagatctttttgaagagtttattcgatcttctgaatcccaagaagaaactggacccaaaggaactggcataactttt

SEQ ID NO: 235423 - DNA, 362 bp, Glycine max
gataccaaaacagagagtggtttcagtgagtgatcggtgtgcacctgatccttcacaagtcgtcatcatcatcatcatcatgaccgttgattgaagaagatgccgatcagaaacatcgccatcggaaggcctgaagaggctattcaccccgacacgttgacggcggggttggctgagttcatctccaccttgatcttcgtgttcgccggttcaggttccggcatcgcctacaataagctcaacgacaacggcgccgccactcacgccggcctcatctccgcttccatcgcccatgcattcgccctcttcgtcgccgtctccgtcggagccaacatctccggcggtcacgtcaagcccgcccg

SEQ ID NO: 235424 - DNA, 351 bp, Glycine max
ggttccggtgttttaaccaaatccaaattttgggaaacctccgcagaaggtggtgctccggaggtgactcgggaaacttccatgggttctttcacctttgacctgtacaacaagcatgccccgaggacttgtaggaacttcattgaactgtctcgccgaggttactacgacaacgttaaattccataggatcattaaggacttcatagtacaaggtggggatcccactggaacaggaagaggaggagaatccatatatggtgcaaagtttgaagatgatattaaaccaaaattgaagcacactggagctggaatcttatccatggcaaatgctggcccaaacaccaatggt

SEQ ID NO: 235425 - DNA, 362 bp, Glycine max
gcaaacttgagtttgttgatcgacataactataatcagtgtgatgaaaatgaaggtccatgttttcttcgttgctacacttttggtaccatggaattgccatgcgtacgatatgttccctctcctaatgaacactggctatggtgcccgtactccggatgtaaaatgcgcaagttgaatgcttgctgtggaagcacacaacatctttggctttgagatcattcctcaagagtgcgttgaatcagcaaatgaatgcatccatggcgaacattagagatcagactccaaatcagttaaacatcagacttacatttatgccagatacctcgatttccatcccaatgacacatttgtgttcagtat

SEQ ID NO: 235426 - DNA, 346 bp, Glycine max
gattctacattctctagagcacacacaaaccctcccctcacactctccaaaccctagcggcactacacacgttatctctctctctctctctcgcggtctctccttccccaagatgtcgagcgccgatcccgagcaccgataagaggaggaggcacccgccgtctgcgacgactaggacaccggagcacacgtcgctcccatcgtcaagctcgaggaggttgctgtcaccaccggcgaggaggacgaagatgcaatcctagatctcacatcgaatctttaccggttcgacaaggatgggaaccagtggaaggagcgaggcgcgggcaccgtgaagttcctgaagcat

SEQ ID NO: 235427 - DNA, 384 bp, Glycine max
ggcagcagcagctttgaacgacgcagaaggttcatccaatctccgaatcctttaatcgcattgcaaccatgtcgaggagaaaggtcagagagccaaaggaggaaaacgtgactcttggcccagctgttagagatggcgaacatgtctttggcgtcgctcgcatatttgcctcctttaatgataccttcattcatgtcactgatctgtctgggagggaaacgcttgtccgcatcactggtggaatgaaggttaaggctgacagagatgaatcatctccttatgctgctatgcttgcagctcaggatgttgctgccagatgcaaggaacttggcattactgctcttcatatcaaactccgtgccacgggtgggaacaagacaaaaa

SEQ ID NO: 235428 - DNA, 338 bp, Glycine max
atgagataaactgtatcaattatgagccagatgaattgagcatgttgcctgaacgaggagctgaaagtgcatcaatgagttatgaccctgctttagactatgaaatgcaggcccaggctggtggtactttacaaaataagaacaaagaggtattgactgacaccaaaccaggatctaaggggttggataaggaggcaaaatcaaaacttaccccaaataattctgataaaagaaagactggtgggccgataaggagagggaagacttctaaacctaatgctttggatgaagcacgagcacgtgctgagagcttacggaactacaaagcggatctccag

SEQ ID NO: 235429 - DNA, 391 bp, Glycine max
tccacaaagccacttgacatctttaggttccaatctttggaatgaagatctagagtgtcttgaatggctagaatctaaggaatctcgatccgttgtttatgtgaattttggcagcatcactgttatgtctgcagaacaactcttggagtttgcttggggtttggccaatagcaagaaaccctttttgtggatcattaggcctgaccttgtcattggtggatccgtgattttgtcgtctgagtttgtcagtgaaacaagagacagaagcctaatagcaagttggtgtccacaggaacaagtgctaaaccatccttcaattggtgtattcttgactcattgtggatggaactcaactactgaaagtgtttgtgctggagtgccaatgttgtgt

SEQ ID NO: 235430 - DNA, 402 bp, Glycine max
ggcacaagtgagtttgttgatcgagataactagaaacagtgtgatgaaaatgaaggtccttgttttcttcgttgctacaattttggtagcatggcaatgccatgcgtacgatatgttccctctccgaatgaacactggctatggtgcccgtactccggaggtgaaatgcgcaagttggaggcttgctgtggaagcacacaacatctttggctttgagaccattcctgaagagtgcgttgaagcaacaaaggaatacatccatggcgaacaatatagatcagactccaaaacagttaaccaacaagcttacttttatgccagagaactcgaaattcatcgcaaagacacatttgtgttcagtatagatggcaccgtactctctaatattccatactacaaaaa

SEQ ID NO: 235431 - DNA, 355 bp, Glycine max
  unsure (1)..(355): unsure at all n locations
ggagtctgcgactgagaagtgcgacgctgctgcaaagtgcaagcggatttggtcttcttctttactcccaatcatttctctgtgcaaggataagtgtgttatctatctaaaaacacaagatgtcagctgggcctggacttgaatctctagtagatcagacaatttcagtcattacaaatgatggacgaaatatagtgggagtcctgaaaggttttgaccaggcaacaaatattattcttgatgagtcncatgaacgggtttattctacaaaggaaggtgtgcaacaacttgttcttggtttgtacatcatcaagggtgacaatataagtgttgttggtgaactggatgaagaact

SEQ ID NO: 235432 - DNA, 403 bp, Glycine max
  unsure (1)..(403): unsure at all n locations
acccacacgtccggccaacccttcgaacggttccaaaaaaacaacaaaagggggaacaaatgaatttggttattcaaaataacaaaaaacattttaataaaaataaaggtccttgtttccttcgttgctacaattttggtagcatggcaatgccatgcgtacgatatgttccctctccgaatgaacactggctatggtgcccgtactccggaagtgaaatgcgcaagttggangcttgctgtggaagcacacaacatctttggctttgagaccattcctgaagagtgcgttgaagcaacaaaggaatacatccatggcgaacaatatagattagactccaaaacagttaaccaacaagcttacttttatgccagagacctcgaagtccatcccaaggacacat

SEQ ID NO: 235433 - DNA, 392 bp, Glycine max
ggagtttgttgatcgagataactagaaacagtgtgatgaaaatgaaggtccttgttttcttcgttgctacaattttggtagcatggcaatgccatgcgtacgatatgttccctctccgaatgaacactggctatggtgcccgtactccggaggtgaaatgcgcaagttggaggcttgctgtggaagcacacaacatctttggctttgagaccattcctgaagagtgcgttgaagcaacaaaggaatacatccatggcgaacaatatagattagactccaaaacagttaaccaacaagcttacttttatgccagagacctcgaagtccatcccaaggacacatttgtgttcagtatagatggcaccgtactctctaatattccatactacaaa

SEQ ID NO: 235434 - DNA, 343 bp, Glycine max
ggcgtagcgaaccaacagagaaaattgccattctccgaaacaagtccggggaaaaaggaagaaaacccgcaaagctcaaaatgggaaacgagtttttgaaggcaaagtgcttaatgaactgtgaagttgcattgattcttgagcacaagtatgagcagcttcaacagacatccgatgatcccatgaatcaagtttctcaggtatttgaaaagtcactgcagtatgtgaagcgcttcagccgctataaaaatcccgatgctgttagacaagttcgagaaattctcgccagatatgaattggctgagtttgagttgtgtgtccttggcaacctttgcccaaaaac

SEQ ID NO: 235435 - DNA, 318 bp, Glycine max
gacaaatctcggaagcaaacgcagcattgggagatagaaggagagagagaaggagagagagagaaggacccttacccttcccaaccgctggcttgcctttgaggcttcggaccctggcttggtcggcgtcttccttctttctttctttctttctcggtgtgtcgtaatggctctcccagactcttcttcccgtcgcaactccctgatcccctccttcatctactcctcttcctccaaaacgctccctctccaccaaaaggctcaacacgggctccgctgccgccgccgccgctccctccccgccgccgggcaatctcg

SEQ ID NO: 235436 - DNA, 401 bp, Glycine max
gattgttggcttgtgctctgctcgtgcctctagggttatcatatctccatttccatttcctctctctcagtttccaagaatcttaagctatgggaaagtcttacccaaccgtgagcgctgattaccagaaggccgttgagaaggcgaagaagaagctcagaggcttcatcgctgagaagagatgcgctcctctaatgctccgtttggcatggcactctgctggaacttacgacgtgagctcgaagaccggtggtcccttcggaaccataaagcacccctccgaactcgctcacggcgctaacaacggtcttgacatcgctgttaggcttttggagccactcaaagcggagtttcctattttgagctacgccgatttctaccagttggctggcgttgttgcc

SEQ ID NO: 235437 - DNA, 328 bp, Glycine max
  unsure (1)..(328): unsure at all n locations
ggttctagtgtatgtgattgttgtgcttttcgttcgcatcttctctctctctcagaaagatgaaggtggtcgccgcgtatttgctcgccgtcctcggtggcaacaacagcccctccgccgatgtcatcaaggaaatccttggctccgttggagtagaagcagatgaagataggattgaatcgtttttgtctgaagttaagggtaaggatatagttgagcttattgctgccggtanggaaaagttggccacggttccttctggtggtggtggtgccgttgccgtcgccgcagctcctgngggaagtgctgctgctgctgctcctgctgc

SEQ ID NO: 235438 - DNA, 390 bp, Glycine max
ggttctagtgtatgtgattgttgtgactcgttcttcttcgtcgttatcttcttcttttgttgtttgtgtgtttgttttttctctcacctgaaaatgtcttgctgcggtggtaactgtggttgcggaagcgcctgcaagtgcggcaacggctgcggaggctgcaagatgtacccagacttgagctacaccgagtcaaccaccaccgagaccttggtcatgggagtggcaccagttaaggctcaattcgagagtgctgaaatgggtgttcccgctgagaacgatggctgcaaatgtggagctaactgcacctgcaacccctacacttgcaagtgaggtgttggagagctaaagcttcaagcagaaatggcccttagaaataatgattaaaac

SEQ ID NO: 235439 - DNA, 386 bp, Glycine max
ggctgtgagtgagacaccgatagatagagagcgcggcataacctaaacctatctttcttctctctctgtgtgtgcgcttcaacggcaaccagaagcagccatggccactgcaaggactgtgaaggatgtttcacctcatgagttcgttaaggcgtactcctctcacctcaagcgatccggcaagatggagctgccagagtggactgatattgtgaaaactgcaagatttaaggagttggctccttatgatcctgactggtactatgtcagagctgcttccatggcaagaaagatctacttgagaggaggacttggtgttggtgcctttcagaggatttatggtgggagcaagaggaatggtagtcgccctcctcatttttgcaaga

SEQ ID NO: 235440 - DNA, 340 bp, Glycine max
gattcgaatggatcacgagtggatgggttccgctgtataagctagacctagcttacgtctctcgcagtgtgtgtgaatctgctgaatgcagaatgttccaaggttatggtctagactgtaactgatgtgtcatcacacacaattcgttaaagcgttatcctctcagcgagtctagttgagaggcatcacgctgaagtaatattctgatattatagcaactgcactatttagaggatttgctccttatgatcctgactgctactatgtcacagttgcatcgatagcgagattcatatacatgataagatgacttggtattggtacctttcagatgatttat

SEQ ID NO: 235441 - DNA, 393 bp, Glycine max
ggcacaagtgagtttgttgatcgagataactagaaacagtgtgatgaaaatgaaggtccttgttttcttcgttgctacaattttggtagcatggcaatgccatgcgtacgatatgttccctctccgaatgaacactggctatggtgcccgtactccggaggtgaaatgcgcaagttggaggcttgctgtggaagcacacaacatctttggctttgagaccattcctgaagagtgcgttgaagcaacaaaggaatacatccatggcgaacaatatagatcagactccaaaacagttaaccaacaagcttacttttatgccagagacctcgaagtccatcccaaggacacatttgtgttcagtatagatggcaccgtactctctaatattccata

SEQ ID NO: 235442 - DNA, 182 bp, Glycine max
gacaatcgaacgggaaaaggcgtcttcataaacgccgcccaaaacttctcatacccttttattcattccattcgtttctagggttttcttttctttgccgataaaatgagagagtgcatttcgatccacattggccaggccggtatccaggttggaaacgcctgctgggaactctattgcct

SEQ ID NO: 235443 - DNA, 405 bp, Glycine max; identical to SEQ ID NO: 234594

SEQ ID NO: 235444 - DNA, 201 bp, Glycine max
gaaggtgcaagagtttgttgtgagctataagctagtttatcgtgaggagaatatgaagttgtgtgttttctttgttgctgcagtaattttggtagcatggccatgccatggcgcaggctatcacaggttccctctccgaatgagaactggctatcgtgagcgttcttcggaggtaaaatgctcaagttttacgcttgctgt

SEQ ID NO: 235445 - DNA, 397 bp, Glycine max
  unsure (1)..(397): unsure at all n locations
ggcacaagtgagtttgttgatcgagataactagaaacagtgtgatgaaaatgaaggtccttgttttcttcgttgctacaattttggtagcatggcaatgccatgcgtacgatatgttccctctccgaatgaacactggctatggtgcccgtactccggaggtgaaatgcgcaagttggaggcttgctgtggaagcacacaacatctttggctttgagaccattcctgaagagtgcgttgaagcaacaaaggaatacatccatggcgaacaatatagattagactccaaaacagttaaccaacaagcttacttttatgccagagacctcgaagtccatcncaaggacacatttgtgttcagtatagatgggcacgtactctctaatattccatactac

SEQ ID NO: 235446 - DNA, 377 bp, Glycine max
gacaagtgagtttgttgatcgagataactagaaacagtgtgatgaaaatgaaggtccttgttttcttcgttgctacaattttggtagcatggcaatgccatgcgtacgatatgttccctctccgaatgaacactggctatggtgcccgtactccggaggtgaaatgcgcaagttggaggcttgctgtggaagcacacaacatctttggctttgagaccattcctgaagagtgcgttgaagcaacaaaggaatacatccatggcgaacaatatagatcagactccaaaacagttaaccaacaagcttacttttatgccagagacctcgaagtccatcccaaggacacatttgtgttcagtatagatggcaccgtactc

SEQ ID NO: 235447 - DNA, 400 bp, Glycine max
gaaggtgcaagagtttgttgtgagctataagctagtttatcgtgaggagaatatgaagttgtttgttttctttgttgctgcagtagttttggtagcatggccatgccatggcgcaggctaccaaaggttccctctccgaatgaaaactggctatggtgagcgttcttcggaggtaaaatgcgcaagttttaggcttgctgtggaagcacacaacatccgagcctttaaaaccattcctgaagagtgcgttgaaccaacaaaggactacattaatggcgaacaatttagattagactctaaaacagttaaccaacaagctttcttttatgctagtgaacgcgaagtccatcacaacgacatatttatattcggcatagataacaccgtactctctaatatc

SEQ ID NO: 235448 - DNA, 336 bp, Glycine max
gctttcttcgttgctacaattttggtagcatggcaatgccatgcgtacgatatgttccctctccgaatgaacaccggctatggtgcccgtactccggaggtgaaatgcgcaagttggaggcttgctgtggaagcacacaacatctttggctttgagaccattcctgaagagtgcgttgaagcaacaaaggaatacatccatggcgaacaatatagatcagactccaaaacagttaaccaacaagcttacttttatgccagagacctcgaagtcgatcccaaggacacatttgtgttcagtatagatggcaccgtactctctaatattccatactac

SEQ ID NO: 235449 - DNA, 394 bp, Glycine max
ggcacaagtgagtttgttgatcgagataactagaaacagtgtgatgaaaatgaaggtccttgttttcttcgttgctacaattttggtagcatggcaatgccatgcgtacgatatgttccctctccgaatgaacactggctatggtgcccgtactccggaggtgaaatgcgcaagttggaggcttgctgtggaagcacacaacatctttggctttgagaccattcctgaagagtgcgttgaagcaacataggaatacatccatggcgaacaatatagattagactccaaaacagttaaccaacaagcttacttttatgccagagacctcgaagtccatcccaaggacacatttgtgttcagttatagatggcacgtactctctaatattccatac

SEQ ID NO: 235450 - DNA, 397 bp, Glycine max
gcacaagtgagtttgttgatcgagataactagaaacagtgtgatgaaaatgaaggtccttgttttcttcgttgctacaattttggtagcatggcaatgccatgcgtacgatatgttccctctccgaatgaacactggctatggtgcccgtactccggaggtgaaatgcgcaagttggaggcttgctgtggaagcacacaacatctttggctttgagaccattcctgaagagtgcgttgaagcaacaaaggaatacatccatggcgaacaatatagatcagactccaaaacagttaaccaacaagcttacttttatgccagagacctcgaagtccatcccaaggacacatttgtgttcagtatagatggcaccgtactctctaatattccatactaca

SEQ ID NO: 235451 - DNA, 397 bp, Glycine max
ggaatcggagggactgcagaagtcgcaacccaaccaaccatggcagcttctgatcccgacaagttgatggtcaaagctgataaactaacaagactcagtctcacgaggtggagtgcggattggaaaagtgctactgttctttatgagcaggcagctaatgggtttagagttgccaaggactatgagaatgctaaaatagcatatgagaaagcttcgaaaggacaagaaatgctttcttcaccttgggatgcggctaagcacatggaatccgctgctgctctcgcaaaggatctaagacactggcaagaagttgtggacttctatcgaaaggcatctgaattatatatggagtgtgggagaccacaacctgcatcagatgctcttgcaaagggagccc

SEQ ID NO: 235452 - DNA, 454 bp, Glycine max
gtctagaattcacgggccgacgcacgcgtccatgaaagatctctctgcatctccttcagccttttctgctaacccaaaatctaaagtgacaagtcctccatcactcactggaacttcaatctcattagtttcaattatacaggcaagaaataatgcccggatattgatctctggctcattgagcttgttcagcaaccgatttttcaggtcaggtgtgcagaaggctgggagtccaaccaaacatgagaagtcaggtaatgagcagttcttgaatgaacttagcaaatggattttccatgaacgaggtcacctcaaggcggtgaatgtgcaacaccacaaagttggggaagctaatgaaacagccatctatcggatcaatgataatttggaatactctgttgaagtttatgagtggtctgggacagcatgggaaccttacgtagctgatgatgtt

SEQ ID NO: 235453 - DNA, 419 bp, Glycine max
acggactcatccagctgtcagaagaccacacaacgggtaagggaggggtatttcatcactgttgatattgaaaaaggcatgcaacatgggcacgacgtgctactctatgatgaccgtgatcccacaattgatcgataatctggagatttaaagtttcgtatccgtactgcacctcacgacaccttcagaagataaagcaatgacttgcacactactgtcactataactctggttcaagcccctgttggttttgagaagaccattaaacacctagatgagcatctggtggacataagcacaattgaaatcacaaagccaaagcaagtgacgaagttcaaatgggatggtatgccattgcatagtagcaacagaaaaagagatctttacgtcacttttgacgttctattccccacgtcact

SEQ ID NO: 235454 - DNA, 400 bp, Glycine max
ggtgctcactcatctatctattataaccaaacactcttcttcatattcttcttcttcttcttgttcttgttctatctgtgacgagcatcatggcctcgagagcagtgctattgttggctatgtgtgtgcttccggccatggttgtggccattcgcccagcaaagaaccctttttgcgtgaagggtcgcgtctactgtgacccttgccgtgctggttttgagacctcagcaaccacctacattgccggtgctgagattatgttgcaatgcaagagcagggttagcaacgaggttgtgtacaccaagaaggggtacactgactcaactggagcatacacaatgtacgtggacgaggatcacgcagattagatatgcagtggcaagcttgtaagcagccctca

SEQ ID NO: 235455 - DNA, 382 bp, Glycine max
ggaacctttgcattctattcattcaagattcagcaagtgcgttttggaagcagagaccgaaatacttcgagatggcccgtacaaagcaaactgctcgtaagtcaactggaggaaaagctcccaggaagcagcttgcaaccaaggctgcacgtaagtctgcaccaacaactggtggtgtgaagaagcctcatcgttatcgccctggaactgttgctcttcgtgagattaggaaataccagaagagcactgagctcctaatcaggaagcttcctttccagaggttggttcgtgaaattgcccaggatttcaagactgatctgcgtttccagagccatgctgtgcttgcattgcaagaggctgctgaggcataccttgttgggct

SEQ ID NO: 235456 - DNA, 376 bp, Glycine max
gtgattctactaggccacagtgactcttacacaagagacaagctgatgcaagtgaccatcgcatacaaccatttcggagagggacttatccagagaatgccacgttgtagacatggatatttccacgtggtgaacaatgactacactcactgggagatgtatgctattggtggaagtgctaaccccaccatcaacagccagggcaacagatacaatgctcctactaacccttttgccaaggaggtgactaagagagtggaaacagcagaaacccaatggaagggttggaattggaggtcagagggagatttgttactgaatggggcctatttcactccatctggtgctggagcctcagccagctatgctagagcct

SEQ ID NO: 235457 - DNA, 400 bp, Glycine max
  unsure (1)..(400): unsure at all n locations
ggcacaagtgagtttgttgatcgagataactagaaacagtgtgatgaaaatgaaggtccttgttttcttcgttgctacaattttggtagcatggcaatgccatgcgtacgatatgttccctctccgaatgaacactggctatggtgcccgtactccggaggtgaaatgcgcaagttggaggcttgctgtggaagcacacaacatctttggctttgagaccattcctgaagagtgcgttgaagcaacanaggaatacatccatggcgaacaatatagatcagactccaaaacagttaaccaacaagcttacttttatgccagagacctcgaagtccatcccaaggacacatttgtgttcagtatagatggcaccgtactctctaatattccatactacaaa

SEQ ID NO: 235458 - DNA, 389 bp, Glycine max
  unsure (1)..(389): unsure at all n locations
ggagcaaaaccctaatccctatttttcttcctcagtagtgtcatttacgcttctcttctctgcagcaactatgcctaaccctaaggtcttcttcgacatgaccatcggcggtcaatctgctggccgcatcgtgatggagctctacgccgacgtcactccccgcaccgccgagaacttccgcgcgctttgcaccggcgagaagggcgtanggcggagcggcaagcccctccactacaagggctcgtccttccaccgcgtgatcccgagtttcatgtgtcagggtggcgacttcaccgccggaaacggaaccggcggcgagtcgatttatggcgccaagttcgccgacgagaacttcgtgaagaagcacaccggtcccggcatcctctcca

SEQ ID NO: 235459 - DNA, 381 bp, Glycine max
ggcacaagtgagtttgttgatcgagataactagaaacagtgtgatgaaaatgaaggtccttgttttcttcgttgctacaattttggtagcatggcaatgccatgcgtacgatatgttccctctccgaatgaacactggctatggtgcccgtactccggaggtgaaatgcgcaagttggaggcttgctgtggaagcacacaacatctttggctttgagaccattcctgaagagtgcgttgaagcaacaaaggaatacatccatggcgaacaatatagatcagactccaaaacagttaaccaacaagcttacttttatgccagagacctcgaagtccatcccaaggacacatttgtgttcagtatagatggcaccgtactctc

SEQ ID NO: 235460 - DNA, 383 bp, Glycine max
ggtgcacaagtgagtttgttgatcgagataactagaaacagtgtgatgaaaatgaaggtccttgttttcttcgttgctacaattttggtagcatggcaatgccatgcgtacgatatgttccctctccgtatgaacactggctatggtgcccgtactccggaggtgaaatgcgcaagttggaggcttgctgtggaagcacacaacatctttggctttgagaacattccttaaaaattgctttgaagcagtaaaggaatacatccatggcgaacaatatagattagactccaaaacagttaaccaacaagcttacttttatgccagagacctcgaagtccatcccaaggacacatttgtgttcagtatagatggcaccgtactct

SEQ ID NO: 235461 - DNA, 392 bp, Glycine max
ggcacaagtgagtttgttgatcgagataactagaaacagtgtgatgaaaatgaaggtccttgttttcttcgttgctacaattttggtagcatggcaatgccatgcgtacgatatgttccctctccgaatgaacactggctatggtgcccgtactccggaggtgaaatgcgcaagttggaggcttgctgtggaagcgcacaacatctttggctttgagaccattcctgaagagtgcgttgaagcaacaaaggaatacatccatggcgaacaatatagatcagactccaaaacagttaaccaacaagcttacttttatgccagagacctcgaagtccatcccaaggacacatttgtgttcagtatagatggcaccgtactctctaatattccat

SEQ ID NO: 235462 - DNA, 412 bp, Glycine max
  unsure (1)..(412): unsure at all n locations
agaaggatcagcagggagaattaggtttttagggtttacaccgagcagccacacctcccgcagcagccatggttctcaaaactgaactatgccgattcagtggtgccaagatctacccaggaaagggcatcagatttgttcgtggtgattctcaggttttcctgtttgcagactcaaaatgtaagaggtatttccacaatcgcctgaagccttcaaagctcacctggactgcaatgtacagaaagcaacacaaaaaggacattgctcaagaagctgtgaggaagaggagacgtgctgccaaaaagccttactctaggtccattgttggtgcgaccttggaagtaatccagaanaagagagctgaggagccagaagttcgagatgcagctagggaagctgctcttcgtgaaat

SEQ ID NO: 235463 - DNA, 381 bp, Glycine max
ggcacaagtgagtttgttgatcgagataactagaaacagtgtgatgaaaatgaaggtccttgttttcttcgttgctacaattttggtagcatggcaatgccatgcgtacgatatgttccctctccgaatgaacactggctatggtgcccgtactccggaggtgaaatgcgcaagttggaggcttgctgtggaagcacacaacatctttggctttgagaccattcctgaagagtgcgttgaagcaacagaggaatacatccatggcgaacaatatagatcagactccaaaacagttaaccaacaagcttacttttatgccaaagacctcgaagttcacccaaggacacatttgtgttcagtatagatggcaccgtactctct

SEQ ID NO: 235464 - DNA, 348 bp, Glycine max
tggggtagttcacactgtgcagatagacatcacgctcaaaccatcgttcgcaacactgctggatggcgactcaatggtggcaacatcggtccaggaatagtcagtcagctttgcttcgtggatgattctcaagctttcatgtttgcaccactacccatgtccgaggtatttccacaatcggctgaaaccttcaaagctcacgtgaactgcactgtaggcacagcaacaaatacaggacattgctcaagaatctgtgaggaatatgacacgtgctagcaagatcccttactctaggtcgattgttggtgcaaccttgtgagtaatcagaagaagagagctgaggagcca

SEQ ID NO: 235465 - DNA, 382 bp, Glycine max
  unsure (1)..(382): unsure at all n locations
ggcacaagtgagtttgttgatcgagataactagaaacagtgtgatgaaaatgaaggtccttgttttcttcgttgctacaattttggtagcatggcaatgccatgcgtacgatatgttccctctccgaatgaacactggctatggtgcccgtactccggaggtgaaatgcgcaagttggaggcttgctgtggaagcacacaacatctttggctttgagaacattcctgaagagtgcgttgaagcaacanaggaatacatccatggcgaacaatatagatcagactccataacagttaaccaacaagcttacttttatgccagagacctcgaagtccatcacaaggacacatttgtgttcagtatagatggcaccgtactctct

SEQ ID NO: 235466 - DNA, 365 bp, Glycine max
ggtgcacaagtgagtttgttgatcgagataactagaaacagtgtgatgaaaatgaaggtccttgttttcttcgttgctacaattttggtagcatggcaatgccatgcgtacgatatgttccctctccgaatgaacactggctatggtgcccgtactccggaggtgaaatgcgcaagttggaggcttgctgtggaagcacacaacatctttggctttgagaccattcctgaagagtgcgttgaagcaacaaaggaatacatccatggcgaacaatatagatcagactccataacagttaaccaacaagcttacttttatgccagagacctcgaagtccatcgcaaggacacatttgtgttcagtat

SEQ ID NO: 235467 - DNA, 392 bp, Glycine max
gaaggtgcaagagtttgttgtgagctataagctagtttatcgtgaggagaatatgaagttgtttgttttctttgttgctgcagtagttttggtagcatggccatgccatggcgcatgctaccaaaagttccctctccgaatgaaaactggctatggtgagcgttcttcggaggtaaaatgcgcaagttttaggcttgctgtggaagcacacaacatccgagcctttaaaaccattcctgaagagtgcgttgaaccaacaaaggactacattaatggcgaacaatttagatcagactctaaaacagttaaccaacaagctttcttttatgctagtgaacgcgaagtccatcacaacgacatatttatagtcggcatagataacaccgtactct

SEQ ID NO: 235468 - DNA, 399 bp, Glycine max
  unsure (1)..(399): unsure at all n locations
ggcagtttcaaattttcttttccttcactttcccgagaaaaaaatagcacttttcactttcttcactacgttcgcacttcgatatggctcgtacgaagcaaaccgctcgcaagtccaccggtggcaaggcgccacgtaagcagctcgccaccaaggccgctcggaagtccgctccggcgaccggaggagtgaagaagccccaccgcttcaggccgggaaccgtggcgctgagggaaatcagaaagtaccagaagagcaccgagcttctcatcaggaagcttccatttcagatgctcgtgagagaaatcgcgcaggatttcaagaccgatttgcgtttccagagcagcgctgtttccgcgcttcaggaggctgctgaggcntaccccgttgggttgttcg

SEQ ID NO: 235469 - DNA, 173 bp, Glycine max
aggggcacaagtgagtttgttgatcgagataactagaaacagtgtgatgaaaatgaaggtccttgttttcgtcgctgccacgatttaggtagcatagcaatgccatgcgtatgatatgttccctctccgtatgaacactggctatggtgcccgtacgccggaggtgaaatgcg

SEQ ID NO: 235470 - DNA, 368 bp, Glycine max
ggcacaagtgagtttgttgatcgagataactagaaacagtgtgatgaaaatgaaggtccttgttttcttcgttgctacaattttggtagcatggcaatgccatgcgtacgatatgttccctctccgaatgaacactggctatggtgcccgtactccggaggtgaaatgcgcaagttggaagcttgctgtggaagcacacaacatctttggctttgagaccattcctgaagagtgcgttgaagcaacaaaggaatacatccatggtgaacaatatagatcagactccaaaacagttaaccaacaagcttacttttatgccatagacctcgaggtccatcccaaggacacatttgtgttcagtatagatg

SEQ ID NO: 235471 - DNA, 216 bp, Glycine max
gatattgtaggagcaacaactgtgaaatctgtggaatcaaaggggcaagctgagaagtgtgccaagagaaagaggaagaaccagtatcgcggaatccgccagcgtccatggggaaagtgggctgctgagattcgcgacccaagaaagggggttcgtgtttggcttggaactttcagcactgctgaagaagctgcaagagcttacgatgctgaaaca

SEQ ID NO: 235472 - DNA, 386 bp, Glycine max
gctgtctgcttcttcactttctctcgtttcaatcgaaaaaaaatcatgggcagaaaattcttcgtcggtggcaactggaaatgcaatgggaccactgaggaggtgaagaagattgttactactttaaatgaagctaaagtccctggagaagatgttgtagaagttgttgtgagccctccttttgtgttccttccttttgtaaaaagtttgctgcccccctgatttccatgtctcggcccaaaattgttgggttcgcaaaggtggtgcttatactggagaggttagtgctgaaatgcttgttaatttgggaattccttgggttattattggtcactctgaacggaggcagcttttgaatgaatcaaatgagtttgtgggagataaag

SEQ ID NO: 235473 - DNA, 388 bp, Glycine max
gaaggtgcaagagtttgttgtgagctataagctagtttatcgtgaggagaatatgaagttgtttgttttctttgttgctgcagtagttttggtagcatggccatgccatggcgcaggctaccaaaggttccctctccgaatgaaaactggctatggtgagcgttcttcggaggtaaaatgcgcaagttttaggcttgctgtggaagcacacaacatccgagcctttaaaaccattcctgaagagtgcgttgaaccaacaaaggactacattaatggcgaacaatttagattagactctaaaacagttaaccaacaagctttcttttatgctagtgaacgcgaagtccatcacaacgacatatttatattcggcatagataacaccgtt

SEQ ID NO: 235474 - DNA, 397 bp, Glycine max; identical to SEQ ID NO: 234774

SEQ ID NO: 235475 - DNA, 237 bp, Glycine max
gcaagcatggagttagtgcaatcaggaggctgaggaaaactgataataatagaattgcaaaggcttgtggtgctgttattgtgaacagaccagatgaattgcaggagtctgatgttggtactggtgctgggttatttgaggttaagaaaattggagatgagtactttgcatagagtgtttatttcagagaacccaggggttgtactgttctacgaaggggtgccagtaaggatccat

SEQ ID NO: 235476 - DNA, 382 bp, Glycine max
ggcacaagtgagtttgttgatcgagatagctagaaacagtgtgatgaaaatgaaggtccttgttttcttcgttgctacaattttggtagcatggcaatgccatgcgtacgatatgttccctctccgaatgaacactggctatggtgcccgtactccggaggtgaaatgcgcaagttggaggcttgctgtggaagcacacaacatctttggctttgagaccattcctgaagagtgcgttgaagcaacaaaggaatacatccatggcgaactatatagatcagactccaaaacagttaaccaacaagcttacttttatgccagagacctcgaagtccatcacaaggacaaatttgtgttcagtatagatggcaacgtactctct

SEQ ID NO: 235477 - DNA, 379 bp, Glycine max
ggcacaagtttgttgagatagctagaagcaataagatgaaaatgaaagtgcttgtgttgtttgttgctacagttttggtagcatatgaatgccatggctcagactaccagaagttccctctccaaatgaaaactgggtttggtgggcaatacagcaatgaggtggcatgtgccagttggaggcttggcgtggaagcaaacaacgtagtcaagtggcaaactgttcctgcagcttgcggagagtacatagctgactacgttctaggagaccaatatagatcagattccaaaacagttaaccaacaagcttatttctatgctaaatccctcaaactcaccaacaaagatgtctttgtcttggacgttgacgacactactct

SEQ ID NO: 235478 - DNA, 399 bp, Glycine max
ggatagcgaaacagagagtggtttcagtgagtgatcggtgttcacttgatccttcagaagtcgtcatcatcatcatcatcatcaccgttgattgaagaagatgccgatcagaaacatcgccatcggaaggcctgaagaggctactcaccccgacacgttgaaggcggggttggctgagttcatctccaccttgatcttcgtgttcgccggttcaggttccggcatcgcctacaacaagctcaccgacaacggcgccgccactcccgccggcctcatctccgcttccatcgcccatgctttcgccctcttcgtcgccgtctccgtcggcgccaacatctccggcggccacgtcaaccccgccgtcaccttcggcgccttcgtgggcggcaacatcacctt

SEQ ID NO: 235479 - DNA, 262 bp, Glycine max
ggtagcgccagactgagaggaagagagagggagattctttgtttgctaccttctctcggaaaaatggttacgttcaggtttcaccagtaccacgtggttgggagggctcttcccacggaagcagatcatcaccccaagatctaccgaatgaagctctgggccacaaacgaagttcgcgccaagtccaggttctggtaatttctgaggaaactgaggaatgtggacaataccagtggccagctgcttgccatcaactgaattt

SEQ ID NO: 235480 - DNA, 390 bp, Glycine max
ggcacaagtttgttgagatagctagaagcaataagatgaaaatgaaagtgcttgttttgtttgttgctacagttttggtagcatatgaatgccatggctcagactaccagaagttccctctccaaatgaaaactgggtttggtgggcaatacagcaatgacgtggcatgtgccagttggaggcttggcgtggaagcaaacaacgtagtcaagtggcaaactgttcctgcagcttgcggagagtacatagctgactacgttctaggagaccaatatagatcagattccaaaacagttaaccaacaagcttatttctatgctaaatccctcaaactcaccaacaaagatgtctttgtcttggacgttgacgacactactctctccaatctcc

SEQ ID NO: 235481 - DNA, 397 bp, Glycine max
ggggaaccctaattctgcgaggtgagtgaaaatggcggtacccttgctctccaagaagatcgtgaagaagcgcgtcaagaagtttatacgcccccagagtgatcgcaagatctccgtcaagccaagctggcgcagacccaagggtattgattctcgtgtcaggagaaagttcaaaggatgcactttgatgcccaacattggttatggctcagacaagaaaacccgccattatctaccaaatggtttcaagaaatttgtcgtgcacaatgtgaaagacctggaacttctcatgatgcataacaggacatattgtgctgagattgctcacaatgtatccacaaggaagaggaaggacatagttgagagagctgctcagcttgatgttgtcttgacgaac

SEQ ID NO: 235482 - DNA, 388 bp, Glycine max
ggtattccttacgctctctcactcacaaacacacactgaactaaaaaacatcaaaagagacatggctgagcaaaccttcatcatgatcaagcctgatggcgtccaaagaggccttattggcgagatcattagcagatttgagaagaaaggtttctacttgaaaggtttgaaacttgttactgtggaccgtccttttgctgagaagcactatgctgatttgtctgccaagcctttctttagtggtttggtggattacattatctctggccctgttgttgccatgatctgggagggcaagaatgttgttacaactggccgaaagattatcggagccacaaacccagctcaatctgagcctggaactatccgtggtgactttgccattgac

SEQ ID NO: 235483 - DNA, 398 bp, Glycine max
ggcacaagtttgttgagatagctagaagcaataagatgaaaatgaaagtgcttgttttgtttgttgctacagttttggtagcatatgaatgccatggctcagactaccagaagttccctctccaaatgaaaactgggtttggtgggcaatacagcaatgaggtggcatgtgccagttggaggcttggcgtggaagcaaacaacgtagtcaagcggcaaactgttcctgcagcttgcggagagtacatagctgactacgttctaggagaccaatatagatcagattccaaaacagttaaccaacaagcttatttctatgctaaatccctcaaactcaccaacaaagatgtctttgtcttggacgttgacgacactactctctctaatctccagtatttt

SEQ ID NO: 235484 - DNA, 370 bp, Glycine max
ggatagcgaaacagagagtggtttcagtgagtgatcggtgttcacttgatccttcataagtcgtcatcatcatcatcatcatcaccgttgattgaagaagatgccgatcagaaacatcgccatcggaaggcctgaagaggctactcaccccgacacgttgaaggcggggttggctgagttcatctccaccttgatcttcgtgttcgccggttcaggttccggcatcgcctacaacaagctcaccgacaacggcgccgccactcccgccggcctcatctccgcttccatcgcccatgctttcgccctcttcgtcgccgtctccgtcggcgccaacatctccgggggccacgtcaaccccgccgtcaccttc

SEQ ID NO: 235485 - DNA, 395 bp, Glycine max
ggaagagtgaagagaatggctcccaagggtttaacctttctggctgtgttaatatgcgtttcagcactgtcactgagtccttctgttgcgggggaagggcaaaataatggccttgttatgaacttctacaaggaatcatgccctcaggctgaagacatcatcacagaacaagtcaagcttctctacaagcgccacaagaacactgctttctcctggctcaggaacatcttccatgactgtgctgttcagagttgtgatgcttcactgttgctggactccacaagaaggagcttgtctgagaaggaaacagatagaagctttgggttgagaaatttcaggtacattgagaccatcaaagaagctttggaaagagaatgccctggagttgtttcatg

SEQ ID NO: 235486 - DNA, 377 bp, Glycine max
gagagaaagagagagaaagatgtcgaagcgtggtcgtggtggttcggcggggaacaagttccgcgtcgctgggtcttccagtggcggcgacggtgaactgcgccgacaacacgggggcgaagaacctctacatcatttcggtgaaagggatcaaaggccgtttgaaccgtcttccctcggcctgcgttggcgacatggtgatggccaccgtgaagaagggaaaacccgatctgaggaagaaggtcttgccagctgtcatcgttcgccagcgcaagccatggcgccgaaaggacggcgtctacatgtacttcgaagataatgctggtgttattgtcaatcccaagggagaaatgaaaggttctgctatcactggtccc

SEQ ID NO: 235487 - DNA, 390 bp, Glycine max
gaaagcaatcctctagcttatgctcacaatggcttcgtcatcttgttctgctgccaccatccacttcatcctgctttcaatatccctcttctcagtttcctctttaccattaccacatgaatcaacttccacaccaaacaaaatcttcttcctgcccattaagatagacgcagcaaccaacatgttctacaccacaattggcattggaactccccaacacagcacaaatctagtgattgatcttggcggagaatacctctggcatgactgcagcatcagacgctacaattcatcatccatacgtaagatcgtttgtaagtcaaagaaatgccccgagggtgctgcatgcgtttccactggctgcattggcccttataaaacaggctgcgc

SEQ ID NO: 235488 - DNA, 392 bp, Glycine max
ggcacaagtgagtttgttgatcgagataactagaaacagtgtgatgaaaatgaaggtccttgttttcttcgttgctacaattttggtagcatggcaatgccatgcgtacgatatgttccctctccgaatgaacactggctatggtgcccgtactccggaggtgaaatgcgcaagttggaggcttgctgtggaagcacacaacatctttggctttgagaccattcctgaagagtgcgttgaagcaacaaaggaatacatccatggcgaacaatatagatcagactccaaaacagttaaccaacaagcttacttttatgccagagacctcgaagtccatcccaaggacacatttgtgttcagtatagatggcaccgtactctctaatattccat

SEQ ID NO: 235489 - DNA, 387 bp, Glycine max
ggcacaagtttgttgagatagctagaagcaataagatgaatatgaaagtgcttgttgtgtttgttgccacagttttggtagcatatgaatgccatggctcagactaccagaagttccctctccaaatgaaaactgggtttggtgggcaatacagcaatgaggtggcatgtgccagttggaggcttggcgtggaagcaaacaacgtagtcaagtggcaaactgttcctgcagcttgcggagagtacatagctgactacgttctaggagaccaatatagatcagattccaaaacagttaaccaacaagcttacttctatgctaaatcactcaaactcaccaacaaagatgtctttgtcttggacgttgacgacactactctctctaatc

SEQ ID NO: 235490 - DNA, 207 bp, Glycine max
tggggcacatgtttgttgagatagctagaagcactcttattaacatgaaagtgcttgtcttgtttgttgctacagttttggtagcatattaatgccatggctcagactaccagaaattccctctccaaattaaaactgggtttggtgggcattcaagccatgatgtggcatctgccacttcgacgcatggcctggaagcacacaacg

SEQ ID NO: 235491 - DNA, 403 bp, Glycine max
gaaggtgcaagagtttgttgtgagctataagctagtttatcgtgaggagaatatgaagttgtttgttttctttgttgctgcagtacttttggtagcatggccatgccatggcgcaggctaccaaaggttccctctccgaatgaaaactggctatggtgagcgttcttcggaggtaaaatgcgcaagttttaggcttgctgtggaagcacacaacatccgagcctttaaaaccattcctgaatagtgcgttgaaccaacacaggactacattaatggcgaacaatttagatcagactctaaaacagttaaccaacaagctttcttttatgctagtgaacgcgaagtccatcacaacgacatatttatattcggcatagataacaccgtactctctaatatccca

SEQ ID NO: 235492 - DNA, 377 bp, Glycine max
gagaaaaaggttggttgggcattcgccgtaaacagaagagagagagagagagagagagagtcctgaaacttgggtgcgattccttcactcacaacaacaacacatcactatggctcttctgagtcgagcctcttcacgcttccctcagctggtttcccctcaaagggtagtttcactccacacaacgctcccatctctgaacgcatccccatccacagccacgcctacaccatatgccccgccaccgcctccgtccgcttcctctcccgccggcgtttcgaaggcggcggagttcgtgatctcgaaggtggacgatctgatgaactgggcccgccgcggctccatctggcccatgaccttcggcctcgcctgctgcg

SEQ ID NO: 235493 - DNA, 400 bp, Glycine max; identical to SEQ ID NO: 234828

SEQ ID NO: 235494 - DNA, 365 bp, Glycine max
ggtggaaatattactgattagttcccaccatcggtgttggtaactaaagacttcttggtgggtccactgttttacggtttgtttgcacacttttcatttccgatccataattgtcccaattctttccactcgcgaaatccagagatatcgatcaacagattcgtgcgacacgttaaattgttttcaaggttgcgcatatccaggatgcaggcatcgcgggcaaggttgttcaaagagtacaaagaggtgcagcgggaaaaggccgttgatcctgatattcaactagtttgtgatgattcaaacatttttaaatggactgctcttatcaagggaacctctgagactccttttgagggtggtgtgtt

SEQ ID NO: 235495 - DNA, 234 bp, Glycine max
ggcacatgtgagtttgttgctcaagacaactacaagtaatgtgatgaaacttaaagtccctgctgtcttcggggctataagcatggttgccaggtcagatcaatcgtaggaaaagttccctccacgtcatgaaatcgagcgatagcgctcctcatccggatgtgacacgcccaacttggacgattgctgcggaaacccacaatacagttggcgctgacaatattcctcaaaaat

SEQ ID NO: 235496 - DNA, 416 bp, Glycine max
gaagacgacagaaggggactcaccaggtgaaccaatatagcccaagccctatacaaccaaaccctaacacacacccatttgattcagtttccatggctagcctcaaggttgcatttttggctgcagtgctctgcatggttgtggtgagtgcacccatggcacatgcagctatcacgtgcgggcaggtgacgaatagcctgatcaattgcatcggttacctccagaacggaggaactccgccgtcgggatgctgcaacggagtgaagagcctcaatgccgccgccaagaccaccgccgaccgccagacggcgtgcaactgcctcaagtcggccgccagccaaatctccggcttcaaagccatcaacgccgcctcgctctccgacaaatgcggagtctccatcccctacaagatcagc

SEQ ID NO: 235497 - DNA, 388 bp, Glycine max
ggcacaagtttgttgagatagctagaagcaataagatgaaaatgaaagtgcttgttttgtttgttgctacagttttggtagcatatgaatgccatggctcagactaccagaagttccctctccaaatgaaaactgggtttggtgggcaatacagcaatgaggtggcatgtgccagttggaggcttggcgtggaagcaaacaacgtagtcaagtggcaaactgttcctgcagcttgcggagagtacatagctgactacgtcctaggagaccaatatagatcagattccaaaacagttaaccaataagcttatttctatgctaaatccctcaaactcaccaacaaagatgtctttgtcttggacgttgacgacactactctctctaatct

SEQ ID NO: 235498 - DNA, 383 bp, Glycine max
gaaggtgcaagagtttgttgtgagctataagctagtttatcgtgaggagaatatgaagttgtttgttttctttgttgctgcagtagttttggtagcatggccatgccatggcgcaggctaccaaaggttccctctccgaatgaaaactggctatggtgagcgttcttcggaggtaaaatgcgcaagttttaggcttgctgtggaagcacacaacatccgagcctttaaaaccattcctgaagagtgcgttgaaccaacaaaggactacattaatggcgaacaatttagatcagactctaaaacagttaaccaacaagctttcttttatgctagtgaacgcgaagtccatcacaacgacatatttatattccgcatagataaca

SEQ ID NO: 235499 - DNA, 359 bp, Glycine max
gcacaagtgagtttgttgatcgagataactagaaacagtgtgatgaaaatgaaggtccttgtttacttcgttgctacaattttggtagcatggcaatgccatgcgtacgaaatgttccctctccgaatgaacactggctatggtgcccgtactccggacgtgaaatgcgcaagttggaggcttgctgtggaagcacacaacatctttggctttgagaccattcctgagtaatgcgtttgaacaacaaaggaatacatccatggcgaacaatatagatcagactccaaaacagttaaccaacaagcttacttttatgccagagacctcgaagtcaatcccaaggacacatttgtgttcag

SEQ ID NO: 235500 - DNA, 385 bp, Glycine max
ggcacaagtttgttgagatagctagaagcaataagatgaaaatgaaagtgcttgttttgtttgttgctacagttttggtagcatatgaatgccatggctcagactaccagaagttccctctccaaatgagaactgggtttggtgggcaatacagcaatgaagtggcttgtggcaattggaagcgtggcgtggaagcaaacaacgtagtcaagtggcaaactgttcctgcagcttgcggagagtacatagctgactacgttctaggagaccaatatagatcagattccaaaacagttaaccaacaagcttatttctatgctaaatccctcaaactcaccaacaaagatgtctttgtcttggacgttgacgacactactctctctaa

SEQ ID NO: 235501 - DNA, 385 bp, Glycine max
  unsure (1)..(385): unsure at all n locations
ggcacaagtgagtttgttgatcgagataactagaaacagtgtgatgaaaatgaaggtccttgttttcttcgttgctacaattttggtagcatggcaatgccatgcgtacgatatgttccctctccgaatgaacactggctatggtgcccgtactccggaggtgaaatgcgcaagttggaggcttgctgtggaagcacacaacatctttggctttgagaccattcctgaagagtgcgttgaagcaacaaaggaatacatccatggcgaacaatatagattagactccaaaacagttaaccaacaagcttacttttatgccagagacctcgaagtccatcncaaggacacatttgtgttcagtatagatggcaccgtactctctaat

SEQ ID NO: 235502 - DNA, 407 bp, Glycine max
ggcacaagtgagtttgttgatcgagataactagaaacagtgtgatgaaaatgaaggtccttgttttcttcgttgctacaattttggtagcatggcaatgccatgcgtacgatatgttccctctccgaatgaacactggctatggtgcccgtactccggaggtgaaatgcgcaagttggaggcttgctgtggaagcacacaacatctttggctttgagaccattcctgaagagtgcgttgaagcaacaaaggaatacatccatggcgaacaatatagatcagactccaaaacagttaaccaacaagcttacttttatgccagagacctcgaagtccatcccaaggacacatttgtgttcagtatagatggcaccgtactctctaataatccatactacaaaaaacatg

SEQ ID NO: 235503 - DNA, 384 bp, Glycine max
ggcacaagtttgttgagatagctagaagcaataagatgaaaatgaaagtgcttgttttgtttgttgctacagttttggtagcatatgaatgccatggctcagactaccagaagttccctctccaaatgaaaactgggtttggtgggcaatacagcaatgaggtggcatgtgccagttggaggcttggcgtggaagcaaacaacgtagtcaagtggcaaactgttcctgcagcttgcggagagtacatagctgactacgttctaggagaccaatatagatcagattccgaaacagttaaccaacaagcttatttctatgctaaatcgctcaaactcaccaacaaagatgtctttgtcttggacgttgacgacactactctctcta

SEQ ID NO: 235504 - DNA, 382 bp, Glycine max
gactcaagcagaggatctctatcgagtaaattaactatgaagcctaccctactattatccctttcgttcctgccgctctttgctttcctggctctttcagaagatgttgaacaagttgtggacataagtggcaaccccattttcccaggtggcacatattacattatgccatcaacttggggcgctgccggtggtggattgaaactaggccggacatgaaactcaaactgcccagttactgttttgcaagattactcagaaatcttccgtggcacaccagtcaaattcatcatacctgggataagccctggaatcatctttacaggtactccacttgaaatcgagttcgcagagaaaccttattgtgctgaatcctccaaat

SEQ ID NO: 235505 - DNA, 395 bp, Glycine max
ggcacaagtgagtttgttgatcgagataactagaaacagtgtgatgaaaatgaaggtccttgttttcttcgttgctacaattttggtagcatggcaatgccatgcgtacgatatgttccctctccgaatgaacactggctatggtgcccgtactccggaggtgaaatgcgcaagttggaggcttgctgtggaagcacacaacatctttggctttgagaccattcctgaagagtgcgttgaagcaacaaaggaatacatccacggcgaacaatatagatcagactccaaaacagttaaccaacaagcttacttttatgccagagacctcgaagtccatcccaaggacacatttgtgttcagtatagatggcaccgtactctctaatattccatact

SEQ ID NO: 235506 - DNA, 395 bp, Glycine max
  unsure (1)..(395): unsure at all n locations
agaagggggaacatcatcacattacattagattggtggtaatggcagcgtcgctacaagcagcagctactttcatgcaacccaccaagttgagcaggagcaacactttgcagcaaaagtctactcagtccatttccaaggcttttggtttggaacctgttggagctaaaaaggtcacatgctcccttcaggctgatcttaaggacttggctcacaagtgtgttgacgctaccaaaattgcaggattcgcccttgccacctctgccctcgttgtctctggggcaagtgctgaaggtgttccaaagaggctaaccttcgacgaaatccagagcaagacctacttggaagtgaaggggacaggaacagcanaccagtgcccaacanttgatggtggat

SEQ ID NO: 235507 - DNA, 107 bp, Glycine max
gggtgcaagagtttgttgtgagctataagctagtttatcgtgaggagaatatgaagttgtttgttttctttgttgctgcagtacttttggtagcatggccatgccat

SEQ ID NO: 235508 - DNA, 382 bp, Glycine max
  unsure (1)..(382): unsure at all n locations
ggcacaagtttgttgagatagctagaagcaataagatgaaaatgaaagtgcttgttttgtttgttgctacagttttggtagcatatgaatgccatggctcagactaccagaagttccctctccaaatgaaaactgggtttggtgggcaatacagcaatgaggtggcatgtgccagttggaggcttggcgtggaagcaaacaacgtagtcaagtggcaaactgttcctgcagcttgcggagagtacatagctgactacgttctaggagaccaatatagatcagattccacaacagttaaccaacaagcttatttctatgctaaatcnctcaaactcaccaacaaagatgtctttgtcttggacgttgactacactactctctc

SEQ ID NO: 235509 - DNA, 396 bp, Glycine max
atcaggcgtcgatagaggggggacactaaacaagttaaaagaagagcatcactgaactaacaaagcaaccctatgtcgaatgtggtttgtgtcaccggagccagcggcgccatcggatcatgggtggtcctactcctcctccagcgtggttacaccgtccatgccaccgtccaagatatcaaggatgaaaatgagacgaaacatttggaggaaatggaaggagcaaagagtcatctccatttttttgaaatggatcttcttgacatcgactccattgccgctgccataaagggttgttccggcgtaatccaccttgcatgtcctaacatcattggtcaagtcgaagatcccgagaaacagatattggaaccggcgataaaaggaacggttaatgtg

SEQ ID NO: 235510 - DNA, 382 bp, Glycine max
gaactcgttctagtgtgtgattgtttgttgttgtaactcgttcttcttcttttgttgttctgtgtttgtgtttgttttttctctcacctgaaaatgtcttgctgcggtggtaactgtggttgcggaagctcctgcaagtgcggcaacggctgcggaggctgcaagatgtacccagacttgagctacactgagtcaaccaccaccgagaccttggtcatgggagtggcacctgttaaggctcaatttgagggtgctgaaatgggtgtgcccgctgagaacgatggctgcaaatgtggaccaaactgctcctgcaacccctgcacttgcaagtgaggtgttgggagagcaagcttcaagcagagatagcccttaattaggaata

SEQ ID NO: 235511 - DNA, 341 bp, Glycine max
agaagacgacagaaggggacgattactaccaagtgaaaaagcaattaactaagcatatatagcgtgtaagacagtgagaaaaaaagtgttgtgtagagagaaatggctaggtggtgcatcttggtggttcttgcccttgtcgtggttgcaagtgccagaaacatgcccaatgacgcagggttggaggaccagaagaacttcctcgggtatgggttctctggagttggcaacaatgggcttccctttggaggagtgggttctgggtttgatggtaatatgggtgggccttctgggctcggtggatttggaggattcggtgggcctaacgggctcggaggtct

SEQ ID NO: 235512 - DNA, 315 bp, Glycine max
gagcgaaacagagagtgatttcagtgagtgatcggtgttcacttgatctcatcataatcgtcagcgtcaattgaagaagatgccgatcagaaacatcgccgtcggaaggcctgaagaggcgactcaccccgacacgttgaaggcggctttggctgagttcatctcaaccttcatcttcgtgttcgccggctcaggctccggcatcgcctacaacaagctcaccgacaacggcgctgccacccctgccggcctcatctccgcctccatcgcccatgcattcgccctcttcgtcgccgtctccgtcggcgccaacat

SEQ ID NO: 235513 - DNA, 309 bp, Glycine max
gacaagtgagtttgctgatcgagataactagaaacagtgtgatgaaaatgaaggtccttgttttcttcgttgctacaattttggtagcatggcaatgccatgcgtacgatatgttccctctccgaatgaacactggctatggtgcccgtactccggaggtgaaatgcgcaagttggaggcttgctgtggaagcacacaacatctttggctttgagaccattcctgaagagtgcgttgaagcaacaaaggaatacatccatggcgaacaatatagatcagactccaaaacagttaaccaacaagcttact

SEQ ID NO: 235514 - DNA, 326 bp, Glycine max
ggcacaagtgagtttgttgatcgagataactagaaacagtgtgatgaaaatgaacgtccttggtgtcttcgtctgctacaagtttggtaacatggcaatgccaagcctacgatatgttccctctccgaatgaacactggctatggtgcccgtactccggatgtgaaatgcgcaacttggacgcttgctgtagaagcacacaacatctttggctttgagaccattcctgaagagtgcgttgaggcaacatcggcatacatccatggcgaacaatatacatcagactccaaaacagttaaccaacaagcttacttttatgccagagac

SEQ ID NO: 235515 - DNA, 346 bp, Glycine max
ggcacaagtgagtttgttgattgagataactagaaacagtgtgatgaagatgaaggtccttgttttcttcgttgctacaattttggtagcatggcaatgccatgcgtacgatatgttccctctccgaatgaacactggctatggtgcccgtactccggaggtgaaatgcgcaagttggaggcttgctgtggaagcacacaacatctttggctttgagaccattcctgaagagtgcgttgaagcaacaaaggaatacatccatggcgaacaatatagatcagactccaaaacagttaaccaacaagcttacttttatgccagagacctcgaagtccatcccaaggac

SEQ ID NO: 235516 - DNA, 382 bp, Glycine max
  unsure (1)..(382): unsure at all n locations
ggcacaagtgagtttgttgatcgagataactagaaacagtgtgatgaaaatgaaggtccttgttttcttcgttgctacaattttggtagcatggcaatgccatgcgtacgatatgttccctctccgaatgaacactggctatggtgcccgtactccggaggtgaaatgcgcaagttggaggcttgctgtggaagcacacaacatctttggctttgagaccattcctgaagagtgcgttgaatcagcataggaatacatccatggcgaacantatagatcggactccataacagttaaccaacaagcttacttttatgccagagacctcgaagtccatcccaaggacacatttgtgttcagtatagatggcaccgtactctct

SEQ ID NO: 235517 - DNA, 394 bp, Glycine max
ggcacaagtgagtttgttgatcgagataactacaaacagtgtgatgaaaatgaaggtccttgttttcttcgttgctacaattttggtagcatggcaatgccatgcgtacgatatgttccctctccgaatgaacactggctatggtgcccgtactccggaggtgaaatgcgcaagttggaggcttgctgtggaagcacacaacatctttggctttgagaccattcctgaagagtgcgttgaatcaacaaaggaatacatccatggcgaacactatagatcagactccaaaacagttaaccaacaagcttacttttatgccagagacctcgaagtccatcccaaggacacatttgtgttcagtatagatggcaccgtactctctaatattccatac

SEQ ID NO: 235518 - DNA, 362 bp, Glycine max
  unsure (1)..(362): unsure at all n locations
gaattgaaaaaccaattaactaagcatatataccgtgtaaaacattgagaaaaaaagtgttgtgtanaaagaaatggctaggtggtgcatcttggtggttcttgcccttgtcgtggttgcaagtgccagaaacatgcccaatgacgcaagtttggaggaccagaagaacttcctcgggtatgggttctctggagttggcaacaatgggcttccctttggaggagtgggttctgggtttgatggtaatatgggtgggccttctgggctcggtggatttggaggattcggtgggcctagcgggctcggaggtcttggtaacngtgaagggcccaaccttcctctcccttgagagttgagaacac

SEQ ID NO: 235519 - DNA, 389 bp, Glycine max
ggcacaagtttgttgagatagctagaagcaataagatgaaaatgaaagtgcttgttttgtttgttgctacagttttggtagcatatgaatgccatggctcagactaccagaagttccctctccaaatgaaaactgggtttggtgggcaatacagcaatgaagtggcatgtgccaattggaggcttggccttgaagcaaacaacgtattcaagtggcaaactgttcctgcaacttgccgagagtacatagctgactacgttctatgagaccaatatagatcaaattccaaaacagttaaccaacaagcttatttctatgctaaatccctcacactcaccaacaaagatgtctttgtcttggacgttgacgacactactctctctaatctc

SEQ ID NO: 235520 - DNA, 382 bp, Glycine max
  unsure (1)..(382): unsure at all n locations
gaccacattccaaaacacaaacacatacattgtagtatcacttttgtctcggaatttgttcttttgagttatggcaagcttaaaggttgcatgtgtggttttgatgtgcatggctgtgatgagtgcaccaatgatggtgcaagccgtgtcatgcaatgatgtttctgtgaacctagcaccgtgcctatcttacctgatgcagggtggagatgttccagaatcgtgctgtagcggattgaggaagattctgggttctgccagcaccacctttgacaaacaaaccgtgtgcaaatgtcttcagcaagctgctaataactatggcatcaacgacgaatacgctcaggcactncccgcccgctgcaatgtcagggtcgcttacaag

SEQ ID NO: 235521 - DNA, 354 bp, Glycine max
ggtgcctggccatccggtttcccagatctgctccttcctcaccccacagaagtcagttgaagagcatgggtcgtggagttagcagtggtggtggtcaaagttccttgggttatctttttggcagtggagaggcccctgccgcaaaaccggcaacaaacaatgccccagcccaacctgaagtgcaggctgtaaataatgcgcctccttcaaaagcatctcctcctactaaaacaatagaccctaacaaggctgctggtataaacagtcattctactggtggccagaacaccggcaacttcatcacggaccgaccctcaaccaaggtccatgctgcccctggtggtggttcttctc

SEQ ID NO: 235522 - DNA, 321 bp, Glycine max
ggcacaagtgagtttgttgatcgagattgctagatgcaatgtgatgaaaatgaatgtccttgttttctgcgttgctacacttttggtagcatggtaatgccatgcgtacgagatgtgccctctccgaatgaacactggctatggtgaccgtacaccggacgtgtaatgcgcaagttagatgcttgctgtggaagcatacagtatctttggctttgagaccagtcctgaagagtacgttgaagcagtacatgaatacatccatggcgaacaatatagatcagactcaaagatagttcaccaacaagcttacttttatgccat

SEQ ID NO: 235523 - DNA, 361 bp, Glycine max
gatatttgagttcaaacagatcaaagccatggccacctccaacttctctattgttctctccgtctccctagccttctttttggtgctacttaccaaggcacactcgatcgataccgtttctttcaccttcaacaagttcaacccagtccaaccaatcattatgctccaaaaatatgctagtatttcatcctctggggtgttacaactcaccaaagttggcagcaacggcgtgcccaactcgggatctctcggtcgtgccctttacgctgccccaatccagatttgggacagcgaaaccggcaaggtagccatctgggctacatcctttaaattcaacattttcgcacccaacagatcatac

SEQ ID NO: 235524 - DNA, 387 bp, Glycine max
cggaaattccttcagtccttggagcttttcgaggaaaatgagaggaaaaagttggcaatcttcacagcacttgctttttcccagaagctgtctggtctcccaccagaaactgtgttccaaccacttcttaaagataaccttgtggccaaagggctagttctgtcatttatgactgacttctttaaggagtatctgattgacaacagtcttgatgatcttatttcaattctaaaacggggtaaagtagaggagaatcctttggacattttcccccctacaaaaagatctaatgaagccttctctgagcatttcaccaaggaaggactggtggccttggtggagtataatgaaaagaaaaattttgaggtgaaacttaaggaaatgaag

SEQ ID NO: 235525 - DNA, 392 bp, Glycine max
ggcgtacacagcctcaacaaccctaacgcgtgcagagcagagagagacgcagccatggggcgaagacccgcgaggtgttataggcaaattaagaacaaaccataccccaagtcacggttttgccgtggtgttcctgatcccaagatcaggatttacgatgttggtatgaagaagaagggtgttgatgagtttcctttctgtgtccatctggttagttgggagaaggagaacgtttctagtgaggccctggaagctgctcgtattgcttgcaacaagtacatggccaaatttgctggaaaggatgctttccacttgagagtcagggtgcacccattccatgttcttaggatcaacaagatgctttcgtgtgctggagctgataggctccaaac

SEQ ID NO: 235526 - DNA, 390 bp, Glycine max
gaccacattccaaaacacaaacacatacattgtagtatcacttttgtctcggaatttgttcttttgagttatggcaagcttaaaggttgcatgtgtggttttgatgtgcatggctgtgatgagtgcaccaatgatggtgcaagccgtgtcatgcaatgatgtttctgtgaacctagcaccgtgcctatcttacctgatgcagggtggagatgttccagaatcgtgctgtagcggagtgaggaacattctgggttctgccagcaccacctttgacaaacaaaccgtgtgcaaatgtcttcagcaagctgctaataactatggcatcaacgacgaatacgctcagacactccccgcccgctgcaatgtcagcgtcgcttacaagatcagccg

SEQ ID NO: 235527 - DNA, 366 bp, Glycine max
tgatgcaaaggctgcaaaaaagggtggagagagacaattcaatggtctcgttgatgtctacaggaagacattggcatctgatggtgttgccgggctctaccgtggtttcaacatctcatgtgttggaatcatcgtgtatcgtggtctgtactttggattgtatgattctgttaaaccagttgtcctcacagggtcattgcaggatagcttttttgccagctttgcccttggatggctcattaccaatggtgcaggtcttgcatcatacccaatagacactgttagaagaagaatgatgatgacctctggtgaagctgtcaagtacaagagctccttggatgcattcacacagatcctcaagagtga

SEQ ID NO: 235528 - DNA, 353 bp, Glycine max
gaagcaaagccctaatccctctttcttcctcttcctcagtagggcgattttcgattcacttctctgcaactaggcctaaccctaaggtcttcttcgacatgaccatcggcggtcaacctgccggccgcatcgtgatggagctctacgccgacgtgactccgagcaccgccgagaacttccgcgcgctctgcatcggtgagaagggcgccgggtcggacggtaagcccctccactacaaatgctcgtccttccagcgcgtgatcccgaacttcatgtgccagtgcggcgacttcaccgccggaaacggcaccagacgcgagtcgatctacggcgccaagttcgccgacgagaac

SEQ ID NO: 235529 - DNA, 386 bp, Glycine max
gacaggtgcaagttgagattttgattgttgttgggctcccaaattcccaaaacagtgatgatcttaagtaaaagaaatgtttttggcaccaagggaaaaatgggtatagatttcatgattttggtgttaacattgtcatggttttgtctgactactatatgcgtctcagctacaaaacaagcatacccaccaacaccacaaccgaaccagaacctaaggtttgaccaagatggagaattcgagatattgcaggtggcagatatgcactatgcaaatggcaagaccacgcattgcttgaatgtgctcccttcccagaatttttcttgctctgacctcaacaccactatctttcttaacagaatgatcaaagcgggagaaacccaatc

SEQ ID NO: 235530 - DNA, 363 bp, Glycine max
gatagcgaaacagagagtggtttcagtgagtgatcggtgttcacttgatccttcataagtcgtcatcatcagcatcatcatcaccgttgattgaagaagatgccgatcagaaacatcgccatcggaaggcctgaagaggctactcaccccgacacgttgaaggcggggttggctgagttcatctccaccttgatcttcgtgttcgccggttcaggttccggcatcgcctacaacaagctcaccgagaacggcgccgccactcccgccggcctcatctccgcttccatcgcccatgctttcgccctcttcgtcgccgtctccgtcggcgccaacatctccggcggccacgtcaaccccgccgtc

SEQ ID NO: 235531 - DNA, 306 bp, Glycine max
  unsure (1)..(306): unsure at all n locations
ggcacaagtttgttgagatagctagaagcaataagatgaaaatgaaagtgcttgttttgtttgttgctacagttttggtagcatatgaatgccatggctcagactaccagaagttccctctccaaatgaaaactgggtttggtgggcaatacagcaatgaggtggcatgtgccagttggaggcttggcgtggaagcaaacaacgtagtcaagtggcaaactgttcctgcagcttgcggagagtacatagctgactacgttctangagaccaatatagatcagattccaaaacagttaaccaacaag

SEQ ID NO: 235532 - DNA, 286 bp, Glycine max
ggcacaagtgagtttgttgatcgagataactagagacagtgtgatgaaaatgaaggtccttgttttcttcgttgctacaattttggtagcatggcaatgccatgcgtacgatatgttccctctccgaatgaacactggctatggtgcccgtactccggaggtgaaatgcgcaagttggaggcttgctgtggaagcacacaacatctttggctttgagaccattcctgaagagtgcgttgaagcaagaaaggaatacatccatggcgaacaatatagatcagactcc

SEQ ID NO: 235533 - DNA, 358 bp, Glycine max; identical to SEQ ID NO: 234733

SEQ ID NO: 235534 - DNA, 209 bp, Glycine max
gattcccaacgaaccaacacagcctcacaagtaacaaacttataacacacactctctctctctctctctgcaatggctggaatggttcacctttgcattgcatcattggtcactctttttgttgcaacaagtgctagaattcctggggttttcaatggtggtgcatggcagggtgcccactgcactttctacggtggaaatgatgcctc

SEQ ID NO: 235535 - DNA, 382 bp, Glycine max
gaaggtgcaagagtttgttgtgagctataagctagtttatcgtgaggagaatatgaagttgtttgttttctttgttgctgcagtagttttggtagcatggccatgccatggcgcaggctaccaaaggttccctctccgaatgaaaactggctatggtgagcgttcttcggaggtaaaatgcgcaagttttaggcttgctgtggaagcacacaacatccgagcctttaaaaccattcctgaagagtgcgttgaaccaacaaaggactacattaatggcgaacaatttagatcagactctaaaacagttaaccaacaagctttcttttatgctagtgaacgcgaagtccatcacaacgacatatttatagtcggcagagataca

SEQ ID NO: 235536 - DNA, 285 bp, Glycine max
  unsure (1)..(285): unsure at all n locations
ggtacacctgaatttgtttattgacaatactagaatcaatgttgagaaaaataagggcctttgtttcctccttgtggtacaattttggtaccagtgcaatgccatgcgtacgatatatgccctctccgaatgaacactggctatggtgcccgtactccggaggtgaaatgcgcaagttggangcttgctgtgaaagcacacaacatctttggctttgagaccattcctgaaaagtgcgttgaggcaggaatggaatacatccatggcgaacaatatagataagac

SEQ ID NO: 235537 - DNA, 389 bp, Glycine max
gatccacagatttcgcgaaaaataaaaaaatatcacgcgctggtaccacctttccccaaaccatcaattcgaatcctcccagtttccacaatcttcaaccttcaaattctgcgtcacctttcttcatttcacttcagagagagagaacaaaacagaatgggcgtcgtggtgatcgacggcagcaccgtgcgcgacttcgtgaacgacgaaaccgccttcaccaagagcgtggacgagcagttctcggcgctggacctcaacaacgacggcgtcctctcgcgctcggagctccgcacggccttcgagtccatgcgcctcatcgagacgcacttcggcatcgacgtttccacgccgctggagcacgtcgggaggcgctacgactccatctt

SEQ ID NO: 235538 - DNA, 311 bp, Glycine max
  unsure (1)..(311): unsure at all n locations
ggtgggcgaggtagccagagagtgatacaatacagagtgcgttgttgctccttcgccacaactccctgcgaacatgggtagtctccagagattctatgcacaanaggcgtgccactggtggcaagaagaaggcatggaggaagaagagaaagtatgagcttggtcgccagcctgctaacactaagctgtcaagcaacaagacagtcaggaggatccgggttagaggtggaaatgtgaagtggagggcactgagattggatactggaaattactcctgnggaagtgaagctgtaactcgcaggactcgtata

SEQ ID NO: 235539 - DNA, 320 bp, Glycine max
cagtgtacattaccgaaaatggcgttgcggaatcaaagaatgactcacttgcaatcaatggaagcccgaaaggatggtattcgaattagataccatgatggccatctcaaatccctgcttcatgcgatcaaagatagagttaatgtgaagggctactatatatggtcattttcagatagctttgaatgggatgctggttacacagctcgatttggcatcatatatgtggattacaagaacaatttgagtagataccctaagtcctctgcgttttggctgaaaacaatgctgttactgcgtttgcgaatcaacatgatctc

SEQ ID NO: 235540 - DNA, 384 bp, Glycine max
gcttgtttgcgagatagaagcgtaagcagcggctaccctaacctcgtcttcctctctactaatttcagctatggccgacgaagctgtggttgttccagatcccacccagatcgatgtcaagctctttaaccgctggagcttcgaggatattgaggttactgacatttcactggctgattacattggagttgcggcatccaagcacgccacatatgttcctcacaccgccggaaggtactccgtgaagcggttcaggaaggcgcagtgccccattgttgagaggctcaccaactctctcatgatgcatggtagaaacaatggcatgaaactcttggctgttaggatcatcaagcatgctatggagattattcatttgttgactga

SEQ ID NO: 235541 - DNA, 388 bp, Glycine max
ggcacaagtgagtttgttgatcgagataactagaaacagtgtgatgaaaatgaaggtccttgttttcttcgttgctacaattttggtagcatggcaatgccatgcgtacgatatgttccctctccgaatgaacactggctatggtgcccgtactccggaggtgaaatgcgcaagttggaggcttgctgtggaagcacacaacatctttggctttgagaccattcctgaagagtgcgttgaagcaacagatgaatacatccatggcgaacaatatagattagactccaaaacagttaaccaacaagcttacttttatgccagagacctcgaagtccatcccaaggacacatttgtgttcagtatagaaggcaccgtactctccaatatt

SEQ ID NO: 235542 - DNA, 380 bp, Glycine max
ggtgcacaagtgagtttgttgatcgagataactagaaacagtgtgatgaaaatgaaggtccttgttttcttcgttgctacaattttggtagcatggcaatgccatgcgtacgatatgttccctctccgaatgaacactggctatggtgcccgtactccgggggtgaaatgcgcaagttggaggcttgctgtggaagcacacaacatctttggctttgagaccattcctgaagagtgcgttgaagcaacaaaggaatacatccatggcgaacaatatagatcagactccaaaacagttaaccaacaagcttacttttatgccagagacctcgaagtccatcccaaggacacatttgtgttcagtatagatggcaccgtact

SEQ ID NO: 235543 - DNA, 391 bp, Glycine max
ggcacaagtgagtttgttgatcgagataactagaaacagtgtgatgaaaatgaaggtccttgttttcttcgttgctacaattttggtagcatggcaatgccatgcgtacgatatgttccctctccgaatgaacactggctatggtgcccgtactccggaggtgaaatgcgcaagttggaggcttgctgtggaagcacacaacatctttggctttgagaccattcctgaagagtgcgttgaagcaacaaaggaatacatccatggcgaacaatatagatcagactccaaaacagttaaccaacaagcttacttttatgccagagacctcgaagtccatcccaaggacacatttgtgttcagtatacatggcaccgtactctctaatattccg

SEQ ID NO: 235544 - DNA, 393 bp, Glycine max
gacaccgagtcgcagaaaaagaaaaaagcgatcatagtttcacttcggccttatcctgtttagggtttcggttctcgaccctatctttcacgtatcgaaaccttaaatttacgatcaggtctgagcaatctggttggtagaacctttggtcttagtgagtcaagttttatgtctgaattggacgatcaaattcctactgccttcgatccttttgctgatgcaaatgctgatgactcgggtgctgggtcaaaggagtatgtgcatattcgtgtacagcagcgaaatggtaggaaaagcctgacaaccgttcagggattgaaaaaggaattcagctataacaggatacttaaagacgtcaagaaagagttctgttgcaatggaacagttgttcag

SEQ ID NO: 235545 - DNA, 369 bp, Glycine max
ggaagaacaagtcttgcattgggtggagcatacttagaaacagcaactatgtctctcatgcagcttactagctcccctgttggctcactggtccgtttcattgtaatatttgctttatggtacagaaccatggctttggccaagttgccaccaaacgcttcatcagttccagcagttttagcgtttggagattccatcgtggacccaggcaacaacaacagcataataacattgatcaagtgcaacttcgcaccttatggaatggattttcagggaggaaacccaacgggtcgattttgcaatggagaaattccttctgacttaatagttgaacaattgggtattaaggagtacttgcctgcatatttg

SEQ ID NO: 235546 - DNA, 400 bp, Glycine max
cgacagaaggggaacaaacacttattatatattcatctttctcttttttagcttttcttttcctctaaaagtgagtccttccttcttcgatcacttgttaaagtcacatatcatagcaatggcagcacgtgcctacagccccatcatggttgccctctctttgcgtcttttggtcacattctctaatgtagctgaggcttatacacgcagtggaacacttcgtccttcagattgtaaaccaaagtgtacttaccgttgctctgcaacttcacacaagaagccatgcatgtttttctgccagaagtgttgtgctaaatgcctatgcgttcctcctggtacatatggcaacaagcaaatttgcccttgctacaacagctggaagacgaaggaaggaggaccc

SEQ ID NO: 235547 - DNA, 386 bp, Glycine max
ggcacaagtgagtttgttgatcgagataactagaaacagtgtgatgaaaatgaaggtccttgttttcttcgttgctacaattttggtagcatggcaatgccatgcgtacgatatgttccctctccgaatgaacactggctatggtgcccgtactccggaggtgaaatgcgcaagttcgaggcttgctgtggaagcacacaacatctttggctttgagaccattcctgaagagtgcgttgaagcaacagaggaatacatccatggcgaacaatatagatcagactccaaaacagttaaccaacaagcttacttttatgccagagacctcgaagtccatcccaaggacacatttgtgttcagtagagatggcaccgtactctctaata

SEQ ID NO: 235548 - DNA, 366 bp, Glycine max
gatgccacaatggttgtccctcttaggcactttcttgttttctctctcaccctcatatccatcatcttccaaacccatggagcgttctctgagcaatcaataatcaagttacccacagaccaaccaagggtagagaaactgacccacttgcattttttctaccacgacatcttatagggcaagaacatcacggtggtgaaaatcatcgagccatcagcgagcgaggttcgtgaagcaactgggtttggaaccactttcaggattgacaatgttttgaccgagggtccagagctgagctcgaagcacgttgggagggctcaggggctgtttggcttggcctctttggaggaccgtggaatggtgatg

SEQ ID NO: 235549 - DNA, 387 bp, Glycine max
ggttctagtgtgtgattgtttgttgttgtaactcgttcttcttcttttgttgttctgtgtttgtgtttgttttttctctcacctgaaaatgtcttgctgcggtggtaactgtggttgcggaagctcctgcaagtgcggcaacggctgcggaggctgcaagatgtacccagacttgagctacactgagtcaaccaccaccgagaccttggtcatgggagtggcacctgttaaggctcaatttgagggtgctgaaatgggtgtgcccgctgagaacgatggctgcaaatgtggaccaaactgctcctgcaacccctgcacttgcaagtgaggtgttgggagagcaagcttcaagcagagatagcccttaattaggaataatgataaact

SEQ ID NO: 235550 - DNA, 390 bp, Glycine max
ggccgtttattcatggaccagaagaatacatcatagcttctttctcatttcacacacacaagaaccttgagacatcatgaagatttcaagttccaagcaattggctgtgggatttgcacttggaaatgaaggataggcaacgttggagagctgaagaggatgctttacttcgtgcatatgtcaaacagtatggtcctagggaatggaatctcgtgtctcagcgcatgaacacacctcttaacagggatgccaagtcatgcttataaaggtggaagaactacctcaaacccggcattaaaaaaggatctcttactgaggaagagcagcgtctagtcatcaatcttcaagcaacgcacgggaacaagtgggagaaaattgcagcacaagtcc

SEQ ID NO: 235551 - DNA, 385 bp, Glycine max; identical to SEQ ID NO: 235101

SEQ ID NO: 235552 - DNA, 389 bp, Glycine max
gaattattatttttttcatcgcattcaacctttctcttcctcctcactcaaacttcccctctctacgccgttcctcccaaatggatgcaccaatggagttttggggtgttgaggttaaggttggtcagaccgtgacagttgacccaatggatcctgtggattcatacatacacatatctcaggttgcgctcggagaggcgaaaaaggagaaacctaatgagtctgtggttttgtatttggaagttggtgaacagaagattgtcttgggaaccctttctagggatggcattcctcatctatcgttggatttggttctggactccgattccgagctttcccacacttcagaaagtgcaagtgtctttttcggtgggtacagagtactaact

SEQ ID NO: 235553 - DNA, 395 bp, Glycine max
  unsure (1)..(395): unsure at all n locations
gacaagtgagtttgttgatcgagataactagaaacagtgtgatgaaaatgaaggtccttgttttcttcgttgctacaattttggtagcatggcaatgccatgcgtacgatatgttccctctccgaatgaacactggctatggtgcccgtactccggaggtgaaatgcgcaagttggaggcttgctgtggaagcacacaacatctttggctttgagaccattcctgaagagtgcgttgaancaacaaaggaatacatccatggcgaacaatatagatcagactccaaaacagttaaccaacaagcttacttttatgccagagacctcgaagtccatcncaaggacacatttgtgttcagtatagatggcaccgtactctcgaatattcaatactac

SEQ ID NO: 235554 - DNA, 388 bp, Glycine max
ggcacaagtgagtttgttgatcgagataactagaaacagtgtgatgaaaatgaaggtccttgttttcttcgttgctacaattttggtagcatggcaatgccatgcgtacgatatgttccctctccgaatgaacactggctatggtgcccgtactccggaggtgaaatgcgcaagttggaggcttgctgtggaagcacacaacatctttggctttgagaccattcctgaagagtgcgttgaagcaacagaggaatacatccatggcgaacaatatagatcagactccaaaacagttaaccaacaagcttacttttatgccagagacctcgaagtccatcccgaagacacatttgtgttcagtatagatggcaacgtacgctctaatatt

SEQ ID NO: 235555 - DNA, 374 bp, Glycine max
gagcgaaacagagagtgatttcagtgagtgatcggtgttcacttgatctcatcataatcgtcagcgtcaattgaagaagatgccgatcagaagcatcgccgtcggaaggcctgaagaggcgactcaccccgacacgttgaaggcggctttggctgagttcatctcaaccttcatcttcgtgttcgccggctcaggctccggcatcgcctacaacaagctcaccgacaacggcgctgccacccctgccggcctcatctccgcctccatcgcccatgcattcgccctcttcgtcgccgtctccgtcggcgccaacatctccggcggccacgtcaaccccgccgtcaccttcggcgccttcgtcggcggcaacatca

SEQ ID NO: 235556 - DNA, 363 bp, Glycine max
gctcacgatctgaggaagacaccaatcttctctccacgcccttcttgggtaaccgtctgaagtgcagcaatggcagatggattgcattcgcagcatccatcggtagttcagaagttatctggacagtcttatcttgtgtccaggcttgctcctaatcactccagaaactgttctaccactggtagttacttcaatggaggtttgcagtcttcaggtttggttccagtcacggcacacgcgccggctgagaaaggggtgtctggatttttgttggatttcctgatgggcggagtgtcggcggctgtgtccaagacagctgcggctccaatcgaacgagttaagttgctcatccaaaaccaggat

SEQ ID NO: 235557 - DNA, 370 bp, Glycine max
ggcacaagtgagtttgttgatcgagataactagaaacagtgtgatgaaaatgaaggtccttgttttcttcgttgctacaattttggtagcatggcaatgccatgcgtacgatatgttccctctccgaatgaacactggctatggtgcccgtactccggaggtgaaatgcgcaagttggatgcttgctgtggaagcacacagcatctttggctttgagaccattcctgaagagtgcgttgaagcaacagaggaatacatccatggcgaacaatatagatcagactccaaaacagttaaccaacaagcttacttttatgccagagacctcgaagtccatcccaaggacacatttgtgttcagtatagagggc

SEQ ID NO: 235558 - DNA, 385 bp, Glycine max
ggcagcgcttgagaccaagccccactcaaccaccacaccactctctctgctcttcgtctacctttcaagtttttaaagtagtaagatggcagagacattcctagttacctcagagtcagtgaacgagggacaccctgacaagctctgcgaccaaatctccgatgctgtcctcgacgcttgccttgaacaggacccagacagcaaggttgcctgcgaaacatgcaccaagaccaacttggtcatggtcttcggagagatcaccaccaaggccaacgttgactacgagaagatcgtgcgtgacacctgcaggaacatcggcttcgtctcaaacgatgtgggacttgatgctgacaactgcaaggtccttgtaaacattgagcagcag

SEQ ID NO: 235559 - DNA, 393 bp, Glycine max
acacaaaatataagaatggcgtttacgctttatggtctaccaatgtcgacaaacactacccgtgccatgatctgtctccatgagaaagaggtggattttgaacttgttccagtcagtgtgttcgctgcagagcataagcagcctccttttctctccaagaatccctttggtttgattccagtactggaagatggtgatctcactctttttgagtccagagccattaccgcagatgtggctgaggaattcaaggaaacaggagccgatctgataaggcataaggacgcgaaagaagcagcactggtaaaggtgtggacagaggtacagtctcattactacgagccagcagtgtcacccattatctacgagtgcttcgggggcccctttccaagg

SEQ ID NO: 235560 - DNA, 393 bp, Glycine max
gggactcgaagtgtaagcactaagtggttgaggaaatgggaacccttgggagagcgatctacagcgttggtaactggattcgagggactggacaggccattgatcgtctcggttccctcctccagggcggttactacgtccaagagcagctgtctaggcatcgaactctgatggacatatttgataaggctcctgttgttgatgaggatgtatttgttgcgcctagtgcctccgtcattggagacgttcaacttggaagaggatcatccatttggtatggagttgtcttgaggggtgatgttaacagcatcagagttggaactggaactaacatacaggacaactctctggtgcatgttgcaaagtcaaatttaagtgggaaggtgttgccta

SEQ ID NO: 235561 - DNA, 371 bp, Glycine max
ggctgcagcttgtcatcaccatcgcgcccaagagagagagagagagagaggcgcgaaaatgagcggagcgaaggggaagaagaagggagcgagctttgtgatcgattgcgcgaagccggtggaggataaaattatggacattgcttctctggagaagttccttcaggagaggattaaggttggcggcaaggccggtgcactcggcgattccattactgtcactagggacaagagcaagatcaccgtcacctccgacagcaacttctctaaacggtatctgaaatatttgaccaagaagtacttgaaaaagcacaatgtgagggattggcttcgcgtgattgcatccaacaaggagcggagtgtctatgaat

SEQ ID NO: 235562 - DNA, 378 bp, Glycine max
  unsure (1)..(378): unsure at all n locations
gagggtagatcaggcaggcttcagttcagccatgagaactcatactcacacttacacttatactattttctctctaattcttctctccttatttcttcgaacccattccgaggttataacgttaacctctgatacatttaatgataagatcaaggagaaagacactgcatggtttgtgaaattctgcgttccctggtgcaagcattgtaagaatcttggttcattgtgggatgatttggggaaagcaatggaaggagaagatgaaatanaggttggagaagtcgattgcggcatggacaaagcagtatgttccaaagttgatattcactcctatcctacctttaaggttttctatgatggtgaagaagtaccagatac

SEQ ID NO: 235563 - DNA, 391 bp, Glycine max
gaaggtgcaagagtttgttgtgagctataagctagtttatcgtgaggagaatatgaagttgtttgttttctttggtgctgcagtagttttggtagcatggccatgccatggcgcaggctaccaaaggttccctctccgaatgaaaactggctatggtgagcgttcttcggaggtaaaatgcgcaagttttaggcttgctgtggaagcacacaacatccgagcctttaaaaccattcctgaagagtgcgttgaaccaacaaaggactacattaatggcgaacaatttagatcagactctaaacagttaaccaacaagctttcttttatgctagtgaacgcgaagtccatcacaacgacatatttatattcggcataggtaacaccgtactct

SEQ ID NO: 235564 - DNA, 394 bp, Glycine max
gttccccattcccaaatttctcattctcccatttcctctcagaaccctcgatcactcccacgcgctcctatatcctcgccttcaccgtcgctctctccaacgatcacaacaacatcgtcatcccatggcaaacgccgcatctggtatggcagtccatgatgactgcaagttaaggtttttggagctgaagacaaagaggacacaccgtttcatagtttttaagattgaggagcagcagaagcaggtcattgtggagaagcttggtgagccagcccaaggctatgaagatttcactgccagccttcctgctgatgagtgccgttatgctgtttatgattttgagtatctgactgaagggaatgtccctaaaagcagagattggtttcattgcatg

SEQ ID NO: 235565 - DNA, 350 bp, Glycine max
gcacaagtgagtttgttgatcgagataactagaaacagtgtgatgaaaatgaaggtccttgttttcttcgttgctacaattttggtagcatggcaatgccatgcgtacgatatgttccctctccgaatgaacactggctatggtgcccgtactccggaggtgaaatgcgcaagttggaggcttgctgtggaagcacacaacatctttggctttgagaccattcctgaagagtgcgttgaagcaacagaggaatacatccatggcgaacaatatagatcagactccaaaacagttaaccaacaagcttacttttatgccagagacctcgaagtccatcccaaagacacatt

SEQ ID NO: 235566 - DNA, 389 bp, Glycine max
gaactcctcaaactgaaaagtgaacagagaaagaaatggagaatgcggaggagcagcagcagcaaaacgaggaggttttgtcggttgaacttccggctccttccggttggaataaactgttcttccctaagaaagtgggaacaccaagaaaaagtgagattgtattcattgctccaactggggaggagatcaataccaaaaaacaattggagcagtacctaaaggcacatcctggcaatcctgtcatttcagagtttgactggggaactggtgagacccccaggcgatcagcaaggatcagtgagaaggtcaagtcaactccaccagcagatagtgatactccaaagaaacgtgctcggaaatcatcaggatcaaagaaggataacaaa

SEQ ID NO: 235567 - DNA, 389 bp, Glycine max
  unsure (1)..(389): unsure at all n locations
ggcacaagtgagtttgttgatcgagataactagaaacagtgtgatgaaaatgaaggtccttgttttcttcgttgctacaattttggtagcatggcaatgccatgcgtacgatatgttccctctccgaatgaacactggctatggtgcccgtactccggaggtgaaatgcgcaagttggaggcttgctgtggaagcacacaacatctttggctttgagaccattcctgaagagtgcgttgaagcaacaaaggaatacatccatggcgaacaatatagatcagactccanaacagttaaccaacaagcttacttttatgccagagaactcgaagtccatcccaaggacacatttgtgttcagtatagatgggcacgtactctctaatattc

SEQ ID NO: 235568 - DNA, 375 bp, Glycine max
gatcgatttgattgtttctgagtaatggcttcgtcgcgagtagatctggatgggaaccccataaagcccatcaccatttgcatgattggcgccggtggcttcattgggtcccacctctgcgagaagctcatgtcggagacccctcacagtgtcctcgccttggatgtctacaatgacaagatcaaacacctcttggaaccccacacgctcccttgggcctctcgcatccagttccatcgcctcaacatcaagcacgattcccgtctcgaaggcctcatcaaaatgtcagatctgactattaatctggctgccatttgcactcccgcggattacaacacgcgccctcttgacacaatttacagcaacttcatcgac

SEQ ID NO: 235569 - DNA, 369 bp, Glycine max
  unsure (1)..(369): unsure at all n locations
ggaacgaaaattagggtttgtagtgtagcaggaagaagcagcaatggcgccgaagataacacgtaaggttagcagaaaccctgaattgataaggggaaaatgaaagtgcttgttttgtttgttgctacagttttggtagcatatgaatgccatggctcagactaccagaagttccctctcgaaatgaaaactgggtttggtgggcaatacagcaatgaggtggcatgtgccagttggaggcttggcgtggaagcaaacaacgtagtcaagtggcaaactgttcctgcagcttgcggagagtacatagctgactacgttctangagaccaatatagatcagattccaaaacagttaaccaacaagcttat

SEQ ID NO: 235570 - DNA, 384 bp, Glycine max
gaaccacaagaatgagggagatattgcacgtgcaaggtgggcaatgcgggaaccaaatcggttccaagttctgggaagtgatatgcgacgaacacggcatcgaccccaccggaaagtacaccggcgacgaggcctccgatctccaactggagaggatcaacgtctactacaatgaggcctccggcggaaggtacgttccccgggccgtcctcatggatctggagcccggcaccatggacagcatcagatccggcccatacggcaagatcttcaggcccgacaactttgtctttggccagtccggcgccggcaacaattgggccaagggccactacaccgaaggtgccgagttgatcgattccgtcctcgacgtcgttcgcaaag

SEQ ID NO: 235571 - DNA, 377 bp, Glycine max
gactctcgctcttgcaattattcctcttctcgcaatccgcactaaaattctagggttccgaaatggacgctgacggaaagatcaagaagggcgccggcggaagaaagggcggcggcccaaagaagaagccggtttcaaggtccgtcaaagccggtctccaattccccgtcggaagaattggccgttatttgaagaaaggaaggtacgctcagcgtgtcggtaccggtgctcccgtatacttggctgcagttctcgaatacctagctgccgaggtgcttgagttggctgggaatgcagcacgtgacaacaagaagaacaggattattccaagacacgtgcttttggcagtgaggaacgatgaggagttggggaaattg

SEQ ID NO: 235572 - DNA, 378 bp, Glycine max
gggtttcagtgagtgatcggtgttcacttgatccttcataagtcgtcatcatcatcatcatcatcaccgttgattgaagaagatgccgatcagaaacatcgccatcggaaggcctgaagaggctactcaccccgacacgttgaaggcggggttggctgagttcatctccaccttgatcttcgtgttcgccggttcaggttccggcatcgcctacaacaagctcaccgacaacggcgccgccactcccgccggcctcatctccgcttccatcgcccatgctttcgccctcttcgtcgccgtctccgtcggcgccaacatctccggcggccacgtcaaccccgccgtcaccttcggcgccttcgtgggcggcaacatcac

SEQ ID NO: 235573 - DNA, 388 bp, Glycine max
ggcacaagtgagtttgttgatcgagataactagaaacagtgtgatgaaaatgaaggtccttgttttcttcgttgctacaattttggtagcatggcaatgccatgcgtacgatatgttccctctccgaatgaacactggctatggtgcccgtactccggacgtgaaatgcgcaagttggaggcttgctgtggaagcacacaacatctttggctttgagaccattcctgaagagtgcgttgaagcaacaaaggaatacatccatggcgaacaatatagatcagactccaaaacagttaaccaacaagcttacttttatgccagagacctcgaagtccatcccaaggacacatttgtgttcagtatagatggcaccgtaatctctaatatt

SEQ ID NO: 235574 - DNA, 398 bp, Glycine max
gaaggtgcaagagtttgttgtgagctataagctagtttatcgtgaggagaatatgaagttgtttgttttcgttgttgctgcagtagttttggtagcatggccatgccatggcgcaggctaccaaaggttccctctccgaatgaaaactggctatggtgagcgttcttcggaggtaaaatgcgcaagttttaggcttgctgtggaagcacacaacatccgagcctttaaaaccattcctgaagagtgcgttgagccaacaaaggactacattaatggcgaacaatttagatcagactctaaaacagttaaccaacaagctttcttttatgctagtgaacgcgaagtccatcacaacgacatatttatattcggcatagataacagcgtactctctaata

SEQ ID NO: 235575 - DNA, 390 bp, Glycine max
ggcacaagtgagtttgttgatcgagataactagaaacagtgtgatgaaaatgaaggtccttgttttcttcgttgctacaattttggtagcatggcaatgccatgcgtacgatatgttccctctccgaatgaacactggctatggtgcccgtactccggaggtgaaatgcgcaagttggaggcttgctgtggaagcacacaacatctttggctttgagaccattcctgaagagtgcgttgaagcaacagaggaatacatccatggcgaacaatatagatcagactccataacagttaaccaacaagcttacttttatgccagagacctcgaagtccatcgcaaggacacatttgtgttcagtatagatggcaccgtagtctctaatattcc

SEQ ID NO: 235576 - DNA, 357 bp, Glycine max
gagcgaaacagagagtgatttcagtgagtgatcggtgttcacttgatctcatcataatcgtcagcgtcagttgaagaagatgccgatcagaaacatcgccgtcggaaggcctgaagaggcgactcaccccgacacgttgaaggcggctttggctgagttcatctcaaccttcatcttcgtgttcgccggctcaagctccggcatcgcctacaacaagctcaccgacaacggcggctgccacccctgccggcctcatctccgcctccatcgcccatgcattcgccctcttcgtcgccgtctccgtcggcgccaacatctccggcggccacgtcaaccccgccgtcaacttcggcgcct

SEQ ID NO: 235577 - DNA, 348 bp, Glycine max
ggtttgctgcgagcgaatccctctctctatctctcacacacactttctctctctctctctctcacccagatcttgtagcaatggcgagcgctcctactccacgcgaagagttcgtgtacatggcgaagctgggggaacaggccgagcgctacgaggagatggtggagttcatggataatgtctccgcctccgccgagagcgaggagctgaccgtggaggagcgtaagctcctctccgtcgcctacaagaacgtgatcggcgctcgccgcgcctcctggcgcatcatctcctcaatcgagcataatgaggagagccgcggcaacgaggaccacgtcgccgtcatccgcg

SEQ ID NO: 235578 - DNA, 392 bp, Glycine max; identical to SEQ ID NO: 235488

SEQ ID NO: 235579 - DNA, 335 bp, Glycine max
ggagtcagattcgcacgcattgcttcgcctcacaacagcagctgcagcagcaatggctcccaaacgaggtggaaaggctccggctcttgccgctaagaagaagcctgagaaggtcacgaatccgttgttcgagaagcgtccgaagcagttcggaatcggaggggcgttgcctccgaagagagacttgactaggttcgtgaagtggccaaagaatgttcaaattcagaggaagaagaggattctgaagcagaggttgaaggttcccccatctttgaaccagtttaacaaaactcttgacaaaaacctagcaacaagtctgttcaagttgcttctga

SEQ ID NO: 235580 - DNA, 387 bp, Glycine max
ggcacaagtgagtttgttgatcgagataactagaaacagtgtgatgaaaatgaaggtccttgttttcttcgttgctacaattttggtagcatggcaatgccatgcgtacgatatgttccctctccgaatgaacactggctatggtgcccgtactccggaggtgaaatgcgcaagttggaggcttgctgtggaagcacacaacatctttggctttgagaccattcctgaagagtgcgttgaagcaacaaaggaatacatccatggcgaacaatatagatcagactccaaaacagttaaccaacaagcttacttttatgccagagacctcgaagtccatcccaaggacacatttgtgttcagtatagatggcaccgtactctcgaatat

SEQ ID NO: 235581 - DNA, 386 bp, Glycine max
gagtcaaagatcgatttgatcatcaatcagtgctcctcaagcatggaagacgctgacgtcaatgatatcatcttcgctttgaataggctgtcaacgagagttccagcctcgaccatgttatgtcccacatcgaacaatccgatgagtgcacctgcgccgactattacttcgactcctactctcatttcggaattcacgaacagatgttgaaggatactgtgagatccaggacatatcataatgtcatttatcagatcaagtttttattcacgattaaagtaattctcgatgttggtgctgggactgggatattatcacgaatttgtgccaaagctcgggcaaaagacgtctatgcggttaattgctcccacatggctgacatggca

SEQ ID NO: 235582 - DNA, 312 bp, Glycine max
gacacacagctattcctcttaagcttgctactgagtttccacactgcataccttaggtcttccgaattcgaagttaatttgcaagatggctaaggaaaaggctcagatcaacattgtggtggttggtcatgtggaccctgaggaggcaaccaccattaacgagctgaagaagcctgttgtggagaaagaagctccagggcatgccatatgagggcatgcacgtacggcctcggaggggaaccagaaaattatgttaacaaaataatctggaaccctaatgtatcagtgtcatcatcagtgtgtagtttaagc

SEQ ID NO: 235583 - DNA, 311 bp, Glycine max
  unsure (1)..(311): unsure at all n locations
gcctcttctctcgcgtcgctccgcaccaatttcaccgcacgaatatcctgttgtttggagcgattcgagaaaaactctgtaaacatgttggtttaccaggacctccttacaggtgatgagcttctctctgactccttccgttacaaggaaattgagaatggaatgctgtgggaagttgaggggaagtgggttgttaaaggagcagttgatgtagacattggtgcaaacccttctgctgaaggtggaggagaagatganggagttgatgatgcagctgttaaagttgttgacattgttgacacattcagact

SEQ ID NO: 235584 - DNA, 368 bp, Glycine max
ggcagagagagagagagagagagagtgagggagagagagtgaggcttcttctacccagatttgtttcattttaaccaaagaagaatctctcacaaatggcgtcaagagcaattgttcaacaacaacaagccagaggtgaagcagtagtagggggaggaaaacagcataagaagaacggtgttgcggatggaaggaaccgcaatgcattgggtgacattgggaatttggccaatataagaagtgccgttgaaatcaagccaaatcgccctatcagaaggagttttggtgcgcaattacttgccaatgcacaagccggaacaactgcctgggaataacaggaaccaagcttgtgctaatgtgcctggtcc

SEQ ID NO: 235585 - DNA, 321 bp, Glycine max
gagcatagatcgagacaacttcaatctctcgtatgcattacgatgttccattttccaattcataaccctaactccgttcgaagcaccagatcgtgatggcaccagaggcagataataagccagcatagaagaagcctgtggacgacaacaggtcgactgtgggagacaaagctccggcggcgaagaagccaaaggcctgaaataagcttccgattgatggaggcgccggcggagaaggtaagaagaataagacatccacgaagagcgtggagacatacaagatctacatcttcaatgatctgaatcaggttcaccctgaca

SEQ ID NO: 235586 - DNA, 325 bp, Glycine max
gattttagcggttcaaatcacaacttcggctcttccgactcctatagcacgtttcgtcgcaatcatgaacattgtcaagatcgggatcacctgctttggaagtattgactgtatgattgacacactcacactggttacgcaacgatgtagagctcatgacagtaatgcagcctttcgataacaccgtttacatgacatacatgttggttaacgtcaatgttcacagccagtggtcacatcaagaggtcaccgttaaggacgaaaatacccatcgtcttcggtgacaaggcactcactgtttttggacacagctatcctgaagaga

SEQ ID NO: 235587 - DNA, 406 bp, Glycine max
  unsure (1)..(406): unsure at all n locations
aagggggtgtggaatctagtgagagagagcagaggaaaaggggaagaaaaatgttgagtgcgacggcgatcggcgcgttattgggtttgggaacccagatgtactccaatgttctccgcaaactcccctacatgcgccatccgtgggagcacgtggtcggaatggggttgggcgcggtgtttgtgaaccagcttctgaaatgggaagcccaagtggagcaagacctcgacaagatgctcgaaaaggccaaggccgccaacgaaagacgttatatagatggagatgatgattaatgcatgtcttcatggattgtggcagttggtgaaaataatcatgaaatatgttgaacttgttgcctttgttttctgatttgatgatgttaggtttgtaaggctgtnaaaacttt

SEQ ID NO: 235588 - DNA, 355 bp, Glycine max
aggtggcactcaaacattgtttgttgtaggaagaggaatcttgagaaatggcaggggacagcaagagcaagattctgttcatcggagggactggttacatcggaaaattcatcgtggaagccagcgccaaagctggccacccaactttccttttggtgagggagtccactctctccgaccccgcaaaatcacccctcatcgacaatttcaaaggcctcggtgtcaatcttgttttaggagatctatacgatcaccaaagtttggtgagtgctataaagcaggtcgatgtggtaatttctactgtacgacacctgcagctagctgatcaagataagatcatttctgcaattaaaga

SEQ ID NO: 235589 - DNA, 348 bp, Glycine max
ggcgtacgcagcttcatccctaacgcgtgcatagcagagtcagagacagagacgcagccatggggcggagacctgcgaggtgttataggcaaattaagaacaagccataccccaagtcacgtttctgccgtggtgttcctgatcccaagatcaggatttatgatgttggtatgaagaagaagggtgttgatgagtttccttgctgtgtccatctggttagttgggagaaggaaaatgtttcaagtgaggccctgcaagctgctcgcattgcttgcaagacgtacatggccaaatttgctggaaaggatgctttccacttgagagtcacggtgcacccattccatgttc

SEQ ID NO: 235590 - DNA, 360 bp, Glycine max; identical to SEQ ID NO: 235260

SEQ ID NO: 235591 - DNA, 374 bp, Glycine max
ggttctatctaattcagtttttttctcccatcataaaatatcgaccctctcctttccctcgtcatcaaccaatggctcccccaaaggccgagaagaagcccgcggtgaaaaagctcgcagagaaggctccggcggagaagaagcccaaggtcgacaagaagatatcgaaggaaggaggaagcgagaagaagaagaagagaacaaagaagagcgtggagacctataagatttacatcttcaaggtgctgaagcaggttcaccccgacatcggaatctcaatcaaggccatggggatcatgaacagtttcataaacgacatcttcgagaagctcgcccaagagtcgtcgcgattggctatgtataacaagaagcct

SEQ ID NO: 235592 - DNA, 375 bp, Glycine max
gacaccatccgttctagtctcaacttctgctcttccaactcctacaacgcttttctctgcactcatgggcaaggtcaagatcggaatcaacggatttggaagaattggccgtttggttgccagagtcgctctgcaaagagacgatgttgaactcgttgccgttaacgaccctttcattaccaccgattacatgacatacatgtttaaatacgacagtgttcacggacactggaagcatcacgatgtcaccgttaaggacgagaagacccttctcttcggtgacaaggcagtcactgtttttggacacagaaaccctgaagagatcccatgggggtcaactggagctgacatcattgttgagtcaacggagttttc

SEQ ID NO: 235593 - DNA, 317 bp, Glycine max
ggcacaagtgagtttgttgatcgagataactagaaacagtgtgatgaaaatgaaggtccttgttttcttcgttgctacaattttggtagcatggcaatgccatgcgtacgatatgttccctctccgaatgaacactggctatggtgcccgtactccggaggtgaaatgcgcaagttggaggcttgctgtggaagcacacaacatctttggctttgagaccattcctgaagagtgcgttgaagcaacaaaggaatacatccatggcgaacaatatagatcagactccaaaacagttaaccaacaagcttacttttatt

SEQ ID NO: 235594 - DNA, 329 bp, Glycine max
  unsure (1)..(329): unsure at all n locations
agggaaggttttgccccgttgttgccgctcaacctccgttaactccggaactctgcgccgaaaaacgaagccaatgggaagacacattgaatgggatctgctcgcaaggctcaagtcccaccgcaggaggcaaanggtggctgacaagtcataacaaganatcacatcttgggaatgaatgaanaaaacttttgctgttcacccatgccaaaggaattgtccttgaaaagataggtattgaggctaancagcccaactctgccattcgtaagtgtgccagggttcaacttatcaagaatgggaagaagattgccgcttttgtccctaat

SEQ ID NO: 235595 - DNA, 324 bp, Glycine max
ggcacaagtgagtttgttgatcgagataactagaaacagtgtgatgaaaatgaaggtccttgttttcttcgttgctacaattttggtagcatggcaatgccatgcgtacgatatgttccctctccgaatgaacactggctatggtgcccgtactccggaggtgaaatgcgcaagttggaggcttgctgtggaagcacacaacatctttggctttgagaccattcctgaagagtgcgttgaagcaacaatggaatacatccatggcgaacaatatagattagactccaaaacagttaaccaacaagcttacttttatgccataga

SEQ ID NO: 235596 - DNA, 377 bp, Glycine max
gactcaccacttcaaaacactcataacacaaagcacaaagcaaagctcatccttgagttaaaaaatggcagcagcttcttccatggctctctcatccccatccttggctggcaaggccgtgaagctgggcccatcagccccagaagtgggaagggtgagcatgaggaagaccgtcaccaagcaggtctcctcaggaagcccatggtacggcccagaccgagtcaagtacttgggcccattctctggcgagcccccgtcctacctaaccggtgagttcccaggcgactacggctgggacactgctgggctttccgcagacccagaaaccttcgccaagaaacgtgaactcgaagtgattcactccaggtgggccatgc

SEQ ID NO: 235597 - DNA, 326 bp, Glycine max
gcacaagtgagtttgttgatcgagataactagaaacagtgtgatgaaaatgaaggtccttgttttcttcgttgctacaattttggtagcatggcaatgccatgcgtacgatatgttgcctctccgaatgaacactggctatggtgcccgtaatcgggaagtgaaatgcgcaagttggaggcttgctgtggaagcacacaacatctttggctttgagaccattcctgaagagtgcgttgaagcaacagaagaatacatccatggcgaacaatatatatcagactccataacagttaaccaacaagcttacttttatgccagagacct

SEQ ID NO: 235598 - DNA, 380 bp, Glycine max
  unsure (1)..(380): unsure at all n locations
ggtaagagcatataaataacatagtcctcctcctttgtttttccacatcacatcacatcgcagagagagagagatccatcgatcaattaatttccaatggccgatcagctcaccgacgaacagatctctgagttcaaggaagcctttagcctcttcgacaaggacggcgatggttgtattaccaccaaggaacttgggactgtgatgcggtcgcttgggcagaacccaactgaggctgagctgcaggacatgataaatgaggttgatgctgatgggaatggtaccattgatttcccagaattcctcaatctcatggcgcgcaagatgaaagacactgattcagnagaagagctgaaggaggctttccgtgtgtttgacaa

SEQ ID NO: 235599 - DNA, 370 bp, Glycine max
agggaacgttcaagagttagtcgtgagcaatcaggcagtgtatcgtgaggagaatatcaagttgttcgtacgcatcattcctcgcgtagttccaggtagcagagacgctcctatgaacagctgcaacagtgctccactgagtcagcaccagctacggtgagcgtgaagcagccgcatcgttagcatcctgcaagcgttacgcttcgtgagattaggccctaccatacaagtaccgaacttatgatccggaagctccccttccagacgctggttcctgatattactcaggatttcaagactgatctgcatttccagatccacaccgtgcttgcattgcacgaacctgctgacgcataacttgtttggctcc

SEQ ID NO: 235600 - DNA, 330 bp, Glycine max
ggcacaagtgagtttgttgatcgagataactagaaacagtgtgatgaaaatgaaggtccttgttttcttcgttgctacaattttggtagcatggcaatgccatgcgtacgatatgttccctctccgaatgaacactggctatggtgcccgtactccggaggtgaaatgcgcaagttggaggcttgctgtggaagcacacaacatctttggctttgagaccattcctgaagagtgcgttgaagcaacaaaggaatacatccatggcgaacaatatagatcagactccaaaacagttaaccaacaagcttacttttatgccagagacctcca

SEQ ID NO: 235601 - DNA, 329 bp, Glycine max
  unsure (1)..(329): unsure at all n locations
ggcacaagtttgttgagatagctagaagcaataagatgaaaatgaaagtgcttgttttgtttgttgctacagttttggtaacatatgaatgccatggctcagactaccagaagttccctctccaaatgaaaactgggtttggtgggcaatacagcaatgaggtggcatgtgccagttggaagcttggcgtggaagcaaacaacgtagtcaagtggcaaactgttcctgcagcttgcggagagtacatagctgactacgttctangagaacaatatagatcagattccanaacagttaaccaacaagcttatttctatgctaaatccctc

SEQ ID NO: 235602 - DNA, 381 bp, Glycine max
gacaagtttgttgagatagctagaagcaataagatgaaaatgaaagtgcttgttttgtttgttgctacagttttggtagcatatgaatgccatggctcagactaccagaagttccctctccaaatgaaaactgggtttggtgggcaatacagcaatgaggtggcatgtgccagttggaggcttggcgtggaagcaaacaacgtactcaagtggcaaactgttcctgcagcttgcggagagtacatagctgactacgttctaggagaccaatatagatcagattccaaaacagttaaccaacaagcttatttctatgctaaatccctcaaactcaacaacaaaaaagtctcttgccttggacgttgacgacactaccctctc

SEQ ID NO: 235603 - DNA, 229 bp, Glycine max
ggaacaagtgagtttgttgattgatataccctcaattcgtgtgaataagctgagagtccttgatttcatcgttgctgggtcttgggtattatggcactgccatgcctgcgatgtgctctctctccgaatgaacactggttatggtgctcgttatccggaagttacattcgcaagttgggtggcttgctcgttgcagtatacagggtctttcgctttgatagcagtcctc

SEQ ID NO: 235604 - DNA, 376 bp, Glycine max
gaactacccagcaatagtaagtgcaaaaccgaaaacaaaaaaccaaacccaaacgaaaccgaccaaaatctcgccaacttcactttccgcttcatgtagtttctgcgttcccaactccttctcccgactctaccctgactcgcccgagtccacactcaaacccgcgctcatggcaaataacccttccgacgctcccgccgatgacttccttgaacaaatcctcggcctcccgaacttcgcttccgccgactccggcctttccgctgccgatgtcggcctcgccggtgcggccactcaggctccgatgatgctgcaactcaactccggcggaagcaaaggctaacttcgccggcgccgccttccacgcgcccgtgta

SEQ ID NO: 235605 - DNA, 386 bp, Glycine max
gagagtgagagagagagagagagagagagagaggtatcacagtgaaacgaagaagccctaactacgcacgcactcattcttgagaaagctcaatattcattcgtccatggcactctcttctcgtctcttttccaaatccaaattgatctatggctgtcaaatacttctgcaaaaggagcatgctattccagttcgtcactttgctaaagagtctgcccctcctgcccttaagggagatcagatgctgaagaacatttttgtggaggtgaagaacaaatttgagactgccataggaatattaaagaaggagaagatcaccattgacccagaagatccagctgctgtttctcaataatgcaaaggtcatgaaaacagttagagagaag

SEQ ID NO: 235606 - DNA, 364 bp, Glycine max
ggcacaagtttgttgagatagctagaagcaataagatgaaaatgaaagtgcttgttttgtttgttgctacagttttggtagcatatgaatgccatggctcagactaccagaagttccctctccaaatgaaaactgggtttggtgggcaatacagcaatgaggtggcatgtgccagttggaggcttggcgtggaagcaaacaacgtagtcaagtggcaaactgttcctgcagcttgcggagagtacatagctgactacgttctaggagaccaatatagatcagattccaaaacagttaaccaacaagcttatttctatgctaaatccctcaaactcaccaacaaagatgtctttgtcttggacgt

SEQ ID NO: 235607 - DNA, 369 bp, Glycine max
ggagaaagagaaagagagaattcgtaaaccctaatttcggaaagatcggcgatgactgcctccaaggatcgcgagaacttcgtctacatcgccaaactcgccgagcaggccgagcgttacgaagagatggtggaatcaatgaagaacgttgcgaatctcgacgttgaactgacggtggaggagcggaatttgctttctgttgggtacaagaatgtgattggtgctcgcagagcgtcctggaggatcctgtcttccattgagcagaaggaagaaacaaaagggaacgagttgaatgcgaagcggattaaggagtacagacagaaggttgaattggagctatcgaacatctgtaatgatgttatgagagtg

SEQ ID NO: 235608 - DNA, 386 bp, Glycine max
ggcacaagtgagtttgttgatcgagataactagaaacagtgtgatgaaaatgaaggtccttgttttcttcgttgctacaattttggtagcatggcaatgccatgcgtacgatatgctccctctccgaatgaacactggctatggtgcccgtactccggaggtgaaatgcgcaagttggaggcttgctgtggaagcatacaacatctttggctttgagaccattcctgaagagtgcgttgaagcaacaaaggaatacatccatggcgaacaatatagatcagactccaaaacagttaaccaacaagcttacttttatgccagagacctcgaagtccatcccaaggacacatttgtgttcagtatagatggcaccgtactctctaata

SEQ ID NO: 235609 - DNA, 129 bp, Glycine max
gcgtgacacactctgtacctgcgcattaaccgcggctggtgtagtggttacacgcagcgtgacagcgacacatggcagagccttatcgctcgcacgtttcactggctacccttcaattctcgccaggtt

SEQ ID NO: 235610 - DNA, 185 bp, Glycine max
aaggtttcctctccggatgataactgggtaaggtgagcgttcttcggaggtaaaatgcgcaagttttaagcttgccgtggcagcacacaacatccgagcctttaaaaccattcctgaaaaatgccttgaaccaacaaaggactacattaatggcgaacaatttagatcagactctaaaacagtta

SEQ ID NO: 235611 - DNA, 379 bp, Glycine max; identical to SEQ ID NO: 235217

SEQ ID NO: 235612 - DNA, 330 bp, Glycine max
ggggttctcctacagattcttcagcaactgcgattttggatcggaacctcttctgcggcgtatcaatgggacactccaacgtttggaattctcacccaagaaactacggtcctggttctcgcacttgccgagtgtgtgggaatccacatggattgatcaggaagtatggccttatgtgctgcatgcagtgcatccgtatcaatgccaatgaaattggcttcatcaagtatcgctaaaatagctgttgtcacgtacggaccaatattatgttctggcactaggatgttttgacgatgttatgtttgaagaaacttgacacgtgtttttttc

SEQ ID NO: 235613 - DNA, 389 bp, Glycine max
gataacacaaacacaaattacatagcctcagtaatctgagagagaaacaaaaacaatgaaggtttccattgccaagttccactcccttcccctatgttttttccttctcttggccttcaacacaaaacccctcctagcagcagaaccagagccagtggttgataagcaagggaaccctttggagccaggagtagggtactacgtgtggccactttgggctgatgaaggaggcctcacactaggccaaacaaggaacaagacatgccctctttatgttatccgtgacccttcattcattggcaccccagtttcattcttagcaccaggccttgaccatgttccaacactcactgatctaaccattgatttccctgtggtgacagtgtgta

SEQ ID NO: 235614 - DNA, 385 bp, Glycine max
ggcacacgcgccggctgagaaaggggtgtctggatttttgttggatttcctgatgggcggagtgtcggcggctgtgtccaagacagctgcggctccaatcgaacgagttaagttgctcatccaaaaccaggatgaaatgatcaagagtggtcggttgtctgaaccatacaaaggaattggcgattgtttcactcgaaccatgaaggatgaaggggtgattgctctttggagaggaaacactgctaatgttatcagatacttccctactcacgctctgaattttgcttttaatgattatttcaagaggcttttcaacttcaaaaaggataaagatggctactggaaatggtttgctgggaatttagcatctgggggggctgctggg

SEQ ID NO: 235615 - DNA, 391 bp, Glycine max
ggcacaagtgagtttgttgatcgagataactagaaacagtgtgatgaaaatgaaggtccttgttttcttcgttgctacaattttggtagcatggcaatgccatgcgtacgatatgttccctctccgaatgaacactggctatggtgcccatactccggaggtgaaatgcgcaagttggaggcttgctgtggaagcacacaacatctttggctttgagaccattcctgaagagtgcgttgaagcaacaaaggaatacatccatggcgaacaatatagatcagactccaaaacagttaaccaacaagcttacttttatgccagagacctcgaagtccatcccaaggacacatttgtgttcagtatagatggcaccgtactctctaatattcca

SEQ ID NO: 235616 - DNA, 331 bp, Glycine max
gagctttagattcttttcccctagattcagccacagttggaaaaaaaaaaagttgttcgagatggcacgtacgaagcaaactgctcgtaagtccacaggaggaaaggcacctaggaagcagctcgcaaccaaggctgcacgtaagtctgcaccaactactggtggtgtgaagaagccacatcgttatcgtcctggtaccgttgctcttcgtgagattaggaaataccagaagagtaccgagcttttgatcaggaagctccccttccagaggctggttcgtgaaattgctcaggacttcaagactgatctgcgtttccagagccatgctgtg

SEQ ID NO: 235617 - DNA, 380 bp, Glycine max
gatacttgtaattcataggcagatatctaccgagagggttaaacacttagcatctgctgagggtaccttggtagacaccacactacccataatatggtcgaaaacaacaacccaagggtttttggttcttctatgtttctatgtttgcttgtgttgatgatttggaacaagattgttgttgttgttccacaagccgaggctcgagcattttttgtttttggtgattcgctagttgacaatggcaacaataactacctattcaccactgctcgtgccgactcatatccttatggcgttgactatcccactcacagggccactggccgtttctccaatgggcttcataatcccggacattatcagcgagaaaattgggtcag

SEQ ID NO: 235618 - DNA, 319 bp, Glycine max
ggcacaagtgagtttgttgatcgagataactagaaacagtgtgatgaaaatgaaggtccttgttttcttcgttgctacaattttggtagcatggcaatgccatgcgtacgatatgttccctctccgaatgaacactggctatggtgcccgtactccggaggtgaaatgcgcaagttggaggcttgctgtggaagcacacaacatctttggctttgagaccattcctgaagagtgcgttgaagcaacaaaggaatacatccatggcgaacaatatagatcagactccaaaacagttaaccaacaagcttacttttatgcc

SEQ ID NO: 235619 - DNA, 353 bp, Glycine max
ggaacggaaaagcactggcgcagctaccctgaggcttctcttctcttctcttctctgtcgtgagtcaccatggtgagggttagtgtgctgaacgatgctctgaagagcatgtacaatgctgacaaaaggggaaagcgccaagtcatgattatgccatcctccaaagtcattatcaaattccttttggtgatgcaaaagcacggatacatcggagagtttgagtatgttgatgaccacatggctggtaaaatcgtggttgaattgaacggtagactgaataagtgtggggttattagtccccgttttgatgtgggcgtcaaagagattgaaggttggactgctaagcttctccc

SEQ ID NO: 235620 - DNA, 353 bp, Glycine max
cgacagaaggggaaggtgcaagagtttgttgtgagctataagctagtttatcgtgaggagaatatgaagttgtttgttttctttgttgctgcagtagttttggtagcatggccatgccatggcgcaggctaccaaaggttccctctccgaatgaaaactggctatggtgagcgttcttcggaggtaaaatgcgcaagttttaggcttgctgtggaagcacacaacatccgagcctttaaaaccattcctgaagagtgcgttgaaccaacaaaggactacattaatggcgaacaatttagatcagactctaaaacagttaaccaacaagctttcttttatgctagttaacgcca

SEQ ID NO: 235621 - DNA, 377 bp, Glycine max
gactccaaaactgaacgctatagaaaatgttcaaaaaaattttcaggtgaagatgtatctgcacagaaccaagtgaaggcatctgttcaacgaaaaatacggcaaagtattgctgaagagtatccgggtcttgaacctgtgttggatgatatacttcccaagaagtcccctctaatagttgctaaatgtcagaaccatctcaatctggttcttgtgaacaacgtgccactgtttttcagtgtccgtgatggaccatacatgcccaccttgcgtcttctccatctatatccaaatataatgaaaaagttacaagttgaccgtggtgcaattagatttgtcttggcgggtgcaaacataatgtgtcctggtcctacatc

SEQ ID NO: 235622 - DNA, 321 bp, Glycine max
ggaaacacacagaagacagagtgagacgcttctcacgatggagggaggagtatcctacgcgcgcatgcctcgggtcaaaatccgcgagctgaaggacgactacgccaagttcgagctccgcgacaccgacgcgagcatcgccaacgcgctgcggcgcgtgatgatcgcggaggtgccgacggtcgccatcgacctcgtggagatcgaggtcaactcctcggtgctcaatgacgagtttatcgctcacaggctgggcctcatccccctcactagcgagcgcgccatgtccatgcgcttctcacgtgactgcgacgcgtgcga

SEQ ID NO: 235623 - DNA, 379 bp, Glycine max
gaaggtgcaagagtttgttgtgagctataagctagtttatcgtgaggagaatatgaagttgtttgttttctttgttgctgcagtagttttggtagcatggccatgccatggcgcaggctaccaaaggttccctctccgaatgaaaactggctatggtgagcgttcttcggaggtaaaatgcgcaagttttaggcttgctgtggaagcacacaacatccgagcctttaaaaccattcctgaagagtgcgttgaaccaacaaaggactacattaatggcgaacaatttagatcagactctaaaacagttaaccaacaagctttcttttatgctagtgaacgcgaagtcgatcacatcgacatatttatattcggcatagat

SEQ ID NO: 235624 - DNA, 371 bp, Glycine max
ggtgaaagaaaggcagcgatggaagaagacttcgacatccccggcggcgaggaaatggatctcggcgaagacgaggtcggcgaggagagggagatcggctctggcggcctcaagaagaagctcctcaatgaaggtcaaggctgggaaacccccgaagtcggtgacgaagtccaagttcattacacggggactttgctcgacgggactaagttcgattcgagccgcgacagggattctcccttcagcttcacgctcggacaagggcaagtaattaaaggatgggatgaaggtattaaaaccatgaagaaaggtgaaaatgctattttcaccatccctcccgagctagcttatggtgaatctggttcccctcc

SEQ ID NO: 235625 - DNA, 349 bp, Glycine max
gaccatagaagaagcacaaagagaagcattagcactaggagcagcaacaactagtctcagctgaaatggcctcttcagtgatggcatctgtggccctcaaacctgcccctttcactgttgagaagtcctcagtgagaggccttccctctctctcaaggaactcttcttcattcagagttgtggccagtggcaagaagatcaagactgacaaaccttatggaattaatggtggcatggctttgagggatggaactgatgcatctggcaggaaaggaaagggaaagggtgtttaccagtttgtagacaaatacggtgctaatgtcgatggttacagtcctatctacgacac

SEQ ID NO: 235626 - DNA, 384 bp, Glycine max
  unsure (1)..(384): unsure at all n locations
gacagcatatatatcaataatctattttatactatacctacattttgataattttctttgtagttgatagccatggctacccgtggaaagcttgaggttgacattgatctcaagtccaacgcagacaagtactggcaaacccttaggaattctactgaaatattccctaaggccttcccacatgattacaaaagcattgaggttcttgagggtgatggcaagtctcctggttctatccgccacataagttatggtgaaggttcaccacttgtgaaatcatcctttgagaagattgaggctgttgatgaggaaaagaaggtagtgtcgtacactatcattgaatggggaactcttcaagcactacanaacattcaagggagacat

SEQ ID NO: 235627 - DNA, 389 bp, Glycine max
ggcacaagtgagtttgttgatcgagataactagaaacagtgtgatgaaaatgaaggtccttgttttcttcgttgctacaattttggtagcatggcaatgccatgcgtacgatatgttccctctccgaatgaacactggctatggtgcccgtactccggaggtgaaatgcgcaagttggaggcttgctgtggaagcacacaacatctttggctttgagaccattcctgaagagtgcgttgaagcaacaaaggaatacatccatggcgaacaatatagatcagactccaaaacagttaaccaacaagcttacttttatgccagagacctcgaagtccatcccaaaggacacaatttgtgttcggtataagatggcaccgtactctctaata

SEQ ID NO: 235628 - DNA, 341 bp, Glycine max
gattctaagatcgatcatcttcaatttccctatattacttgcaatattgattgaacactactagatcatgtgtataacgttgtatagctagctagctagctttctattgtctaatatacctttgtctgtgttgtaaattaaggtgcaagaagcaagtaatccctcataatacacacacacacatatatatatatatataatggcggattggggtccagtggtgatagcagtggtgctgtttgtgttgctaagccctggtcttgtgtttcaattgccatggaagagcagagtggtggagtttgggaacatgcataccagtgcagtgtctatcttggtccaca

SEQ ID NO: 235629 - DNA, 355 bp, Glycine max
ccaggcgtcagtaaggatgcgaggggacaacacaagggggcacaagtgagtttgttgatccacacacccacacacagtgtgatcagcatgaaggtccttgttatcttcgttgctacaattctggtagcaaggcagtgccatgcgtacgatatgttccctctccgaatgaacactggctatggtgcacgtacgccggaggtgaaatgcgcaagttggacgcatgctgtggaagcacacatcatctttggcgttgagaccattcctgaagagtgcgttgaagcaacccacgaatacatccatggcgaacaatatagatcagactccacaacagttaacctacacgcttacttttatg

SEQ ID NO: 235630 - DNA, 365 bp, Glycine max
ggcacaagtgagtttgttgatcgagataactagaaacagtgtgatgaaaatgaaggtccttgttttcttcgttgctacaattttggtagcatggcaatgccatgcgtacgatatgttccctctccgaatgaacactggctatggtgcccgtactccggaggtgaaatgcgcaagttggaggcttgctgtggaagcacacaacatctttggctttgagaccattcctgaagagtgcgttgaagcaacaaaggaatacatccatggcgaacaatatagatcagactccaaaacagttaaccaacaagcttacttttatgccagagacctcgaagttcatcccaaggacacatttgtgttcagtatag

SEQ ID NO: 235631 - DNA, 377 bp, Glycine max; identical to SEQ ID NO: 235059

SEQ ID NO: 235632 - DNA, 385 bp, Glycine max
ggcacaagtgagtttgttgatcgagataactagaaacagtgtgatgaaaatgaaggtccttgttttcttcgttgctacaattttggtagcatggcaatgccatgcgtacgatatgttccctctccgaatgaacactggctatggtgcccgtactccggaggtgaaatgcgcaagttggaggcttgctgtggaagcacacaacatctttggctttgagaccattcctgaagagtgcgttgaagcaacaaaggaatacatccatggcgaacaatatagatcagactccaaaacagttaaccaacaagcttacttttatgccagagacctcgaagtccatcccaaggacacatttgtgttcagtatagatggcaccgtactctctaat

SEQ ID NO: 235633 - DNA, 334 bp, Glycine max
gagcgaaacagagagtggtttcagtgagtgatcggtgttcacttgatccttcataagtcgtcatcatcatcatcatcatcaccgttgattgaagaagatgccgatcagaaacatcgccatcggaaggcctgaagaggctactcaccccgacacgttgaaggcggggttggctgagttcatctccaccttgatcttcgtgttcgccggttcaggttccggcatcgcctacaacaagctcaccgacaacggcgccgccactcccgccggcctcatctccgcttccatcgcccatgctttcgccctcttcgtcgccgtctccgtcgggcgcaacatc

SEQ ID NO: 235634 - DNA, 332 bp, Glycine max
ggaccccaatactcggcatccggagaaaaccctagccactctcccggcgtcacgatgcagatcgtcgtgaaaaccctaacgggtaagacgatcacgttggacgtggagtcttcggacaccatcgacaacgtgaaggccaagatccaggacaaggaatgcatccctccggaccagcagcgcctcatcttcgccgggaagcagctggaggacggccgcaccctcgccgactacaacatccagaaggagtccacgcttcacctcgtcctccgcctccgtggcggtgccaagaagcgcaagaagaagacctacaccaagcccaagaagatcaagca

SEQ ID NO: 235635 - DNA, 380 bp, Glycine max
gaaggtgcaagagtttgttgtgagctataagctagtttatcgtgaggagaatatgaagttgtttgttttctttgttgctgcagtagttttggtagcatggccatgccatggcgcaggctaccaaaggttccctctccgaatgaaaactggctatggtgagcgttcttcggaggtaaaatgcgcaagttttaggcttgctgtggaagcacacaacatccgagcctttaaaaccattcctgaagagtgcgttgaaccaacaaaggactacattaatggcgaacaatttagatcagactctaaaacagttaaccaacaagctttcttttatgctagttaacgccaagtcaatcacaacgacatatttatattcggcatagata

SEQ ID NO: 235636 - DNA, 378 bp, Glycine max
gggtgcaagagtttgttgtgagctataagctagtttatcgtgaggagaatatgaagttgtttgttttctttgttgctgcagtagttttggtagcatggccatgccatggcgcaggctaccaaaggttccctctccgaatgaaaactggctatggtgagcgttcttcggaggtaaaatgcgcaagttttaggcttgctgtggaagcacacaacatccgagcctttaaaaccattcctgaagagtgcgttgaaccaacaaaggactacattaatggcgaacaatttagatcagactctaaaacagttaaccaacaagctttcttttatgctagtgaacgccaagtccatcacaacgacatatttatattcggcatagata

SEQ ID NO: 235637 - DNA, 293 bp, Glycine max
gggacaagtgagtttgttgatccagataactagaaacactgtgaggaaaaagaaagtccttggtttcctcggtgccagaattttggtagcaaggcaatgccatgcatacgacatgttcccactcggaatgaacactggcgatggtgcccgtacgccggaggtgaaatgcgcaagtttgaggcttgctgtggaatcacataacatcattggccatgagacccttcctgaagagtccgtttaagcaccttaggaaaacatccgaggcgaataatagcgatcagactccataacag

SEQ ID NO: 235638 - DNA, 378 bp, Glycine max
  unsure (1)..(378): unsure at all n locations
gggcacaagtttgttgagatagctagaagcaataagatgaaaatgaaagtgcttgttttgtttgttgctacagttttggtagcatatgaatgccatggctcagactaccagaagttccctctccaaatgaaaactgggtttggtgggcaatacagcaatgaggtggcatgtgccagttggaggcttggcgtggaagcaaacaacgtagtcaagtggcaaactgttcctgcagcttgcggagagtacatagctgactacgttctaggagaccaatatagatcagattccaaaacagttaaccaacaagcttatttctatgctaaatccctcaaactcaccaacanagatgtctttgtcttggacgttgacgacactact

SEQ ID NO: 235639 - DNA, 368 bp, Glycine max; identical to SEQ ID NO: 235349

SEQ ID NO: 235640 - DNA, 381 bp, Glycine max
  unsure (1)..(381): unsure at all n locations
aaagagacccggaaagggtgggaaccgcttttggaaatccattgggcttggatttaagactcccagggaagccatcgaaggaacctacattgacaagaagtgccccttcactggcaatgtttccatccgtggccgtatcttggctggaacatgtcacagtgctaagatgaacaggactattattgttaggaggaattatctccattttatcaagaagtaccagaggtacgagaaaaggcactccaacattcctgctcatatatcacctgctttccgtgtgaaggaaggagatcacgttattattggtcaatgcaggccactttctaagactgtgaggttcaatgtgttgaaagtgatcccagctggatcntctagcggtgc

SEQ ID NO: 235641 - DNA, 377 bp, Glycine max
gaagatttgttcattgttgggtcaattgaagtctaagaaagaaaacagagagcgaagaaggagaagagatcagaaaaatggggtccaaagctccaaagaaggccaatctcctcgatcaccactccatcaagcacatcctcgacgagtcagtctccgaggtggtaacgagtcgtgggtttgtggaagacgtgagattgagcaatgtgaggcttcccaatggggcaatcatcatcgtcattgctctcttcgcccaattctacaagaagaagttccctgaaaatagggattttctcatcgcctgcatcgccttgtatgtgatcatcaatgggttgttgcagctgatcatatacactaaggagaaaaatgccattctgttc

SEQ ID NO: 235642 - DNA, 324 bp, Glycine max
ggcacaagtgagtttgttgatcgagataactagaaacagtgtgatgaaaatgaaggtccttgttttcttcgttgctacaattttggtagcatggcaatgccatgcgtacgatatgttccctctccgaatgaacactggctatggtgcccgtactccggaggtgaaatgcgcaagttggaggcttgctgtggaagcacacaacatctttggctttgagaccattcctgaagagtgcgttgaagcaacaaaggaatacatccatggcgaacaatatagatcagactccaaaacagttaaccaacaagcttacttttatgccagaga

SEQ ID NO: 235643 - DNA, 379 bp, Glycine max
ttacaaattgttgacagtaaagataaacctgccatgggttttctttaccaagctatgtataaagccaaagaggagatgattaggaggtttcagaaaaataagaaggtagagccttacttgaatatcttggataggcattgggattctctttgtaaaagtatacatgctgctggttattggttaaatccagcttgtcatttcaatgaagaatttgctaagcataagtccacaacatctggccttttggatgtcattgaaaggtatgctcatggagatcctgatttgcaatttaatttggcaagtgaaatgagaatatttaaaaatgccgagttaaatttttggaaggctagttgctacacgtgaacggaatacggtgatg

SEQ ID NO: 235644 - DNA, 317 bp, Glycine max
ggcacaagtgagtttgttgatcgagataactagaaacagtgtgatgaaaatgaaggtccttgttttcttcgttgctacaattttggtagcatggcaatgccatgcgtacgatatgttccctctccgaatgaacactggctatggtgcccgtactccggaggtgaaatgcgcaagttggaggcttgctgtggaagcacacaacatctttggctttgagaccattcctgaagagtgcgttgaagcaacaaaggaatacatccatggcgaacaatatagatcagactccaaaacagttaaccaacaagcttacttttatg

SEQ ID NO: 235645 - DNA, 382 bp, Glycine max
taacggtcagggattcccggctcgacccacgcgtacgaccacaaggggggacagaaggtaataggggttttgagtgccgcggtccacacactcttctctgcagcttttgcctacaactcccttcaccatggctgaacaaaccgagaaagcttttctgaagcaaccaaaagtgtttctcagcacaaagaagactgggaagggaaagaggcctggaaaaggtgggaaccgcttttggaagtccattgggcttggatttaagactcccagggaagccatcgaaggaacctatattgacaagaagtgccccttcactggcaatgtttccatccgtggccgtatcttggctggaacatgtcacagtgctaagatgaacaggactatt

SEQ ID NO: 235646 - DNA, 382 bp, Glycine max; identical to SEQ ID NO: 235220

SEQ ID NO: 235647 - DNA, 292 bp, Glycine max
ggcacaagtgagtttgttgatcgagataactagaaacagtgtgatgaaaatgaaggtccttgttttcttcgttgctacaattttggtagcatggcaatgccatgcgtacgatatgttccctctccgaatgaacactggctatggtgcccgtactccggaggtgaaatgcgcaagttggaggcttgctgtggaagcacacaacatctttggctttgagaccattcctgaagagtgcgttgaagcaacaaaggaatacatccatggcgaacaatatagatcagactccaaaaca

SEQ ID NO: 235648 - DNA, 367 bp, Glycine max; identical to SEQ ID NO: 235109

SEQ ID NO: 235649 - DNA, 391 bp, Glycine max
agaaggggactcaccacttcaaaacactcataacacaaagcacaaagcaaagctcatccttgagttaaaaaatggcagcagcttcttccatggctctctcatccccatccttggctggcaaggccgtgaagctgggcccatcagccccagaagtgggaagggtgagcatgaggaagaccgtcaccaagcatgtctcctcaggaagcccatggtacggcccagaccgagtcaagtacttgggcccattctctggcgagcccccgtcctacctaaccggtgagttcccaggcgactaccgctgggacactgctgggctttccgcagacccagaaaccttcgccaagaaccgtgaactcgaagtgatccactccaggtgggccatgctcggagc

SEQ ID NO: 235650 - DNA, 282 bp, Glycine max
ggcacaagtgagtttgttgatcgagataactagaaccagtgtgatgaaaatgagggcccttgtttcctccgttgcaacattttgggcacccaagaaaccacccggacgaaaaattccccccccccaagaacaccggctatggtgcccctactcccgaggtgaaatgcgcaagttggaggcttgctgtggaagcacacaacatctttggctttgagaccattcctgaagagtacgttgaagcaacaaacgaatacatccatggcgaacaatatagatcagact

SEQ ID NO: 235651 - DNA, 361 bp, Glycine max
  unsure (1)..(361): unsure at all n locations
gcagtacagaaaacgcagttctcaccatttccctctcgattgtgagacttgttgttgttaactgaacttttctgagcaagaatgtctgggcgtggaaagggaggcaagggtttgggaaagggaggagcgaaacgacaccgtaaggtgctgcgcgataacattcagggaatcaccaagcccgcgattcggcgtttggctcgtangggtggcgtgaagcgtatcagtggtctcatctacgaagagacacgtggcgtgctcaagatctttttggagaacgtgattcgtgacgccgttacctacactgagcatgctaggagaaagaccgttacggcaatggacgtggtttatgctctcaagagac

SEQ ID NO: 235652 - DNA, 425 bp, Glycine max
  unsure (1)..(425): unsure at all n locations
cgggtcgacgcacgcgtcagcccacgcgtccgaagacgacagaagggggcacaagtgagtttgttgatcgagataactagaaacagtgtgatgaaaatgaaggtccttgttttcttcgttgctacaattttggtagcatggcaatgccatgcgtacgatatgttccctctccgaatgaacactggctatggtgcccgtactccggaggtgaaatgcgcaagttggaggcttgctgtggaagcacacaacatctttggctttgagaccattcctgaagagtgcgttgaagcaacaaaggaatacatccatggcgaacaatatagatcagactccaaaacagttaaccaacaagcttacttttatgccagagacctcgaagtccatcncaaggacacatttgtgttcagtatagatggcaccgtact

SEQ ID NO: 235653 - DNA, 352 bp, Glycine max
gactcacaaccacaacaaggcagcagtgcgaagagaaagaaagagaagaagcgcttatcgaactcggacggaagcactgagttaactcagagcgagtgaaagtgttgctgcgtgatgtctggtggtatcgcccgtggacgcctcaccgaggagcgcaagtcgtggcggaagaaccatccccatggttttgttgcgaagccggagacgctgcccgatggaaccgtgaacttgatggtgtggcattgcactattcccgggaagactgggactgattgggaaggtggctacttcccgcttacgctgcactttagtgaagactacccaagcaagcctccaaagtgtaaattcccac

SEQ ID NO: 235654 - DNA, 377 bp, Glycine max
aggggataagtaagtattcatctcaatcctcaacctttccctcttctctctcaaccaataccctacctcccgaccctgttcccctctcgtatcggtcattgaaagaggaaagtctaagaccgaatctaagagagccgatcccaaacttgctgtgaataagaagggagccgccatcaaagctaggatacccgccggcaaggggaaggcagcgaaagaccctaacaagccaaagaggcctccaagtgctttcttcgttttcatggaggagttcaggaaggtattcatcaaagaacatcctgaaaacaatgcagtgtctgctgtgggcaaagctgctggagcaaaatggaagaccatgtctgatgctgaaaaagcacctt

SEQ ID NO: 235655 - DNA, 390 bp, Glycine max
ggcattggggcatgcttttaatttcctagatctcccaaacaaattgtagcataagtcccatggccaaagagactagtgttgtttatctatatcccagcaaatcacaagtttggggtgagaattttgatcataaaaaacttgtaataacaacactagctgctaatggaaagaaggaggagagtaatggagcacctaatgacacatatcctgcgtttcccgggtggtatgctgatgtttcctggccaggagaagcacacacatatgaaatagaaaagattctattccacgggaaatcagaattccaagagcttcttgtatttgagtcttctagacaaggcaaggttgcaattcttgatgggcatatccagctgacagaaaacgatgaatttg

SEQ ID NO: 235656 - DNA, 380 bp, Glycine max
gacacacagctattcctcttaagcttgctactgagtttccacactgcataccttaggtcttccgaattcgaagttaatttgcaagatggctaaggaaaaggctcagatcaacattgtggtggttggtcatgtggaccctgaggaggcaaccaccattaacgagctgaagaagcctgttgtggagaaagaagctccagggcatgccatatgagggcatgcacgtacggcctcggaggggaaccagaaaattatgttaacaaaataatctggaaccctaatgtatcagtgtcatcatcagtgtgtagtttaagctagctttgctatgggtacgttctttgagatgagagtcttgatgaacagtaccattctgatgtattgct

SEQ ID NO: 235657 - DNA, 379 bp, Glycine max
gacggacgagggtttcgtttcgggtttgacgttgttcacaatcactttctgcgcttcactcactcccttcgtgcggttttctttctttgtcgagctcgtgcgaaaatgcgtgagattcttcacatacagggagggcaatgcggaaaccagatcggagcgaagttctgggaggtggtgtgcgcggagcacgggatcgattccacggggaggtaccagggggacaacgagttgcaactcgagcgagtcaacgtctattacaatgaagcgagttgcggaaggttcgtgccgagggcggtgctcatggatctagagccagggaccatggacagcgtcagatctggtccctacggtcagattttccgacctgataacttcgtct

SEQ ID NO: 235658 - DNA, 379 bp, Glycine max
gaacacagaacaaaaacaaagaaaaaaaaacccttagccaacacaaccatcatggccacctctgctattcagcaatcagcattcactggtcaaactgctctgaagcagctcaatgagttcgtccgcaagaccggtggcgccggcaaaggtcgcactaacatgcgccgcaccgtcaagagtgctcctcagagcatttggtatggccctgaccgtcccaagtacttgggtccattcactgagcagattccatcatacctgaccggagaattccctggtgactacggatgggacactgctggattatcagctgaaccggaaaccttcgccaggaaccgggagctggaggtgattcacagcagatgggcaatgcttggtgccc

SEQ ID NO: 235659 - DNA, 374 bp, Glycine max
gaatgattgatagaggagtgagtctcggggcatcaaagaagaaagatgggagacgtagcagataaattggcgtatttccaagcgataaccggtttagaagatccggagctctgcacagaaatcctggctgcccacaattgggacctggaactcgctatctctactttcacctcttcctcaaaccctaacaaccctccaccgcctcccgctctggcttggaaactcatcaccctacccgtttccgtcatctccgccagtctaggcttagtttccgccgctatcggcttgggcctatgggccgcggggggcgtcctctcctattccctcggcctcgtgggcctgggctcgccctcggccccattggtttccgtcac

SEQ ID NO: 235660 - DNA, 378 bp, Glycine max
ggcacaagtgagtttgttgatcgagataactagaaacagtgtgatgaaaatgaaggtccttgttttcttcgttgctacaattttggtagcatggcaatgccatgcgtacgatatgttccctctccgaatgaacactggctatggtgcccgtactccggaggtgaaatgcgcaagttggaggcttgctgtggaagcacacaacatctttggctttgagaccattcctgaagagtgcgttgaagcaacaaaggaatacatccatggcgaacaatatagattagactccaaaacagttaaccaacaagcttacttttatgccagagacctcgaagtccatcccaaggacacatttgtgttcagtatagatggcaccgtact

SEQ ID NO: 235661 - DNA, 361 bp, Glycine max
  unsure (1)..(361): unsure at all n locations
gaaggtgcaagagtttgttgtgagctataagctagtttatcgtgaggagaatatgaagttgtttgttttctttgttgctgcagtagttttggtagcatggccatgccatggcgcatgctaccaaaggttccctctccgaatgaaaactggctatggtgagcgttcttcggaggtaaaatgcgcaagttttaggcttgctgtggaagcacacaacatccgagcctttaaaaccattcctgaagagtgcgttgaaccaacaaaggactacattaatggcgaacaatttagatcagactctaaaacagttaaccaacaagctttcttttatgctagtgaacgcgaagtccatcacancgacata

SEQ ID NO: 235662 - DNA, 381 bp, Glycine max
ggctgtgcaaaatcaggtagcagataactactacaggcctgatctcaaaagggcagctctggcaagattgagcgctgtcaataggagcctcagagtagctaagtctggtgtgaagaagaggaacagacaggctgtgaaggtccccagcaggaagtgaatttagaagagttaaattgcattctaaatttcttccatcctttccccattttgtagtttgtgttccagaactcaattctagattttctagttttgtttggagaggcaatttattgtgttttcaatatacaacaaccggaactactatgttatagctttcaacaactggtttggtttttttttctaaaaaaaaaaaaaaaaaaagaaaaaaaaaaagcggccgct

SEQ ID NO: 235663 - DNA, 382 bp, Glycine max
ggtctcgtggaagtgtaagcaagcaaaaccctagcggcgcctgctttctttgttcgtgttttgcatcaggatggagtctcaggtgaagcacgcacttgttgtcaaagttatgggtcgtactggatccagaggacaagtgacccaggttagagtgaagtttttggatgatcagaaccgtcacatcatgaggaatgtgaaaggacctgtgagagaaggagacattctcaccctactcgagtctgaaagggaagcaagaagattgcgctagatggtctcttttttttggcttgcctccaaattcgaacaaaagcaatatttttcttgatatttatggtagttagtcggtgctaaaggggttatagcaccctatcttattgttttg

SEQ ID NO: 235664 - DNA, 370 bp, Glycine max
gatcctttgtattctattcttcaagattcaggtactgcgtgtcggaagcagacacagaattgctcgtacgaagcaaacccgctcgtaagtccacaggaaggaacgctcctatgaagcagcttgcatacaaggctgcacgtaagtctgcaccaactactggtggtgtgaataagccccatcgttatcgtcctggtaccgttgctcttcgtgagattaggaaataccagaagagtaccgagcttttgatccggaagctccccttccagaggctggttcgtgaaattgctcatgacttcaagactgatctgcgtttccagagccacgccgtgcttgcattgcaagaagctgctgaggcataccttgttgggct

SEQ ID NO: 235665 - DNA, 375 bp, Glycine max
gatcttttgcgttagggcactcaacattttacactcttttcttcttctcgttgttgcttcgctgttgaatcatggatcagaaggtcgatttcagcgctccccattccatgggaaccactatcatcggcgttacttacaacggcggtgtcgttctcggagccgactctcgaaccagcaccggagtgtatgttgccaaccgagcatcggacaaaatcactcagctcactgataatgtatacgtgtgtcgctctggatcggctgctgattctcagattgtctctgattatgtgcgttacttcctccatcaacacacaatacaacttggacaacctgcaacagttaaagttgctgcaaaccttgtccgacttctctcat

SEQ ID NO: 235666 - DNA, 368 bp, Glycine max
ggcacaagtgagtttgttgatcgagataactagaaacagtgtgatgaaaatgaaggtccttgttttcttcgttgctacaattttggtagcatggcaatgccatgcgtacgatatgttccctctccgaatgaacactggctatggtgcccgtactccggaggtgaaatgcgcaagttggaggcttgctgtggaagcacacaacatctttggctttgagaccattcctgaagagtgcgttgaagcaacaaaggaatacatccatggcgaacaatatagatcagactccaaaacagttaaccaacaagcttacttttatgccagagacctcgaagtccatcccaaggacacatttgtgttcagtatagatg

SEQ ID NO: 235667 - DNA, 373 bp, Glycine max
ggtaataattcttataacacaacacaacccatggccaccacctccgcattcctcctccttcccctcctcctgctgctccacctcgccatcgccgctcacggcatcggcatcaactacggcacgctcggcgacaaccttccaccgcccgcggcggtggcgaacttcctgaagacgaatacgaccatcgaccgcgtgaagatctacgacgtgaacccggacatcctgcgggccttcgccggcagcggcatctccgtgacggtgaccgcccccaacggcgacatcgccgccttaaccaaaatcgactcggcgaggcagtgggtggcgacgcacatcaaaccctttcaccctcagaccaaaattaattacatcctcg

SEQ ID NO: 235668 - DNA, 359 bp, Glycine max
ggaacttctcacgttcatttctacacatccctagctctgtcgttccgtcgttgacgatggcgtttcgggtgcgaagccctgacctccgctctctctttcttctctctctcttgtccatcgcttccgccaatgtcttcttcgaagagcgtttcgatgacgggtgggaaaatcgatgggttaaatcagattggaaaaaagatgagaacgtggctggggagtggaaccacacctctggtcaatggaatggagacgctaatgacaaaggtattcaaaccagtgaggattacagattctatgctatttcagctgagtaccctgaattcagcaacaagggtaagacactagtccttcaaatttcc

SEQ ID NO: 235669 - DNA, 383 bp, Glycine max
aagacgacagaagggggggcgaggtagccagagagtgatacaatacagagtgcgttgttgctccttcgccacaactccctgccaacatgggtatctccagagattctatgcacaagaggcgtgccactggtggcaagaagaaggcatggaggaagaagagaaagtatgagcttggtcgccagcctgctaacactaagctgtcaagcaacaagacagtcaggaggatccgggttagaggtggaaatgtgaagtggagggcactgagattggatactggaaattactcctggggaagtgaagctgtaactcgcaagactcgtatactagatgtggtttacaatgcctcaaacaacgagcttgtgcgtactcagactcttgtaaaa

SEQ ID NO: 235670 - DNA, 352 bp, Glycine max
gaattcagagagagcgagacggcagcacgcgcaaaaatggtgaagtttctgaaaccaaacaaagccgtcatcgtccttcagggacgctacgccggcaaaaaagccgtgatagtgcgaaccttcgatgaaggcacgcgcgagcgcccctacgggcactgcttggtggcagggataaagaagtaccctgcgaaggtgatcaagaaggattcggccaagaagacggccaagaagtcgcgtgtgaaggcgttcgtgaagctcgtgaactaccagcacctcatgcccacgcgctacacgctcgatgtcgatttgaaggacgcggttacccccgacgtgctccaagccaaggataaga

SEQ ID NO: 235671 - DNA, 364 bp, Glycine max
gaaggtgcaagagtttgctgtgagctataagctagtttatcgtgaggagaatatgaagttgtttgttttctttgttgctgcagtagttttggtagcatggccatgccatggcgcaggctaccaaaggttccctctccgaatgaaaactggctatggtgagcgttcttcggaggtaaaatgcgcaagttttaggcttgctgtggaagcacacaacatccgagcctttaaaaccattcctgaagagtgcgttgaaccaacaaaggactacattaatggcgaacaatttagattagactctaaaacagttaaccaacaagctttcttttatgctagtgaacgcgaagtccatcacaacgacatattt

SEQ ID NO: 235672 - DNA, 386 bp, Glycine max
ccatgtacatattcaaaatgtttcaatctctactcctcctgaatccccttatactgttggcatagtgccagattcttctgataatgtgtgtatagaagattgtattgttgccatgggatttgatgcaatttctctcaaaagtggctgggatgagtatggcattgcttatggaaggcctactgagaatgtacacatcagaagggtgcaacttcatgcattttctggctctgctcttgcatttggcagtgacatgtctggtggcatttcaaatgttctagtggagcatgctcatcttttcaactcaaatagtggcattgagttcagaaccaccaagggaagaggtggttatatgaaagaaattgttatgtcagacatacaaatggaga

SEQ ID NO: 235673 - DNA, 386 bp, Glycine max
  unsure (1)..(386): unsure at all n locations
gagacacanaataaaccaacgtattctctttctctcttcaatggccggaatccgcttgcagccggaggactctgacgtctcccaacaatcccgcgcggtggctctctccgccaccgatctggtctccgacgacgaccgctccgtcgccgccgactcttggtccatcaagagcgagtacggaagcactctggacgacgaccagcgccatgctgacgccgccgaagctctctccaacgccaacctccgacctccctccgattacagttctgacaaggatgaacctgattctgaagcagtcacatccatgctgggatttcagagttattgggattctgcatatgctgacgagctcacaaattttcgtgaacatggtcatactggtgaag

SEQ ID NO: 235674 - DNA, 379 bp, Glycine max
gagagtggtggagtgtgcagaagagcgtcgcagtcgcaaccctaatcagaagaagcgcagcttcaagcgagtgacagccaccagccatgggtcgtatgcacagccgcggtaagggtatatcctcttctgctttgccctacaaaaggacacctcctagctggctcaagatctcttcgcaagatgtcgaagaaaatatctgcaagtttgcgaagaaaggtttgaccccgtctcagattggtgtcattctcagagattctcacggtattgctcaggtcaatagcgtcactggcagcaaaatccttcgcatcctcaaagctcacggacttgcgcctgaagttccagaggacctgtaccatttgattaagaacgcagtttcaat

SEQ ID NO: 235675 - DNA, 383 bp, Glycine max
gattgttggcttgtgctctgctcgtgcctctagggttatcatatctccatttccatttcctctctctcagtttccaagaatcttaagctatgggaaagtcttacccaaccgtgagcgctgattaccagaaggccgttgagaaggcgaagaagaagctcagaggcttcatcgctgagaagagatgcgctcctctaatgctccgtttggcatggcactctgctggaacttacgacgtgagctcgaagaccggtggtcccttcggaaccataaagcacccctccgaactcgctcacggcgctaacaacggtcttgacatcgctgttaggcttttggagccactcaaagcggagtttcctattttgagctacgccgatttctaccag

SEQ ID NO: 235676 - DNA, 375 bp, Glycine max
gatctcaatttcttttctctttgtcgcaaagagaagagatctgcctcctttttatcaaatctatctcttcttcaagaatagttgaaaatggggctgtctttcaccaagttgttcagccgactgtttgccaagaaagagatgcgtatactgatggtgggtctcgatgctgcgggtaagaccaccattctgtacaagctcaagcttggagagattgtcaccaccattcccaccattgggtttaatgtggaaactgtggaatataagaacatcagcttcactgtctgggatgttggaggtcaggacaagatccgtcctttgtggagacattacttccaaaatacacaaggacttatttttgtggttgatagcaatgac

SEQ ID NO: 235677 - DNA, 383 bp, Glycine max
ggccgataccaagccagctgtttcactcttttctctctttccctttctattatctctccaacttcactccttttattcccttatcacttcttagttctttccttatcctttcgctatccagacatgtaatctctcctttaccaagttttgttttactatttgatcggatcggatcggatcttgctttcgccattaattactcatggagatccgtgccgatgcagataccagctccttttcaagtttgttcgcagctgtgtcatatggatttacatcaatggccatggtttttatcaacaaggctgttcttatgcagtatgcatattcaatgactctcctcactctgcagcaattggttaccaccttgcttattcactttggta

SEQ ID NO: 235678 - DNA, 381 bp, Glycine max
ggcacaagtgagtttgttgatcgagataactagaaacagtgtgatgaaaatgaaggtccttgttttcttcgttgctacaattttggtagcatggcaatgccatgcgtacgatatgttccctctccgaatggaacactggcaatggtgcccttattccggaggtaaattccccaatttggaggcttgctgtgaaagcacacaccatctttggctttgaaacaatccttaaaaattcctttaaaccaccaatggatacattcaatgcgaacaatatatattaaactccaaaacactttaccaacaagcctacatttatgccagagacatccaaatctatctcacagagacatatgtgttcactatagatggcaccgtattctc

SEQ ID NO: 235679 - DNA, 395 bp, Glycine max
ggcacaagtttgttgagatagctagaagcaataagatgaaaatgaaagtgcttgttttgtttgttgctacagttttggtagcatatgaatgccatggctcagactaccagaagttccctctccaaatgaaaactgggtttggtgggcaatacagcaatgaggtggcatgtgccagttggaggcttggcgtggaagcaaacaacgtagtcaagtggcaaactgttcctgcagcttgcggagagtacatagctgactacgttctaggagaccaatatagatcagattccaaaacagttaaccaacaagcttatttctatgctaaatccctcaaactcaccaacaaagatgtctttgtcttggacgttgacgacactactctctctaatctccagtat

SEQ ID NO: 235680 - DNA, 386 bp, Glycine max; identical to SEQ ID NO: 235120

SEQ ID NO: 235681 - DNA, 369 bp, Glycine max
gacagcatatatatcaataatctattttatactatacctacattttgataattttctttgtagttgatagccatggctacccgtggaaagcttgaggttgacattgatctcaagtccaacgcagacaagtactggcaaacccttaggaattctactgaaatattccctaaggccttcccacatgattacaaaagcattgaggttcttgaaggtgatggcaagtctcctggttctatccgccacataagttatggtgaaggttcaccacttgtgaaatcatcctttgagaagattgaggctgttgatgaggaaaagaaggtagtgtcgtacactatcattgatggggaactcctccagcactatacaaca

SEQ ID NO: 235682 - DNA, 367 bp, Glycine max
  unsure (1)..(367): unsure at all n locations
ggcacaagtgagtttgttgatcgagataactagaaacagtgtgatgaaaatgaaggtccttgttttcttcgttgctacaattttggtagcatggcaatgccatgcgtacgatatgttccctctccgaatgaacactggctatggtgcccgtactccggaggtgaaatgcgcaagttggaggcttgctgtggaagcacacaacatctttggctttgagaccattcctgaagagtgcgttgaagcaacaaaggaatacatccatggcgaacaatatagattagactccaaaacagttaaccaacaagcttacttttatgccagagacctcgaagtccatcncaaggacacatttgtgttcagtatagat

SEQ ID NO: 235683 - DNA, 386 bp, Glycine max; identical to SEQ ID NO: 235120

SEQ ID NO: 235684 - DNA, 355 bp, Glycine max
ggcacaagtgagtttgttgatcgagataactagaaacagtgtgatgaaaatgaaggtccttgttttcttcgttgctacaattttggtagcatggcaatgccatgcgtacgatatgttccctctccgaatgaacactggctatggtgcccgtactccggaggtgaaatgcgcaagttggaggcttgctgtggaagcacacaacatctttggctttgagaccattcctgaagagtgcgttgaagcaacaaaggaatacatccatggcgaacaatatagatcagactccaaaacagttaaccaacaagcttacttttatgccagagacctcgaagtccatcccaaggacacatttgtg

SEQ ID NO: 235685 - DNA, 368 bp, Glycine max
ggtaatccttacgctctctcactcacaaacgcacactgaattcaaaaacatcgaaagagagaggcatggccgagcaaaccttcatcatgatcaagccagatggcgttcaaagaggccttattggcgagattattagcagatttgagaggaagggtttttacttgaaagggttgaaactcgttactgtggaccgtccttttgctgagaagcactatgctgatttgtctgcaaagcctttctttagtggtttggtggattacattgtctctggccctgttgttgccatgatctgggagggtaagaatgttgttacaactggccgaaagattatcggagccacaaacccagctcaatctgagcctggaact

SEQ ID NO: 235686 - DNA, 378 bp, Glycine max; identical to SEQ ID NO: 235250

SEQ ID NO: 235687 - DNA, 390 bp, Glycine max
aatatttatttcaagtactggagatcaggcacagtcaatgagtggaaatggcgctatggcatttgatgtagagtacgcacgatggttagaagagcataatagacaaaccaatgagctaagggctgcaataaattctcatgctggagatattgaacttcgaaccattgttgacaatttcatgacacaatttgatgatatcctcaggctgaaaggtattgcagcaaaagctgatgttttccacattctgtcaggaatgtggaagactccagctgagaggtgtttcatgtggattggaggctttcgctcatccgaactactcaagcttcttgaaagtcagttggagcctttaaccgagcaacaattgatgggcatctacaacttgcagcagtc

SEQ ID NO: 235688 - DNA, 386 bp, Glycine max
ggaagaacaagtcttgcattgggtggagcatacttagaaacagcaactatgtctctcatgcagcttactagctcccctgttggctcactggtccgtttcattgtaatatttgctttatggtacagaaccatggctttggccaagttgccaccaaacgcttcatcagttccagcagttttagcgtttggagattccatcgtggacccaggcaacaacaacaacataaaaacattgatcaagtgcaacttcccaccttatggaaaggattttcagggaggaaacccaacgggtcgattttgcaatggaaaaattccttctgacttaatagttgaacaattgggtattaaggagtatttgcctgcatatttggatccgaatctcaaatc

SEQ ID NO: 235689 - DNA, 359 bp, Glycine max
gaaggtgcaagagtttgttgtgagctacaagctagtttatcgtgaggagaatatgaagttgtttgttttctttgttgctgcagtagttttggtagcatggccatgccatggcgcaagctaccaaaggttccctctccgaatgaaaactggctatggtgagcgttcttcggaggtaaaatgcgcaagttttaggcttgctgtggaagcatacaatatccgatcctttaaagccattcctgaagactgcgttgaaccaacaaaggactacattactggcgaacaatttagatcagactctaaaacagttaaccaacaagctttcatttatgctagtgaacgctaagtccatcacaacgaca

SEQ ID NO: 235690 - DNA, 384 bp, Glycine max
  unsure (1)..(384): unsure at all n locations
ggcacaagtgagtttgttgatcgagataactagaaacagtgtgatgaaaatgaaggtccttgttttcttcgttgctacaattttggtagcatggcaatgccatgcgtacgatatgttccctctccgaatgaacactggctatggtgcccgtactccggaggtgaaatgcgcaagttggaggcttgctgtggaagcacacaacatctttggctttgagaccattcctgaagagtgcgttgaagcaacaaaggaatacatccatggcgaacaatatagattagactccaaaacagttaaccaacaagcttacttttatgccagagacctcgaagtccatcncaaggacacatttgtgttcagtatagatggcaccgtactctctaa

SEQ ID NO: 235691 - DNA, 385 bp, Glycine max
tttcatcttctgattctgattatttttttctttattttgttcagatggagaaggtgagaatggagattgatgaaaagaggaagaggcaagcgaggaggttcatcgaggctattgaagttggagtgatgaagaagctgaaggcgaaggaagaggaaatagagaaaatcggaaaactgaattgggcgttggaagagaaagtgaagcatctttgcatggagaatcaggtgtggcgcaacttagcggaagcgaacgaagccacggcaaatgctctacgctgcaatttggagcaagttttggcgcagtgtggcggaatcgcggcggaggaagaccgcggcggcgcaaccgtgtgcggcggcgcggagatggacgacgcggagtcctgctg

SEQ ID NO: 235692 - DNA, 376 bp, Glycine max
ggcacaagtgagtttgttgatcgagataactagaaacagtgtgatgaaaatgaaggtccttgttttcttcgttgctacaattttggtagcatggcaatgccatgcgtacgatatgttccctctccgaatgaacactggctatggtgcccgtactccggaggtgaaatgcgcaagttggaggcttgctgtggaagcacacaacatctttggctttgagaccattcctgaagagtgcgttgaagcaacaaaggaatacatccatggcgaacaatatagattagactccaaaacagttaaccaacaagcttacttttatgccagagacctcgaagtccatcccaaggacacatttgtgttcagtatagatggcaccgta

SEQ ID NO: 235693 - DNA, 375 bp, Glycine max
gaaggtgcaagagtttgttgtgagctataagctagtttatcgtgaggagaatatgaagttgtttgttttctttgttgctgcagtagttttggtagcatggccatgccatggcgcaggctaccaaaggttccctctccgaatgaaaactggctatggtgagcgttcttcggaggtaaaatgcgcaagttttaggcttgctgtggaagcacacaacatccgagcctttaaaaccattcctgaagagtgcgttgaaccaacaaaggactacattaatggcgaacaatttagatcagactctaaaacagttaaccaacaagctttcttttatgctagtgaacgcgaagtccatcacaacgacatatttatattcggcat

SEQ ID NO: 235694 - DNA, 380 bp, Glycine max
ggttgtgtgagtgaagaagcagagggagtagcggcattaaaaatgcagatcttcgtgaaaactctgacagggaagactataaccctcgaggtcgagagcagcgacaccatcgacaatgtcaaggccaagattcaagacaaggaaggcattcctccggatcagcagcgtttgattttcgccggaaagcagcttgaagatggaaggaccctggccgattacaacatccagaaggaatcaacccttcatctcgtcctcaggcttcgtggtggcatcattgagccttccctcatggctttggctcgcaaatacaaccaggacaagatgatttgccgcaaatgctatgctcgtctgcatcctaaggctgtgaactgccgtaagaa

SEQ ID NO: 235695 - DNA, 380 bp, Glycine max
ggttgtctgaaccatacaaaggaattggcgattgtttcactcgaaccatgaaggatgaaggggtgattgctctttggagaggaaacactgctaatgttatcagatacttccctactcaggctctgaattttgcttttaaggattatttcaagaggcttttcaacttcaaaaaggataaagatggctactggaaatggtttgctgggaatttagcatctgggggggctgctggggctccctccctcttgtttgtctattctttggactatgcccgaacacgtttagcaaatgatgcaaaggctgcaaagaagggtggtgagaggcagttcaatggcttgattgatgtttacaggaaaaccattaagtctgatggcattgct

SEQ ID NO: 235696 - DNA, 388 bp, Glycine max
  unsure (1)..(388): unsure at all n locations
ggcacaagtgagtttgttgatcgagataactagaaacagtgtgatgaaaatgaaggtccttgttttcttcgttgctacaattttggtagcatggcaatgccatgcgtacgatatgttccctctccgaatgaacactggctatggtgcccgtactccggaggtgaaatgcgcaagttggaggcttgctgtggaagcacacaacatctttggctttgagaccattcctgaagagtgcgttgaagcaacaaaggaatacatccatggcgaacaatatagattagactccaaaacagttaaccaacaagcttacttttatgccagagacctcgaagtccatcncaaggacacatttgtgttcagtatagatggcaccgtactctctaatatt

SEQ ID NO: 235697 - DNA, 377 bp, Glycine max
ggaacttcccacgttcatttctacacatccctagctctgtcgttccgtcgttgacgatggcgtttcgggtgcgaagccctgacctccgctctctctttcttctctctctcttgtccatcgcttccgccaatgtcttcttcgaagagcgtttcgatgacgggtgggaaaatcgatgggttaaatcagattggaaaaaagatgagaacgtggctggggagtggaaccacacctctggtcaatggaatggagacgctaatgacaaaggtattcaaaccagtgaggattacagattctatgctatttcagctgagtaccctgaattcagcaacaagggtaagacactagtctttcaattttctgttaagcacgaacagaag

SEQ ID NO: 235698 - DNA, 391 bp, Glycine max
  unsure (1)..(391): unsure at all n locations
gatagcaaaatcgtttctccaatttaatcaccattgtacaacccaattcccttcgtcgttttcgattaagagagcaatggcacgtaccaagcaaaccgctcgcaagtccaccggaggaaaggctccgaggaagcaattggcaaccaaagccgctcgcaagtcagccccggcgaccggcggagtgaagaagccccaccgcttcaggccaggaacggtggctctgagggagattcgaaagtaccagaagagcaccgaacttctgatccgaaaactcccattccagaggctcgtcagagaaatcgctcaggatttcanaaaccgatctccgctttcagagcagcgccgtttcggctcttcaggaagccgcggaggcttatctcgttggactctt

SEQ ID NO: 235699 - DNA, 383 bp, Glycine max
ggaacctttgcattctattcattcaagattcagcaagtgcgttttggaagcagagaccgaaatacttcgagatggcccgtacaaagcaaactgctcgtaagtcaactggaggaaaagctcccaggaagcagcttgcaaccaaggctgcacgtaagtctgcaccaacaactggtggtgtgaagaagcctcatcgttatcgccctggaactgttgctcttcgtgagattaggaaataccagaagagcactgagctcctaatcaggaagcttcctttccagaggttggttcgtgaaattgcccaggatttcaagactgatctgcgtttccagagccatgctgtgcttgcattgcaagaggctgctgaggcataccttgttgggctc

SEQ ID NO: 235700 - DNA, 353 bp, Glycine max
gacaccaaaatttgccaattgccatttcaatccccagtttcttcttcaacgtcctcttacgagcagatcccaattctccttcccagtttcaaaccctaattccctcattcccatggcctcagaagagcccactgtcgcggtggaacccgctcccgaacctgccaccgccgagcctcccccggaggagaaggaggagcccaaacctgaagccaaggctaagaaaaccaaggaacccaaacctaaaaaggtttccagaccacgcaaccctcccactcatccttcctacgaggagatgattaaagacgcaattacctcgctgaaggagaaaaccggttcgagccaacacgcgattg

SEQ ID NO: 235701 - DNA, 315 bp, Glycine max
ggagtcagattcgcacgcattgcttcgcctcacaacagcagctgcagcagcaatggctcccaaacgaggtggaaaggctccggctcttgccgctaagaagaagcctgagaaggtcacgaatccgttgttcgagaagcgtccgaagcagttcggaatcggaggggcgttgcctccgaagagagacttgactaggttcgtgaagtggccaaagaatgttcaaattcagaggaagaagaggattctgaagcagaggttgaaggttcccccagctttgaaccagtttaccaaaactcttgacaaaaacctagcaacaag

SEQ ID NO: 235702 - DNA, 382 bp, Glycine max
ggcacaagtgagtttgttgatcgagataactagaaacagtgtgatgaaaatgaaggtccttgttttcttcgttgctacaattttggtagcatggcaatgccatgcgtacgatatgttccctctccgaatgaacactggctatggtgcccgtactccggaggtgaaatgcgcaagttggaggcttgctgtggaagcacacaacatctttggctttgagaccattcctgaagagtgcgttgaagcaacaaagggatacatccatggcgaacaatatagattagactccaaaacagttaaccaacaagcttacttttatgccagagacctcgaagtccatcccaaggagacatttgtgttcagtatagatggcaccgtactctct

SEQ ID NO: 235703 - DNA, 385 bp, Glycine max; identical to SEQ ID NO: 235632

SEQ ID NO: 235704 - DNA, 386 bp, Glycine max
ggcacaagtgagtttgttgatcgagataactagaaacagtgtgatgaaaatgaaggtccttgttttcttcgttgctacaattttggtagcatggcaatgccatgcgtacgatatgttccctctccgaatgaacactggctatggtgcccgtactccggaggtgaaatgcgcaagttggaggcttgctgtggaagcacacaacatctttggctttgagaccattcctgaagagtgcgttgaagcaacaaaggaatacatccatggcgaacaatatagattagactccaaaacagttaaccaacaagcttacttttatgccagagacctcgaagtccatcccaaggacacatttgtgttcagtatagatggcaccgtactctctaata

SEQ ID NO: 235705 - DNA, 378 bp, Glycine max; identical to SEQ ID NO: 235660

SEQ ID NO: 235706 - DNA, 412 bp, Glycine max
cccacgcgtccggacgacagaaggggataacgttatccattaacaaggtcactgatttgtgcaaatgatgtctttgcagaggaccaagttgtttccttttttcattgtccttgtttccttcacatgtagtctctcccttgctatgtccagtaaccagttggagcagtttgcttcggaggaagaagtgtttcaactattccaagcgtggcagaaggagcataagcgtgaatatggcaaccaagaggagaaggcaaagaggttccagatattccaaagtaatttgaggtacatcaacgagatgaatgcgaagaggaagtcacctacgacgcaacatcgtttgggtctgaacaagtttgctgatatgagtcctgaggagtttatgaaaacctacttgaaagaaatagagatgccc

SEQ ID NO: 235707 - DNA, 381 bp, Glycine max
ggcttaaattatcataaccctaacaatattcgttcggtcagtgtctgagagtagattgagcatcagaggaacgatgtcgaagaagaacaacctcgccaagagaaagaagcagtacgaattcgatctccaaagagagaaacaagagaagataaagaaagagcagaagctccatgcgaagaacaacaagatgaaagttgatggtagtgacaagaaaaagaaaggtgggagtggatttcaggtggggaagagaaaagtgaagaccaagttgactgcccttgctaaagctaaggctgcccaggcaatggagcttgacaaatgagcatgtccgccttgcaagttatttgcagcgatgaagagtttggcattttgttttcatgatga

SEQ ID NO: 235708 - DNA, 381 bp, Glycine max
ggggagagaatagagaagagagatggatccagacgcgttggcaaaggcattcgtggagcactactacagcaccttcgacaccaacaggaacggcttagcgaatctctaccaggagggttccatgctcactttcgaagggcagaagatccaaggcgcttccaacatcgttgccaagctcacctccctcccttttcagcagtgtcaccactcaatctccaccgtctactgccagccctccggcgtcaacgccggcatgctcgtcttcgtcagcggaatacttcagctcgccggcgaacagcacactctcaagttcacccagatgtctcacttataccaacacctcagggaagctattatgtgttgaatgacatattccgttta

SEQ ID NO: 235709 - DNA, 380 bp, Glycine max
  unsure (1)..(380): unsure at all n locations
ggcacaagtgagtttgttgatcgagataactagaaacagtgtgatgaaaatgaaggtccttgttttcttcgttgctacaattttggtagcatggcaatgccatgcgtacgatatgttccctctccgaatgaacactggctatggtgcccgtactccggaggtgaaatgcgcaagttggaggcttgctgtggaagcacacaacatctttggctttgagaccattcctgaagagtgcgttgaagcaacaaaggaatacatccatggcgaacaatatagattagactccanaacagttaaccaacaagcttacttttatgccagagacctcgaagtccatcncaaggacgcatttgtgttcagtatagatggcaccgtactct

SEQ ID NO: 235710 - DNA, 357 bp, Glycine max
ggcagtttcaaattttcttttccttcactttcccgagaaaaaaataacacttttcactttcttcactacgttctcacttcgatatggctcgtacgaagcaaaccgctcgcaagtccaccggtggcaaggcgccacgtaagcagctcgccaccaaggccgctcggaagtccgctccggcgaccggaggagtgaagaagccccaccgcttcgggccgggaaccgtggcgctgagggaaatcagaaagtaccagaagagcaccgagcttctcatcaggaagcttccatttcagaggctcgtgagagaaatcgcgcaggatttcaagaccgatttgcgtttccagagcagcgctgtttccg

SEQ ID NO: 235711 - DNA, 367 bp, Glycine max
gggcacaagtgagtttgttgatcgagataactagaaacagtgtgatgaaaatgaaggtccttgttttcttcgttgctacaattttggtagcatggcaatgccatgcgtacgatatgttccctctccgaatgaacactggctatggtgcccgtactccggaggtgaaatgcgcaagttggaggcttgctgtggaagcacacaacatctttggctttgagaccattcctgaagagtgcgttgaagcaacaaaggaatacatccatggcgaacaatatagatcagactccaaaacagttaaccaacaagcttacttttatgccagagacctcgaagtccatcccaaggacacatttgtgttcagtataga

SEQ ID NO: 235712 - DNA, 358 bp, Glycine max
ggcacaagtgagtttgttgatcgagataactagaaacagtgtgatgaaaatgaaggtccttgttttcttcgttgctacaattttggtagcatggcaatgccatgcgtacgatatgttccctctccgaatgaacactggctatggtgcccgtactccggaggtgaaatgcgcaagttggaggcttgctgtggaagcacacaacatctttggctttgagaccattcctgaagagtgcgttgaagcaacaaaggaatacatccatggcgaacaatatagattagactccaaaacagttaaccaacaagcttacttttatgccagagacctcgaagtccatcccaaggacacatttgtgttc

SEQ ID NO: 235713 - DNA, 278 bp, Glycine max
gcatttagtcaaatttctgccaatttatctacattgaagtttcaggataacattgaactcttttgtcagacaaggcgcaatattaataccgttcttaatgagtatgtgatgtgaatattataaataagttcattattaatataatccaaatccattttgtttagagcttaatttgatgtgtattgccttttgaagtttgctcattaagtttgtgcagaatgagaacgatgcctggcataatgagccaaatgcccccttttcttgtttccatgaatgag

SEQ ID NO: 235714 - DNA, 380 bp, Glycine max
gatagcgaaacagagagtggtttcagtgagtgatcggtgttcacttgatccttcataagtcgtcatcatcatcatcatcatcaccgttgattgaagaagatgccgatcagaaacatcgccatcggaaggcctgaagaggctactcaccccgacacgttgaaggcggggttggctgagttcatctccaccttgatcttcgtgttcgccggttcaggttccggcatcgcctacaacaagctcaccgacaacggcgctgccacccctgccggcctcatctccgcctccatcgcccatgcattcgccctcttcgtcgccgtctccgtcggcgccaacatctccggcggccacgtcaaccccgccgtcaccttcggcgccttcgt

SEQ ID NO: 235715 - DNA, 384 bp, Glycine max
gggcattggagagattggtacacccccccaaaacaagccccaattatggctctgaatctttgtatctcacctaactgtaaatgggtttcatctcctgcttccttagatagtgcatcttctttgagatcttcacttggttcttgttttggtaacataaacattgctagtgtgagtttaagcactagtagaagtttgagtttgaggaggagtgggagtgttagtgtaagatctagtttggaaactacggggcccacagttacagtgggacaggtcactgaggttaacaaggataccttctggccgatcgttaaggctgccggggataaaaccgttgtccttgacatgtacacacaatggtgtgggccttgcaaagcgatggctcca

SEQ ID NO: 235716 - DNA, 377 bp, Glycine max
gacactaaacaagttaaaagaagagcatcactgaactaacaaagcaaccctatgtcgaaggtggtttgtgtcaccggagccagcggcgccatcggatcatgggtggtcctactcctcctccagcgtggttacaccgtccatgccaccgtccaagatatcaaggatgaaaatgagacgaaacatttggaggaaatggaaggagcaaagagtcatctccatttttttgaaatggatcttcttgacatcgactccattgccgctgccataaagggttgttccggcgtaatccaccttgcatgtcctaacatcattggtcaagtcgaagatcccgagaaacagatattggaaccggcgataaaaggaacggttaatgtgtt

SEQ ID NO: 235717 - DNA, 256 bp, Glycine max
gactcaccacttcaaaacactcataacacaaagcacaaagcaaagctcatccttgagttaaaaaatggcagcagcttcttccatggctctctcatccccatccttggctggcaaggccgtgaagctgggcccatcagccccagaagtgggaagggtgagcatgaggaagaccgtcaccaagcaggtctcctcaggaagcccatggtacggcccagaccgagtcaagtacttgggcccattctctggcgagcccccg

SEQ ID NO: 235718 - DNA, 353 bp, Glycine max
ggcttgttgttgtgtcaaccatggcgtcgtttgggtctctgaaatccaccattttcgaaaaagaagagagaaaacagcagtatcagtcgcacattcgaggcctcaatgcatacgaccgtcacaaaaaattcatcgacgactacggtaatgtttctcttacaaaatccttaaatcatttattattcactacctcttttttaaaaaataaaatataaatataaatttcctgtttcatgataaatgtcgttttgtttagggttgatggacaataaggaattgatcaaacttgtagctgctggtttggttggttccttataataataataatgtcctatagcaaatggatgatgaac

SEQ ID NO: 235719 - DNA, 359 bp, Glycine max
ggcagtttcaaattttcttttccttcactttcccgagaaaaaaataacacttttcactttcttcactacgttctcacttcgatatggctcgtacgaagcaaaccgctcgcaagtccaccggtggcaaggcgccacgtaagcagctcgccaccaaggccgctcggaagtccgctccggcgaccggaggagtgaagaagccccaccgcttcaggccgggaaccgtggcgctgagggaaatcagaaagtaccagaagagcaccgagcttctcatcaggaagcttccatttcagaggctcgtgagagaaatcgcgcaggatttcaagaccgatttgcgtttccagagcagcgctgtttccgcg

SEQ ID NO: 235720 - DNA, 399 bp, Glycine max
acggaagacgacagaaggggattagatttaggtcttccctcttccgtgcacagcttgaacacaccgcgtttcggagagagacgtcgcaatggggaggaggcctgcaaggtgttatcggcagataaaaaacaagccataccccaaatcacgcttttgccgtggtgttcctgatcctaagatcagaatttatgatgttggtatgaagaagaaaggtgttgatgagtttcccttctgtgttcatctggttagctgggaaaaagaaaatgtttcaagtgaagcattggaagctgctagaattgcatgcaacaaatatatggcgaaatttgctggaaaagatgctttccacttgagagtccgagtacatccattccatgttcttaggatcaacaaaatgctttc

SEQ ID NO: 235721 - DNA, 392 bp, Glycine max
gaaggtgcaagagtttgttgtgagctataagctagtttatcgtgaggagaatatgaagttgtttgttttctttgttgctgcagtagttttggtagcatggccatgccatggcgcaggctaccaaaggttccctctccgaatgaaaactggctatggtgagcgttcttcggaggtaaaatgcgcaagttttaggcttgctgtggaagcacacaacatccgagcctttaaaaccattcctgaagagtgcgttgaaccaacaaaggactacattaatggcgaacaatttagattagactctaaaacagttaaccaacaagctttcttttatgctagtgaacgcgaagttcatcacaacgacatatttatattcggcatagataacaccgtactct

SEQ ID NO: 235722 - DNA, 384 bp, Glycine max
gggatgagcatcctaagttgtggatggagctacatgtcaaaaacagggagaagcttctcacatcccttcgtcaacacctctccgactcttctcgttctctccatggcttcgtcctccttcaaggtggcgaggagcaaacgcgttacgacaccgatcacttggagctcttcaggcaagagagttacttcgcttacttgtttggagtcatagagcctggattctatgcagctattgacgttgcaactgggaattctatcctatttgctcctaggttaccttctgagtatgctgtttggttgggggagattaagccactctcctactttaaggaacactacatggttaccacgtgttgcttctcagatgaaattgaaagtgtattgc

SEQ ID NO: 235723 - DNA, 377 bp, Glycine max
ggtgagttgagaggatcgtgagaggggcagtagccgagattccgtgagttgcaaaaatgaagacgattctttccaccgagaccatgaacatcccggacggcgtgagcatcaaagttcatgccaaggtcatcgaagttgagggcccccgcggaaaattggtgcgagacttcaagcatttgaatctcgattttcagctcattactgacgaaaacggtaaaagaaagctgaaaatcgacgcgtggtttggttctcggaaaacatccgccgccattcgcaccgccttgagccacgtggagaatcttatcaccggcgtcaccaagggctaccgctacaaaatgaggttcgtttatgcccattttcccatcaacgcaagcatc

SEQ ID NO: 235724 - DNA, 299 bp, Glycine max
gaaggttctaatttataatatgggagtggaggagaacacccctaactccatttctaggtcagaatgccacgcggaacaaagcagcaacagaatcaaggcgcatgtgctcttgagtgtctacgatctcacccctgtcaataggtacgtctagtgggttgggtttggcatccttcactctggcattgaagtacatggtaacgagtatgggtttggagcccatgacttccagctagtggagtttttgaagtggagccaaggaaatgccctggattcatatagagatgttccagctctttggg

SEQ ID NO: 235725 - DNA, 281 bp, Glycine max
cacatacacatacattgtagtatcacttttgtctcggaatttgttcttttgaggtagggcaagcttaaaggttgcatgtgtgggtttgatgtgcatggctgtgatgagtgcaccaatgatggtgcaagccgtgtcatgcaatgatgtttctgtaaacctagcaccgtgcctatcttacctgatgcacggtggatatgttccagaatcgtgctgtagcggagtgaggaacattctgggttctgccagcaccacctttgacaaacaaaccgtgtgcaaatgtc

SEQ ID NO: 235726 - DNA, 298 bp, Glycine max
ggagcaaaaccctaatccctatttttcttcctcagtagtgtcatttacgcttctcttctctgcagcaactatgcctaaccctaaggtcgtcttcgacatgaccatcggcggtcaatctgctggccgcatcgtgatggagctctacgccgacgtcactccccgcaccgccgagaacttccgcgcgctttgcaccggcgagaagggcgtagggcggagcggcaatcccctccactacaatggctcgtcattccaccgcgtgatcccgagtttcatgtgtcacggtggcgacttcaccgcc

SEQ ID NO: 235727 - DNA, 176 bp, Glycine max
gaatttgggaattattgctcccatcactaatggattcattgtcacgtcatcacattagtatgggtggggcctatctctggacgggacggtcaccgctgcgacatttggaccggctgtcatgagatgcacctggacaaatcaatggatgtattgggtcagttcacccaacggttcat

SEQ ID NO: 235728 - DNA, 352 bp, Glycine max
ggtgcaagagtttgttgtgagctataagctagtttatcgtgaggagaatatgaagttgtttgttttctttgttgctgcagtagttttgggagcatggccatgccatggcgcaggctaccaaaggttccctctccgaatgaaaactggctatggtgagcgttcttcggaggtaaaatgcgcacgttttaggcttgctgtggaagcacacaagatccgagcctttaaaaccattcctgaagagtgcgttgaaccaacaaaggactacattaatggcgaacactttagatcagactctaaaacagttaaccaacaagctttcttttatgccagtgaacgccacatccaacacaac

SEQ ID NO: 235729 - DNA, 387 bp, Glycine max
gaaggtgcaagagtttgttgtgagctataagctagtttatcgtgaggagaatatgaagttgtttgttttctttgttgctgcagtagttttggtagcatggccatgccatggcgcaggctaccaaaggttccctctccgaatgaaaactggctatggtgagcgttcttcggaggtaaaatgcgcaagttttaggcttgctgtggaagcacacaacatccgagcctttaaaaccattcctgaagagtgcgttgaaccaacaaaggactacattaatggcgaacaatttagatcagactctaaaacagttaaccaacaagctttcttttatgctagtgaacgcgaagtccatcacaacgacatatttatattcggcatagattacaccgt

SEQ ID NO: 235730 - DNA, 274 bp, Glycine max
ggagcgaagaagatattagggtttttgagtgcggtgcggcgatcctagcactctcgtctgcagctttcgccgacagcttcattcaccatggctgagcaaaccgagaaggcttttttgaaacaaccaaaagtgtttctcagctcgaagaaagactgggaagggaaagagacccggaaagggtgggaaccgcttttgggaatccattgggcttggatttaagactcccagggaagccatcgaaggaacctacattgacaagaagtgccccttcact

SEQ ID NO: 235731 - DNA, 310 bp, Glycine max
gactcacacctaccttgacacattttaaatgtagccactactaactttatcataccactcactcttacatcattgtccctaaatggcggaaaccctgatccaaatcggcgtggttgggcgcgccgacatagcccggaaggtctcccgcgccatcacgctcgcccccaacgccgccctctgcgccgtggcgagccgctctcacgacaaggcagccgcattcgccgccgccaacggcttccctctctcagccaaagtgtacggctcctacgagtcccttctggaagaccccgacgtgggcgccgtctaaatg

SEQ ID NO: 235732 - DNA, 358 bp, Glycine max
ggcacaagtgagtttgttgatcgagataactagaaacagtgtgatgaagatcaaggtccttgttttcttcgttgctacaattttggtagcatggcaatgccatgcgtacgataggttccctctccgaatgaacactggctatggtgcccgtactccggaggtgaaatgcgcaagttggaggcttgctgtggaagcacacaacatctttggctttgagaccattcctgaagagtgcgttgaagcaacaaaggaatacatccatggcgaacaatatagagtagactccaaaacagttaaccaacaagcgtacttttatgccacagacctcgaggtccatcccaaggacacatttgtgttc

SEQ ID NO: 235733 - DNA, 384 bp, Glycine max
ggcatcaattcaaaatatatcatcaattataagcatgggtttgtggaacacaacgaatgcagtgtcttgccgctttcacaagtttggtgatgaccaaaagaatctggtcttccaaggtgatgccacgtcttcttccaggggcatagaactcacaaagttagacggtggaggaaaaccagtgggtggcagtgtggggagagtgttatactcttctccagtgcacctttgggaaagctctacagtggtcgcaagctttgaaaccgacttcaccttttccatctcatcagactctactactccaggtgatggccttgccttcttcattgcaccatttgacactaaaatccctccaaactctggtgggagcaaccttggactcttccc

SEQ ID NO: 235734 - DNA, 385 bp, Glycine max
ggaggagaatatgaagttgtttgttttctttgttgctgcagtagttttggtagcatggccatgccatggcgcaggctaccaaagggtccctctccgaatgaaaactggctatggtgagcgttcttcggaggtaaaatgcgcaagttttacgcttgctgtggaagcacacaacatccgagcctttaaaaccattcctgaacagtgcgttgaaccaacaaacgactacattaatggcgaccaatttagatcagactctaaaacagttaccaacaagctttcttttatgctagtgaacgccaactccatcacaacgatcatatttatattcggcattaataacaccgttctctctaatatcccaatctatgaaaaacattgatattgg

SEQ ID NO: 235735 - DNA, 327 bp, Glycine max
gacggttttgcgctgttgttgctgctcatcctccgtaacctccgagctctgcaccgtggaacgaagccatggggaagacacatggaatgggatctgctcgcaagctcaagtcccaccgcaggaggcaaaggtgggctgagaagtcatacaagaaatcacatcttggaaatgaatggaagaaaccttttgttggttcatcccatgccaagggaattgtccttgaaaagataggtattgaggctaagcagcccaactctgccattcgtaagtgtgccagggttcaacttatcacgaatgggaagaagattgccgcttttgtccctaatg

SEQ ID NO: 235736 - DNA, 292 bp, Glycine max
gatcgcatttcatagcactcaccctcattaccaacacgaaagcatagccaaaagcagttttcgaagtcgctgattttcctaatggctccgggagggggagaaaagaagccggcggagaagaagccaacggcggagaaagcaccggcggagcaagaagccgaaggcggagaggaaaatctccaacgagggatggagctagaagaacaagaagcgcacgaagaagaacgtggagacctacaagatctacatcttcaacgtcctcaagcaggttcaacccgacattgggaagttc

SEQ ID NO: 235737 - DNA, 375 bp, Glycine max
cgcgtcaagttttcttcgttgctacaattttggtagcatggcaatgccatgcgtacgatatgttccctctccgaatgaacagtgggtatggtgcgagtactccggaggtgaaatgcgcaaggttggaggcttgctgtggaaacacacaacatctttggctttgagaccattcctgaagagtgcgttgaagcaacagaggaatacatccatggacaacaatatagatcagagtccaaaacagttaagcaacaagcttacttttatgccatagacctcgaagtccatcgcaaggacacatttgtgttcagtatatatggcaccgtactctctaatattcgatactaccaaaaacatggatatggggtggaaaaattt

SEQ ID NO: 235738 - DNA, 363 bp, Glycine max
ggcacaagtgagtttgttgatcgagataactagaatcagtgtgatgaaaatgaaggtccttgttttcttcgttgctacaattttggtagcatggcaatgccatgcgtacgatatgttccctctccgaatgaacactggctatggtgcccgtactccggaggtgaaatgcgcaagttggaggcttgctgtggaagcacacaacatctttggctttgagaccattcctgaagagtgcgttgaagcaacaaaggaatacatccatggcgaacaatatacatcagactccaacacagttaaccaacaagcttacttttatgccacagacctcgatgtccatcccactgacacatttgtgttcagtat

SEQ ID NO: 235739 - DNA, 387 bp, Glycine max
ggtgcttcgtctcagatcattctgcgcaggtaagacagagagaaagaactgacctcagcggcggcggcggcggcaacagaagaggagccaccaccacacacaatgggtcgcgtgagaacaaaaacggtgaagaaatcctcccgccaggtgattgagcgttactactcgcgcatgaccctcgacttccacacaaacacaaagcttctcgaagaagtggccatcatcccttccacgaggctgcggaacaagatcgcgggtttctccacgcatctcatgaagcgcatccagaagggtcccgttcgcggcatctccctcaagctccagtaggaagagcgcgagccccgcatggacttcgtccccgacgtctccgccatcaacaccgaccaa

SEQ ID NO: 235740 - DNA, 339 bp, Glycine max
ggaaagttgatctcactaagcaatgggtattatatcacagccccagctggtgccatttccgttattgatgaatgggaggtacacaacatgcaccattccttggacgctcccttccgacgatccaagcattcgcacacccatcgagctatcttggcttaatctcttcatcaacacaatccccaccttcaagaagcatgctgagagtgatacttctgttcctgatgctgtaaacaaaactgaagaatttgctcatacgtttgctaaaagaattgactatttcatgatagatcctgcatttcaatgcgtgcgtcttgacgtccttcttccatgcagacttcg

SEQ ID NO: 235741 - DNA, 368 bp, Glycine max; identical to SEQ ID NO: 235666

SEQ ID NO: 235742 - DNA, 382 bp, Glycine max
ggcacaagtttgttgagatagctagaagcaataagatgaaaatgaaagtgcttgttttgtttgttgctacagttttggtagcatatgaatgccatggctcagactaccagaagttccctctccaaatgaaaactgggtttggtgggcaatacagcaatgaggtggcatgtgccagttggaggcttggcgtggaagcaaacaacgtagtcaagtggcaaactgttcctgcagcttgcggagagtacatagctgactacgttctaggagaccaatatagatcagattccaaaacagttaaccaacaagcttatttctatgctaaatccctcaaactcaccaacagagatgtctttgtcttggacgttgacgacaactagtctct

SEQ ID NO: 235743 - DNA, 359 bp, Glycine max
agacacaaaacttgtgtgcctttctcccaagttaattgtgtggaggagttacaaatctttctaaaccacactgcaatacaccaaaacaatggcagataaagatgctttttgctacccttatcatgttcatgattgcacatcaccacaagagaatttgcccaataaagggccttttcattcagaaatgcttcccaaaaattctaggaaaggagctggttacacatcagagaagccacttgatgcaaagacactgagacgtttagctcaaaacagagaagctgcaaggaaaagccgtctcaggaaaaaggcttatgtgcagcaactagagtcaagtagattaaggctcacacaccttgaac

SEQ ID NO: 235744 - DNA, 328 bp, Glycine max
gatcacattccaaaacacaaacacatacattgtagtatcagttttgtctcggaatttgatcttttgagttatggcaagcttaaatgttgcatgtgtggttttgatgtgcatggctgtgatgagtgcaccactgatggtgcatgccgtgtcatgcaatgatgtttctgtgaacctagcaccgtgcctatcttacctgatgcagggtggagatgttccagaatcgtgctgtacccgagtgatgaacattctgggttctgccagcaccagctttgacaaacaaaccgtgtgcaaatgtcttcagcaagctgctgataactatggcatcaac

SEQ ID NO: 235745 - DNA, 322 bp, Glycine max
ggcacaagtgagtttgttgatcgaagtaactagaaacagtgtgatgaaaatgaaggtccttgaattcttcgttgctacaattttggtagcatggcaatgccatgcgtaccatatgttccctctcagaatgaacactggctatggtgcccgtactccggaggtgacatgcgcaagttgagggcttgctgtggaagcagacaacatctttggctttgagaccattcctgaagagtgcgttgatgcaacacatgaatagatccatggctaacaatatagataagggccacaacagttaaccaacaggcgtaggtttatgccagag

SEQ ID NO: 235746 - DNA, 275 bp, Glycine max
gcacaagtgagtttgttgatcgagataactagaaacagtgtgatgaagagtaaggtccttgttttcttcgttgctacaattttggaaggatggcaatgccatgcgtacgatatgttccctctccgaatgaacactggctatggtggccgtactccggaggtgagatgcgcaagttggacgcttgctgtgcaagcacacaacatctttgggtttgagaccattcctgaagagtgcgttgaagcaacaaatgaagacatccatggcgaacagtatag

SEQ ID NO: 235747 - DNA, 376 bp, Glycine max
ggcagcgcttgatttgaggccaggcaagccccactcaaccaccacacctctcctcgttcacgctacccctttctgctcttcttcgacctttcaagttttaaaagtataaagatggcagagacattcctatttacctcagagtcggtgaacgagggacaccctgacaagctctgcgaccaaatctccgatgctgtcctcgacgcttgcctcgagcatgacccagacagcaaagttgcctgcgaaacatgcaccagaaccaacttggtcatggtcttcggagaaatcacgaccaaggccaacgttgactacgagaagatagtgcgtgacacctgcatgaacatcggattcgtctcaaatgatgtgggactggatgccg

SEQ ID NO: 235748 - DNA, 374 bp, Glycine max
ggcacaagtgagtttgttgatcgagataactagaaacagtgtgatgaaaatgaaggtccttgttttcttcgttgctacaattttggtagcatggcaatgccatgcgtacgatatgttccctctccgaatgaacactggctatggtgcccgtactccggaggtgaaatgcgcaagttggaggcttgctgtggaagcacacaacatctttggctttgagaccattcctgaagagtgcgttgaagcaacagaggaatacatccatggcgaacaatatagatcagactccagaacagttaaccaacaagcttacttttatgccagagacctcgaagtccatcccaaggacacatttgtgttcagtatatatggcaccg

SEQ ID NO: 235749 - DNA, 323 bp, Glycine max
tctgttgggtgcagttggtgcaatagcagcgcggattctaggcgtggctgggctgatccctcaggagacggcactcccattggtcagaactggtgtgttcccacctgcagggacctacaagtactgggcagactcctacacactgttcgtgtttgagatggaactgatgggatttgcagagcacagtagattccaagactgggccaaaccaggctctatgggcaaacaatacttcctaggactagacaagggtcctggcggttctggtgaaccagcttatccacggggacctttcttcaacccactaggctttggtaaggatg

SEQ ID NO: 235750 - DNA, 325 bp, Glycine max
gagtgcacaagtgagtttgttgatcgagataactagaaacagtgtgatgaaaatgaagggccttgttttcgtcgttgctacaattttggtagcatgggaatgccatgcgtacgatatgttccctctccgaatgaacactgggtatggtgcccgtactccggaggtgaaatgcgcaagttggaggcttgctgtggaagcacacaacatctttggctttgagaccattcctgaagaatgcgttgaagcaacaaaggaatacatccatggcgaacaatatagatcagactccagaacagttagccaacaagcttacttttatgccaga

SEQ ID NO: 235751 - DNA, 282 bp, Glycine max
gactcatttttccaatattcacacaatacctctatcttgtgccacttatatagtacgtggagcctagtgagacagaccatggtttccgaaacaaaccagtccaagaatgtgtgtgtaattggaactggaccatcacggctagtggcagcgagggggctcccagcacaaggtcagaacgtggttctgttggagcagaaccatgatattggaggtcaatggctagataacccaaatgtacaagacgaggaccctttgggaagagacccttggctaaaggtgcat

SEQ ID NO: 235752 - DNA, 263 bp, Glycine max
ggcacaagtgagtttgttgatcgagataactagaaagagtgtgatgaacgtgaaggtccttgttttcttcgttgcggcaattttggtggcatggcagtgccatgcgtacgatatgttccgtctccgaatgaacactggcgatggtgcccgtactcgggaggtgaaatgcgcacgttggaggcttgctgtcgcagcacacaacatctttggctttcggaccattcctgaagagtgcattgaagcaacaaaggaatacatccatg

SEQ ID NO: 235753 - DNA, 84 bp, Glycine max
ggcacaagtgagtttgttgatcgagataactagaaacagtgtgatcgagatgaaggtccgtgttttcttcgttgctacaatttt

SEQ ID NO: 235754 - DNA, 310 bp, Glycine max
gacactaaacaagttaaaagaagagcatcactgaactaacaaagcaaccctatgtcgaaggtggtttgtgtcaccggagccagcggcgccatcggatcatgggtggtcctactcctcctccagcgtggttacaccgtccatgccaccgtccaagatatcaaggatgaaaatgagacaaaccatttggaggaaatggaaggaccaaggggccaccccaatttttttgaaatggttctccttgacaccaacccaatgccgctggcataaagggttgttcccgcgtaatccaccttgcatgtcctaacatcat

SEQ ID NO: 235755 - DNA, 367 bp, Glycine max
  unsure (1)..(367): unsure at all n locations
gagagctgcaagggatcaactgaggagagtgagagaaaagagaagagaagatgacaacacgcttcaagagcaacaggaagaagaggggccacgtcagcgctggccacggtcgaatcggaaagcacaggaagcaccctggatgacgcggtaacgccggaggcatgcaccaccacaggatcctcttcgacaaataccaccctgggttcttcggcaaggtaggaatgcgctattttcacaagcttcgcaacaaattctactctccgatcctcaacatcgacaagctgtggtccctggtcacgcaagaagtgaaggacaaggcctccaaggagaacaacgcnccgctcatcgacgtcacgcagttcgggta

SEQ ID NO: 235756 - DNA, 337 bp, Glycine max
gacacaccgtttgttctattcttaactcaacttctgctacccactctcttcttcgagggccaaccacgcgtttctctacagtcatgggcaaggtcaggatcggaatcaacgggtttggcagaattgggcgtttgggtgccagagtcgctctgcggagagacgatgtggagctcgttgccgttaacgagcctttcattaccaccggttacatgacatacatgtttaaatacgacagtgttcacggacactggaagcatcacgatgtcaccgttaacgacgagaagacccttctcttcggtagcaagccagtcaggggggtgtggacacaggaaccctg

SEQ ID NO: 235757 - DNA, 291 bp, Glycine max
ggcacaagtgagtttgttgatcgagataactagaaacagtgtgatgaaaatgaaggtccgtgtgttcttcggtgctacaattttggtagcatggcaaagccatgcgtacgatatgttccctctccgaatgagcactggctatggtgcccgtacaccggaggtgaaatgcgcacgttggaggcttgctgtggaagcacacaacatctttggctttgagaccattcctgaagagtgtgttgaagcaacaaaggaatacatccatggcgaacaatatagatcagactccaaggc

SEQ ID NO: 235758 - DNA, 284 bp, Glycine max
ggctcttctctctctctaaaaatctccggcggtccttcagtccattttcctttccagttcgggtctgatacgaatagatttcgtcagtgttgaaatcacgagaaattcatggctgcgccaccgggaagagctcgtgcggattacgattatctcagaaaagttctcttgattggcgatagtggtgtcgggaagagttgccttcgtctacgattctctgatggttctttcacagactaggttcatcacaactataggcattgattttaggataagaaccattgagc

SEQ ID NO: 235759 - DNA, 379 bp, Glycine max
gattggacacattcttcagcgactgcgtttttggatcggaacctcttctgcggcgtatcaatgggacactccaacgtttgggggtcggacccaaaaaactacggtcctggttctcgcacttgccgtgtgtgtgggaatccacatggactgatcaggaactatggccttatgtgctgcatgcagtgcttccgtaccaatgccaacgaaattggcttcatcaagtatcgctaacagagcagttgtcaactacggaccaatattgtgttctggcactatgatgttttgaggatgttatgtttgaagaaacttgagaccttcatttttcatctaactaactatcagacgtaatttgtggtactaagaatacttttagataaat

SEQ ID NO: 235760 - DNA, 357 bp, Glycine max
gactcgcagttgtattgttgaacaagggtttctctgtctgcttcttcactttctcgcgtttcaatcgagaccaaaacaaaaacatgggcagaaaattcttcgtcggtggcaactggaaatgcaatgggaccactgaggaggtaaagaagattgttactactttgaatgaggctgaagtccctggagaagatgtcgtagaagttgttgtgagccctccttttgtgttccttcctgttgtaaaaagtttgctgcgccctgatttccatgtttcggcacaaaactgttgggttcgcaaaggtggtgcttataccggtgaggttagtgctgaaatgcttgttaatttgggaattccgtggg

SEQ ID NO: 235761 - DNA, 275 bp, Glycine max
gaaagtgcaagagtttgttgtgagctataagctagtttatcgtgaggagaatatgaaagtgtttgttttcggtggtgctgcagtagttttggtagcatggccatgccatggcgcaggctaccaaatgttccctctccgaatgaaaactggctatggtgagcgttcttcggaggtaaaatgcgcaggttttaggcttgctgtggaagcacacagcatccgagcctttaaaaccattcctgaagaatgcgttgaaccaacagaggactacattaatg

SEQ ID NO: 235762 - DNA, 277 bp, Glycine max
gaccatcatctacaacgcctcgaatccacacagttctactctacgctctgaagcctctctctctctctctctcgatgtatcatggctgtgcccaatcaggcagagcgtggattagcctagttgcaaactcgtgatcgtcggtggaagcggtacaggaaagacagcgttcgtgagaagggatcttaccggtgaattcgagaagaagtacgaaccgaccattggagtggaggttcacccattggatttcttcacagactgcggaaagattcgcttctac

SEQ ID NO: 235763 - DNA, 334 bp, Glycine max
ggcatcaattcaaaatatatcatcaattataagcatcggtttgtggaacacagcgaatgcagtgtcttgccgctttgacaagtttggtgatgaccaagagaatcgggtcttccaaggtgagtgcacgtcttcttcgagtggcatagaagtcacaaggttagacggtggaggaaaaccagtgggtggcagtgtggggagagtgttatactcttctccagtgcacctttgggaaagctctacagtgatcgcaagctttgggatcgactttaccttttccatctcagcagactctagtactccaggtgatggccttgccttcgtcattgcaccattt

SEQ ID NO: 235764 - DNA, 374 bp, Glycine max
cttctttttggtgctacttaccaatgcacactcgaccgataccgtttccttcaccttcaacaagttcaacccagtccaaccagggattgggctccaaaaagatgctagtatttcatcctctggggtgttacaactcaccaaagttggcaccaacggcgtgcccacctcgggatctctcggtcgtgccctttacgctgccccaatccagatgtgggacagcgatacccggcaaggtaaccagctgggctacatcctttaaattcaacattttcgcatccataatctcaaactcaagtgacgcgcttgcactcttcctagtaaccgttccggtcccaagcccaattctgatatggaattcttggtcctttcaacat

SEQ ID NO: 235765 - DNA, 359 bp, Glycine max
ggcacaagtgagtttgttgatcgagataactagaaacagtgtgatgaaaatgaaggtccttgttttcttcgttgctacaattttggtagcatggcaatgccatgcgtacgatatgttccctctccgaatgaacactggctatggtgcccgtactccggaggtgaaatgcgcaagttggaggcttgctgtggaagcacacaacatctttggctttgagaccattcctgaagagtgcgttgaagcaacaaaggaatacatccatggcgaacaatatagatcagactccaaaacaagttaaccaacaagcttacttttaagccatagacctccaagtccatcccaaggacacatttgtgttc

SEQ ID NO: 235766 - DNA, 435 bp, Glycine max
aagtcccgggcagacccacacgtcaaagaaaacgacagaagggggagattcatgcctgagaaagggtctgctgagtatgcagctttggctaagaaccctgagaaggagtttttgaagactattactggcaagaaggagacggtcattgaccttacaattatagaaatcttgtcaaggcacacatctgatgagttctaccttggggagagagatggtggtgactattggacttctgatgctggtccactacaggccttcaagaggtttggaaagaagcttcaagagattgaacaaaagcttatacagaagaacaaggacgagacgttgagaaaccgcagtgggccggctaaaatgccttacactttgctctatccttctagtgaggagggattgactttcagaggaattcccaacagtatctccatctacgggctc

SEQ ID NO: 235767 - DNA, 318 bp, Glycine max
  unsure (1)..(318): unsure at all n locations
aggggcaagtgcagcagcagaaagtgcggtaggctcatccgagaacggaagcagcaatggagatcgatctcaaggccggaggtaaaagcaaaaaaaccaaaagaacagcaaccaagtccaatgatatctatcttaaactcttggtcaagctttatcgcttccttgttcggagaactggcagcaaattcaatgccgttatactcaagagattgttcatgagcaaggttaacaagcccccattgtctttgtcaaggttgattaagtataccaaggggaangaagataagattgctgtggtggtaagcaatataaccgatg

SEQ ID NO: 235768 - DNA, 249 bp, Glycine max
gaggctgagcttcttgcagctgctagtcagcccctcgctgacgatgatgaggaatcttttgagtagagggctgtgtgtctgagtgggctggtagttgtatggtactgtatgtgctgttggaggttgtagtgttgacatttttggatgcgaattcgaggatctgaatcaattatcatcgagatttgttgcttaaatttagaacctcagtttaatatatcaacgatgggcgttaaaaacgatgaggatttg

SEQ ID NO: 235769 - DNA, 261 bp, Glycine max
ggcacaagtgagtttgttgatcgagataactagaaacagtgtgatgaaaagagaggtccttgtgttcttcgttgctacaattttggtaacatggcaatgccatgcgtacgatatgttccctctccgaatgaacactggctatggtgcccgtactccggacgtgagatgcgcaagttggaggcttgctgtggaagcacacaacaactttggctttgagaccattcctgaagagtgcgttgaagcaacaaaggaatacatcca

SEQ ID NO: 235770 - DNA, 384 bp, Glycine max
gacacatttgtttgtatagatagatacaatcagatgaatatgaatgtgcttgctttgtttgttgctagagttttggtagcatagggatgccatggatcacacaaccaaacattccctctctatctgaatactgggtttggttggcaatacatcaatgaagtgggatgtatcagttagttgcttggcttgcgagcaaacaacgtactcaggtggcagactgttcctgcatcttgcttacagtacatagctaactacgttctatgaaaccaatatatatcaatctccatcccagttagtcaacaagcttatttctatccaaacatcctcactctcactaacaaacatatctctgtcttgcacgtagattacactactctctctaat

SEQ ID NO: 235771 - DNA, 362 bp, Glycine max
gaaggtgcaagagtttgttgtgagctataagctagtttatcgtgaggagaatatgaagttgtttgttttctttgttgctgcagtagttgtggtagcatggccatgccatggcgcatgctaccaaaggttccctctccgaatgaaaactggctatggtgagcgttcttcggaggtaaaatgcgcaagttttaggcttgctgtggaagcacacaacatccgagcctttaaaaccattcctgaagagtgcgttgaaccaacacaggactacattaatggcgaacaatttagatcagactctacaacagtttaccaacaacctttcttttatgccagtgaacgcgaagtcaatcacaacgacatat

SEQ ID NO: 235772 - DNA, 357 bp, Glycine max
acccacgagtcaatacagctgtcagtacagctgagaaaggggcacaaatgggtttattgatcaatatgtcgataaacattgtgataaacattatggtccttgttttcgtcgttgctatcatcgtggcagcattttagtgacaatcgtactacaattcctctcacagattcactctcggattgggtactggtaatcgtgccgttactccggcagtttaatgcgctgctttggagccacatatcatcttaggctttagcattattcttgaaaagagtcttgaagcatgagttgaataaatccatggataccaatatagataagactccatatcagtctccaaacaattttacttttatg

SEQ ID NO: 235773 - DNA, 354 bp, Glycine max
gatatcagaagctcagacctagggatttcggccgtttgctccccaaaaaggaaagaagcagattctgtcctttgaaatcaacaagaaaagatgtcaggtgaagaggtagctgttgcagttgaggtacctgctacttcaattccaggtgagccaatggacatcatgactgctctacagcttgtgctgagaaaatctctggcctatggtggtcttgcacgaggtcttcatgaaggtgccaaggtgatcgagaagcatgctgcacagctctgtgttctagcagaagattgtgaccaacctgattatgtgaaactggtgaaggctctttgtgcagaacacaatgttagccttttgaca

SEQ ID NO: 235774 - DNA, 132 bp, Glycine max
gaacgtgcaagagtttgttgtgagctataagctagtttaccgtgaggagaatatgaagttgtttgttttctttgttgctgaagtatttttgggggaatgggcatgcaatggcgcaggttaccaaaggttccc

SEQ ID NO: 235775 - DNA, 396 bp, Glycine max
  unsure (1)..(396): unsure at all n locations
ggacacactcatcttcttcttcttctttttggttttctctctcacagtgagtcagcagcaatggactccatttccccaagagctcaagagaataataacactacggcgaaggccatgatgacgagatccgaaccagcgaacccatacccgacaacgttcgtccaagctgacacatcctccttcaagcaagtagtccaaatgctaaccggctcctcggagacagcgaaacaagcagccgccggcggctcctcgaaaccttcgaactcgatcccacccatgaaatccatacccaacaaaaagcatttttctaagctctacgagcgcagagcaaactccctgaacctcaagaacatcaaccccctcacctcgtttttctcganacacaacactaattcc

SEQ ID NO: 235776 - DNA, 402 bp, Glycine max
agacgacagaagggctcttggttggtgtattgaatgggtatggctgttgaaagcttttgcctttcttgtttgaatgattaaactagttctaatcgtttcagatgtttactgtgatggcattgggggggatcttatgattgtctgttgatgggttttgcagcttcaggcatattttcttgttcttgatgacattatggataactctcacacacgccgtggtcagccatgctggtttagagtgcccaaggtttgtagaaagaataacatgtgccattttgttatctttatgctactgttgcgataaagcaattatctccaatttaggtaagggtgtaggttggaatgatttcagccaatgatggagttctactaagaaaccatattccacgtttccttaaaaag

SEQ ID NO: 235777 - DNA, 303 bp, Glycine max
ggttttccacattcatattttccgtgcgtttccctttcattttccctcactttctcgctcgccaaacgcccctctctctcctccaatgggcgaccagctcaccgacgaccagatcgccgagttcaaggaggccttcagcctcttcgacaaggacggcgatggttgtattactactaaggaacttgggactgtgatgcggtcactagggcaaaacccaactgaggcagaactgcaggatatgattaatgaggttgatgctgatggcaatggaaccaaccaggtcccagagttcctcaacctgat

SEQ ID NO: 235778 - DNA, 366 bp, Glycine max
ggcacaagtgagtttgttgatcgagataactagaaacagtgtgatgaaaatgaaggtccttgttttcttcgttgctacaattttggtagcatggcaatgccatgcgtacgatatgttccctctccgaatgaacactggctatggtgcccgtactccggaggtgaaatgcgcaagttggaggcttgctgtggaagcacacgacatctttggctttgagaccattcctgaagagtgcgttgaagcaacaaaggaatacatccatggcgaacaatatagatcagactccaaaacagttaaccaacaagcttacttttatgccagagacctcgaagtccatcccaacgacacatttgtgttcagtataga

SEQ ID NO: 235779 - DNA, 351 bp, Glycine max
ggagagaagagataagagatatggatccagacgcgttggcaaaggcattcgtggagcactactacagcaccttcgacaccaaccggaacggtttaacgaatctgtatcaggagggttccatgctgaccttcgaagggcagaagatccagggcgcttccagcatcgtcgctaagctcacttccctccctttccaacagtgccaacactccatctccaccgtcgactgccagccctccggtgtcaacgctggcatgcttgtcattgtcaacgggaatcctctagctcgctggcgaactagccactctcaagttcatccagctgttccatttgataccaacgcctcagggaaac

SEQ ID NO: 235780 - DNA, 385 bp, Glycine max; identical to SEQ ID NO: 235632

SEQ ID NO: 235781 - DNA, 373 bp, Glycine max
ggaacctttgcattctattcattcaagattcagcaagtgcgttttggaagcagagaccgaaatacttcgagatggcccgtacaaagcaaactgctcgtaagtcaactggaggaaaagctcccaggaagcagcttgcaaccaatgctgcacgtaagtctgcaccaacaactggtggtgtgaagaagcctcatcgttatcgccctggaactgttgctcctcgcgagattaggaaataccacaagagcactgagctcctaatcacgaagcttcccttccaaaagttgggtcctgaaaattgcccaggatttcaagactgatctgcgtttccagagccatgctgtgcctgcattgcaagaagctgcctaggcataac

SEQ ID NO: 235782 - DNA, 352 bp, Glycine max
gcgtccgtgctactacaagacgacaacaggggacggatgagtttgatgctagacattcctgaatcaactgttacgatatggaaggtccttgctttcttcgtcgctacgacttttgcagcatggaatggccatgcgtcagatgggtgccctccccccagtgaacaaccggttatggtgcgcgtaatctagatgtgcaatacgcactttgggtgcttgcagtcctcaccgacaacatccttggactggtgatcattcctgaattatgagttgacacaacagcagtgtacacccatggaggacacttcctatccaaatgttggatagttaacctgcacacttacttttaagcgat

SEQ ID NO: 235783 - DNA, 378 bp, Glycine max
ggaataacgctaacctgaagaaaagagtgtaagagtaggaaacgagattgacgaaccctaagctgaaagaagaaaaaatgtctggcgtgaagagagcactgaggcagttcaccttcggaaccggcaagaccgccggtcgcaactcggcggggcgcataacgtccttccaccgcggcggcggagccaagcgcttgcaacgaaccgtcgatcacaaacggaataccgcttcttctctcggcgtcgtcgaaaggatcgagtacgaccctaaccgctcctccaaaatcgccctcgttcgctggatcgaaggcgtccatcaccgtcgccgccgcgctgcctccgccaacgccgcttcgcccaagctcctccatctcgattccg

SEQ ID NO: 235784 - DNA, 331 bp, Glycine max
ggtaataccgtgtttggatttcgcgaaggggaaggaagaaacgccgaaaaagcaatgttgcgacgcagcaacgtccataaaggagagcaacccagagtgcctctgctacatcattgaagagacccacaagggtagcccacaggttaaaagcttgggcattcaagaggccaagctgcttcagctcccttctgtttgtaacgtcaaaaacgccagcatcaccaactgtcctaagcttttgggtctatccccaagttcccctgatgctgctatcttcacatcaaattctttcaagacaactccttctgcacctgcaacctcaaactcaaaaact

SEQ ID NO: 235785 - DNA, 365 bp, Glycine max
ggaacacaaacagcagcgtcttggtttgtgagagagacagaggcacagagagaaaatggtttcggggtcaggaatctgcgcgaagagggtagttgtggacgcgcggcaccacatgctggggaggctggcatcgatcgtggcgaaggaacttctgaatgggcagaaggtggtggtggtgcgctgcgaggagatttgcatctccggtgggctcgtcaggcagaagatgaagtacttgcgtttcctccgcaagcgcatgaacaccaagccctctcacggccccatccatttccgtgcacccggcaagatcttctggcgcaccgctcgtgggatgataccacacaagacacagcgcggggaagctgctc

SEQ ID NO: 235786 - DNA, 268 bp, Glycine max
ggaaacgaagaagccctaactacgcacgcattcgtgagaaaactcaatattcgtcgctcatggcactctcttctcgtctcttttccaaatccagattgatctatggcagtcaaatacttctacaaaaggagcatgctattccagttcgtcactttgctaaagagtctgcccctcctgcccttaagggagacgagatgctgaagaaaatttttgggggaggtgaagaacaaatttgagaccgccataggaatattaaagaaggagaaaa

SEQ ID NO: 235787 - DNA, 383 bp, Glycine max
ggtgcacaagtgagtttgttgatcgagataactagaaacagtgtgatgaaaatgaaggtccttgttttcttcgttgctacaattttggtagcatggcaatgccatgcgtacgatatgttccctctccgaatgaacactggctatggtgcccgtactccggaggtgaaatgcgcaagttggaggcttgctgtggaagcacacaacatccgagcctttaaaaccattcctgaagagtgcgttgaaccaacaaaggactgcattaatggcgaacaatttagatcagactctaaaacagttaaccaacaagctttcttttatgctagtgaacgcgaagtccatcacaacgacatatttatattcggcatagataacaccgtactctc

SEQ ID NO: 235788 - DNA, 388 bp, Glycine max
gacaagtgagtttgttgatcgagataactagaaacagtgtgatgaaaatgaaggtccttgttttcttcgttgctacaattttggtagcatggcaatgccatgcgtacgatatgttccctctccgaatgaacactggctatggtgcccgtactccggaggtgaaatgcgcaagttggaggcttgctgtggaagcacacaacatctttggctttgagaccattcctgaagagtgcgttgaagcaacaaaggaatacatccatggcgaacaatatagatcagactccaaaacagttaaccaacaagcttacttttatgccagagacctcgaagtccatcccaaggacacatttgtgttcagtatagatggcactgtactctctaatattcc

SEQ ID NO: 235789 - DNA, 382 bp, Glycine max; identical to SEQ ID NO: 235342

SEQ ID NO: 235790 - DNA, 384 bp, Glycine max
aggggcacaagtttgttgagatagctagaggcaataagatgaaaatgaaagtgcttgttttgtttgttgctacagttttggtagcatatggatgccatggctcagactaccagaagttccctctccaaatgaaaactgggtttggtgggcaatacagcaatgaagtggcatgtgccagttggacgcttggcgtggaagcaaacaacgtagtcaagtggcaaactgttcctgcagcttgcggagagtacatagctgactacgttctacgagaccaatatagatcagattccaaaacagttaaccaataagcttatttctatgctaaatccctcaaactcaccaacaaagatgtcattgtcatggacgttgacgacactactctct

SEQ ID NO: 235791 - DNA, 389 bp, Glycine max
ggaaaatacggaacttgaaaccctcccaatataaaccctcgcttccttgtgtactctctcactttccattctcttcaaacctaacgcagcatcgcgtattctcttcattccatggctttgcccaaccagcaaaccgtggattaccctagtttcaaactcgttatcgtcggcgatggtggcacaggaaagacaacctttgtgaaaaggcatctcaccggagaattcgagaagaaatatgagccaaccatcggtgtggaggttcacccattggattttttcacaaactgtggaaagattcgattttactgctgggatactgctggacaggagaaatttggtggcctcagagatggatactatatccatggacaatgtgctattatcatgtt

SEQ ID NO: 235792 - DNA, 294 bp, Glycine max
gatcagcaacttatatatcatgattttaatctacgtattggcaccgatacacacatacatcaccaactgatatataatactagatttcttgcagtctattattagagagaagaattgagttggaagaacccagaaaaagaaacataagataaataaaacgatgtggtggccattcagcagaataggatcttctgggttttcaacatattctactgccgatgaagttactcatggaatcgatggaagtggtctcactgctattgttacaggagcatctagtggtcttggtgctga

SEQ ID NO: 235793 - DNA, 316 bp, Glycine max
gatctgagagtgagatacagaaaacaaaaaggaaaccctagctggataggtcaaacatcatcatgtcggtcgaagagcaccatttctagtccaaggcacacgccggtgcctccaaaacctaccctcagcaagccggtaccattcgcaagaacggctacatcgtcatcaaaggacgcccctgcaacgttgtggaagtttcgacttccacaactggaaagcacggtcacgccaagtgccactttgttggaattgatattttcactgccaacaaccttgacgatagtgtgccctcttcatatacctgtgatgttcctca

SEQ ID NO: 235794 - DNA, 383 bp, Glycine max
gaaggtgcaagagtttgttgtgagctataagctagtttatcgtgaggagaatatgaagttgtttgttttctttgttgctgcagtagttttggtagcatggccatgccatggcgcaggctaccaaaggttccctctccgaatgaaaactggctatggtgagcgttcttcggaggtaaaatgcgcaagttttaggcttgctgtggaagcacacaacatccgagcctttaaaaccattcctgaagagtgcgttgaaccaacataggactacattaatggcgaacaatttagatcagactccaaaacagttaaccaacaagctttcttttatgctagtgaacgcgaagttcatcacaacgacatatttatattcggcatacataaca

SEQ ID NO: 235795 - DNA, 382 bp, Glycine max
ggcacaagtgagtttgttgatcgagataactagaaacagtgtgatgaaaatgaaggtccttgttttcttcgttgctacaattttggtagcatggcaatgccatgcgtacgatatgttccctctccgaatgaacactggctatggtgcccgtactccggaggtgaaatgcgcaagttggaggcttgctgtggaagcacacaacatctttggctttgagaccattcctgaagagtgcgttgaagcaacaaaggaatacatccatggcgaacaatatagatcagactccaaaacagttaaccagcaagcttacttttatgccagagacctcgaagtccatcccaaggacacatttgtgttcagtatagatggcaccgtactctct

SEQ ID NO: 235796 - DNA, 310 bp, Glycine max
cacagcgacatatttagattcggcatagataacaccgtactctctaatatcccatactatgaatgacatcgatatggggtggatgaatttaatgagaccttatatgattaatgggttaacaagggcgacgcaccggcattgccaaagactcttaagaattacatcatgctgttgtctcttggcttcaatattggattcctgtcacgaagatatcttgacagaatggccgtaacataatcaaaccttaagaaggctggcttccacacatgggaacacttaactctcaacgatccacatcttatcactctaa

SEQ ID NO: 235797 - DNA, 350 bp, Glycine max
gattacggggaacatttcactagtctctatttatcatcctcaataatgccatttacacgtctcctctctggagcatctaagcatatacctaaggtcgtctgcgaaatgacaatttgaggtcaatatgctgggcacatcgtgatgtggctctagtcactggtgatgccctgtatcgtcgacaacttcgtaacgctttgcaccgttggatgaagggcctacggcgtttcggcaagcgcctccatgacattggcgcttccatccaccgtgtgatctcgagtttcatgtgtcatcggtggctatttcaccggcgggaaaatcacctgcggttagtcgatttatcgtcccaagtt

SEQ ID NO: 235798 - DNA, 378 bp, Glycine max
ggcacaagtgagtttgttgatcgagataactagaaacagtgtgatgaaaatgaaggtccttgttttcttcgttgctacaattttggtagcatggcaatgccatgcgtacgatatgttccctctccgaatgaacactggctatggtgcccgtactccggaggtgaaatgcgcaagttggaggcttgctgtggaagcacacaacatctttggctttgagaccattcctgaagagtgcgttgaagcaacaaaggaatacatccatggcgaacaatatagatcagactccaaaacagttaaccaacaagcttacttttatgccagagacctcgaagtccatcccaaggacacatttgtgttcagtatagatggcaccgtact

SEQ ID NO: 235799 - DNA, 374 bp, Glycine max
ggttgtcaagcctgccgagaaaaccctagttcgcttgcagtcacacaagaggccaatcctattcatagctcgagatgggtgaagaagtgaaggtagttgttccagaatcagtgttgaagaagcgcaagagggaggaggaatgggcgttggccaagaagcaagaactcgatgctgccaagaagaagagagccgagagccgcaaactcatctacaacagagctaagcagtacgctaaggagtacgatcaccaggagaaggaattgattcggttgaaacgcgaggccaagctgaaaggtggtttctatgtggatccacaggctaagctgttgtttattattcgcattcgtggtattaatgccatggaccccaaatca

SEQ ID NO: 235800 - DNA, 375 bp, Glycine max
gacaacacaacacaacgcgcactctctctttttctctctgttttttgttctctcttcgcttaaaccctatcgttcttctcgttttcgccgattctcgccatgccgaaagctaaatccgacgccaaagccgccgatagcaggttgaagcggaagggcgctggtgctgggaggaagcaatcgaggaaagctgctaaggaccctaacaagccgaagagacctccaagcgctttcttcgttttcatgtccgagttcagaaagcagttcaagaaggagcatcctaacaacaaatccgtcgctgttgtcggcaaagctggtggtgaaaaatggaaatcgctatctgatgctgaaaagggccctttcgttgctactgcggag

SEQ ID NO: 235801 - DNA, 385 bp, Glycine max
ggcacaagtgagtttgttgatcgagataactagaaacagtgtgatgaaaatgaaggtccttgttttcttcgttgctacaattttggtagcatggcaatgccatgcgtacgatatgttccctctccgaatgaacactggctatggtgcccgtactccggaggtgaaatgcgcaaattggaggcttgctgtggaagcacacaacatctttggctttgagaccattcctgaagagtgcgttgaagcaacaaaggaatacatccatggcgaacaatatagatcagactccaaaacagttaaccaacaagcttacttttatgccagagacctcgaagtccatcccaaggacacatttgtgttcagtatagatggcaacgtactctctaat

SEQ ID NO: 235802 - DNA, 382 bp, Glycine max
ggcacaagtgagtttgttgatcgagataactagaaacagtgtgatgaaaatgaaggtccttgttttcttcgttgctacaattttggtagcatggcaatgccatgcgtacgatatgttccctctccgaatgaacactggctatggtgcccgtactccggaggtgaaatgcgcaagttggaggcttgctgtggaagcacacaacatctttggctttgagaccattcctgaagagtgcgttgaagcaacaaaggaatacatccatggcgaacaatatagatcagactccaaaacagttaaccaacaagcttacttttatgccagagacctcgaagtccatcgcaaggacacatttgtgttcagtatagatggcaccgtactctct

SEQ ID NO: 235803 - DNA, 389 bp, Glycine max
gctccgaaaaccctaacaacacaggcgcagacgcaaacgcaaacgcaaacgcaaacgcaaacgcagagcgtgatccattgacgaagatggtgcagcgtctcacctaccgcaagcggcacagctatgccaccaagtccaaccaacacagggtcgtcaaaacccctggtgggaagctcgtttatcagactaccaagaagagggccagcggacccaagtgccccgtcactggcaagaggattcaggggattccacacttgaggcctgcagagtacaagaggtcaaggttacccagaaaccgtaggactgtcaaccgtgcatatggtggggttttatctggaagtgccgtcagggagaggattatccgagccttcttagttgaagagcaaaag

SEQ ID NO: 235804 - DNA, 385 bp, Glycine max
ggcacaagtttgttgagatagctagaagcaataagatgaaaatgaaagtgcttgttttgtttgttgctacagttttggtagcatatgagtgccatggctcagactaccagaagttccctctccaaatgaaaactgggtttggtgggcaatacagcaatgaggtggcatgtgccagttggaggcttggcgtggaagcaaacaacgtagtcaagtggcaaactgttcctgcagcttgcggagagtacatagctgactacgttctaggagaccaatatagatcagattccaaaacagttaaccaacaagcttatttctatgctaaatccctcaaactcaccaacaaagatgtctttgtcttggacgttgacgacactactctctctaa

SEQ ID NO: 235805 - DNA, 381 bp, Glycine max
gggaggcataagtgagtttgctgatagagataactacagtgagtgtgatgaaaatgaccgtccttgctttcttcctagcaataagtttggaagcaagggacagccatgcgtaagatacgttccctcaccgaataaagactggcgagcgtgcacgtacgccggaagtgacatgcgcaagttggatgcttgctgtggaaacacaaaccatcgttggcatagaaatcattcctgatgagtgcgttcaaccaacgaatgcatacatcgatagcaatcaatatcaatcacactccaagttagttaaccaacatacttacatttaagccacatacatctacatccaacggacagacacatgtgtattcaatatagaaggcaacgtac

SEQ ID NO: 235806 - DNA, 375 bp, Glycine max
ggagctgaaaccgagaagaagaagatggagatgtatcagatctggagcaggagaatagcgttgggagcgttcgcgtttgttctgcttttcctatcggcctcagcagacgacgtcgttgtgctctctgaagataacttcgagaaggaagttggtcaggacagaggagctctcgttgagttctatgctccttggtgtggacactgcaaaaagcttgctccagaatatgaaaagcttggtagcagcttcaagaaagccaaatctgttttaatcggcaaggttgactgtgatgagcacaagagtttgtgcagcaaatatggagtctctgggtacccaacaattcagtggtttccaaaaggatctcttgaacccaaaaag

SEQ ID NO: 235807 - DNA, 380 bp, Glycine max
gcacaagtgagtttgttgatcgagataactagaaacagtgtgatgaaaatgaaggtccttgttttcttcgttgctacaattttggtagcatggcaatgccatgcgtacgatatgttccctctccgaatgaacactggctatggtgcccgtactccggaggtgaaatgcgcaagttggaggcttgctgtggaagcacacaacatctttggctttgagaccattcctgaagagtgcgttgaagcaacaaaggaatacatccatggcgaacaatatagatcagactccaaaacagttaaccaacaagcttacttttatgccagagacctcgaagtccatcccaaggacacatttgtgttcagtatagatggcaccgtactctc

SEQ ID NO: 235808 - DNA, 350 bp, Glycine max
ggcacaagtgagtttgttgatcgagataactagaaacagtgtgatgaaaatgaaggtccttgttttcttcgttgctacaattttggtagcatggcaatgccatgcgtacgatatgttccctctccgaatgaacactggctatggtgcccgtactccggaggtgaaatgcgcaagttggaggcttgctgtggaagcacacaacatctttggctttgagaccattcctgaagagtgcgttgaagcaacaaaggaatacatccatggcgaacaatattaattagactccaaaacagttatacaacaagcttacttttatgccagagacctcgaagtccatcccaaggacacat

SEQ ID NO: 235809 - DNA, 389 bp, Glycine max
  unsure (1)..(389): unsure at all n locations
ggcacaagtttgttgagatagctagaagcaataagatgaaaatgaaagtgcttgttttgtttgttgctacagttttggtagcatatgaatgccatggctcagactaccagaagttccctctccaaatgaaaactgggtttggtgggcaatacagcaatgaggtggcatgtgccagttggaggcttggcgtggaagcaaacaacgtagtcaagtggcaaactgttcctgcagcttgcggagagtacatagctgactacgttctangagaccaatatagatcagattccaaaacagttaaccaacaagcttatttctatgctaaatcgctcaaactcaccaacaaagatgtctttgtcttggacgttgacgacactactctctctaatctc

SEQ ID NO: 235810 - DNA, 354 bp, Glycine max
ggttctctcccctcaaacacagacacaacacaacaaggttgcaaagtgaagaaggattaagccatgaaagctctaattttaatcctcacgctatgcatcattgctgtcaccttctcatcacaagcagcaacctccatagtcactcaaccccaacccaacgaatttttcaagctcaaccaaaccaagccacagaatgatggtagttcctgtagttacacggtgagcataaaaacaagctgcagttctccctcctacaccagagattacatcggtcttgcatttggtgatgcttaaggctatcaggtttatgttccaacactggatgatcctggttcatggtcattcgagcggtgc

SEQ ID NO: 235811 - DNA, 333 bp, Glycine max
ggaacctttgcattctattcattcaagattcagcaagtgcgttttggaagcagagaccgaaatacttcgagatggcccgtacaaagcaaactgctcgtaagtcaactggaggaaaagctcccaggaagcagcttgcaaccaaggctgcacgtaagtctgcaccaacaactggtggtgtgaagaagcctcatcgttatcgccctggaactgttgctcttcgtgagattaggaaataccagaagagcactgagctcctaatcaggaagcttcctttccagaagttggttcgtgaaattgcccaggatttcaagaatgatttgcgtttccagagcc

SEQ ID NO: 235812 - DNA, 386 bp, Glycine max
gaaggtgcaagagtttgttgtgagctataagctagtttatcgtgaggagaatatgaagttgtttgttttctttgttgctgcagtagttttggtagcatggccatgccatggcgcaggctaccaaaggttccctctccgaatgaaaactggctatggtgagcgttcttcggaggtaaaatgcgcaagttttaggcttgctgtggaaacacacaacatccgagcctttaaaaccattcctgaagagtgcgttgaaccaacaaaggactacattaatggcgaacaatttagatcagactctaaaacagttaaccaacaagctttcttttatgctagtgaacgcgaagtccatcacaacgacatatttatattcggcatagataacaccg

SEQ ID NO: 235813 - DNA, 371 bp, Glycine max
ggtgcacaggcgaaaaccctaatcctgaggcactgaaagtgtgatatggcaagagtcatttcctcttcctgcgcacgcctcgcaatgcgcctcttctccaccaccaccacagccaccgcgttcgccgtcactttacccaaaccctcatcactctccctctcatcgcgtcgattcctcttccctctctcccatgccatcgtccctccctccacccgcgtcgccggaatccggtgccgcgttaaccgcgccggagactcggcgtactcaccgctgaactcggggtcgtcgtcttcgtcgttcagcgaccgcccccccacggagatggcgccgctcttccccggctgcgactacaaccactgggtcatcctcat

SEQ ID NO: 235814 - DNA, 359 bp, Glycine max
ggtgcacaagtgagtttgttgatcgagataactagaaacagtgtgatgaaaatgaaggtccttgttttcttcgttgctacaattttggtagcatggcaatgccatgcgtacgatatgttccctctccgaatgaacactggctatggtgcccgtactccggaggtgaaatgcgcaagttggaggcttgctgtggaagcacacaacatctttggctttgagaccattctgaagagtgcgttgaagcaacaaaggaatacatccatggcgaacaatatagatcagactccaaaacagttaaccaacaagcttacttttatgccagagacctccaaatccatcccaaggacaaatttgtgttc

SEQ ID NO: 235815 - DNA, 348 bp, Glycine max
gcacaagtgagtttgttgatcgagataactagaaacagtgtgatgaaaatgaaggtccttgttttcttcgttgctacaattttggtagcatggcaatgccatgcgtacgatatgttccctctccgaatgaacactggctatggtgcccgtactccggaggtgaaatgcgcaagttggaggcttgctgtggaagcacacaacatctttggctttgagaccattcctgaagagtgcgttgaagcaacaaaggaatacatccatggcgaacaatatagatcagactccaaaacagttaaccaacaagcttacttttatgccagagacctcgaagtccatcccaaggacaca

SEQ ID NO: 235816 - DNA, 357 bp, Glycine max
gagcgaaacagggagtgatttcagtgagtgatcggtgttcacttgatctcatcataatcgtcagcgtcaattgaagaagatgccgatcagaaacatcgccgtcggaaggcctgaagaggcgactcaccccgacacgttgaaggcggctttggctgagttcatctcaaccttcatcttcgtgttcgccggctcaggctccggcatcgcctacaacgagctcaccgacaacggtgctgccacccctgccggcctcatctccgcctccatcgcccatgcattcgccctcttcgtcgccgtctccgtcggggccaacatctccgaggggccacgtcaaccccgccggtcaccttcgggcgc

SEQ ID NO: 235817 - DNA, 369 bp, Glycine max
gggcgacgacgcgtccagaggcaacgagaaggacgacagaagggggagagaagttattagggtttttgagtgcggcggtccaaacactcttctctgcagcttttgcctacaactcccttcaccatggctgaagaaaccgagaaagcttttctgaagcaaccaaaagtgtttctcagcacaaagaagactgggaagggaaagagacctggaaaaggtgggaaccgcttttggaagtccattgggcttggatttaagactcccagggaagccatcgaaggaacctatattgacaagaagtgccccttcactggcaatgtttccatccgttggcgtatcttggctgggacatgtcacagtgctaagatgaac

SEQ ID NO: 235818 - DNA, 386 bp, Glycine max
ggcacaagtgagtttgttgatcgagataactagaaacagtgtgatgaaaatgaaggtccttgttttcttcgttgctacaattttggtagcatggcaatgccatgcgtacgatatgttccctctccaaatgaacactggctatggtgcccgtactccggaggtgaaatgcgcaagttggaggcttgctgtggaagcacacaacatctttggctttgagaccattcctgaagagtgcgttgaagcaacaaaggaatacatccatggcgaacaatatagatcagactccaaaacagttaaccaacaagcttacttttatgccagagacctcgaagtccatcccaaggacacatttgtgttcagtatagatggcaccgtactctctaata

SEQ ID NO: 235819 - DNA, 391 bp, Glycine max
ggcacaagtgagtttgttgatcgagataactagaaacagtgtgatgagaatgaaggtccttgttttcttcgttgctacaattttggtagcatggcaatgccatgcgtacgatatgttccctctccgaatgaacactggctatggtgcccgtactccggaggtgaaatgcgcaagttggaggcttgctgtggaagcacacaacatctttggctttgagaccattcctgaagagtgcgttgaagcaacaaaggaatacatccatggcgaacaatatagatcagactccaaaacagttaaccaacaagcttacttttatgccagagacctcgaagtccatcccaaggacacatttgtgttcagtatagatggcaccgtactctctaatattcca

SEQ ID NO: 235820 - DNA, 383 bp, Glycine max
gagtgcacaagtgagtttgttgatcgagataactagaaacagtgtgatgaaaatgaaggtccttgttttcttcgttgctacaattttggtagcatggcaatgccatgcgtacgatatgttccctctccgaatgaacactggctatggtgcccgtactccggaggtgaaatgcgcaagttggaggcttgctgtggaagcacacaacatctttggctttgagaccattcctgaagagtgcgttgaagcaacaaaggaatacatccatggcgaacaatatagatcagactccaaaacagttaaccaacaagcttacttttatgccagagacctcgaagtccatcccaaggacagatttgtgttcagtatagatggcaccgtactct

SEQ ID NO: 235821 - DNA, 378 bp, Glycine max
ggcacaagtgagtttgttgatcgagataactagaaacagtgtgatgaaaatgaaggtccttgttttcttcgttgctacaattttggtagcatggcaatgccatgcgtacgatatgttccctctccgaatgaacactggctatggtgcccgtactccggaggtgaaatgcgcaagttggaggcttgctgtggaagcaaaaaacatctttgggttttagaacattcctgaaaaatgcgttgaagcaacaaaggaatacatccatggcgaacaatatagatcagactccaaaacagttaaccaacaagcttacttttatgccagagacctcgaagtccatcccaaggacacatttgtgttcagtatagatggcaccgtact

SEQ ID NO: 235822 - DNA, 375 bp, Glycine max
gatgcatagcaattcccaattcctaattgtttaaacctaattctcatttcttcatcgttcgattcttctcctcctaaagatgcagatcttcgtggaaactttgaccggtaagaccatcacccttgaggtggagtcctccgacaccatcgataacgtgaaagctaagattcaagacaaggaagggatcccacctgaccagcagagacttatctttgcgggtaaacagcttgaggatggtcgaacccttgccgactacaacatccaaaaggaatccactctccacctcgtgcttcgcctcaagggtggcatgcaaatctttgtcaagactttgactgggatgaccatcaccctcgacgtcgaatcctcgggcaccat

SEQ ID NO: 235823 - DNA, 395 bp, Glycine max
ggcacaagtgagtttgttgatcgagataactagaaacagtgtgatgaaaatgaaggtccttgttttcttcgttgctacaattttggtagcatggcaatgccatgcgtacgatatgttccctctccgaatgaacactggctatggtgcccgtactccggaggtgaaatgcgcaagttggaggcttgctgtggaagcacacaacatctttggctttgagaccattcctgaagagtgcgttgaagcaacaaaggaatacatccatggcgaacaatatagatcagactccaaaacagttaaccaacaagcttacttttatgccagagacctcgaagtccatcccaaagacacatttgtgttcagtatagatggcaccgtactctctaatattccatact

SEQ ID NO: 235824 - DNA, 292 bp, Glycine max
ggcaagagtttgttgtgagctataagctagtttatcgtgaggagaatatgaagttgtttgttttctttgttgctgcagtagttttggtagcatgggcatgccatggcgcaggctaccaaaggttccctctccgaatgaaaactggctatggtgagcgttcttcggagggaaaatgcgcaagttttaagcttgctgtggaagcacacaacaatccgagcctttaaaaccattcctgaagagtgcgttgaaccaacacacgactacattaatggctaacaatttagatcagact

SEQ ID NO: 235825 - DNA, 357 bp, Glycine max
ggcacaagtgagtttgttgatcgagataactagaaacagtgtgatgaaaatgaaggtccttgttttcttcgttgctacaattttggtagcatggcaatgccatgcgtacgatatgttccctctccgaatgaacactggctatggtgcccgtactccggaggtgaaatgcgcaagttggaggcttgctgtggaagcacacaacatctttggctttgagaccattcctgaagagtgcgttgaagcaacaaaggaatacatccatggcgaacaatatagatcagactccaaaacagttaaccaacaagcttacttttatgccagagacctcgaagtccatcccaaagggacatttgtgtt

SEQ ID NO: 235826 - DNA, 383 bp, Glycine max
gatgcacaagtttgttgagatagctagaagcaataagatgaaaatgaaagtgcttgttttgtttgttgctacagttttggtagcatatgaatgccatggctcagactaccagaagttccctctccaaatgaaaactgggtttggtgggcaatacagcaatgaggtggcatgtgccagttggaggcttggcgtggaagcaaacaacgtagtcaagtggcaaactgttcctgcagcttgcggagagtacatagctgactacgttctaggagaccaatatagatcagattccaaaacagttaaccaacaagcttatttctatgctaaatccctcaaactcaacaacaaagatgtctttgtcttggacgttgacgacactactctct

SEQ ID NO: 235827 - DNA, 348 bp, Glycine max
gaattcaaaatatatcatcaattataagcatgggtttgtggaacacaacgaatgcagtgtcttgccgctttcacaagtttggtgatgaccaaaagaatctggtcttccaaggtgatgccacgtcttcttccaagggcataaaactcaaaaagttagacggtggaagaaaaccagtgggtggcaatgtggggagagtgttatactcttctccagtgcacctttgggaaagctctacagtggtcgcaagctttgaaaccgacttcaccttttccatctcaacagaatctaataatccaagttatgggcctgccttcctcaatggaccaattggcactaaaatccctccaa

SEQ ID NO: 235828 - DNA, 233 bp, Glycine max
gggcatagcaaggtcatttctcgaatttaatcaacactgtgcacaccaagtcccttcggcgattacgaatcgcagagcattgggacggaccatgcaaagcgctcggaactccaccggacgaaaggctccgctgacgcaattggcattgaaagccgcgcggaagtcagctccggagaacggaggagtgaagaaaccccaccgcatcacgtcaggaatggtggctctgaaggaca

SEQ ID NO: 235829 - DNA, 291 bp, Glycine max
ctacgtgtttcaaggtggtgctgatgggggactcggcggtggggaagtcccagatactagctcggtttgcgaggaacgagttcagcttggactccaagtccaccatcggtgttgaatttcagaccaggacttttggttatcgatcacaggaccgtttatgctcatatctgggacactgccggccaagaacgatacaaagcagttacgagtgcatattacaggggtgctgtgggggcaatgttggtttatggcatcactaaacgccaaacctttgatcacataccgcgttgg

SEQ ID NO: 235830 - DNA, 369 bp, Glycine max
  unsure (1)..(369): unsure at all n locations
gtcgccaccagcacctctaaaaaccacgccaccaaatgcaccggctgcggcaactgcaccagccccgccgaaaacgggatcgagatcctctcccaaatccccagcccccgcctcgtcaacctcatcggcttcagcaccgacccaaacggcaacaaattactcgtcgtcgaatacatgcccaacggctcgctccacgatctgttacactccgttaaaaaaccgcccggttggaaccgtanggtccggttcgcgcttcaggtcgcaaaagcggttcgcgaactacactcttccaaccctcgcgttattcaccgtgacgttaagtcttccaatgttttaatcgatcaagaatggaacgccaagctcggtgac

SEQ ID NO: 235831 - DNA, 358 bp, Glycine max
ggcacaagtgagtttgttgatcgagataactagaaacagtgtgatgaaaatgaaggtccttgttttcttcgttgctacaattttggtagcatggcaatgccatgcgtacgatatgttccctctccgaatgaacactggctatggtgcccgtactccggaggtgaaatgcgcaagttggaggcttgctgtggaagcacacaacatctttggctttgagaccattcctgaagagtgcgttgaagcaacaaaggaatacatccatggcgaacaatatagatcagactccaaaacagttaaccaacaagcttacttttatgccagagacctcgaagttcatcccaaggacacatttttgttc

SEQ ID NO: 235832 - DNA, 397 bp, Glycine max
tcccgggccgacccacgcgtcaggcatcagcgaaatctcctccaaattccacctcgaggtctttcaggaggccgaacttctcgttaacattaaagagcatgagcttgtccccgaacatcaggttctcactgacgccgagaagaaaaccttgcttgagagatacactgtcaaggaaactcagctacctaggattcaggtcacagttccggttgcaaaatattatggattgaagcgtggacaagttgtcaagattatccggccaagtgaaactgctggcagatatgttacataccgatttgttgtataagaatttgctttaacatatttggttatactgtcatagtgatggatagggatataaagccttctttttgcagggggggaactcttgatttac

SEQ ID NO: 235833 - DNA, 335 bp, Glycine max
gtgaagagttgattgaagcctcggctaccctcgtatggatcgcttcagcccttcatgcagctgttaactttggacagtatccatatggaggtttaatcctaaacaggccaaccattagcaggagattcatgcctgagaaagggtctgctgagtatgcagctttggctaagaaccctgagaaggagtttttgaagactattactggcaagaaggagaccctcattgaccttacaattatcgaaatcttgtcaaggcacacatctgatgagttctaccttggggagagagatggtggtgactattggacttctgatgctggtccactataggccttc

SEQ ID NO: 235834 - DNA, 487 bp, Glycine max
  unsure (1)..(487): unsure at all n locations
gaacgattagaggaaacttctaagtgctacggccttggtccagnctatcacgggctgagccacgcgtcaaacggatgcgagaagacgacagaaggggaaattcttggatttatgaaagacgaacaactgcgaaagcatttgccaaggatgttttcattaatcaagaacgaaagttgggggcacaagtttgttgagatagctagaagcaataagatgaaaatgaaagtgcttgttttgtttgttgctacagttttggtagcatatgaatgccatggctcagactaccagaagttccctctccaaatgaaaactgggtttggtgggcaatacagcaatgaggtggcatgtgccagttggaggcttggcgtggaagcaaacaacgtactcaagtggcaaactgttcctgcagcttgcggagagtacatagctgactacgttctaggagaccaatatagatcagattccaaaacagtttaccaaaaaagcg

SEQ ID NO: 235835 - DNA, 393 bp, Glycine max
atcagactccaaaacagttaaccaacaagcttacttttatgccagagacctcgaagtccatcccaaggacacatttgtgttcagtatagatggcaccgtactctctaatattccatactacaaaaaacatggatatggggtggagaaatttaactcgaccttgtatgatgaatgggttaacaagggcaatgcaccggcactgcccgagactcttaagaattacaacaagctggtgtctcttggcttcaagattatattcttgtcaggaagaacactggacaaacaggccgtaacagaagcaaacttaaagaaggctggctaccacacatgggaaaaattaattctcaaggatccacaagatccttccactccaaatgcagtttcatgcaaaac

SEQ ID NO: 235836 - DNA, 376 bp, Glycine max
gtctacactgtcttctctgccactgaccccaagaggaatgccagagattcccatgtgccggttttggctccacttcccattggatttgctgtgttcatggttcacttggccaccatcccagtcactggtactggtatcaaccctgctaggagtcttggagctgctgttatctacaaccaagataagccatgggatgaccattggatcttttgggtaggaccatttattggggcagccattgcagccttctaccatcagttcatcttaagagcaggtgcagctaaggctcttggatcattcaggagtaacccccataattgagttgtctttctcttccttatgatggctctagtggaaagaagataattggagagat

SEQ ID NO: 235837 - DNA, 372 bp, Glycine max
  unsure (1)..(372): unsure at all n locations
ggttcctttgcctctttcgcttttgcttcctaggtttttttttttttgtgtcgatggcgggaaaaggagggaaggggcttgtggccggaaaaaccacggcagcgaacaaggacaaagacaaggataagaagaggcccgtctctcgttcatcccgtgctgggatccagtttcctgtgggacgtatccacaggcagttgaagcaaagggtgcaagcaaatggacgtgtgggggcgactgctgctgtgtacttggcctccattctggaatatctgactgctgaggtgctggagctggcagggaatgctagcaaagatcttaaggtgaagaggatcacaccaaggcacttgcaacttgctatcangggagatgaag

SEQ ID NO: 235838 - DNA, 383 bp, Glycine max
gactccgaagtcaccctacaacaacacatacactcacacaataatggaaaaagggcaaagaaaaacaacaccactactactatgctctcacattgtggttctccatttgctctccctagtggccgagactagtgccaaggtttccgcggtgatcgtcttcggtgactcctccgtcgacgccggcaacaacaacttcatccccaccattgcacggagcaatttccagccatatgggcgtgactttgaaggtggaaaagccactgggaggttctgcaatgggagaatacctacggattttatatcagagtcttttgggctgaaaccttatgtgccagcatacttggatcctaagtataatatttcagattttgcaagtggggtca

SEQ ID NO: 235839 - DNA, 384 bp, Glycine max
gagtgcagtgatagagataagaaaatgtggcttgtgcagctctcaaccccatttctgaacggacatggtcattccaccacccttctctccaagcacagttcggcggtgactcagacccactgggccccaccgagtttcctgcctcaaatcaatgcgatgaagacaatgcaggggagagtggtgtgctccaccagcgacaagacggtggcagtggaggtggtgcggctggcccctcacccaaagtacaagaggcgcgtgaggaagaagaagaagtaccaggcccacgaccccgataaccaattcaaagtcggcgacatcgtccagctccagaagaccaggcccatcagcaagaccaaggcctttctcgcactccccgttcccaaa

SEQ ID NO: 235840 - DNA, 383 bp, Glycine max
ggcacaagtgagtttgttgatcgagataactagaaacagtgtgatgaaaatgaaggtccttgttttcttcgttgctacaattttggtagcatggcaatgccatgcgtacgatatgttccctctccgaatgaacactggctatggtgcccgtactccggaggtgaaatgcgcaagttggaggcttgctgtggaagcacacaacatctttggctttgagaccattcctgaagagtgcgttgaagcaacaaaggaatacatccatggcgaacaatatagatcagactccagaacagttaaccaacaagcttacttttatgccagagacctcgaagtccatcccaaggacacatttgtgttcagtatagatggcaccgtactctcta

SEQ ID NO: 235841 - DNA, 322 bp, Glycine max
gattgttggcttgtgctctgctcgtgcctctagggttatcatatctccatttccatttcctctctctcagtttccaagaatcttaagctatgggaaagtcttacccaaccgtgagcgctgattaccagaaggccgttgagaaggcgaagaagaagctcagaggcttcatcgctgagaagagatgcgctcctctaatgctccgtttggcatggcactctgctggaacttacgacgtgagctcgaagaccggtggtcccttcggaaccataaagcacccctccgaactcgctcacggcgctaacaacggtcttgacatcgctgt

SEQ ID NO: 235842 - DNA, 360 bp, Glycine max
ggaacggaaaagcactggcgcagctaccctgaggcttctcttctcttctcttctctgtcgtgagtcaccatggtgagggttagtgtgctgaacgatgctctgaagagcatgtacagtgctgagaaaaggggaaagcgccaagtcatgattaggccatcctccaaagtcattatcaaattccttttggtgatgcaaaagcacggatacatcggagagtttgagtatgttgatgaccacagggctggtaaaatcgtggttgaattgaacggtagactgaacaagtgtggggttattagtccccgttttgatgtgggcgtcaaagagattgaaggttggactgctaggctttctccctcaaga

SEQ ID NO: 235843 - DNA, 367 bp, Glycine max
ggcacaagtgagtttgttgatcgagataactagaaacagtgtgatgaaaatgaaggtccttgttttcttcgttgctacaattttggtagcatggcaatgccatgcgtacgatatgttccctctccgaatgaacactggctatggtgcccgtactccggaggtgaaatgcgcaagttggaggcttgctgtggaagcacacaacatctttggctttgagaccattcctgaagagtgcgttgaagcaacaaaggaatacatccatggcgaacaatatagatcagactccaaaacagttaaccaacaagcttacttttatgccagagacctcgaagtccatcccaaggacacatttgtgttcagtatagat

SEQ ID NO: 235844 - DNA, 376 bp, Glycine max
gggtgtgggcatatatccaacataaaaggacaattttccgggaattggtaatgtttgacaaagaaaaccaccaatttcaaacacagagagaagggttttggaatggatggaatgactccgcgtcccctcctcatccccttcaattcaaccctcattcctaagcctccaatccaaccatctcagcctcacactcacatgtacacatatctgaacgcgtatcgtccctcctatggcttcaaagcgcatcctcaaggagctcaaagacttgcacaaagacccaccaacttcttgcagcgctggtccagtagctgaggacatgttccattggcaagcaacaataatgggtcctgctgatagtccttatgctggaggtgta

SEQ ID NO: 235845 - DNA, 386 bp, Glycine max; identical to SEQ ID NO: 235120

SEQ ID NO: 235846 - DNA, 370 bp, Glycine max
ggagttacagccgcagcttgaaacagagcagagcgaccttgaagagctatggctgtcggaaagaataagaggatttccaagggaaagaagggtggcaagaagaaagccgctgatccctttgccaagaaagactggtacgatatcaaggccccttccctcttccaggtcaagaatattggcaaaaccctcgtctctcgtacccagggaaccaagattgcatccgaaggactcaaacatcgggtttttgaggtctcattggctgatctccaaggggatgaagaccactccttcaagaagattcgtttgagagctgaggacgttcaagggaagaatgttctgacaaacttctggggaatggatttcacaactg

SEQ ID NO: 235847 - DNA, 382 bp, Glycine max
ggttctagtgtgtgattgtttgttgtcgtaacccgttcttcttcttttgttgttcggtgtttgtgtttgttttttctctcacctgaaaatgtcttgctgcggtggtaactgtggttgcggaagctcctgcaattgcggcaacggctgcggaggctgcaagatgtacccagacttgagctacactgattcaaccaccaccgagaccttggtcatggaattggcacctgttaaggctcaatttgagggtgctgaaatgggtgtgcccgctgagaacgatggctgcaaatgtggaccaaactgctcctgcaacccctgcacttgcaattgaggtgttggaagagcaagcttcaagcagagatagcccttaattaggaataatgat

SEQ ID NO: 235848 - DNA, 370 bp, Glycine max
gaaggtgcaagagtttgttgtgagctataagctagtttatcgtgaggagaatatgaagttgtttgttttctttgttgctgcagtagttttggtagcatggccatgccatggcgcaggctaccaaaggttccctctccgaatgaaaactggctatggtgagcgttcttcggaggtaaaatgcgcaagttttaggcttgctgtggaagcacacaacatccgagcctttaaaaccattcctgaagagtgcgttgaaccaacaaagggctacattaatggcgaacaatttagattagactctaaaacagttaaccaacaagctttcttttatgctagtgaacgcgaagtccatcacaacgacatatttatattc

SEQ ID NO: 235849 - DNA, 386 bp, Glycine max
gacttgtaataattcttataacacaacacaacccatggccaccacctccgcattcctcctccttcccctcctcctgctgctccacctcgccatcgccgctcacggcatcggcatcaactacggcacgctcggcgacaaccttccaccgcccgcggcggtggcgaacttcctgaagacgaagacgaccatcgaccgcgtgaagatctacgacgtgaacccggacatcctgcgggccttcgccggcagcggcatctccgtgacggtgaccgcccccaacggcgacatcgccgccttaaccaaaatcgactcggcgaggcagtgggtggcgacgcacatcaaaccctttcaccctcagaccaaaattaattacatcctcgtcggcagcg

SEQ ID NO: 235850 - DNA, 383 bp, Glycine max; identical to SEQ ID NO: 235699

SEQ ID NO: 235851 - DNA, 368 bp, Glycine max
gacaacactcatagtagagtaaccaaaaggagagtgcaataactcgttgtacattcctagtgtgtgggagagacatggctaagatgtgtgttttggtgttggttcttgctctggctgtggccacaagtgccagaaacgttcccaaccccaaggatgctggtcttaaggaccagaagaacttcatcagctatggtggagttggtggttattccgggattgggaacaatggactgccttttggaggagctggtgccggaataggtggtggttttggcagaggtggtggacttggtggtggcctcggcggtcctaccggtgggatcggagggtttggcggtaccggtagcggtgtcggtggcggtattggt

SEQ ID NO: 235852 - DNA, 416 bp, Glycine max
gcacaagtttgttgagatagctagaagcaataagatgaaaatgaaagtgcttgttttgtttgttgctacagttttggtagcatatgaatgccatggctcagactaccagaagttccctctccaaatgaaaactgggtttggtgggcaatacagcaatgaggtggcatgtgccagttggaggcttggcgtggaagcaaacaacgtagtcaagtggcaaactgttcctgcagcttgcggagagtacatagctgactacgttctaggagaccaatatagatcagattccaaaacagttaaccaacaagcttatttctatgctaaatccctcaaactcaccaacaaagatgtctttgtcttggacgttgacgacactactctctctaatctccagtattttgctaaccatggatttggtg

SEQ ID NO: 235853 - DNA, 382 bp, Glycine max
ggtgcacaagtgagtttgttgatcgagataactagaaacagtgtgatgaaaatgaaggtccttgttttcttcgttgctacaattttggtagcatggcaatgccatgcgtacgatatgttccctctccgaatgaacactggctatggtgcccgtactccggaggtgaaatgcgcaagttggaggcttgctgtggaagcacacaacatctttggctttgagaccattcctgaagagtgcgttgaagcaacaaatgaatacatccatggcgaacaatatagatcagactccaaaacagttaaccaacaagcttacttttatgccagagacctcgaagtccatcccaaggacacatttgtgttcagtatagatggcaccgtactct

SEQ ID NO: 235854 - DNA, 390 bp, Glycine max
gaagcaaaaccctaatccctctttcttcctcttcctcagtagtgcgattttcgattctcttctctgcaactatgcctaaccctaaggtcttcttcgacatgaccatcggcggtcaacctgccggccgcatcgtgatggagctctacgccgacgtgactccgagcaccgccgagaacttccgcgcgctctgcaccggcgagaagggcgccgggcggagcggcaagcccctccactacaaaggctcgtccttccaccgcgtgatcccgaacttcatgtgccagggcggcgacttcaccgccggaaacggcaccggaggcgagtcgatctacggcgccaagttcgccgacgagaacttcgtgaataagcatactggtcccggcatcctctcca

SEQ ID NO: 235855 - DNA, 380 bp, Glycine max
  unsure (1)..(380): unsure at all n locations
agaagaaagacgacaggggggggcaaaggagtttgttgatcgagataactctagaaacagtgtgatgaaaagaagtgcttgggttcttccctgctacaaatttggtagcatggcaatgccatgcgtacgatatgttccctctccgaatgaacactggctatggtgcccgtactccggaggtgaaatgcgcaagtttggngcttgctgtggaaacacacaacatctttggctttgagaccattcctgaagagtgcgttgaagcaacaaaggaatacatccatggcgaacaatatagatcagactccaaaacagttaaccaacaagcttacttttatgccagagacctcgaagtccatcccaaggacacatttgtgttcagt

SEQ ID NO: 235856 - DNA, 320 bp, Glycine max
ggacaccaatagtgattgcactgcatgctcggtgttcacctgatcacatcatagtcgtcagcgtccagtgatgaagacggcgatgagggccatcgccgtcggacggcctgaaggagcgaatcaggtcgatacgcgaatggtagcagtggatgggtacagttcttcagaagcctcattgttcgccggctcaggctccggcatcgcctacaacaagctcaccgacaacggcgactccactccagccggcctcagctccgcagccatcgcgcatgcattcgccctcatcgtcgccgtctccgtcggcgcgaacatcgccggcg

SEQ ID NO: 235857 - DNA, 387 bp, Glycine max
gatcaattcaaaatatatcatcaattataagcatgggtttgtggaacacaacgaatgcagtgtcttgccgctttcacaagtttggtgatgaccaaaagaatctggtcttccaaggtgatgccacgtcttcttccaggggcatagaactcacaaagttagacggtggaggaaaaccagtgggtggcagtgtggggagagtgttatactcttctccagtgcacctttgggaaagctctacagtggtcgcaagctttgaaaccgacttcaccttttccatctcatcagactctactactccaggtgatggccttgccttcttcattgcaccatttgacactaaaatccctccaaactctggtgggagcaaccttggactcttcccatcag

SEQ ID NO: 235858 - DNA, 381 bp, Glycine max
ggcacaagtttgttgagatagctagaagcaataagatgaaaatgaaagtgcttgttttgtttgttgctacagttttggtatcatatgaatgccatggctcagactaccagaagttccctctccaaatgaaaactgggtttggtgggcaatacagcaatgaggtggcatgtgccagttggaggcttggcgtggaaacaaacaacgtactcaagtggcaaactgttcctgcagcttgcggagagtacatagctgactacgttctaggagaccaatatagatcagattccacaacagttaaccaacaagcttatttctatgctaaatccctcaaactcaccaacaaagatgtctttgtcttggacgttgacgacactactctct

SEQ ID NO: 235859 - DNA, 389 bp, Glycine max
ggttctagtgtatgtgattgttgtgactcgttcttcttcgtcgttatcttcttcttttgttgtttgtgtgtttgttttttctctcacctgaaaatgtcttgctgcggtggtaactgtggttgcggaagcgcctgcaagtgcggcaacggctgcggaggctgcaagatgtacccagacttgagctacaccgagtcaaccaccaccgagaccttggtcatgggagtggcaccagttaaggctcaattcgagagtgctgaaatgggtgttcccgctgagaacgatggctgcaaatgtggagctaactgcacctgcaacccctgcacttgcaagtgaggtgttggagagctaaagcttcaagcagaaatggcccttagaaataatgataaaaa

SEQ ID NO: 235860 - DNA, 377 bp, Glycine max
gagggttttacactgcggcagctacttcggctccatcttcttcgatctctcaaactctatcggcgcagaaccaatcctatatcactatggggaagacacatggaatgggagctgcccgcaagctgaagtctcaccgtaggagacaaaggtgggctgacaagtcatacaaaaagtctcatcttggaaatgaatggaagaagccttttgctggttcatcccatgcaaagggtattgttcttgaaaagataggtattgaggctaagcagcccaactctgccattcgaaaatgtgccagggttcaactcatcaaaaatgggaagaagattgctgcattcgtgccaaatgatggttgcttaaattacattgaagagaatgat

SEQ ID NO: 235861 - DNA, 384 bp, Glycine max
gaaggtgcaagagtttgttgtgagctataagctagtttatcgtgaggagaatatgaagttgtttgttttctttgttgctgcagtagttttggtagcatggccatgccatggcgcaggctaccaaaggttccctctccgaatgaaaactggctatggtgagcgttcttcggaggtaaaatgcgcaagttttaggcttgctgtggaagcacacaacatccgagcctttaaaaccattcctgaagagtgcgttgaaccaacaaaggactacattaatggcgaacaatttagattagactctaaaacagttaaccaacaagctttcttttatgctagtgaacgcgaagtccatcacaacgacatatttatattcggcatagataacac

SEQ ID NO: 235862 - DNA, 391 bp, Glycine max
ggcgcattgaacgattattatggtttgtagtgtagcatgaagaagcaacaatggcgccgaatatgacacctaaggttaccacaaaccctgaattgataaggggaatcagaaagtactccaagtcgcagatgtatcacaagatgggcatttgggctatcaaggccacaaacggtggcgttttacctcgccacgagcctaaacccaagcctgaaactcctgctgaaaaaccacccaaattttaccctgctgatgatatcaagaagccccttgtcaacaagcacaaaccgaaactagctaacctcagggctagcattactcccgggacagtgttgattcttcttgccggtagatttaacggaaatagggtagtctttttgaaacagcatccttc

SEQ ID NO: 235863 - DNA, 385 bp, Glycine max
ggctgacaagccaatcctttgtgtaggtgctcaaccctagtaagccgcaatggtgaagtactcaagggagcctgacaatccaactaagtcttgcaaggctagaggcgccgaccttagggttcattttaagaacacaagggaaactgcctttgcaatcaggaagttgcccttggtcaaggctaaaaggtacttggaagatgttcttgcccacaagcaggcaattccattcagacgtttttgtcgaggtgttggaaggacagcccaggctaagaatagacactctaatggccaaggacggtggcctgtcaagtcagcaaaattcattcttgatttgctcaaaaatgctgagagcaatgctgaagtgaaaggtttggatgttgatgca

SEQ ID NO: 235864 - DNA, 381 bp, Glycine max
ggcacaagtttgttgagatagctagaagcaataagatgaaaatgaaagcgcttgttttgtttgttgctacagttttggtagcatatgaatgccatggctcagactaccagaagttccctctccaaatgaaaactgggtttggtgggcaatacagcaatgaggtggcatgtgccagttggaggcttggcgtggaagcaaacaacgtagtcaagtggcaaactgttcctgcagcttgcggagagtacatagctgactacgttctaggagaccaatatagatcagattccaaaacagttaaccaacaagcttatttctatgctaaatccctcaaactcaccaacaaagatgtctttgtcttggacgttgacgacactactctct

SEQ ID NO: 235865 - DNA, 367 bp, Glycine max
ggcacaagtgagtttgttgatcgagataactagaaacagtgtgatgaacatgaaggtccttgttttcttcgttgctacaattttggtagcatggcaatgccatgcgtacgatatgttccctctccgaatgaacactggctatggtgcccgtactccggaggtgaaatgcgcaagttggaggcttgctgtggaagcacacaacatctttggctttgagaccattcctgaagagtgcgttgaagcaacaaaggaatacatccatggcgaacaatatagattagactccaaaacagttaaccaacaagcttacttttatgccagagacctcgaagtccatcccaaggacacatttgtgttcagtatagat

SEQ ID NO: 235866 - DNA, 383 bp, Glycine max
ggcacaagtgagtttgttgatcgagataactagaaacagtgtgatgaaaatgaaggtccttgttttcttcgttgctacaattttggtagcatggcaatgccatgcgtacgatatgttccctctccgaatgaacactggctatggtgcccgtactccggaggtgaaatgcgcaagttggaggcttgctgtggaagcacacaacatctttggctttgagaccattcctgaagagtgcgttgaagcaacaaaggaatacatccatggcgaacaatatagattagactccaaaacagttaaccaacaagcttacttttatgccagagacctcgaagtccatcccaaggacacatttgtgttcagtatagatggcaccgtactctcta

SEQ ID NO: 235867 - DNA, 381 bp, Glycine max
ggcacaagtatgttgagatagctagaagcaataagatgaaaatgaaagtgcttgttttgtttgttgctacagttttggtagcatatgaatgccatggctcagactaccagaagttccctctccaaatgaaaactgggtttggtgggcaatacagcaatgaggtggcatgtgccagttggaggcttggcgtggaagcaaacaacgtagtcaagtggcaaactgttcctgcagcttgcggagagtacatagctgactacgttctaggagaccaatatagatcagattccaaaacagttaaccaacaagcttatttctatgctaaatccctcaaactcaccaacaaagatgtctttgtcttggacgttgacgacactactctct

SEQ ID NO: 235868 - DNA, 364 bp, Glycine max
gaaggtgcaagagtttgttgtgagctataagctagtttatcgtgaggagaatatgaagttgtttgttttctttgttgctgcagtagttttggtagcatggccatgccatggcgcaggctaccaaaggttccctctccgaatgaaaactggctatggtgagcgttcttcggaggtaaaatgcgcaagttttaggcttgctgtggaagcacacaacatccgagcctttaaaaccattcctgaagagtgcgttgaaccaacaaaggactacattaatggcgaacaatttagattagactctaaaacagttaaccaacaagctttcttttatgctagtgaacgcgaagtccatcacaacgacatattt

SEQ ID NO: 235869 - DNA, 380 bp, Glycine max
ggtgtgagtgaagaagcagagggagtatcggcattaaaaatgcaggtcttcgtgaaaactctgacagggaagactagaaccctcgaggtcgagagcagcgacaccatcgacaatgtcaaggccaagattcaagacaaggaaggcattcctccggatcagcagcgtttgattttcgccggaaagcagcttgaagatggaaggaccctggccgattacaacatccagaaggaatcaacccttcatctcgtcctcaggcttcgtggtggcatcattgagccttccctcatggctttggctcgcaaatacaaccaggacaagatgatttgccgcaagtgctatgcccgtctgcatcctaaggctgtgaactgccgcaagaaaaa

SEQ ID NO: 235870 - DNA, 351 bp, Glycine max
ggtgcacaagtgagtttgttgatcgagataactagaaacagtgtgatgaaaatgaaggtccttgttttcttcgttgctacaattttggtagcatggcaatgccatgcgtacgatatgttccctctccgaatgaacactggctatggtgcccgtactccggaggtgaaatgcgcaagttggaggcttgctgtggaagcacacaacatctttggctttgagaccattcctgaagagtgcgttgaagcaacaaaggaatacatccatggcgaacaatatagattagactccaaaacagttaaccaacaagcttacttttatgccagagacctcgaagtccatcccaaggacaca

SEQ ID NO: 235871 - DNA, 384 bp, Glycine max
gaccaagttagtttaatttgagtgtatattcagagagaaaaacgaagaaaacatcgtgaagcatgtctggaagaggaaagggagggaagggtctaggaaagggaggagcgaaacggcaccgtaaggttctgagggataacattcagggaatcacgaagcccgcgattcggcgtctggcgcgacgtggtggcgtgaagcgtatcagtggtctcatctatgaagaaactcgcggtgttctcaagatcttcctcgagaacgtcattcgcgacgctgtcacctatactgagcacgctcgccgcaagaccgtcactgctatggacgttgtttacgctctcaagaggcatggcaagaccctctatggtttcggtggttagagatttgggg

SEQ ID NO: 235872 - DNA, 374 bp, Glycine max
gacagcatatatatcaataatctattttatactatacctacattttgataattttctttgtagttgatagccatggctacccgtggaaagcttgaggttgacattgatctcaagtccaacgcagacaagtactggcaaacccttaggaattctactgaaatattccctaaggccttcccacatgattacaaaagcattgaggttcttgagggtgatggcaagtctcctggttctatccgccacataagttatggtgaaggttcaccacttgtgaaatcatcctttgagaagattgaggctgttgatgaggaaaagaaggtagtgtcgtacactatcattgatggggaactcctccagcactacaaaacattcaa

SEQ ID NO: 235873 - DNA, 388 bp, Glycine max
ggttctagtgtgtgattgtttgttgttgtaactcgttcttcttcttttgttgttctgtgtttgtgtttgttttttctctcacctgaaaatgtcttgctgcggtggtaactgtggttgcggaagctcctgcaagtgcggcaacggctgcggaggctgcaagatgtacccagacttgagctacactgagtcaaccaccaccgagaccttggtcatgggagtggcacctgttaaggctcaatttgagggtgctgaaatgggtgtgcccgctgagaacgatggctgcaaatgtggaccaaactgctcctgcaacccctgcacttgcaagtgaggtgttgggagagcaagcttcaagcagagatagcccttaattaggaataatgataaacta

SEQ ID NO: 235874 - DNA, 383 bp, Glycine max
gaaggtgcaagagtttgttgtgagctataagctagtttatcgtgaggagaatatgaagttgtttgttttctttgttgctgcagtagttttggtagcatggccatgccatggcgcaggctaccaaaggttccctctccgaatgaaaactggctatggtgagcgttcttcggaggtaaaatgcgcaagttttaggcttgctgtggaagcacacaacatccgagcctttaaaaccattcctgaagagtgcgttgaaccaacaaaggactacattaatggcgaacaatttagattagactctaaaacagttaaccaacaagctttcttttatgctagtgaacgcgaagtccatcacaacgacatatttatattcggcatagataaca

SEQ ID NO: 235875 - DNA, 384 bp, Glycine max
gaaggtgcaagagtttgttgtgagctataagctagtttatcgtgaggagaatatgaagttgtttgttttctttgttgctgcagtagttttggtagcatggccatgccatggcgcaggctaccaaaggttccctctccgaatgaaaactggctatggtgagcgttcttcggaggtaaaatgcgcaagttttaggcttgctgtggaagcacacaacatccgagcctttaaaaccattcctgaagagtgcgttgaaccaacaaaggactacattaatggcgaacaatttagatcagactctaaaacagttaaccaacaagctttcttttatgctagtgaacgcgaagtccatcacaacgacatatttatattcggcatagataacac

SEQ ID NO: 235876 - DNA, 386 bp, Glycine max
gggagaagagtgttggacggaccttgaatactgcaagcaaaaggggttgtattatcccattgcaaagactctagcagagaaagcgggttgggactttgcgaaggagacaggttttgatgttgtcatgataaaccctggtacagcattgggccctctgcttcctccaagaatcaattcaagcatggctgtgcttgttagtgttctcaaagggggcaaagagacctacgaggacttctttatgggaacggctcacttcaaagacatagcattggcacatattttggtacttgagaacaagaaagcagcaggaaggcacttgtgtgtggaatctattcgtcactttagtgatcttgtggacaaggttgctgagttataccctgaatacg

SEQ ID NO: 235877 - DNA, 375 bp, Glycine max
ggaacctttgcattctattcattcaagattcagcaagtgcgttttggaagcagagaccgaaatacttcgagatggcccgtacaaagcaaactgctcgtaagtcaactggaggaaaagctcccaggaagcagcttgcaaccaaggctgcacgtaagtctgcaccaacaactggtggtgtgaagaagcctcatcgttatcgccctggaactgttgctcttcgtgagattaggaaataccagaagagcactgagctcctaatcaggaagcttcctttccagaggttggttcgtgaaattgcccaggatttcaagactgatctgcgtttccagagccatgctgtgcttgcattgcaagaggctgctgaggcataccttg

SEQ ID NO: 235878 - DNA, 375 bp, Glycine max
aggcattatatttgagttcaaacaaatcaaagccatggccacctccaacttctctattgttctctccgtctccctagccttctttttggtgctacttaccaaggcacactcgaccgataccgtttctttcaccttcaacaagttcaacccagtccaaccaaacattatgctccaaaaagatgctagtatttcatcctctggggtgttacaactcaccaaagttggcagcaacggcgtgcccacctcgggatctctcggtcgtgccctttacgctgccccaatccagatttgggacagcgaaaccggcaaggtagccagctgggctacatcctttaaattcaacattttcgcacccaacaaatcaaactcagctga

SEQ ID NO: 235879 - DNA, 381 bp, Glycine max
ggggcgaggtagccagagagtgatacaatacagagtgcgttgttgctccttcgccacaactccctgccaacatgggtatctccagagattctatgcacaagaggcgtgccactggtggcaagaagaaggcatggaggaagaagagaaagtatgagcttggtcgccagcctgctaacactaagctgtcaagcaacaagacagtcaggaggatccgggttagaggtggaaatgtgaagtggagggcactgagattggatactggaaattactcctggggaagtgaagctgtaactcgcaagactcgtatactagatgtggtttacaatgcctcaaacaacgagcttgtgcgtactcagactcttgtaaaaagtgctattgttc

SEQ ID NO: 235880 - DNA, 390 bp, Glycine max
gaccgtattccttacgctctctcactcacaaacacacactgaactaaaaaacatcaaaagagacatggctgagcaaaccttcatcatgatcaagcctgatggcgtccaaagaggccttattggcgagatcattagcagatttgagaagaaaggtttctacttgaaaggtttgaaacttgttactgtggaccgtccttttgctgagaagcactatgctgatttgtctgccaagcctttctttagtggtttggtggattacattatctctggccctgttgttgccatgatctgggagggcaagaatgttgttacaactggccgaaagattatcggagccacaaacccagctcaatctgagcctggaactatccgtggtgactttgccattga

SEQ ID NO: 235881 - DNA, 378 bp, Glycine max
gattgatgaactagtgtgacattagagaagaaccaatttaaaagaagagcagcggagctaaagaggggagaggagagaggagaagagaagctaaagaaagaaaggagatgggagtggagaagcagttgttgaggtctggcaccggtccgaagccaattcccggtcagaacgtaaccgttcactgcactggtttcgggaagaacggtgacctttctcagaaattctggagcacaaaggatcctggccagaacccattcactttcaaaatcggccaaggttctgttatcaaaggatgggatgaaggtgtgcttggcatgcaaattggtgaagttgctcgtctccggtgctctccggattatgcttatggtgctggtggct

SEQ ID NO: 235882 - DNA, 394 bp, Glycine max
tgagggtgtaaatataccgattattgctgtgaaaagagatggtggctacaactattcttcaactgatctagcagcactttggaatcgtctaaatgtggaaaatgttgagtggaatatatacgttacagatgttgggcagtggcaacactttgatatggtttttaaggcctttaggcgtgcaggatggctgccaaatcatgaaaatgagttccccaaatgtactcatattggttttggtcttgttcttggggaagatggaaaacgatttcggacacgcagcagtgaaactgttagattggttgagctgcttgatgaagccaaaaggcgttgtaaagcttccctcctcgagcgtgacgctgttaaagattggtctgaggaagagatcgaaaagaca

SEQ ID NO: 235883 - DNA, 382 bp, Glycine max
ggatcctttgtattctattcttcaagattcaggtactgcgtttcggaagcagacacagatggctcgtacgaagcaaaccgctcgtaagtccacaggaggaaaggctcctaggaagcagcttgcaaccaaggctgcacgtaagtctgcaccaactactggtggtgtgaagaagccccaccgttatcgtcctggtaccgttgctcttcgtgagattaggaaataccagaagagtaccgagcttttgatccggaagctccccttccagaggctggttcgtgaaattgctcaggacttcaagactgatctgcgtttccagagccacgccgtgcttgcattgcaagaagctgctgaggcataccttgttgggctctttgaggacact

SEQ ID NO: 235884 - DNA, 388 bp, Glycine max
ggcacaagtgagtttgttgatcgagataactagaaacagtgtgatgaaaatgaaggtccttgttttcttcgttgctacaattttggtagcatggcaatgccatgcgtacgatatgttccctctccgaatgaacactggctatggtgcccgtactccggaggtgaaatgcgcaagttggaggcttgctgtggaagcacacaacatctttggctttgagaccattcctgaagagtgcgttgaagcaacaaaggaatacatccatggcgaacaatatagatcagactccaaaacagttaaccaacaagcttacttttatgccagagacctcgaagtccatcccaaggacacatttgtgttcagtatagatggcaccgtactctctaatatt

SEQ ID NO: 235885 - DNA, 411 bp, Glycine max
cccacgcgtccgacgacagaaggggacccacagggaggcgaacagagaaactcagagacccgaaggcagatttcaagatgaagttcaacattgcgaatcccaccaccggttgtcagaagaagctggagatcgatgatgacctgaagctgcgagcattttgggacaagaggatctcacaagaggttgttggtgatgctctgggtgaggaattcaaaggttatgtcttcaaaattactggaggttgcgacaagcaaggatttccaatgaagcaaggagtgttgacccctggtcgtgttcgcctcttgctgcatagaggaactccttgtttccgtggttacggaaggcgcaatggagagcgtaggaggaagtctgttcgtgggtgcattgtcagccctgacctctctgttctca

SEQ ID NO: 235886 - DNA, 379 bp, Glycine max
ggaacctttgcattctattcattcaagattcagcaagtgcgttttggaagcagagaccgaaatacttcgagatggcccgtacaaagcaaactgctcgtaagtcaactggaggaaaagctcccaggaagcagcttgcaaccaaggctgcacgtaagtctgcaccaacaactggtggtgtgaagaagcctcatcgttatcgccctggaactgttgctcttcgtgagattaggaaataccagaagagcactgagctcctaatcaggaagcttcctttccagaggttggttcgtgaaattgcccaggatttcaagactgatctgcgtttccagagccatgctgtgcttgcattgcaagaggctgctgaggcataccttgttgg

SEQ ID NO: 235887 - DNA, 393 bp, Glycine max
gagaaaggttagggagccaaaggaggaaaatgtcactcttggtccagccgttagagacggtgaacatgttttcggcgtggctcgcatctttgcctccttcaacgacaccttcatccatgtcactgatttgtctgggagggaaacccttgttcgcatcactggtgggatgaaagttaaagctgacagagatgaatcatctccatatgctgctatgcttgcagcacaggatgttgctgccagatgtaaggaactgggcataactgctcttcatatcaggctccgtgccactggtggaaacaagaccaaaacacctggtcctggtgctcaatcagctcttcgagcccttgcacgttcaggaatgaaaattggtcgtatagaggatgttactcccat

SEQ ID NO: 235888 - DNA, 384 bp, Glycine max
ggaagagagatggatccagacgcgttggcaaaggcattcgtggagcactactacagcaccttcgacaccaaccggaacggtttagcgaatctgtatcaggagggttccatgctgaccttcgaagggcagaagatccagggcgcttccagcatcgtcgctaagctcacttccctccctttccagcagtgccaccactccatctccaccgtcgactgccagccctccggtgtcaacgctggcatgcttgtctttgtcagcggcaacctccagctcgctggcgaacagcacactctcaagttcagccagatgttccatttgataccaacgcctcagggaagctattatgtgttgaatgacatattccgtttgaactatgcatgaaga

SEQ ID NO: 235889 - DNA, 386 bp, Glycine max
gattgttggcttgtgctctgctcgtgcctctagggttatcatatctccatttccatttcctctctctcagtttccaagaatcttaagctatgggaaagtcttacccaaccgtgagcgctgattaccagaaggccgttgagaaggcgaagaagaagctcagaggcttcatcgctgagaagagatgcgctcctctaatgctccgtttggcatggcactctgctggaacttacgacgtgagctcgaagaccggtggtcccttcggaaccataaagcacccctccgaactcgctcacggcgctaacaacggtcttgacatcgctgttaggcttttggagccactcaaagcggagtttcctattttgagctacgccgatttctaccagttg

SEQ ID NO: 235890 - DNA, 378 bp, Glycine max
ggaacctttgcattctattcattcaagattcagcaagtgcgttttggaagcagagaccgaaatacttcgagatggcccgtacaaagcaaactgctcgtaagtcaactggaggaaaagctcccaggaagcagcttgcaaccaaggctgcacgtaagtctgcaccaacaactggtggtgtgaagaagcctcatcgttatcgccctggaactgttgctcttcgtgagattaggaaataccagaagagcactgagctcctaatcaggaagcttcctttccagaggttggttcgtgaaattgcccaggatttcaagactgatctgcgtttccagagccatgctgttcttgcattgcaagaggctgctgaggcataccttgttg

SEQ ID NO: 235891 - DNA, 371 bp, Glycine max
gaaggtgcaagagtttgttgtgagctataagctagtttatcgtgaggagaatatgaagttgtttgttttctttgttgctgcagtagttttggtagcatggccatgccatggcgcaggctaccaaaggttccctctccgaatgaaaactggctatggtgagcgttcttcggaggtaaagtgcgcaagttttaggcttgctgtggaagcacacaacatccgagcctttaaaaccattcctgaagagtgcgttgaaccaacaaaggactacattaatggcgaacaatttagatcagactctaaaacagttaaccaacaagctttcttttatgctagtgaacgcgaagtccatcacaacgacatatttatattcg

SEQ ID NO: 235892 - DNA, 402 bp, Glycine max
gcattctcccaaactaacaaacaaatcccagggagccaccaaccatggcttccaagctctgcgactcatgcaaatcagccactgctaccttgtactgccgccccgacgcggccttcctctgcggcgcctgtgactctaaggttcatgccgccaacaagctcgcatcgcgccacccgcgcgtcgtgctctgcgaggtgtgcgagcaggcgcccgcgcatgtgacctgtaaagccgacgccgccgcgctctgccttgcctgcgatcgcgatatccactccgccaaccccctcgccagccgccacgagcgcatccccgtcacgccgttcttcgagtccgtacattcagtcaaggcctcctcgccgattaacttccaccaccgcttcttctccgacgccgacgctg

SEQ ID NO: 235893 - DNA, 379 bp, Glycine max
ggcacaagtgagtttgttgatcgagataactagaaacagtgtgatgaaaatgaaggtccttgttttcttcgttgctacaattttggtagcatggcaatgccatgcgtacgatatgttccctctccgaatgaacactggctatggtgcccgtactccggaggtgaaatgcgcaatttggaggcttgctgtggaagcacacaacatctttggctttgaaacaattcctgaaaatgtgcgttgaaccaccaaaggaatacatcaatggcaaacaatatagttcagactccaaaacagttacccaacacgctaacttatatgccagagacctcgatctctatcccagggacacatgtgtgtacagtatatatggcactgtact

SEQ ID NO: 235894 - DNA, 393 bp, Glycine max
gactcaccacttcaaaacactcataacacaaagcacaaagcaaagctcatccttgagttaaaaaatggcagcagcttcttccatggctctctcatccccatccttggctggcaaggccgtgaagctgggcccatcagccccagaagtgggaagggtgagcatgaggaagaccgtcaccaagcaggtctcctcaggaagcccatggtacggcccagaccgagtcaagtacttgggcccattctctggcgagcccccgtcctacctaaccggtgagttcccaggcgactacggctgggacactgctgggctttccgcagacccagaaaccttcgccaagaaccgtgaactcgaagtgatccactccaggtgggccatgctcggagccttgggctg

SEQ ID NO: 235895 - DNA, 388 bp, Glycine max
gatagggtttttgtcgttgcgactaagagttgctgcttcttccgccactcagcacttcgctccctctgtgcttcaccaaccatggccgaaatcgaagctaccgttccagatccctctcaaatcgacgtcaaacttttcaaccgctggagcttcgacgacgttgaggttactgatatgtctctggctgattacattggagtgtccccgtcaaagcatgctacatatgttcctcacactgctggtaggtactcagtgaagaggttcaggaaggcgcagtgccccattgttgagagactcaccaactctctcatgatgcacggaaggaacaatggaaagaagctcatggctgtcaggattatcaagcatgcaatggaaattattcacttgc

SEQ ID NO: 235896 - DNA, 385 bp, Glycine max
gacaagtttgttgagatagctagaagcaataagatgaaaatgaaagtgcttgttttgtttgttgccacagttttgggaccaaaagaatggcaatggcccaaacaacaaaagtttcctccccaaattaaaaccgggttttggtgggcattacaccattaaggtgcaatttgcaatttgaaggcttgccttgaaaccaaccaccttatccaattgcaaaatggtcccggcaccttgcggaaattacataccagactattttctaggacaccaatatatatcagatcccaacacatttacccaacacccatatctctacgcaaaatctctcactctcaccaacagagatctctttgtcgtggacgttgacgacactactctctctaat

SEQ ID NO: 235897 - DNA, 388 bp, Glycine max
ggaacggaaaagcactggcgcagctaccctgaggcttctcttctcttctcttctctgtcgtgagtcaccatggtgagggttagtgtgctgaacgatgctctgaagagcatgtacaatgctgagaaaaggggaaagcgccaagtcatgattaggccatcctccaaagtcattatcaaattccttttggtgatgcaaaagcacggatacatcggagagtttgagtatgttgatgaccacagggctggtaaaatcgtggttgaattgaacggtagactgaacaagtgtggggttattagtccccgttttgatgtgggcgtcaaagagattgaaggttggactgctaggcttctcccctcaagacagtttgggtatattgtattgactacct

SEQ ID NO: 235898 - DNA, 380 bp, Glycine max
ggcacaagtgagtttgttgatcgagataactataaacatcttggacttaactcggaacaagtaaacgtacatggtggagctgttgcactgggtcatcctcatggttgcagtggtgctcgcattctggtgacacttttgggggtactgaaacagaagaatgggaagtacggaattggtggcatttgcaatggaagaggtggtgcatctgcccttgttgttgagcttcagtaagacctatttcatgtacagtagatgtccttttaagagctaacgtttgatgcagagctcagaagatcttgcctccctctttatcaagcgaacatgcaagtttcacatttattactacgacaagaccgaaagagagcgaaatttatctacat

SEQ ID NO: 235899 - DNA, 373 bp, Glycine max
gagcgaaacagagagtgatttcagtgagtgatcggtgttcacttgatctcatcataatcgtcagcgtcaattgaagaagatgccgatcagaaacatcgccgtcggaaggcctgaagaggcgactcaccccgacacgttgaaggcggctttggctgagttcatctcaaccttcatcttcgtgttcgccggctcaggctccggcatcgcctacaacaagctcaccgacaacggcgctgccacccctgccggccgcatctccgcctccatcgcccatgcattcgccctcttcgtcgccgtctccgtcggcgccaacatctccggcggccacgtcaaccccgccgtcaccttcggcgccttcgtcggcggcaacatc

SEQ ID NO: 235900 - DNA, 390 bp, Glycine max
ggcagcagcacctgatgcagatgcagcccatgatggcagcctactaccccaacaacgtcaccactgatcacattcagcagtatctggatgagaacaagtccttaattctgaagattgttgaaagccagaattctggcaagctgagcgagtgtgccgagaaccaagcaaggcttcagagaaatctcatgtacttagctgcaatagctgattctcaaccccaaccacccaccatgtctggtcagtaccctccgagtgggatgatgcagcagggagcacagtacatgcaggctcaacaacaggcacagcagatgacaccacaacaactaatggcagcacgctcatctcttttgtacgcacagcagccgtactcagcacttcaacagcagcaag

SEQ ID NO: 235901 - DNA, 392 bp, Glycine max
ggagagactgaggataccttcattgctgacctttctgttggtttggcaacgggtcaaattaagactggagctccatgcaggtcagagcgtcttgctaaatataaccagctcttgagaattgaggaggagcttggtgcggaagcagtgtatgctggagctaacttccgtacccctgttgagccctactaaagttttcaagtggaaaaaacctggagatccccacgagtttgagcaatgagatttggatgcgcggttttagttgtgatcaataagtcgatagttagaacaatagtcttggtataaggaccttgccaataattttttagttctgattcacagagctaagacagttccgtcttagactttaaaagttttgatatttagctttaata

SEQ ID NO: 235902 - DNA, 390 bp, Glycine max
ggtgtgagtgaagaagcagagggagtagcggcattaaaaatgcagatcttcgtgaaaactctgacagggaagactataaccctcgaggtcgagagcagcgacaccatcgacaatgtcaaggccaagattcaagacaaggaaggcattcctccggatcagcagcgtttgattttcgccggaaagcagcttgaagatggaaggaccctggccgattacaacatccagaaggaatcaacccttcatctcgtcctcaggcttcgtggtggcattattgagccttccctcatggctttggctcgcaaatacaaccaggacaagatgatttgccgcaagtgctatgcccgtctgcatcctaaggctgtgaactgccgcaagaaaaagtgcggtcat

SEQ ID NO: 235903 - DNA, 388 bp, Glycine max
gacagctcttggctttagcaaattccaattcccaattcccaattcgaaacccttattcctttcaaagaaccaaattgagtgatcgtgatggcaccaaaggcagagaagaagccagcggagaagaagcccgcggaggagaagaagtcgacggtgggagacaaggctccggcggagaagaagccaaaggccggaaagaagcttccgaaggagggaggcgccggcggagaagggaagaagaagaagagaaacaagaagagcgtggagacatacaagatctacatcttcaaggttctgaagcaggtccaccctgacattggtatctcaagcaaggccatgggaatcatgaacagcttcatcaacgacatcttcgagaagcttgcccaggaat

SEQ ID NO: 235904 - DNA, 353 bp, Glycine max
acaagcacttgggcgagcatgtggagtcacacggccagcgattgcatgttctgtaacaactaatgaaggaagtcaactcaaatcccaaattcagcaactaaaggatgctattgagaagctgttaatttgaaaatttgatattcggtatgacgggcttcttgagaggctttgactggaccagatgttgtattcaacagacaaaggtgttttatgtgtaaacctacatttatatttacttttgccgcgaaggattgtttgaaagtaattttgaagttagctcgccgttgttattaattacacttctgttataacttataaattgttcaatgctatgcatgtggggtgctgttagg

SEQ ID NO: 235905 - DNA, 344 bp, Glycine max
ggaggaacagtttgtggaatctactgagagagagcagaggaaaacgggaagaaaaatgttgagtgcgacggcgatcggcgcgttattgggtttgggaacccagatgtactccaatgctctccgcaaactcccctacatgcaccatccgtgggagcacatttccgtactcctgttgggccctacgtaagttttcaagcgtcaaaaacctgaagatcaccacgagtttgaccactaccatatgcactgcgcgggtttagctgtcatcaataaatcttatattaatgcagaatacctggaatacagatcttcccaacacgttgtaattgctgaatcacatcaccaaa

SEQ ID NO: 235906 - DNA, 381 bp, Glycine max; identical to SEQ ID NO: 235459

SEQ ID NO: 235907 - DNA, 391 bp, Glycine max
gaggagcaagcttaagctgttttctctgctctttgatcccgtgaaaaaaaaaatggctggagatgaagaaaagcttcgaatagtgtgatgtttccatggctagcctttggtcacatgatcccaaaccttgagctggccaaactcattgctcaaaagggtcaccacgtgagtttcgtatccacccaagaaacatagagcgtcttccaaaaccgtcactaaacacacttgatatcaatttcgtgaaccttccactgcctaaagtccaaaaccttccagaaaacgcagaagccaacactgacatcccctacgacgtctttgaacacctcaaagaagcctacgacgttctccaagaaccgctgaaacgttttctcgaatcttccaaacccgattg

SEQ ID NO: 235908 - DNA, 377 bp, Glycine max
ggcacaagtgagtttgttgatcgagataactagaaacagtgtgatgaaaatgaaggtccttgttttcttcgttgctacaattttggtagcatggcaatgccatgcgtacgatatgttccctctccgaatgaacactggctatggtgcccgtactccggaggtgaaatgcgcaagttggaggcttgctgtggaagcacacaacatctttggctttgagaccattcctgaagagtgcgttgaagcaacaaaggaatacatccatggcgaacaatatagatcagactccaaaacagttaaccaacaagcttacttttatgccagagacctcgaagtccatcgcaaggacacatttgtgttcagtatagatggaacgtact

SEQ ID NO: 235909 - DNA, 380 bp, Glycine max
gcacaagtgagtttgttgatcgagataacgattccgggtcaaggatctgtgccaacagggtaattgtggacgcacgacaccacatgctggggaggctggcatcgatcgtggcgaaagaacttctgaatgggcagaaggtggtggtggtgcgctgcgaggagatttgcatctccggtgggctcgtcaggcagaagatgaagtacttgcgtttcctccgcaagcgcatgaacaccaagccctctcacggccccatccatttccgtgcacccggcaagatcttctggcgcaccgttcgtgggatgataccacacaagacaaagcgcggggaagctgctcttgcgcgattgaaggtgtatgagggcattcctcctccttatgac

SEQ ID NO: 235910 - DNA, 380 bp, Glycine max
gattgtgcaaaaggtggtcatggagcttacaccagcagtgttgaactgaaaggctatgacaacggcattactcaagcatcgtcattccgtacttatcataccccactcaacaagcaggttgactacgttaattctatgagggctgctcgagagttcagttcaagagtttctgattctttgaagattgagatttttccatattcagtgttttatatgttttttgagcaataccttcatatatggaagactgcactgatcaaccttgctatagctattggtgcagtatttattgtgtgcttgattttcacaagcagtttatggagctcatcaataattttgttggtgttggcaatgattgttgttgatcatatgggtttgat

SEQ ID NO: 235911 - DNA, 394 bp, Glycine max
  unsure (1)..(394): unsure at all n locations
gatcccttacaacgaaaccctcttcatcttgtccaaccggtgacaagcatcatggcctcaagagcattgttattgttggctatgtgtgtgcttccggcgatggttgtggccattcgcccagcanagaaccctttttgcgtgaagggtcgtgtctactgtgacccttgccgtgctggttttgagaccccagctaccacctacattgctggtgctgagattatgttgcaatgcaagagcagggttagcaacgaggttgtgtacacgaagaaggggtacaccgactcaaccggagcatacacaatgtacgtggatgaggatcacgcagatcagatctgcagtgccaagcttgtaagcagccctcaacctcaatgcaaggaagtcaccccaagccgcg

SEQ ID NO: 235912 - DNA, 335 bp, Glycine max
ggcacaagtttgttgagatagctagaagcaataagatgaaaatgaaagtgcttgttttgtttgttgctacagttttggtagcatatgaatgccatggctcagactaccagaagttccctctccaaatgaaaactgggtttggtgggcaatacagcaatgaggtggcatgtgccaattggaggcttggcgtggaagcaaacaacgtagtcaagtggcaaactgttcctgcagcttgcggagagtacatagctgactacgttctaggagaccaatatagatcagattccaaaacagttaaccaacaagcttatttctatgctaaatccctcaaactc

SEQ ID NO: 235913 - DNA, 382 bp, Glycine max
ggagcttccctcacacattctctgtgactgcctctgttccgccgaacccagcattttcccaccgttcgggccaccggcggagttagttttccggcaaggatgggtgctgctctgctgtctgagcttgcgacggagatagttgtgccggcctgcgccgtcatcgggatcgtgttctcgttggtgcagtggttcctcgtgtcgcgcgtcaagctcactcccgaccgaaacggaacgacgtcgtcgccgcgcaacaacaagaacggctacggcgacttcctcattgaggaggaagaaggcatcaacgaccacagcgtcgttgtgaaatgcgctgagatacagaacgctatctccgaaagtgcaacatcctttcttttcactgaat

SEQ ID NO: 235914 - DNA, 380 bp, Glycine max
  unsure (1)..(380): unsure at all n locations
ggcacaagtgagtttgttgatcgaaataactagaaacagtgtgatgaaaatgaacgtccttgttttcttcgttgctacaattttggtagcatggcaatgccatgcgtacgatatgttccctctccgaatgaacactggctatggtgcccgtactccggaggtgaaatgcgcaagttggaggcttgctgtggaagcacacaacatctttggctttgagaccattcctgaagagtgcgttgaagcaacaaaggaatacatccatggcgaacaatatagatcagactccaaaacagttaaccaacaagcttacttttatgccagagacctcgaagtccatcccanggacacatttgtgttcagtatagatggcaccgtactct

SEQ ID NO: 235915 - DNA, 352 bp, Glycine max
cccacgcgtccggccgatgtcatcaaggaaatccttggctccgttggagtagaagcagatgaagataggattgaatcgtttttgtctgaagttaagggtaaggatatagttgagcttattgctgccggtagggaaaagttggccacggttccttctggtggtggtggtgccgttgccgtcgccgcagctcctgggggaggtgctgctgctgctgctcctgctgctgaggcaaagaaggaggaaaaggtggaggagaaagaggaatctgatgatgatatgggtttcagtctcttcgattaattggtgtagtctattcagcttttttgttcagaacatattcttaattaacact

SEQ ID NO: 235916 - DNA, 345 bp, Glycine max
ggcacaagtttgttgagatagctagaagcaataagatgaaaatgaaagtgcttgttttgtttgttgctacagttttggtagcatatgaatgccatggctcagactaccagaagttccctctccaaatgaaaactgggtttggtgggcaatacagcaatgaggtggcatgtgccagttggaggcttggcgtggaagcaaacaacgtagtcaagtggcaaactgttcctgcagcttgcggagagtacatagctgactacgttctaggagaccaatatagatcagattccaaaacagttaaccaacaagcttatttctatgctaaatccctcaaactcaccaacaaag

SEQ ID NO: 235917 - DNA, 327 bp, Glycine max
gactcaggcacaacatctctatcgagtaaattaactatgaagcctaccctactattatcccattccttcctgcctctctgtgctttcctggctctttcagaagatgttgaacaagttgtggacataagtggcaaccccattttcccaggtggcacatattacattatgccatcaacttggggcgctgccggtggtggattgatactatgccggacaggaaactcagactgcccagttactgttttgcaggattactcagaaatcttccgtggcacactagtcaacttcagcatatctgggataagccctgtaatcatctttacaggt

SEQ ID NO: 235918 - DNA, 378 bp, Glycine max
  unsure (1)..(378): unsure at all n locations
gattatatttgagttcaaacaaatcaaagccatggccacctccaacttctctattgttctctccgtctccctagccttctttttggtgctacttaccaaggcacactcgaccgataccgtttctttcaccttcaacaagttcaacccagtccaaccaaacattatgctccaaaaagatgctagtatttcatcctctggggtgttacaactcaccaaagttggcagcaacggcgtgcccacctcgggatctctcggtcgtgccctttacgctgccccaatccagatttgggacagcgaaaccggcaaggtagccagctgggctacatcctttaaattcaacattcgcacccaacanatcaaactcagctgacgggcttg

SEQ ID NO: 235919 - DNA, 363 bp, Glycine max
ggcacaagtgagtttgttgatcgagataactagaaacagtgtgatgaaaatgaaggtccttgttttcttcgttgctacaaatttggtagcatggcactgacatgcgtacgatatgttccctctccaaatgaacactggctatggtgcccgtactccggaagtgaaatgcgcaagttggaggcttgctgtggaagcacacaatatctttggctttgagaccattcctgaataatgcattgaagcaataaatgaatacatccatggcgaacaatatagatcagactccagaacagttatacagcaagcatacctttatgccatagacctcgaagtccatcccaaggacacatttgtgttcagtat

SEQ ID NO: 235920 - DNA, 347 bp, Glycine max
gggttcaaagcacgccgtgtttcgctgtctctcccatcctttcgcagtctcaatacccttctgatctgtgaaaggaaagcaaacatggttgatcaggtccaacaccctacaatcatggacaaggttgctggtcagctccatctccgttctggtctttcatctggtattagaagttatgatggagcctaccgccacccatctatgtaccaaagaccctcttttgggaattactcgaatgctgcattgcagttacctgtgatgcccacattcaaagctaccatggatttgtctgctactgcaacatcagcctcacacgtccttgttgctgctccaggagacaaaggcca

SEQ ID NO: 235921 - DNA, 387 bp, Glycine max
ggcacaagtgagtttgttgatcgagataactagaaacagtgtgatgaaaatgaaggtccttgttttcttcgttgctacaattttggtagcatggcaatgccatgcgtacgatatgttccctctccgaatgaacactggctatggtgcccgtactccggaggtgaaatgcgcaagttggaggcttgctgtggaagcacacaacatctttggctttgagaccattcctgaagagtgcgttgaagcaacaaaggaatacatccatggcgaacaatatagatcagactccaaaacagttaaccaacaagcttacttttatgccagagacctcgaagtccatcccaaggacacatttgtgttcagtatagatggcaccgtactctctaatat

SEQ ID NO: 235922 - DNA, 400 bp, Glycine max
aagacgacagaagggaaagagacccggaaagggtgggaaccgcttttggaaatccattgggcttggatttaagactcccagggaagccatcgaaggaacctacattgacaagaagtgccccttcactggcaatgtttccatccgtggccgtatcttggctggaacatgtcacagtgctaagatgaacaggactattattgttaggaggaattatctccattttatcaagaagtaccagaggtacgagaaaaggcactccaacattcctgctcatatatcacctgctttccgtgtgaaggaaggagatcacgttattattggtcaatgcaggccactttctaagactgtgaggttcaatgtgttgaaagtgatcccagctggatcttctagcggtgcaaag

SEQ ID NO: 235923 - DNA, 380 bp, Glycine max
  unsure (1)..(380): unsure at all n locations
gacccacaccattctacactcccctctctcactcactcacactctcttctgtcatagctgtaccacgtttttcttctccatctcagcctctgtcccaacaccattctcatggctgctctagctctagcactgcttcttctggctttcactggcacttcaagtgctacatggtgcgtttgcaaggatggaagcgacgcgatcctgcagaaaaccttggactatgcttgtggagctggtgctgactgtaatcctctccaccaaaacgggccttgtttccagcccaacaccgttagggcccactgtaactacgccgtgaacagctacttccaaaggaagggtcaagctcaagggtcctgcgactttgcnggaacagccattgt

SEQ ID NO: 235924 - DNA, 379 bp, Glycine max
gacaacacaacgcaacacaacgcgcactctctcttttctctcttaacacaaaaaccctatcgttcttcgcggtttcgccgattctcgccatgccgaaagccaaatccgacgccaaagccgccgatagccggttgaagcgcaagggcgctggtgctggaaggaagcaatcgaagaaagctgctaaggatcctaacaagccaaagagacctccaagcgctttcttcgttttcatgtccgagttcagagagcagtttaagaaggagcatcctaacaacaaatccgtcgctgttgtcggtaaagctggtggtgacaaatggaaatcgctgtctgatgctgaaaaggcccccttcgttgccacggccgaaaagaagaaacaaga

SEQ ID NO: 235925 - DNA, 341 bp, Glycine max
gagcgaaacagagagtgatttcagtgagtgatcggtgttcacttgatctcatcataatcgtcagcgtcaattgaagaagatgccgatcagaaacatcaccgtcggaaggcctgaagaggcgactcaccccgacacgttgaaggcggctttggctgagttcatctcaaccttcatcttcgtgttcgccggctcaggctccggcatcgcctacaacaagctcaccgacaacggcgctgccacccctgccggcctcatctccgcctccatcgcccatgcattcgccctcttcgtcgccgtctccgtcggcgccaacatctccggcgggcacgtcaaccccgccg

SEQ ID NO: 235926 - DNA, 381 bp, Glycine max
ggcacaagtgagtttgttgatcgagataactagaaacagtgtgatgaaaatgaaggtccttgttttcttcgttgctacaattttggtagcatggcaatgccgtgcgtacgatatgttccctctccgaatgaacactggctatggtgcccgtactccggaggtgaaatgcgcaagttggaggcttgctgtggaagcacacaacatctttggctttgagaccattcctgaagagtgcgttgaagcaacaaaggaatacatccatggcgaacaatatagatcagactccaaaacagttaaccaacaagcttacttttatgccagagacctcgaagtccatcccaaggacacatttgtgttcagtatagatggcaccgtactctc

SEQ ID NO: 235927 - DNA, 378 bp, Glycine max
ggcgtcgctccgcaccagtttcaccgcacgaatatcttgttgtttggagcgatccgagaaaaactctgtaaacatgttggtttaccaggacctccttacaggtgatgagcttctctctgactccttccgttacaaggaaattgagaatggaatgctgtgggaagttgaggggaagtgggttgttaaaggagcagttgatgtagacattggtgcaaacccttctgctgagggtggaggagaagatgagggagttgatgatgcagctgttaaggttgttgacattgttgacacattcagacttcaggagcaacccgcattcgataagaagcagtttgttaccttcatgaagaggtttatcaagaatttgactcccaagct

SEQ ID NO: 235928 - DNA, 360 bp, Glycine max
gatgactatcaccatgctgtgagacctttttccatctagagttgttgcggctctcttctctgcacactcagaatgcagtccagactcttcaaccccaccaattcccttatcccaacttcacaagactccaacaagttcaaattctggtcatgcttctctctccgttcgcgcctcaatcgccgtggaaacccccacggagacggtgaagctgaacaagtacagctctcgcatcacggagcccaaatcgcagggcgcctcccaggccgtgctctacggcgtcggtctctccgaggacgacatggccaagccccaggtcggcgtctcctcggtctggtacgagggcaacacctgcaacatgca

SEQ ID NO: 235929 - DNA, 392 bp, Glycine max
gaccagttagttgctttgtttcactcacactgtgtttggagcagaatcagatcgtgtgttccgtacgttcgttcgttcatttccagtgtcaaacatggcgtctcagatgagcaagaagagaaagtttgttgcggacggagtgttcttcgccgaactgaacgaggttctgacacgtgaattggcggaggacggttactccggcgtggaagttagggttacgccgatgcgcaccgagatcatcatcagagccaccagaacccaggctgttctaggtgagaagggaaggagaattagggaacttacctcagtggtgcagaagaggttcaaattccccgaaaacagtgtcgagctttatgctgagaaggtcaacaacagaggcttgtgtgccattg

SEQ ID NO: 235930 - DNA, 382 bp, Glycine max; identical to SEQ ID NO: 235455

SEQ ID NO: 235931 - DNA, 355 bp, Glycine max
gataatcattacacatcataggctctctctctagggtttgatcagactcaagggtttaagccatgggaaaaaggaaggcaaaggcaaagcctcctccaaagaagcgaatggataagctcgataccgtcttcagctgccctttctgcaatcatggcagcagcgtcgaatgccgccttgacatgaagaacttgataggggaagctatttgcgggatatgccaagagagctttagcactaccatcacagctttatcagagccaatagacatatacagtgagtggattgatgaatgtgaactggtaaaccacccggacgatgatggtgctgagcactgatgctcagattcctgttcttg

SEQ ID NO: 235932 - DNA, 382 bp, Glycine max
  unsure (1)..(382): unsure at all n locations
gactaaacagagtaactaactaaattaaggagagtccaagtgtgtgggagacanagagagacatggctaagtggtgtatgttggtgttggttcttgctctggctgtggctacaagtgccagagatgttcccaatcccaaaggatgctggtctcaatgaccagaagaacttcatcagctatggtggagttggtggctattctggaattggaagcaatggactaccttttggaggtgtcggaatangtggtggtattggcggtggtggacttggtggcggcctcggcggcaccaccgggataagtgggttgggaggattcggaggtcncattggtggcggtggtgttggtggtggtagcatacctcatcctaccccttgatata

SEQ ID NO: 235933 - DNA, 302 bp, Glycine max
aaaggtcaacaatttggtgttaactaaaagccaatttaaccttaagaagatatgaaattgtttggtttccttggtgctgcaatatttttggtaacatggccatgccatggcgcacgcgaccaaaagttccctctccgaatgaaaactggctatagtgagcgttcttcggaggtgaaatgcgcaagttttacgcgtgctgtggaagcacacaacatccgagcctttaaaaccattcctgaagagtgcgttgaaccaacaaaagactacattaatggcgaacaatttagattatactccaaaac

SEQ ID NO: 235934 - DNA, 378 bp, Glycine max
ggtgcacaagtgagtttgttgatcgagataactagaaacagtgtgatgaaaatgaaggtccttgttttcttcgttgctacaattttggtagcatggcaatgccatgcgtacgatatgttccctctccgaatgaacactggctatggtgcccgtactccggaggtgaaatgcgcaagttggaggcttgctgtggaagcacacaacatctttggctttgagaccattcctgaagagtgcgttgaagcaacaaaggaatacatccatggcgaacaatatagatcagactccaaaacagttaaccaacaagcttacttttatgccagagacctcgaagtccatcccaaggacacatttgtgttcagtatagatggcaccgta

SEQ ID NO: 235935 - DNA, 360 bp, Glycine max
gatccatttctcgcaacaacgcttaacctctctcattccccatttcctcacctccttcaaccgctgctaaattctagggttccgaaatggacgctggcggaaagatcaagaagggcgccggaggtagaaagggcggcggcccaaagaagaagccggtttcaaggtccgtcaaagccggtctccaattccccgtcggaagaattggccgttatttgaagaaaggaaggtacgctcagcgtgtcggtaccggtgctcccgtatacttggctgcagttctcgaatacctagctgccgaggtgcttgagttggctgggaatgccgcacgtgacaacaagaagaacaagattattccaagacacg

SEQ ID NO: 235936 - DNA, 379 bp, Glycine max
gatccatttctcgcaacaacgcttaacctctctcattccccatttcctcacctccttcaaccgctgctaaattctagggttccggggtggacgctggcggaaagatcaagaagggcgccggaggtagaaagggcagcggcccagagaagaagccggtttcaaggtccgtcaaagccggtctccaattccccgtcggaagaattggccgttatttgaagaaaggaaggtacgctcagcgtgtcggtaccggtgctcgcgtatacttggctgcagttctcgaatacctagctgccgatgtgcttgagttggctgggaatgccgcacgtgacagcaggaagaacaggattattccaagacacgtgcttttggcagtgaggaa

SEQ ID NO: 235937 - DNA, 400 bp, Glycine max
agaagggggtattctattcttcaagattcaggtactgcgtttcggaagcagacacagatggctcgtacgaagcaaaccgctcgtaagtccacaggaggaaaggctcctaggaagcagcttgcaaccaaggctgcacgtaagtctgcaccaactactggtggtgtgaagaagccccaccgttatcgtcctggtaccgttgctcttcgtgagattaggaaataccagaagagtaccgagcttttgatccggaagctccccttccagaggctggttcgtgaaattgctcaggacttcaagactgatctgcgtttccagagccacgccgtgcttgcattgcaagaagctgctgaggcataccttgttgggctctttgaggacactaacctgtgtgccattcacg

SEQ ID NO: 235938 - DNA, 380 bp, Glycine max
gacaacactcagagtagagtaaccaaaaggagagtgcaataactcgttgtacattcctagtgtgtgggagagacatggctaagatgtgtgttttggtgttggttcttgctctggctgtggccacaagtgccagaaacgttcccaaccccaaggatgctggtcttaaggaccagaagaacttcatcagctatggtggagttggtggttattccgggattgggaacaatggactgccttttggaggagctggtgcctgaataggtagtggttttggtagaagtgatggacttggtggtggactctgacgtccaagcgatagaatccgaagtttagcgcgagacacatttgggttcagtagagatagcaccgtactctctaat

SEQ ID NO: 235939 - DNA, 390 bp, Glycine max
ggcacaagtgagtttgttgatcgagataactagaaacagtgtgatgaaaatgaaggtccttgttttcttcgttgctacaattttggtagcatggcaatgccatgcgtacgatatgttccctctccgaatgaacactggctatggtgcccgtactccggaggtgaaatgcgcaagttggaggcttgctgtggaagcacacaacatctttggctttgagaccattcctgaagagtgcgttgaagcaacaaaggaatacatccatggcgaacaatatagatcagactccaaaacagttaaccaacaagcttacttttatgccagagacctcgaagtccatcccaaggacacatttgtgttcagtatagatggcaccgtactctctaatattcc

SEQ ID NO: 235940 - DNA, 406 bp, Glycine max
  unsure (1)..(406): unsure at all n locations
ggagcaaaaccctaatccctatttttcttcctcagtagtgtcatttacgcttctcttctctgcagcaactatgcctaaccctaaggtcttcttcgacatgaccatcggcggtcaatctgctggccgcatcgtgatggagctctacgccgacgtcactccccgcaccgccgagaacttccgcgcgctttgcaccggcgagaagggcgtanggcggagcggcaagcccctccactacaagggctcgtccttccaccgcgtgatcccgagtttcatgtgtcagggtggcgacttcaccgccggaaacggaaccggcggcgagtcgatttatggcgccaagttcgccgacgagaacttcgtgaagaagcacaccggtcccggcatcctctccatggcgaacgccggtccc

SEQ ID NO: 235941 - DNA, 344 bp, Glycine max
aaacagaagagagagagagagagagagagagtcctgaaacttgggtgcgattccttcactcacaacaacaacacatcactatggctcttctgagtcgagcctcttcacgcttccctcagctggtttcccctcaaagggtagtttcactccacacaacgctcccatctctgaacgcatccccatccacagccacgcctacaccatatgccccgccaccgcctccgtccgcttcctctcccgccggcgtttcgaaggcggcggagttcgtgatctcgaaggtggacgatctgatgaactgggcccgccgcggctccatctggcccatgaacttcggcctcgcctgc

SEQ ID NO: 235942 - DNA, 365 bp, Glycine max
gaccacattccaaaacacaaacacatacattgtagtatcacttttgtctcggaatttgttcttttgagttatggcaagcttaaaggttgcatgtgtggttttgatgtgcatggctgtgatgagtgcaccaatgatggtgcaagccgtgtcatgcaatgatgtttctgtgaacctagcaccgtgcctatcttacctgatgcagggtggagatgttccagaatcgtgctgtagcggagtgaggaacattctgggttctgccagcaccacctttgacaaacaaaccgtgtgcaaatgtcctcagcaagctgctaatgactatggcatcaacgacgaatacgctcaggcactccccgcccgctgcaatg

SEQ ID NO: 235943 - DNA, 379 bp, Glycine max
gatgcacaagtttgttgagatagctagaagcaataagatgaaaatgaaagtgcttgttttgtttgttgctacagttttggtagcatatgaatgccatggctcagactaccagaagttccctctccaaatgaaaactgggtttggtgggcaatacagcaatgaggtggcatgtgccagttggaggcttggcgtggaagcaaacaacgtagtcaagtggcaaactgttcctgcagcttgcggagagtacatatctgactacgttctatgagaccaatatagatcagattccaaaacagttaaccaacaagcttatttctatgctaaatccctcaaactcaccaacaaagatgtctttgtcttggacgttgacgacactact

SEQ ID NO: 235944 - DNA, 327 bp, Glycine max
tggggcacaagtgagtttgttgatcgagataactagacacagtgtgatgaaaatcaaggtccttgtgttcatcgttgctacaattttggtagcatggcaatgccatgcgtacgatatgttccctctccgaatgaacactggctatggtgcccgtactccggatgtgaaatgcgcaagttggaagcttgctgtggaagcacacaccatctttggctttgagaccattcctgaagagtgcgttgaagcaacaaaggaatatatccatggcgaacattatacatcagactcaattacagttaaccaacaagcatacttttatgccagaga

SEQ ID NO: 235945 - DNA, 377 bp, Glycine max
ggcacaagtgagtttgttgatcgagataactagaaacagtgtgatgaaaatgaaggtccttgttttcttcgttgctacaattttggtagcatggcaatgccatgcgtacgatatgttccctctccgaatgaacactggctatggtgcccgtactccggaggtgaaatgcgcaagttggaggcttgctgtggaagcacacaacatctttggctttgagaccattcctgaagagtgcgttgaagcaacaaaggaatacatccatggcgaacaatatagatcagactccaaaacagttaaccaacaagcttacttttatgccagagacctcgaagtccatcccaaggacacatttgtgttcagtatagatggcaccgtac

SEQ ID NO: 235946 - DNA, 356 bp, Glycine max; identical to SEQ ID NO: 234809

SEQ ID NO: 235947 - DNA, 263 bp, Glycine max
ggcacaagtttgttgagatagctagaagcaataagatgaaaatgaaagtgcttgttttgtttgttgctacagttttggtagcatatgaatgccatggctcagactaccagaagttccctctccaaatgaaaactgggtttggtgggcaatacagcaatgaggtggcatgtgccagttggaggcttggcgtggaagcaaacaacgtagtcaagtggcaaactgttcctgcagcttgcggagagtacatagctgactacgttcta

SEQ ID NO: 235948 - DNA, 387 bp, Glycine max
ggttctagtgtgtgattgtttgttgttgtaactcgttcttcttcttttgttgttctgtgtttgtgtttgttttttctctcacctgaaaatgtcttgctgcggtggtaactgtggttgcggaagctcctgcaagtgcggcaacggctgcggaggctgcaagatgtacccagacttgagctacactgagtcaaccaccaccgagaccttggtcatgggagtggcacctgttaaggctcaatttgagggtgctgaaatgggtgtgcccgctgagaacgatggctgcaaatgtggaccaaactgctcctgcaacccctgcacttgcaagtgaggtgttgggagagcaagcttcaagcagagatagcccttaattaagaataatgataaact

SEQ ID NO: 235949 - DNA, 388 bp, Glycine max
ggcacaagtttgttgagatagctagaagcaataagatgaaaatgaaagtgcttgttttgtttgttgctacagttttggtagcatatgaatgccatggctcagactaccagaagttccctctccaaatgaaaactgggtttggtgggcaatacagcaatgaggtggcatgtgccagttggaggcttggcgtggaagcaaacaacgtagtcaagtggcaaactgttcctgcagcttgcggagagtacatagctgactacgttctaggagaccaatatagatcagattccaaaacagttaaccaacaagcttatttctatgctaaatccctcaaactcaccaacaaagatgtctttgtcttggacgttgacgacactactctctctaatct

SEQ ID NO: 235950 - DNA, 363 bp, Glycine max
gagactggttggattatcttgctggtaattacaaggttcctgtggttccagttgggttgcttccaccatccatgcagataagggacgttgaagaggaagacaataaccctgattgggtcagaatcaaggattggttagacacacaagagtcgtcatccgtggtttatattgggtttgggagcgagttgaagctgagtcaggaggacctcactgagttggcacatggcattgagctttcaaatttgcctttcttttgggcattgaagaacctgaaagaaggtgtgcttgagttgccagaagggtttgaagaaagaaccaaggaacgtggcattgtttggaagacttgggcaccccagcttaaga

SEQ ID NO: 235951 - DNA, 325 bp, Glycine max
gacacaccgtttgttctattcttaactcaacttctgctacccactctcttcttccaagtccaaccacgcttttctctacagtcatgggcaaggtcaagatcggaatcaacggatttggaagaattggccgtttggttgccagagtcgctctgcaaagagacgatgtggagctcgttgccgttaacgaccctttcattaccaccgattacatgacatacatgtttaaatacgacagtgttcacggacactggaagcatcacgatgtcaccgttaaggacgagaagacccttctcttcggtgacaagccagtcactgtttttggaca

SEQ ID NO: 235952 - DNA, 379 bp, Glycine max
gacaatcgaacgggaaaaggcgtcttcataaacgccgcccaaaacttctcatacccttttattcattccattcgtttctagggttttcttttctttgccgagaaaatgagagagtgcatttcgatccacattggccaggccggtatccaggttggaaacgcctgctgggaactctattgccttgaacacggcattcagcccgatggacagatgccgagtgacaagaccgttggcggaggagacgacgccttcaacacatttttcagcgagaccggcgccggaaagcacgtgccccgcgccgtcttcgtggatcttgaacccaccgtgatcgacgaagtccgaaccggtgcgtaccggcagctcttccacccggagcagc

SEQ ID NO: 235953 - DNA, 331 bp, Glycine max
gccatcggcgcggcacacacagacacacacatttcgtcggaatgggaagggtgattcgcgcacagcgtaagggtgcggggtcggtgttcaagtcccacacccaccaccgcaagggtccggcgaggttccgcagcctcgacttcggcgagcgcaacggctacctcaaaggggtcgtcaccgatatcatccacgaccctggtcgcggtgctcctctagccaaggtggcgttccgccaccccttccgctacaagaagcagatggagctcttcgtcgccgccgagggcctctacaccggccagttcatctactgcggcaagaaggccacctcgtc

SEQ ID NO: 235954 - DNA, 375 bp, Glycine max
gaaagtgcaagagtttgttgtgagctataagctagtttatcgtgaggagaatatgaagttgtttgttttctttgttgctgcagtagttttggtagcatggccatgccatggcgcaggctaccaaaggttccctctccgaatgaaaactggctatggtgagcgttcttcggaggtaaaatgcgcaagttttaggcttgctgtggaagcacacaacatccgagcctttaaaaccattcctgaagagtgcgttgaaccaacaaaggactacattaatggcgaacaatttagatcagactctaaaacagttaaccaacaagctttcttttatgctagtgaacgcgaagtccatcacaacgacatatttatattcggcat

SEQ ID NO: 235955 - DNA, 378 bp, Glycine max; identical to SEQ ID NO: 235798

SEQ ID NO: 235956 - DNA, 358 bp, Glycine max
gaaggtgcaagagtttgttgtgagctataagctagtttatcgtgaggagaatatgaagttgtttgttttctttgttgctgcagtagttttggtagcatggccatgccatggcgcaggctaccaaaggttccctctccgaatgaaaactggctatggtgagcgttcttcggaggtaaaatgcgcaagttttaggcttgctgtggaagcacacaacatccgagcctttaaaaccattcctgaagagtgcgttgaaccaacaaaggactacattaatggcgaacaatttagatcagactctaaaacagttaaccaacaagctttcttttatgctagtgaacgcgaagtccatcacaacgac

SEQ ID NO: 235957 - DNA, 386 bp, Glycine max
ggctgagtgagtgagggggcattctgaacaaagttggggctgaaaaacagagtctccgacccagtaaggagaaatggactggtgggtgtcaatgccaaagatagaactgcatgctcacctcaatggatccattagagactctacacttctagaactcgctagagctttgggtgacaaaggtgtcatagatttctcccaagtcgaacatgttatccttaaaaatgatcgttcattaagtgaggtattcaagttgtttgacttaatccacgttgttactactgatcactcaagtattacgagaattaccaaagaagttgttgaagattttgcatttgagaatgttgtgtatctggagctgaggactacaccaaagaaaaatgattccc

SEQ ID NO: 235958 - DNA, 408 bp, Glycine max
  unsure (1)..(408): unsure at all n locations
gacccacgagtcaatacgggnnnnnnannacaccnnacggggccctagccttgcgttcaaaccaatcaaagccatggccacctccaacttctctattgttctctccgtctccctagccttctttttggtgctacttaccaaggcacactcgaccgataccgtttctttcaccttcaacaagttcaacccagtccaaccaaacattatgctccaaaaagatgctagtatttcatcctctggggtgttacaactcaccaaagttggcagcaacggcgtgcccacctcgggatctctcggtcgtgccctttacgctgccccaatccagatttgggacatcgaaaccggcaaggtagccagctgggctacatcctttaaattcaacattttcgcacccaacaaatcaaactc

SEQ ID NO: 235959 - DNA, 385 bp, Glycine max
ggcacaagtgagtttgttgatcgagataactagaaacagtgtgatgaaaatgaaggtccttgttttcttcgttgctacaattttggtagcatggcaatgccacgcgtacgatatgttccctctccgaatgaacactggctatggtgcccgtactccggaggtgaaatgcgcaagttggaggcttgctgtggaagcacacaacatctttggctttgagaccactcctgaagagtgcgttgaagcaacaaaggaatacatccatggcgaacaatatagatcagactccaaaacagttaaccaacaagcttacttttatgccagagacctcgaagtccatcccaaggacacatttgtgttcagtatagatggcaccgtactctctaat

SEQ ID NO: 235960 - DNA, 349 bp, Glycine max
aggggtgattggtcacgcggacccttacgacggaattaccattatggagctgataagtcctgttgtgtcgaaattagctccaaagcatgccataggaagggatgcacttaccgactcggaggggaagcatatgattacgttaagaagcataatctgataccctaatgtatcaatgtcatcatcaatatgtaatttacagcgaactttgctatgggtacgttctttgagatcacagtcgtgatgaacagtatcattctgatgtaatgctttccttgacaattattgcattcttcttatccttctgttaattaagctagctttgctatggttacattccttgcgatctaaa

SEQ ID NO: 235961 - DNA, 349 bp, Glycine max
ggcacaagtgagtttgttgatcgagataactagaaacagtgtgatgaaaatgaaggtccttgttttcttcgttgctacaattttggtagcatggcaatgccatgcgtacgatatgttccctctccgaatgaacactggctatggtgcccgtactccggaggtgaaatgcgcaagttggaggcttgctgtggaagcacacaacatctttggctttgagaccattcctgaagagtgcgttgaagcaacaaaggaatacatccatggcgaacaatatagatcagactccaaaacagttaaccaacaagcttacttttatgccagagacctcgaagtccatcccaaggacaca

SEQ ID NO: 235962 - DNA, 303 bp, Glycine max
ggcacaagtttgttgagatagctagaagcaataagatgaaaatgaaagtgcttgttttgtttgttgctacagttttggtagcatatgaatgccatggctcagactaccagaagttccctctccaaatgaaaactgggtttggtgggcaatacagcaatgaggtggcatgtgccagttggaggcttggcgtggaagcaaacaacgtagtcaagtggcaaactgttcctgcagcttgcggagagtacatagctgactactttctaggagaccattatagatcagattccaaaacagttaaccaac

SEQ ID NO: 235963 - DNA, 347 bp, Glycine max
gatcagtatagaccaccttccctctcttctgttaccaatggctccctcatcaaactacatttctttccttttcctcaccacccttttgtttgctcttcaaatcagtgcaagagacagccagttcttcagcaaagtcacccattttgacaaaaacagtgtcaaagagacagaacttcccaacaaagaagcaccagaagtgaacaagccagagcaacaaccacctttcattccggagactgaaaacagctatggcctatatggtcatcatgatgagtataaccaagtcccttccaccaccaccaaccccacttcttaccacccctacaagaccgagtttgagaactcca

SEQ ID NO: 235964 - DNA, 355 bp, Glycine max
ggaacctttgcattctattcattcaagattcagcaagtgcgttttggaagcagagaccgaaatacttcgagatggcccgtacaaagcaaactgctcgtaagtcaactggaggaaaagctcccaggaagcagcttgcaaccaaggctgcacgtaagtctgcaccaacaactggtggtgtgaagaagcctcatcgttatcgccctggaactgttgctcttcgtgagattaggaaataccagaagagcactgagctcctaatcaggaagcttcctttccagaggttggttcgtgaaattgcccaggatttcaagactgatctgcgtttccagagccatgctgtgcttgcattgcaaga

SEQ ID NO: 235965 - DNA, 364 bp, Glycine max
ggggaaaatttgtcaaataaattcatctaaccccaaacaaaaccctagcacacttttatcgcttagtggcagcagcagtggcggcaagcaactccatccgcaatgggaatcgatttgaaggcaggaggtaagtccaagaagaccaagcgaaccgcccccaaatccgatgatatctacctcaagcttctcgtcaagctgtaccgttttcttgttcggaggactgggagtaacttcaatgctgttgtcctcaagcgccttttcatgagcaaggtcaacaagcccccgctatccctctctagattgatccgttacacgaagggaaaggaggataagatagctgtggttgttggtgccgtgaccgatg

SEQ ID NO: 235966 - DNA, 406 bp, Glycine max
agacgacagaaggggaatactaaataagttgactccggagaaatttgatctcctgaagggtcagttgatcgattctggcattacatcagccgacatattgaagggagttatttcgctgatatttgataaggcagtgctggaaccaacattttgccccatgtatgctcagctgtgttctgatcttaatgaaaagctgcctccattcccatctgacgagcctggtgggaaagaaatcacttttaagcgagtactcttgaatatctgccaggaggcttttgaaggtgcagataaactgagggaagaactgagacagatgactgcccctgaccaggagatggagcgacgggacaaggaaaggcttgtcaagattcgaacccttggaaatatccgtttaattggtgagctg

SEQ ID NO: 235967 - DNA, 392 bp, Glycine max
  unsure (1)..(392): unsure at all n locations
gcccaactcttcctctttttacttcccctatggctcgtcactccttgctcttagccctcctcctcttcgccgcctgtggcancgccgcgatggcggtggccgcgtccgacgccgacgacatcctgatccgtcaggtggtgccagatgttggcgaagccgaagaggaggacaacctgctgaacgccgagcaccacttcgcgagcttcaaggccaagttcgccaagacctacgccaccaaggaggagcacgatcatcgcttcggcgtcttcaagtccaacctccgcagagccaggctgcacgccaagctcgacccctccgccgtccacggcgtcaccaaattctccgatctaactccggccgagttccgccgccagttcctcggcctcaagccg

SEQ ID NO: 235968 - DNA, 380 bp, Glycine max
gcaccatgaatctcttacagaggcacatcctggtgacaatgtgggattcaatgttaagaatgttgctgttaaggatttgaagcgtggttacgttgcctcaaactcaaaggatgaccctgcaaaggaggctgctaacttcacagcccaagtcatcatcatgaaccaccctggtcagattggaaatggctatgcccctgtcctcgactgccacacttctcacattgctgtcaagtttgctgaactcatgaccaagattgacaggcgatccggcaaagagcttgagaaggagcccaagtttttgaagaacggtgatgctggttttgttaagatgattccaaccaaacccatggttgttgaaactttctccgagtatcctccac

SEQ ID NO: 235969 - DNA, 385 bp, Glycine max
ggcagtgagaagaagagggggtcagagtgagaaagagaaagagagaattcgtaaaccctaatttcggaaagatcggcgatgactgcctccaaggatcgcgagaacttcgtctacatcgccaaactcgccgagcaggccgagcgttacgaagagatggtggaatcaatgaagaacgttgcgaatctcgacgttgaactgacggtggaggagcggaatttgctttctgttgggtacaagaatgtgattggtgctcgcagagcgtcctggaggatcctgtcttccattgagcagaaggaagaaacaaaagggaacgagttgaatgcgaagcggattaaggagtacagacagaaggttgaattggagctatcgaacatctggtatgatg

SEQ ID NO: 235970 - DNA, 393 bp, Glycine max
  unsure (1)..(393): unsure at all n locations
aaaagggggaaaaattaatttggttattcaaaatactaaaaacattttaataaaattaaaggccctggtttcctccttggcaaaattttgggaacaagggaatgccatgcgtacgatatgttccctctccgaatgaacactggctatggtgcccgtactccggaggtgaaatgcgcaagttggaggcttgctgtggaagcacacaacatctttggctttgagaccattcctgaagagtgcgttgaagcaacaanaggaatacatccatggcgaacaatatagatcagactccaaaacagttaaccaacaagcttacttttatgccagagacctcgaagtccatcncaaggacacatttgtgttcagtatagatggcaccgtactctctaatat

SEQ ID NO: 235971 - DNA, 360 bp, Glycine max
  unsure (1)..(360): unsure at all n locations
gacaacacagaacanaaacaaagaaaaaaaaaacccttagccaacacaaccatcatggccacctctgctattcagcaatcagcattcacttgtcaaactgctctgaagcagctcaatgagttcgtccgcaagaccggtggcgccggcaaaggtcgcactaacatgcgccgcaccgtcaagagtgctcctcagagcatttggtatggccctgaccgtcccaagtacttgggtccattctcggagcagattccatcatacctgaccggagaattccctggtgactacggatgggacactgctggattatcagctgacccggaaaccttcgccaggaaccgggagctggaggtgattcacagc

SEQ ID NO: 235972 - DNA, 378 bp, Glycine max
  unsure (1)..(378): unsure at all n locations
ggcacaagtgagtttgttgatcgagataactagaaacagtgtgatgaaaatgaaggtccttgttttcttcgttgctacaattttggtagcatggcaatgccatgcgtacgatatgttccctctccgaatgaacactggctatggtgcccgtactccggaggtgaaatgcgcaagttggaggcttgctgtggaagcacacaacatctttggctttgagaccattcctgaagagtgcgttgaagcaacanaggaatacatccatggcgaacaatatagatcagactccaaaacagtttaacaacaagcttacttttatgccagagacctcgaagtccatcncaaggacacatttgtgttcagtatagatggcaccgtact

SEQ ID NO: 235973 - DNA, 377 bp, Glycine max
  unsure (1)..(377): unsure at all n locations
gacagccacaacactttccacttgtctccgaattagttatcttgagaaacattattcccattgctatatattatggctagcatgaaggttacatgggtggttgtgatcatgtgcatggccgtggtgggtgcaccgatgatggcgcaagccatgacatgcaatgatgtgacggtgaacatggcacagtgcctatcctacctgatgcagggaggaacaccttcaacactttgctgcagcggagtcaagaacattcttggctctgctgtcaccaccgttgacaaacaaactgtgtgcaactgtctcaaggcggatgctgctaggtacaacatcaatgaccagtatgctcaggcactccctgnttttctgcaagtcaatgt

SEQ ID NO: 235974 - DNA, 378 bp, Glycine max
ggcgtacgcagcttcatccctaacgcgtgcatagcagagtcagagacagagacgcagccatggggcggagacctgcgaggtgttataggcaaattaagaacaagccaataccccaagtcacgtttctgccgtggtgttcctgatcccaagatcaggatttatgatgttggtatgaagaagaagggtgttgatgagtttcctttctgtgtccatctggttagttgggagaaggaaaatgtttcaagtgaggccctggaagctgctcgcattgcttgcaacaagtacatggccaaatttgctggaaaggatgctttccacttgagagtcagggtgcacccattccatgttcttaggatcaacaagatgctttcgtgtgct

SEQ ID NO: 235975 - DNA, 344 bp, Glycine max
  unsure (1)..(344): unsure at all n locations
gacaacactcatagtagagtaaccaaaaggagagtgcaataactcgttgtacattcctagtgtgtgggagagacatggctaagatgtgtgttttggtgttggttcttgctctggctgtggccacaagtgccagaaacgttcccaaccccaaggatgctggtcttaaggaccagaagaacttcatcagctatggtggagttggtggttattccgggattgggaacaatggactgccttttggaggagctggtgccggaataggtggtggttttggcggaggtggtggacttggtggtggcctcggcggtcctaccggtgggatcgganggtttggcggtaccggt

SEQ ID NO: 235976 - DNA, 374 bp, Glycine max
  unsure (1)..(374): unsure at all n locations
ggtgctctatgattcccagaccttattttttctgtcatttgcttcaaatttcagggagattaattatggctcaacccacaacaagaataggccttgctggattggctgttatgggccaaaatctggcactcaatattgctgagaaaggctttcccatttctgtttacaaccgaaccacttccaaggttgatgagacagtagaacgagcaaaacaagaaggaaatcttccagtttatggctaccatgaccctgaagcttttgttcattccattcaaaagcctaaggtgataataatgcttgttaaggctggggcacctgttgaccagaccattaagaacctatctgcgtacatggaanaaagtgactgtataatt

SEQ ID NO: 235977 - DNA, 327 bp, Glycine max
  unsure (1)..(327): unsure at all n locations
ggcacaagtgagtttgttgatcgagataactagaaacagtgtgatgaaaatgaaggtccttgttttcttcgttgctacaattttggtagcatggcaatgccatgcgtacgatatgttccctctccgaatgaacactggctatggtgcccgtactccggaggtgaaatgcgcaagttggaggcttgctgtggaagcacacaacatctttggctttgagaccattcctgaagagtgcgttgaagcaacaaaggaatacatccatggcgaacaatatagatcagactccaaaacagttaaccagcaagcttacttgntatgccagagact

SEQ ID NO: 235978 - DNA, 375 bp, Glycine max
  unsure (1)..(375): unsure at all n locations
gacactcgtttggtttcatctctttctctctctctctctctatctatctatcttatttttctctctctaaaatcctctgtgagaacgtgcacagcaatggctacagaggtaagctctctgattagggtgatgggtggcggctacaaggaggagcagcatcggactgtggggaatgagtcacacggtgagaaatcaacggctctcattactcgggacttgctcggtgggtcctcgattgaatcacaggaattggacctcgatttgcaggttcctagtggctgggagaagagactcgaccttcagtcaggaaaagtctatctccaaaagtgcaaacacacaataggctttcnatcaatctctgaacacaacaagctg

SEQ ID NO: 235979 - DNA, 379 bp, Glycine max
gacacaaccactctttcttcttcttctcttaaaagagcctttgctttttctttaggcctttccgaattaagtacttgtttcattttctctcgaagcaagaaaaatgttcatcgagagtttcaaggttgagagtcctaacgtgaagtacacagagactgagattcagtccgtgtacaactatgaaaccactgaacttgttcacgagaacaagaatggcacttatcagtgggttgtcaagcccaaaactgtcaaatatgaatttaaaaccaacaaccatgtccctaaactaggggtaatgcttgtggggtggggtggaaacaatggctcaaccctcaccggtggtgttattgctaaccgagagggtatttcatgggcaaca

SEQ ID NO: 235980 - DNA, 366 bp, Glycine max
ggtgcacaagtgagtttgttgatcgagataactagaaacagtgtgatgaaaatgaaggtccttgttttcttcgttgctacaattttggtagcatggcaatgccatgcgtacgatatgttccctctccgaatgaacactggctatggtgcccgtactccggaggtgaaatgcgcaagttggaggcttgctgtggaagcacacaacatctttggctttgagaccattcctgaagagtgcgttgaagcaacaaaggaatacatccatggcgaacaatatagatcagactccaaaacagttaaccaacaagcttacttttatgccagagacctcgaagtccatcccaaggacacatttgtgttcagtata

SEQ ID NO: 235981 - DNA, 394 bp, Glycine max
gcaagtgcaagagtttgttgtgagctataagctagtttatcgtgaggagaatatgaagttgtttgttttctttgttgctgcagtagttttggtagcatggccatgccatggcgcatgctaccaaaggttccctctccgaatgaaaactggctatggtgagcgttcttcggaggtaaaatgcgcaagttttaggcttgctgtggaagcacacaacatccgagcctttataaccattcttgaagagtgcgttgaaccaacacaggactacattaatggcgaacaatttagatctgactctaaaacaatttatccacacgctttcctttatgctagtgaaacctgaatctatcacaccgacatatttatatttggcatagataacaccgtattctct

SEQ ID NO: 235982 - DNA, 358 bp, Glycine max
ggtgcacaagtgagtttgttgatcgagataactagaaacagtgtgatgaaaatgaaggtccttgttttcttcgttgctacaattttggtagcatggcaatgccatgcgtacggtatgttccctctccgaatgaacactggctatggtgcccgtactccggaggtgaaatgcgcaagttggaggcttgctgtggaagcacacaacatctttggctttgagaccattcctgaagagtgcgttgaagcaacaaaggaatacatccatggcgaacaatatagatcagactccaaaacagttaaccaacaagcttacttttatgccagagacctcgaagtccatcccaaaggacacatttgtg

SEQ ID NO: 235983 - DNA, 380 bp, Glycine max
ggcacaagtgagtttgttgatcgagataactagaaacagtgttatgaaaatgaaggtccttgttttcttcgttgctacaattttggtagcatggcaatgccatgcgtacgatatgttccctctccgaatgaacactggctatggtgcccgtactccggaggtgaaatgcgcaagttggaggcttgctgtggaagcacacaacatctttggctttgagaccattcctgaagagtgcgttgaagcaacaaaggaatacatccatggcgaacaatatagatcagactccaaaacagttaaccaacaagcttacttttatgccagagacctcgaagtccatcccaaggacacatttgtgttcagtatagatggcaccgtactct

SEQ ID NO: 235984 - DNA, 378 bp, Glycine max; identical to SEQ ID NO: 235250

SEQ ID NO: 235985 - DNA, 322 bp, Glycine max
ggttcaattgtgtgattgtttgttgttgtaacccgtccttctcctttggtggtccggtgtcggcgttggtttttcccctcaccggaaaatgtcttgctgcggtggtaacggtggttgcggaacctcctgcaattgcggaaacggttgcggaggctgcaaaatttacccaaacttgacctacactgattcaaccacaaccgaaatcttggccatggaattggaaccggttaaggctcaatttgagggtgctgaaatgggtgtgcccgctgaaaacgatggctgcaaatgtggaccaaactgttcctgcaacccctgcacttgc

SEQ ID NO: 235986 - DNA, 376 bp, Glycine max
  unsure (1)..(376): unsure at all n locations
ggcttcgtctcagatcattctgcgcaggtaagacagagagaaagaactgacctcagcggcggcggcggcggcaacagaagaacaaccaccaccacacacaatgggtcgcgtgagaacaaaaacggtgaagaaatcctcccgccaggtgattgagcgttactactcgcgcatgaccctcgacttccacacaaacaaaaagcttctcgaagaagtggccatcatcccttccaagaggctgcggaacaagatcgcgggtttctccacgcatctcatgaagcgcatccagaagggtcccgttcgcggcatctcnctcaagctccaagangangagcgcgagcgccgcatggacttcgtcnccgacgtctcccgcatcaac

SEQ ID NO: 235987 - DNA, 368 bp, Glycine max
gagccacaaacgcaatccctccatcctttgaatgctcttgcgttttcctttcactacctcattcctaactcacacacacacaacgggtgatatcaatgtcgactcctgctatgaagaggctcatgagagatttcaagaggctgcaacaagacccgcctgcaagaatcagcggggcatctcaggataacaacataatgctgtggaacgctgtcatatttggtcctgatgatactccatgggatggaggcacgtttaagttgactctccaatttactgaggattatccaagcaagccatcaactgtacgatttgtctctcgaatgtttcatccaaacatttatgcggatggaagtatttgtttggatata

SEQ ID NO: 235988 - DNA, 370 bp, Glycine max
aggggattatatttgagttcaaacaaatcaaagccatggccacctccaacttctctattgttctctccgtctccctagccttctttttggtgctacttaccaaggcacactcgaccgataccgtttctttcaccttcaacaagttcaacccagtccaaccaaacattatgctccaaaaagatgctagtatttcatcctctggggtgttacaactcaccaaagttggcagcaacggcgtgcccacctcgggatctctcggtcgtgccctttacgctgccccaatccagatttgggacagcgaaaccggcaaggtagccagctgggctacatcctttaaattcaacattttcgcacccaacaaatcaaactc

SEQ ID NO: 235989 - DNA, 379 bp, Glycine max
  unsure (1)..(379): unsure at all n locations
gacaaacagcgcgagacagangcacagagagaaaatggtttcggggacatggatctatgataatcgggaacgtcaagtgaagaagatgccgatcagaaacatcgccgtcggaatgcctgaagaggcgactcaccccgacacgttgaaggcggctttggctgagttcatctcaaccttcatcttcgtgttcgccggctcaggctccggcatcgcctacaacaagctcaccgacaacggcgctgccacccctgccggccgcatctccgcctccatcgcccatgcattcgccctcttcgtcgccgtctccgtcggcgccaacatctccggcggccacgtcaaccccgccgtcaacttcggcgccttcgtcggcggcaacatc

SEQ ID NO: 235990 - DNA, 385 bp, Glycine max
gcacaagtgagtttgttgatcgagataactagaaacagtgtgatgaaaatgaaggtccttgttttcttcgttgctacaattttggtagcatggcaatgccatgcgtacgatatgttccctctccgaatgaacactggctatggtgcccgtactccggaggtgaaatgcgcaagttggaggcttgctgtggaagcacacaacatctttggctttgagaccattcctgaagagtgcgttgaagcaacaaaggaatacatccatggcgaacaatatagatcagactccaaaacagttaaccaacaagcttacttttatgccagagacctcgaagtccatcccaaggacacatttgtgttcagtatagatggcaccgtactctctaata

SEQ ID NO: 235991 - DNA, 399 bp, Glycine max
gagggttttgcgctgttgttgctgctcatcctccgtaacctccgagctctgcaccgaagaacgaagccatggggaagacacatggaatgggatctgctcgcaagctcaagtcccaccgcaggaggcaaaggtgggctgacaagtcatacaagaaatcacatcttggaaatgaatggaagaaaccttttgctggttcatcccatgccaagggaattgtccttgaaaagataggtattgaggctaagcagcccaactctgccatccgtaagtgtgccagggttcaacttatcaagaatgggaagaagattgccgcttttgtccctaatgacggttgccttgaactacattgaagagaatgacgaagtcttgattgctggatttggacgaaaaggtcatgct

SEQ ID NO: 235992 - DNA, 445 bp, Glycine max
cggtcaggaattcgcggctcgaccgatgcgacaatacgacagaaagggatctggcagcagaagaacaagtagttgagaactaagaaggagaagcaaatggcttcctcaatgatctcttccccagctgttaccactgtcaaccgtgccggtgccggcatggttgctccattcactggcctcaagtccatggctggcttccccaccagaaagaccaacaatgacattacctccattgctagcaacggtggaagagtgcaatgcatgcaggtgtggccaccagttggcaagaagaagtttgagactctttcctacctgccagaccttgatgatgcacaattggcaaaggaagtagaataccttcttaggaagggatggattccttgcctgggaatccaatttggagcacggtttcgtgtaccgtgagcacaacaggtcaccaggatac

SEQ ID NO: 235993 - DNA, 400 bp, Glycine max
  unsure (1)..(400): unsure at all n locations
gacagcagcagagcaaaagaaagaaagaaagaaagtgcaacttcctctgttttgctcccctgtttaagccttatcataagcttagaatggcacacaaggaattttccattgccctagtgactctcattgttctctttgtcaacacgaacctccaaggtgccacggctgactatggtggtggttggcagagtgctcatgccactttctatggtgggggtgatgcttctggcacaatgggtggagcatgtgggtatggaaatttgtatagccagggatatggaactgacactgtggctctaagcactgttttgttcaacaatggcttaagctgtggattntggctatgaaataaaatgtgatgatgacccaagatggtgcaaacctggctctattaccgtca

SEQ ID NO: 235994 - DNA, 321 bp, Glycine max
ggagtcagattcgcacgcattgcttcgcctcacaacagcagctgcagcagcaatggctcccaaacgaggtggaaaggctccggctcttgccgctaagaagaagcctgagaaggtcacgaatccgttgttcgagaagcgtccgaagcagttcggaatcggaggggcgttgcctccgaagagagacttgactaggttcgtgaagtggccaaagaatgttcaaattcagaggaagaagaggattctgaagcagaggttgaagggttccccagctttgaaccagttttacaaaactcttgacaaaaacctagcaacaagtcggtt

SEQ ID NO: 235995 - DNA, 327 bp, Glycine max
ggcacaagtgagtttgttgatcgagataactagaaacagtgtgatgaaaatgaaggtccttgttttcttcgttgctacaattttggtagcatggcaatgccatgcgtacgatatgttccctctccgaatgaacactggctatggtgcccgtactccggaggtgaaatgcgcaagttggaggcttgctgtggaagcacacaacatctttggctttgagaccattcctgaagagtgcgttgaagcaacaaaggaatacatccatggcgaacaatatagattagactccaaaacagttaaccaacaagcttacttttatgccagagacct

SEQ ID NO: 235996 - DNA, 388 bp, Glycine max
ggagtctctgtccgaagccacttgagagaaaatggcggtgcctctgctctcaaagaagatcgtgaagaagagggtaaagaagttcaagaggcctcagagtgacaggaaaatttccgtcaagactaactggcgcagaccaaagggtatcgattctcgtgttaggggaaagttcaagggatgcactttgatgccaaacattggttatggttcagacaagaagacccgccactatctccctaatggtttcaagaaatttgttgttcacatgtgaaggatttggaactgctcatgatgcacaacaggacttactgtgctgagattgcccacaatatatccacaagaaagagaaaagatatagtcgagagagccgcgcagcttgatgttgttg

SEQ ID NO: 235997 - DNA, 361 bp, Glycine max
gagagtggtggagtgtgcaaaagagcgtcgtagtcgcaaccctaatcagaagaagcgcagcttcaagcgagtgacagccaccagccatgggtcgtatgcacagccgcggtaagggtatatcctcttctgctttgccctacaaaaggacacctcctagctggctcaagatctcttcgcaagatgtcgaagaaaatatctgcaagtttgcgaagaaaggtttgaccccgtctcagattggtgtcattctcagagattctcacggtattgctcaggtcaatagcgtcactggcagcaaaatccttcgcatcctcaaagctcacggacttgcgcctgaaattccagaggacctgtaccatttgat

SEQ ID NO: 235998 - DNA, 406 bp, Glycine max
cgggtcaggccatgccgtgcgtacggatgcgtacagaagacagaaaggggcacaagtgagtttgttgatcgagataactagaaacagtgtgatgaaaatgaaggtccttgttttcttcgttgctacaattttggtagcatggcaatgccatgcgtacgatatgttccctctccgaatgaacactggctatggtgcccgtactccggaggtgaaatgcgcaagttggaggcttgctgtggaagcacacaacatctttggctttgagaccattcctgaagagtgcgttgaagcaacaaaggaatacatccatggcgaacaatatagatcagactccaaaacagttaaccaacaagcttacttttatgccagagacctcgaagtccatcccaaggacacaattgtgttc

SEQ ID NO: 235999 - DNA, 362 bp, Glycine max
  unsure (1)..(362): unsure at all n locations
ggcaagcgaaagagaagatggccaccgttccagggcagctcgtgtgggagatcgtgaagaaaaacaactcctttttggtcaagcagttcggaagggggacccagagcgtcgaattcagcagagagagcagcaatctctacaacctcaattcgttcaggtactctggtttggcaaacaagaaaactgttacggtacagcctgagggtaaagatcaggctgtgttgttggctacaacaaagacaaagaagcaaaacaagcctgctgcattgcttcacaaatctgtgatgaagaaggagttcaagangatggcaaaggctgttgaaaatcaagtggcagaaaattactacaggcccgatctcaag

SEQ ID NO: 236000 - DNA, 325 bp, Glycine max
gcacaagtgagtttgttgatcgagataactagaaacagtgtgatgaaaatgaaggtccttgttttcttcgttgctacaattttggtagcatggcaatgccatgcgtacgatatgttccctctccgaatgaacactggctatggtgcccgtactccggaggtgaaatgcgcaagttggaggcttgctgtggaagcacacaacatctttggctttgagaccattcctgaagagtgcgttgaagcaacaaaggaatacatccatggcgaacaatatagatcagactccaaaacagttaaccaacaagcttacttttatgccagagacc

SEQ ID NO: 236001 - DNA, 401 bp, Glycine max
ggcacaagtgagtttgttgatcgagataactagaaacagtgtgatgaaaatgaaggtccttgttttcttcgttgctacaattttggtagcatggcaatgccatgcgtacgatatgttccctctccgaatgaacactggctatggtgcccgtactccggaggtgaaatgcgcaagttggaggcttgctgtggaagcacacaacatctttggctttgagaccattcctgaagagtgcgttgaagcaacaaaggaatacatccatggcgaacaatatagatcagactccaaaacagttaaccaacaagcttacttttatgccagagacctcgaagtccatccaaaggacacatttgtgttcagtatagatggcaccgtactctctaatattccatactacaaaa

SEQ ID NO: 236002 - DNA, 394 bp, Glycine max
gcacaacaaaaagtggtgtcctaaagaaagaccatctttctcttttctgtatcaccgttggaagagactgagatgggttcaaaaaccaagacttttacctttgaagaggtggctaaacacaatcacaggaaggattgttggattatagtcaaagggaaggtgtatgatgtcaccccatttttggatgatcatccaggaggtgatgaagttttagtgactgcaacagagaaggatgccaccactgattttgaagatattggccacagtgattcagcaacacagatgatggaaaaatactttgttggggaagttgacaccaacactcttccagcacaagttaacagcaacaccagtgtacgccaaacaacacaagcaccacctgcctataacaatc

SEQ ID NO: 236003 - DNA, 401 bp, Glycine max
ggcacaagtgagtttgttgatcgagataactagaaacagtgtgatgaaaatgaaggtccttgttttcttcgttgctacaattttggtagcatggcaatgccatgcgtacgatatgttccctctccgaatgaacactggctatggtgcccgtactccggaggtgaaatgcgcaagttggaggcttgctgtggaagcacacaacatctttggctttgagaccattcctgaagagtgcgttgaagcaacaaaggaatacatccatggcgaacaatatagatcagactccaaaacagttaaccaacaagcttacttttatgccagagacctcgaaatccatccccaaggacacatttgtgttcagtatagatggcaccgtactctctaatattccatactacaaa

SEQ ID NO: 236004 - DNA, 387 bp, Glycine max
ggaacctttgcattctattcattcaagattcagcaagtgcgttttggaagcagagaccgaaatacttcgagatggcccgtacaaagcaaactgctcgtaagtcaactggaggaaaagctcccaggaagcagcttgcaaccaaggctgcacgtaagtctgcaccaacaactggtggtgtgaagaagcctcatcgttatcgccctggaactgttgctcttcgtgagattaggaaataccagaagagcactgagctcctaatcaggaagcttcctttccagaggttggttcgtgaaattgcccaggatttcaagactgatctgcgtttccagagccatgccgtgcttgcattgcaagaggctgctgaggcataccttgttgggctctttg

SEQ ID NO: 236005 - DNA, 378 bp, Glycine max
cccacgcgtccgggcacgtgtccttctcctacgccagagctctccaaaacacctgcttgaagacatggggtggactccctgagaacgtgaaggctgctcaagatgcactccttttccgtgccaagtccaactcactcgctcagcttggaaagtacactgccgagggtgaatctgaggaagccactcggggaatgttcgtcaaaggttactcctactaagatcatcttgccacacatgctacagtaacccaaggatccaacattaatttgtctaaattgtgtttgtggtttatatagtcttggacactatttttaatgatgattattacttgtaccttttctacttaatgaacttctagccaatcaattacgaatcctg

SEQ ID NO: 236006 - DNA, 270 bp, Glycine max
ggcacttgcagattttcatttccttcactttcccgaaaaatggctaacacttttgactttcttcacgacgttctcacatcaagatagctcgtacgaagcacatcgatcacatttacatcgatgggaatgggtcacgtaagcagtccggcgacatcgacgcacggaagtccgcacaggtgaactgctgactcaagtagcccgatcgattcaggccgggaaacgtagcccatagggataataaaaaatcctagcagagcaacgagcttctca

SEQ ID NO: 236007 - DNA, 394 bp, Glycine max
  unsure (1)..(394): unsure at all n locations
ggcacaagtgagtttgttgatcgagataactagaaacagtgtgatgaaaatgaaggtccttgttttcttcgttgctacaattttggtagcatggcaatgccatgcgtacgatatgttccctctccgaatgaacactggctatggtgcccgtactccggaggtgaaatgcgcaagttggaggcttgctgtggaagcacacaacatctttggctttgagaccattcctgaagagtgcgttgaagcaacaaaggaatacatccatggcgaacaatatagatcagactccaaaacagttaaccaacaagcttacttttatgccagagacctcgaagtccatcccaaggacacatttgtgttcagtatanatggcaccgtactctctaatattccatac

SEQ ID NO: 236008 - DNA, 391 bp, Glycine max
gaggggtgatcagaaccaaaatggccaatcttagtagtcctggatttaacctctttttggtgtctctcttggttacattggtccaaatccaaaccaaggtgcaatgctaccagtacaaagttggagatctagattcctgggggatccccatttcaccaagttcacacctctacgacaaatggtccaaatatcacaaccccaggatcggtgattcgcttctgtttctatacccaccaagtcaagattcagtgattcaagtaacagcagaatcctacaagagctgcaaccttaaagatccgattttgtacatgaacaatggcaactccttgttcaacattacatcagagggggacttctacttcacaagtggagaagctggtcattgccaaaa

SEQ ID NO: 236009 - DNA, 393 bp, Glycine max; identical to SEQ ID NO: 235441

SEQ ID NO: 236010 - DNA, 382 bp, Glycine max
gacaatacagagtgagttgttgctccttcgccacaactctctgccaacatgggtatctccagagattctatgcacaagaggcgtgccactggtggcaagaagaaggcctggaggaaaaagagaaagtatgagcttggtcgccagcctgctaacactaagctgtcaagcaacaagacagtcaggaggatccgtgttagaggtggaaatgtgaagtggagggcactgagattggatactggaaattactcctggggaagtgaagctgtaactcgcaagactcgtatactagatgtggtttacaatgcctcaaacaacgagcttgtgcgtactcagactcttgtaaaaagtgctattgttcaagttgatgctgctccattcaaac

SEQ ID NO: 236011 - DNA, 319 bp, Glycine max
gatccaaattcaagttcgcaccaaattttcctcccaaaatgtcaggccgtggaaaaggtgggaagggtttgggaaagggaggagctaagaggcacagaaaggttcttcgtgacaacattcaaggaatcacgaaacctgcgattcgtaggttagcgagaagaggtggcgtgaagaggatcagtggtttgatttacgaggaaaccagaggagttctgaagatattcttggagaacgtgattcgcgatgctgtaacctacactgagcacgctaggaggaaaactgttactgctatggatgtcgtttatgctctcaagagaca

SEQ ID NO: 236012 - DNA, 399 bp, Glycine max
ggagaaagagagtgaagagagaagaagatggcgtcgagcggagcggtgccgttttggagggcagcggggatgacatacatcacatactcaaacatatgcgcgaatctggtcaggaattgcctcaaggaaccctacaaggctgaagccatctctcgtgagaaggtccattttgctctctccaaatgggtcgacgccaagcctgaaaaacctactattcgttcagacaccccagagcagtgatccggaatagttggaagctataaatgcataaatctttgagatctggaagttcattgtcattttgaacctttctgtgatgtttaattcccttgcttctttttttttcattccatgaaatggaacatacactggattttgatttgcatgattaatcttgta

SEQ ID NO: 236013 - DNA, 397 bp, Glycine max
gactcactcatacaatagagaccagcttttgcttctttgtgaacatggagatgaggaaatcatgtggcttcttcttcttgctcctcctccttgtctttgcttcccaggtggtggtgcagacggagggaagagtgtgtgagtcacaaagccacgggttccatggtttgtgtaatagagaccacaactgtgctttggtctgcaggaacgaaggtttctccggtggcaggtgcaaaggcttccgccgccgctgcttttgcaccaggatttgttgagatctcatcaaacactactcttgccatgcaaattaataaatcatagctaggccaaataaattgcatctactccttaaccaatttggaagctagctaccacaaccaactcatacttggtcattgga

SEQ ID NO: 236014 - DNA, 398 bp, Glycine max
  unsure (1)..(398): unsure at all n locations
ggcacaagtttgttgagatagctagaagcaataagatgaaaatgaaagtgcttgttttgtttgttgctacagttttggtagcatatgaatgccatggctcagactaccagaagttccctctccaaatgaaaactgggtttggtgggcaatacagcaatgaggtggcatgtgccagttggaggcttggcgtggaagcaaacaacgtagtcaagtggcaaactgttcctgcagcttgcggagagtacatagctgactacgttctaggagaccaatatagatcagattccaaaacagttaaccaacaagcttatttctatgctaaatccctcaaactcaacaancaaagatgtctttgtcttggacgttgacgacactactctctctaatctccagtattt

SEQ ID NO: 236015 - DNA, 385 bp, Glycine max
gacaacaatctaagagtgagttttgtttatttgaaattaacaagtagcaaagatgtttggaatcatcggaggaaacaagggtcacaagataaaggggaacttggtgattatgcgaaagaatgtgttggatatcaacagcattaccagtgttaagggtgtcatcggaaccggcattaacatcattggaggagtcgtcgacaccgttactgctttggcgtcccacatctccatccagctcattagtgccaccaaggctgatggacatgggaaaggaaaagttggaaaggctacaaatttaagaggacaagtgtcgttaccaaccttgggagctggcgaagatgcatacgaagttcaattttgattgggacagtgacttcggaattcc

SEQ ID NO: 236016 - DNA, 388 bp, Glycine max
ggttctagtgtgtgattgtttgttgttgtaactcgttcttcttcttttgttgttctgtgtttgtgtttgttttttctctcacctgaaaatgtcttgctgcggtggtaactgtggttgcggaagctcctgcaagtgcggcaacggctgcggaggctgcaagatgtacccagacttgagctacactgagtcaaccaccaccgagaccttggtcatgggagtggcacctgttaaggctcaatttgagggtgctgaaatgggtgtgcccgctgagaacgatggctgcaaatgtggaccaaactgctcctgcaacccctgcacttgcaagtgaggtgtttgggagagcaagctttaaagcagagatagcccttaattaggaataatgataaac

SEQ ID NO: 236017 - DNA, 323 bp, Glycine max
tggggagtttggttatcgagatgagtagaaacagtgtgacgataatgaacgtccttgttttcttcgctgccaaaattttggaagcatggcaatgccatgcttaccatatgttcccactccgaatgaacactggctatggtgcccgtactccggtggtgaaatgcgcaagttggatgcttgctgtggtagcacacaacatcgttggctttgggaccattcctgaaaagtgcgttgaatcaacagatgcatacatccatggcgaagactatcgatcagactccaaaccagttaagcaacatacttacttttatgccagagacctc

SEQ ID NO: 236018 - DNA, 393 bp, Glycine max
ggcacaagtgagtttgttgatcgagataactagaaacagtgtgatgaaaatgaaggtccttgttttcttcgttgctacaattttggtagcatggcaatgccatgcgtacgatatgttccctctccgaatgaacactggctatggtgcccgtactccggaggtgaaatgcgcaagttggaggcttgctgtggaagcacacaacatctttggctttgagaccattcctgaagagtgcgttgaagcaacaaaggaatacatccatggcgaacaatatagatcagactccaaaacagttaaccaacaagcttacttttatgccagagacctcgaagtccatcccaaggacacatttgtgttcagtatagatggcaccgtactctccaatattccata

SEQ ID NO: 236019 - DNA, 390 bp, Glycine max
gaaggtgcaagagtttgttgtgagctataagctagtttatcgtgaggagaatatgaagttgtttgttttctttgttgctgcagtagttttggtagcatggccatgccatggcgcaggctaccaaaggttccctctccgaatgaaaactggctatggtgagcgttcttcggaggtaaaatgcgcaagttttaggcttgctgtggaagcacacaacatccgagcctttaaaaccattcctgaagagtgcgttgaaccaacaaaggactacattaatggcgaacaatttagatcagactctaaaacagttaaccaacaagctttcttttatgctagtgaacgcgaagtccatcacaacgacatatttatattcggcataaataacaccgtact

SEQ ID NO: 236020 - DNA, 385 bp, Glycine max; identical to SEQ ID NO: 235632

SEQ ID NO: 236021 - DNA, 393 bp, Glycine max
ggaacagtttgattggaggagatgactttaagagtggtcagaccaaaatgaaatctgtgttggtggatttccttgtgggggccggcatcaagccaacatctatagtgagttacaaccatctgggcaacaatgatggcatgaatctctcagcccctcaaaccttccgctctaaggaaatctccaagagcaatgttgttgacgatatggtcaacagcaacgccatcctctatgagcccggtgaacatccagaccatgcggttgtcattaagtacgtgccttatgtaggggacagcaagatggccatggatgagtacacttctgagatattcatgggttgaaaagaaaacaattgtgttgcacaacacatgtgaggattcactgttagctgctcct

SEQ ID NO: 236022 - DNA, 397 bp, Glycine max
gagtgcagaggtgtaataaattggtggcaagtggcaaccggaaagccagagtgtgtggttccgtttgctgacctgacctcggaaatccaaagagggaaactcacggtgtttcgttgcgttgtgctctgctctgctcctttgggcctgggctgggctgggctgggctgggctgggcatggctattgcagcagcggccgtggtggtaccattgggcctgctcttcttcgcctccggcctccttgttaatctcattcaggcaatatgctatgtcgtcgtaaggccggtgtcgaaaagtttgtacagaaggattaaccgggtagtagcagagctcctgttggctggaaccttgtatggcttattgattggtgggcaggagttaaggtccaaatattcacag

SEQ ID NO: 236023 - DNA, 302 bp, Glycine max
  unsure (1)..(302): unsure at all n locations
ggcacaagtgagtttgttgatcgagataactagaaacagtgtgatgaaaatgaaggtccttgttttcttcgttgctacaattttggtagcatggcaatgccatgcgtacgatatgttccctctccgaatgaacactggctatggtgcccgtactccggaggtgaaatgcgcaagttggaggcttgctgtggaagcacacaacatctttggctttgagaccattcctgaagagtgcgttgaagcancaaaggaatacatccatggcgaacattatagtatagactccaaaacagttaaccaac

SEQ ID NO: 236024 - DNA, 386 bp, Glycine max
ggcacaagtgagtttgttgatcgagataactagaaacagtgtgatgaaaatgaaggtccttgttttcttcgttgctacaattttggtagcatggcaatgccatgcgtacgatatgttccctctccgaatgaacactggctatggtgcccgtactccggaggtgaaatgcgcaagttggaggcttgctgtggaagcacacaacatctttggctttgagaccattcctgaagagtgcgttgaagcaacaaaggaatacatccatggcgaacaatatagatcagactccaaaacagttaaccaacaagcttacttttatgccagagaactccaagttcaatcccaaggacacatttgtgttcagtatagatggcaccgtactctctaat

SEQ ID NO: 236025 - DNA, 355 bp, Glycine max
ggtgcacaagtgagtttgttgatcgagataactagaaacagtgtgatgaaaatgaaggtccttgttttcttcgttgctacaattttggtagcatggcaatgccatgcgtacgatatgttccctctccgaatgaacactggctaatggtgcccttatcccggaggtgaaatgcccaatttggaggcttgctgtggaaccacacaacatctttggctttgagaccattcctgaagagtgcgttgaagcaacaaaggaatacatccatggcgaacaatatagatcagactccaaaacagttaaccaacaagcttacttttatgccagagacctcgaagtccatcccaaggacacattt

SEQ ID NO: 236026 - DNA, 327 bp, Glycine max
ggcacaagtgcgtttgttgatcgagataactagaaacagtgtgatgaaaatgaaggtccttgttttcttcgttgctacaattttggtagcatggcaatgccatgcgtacgatatgttccctctccgaatgaacactggctatggtgcccgtactccggaggtgaaatgcgcaagttggaggcttgctgtggaagcacacaacatctttggctttgagaccattcctgaagagtgcgttgaagcaacaaaggaatacatccatggcgaacaatatagatcagactccaaaacagttaaccgacaagcttacttttatgccagagacct

SEQ ID NO: 236027 - DNA, 324 bp, Glycine max
ggaagcaaagcaaagcggtaaggatggggaacacggagaagctgatgaaccagatcatggaattgaaattcacttcgaaatcgctgcagcgtcaatcgcgtaagtgcgagaaggaggagaaatcggagaagctgaaggtgaagaaggcgatcgagaaaggcaacatggacggcgctcgaatctacgcggagaacgcgatccgtaagcgcacggagcagatgaactacctccgcctggcctcgcgcctcgacgccgtggtcgcccgcctcgacacgcaggcgaagatgacgacgatcagcaagtcgatgggcaacatcgtgaaat

SEQ ID NO: 236028 - DNA, 391 bp, Glycine max
ggtgagttgagaggatcgtgagaggggcagtagccgagattccgtgagttgcaaaaatgaagacgattctttccaccgagaccatgaacatcccggacggcgtgagcatcaaagttcatgccaaggtcatcgaagttgagggcccccgcggaaaattggtgcgagacttcaagcatttgaatctcgattttcagctcattactgacgaaaacggtaaaagaaagctgaaaatcgacgcgtggtttggttctcggaaaacatccgccgccattcgcaccgccttgagccacgtggagaatcttatcaccggcgtcaccaagggctaccgctacaaaattgaggtccgttaatgcccattttcccatcaacgcaagcatcggcaacagcaaca

SEQ ID NO: 236029 - DNA, 363 bp, Glycine max
ggaacctttgcattctattcattcaagattcagcaagtgcgttttggaagcagagaccgaaatacttcgagatggcccgtacaaagcaaactgctcgtaagtcaactggaggaaaagctcccaggaagcagcttgcaaccaaggctgcacgtaagtctgcaccaacaactggtggtgtgaagaagcctcatcgttatcgccctggaactgttgctcttcgtgagattaggaaataccagaagagcactgagctcctaatcaggaagcttcctttccagaggttggttcgtgaaattgcccaggatttcaagactgatctgcgtttccagagccatgctgtgcttgcattgcaagaggctgctg

SEQ ID NO: 236030 - DNA, 379 bp, Glycine max
gagggcgaggaagccacatagagacacaatacagagtgagttgttgctccttcgccacaactctctgccaacatgggtatctccagagattctatgcacaagaggcgtgccactggtggcaagaagaaggcctggaggaaaaagagaaagtatgagcttggtcgccagcctgctaacactaagctgtcaagcaacaagacagtcaggaggatccgtgttagaggtggaaatgtgaaatggagggcattgagattggatactggaaattactcctggggaagtgaagctgtaactcgcaagactcgtgtactagatgtggtttacaatgcctcaaacaatgagcttgtgcgtactcagactcttgtcaaaagtgctatcg

SEQ ID NO: 236031 - DNA, 360 bp, Glycine max; identical to SEQ ID NO: 235260

SEQ ID NO: 236032 - DNA, 358 bp, Glycine max
gatccatttctcgcaacaacgcttaacctctctcattccccatttcctcacctccttcaaccgctgctaaattctagggttccgaaatgggcgctggcggaaagatcaagaagggcgccggaggtagaaagggcggcggcccaaagaagaagccggtttcaaggtccgtcaaagccggtctccaattccccgtcggaagaattggccgttatttgaagaaaggaaggtacgctcagcgtgtcggtaccggtgctcccgtatacttggctgcagttctcgaatacctagctgccgaggtgcttgagttggctgggaatgccgcacgtgacaacaagaagaacaggattattccaagaca

SEQ ID NO: 236033 - DNA, 396 bp, Glycine max
  unsure (1)..(396): unsure at all n locations
gcacaagtgagtttgttgatcgagataactagaaacagtgtgatgaaaatgaaaggccttgttttcctcgttgccacaattttggtaacatggcaatgccatgcgtacgatatgttccctccccgaatgaacactggctatggtgcccgtactccggaggtgaaatgcgcaagttggaggcttgctgtggaagcacacaacatctttggctttgagaccattcctgaagagtgcgttgaagcaacaaaggaatacatccatggcgaacaatatagatcagactccaaaacagttaaccaacaagcttacttttatgccagagacctcgaagtccatcccaanggacacatttgtgttcatgtatanatggcaccgtactctctaatattccatact

SEQ ID NO: 236034 - DNA, 374 bp, Glycine max
  unsure (1)..(374): unsure at all n locations
gaaggttcggtcatctgtgaagaagatgtgtgaattttgtcagatagttaagcgccggggacgaatctatgtgatttgctctgggaaccctaagcacaagcaacgacagggcatggcaacatttgcaagtgaaggcccatctcaaccagtgtcctcggagacaagtagctgcaagattatgattaagcctgctcaaattgcgcgaccaggtcggatttgtacttccccctcaaaggcaaagtttgtctatgttgtatggatggagggtgggattggcctctattctgtctataaagtagcaaaaataattagtaaccttgancattacaagtaataagtgtgaagagattgataatcaacggttctggattaaa

SEQ ID NO: 236035 - DNA, 444 bp, Glycine max
  unsure (1)..(444): unsure at all n locations
attcncgggtagacccacgcgtcagactcaagcacaacatctctatcgagtaaattaactatgaagcctaacctactaatatccctttccttcctgcctctctttgctttcctggctctttcagaagatgttgaacaagttgtgggcataagtggcaaccccattttcccaggtggcacatattacattatgccatcaacttggggcgctgccggtggtggattgaaactaggccggacaggaaactcaaactgcccagttactgttttgcaagattactcagaaatcttccgtggcacaccagtcaaattcagcatacctgggataagccctggaatcatctttacaggtactccacttgaaatcgagttcgcagagaaaccttaatgtgctgaatcctccaaaatgggtggcgtttgtggacattgaaatccaaaaggcatg

SEQ ID NO: 236036 - DNA, 319 bp, Glycine max
gacactaaacaagttaaaagaagagcatcactgaactaacaaagcaaccctatgtcgaaggtggtttgtgtcaccggagccagcggcgccatcggatcatgggtggtcctactcctcctccagcgtggttacaccgtccatgccaccgtccaagatatcaaggatgaaaatgagacgaaacatttggaggaaatggaaggagcaaagagtcatctccatttttttgaaatggatcttcttgacatcgactccattgccgctgccataaagggttgttccggcgtaatccaccttgcatgtcctaacatcattggtcaag

SEQ ID NO: 236037 - DNA, 388 bp, Glycine max
  unsure (1)..(388): unsure at all n locations
ggttgagtgtagaacgctgctgccgaaacccttccggaaccctaaggtaagtgagtaatcagtggttgagaatggtggagaaggcgaagggtagaaaggaggaggtggttacacgtgagtacaccattaacctccacaagcgcctccatggctgcacatttaagaagaaagctcctaaagctattaaggagataaggaaatttgcccaaaaggccatggggaccaatgatgtgagggtggatgtgaagttgaacaagtttgtctggagccagggaatcaggagtgttccaaggaggattagagtaagaattgctcgcaagagaaattgatatganaatgccaaggaagagctgtactctcttgttaccgttgttgagatccctaagga

SEQ ID NO: 236038 - DNA, 352 bp, Glycine max
ggcacaagtgagtttgctgatcgagataactagaaacagtgtgatgaaaatgaaggtccttgttttcttcgttgctacaattttggtagcatggcaatgccatgcgtacgatatgttccctctccgaatgaacactggctatggtgcccgtactccggaggtgaaatgcgcaagttggaggcttgctgtggaagcacacaacatctttggctttgagaccattcctgaagagtgcgttgaagcaacaaaggaatacatccatggcgaacaatatagattagactccaaaacagttaaccaacaagcttacttttatgccagagacctcgaagtccatcccaaggacacattt

SEQ ID NO: 236039 - DNA, 393 bp, Glycine max
gacaagtgagtttgttgatcgagataactagaaacagtgtgatgaaaatgaaggtccttgttttcttcgttgctacaattttggtagcatggcaatgccatgcgtacgatatgttccctctccgaatgaacactggctatggtgcccgtactccggaggtgaaatgcgcaagttggaggcttgctgtggaagcacacaacatctttggctttgagaccattcctgaagagtgcgttgaagcaacaaaggaatacatccatggcgaacaatatagatcagactccaaaacagttaaccaacaagcttacttttatgccagagacctcgaagtccatcccaaggacacatttgtgttcagtatagatggcaccgtactctctaatattccatact

SEQ ID NO: 236040 - DNA, 381 bp, Glycine max
ggcacaagtgagtttgttgatcgagataactagaaacagtgtgatgaaaatgaaggtccttgttttcttcgttgctacaattttggtagcatggcaatgccatgcgtacgatatgttccctctccgaatgaacactggctatggtgcccgtactccggaggtgaaatgcgcaagttggaggcttgctgtggaagcacacaacatctttggctttgagaccattcctgaagagtgcgttgaagcaacaaaggaatacatccatggggaacaatatagatcagactccaaaacagtttaacaacaagcttacttttatgccagagacctcgaagtccatcccaaggacacatttgtgttcagtatagatggcaccgtactctc

SEQ ID NO: 236041 - DNA, 397 bp, Glycine max
ggacaagtgagtttgttgatcgagataactagaaacagtgtgatgaaaatgaaggtccttgttttcttcgttgctacaattttggtagcatggcaatgccatgcgtacgatatgttccctctccgaatgaacactggctatggtgcccgtactccggaggtgaaatgcgcaagttggaggcttgctgtggaagcacacaacatctttggctttgagaccattcctgaagagtgcgttgaagcaacaaaggaatacatccatggcgaacaatatagatcagactccaaaacagttaaccaacaagcttacttttatgccagagacctcgaagtccatcccaaggacacatttgtgttcagtatagatggcaccgtactctctaatattccatactaca

SEQ ID NO: 236042 - DNA, 398 bp, Glycine max
caggagaacggaattgaaagaaaaaataaagttctgtcacgggtacatgcagcattgaaagaaatagctgatttggtgcctcttgcacccttgcgactatctccaatagttatccagaaaatgccgagtgtcttcagtaaggaaactgagattgtcatgtatgtcgagaatatgttgaggctggagagtggtgcacttggagaagctgttggttctaccatgctgcctgctcttgtggataggttgctagagttggatgtggaaattggatgggatggaatcctgcaagaagatgctaaaggcatatttgaaatggagttagaagatgttactgaatttactggaagaggatgagaattgtgatagtatgctttcgtcagagttgttaaataggaaaa

SEQ ID NO: 236043 - DNA, 286 bp, Glycine max
gaacaccgatacagagagtgatttcagtgagtgatcggtgatgacatgatcccatcacaagcatcagcgtcaactgaggcacacgcggatcagacacacccccgtccgcacgcctgaagaggcgacgcaacccgatacgtagaatgcggcattcgccgagttcatctcaacgttcatcttactcttcgcaggcgcaggctcccgcaacgccgatcacgagctcaccgatgtgcgcgctgccagtcatgccggcctgacctcatcctccaacgcccatgcactcggg

SEQ ID NO: 236044 - DNA, 394 bp, Glycine max
gaaagtgcaagagtttgttgtgagctataagctagtttatcgtgaggagaatatgaagttgtttgttttctttgttgctgcagtagttttggtagcatggccatgccatggcgcaggctaccaaaggttccctctccgaatgaaaactggctatggtgagcgttcttcggaggtaaaatgcgcaagttttaggcttgctgtggaagcacacaacatccgagcctttaaaaccattcctgaagagtgcgttgaaccaacaaaggactacattaatggcgaacaatttagatcagactctaaaacagttaaccaacaagctttcttttatgctaatgaacgcgaaatccaatcacacgacatatttatattcggcatagataacaccgtactctct

SEQ ID NO: 236045 - DNA, 386 bp, Glycine max; identical to SEQ ID NO: 235120

SEQ ID NO: 236046 - DNA, 412 bp, Glycine max
  unsure (1)..(412): unsure at all n locations
agaagacgacagaagggggagtgcatccaacacgttgcaaggaatttgaggagagtggagatccagaaaagcatttccaggctcttttgtctttagctaaagagggaattcagaaaggaaaggtggttgcaattggagaatgtggattggactatgacaggcttcatttttgcccagcagagattcaaaagaagtatttcgagaagcaatttgaattagcatatatcacaaaactgcctatgtttttgcacatgcgagcagctgctgcagatttctgtgaaatagtggagaaaaataaggacaggttcactgctggagtcacccattcatttactggtantatggatgaaatgcattaangcttcccccatttgataaaatgtacataggcataaatgggtgctctctgaaa

SEQ ID NO: 236047 - DNA, 374 bp, Glycine max
ggtatgaggtgagagctagaaactgaggacttagctagtagttagagatgcctgagttttgcgtgacaggtggtactgggttcatcgcatcttacctggtcaaggccttactagagaagggtcacacagtgaggaccaccgtgagaaacccaggggatgtggagaaggttggttttctgactgaactaagtggagccaaagagagactgaagattttgaaagcagatctattagtggaaggaagctttgatgaggcagtgagaggagttgatggtgtctttcatatggcgtcccctgtgcttattccttatgatgagaacgttcagcaaaatttgattgatccctgtataaaaggaactttgaatgtgcttaac

SEQ ID NO: 236048 - DNA, 359 bp, Glycine max
aaagagacctggaaaaggtgggaaccgcttttggaagtccattgggcttggatttaagactcccagggaagccatcgaaggaacctatattgacaagaagtgccccttcactggcaatgtttccatccgtggccgtatcttggctggaacatgtcacagtgctaagatgaacaggactattattgttagaaggaattatctccattttatcaagaagtaccagaggtacgagaagaggcactcaaatattcctgctcatatatcacctgccttccgtgtgaaggaaggggatcacgttattattggtcaatgcaggcctctctctaagacagtgaggttcaatgtcttgaaagtgatcc

SEQ ID NO: 236049 - DNA, 361 bp, Glycine max
gacaaacaacttctttcaaggaaaatggctcttcttggatttcttctgggacttttctacatgatctcacatgtcaaggggtatggttttggaggttggaccaatgcacatgccaccttctatggagggggtgatgcttctgggacaatgggtggggcttgtggttatggaaatctgtataaccaaggttatggaactgatacaacagcactgagcactgcactgttcaacaatggcttaagctgtggtgcatgctttcaaattaaatgtgcgaatgacccacaatggtgccttcctggctccatcatagtcactgccacaaatttctgtccacctggtggttggtgtgaccctcccaatc

SEQ ID NO: 236050 - DNA, 382 bp, Glycine max
ggcagcgcttgatttgagggcaggcaagccccactcaaacaccacacctctcctcgttcacgctaccctttctgctcttcttctacctttcaagttttaaaagtataaagatggcagagacattcctatttacctcagagtcggtgaacgagggacaccctgacaagctctgcgaccaaatctccgatgctgtcctcgacgcttgcctcgagcaggacccagacagcaaagttgcctgcgaaacatgcaccaaaaccaacttggtcatggtcttcggagaaatcacgaccaaggccaacgttgactacgagaagatagtgcgtgacacctgcaggaacatcggcttcgtctcaaatgatgtgggactggatgccgacaactg

SEQ ID NO: 236051 - DNA, 446 bp, Glycine max
  unsure (1)..(446): unsure at all n locations
attcncgggcagacccacgcgtcagtggcaattggaacacttgcattatgccacaataacattgagggcctcaaaagggtagttaaaatgaagggaagtttaactgccaaagtgattgaccgaactaacaacaaggctgatgtctaaggtgctttccttgattttgcttccatgttggagtccaaggttgacaaaaatgattccaatgcaactaaagcattgagcaagctggaagctatacagaaaacttgcagagaatctggtctcttgagtaaaaggaaatcttacattgtgaaggatgaaagtggatatggctcaaccatgattaacgtactggtcatcatggtttccatcattttttcttatctgtctgctagccaccaaaataactaatcaacaagcaatgccttcttgcctttccgaacattgatatcatgcctcgttca

SEQ ID NO: 236052 - DNA, 394 bp, Glycine max
  unsure (1)..(394): unsure at all n locations
gacagcatatcaataatctattttatactatacccacattttgataattatttttctagttgataagccatggctactcgaggaaagcttggggttgacgttgatctcaagtctaacgcagacaagtactggcaaacccttaagaactccactgaaatattccccaaggccttccccaatgattacaaaggcattgaggttcttganggtgatggcaaatcacctggttctatccgccacataagttatggtgaaggttcaccacttgtgaagtcatcctttgagaagattgaggctgttgatgaagaaaagaaggtantgtcgtacactatcattgatggagaactcctcnagcactacannacattcaagggagacatttctgtgactccag

SEQ ID NO: 236053 - DNA, 388 bp, Glycine max
gacaataaaccacctccgcgcgagccaccttacccagtgaaccctaccgcaccgaaacaaaaccctcgcaaaccctaaccctaatctcataggaacatggacggcgacgacgagacctcgggtccgatgatcgacgaaatctacgccaacggcggtggcgtcggcgacgacggagacaagcggagccgccgcgcaatcatgagcggcgaccagctcgacatcgaggcgtacgcggcgctatactcggggcgcacgaagatcatgaggctcctcttcttcgccgacaagatgaacaacgcggcgacgcagctcgaggcgctgcgcatggcctacgacgagattaagaagggagagaacacgcagctgttcagggaggtcgtgcagaaga

SEQ ID NO: 236054 - DNA, 401 bp, Glycine max
ggcacaagtgagtttgttgatcgagataactagaaacagtgtgatgaaaatgaaggtccttgttttcttcgttgctacaattttggtagcatggcaatgccatgcgtacgatatgttccctctccgaatgaacactggctatggtgcctgtactccggaggtgaaatgcgcaagttggaggcttgctgtggaagcacacaacatctttggctttgagaccattcctgaagagtgcgttgaagcaacaaaggaatacatccatggcgaacaatatagatcagactccaaaacagttaaccaacaagcttacttttatgccagagacctcgaaatccatcgcaaagacacatttgtgttcagtatagatggcaccgtactctctaatattccatactacaaaa

SEQ ID NO: 236055 - DNA, 384 bp, Glycine max
  unsure (1)..(384): unsure at all n locations
ggaagaaggcaaatcgcgaagactagatctgatctgagagaatggctcctcggtctagcagcaaggacgcccaagaccttttccgcgctctttggtctgcttatgctgcaacccccactaatctcaagatcattgatctctatgtcatctatgccgtattcaccgctttcatccaggttgtttacatggctttggttggatcatttccatttaactccttcctatcaggagtactttcttgtgtangaactgctgttcttgctgtttgtctcaggatccaagtgaataaagagaataaggaattcaaggatcttgcacctgagcgcgcttttgcggattttggtccccggtaatttggggcttcatttggtgatcatgaacttc

SEQ ID NO: 236056 - DNA, 358 bp, Glycine max; identical to SEQ ID NO: 235190

SEQ ID NO: 236057 - DNA, 338 bp, Glycine max
gaggaaaaaaatttagatccgcccagtgacattcccgttttcggctctctccgaaatttcttagattgcttctgtgtcagagaaatcagtgcaacaaaaatggacgacaccgaaaccaaaggaagaatcgaagagactgtgcgtaggattttgcaagaatcggacatggacgaggttactgagtctaagattcgaaaacaggcctccgaacaccttggcctcgacctgtctcagccttatttcaaagcctttgtcaaacaggtcgtgaaggcttttctccaagaagaagaacaacgacagaaacaacaacaacaagatgaagatgaagaagaagaact

SEQ ID NO: 236058 - DNA, 359 bp, Glycine max
  unsure (1)..(359): unsure at all n locations
ggcacaagtgagtttgttgatcgagataactagaaacagtgtgatgaaaatgaaggtccttgttttcttcgttgctacaattttggtagcatggcaatgccatgcgtacgatatgttccctctccgaatgaacactggctatggtgcccgtactccggaggtgaaatgcgcaagttggaggcttgctgtggaagcacacaacatctttggctttgagaccattcctgaagagtgcgttgaagcaacaaaggaatacatccattggcgaacaatatagatcagactccaaaacagttaaccaacaagcttacttttatgccagagacctcgaagtccatcncaaggacacatttgtgttc

SEQ ID NO: 236059 - DNA, 349 bp, Glycine max
  unsure (1)..(349): unsure at all n locations
gaggcacaacaaaaccacaatctaagtaagtgttgagagaagagtgcgtttgtttgtttgaaattaagtagtaaagatgtttggaatcatcggaggaaacaagggtcacaagataaaggggaacttggtgattatgcgaaagaatgtgttggatatcaacagcatcaccagtgttaagggtgtcattggaaccggcattaacatcattggaggtgtcgtcgacaccgttactgctttggcgtcncacatctccatccagctcatcagtgccaccaaggctgatggacatgggaaaggtaaagttggaaaggctacaaatttaagaggacaagtgtcgttgccaaccttg

SEQ ID NO: 236060 - DNA, 383 bp, Glycine max
ggcacaagtttgttgagatagctagaagcaataagatgaaaatgaaagtgcttgttttgtttgttgctgcagttttggtagcatatgaatgccatggctcagactaccagaagttccctctccaaatgaaaactgggtttggtgggcaatacagcaatgaggtggcatgtgccagttggaggcttggcgtggaagcaaacaacgtagtcaagtggcaaaccgttcctgcagcttgcggagagtacatagctgactacgttctaggagaccaatatagatcagattccaaaacagttaaccaacaagcttatttctatgctaaatccctcaaactcaccaacaaagatgtctttgtcttggacgttgacgacactactctctct

SEQ ID NO: 236061 - DNA, 398 bp, Glycine max
gacacagctattcctcttaagcttgctactgagtttccacactgcataccttaggtcttccgaattcgaagttaatttgcaagatggctaaggaaaaggctcagatcaacattgtggtggttggtcatgtggaccctgaggaggcaaccaccattaacgagctgaagaagcctgttgtggagaaagaagctccagggcatgccatatgagggcatgcacgtacggcctcggaggggaaccagaaaattatgttaacaaaataatctggaaccctaatgtatcagtgtcatcatcagtgtgtagtttaagctagctttgctatggttacgttctttgagatgagagtcttgatgaacagtaccattctgatgtattgctttccttgaaagttaatgcat

SEQ ID NO: 236062 - DNA, 405 bp, Glycine max
ggaactacactacatattctctgaccaccctagctagctaattagatttctgagagaaaggaaagggtgtgagaagagaatggagagtaaagaggaagatgttaacgttggagcaaacaagttctcagaaaggcaaccaattggtacagcagctcagggtggtggtgacaaggactacaaggaggcacccccagctcctttgtttgaacctggtgagctcaaatcatggtccttctacagagctggaattgctgagtttgtggcaactttcttgttcctctacattaccatcttaactgtcatgggtgtcaacaggtcaccctccaagtgtgcctctgttggcattcaaagcaatgcttgggcctttggtggcatgatctttgcccttgtctactgcactgctgg

SEQ ID NO: 236063 - DNA, 399 bp, Glycine max
  unsure (1)..(399): unsure at all n locations
agggcacaagtgagtttgttgattgagataactagaaacaatgtgatgaaaatgaaggtccctggtttcctcgttgccacaattttggtagcaaggcaatgccaagggttacatatgttccctccccgaatgaacactggctatggtgcccgtactccggaagtgaaatgcgcaagttggaggcttgctgtggaagcacacaacatctttggctttgagaccattcctgaagagtgcgttgaagcaacanaggaatacatccatggcgaacaatatagatcagactccaaaacagttaaccaacaagcttacttttatgccagagacctcgaagtccatcccaaggacacnattgtgttcagtatagatggcaccgtactctctaatattccatactac

SEQ ID NO: 236064 - DNA, 457 bp, Glycine max
ggtaccggtcaggaattcccgggccgacccacgcgtcagagacgacagaaggggatcatcacaaatatggaagaagaagctcctccagtgccacctgcaccgcccatagtggccatgctgccatcccctggcatgggccacctaatcccaatgatcgagttcgccaagcgagcggtgcgctaccataacctggccgtcaccttcgtcatccccactgacggcccaccttctaaagcccaaaaggccgtcttccaggccctcccggactccatttcccacaccttcctccctccggtcaatctctccgactttccaccgggcaccaaaattgaaaccctgatctcccacaccgtcctcctctccctcccttccctccgccaagccttccactccctctcctccacattaaaccttggcggccgtcgtcgtcgacctcttcgccaccgacgccttcgac

SEQ ID NO: 236065 - DNA, 378 bp, Glycine max
ggaagagtacttagcgatctccgtgaatacatagtaacacaataaaccacctccgcgcgagccaccttacccagtgaaccctaccgcaccgaaacaaaaccctcgcaaaccctaaccctaatctcataggaacatggacggcgacgacgagacctcgggtccgatgatcgacgaaatctacgccaacggcggtggcgtcggcgacgacggagacaagcggagccgccgcgcaatcatgagcggcgaccagctcgacatcgaggcgtacgcggcgctatactcggggcgcacgaagatcatgaggctcctcttcttcgccgacaagatgaacaacgcggcgacgcagctcgaggcgctgcgcatgggctacgacgagat

SEQ ID NO: 236066 - DNA, 339 bp, Glycine max
gagagcgaaagagatgtcgttggtttcaagcatgttcgggtgtggagtggtgatggcggcgtcgcaagcaatgggaattggaaggagaagcgatggtggattgacgatagtgtgttcgtctaggccgcagaagaaagcgacggcgcatcacatgaagactcggcctcggaagacgcaggcatgggatagaaaccgcaagcccaccgtctacgatccactccctcctcttcctcctgattggaccctcgttattcccgctgacgcttcttctgctcccgttacgcctccgcctccaactccctctgcctagtcactctctcggtactctctctcgttttc

SEQ ID NO: 236067 - DNA, 358 bp, Glycine max
ggcacaagtgagtttgttgatcgagataactagaaacagtgtgatgaaaatgaaggtccttgttttcttcgttgctacaattttggtagcatggcaatgccatgcgtacgatatgttccctctccgaatgaacactggctatggtgcccgtactccggaggtgaaatgcgcaagttggaggcttgctgtggaagcacacaacatctttggctttgagaccattcctgaagagtgcgttgaagcaacaaaggaatacatccatggcgaacaatatagatcggactccaaaacagttaaccaacaagcttacttttatgccagagacctcgaagtccatcccaaggacacatttgtgttc

SEQ ID NO: 236068 - DNA, 343 bp, Glycine max
gatcttcgcccggaaaagaaaggggggaagaagaaagaaccgttcctttatgatcgaaaaggtgcctttggtcatcatcgcggtgttaatcttggtggtgcaatcctctgcagcgttccacggtataaacagaatcatgaaggtccaccctgttcctcgaaaacgcaacatctcaatccaatttggcggcgacgggggcaacccgatgtcggaggctcaagcgctgttggggatcgccgggaagaagctccggcgactaccgcacgtgttcagctgcgtgctggagctgcccttccgctccgacgccgacgttgcggtggaggaagcccccgactgcttccgc

SEQ ID NO: 236069 - DNA, 370 bp, Glycine max
ggcacttcaattgcaatcaaattagttcattctctttgcgcagttccctacctctcctttcaagatgcagatcttcgtcaagaccctcaccggaaagaccatcacccttgaggtggaaagctctgacaccatcgacaacgtcaaggccaagatccaggacaaggaaggaattcccccggatcagcaacgtctcatcttcgccggaaagcagctcgaggacggccgtaccctcgccgactacaacatccagaaggagtcaacccttcaccttgtccttcgtctccgtggtggcatgcagatcttcgtcaagactctcactggcaaaaccataaccctagaggtcgaaagctctgacaccattgacaacgtc

SEQ ID NO: 236070 - DNA, 393 bp, Glycine max
ggcacaagtgagtttgttgatcgagataactagaaacagtgtgatgaaaatgaaggtccttgttttcttcgttgctacaattttggtagcatggcaatgccatgcgtacgatatgttccctctccgaatgaacactggctatggtgcccgtactccggaggtgaaatgcgcaagttggaggcttgctgtggaagcacacaacatctttggctttgagaccattcctgaagagtgcgttgaagcaacaaaggaatacatccatggcgaacaatatagatcagactccaaaacagttaaccaacaagcttacttttatgccagagacctcgaagttcatcccaaggacacatttgtgttcagtatagatggcaccgtactctctaatattccata

SEQ ID NO: 236071 - DNA, 337 bp, Glycine max
  unsure (1)..(337): unsure at all n locations
ggatcttatcaagagaggaatggcagtggaggatccatcctctccctatggccttcgccttgtgatagatgactacccttatgctgttgatggactagagatatggagtgctatccagacatgggttaaggactacgtctccttgtacgaggccacngatgatgcagttaagaaagactcagaactccaagcttggtggaaggaagctgttgagaagggtcacggtgacttgaaagacaagccatggtggcctaagttgaacactcttcaagatctgattcacatttgctggagtagtatatggactgcgtcagcactccatgcagctgtgaatttc

SEQ ID NO: 236072 - DNA, 278 bp, Glycine max
  unsure (1)..(278): unsure at all n locations
ggagcaaaaccctaatccctatttttcttcctcagtagtgtcatttacgcttctcttctctgcagcaactatgcctaaccctaaggtcttcttcgacatgaccatcggcggtcaatctgctggccgcatcgtgatggagctctacgccgacgtcactccccgcaccgccgagaacttccgcgcgctttgcaccggcgagaagggcgtanggcggagcggcaagcccctccactacaagggctcgtccttccaccgcgtgatcccgagtttcatgtgtc

SEQ ID NO: 236073 - DNA, 226 bp, Glycine max
ggcacaagtttgttgagatagctagaagcaataagatgaaaatgaaagtgcttgttttgtttgttgctacagttttggtagcatatgaatgccatggctcagactaccagaagttccctctccaaatgaaaactgggtttggtggggaatacagcaatgaggtggcatgtgccaattggaagcttggcgtggaagcaaacaacgtagtcaggtggcaaactgttcc

SEQ ID NO: 236074 - DNA, 370 bp, Glycine max
ggcacaagtgagtttgttgatcgagataactagaaacagtgtgatgaaaatgaaggtccttgttttcttcgttgctacaattttggtagcatggcaatgccatgcgtacgatatgttccctctccgaatgaacactggctatggtgcccgtactccggatgtgaaatgcgcaagttggaggcttgctgtggaagcacacaacatctttggctttgagaccattcctgaagagtgcgttgaagcaacataggaatacatccatggcgaacaatatagatcagactccaaaacagttaaccaacaagcttacttttatgccagagacctcgaagtccatcccaaggacacatttgtgttcagtatagatggc

SEQ ID NO: 236075 - DNA, 319 bp, Glycine max
tggatgcacacaaccactctttcatcttcatcgcttaaaagagcctttgctttttctttaggcctttccgaattaagtacttgtttcaatttctctcgaagcaagaaaaatgttcatcgagagtttcaaggttgagagtcctaacgtgaagtacacagagactgagattcagtccgtgtacaactatgaaaccactgaacttgttcacgagaacacgaatggcacttatcagtgggttgtcaagcccaaaactgtcaaatatgaatttaaaaccaacacccatgtccctaaactaggggtaatgcttgtggggtggggt

SEQ ID NO: 236076 - DNA, 357 bp, Glycine max
agggttttgtgctgttgtcgctgctcatcctccataacctccgagctctacaccgaagaacgaagccatggggaagacacatggattgggagctgctcgcaagctcaagtctcaccgcaggaggcaaaggtgggctgataagtcatacaagaaatcccatcttgggaatgaatggaagaaaccttttgccggttcatcccatgccaagggaattgtccttgaaaagataggtattgaagctaagcagcccaactctgctattcgtaagtgtgccagagttcaacttatcaagattgggaagaaaattgcagcttttgtccctaatgatggttgcttgaactacattgacgagaatga

SEQ ID NO: 236077 - DNA, 356 bp, Glycine max
ggagaagcattagcaaaagcaagaagaactagtctaagcagaaatggcctcttcagtgatggcatctgtggccctcaaacctgcccctttcactgttgagaagtcctcagttagaggccttccctccctctcaaggaactcctcttcattcagagttgtggccagtggtggcaagaagatcaagactgacaagccttatggaattaatggtggcatggctttgagggaaggagttgatgcatctggcaggaaaggaaagggaaagggcgtttaccagtttgtagacaaatacggtgctaatgtcgatggttacagtcctatctacgacaccaacgactggtctccaaccggtgatg

SEQ ID NO: 236078 - DNA, 379 bp, Glycine max
ggcacaagtgaatttgttgatcgagataactagaaacaatgtgatgaaaatgaaaggccctggtttcctccgtgccaaaaatttggtaacactggaatgccaagcgtacgaaaagttccctctccgaatgaacaactggcaaggtgcccctaacccggaaggtaaaatcccaagttggaagcttgctgtggaagcacacaacatctttggccttgagaccattcctgaagagtgcgttgaagcaacaaaggaatacatccatggcgaacaatatagatcagactccaaaacagttaaccaacaagcttacttttatgccagagacctcgaagtccatcccaaggacacatttgtgttcagtatagatggcaccgtactc

SEQ ID NO: 236079 - DNA, 386 bp, Glycine max
  unsure (1)..(386): unsure at all n locations
gacagcactgcactcgtcgcaacacaacanaagaagacaacccagagagcgcgtcgtaataaacgctcttctctgaaaacccccatttcgtttcgtcgttcgtcgtctcgttcgcgtcgtcgatcttcgatcttcgtcgctgaaaatgagagagtgcagttcagtccacatcggccaggccgggattcatgttggaaacgcctgctgggagctttactgcctcgaacacggcattcagcctgatgggcagatgccaagtgacaagaccgttggtggatgtgatgatgctttcaacaccttcttcagtgaaactggggcaggaaagcacgtgccccgtgcgaggtctgtagatcttgagcccacgtgattgatgacgttaggactgg

SEQ ID NO: 236080 - DNA, 309 bp, Glycine max
ggtgctctgctcgtgcctctagggttatcatttctccatttccagtttctctctcacttttcaagaatcgtaagctatgggaaagtcttacccaactgtgagtgctgattaccagaaggccgttgagaaggcgaagaagaagctcagaggcttcatcgctgagaagagatgcgctcctctaatgctccgtttggcatggcactctgctggaacctttgacaagggcacgaagaccggtggacccttcggaaccatcaggcagcctggcgaactggctcacagcgctgacaacggtcttgacatcgctgt

SEQ ID NO: 236081 - DNA, 442 bp, Glycine max
  unsure (1)..(442): unsure at all n locations
gggggggggggggggaggggggggggggggggggggggggggggggggggggggggggtggggggcaaggttagggacangtatggggagagggggggaagagggggggaagggggggggagggggggaggggggggggggggggggagaggggggggggggggggggggggggggggggagggggggggggggggggggggggggggggggggggggggggggggggggggggggggggggggggggggagggggagagggggggggggggggggggggggggggggggggggggggggtggggggggaggggggggggggggggggggggggggggggggggggggggggggagggggggggggggggggggggagggggggggggggggggggggggggggggggtgggggaagggggggggggggggggggggggggg

SEQ ID NO: 236082 - DNA, 365 bp, Glycine max
ggtgtgcaaaagagcgtcgtagtcgcaaccctaatcagaagaagcgcagcttcaagcgagtgacagccaccagccatgggtcgtatgcacagccgcggtaagggtatatcctcttctgctttgccctacaaaaggacacctcctagctggctcaagatctcttcgcaagatgtcgaagaaaatatctgcaagtttgcgaagaaaggtttgaccccgtctcagattggtgtcattctcagagattctcacggtattgctcaggtcaatagcgtcactggcagcaaaatccttcgcatcctcaaagctcacggacttgcgcctgaaattccagaggacctgtaccatttgattaagaaggcagtttc

SEQ ID NO: 236083 - DNA, 156 bp, Glycine max
gggacaagtgagtttggtgatcgacataactagaaacagtgtgatcaaaatgaaagtccttggtttcctcgatgctacaattttggtaacatggccatgccaggcgtacgatatgttccctcgccgaatgaacagtggccatggtgcccgtacacc

SEQ ID NO: 236084 - DNA, 370 bp, Glycine max
aacaccgaaagggggacaagtgagtttgttgatcgagatgactaaaaacagtgtgatgaaaatgaaagtccttgttttcttcgttgcaacaattttggtagcatggcaatgccatgcgtacgatatgttccctctccgaatgaacactggctatggtgcccgtacaccggaggttaaatgcgcaagttggaggcttgctgtggacgcatacaacatccttggctttgagaccattcctgaagagtgcgtttaaacacacatggaatacatccatggcgaacaatagagatcagactccacaacagtgaaccaacaagcgtacttttatgccatagacctcgaagtccatcccaaggacacatttgtgttc

SEQ ID NO: 236085 - DNA, 325 bp, Glycine max
  unsure (1)..(325): unsure at all n locations
ggtgtgagtgagattacccatagatagagagcgcggcataacctaaacttacccttcttctctctgtgtgtgtgcgcatcaaacgcaaccagaagcagccatggccactgcaagaactgtgaaggacgtttctcctcatgagttcgtcaaagcttactcttctcacctcaagcgatctggcaagatggagctgccagagtggactgatattgtgaaaactgcaagatttaaggagttggctccttatgatcctgactggtactatgtcagagctgcttccatggcaagaaagatctacttgagaggangacttggtgttggtgcc

SEQ ID NO: 236086 - DNA, 325 bp, Glycine max
gagtgcacaagtgagtttgttgatcgagataactagaaacagtgtgatgaaaatgaaggtccttgttttcttcgttgctacaattttggtagcatggcaatgccgtgcgtacgatatgttccctctccgaatgaacactggctatggggcccgtactccggaagtgaaatgcccaagttggaagcttgctgtgggagcacacaacatctttgggggttggacgattcctgaagagtgcgttgaagcaacaaaggaatagatccatggcgaacaatatagatcagactccagagcagttaaccaacaagcttacttttatgccaga

SEQ ID NO: 236087 - DNA, 258 bp, Glycine max
ggcacaagtgagtttgccgatctagataactagaaacagtgtgattaaaatgaaggtccttgttttcttcgttgctacgattttggtagcatggcaatgccatgcgtacgaaatgttccctctccgaatgaacactggttatggtggccgtagtccggaggtgaaatgcccaagttggaggcttgctgtggaagcacacaacatctttggctttgagaccattcctgaaaaattcgttgaagcaacaaaggaatacat

SEQ ID NO: 236088 - DNA, 329 bp, Glycine max
ggcacaagtgagtttgttgatcgagataactagaaacagtgtgatgaaaatgaaggtccttgttttcttcgttgctacaagtttggtagcatggcaatgccatgcgtacgatatgttccctctccgaatgaacactggctatggggcccgtactccggaggtgaaatgcgcaagttggaggcttgctgtggaagcacacaacatctttggctttgagaccattcctgaagagtgcgttgaagcaacaaaggaatacatccatggcgaacaatatagattagactccaagacagttagacaacaagcttacttttatgccagagacctcg

SEQ ID NO: 236089 - DNA, 361 bp, Glycine max
ggcacaagtgagtttgttgatcgagataactagaaacagtgtgatgaaaatgaaggtccttgttttcttcgttgctacaattttggtagcatggcaatgccatgcgtacgatatgttccctctccgaatgaacactggctatggtgcccgtactccggaggtgaaatgcgcaagttggaggcttgctgtggaagcacacaacatctttggctttgagaccattcctgaagagtgcgttgaagcaacagaggaatacatccatggcgaacaatatagatcagactccaaaacagttaaccaacaagcttacttttatgccagagacctcgaagtccatcgcaaggacacatttgtgttcagt

SEQ ID NO: 236090 - DNA, 209 bp, Glycine max
ggcacaagtgagtttgttgatcgagataactagaaacaatgtgatgaaaatgaaggtccctgttttcctcggtgccacaattttggtaacatggcaatgccatgcgtacgaaatgttccctccccgaatgaacactggctaaggtgcccgttctccggaagtgaaatgcccaagttggaagcttgctgttgaagcccacaacatccttg

SEQ ID NO: 236091 - DNA, 328 bp, Glycine max
ggcacaagtgagtttgttgatcgagataactagaaacagtgtgatgaaaatgaaggtccttgttttcgtcgttgctacaattttggtagcatggcaatgccatgcgtacgataggttccctctccgaatgaacactggctatggtgcccgtactccggaggtgaaatgcgcaagttggaggcttgctgtggaagcacacaacatctttggctttgagaccattcctgaagagtgcgttgaagcaacatatgaatacatccatggcgaagaagatagatcagactcgaaaacagtcaaccaacaagcttacttttatgccagagacctc

SEQ ID NO: 236092 - DNA, 348 bp, Glycine max
ggcacaagtgagtttgttgatcgagataactagaaacagtgtgatgaaaatgaaggtccttgttttcttcgttgctacaattttggtagcatggcaatgccatgcgtacgatatgttccctctccgaatgaacactggctatggtgcccgtactccggaggcgaaatgcgcaagttggaggcttgctgtggaagcacacaacatctttggctttgagaccattcctgaagagtgcgttgaagcaacaaaggaatacatccatggcgaacaatatagatcagactccaaaacagttaaccaacaagcttacttttatgccagagacctcgaagtccatcccaaggacac

SEQ ID NO: 236093 - DNA, 358 bp, Glycine max; identical to SEQ ID NO: 235712

SEQ ID NO: 236094 - DNA, 355 bp, Glycine max
ggcacaagtgagtttgttgatcgagataactagaaacagtgtgatgaaaatgaaggtccttgttttcttcgttgctacaattttggtagcatggcaatgccatgcgtacgatatgttccctctccgaatgaacactggctatggtgcccgtactccggaggtgaaatgcgcaagttggaggcttgctgtggaagcacacaacatctttggctttgagaccattcctgaagagtgcgttgaagcaacaaaggaatacatccatggcgaacaatatagatcggactccaaaacagttaaccaacaagcttacttttatgccatagacctcgaagtccatcccaaggacacatttgtg

SEQ ID NO: 236095 - DNA, 296 bp, Glycine max
taaaggggcataagttactctgttgatcgagattacaaacaaagtgttatcaacattaaggtccttgtcttcttcgttgctacaattttggtagcatggctatgccatacgtacgatatgtaccctcgccgaatgaacactggccatagtgcctctactcctgaggtaaaattcccaagttgtacgcttgctctagaagcacacaacatctttggctttgagaccaatcctaacgagtgcgttgaagcaacaaacgaatatatccatggcgaaccatatagatcatactccagaac

SEQ ID NO: 236096 - DNA, 252 bp, Glycine max
ggcagttgtattgttgaacaagggtttcgctgtctgcttcttcactttctctcgtttcaatcgaaacgaaaacaaaaacatgggcagaaaattcttcgtcggtggcaactggaaatgcaatgggaccactgaggaggtaaagaagattgttacgactttgaatgaggcgaaagtccctggagaagatatcgtacaagttgttgtgagccctccttttgtgttccttcctgtgggtaaaagtttgctgcgccc

SEQ ID NO: 236097 - DNA, 305 bp, Glycine max
agggtggcaaaaaaccaacaaaggggggcacaagtgagtatgatcatcgataacaactatgcacagtgtaactaaaactgagtgaccgtattgtccacgttgctacgtttttgatccaatcgcattgacatgcctaaaattagtccgctctcctaaagaacaacgtctatggtgccaatactcccgatgtgaactgcacaatttagaagcttgctgtcaacgtacacaacatctttggcattgagaccattcctcaaaaatgcgtgcacaaaccaactgaatatatccatgcgtaacaatatata

SEQ ID NO: 236098 - DNA, 368 bp, Glycine max
ggtaaacaaagaccatcaccaaaaaagaaaatgatgctcggagagcaccatcgcgcgaatccaacggttcacgtgccaccgtggccaacccacgacgattcaacggccgagatgtactccgcgtttttaacaaacgacgtcaatgctggtgagtactccccgtactatcttcaagaagcactaacggctctgcagcgttttctgccgtctaacgaaacggacgctgactcggacacggaggctcaacccgacgcggcggtggacgcgtactcgtgcgaccatttccgcatgtacgagttcaaggtccgtcgatgcgcacgtggcaggtcacacgactggacggagtgtccgtacgcgcatcccggcga

SEQ ID NO: 236099 - DNA, 351 bp, Glycine max
gacacattgtgagtatcaacaagaatactcataatataggtagcatatagagctatagttatattgatattgcgatttgttaagctcttatttcctcggccatggctaagaatgaacgtgatctcttctcggcggagattgtgaatcgtggaattgaaccgtcgggacccaacgttggctcgttgacattctctgtgatggtgaggaggcgcttaccggattttctgcaatcggtgaaccttaagtacgtgaaattgggttaccattatctcataaaccatggcatatacttgttcaccatacccgttcttctcgtggtgtttagtgctgaggttgggagcctcagcaaag

SEQ ID NO: 236100 - DNA, 378 bp, Glycine max
ggcacaagtgagtttgttgatcgagataactagaaacagtgtgatgaaaatgaacgtccttgttttcttcgttgctacaattttggtagcatggcaatgccatgcgtacgatatgttccctctccgaatgaacactggctatggtgcccgtactccggaggtgaaatgcgcaagttggaggcttgctgtggaagcacacaacatctttggctttgagaccattcctgaagagtgcgttgaagcaacaaaggaatacatccatggcgaacaatatagatcagactccaaaacagttaaccaacaagcttacttttatgccagagacctcgaagtcgatcccagggacacatttgtgttcagtatagatggcaccgtact

SEQ ID NO: 236101 - DNA, 349 bp, Glycine max
ggcacaagtgagtttgttgatcgagataactagaaacagtgtgatgaaaatgaaggtccttgttttcttcggtgctacaattttggtagcatggcaatgccatgcgtacgatatgttccctctccgaatgaacactggctatggtgcccgtactccggaggtgaaatgcgcaagttggaagcttgctgtggaagcacacaacatctttggcgttgagaccattcctgaagagtgcgttgaagcaacaaaggaatacatccatgggcgaacaatatagatcagactccaaaacagttaaccaacaagcttacttttatgccagagacctcgaagtcaagcccaaggacac

SEQ ID NO: 236102 - DNA, 355 bp, Glycine max
gggagaagaatttgcatagagcaagcaaagcgggggagaatgagaggcagcatacacgaacaatggctacgtctctctctgtttcgccatctctctctctctcaagactctcttcatcgccaaagcgcttccactatctcgcccctcctttctctctctccctctcaccaactccctactctctctctccacgcgccgccgcaccttcatcgtccgcgccaaatctcatcacggctccgagcccgttcccgcccactacgacttcgatctcttcaccatctgcgcaggcagcggcggtgtccgatccgctcacttcgacgctaactacggcacttctgtcgccatctgcgatctt

SEQ ID NO: 236103 - DNA, 346 bp, Glycine max
gactcacaactccataacacaaggcagaaagcaagctcatcctagagttttaaaaatggcagcagcctcctccatggctctctcttccccatccttggctggcaaggccgtgaagctgggcccatcagcccccgaagtcgggagggtcagcatgaggaagaccgtcaccaagcaggcctcctccggaagcccatggtacggcccagaccgcgtcaagtacttgggcccattctctggcgagcccccgtcctacctcactggcgagttcccaggtgactacggctgggacactgctgggctttcggccgacccagaaaccttcgccagaaaccgtgagctcgaagtg

SEQ ID NO: 236104 - DNA, 271 bp, Glycine max
ggcacaagtgactttgttcatcgagaaaactagaaacagtgtgatgaaaatgaaggtccctggtttcttcgttgctacaattttggtaggatggcaatgccatgcgtacgatatgttccctctccgaatgaacactgggctatggtgcccgtactcccgaggtgaaatgcgcaagttggacgcttgctgtggaagcacacaacatctttggctttgagaccattcctgaagagtgcgttgaagcaacagaggaatacatccatggcgaaca

SEQ ID NO: 236105 - DNA, 346 bp, Glycine max
ggcagcatcgtagagaaataagggaaaaatggtgtcgctgaaactgcagaagcgcctctccgcaagcgtgctcaagtgcggcagaggaaaggtttggcttgaccccaatgaagtcaacgaaatctccatggccaattctcgggaaaacatcaggaagttggttaaggatgggtttatcatcaggaagccaaccaagattcactcccgctcacgtgctcgtaggatgaaggaggcaaagaggaagggccgccactccggttatggtaaacgtaaggggtacaagggaggcaaggcttcccaccaagatactctggatgagaaggatgcgtgtgctcagacggttgct

SEQ ID NO: 236106 - DNA, 255 bp, Glycine max
ggagtttgttgatcgagataagtacaaacagtgtgatgaaaatgaatgtccctgttttcttcgttgctacaatgttaggagcaaggcaatgccatgcgtaccatatgttccctctccgaatgaacaatggctatggtgcccgtaagcgggaggtgaaatgcgcaaattggaggcttgctgtggaagcacagaacatcattggctttgagacgattcctgaataatgcgttgaagcaacagcagaatacatccatg

SEQ ID NO: 236107 - DNA, 274 bp, Glycine max
ggcgcattgaacgaaaattagggtttgtagtgtagcaggaacaagcagcaatggcgccgaaggtaacacgcaaggttagcagaaaccccgaattgataaggggaattgggaagtactcgaggtcgcagatgtaccacaagaggggcatttgggctatcaaggccaaaaatggtggcgttttacctcgccacgaccctaaacccaaacctgaaacacccgctgaaaaaccacccaaattttaccctgctgatgatatcaagaaaccccttgtcaa

SEQ ID NO: 236108 - DNA, 343 bp, Glycine max
gagtgcacaagtgagtttgttgatcgagataactagaaacagtgtgatgaaaatgaatgtccttgttttcttcgttgctacaattttggtagcatggcaatgccatgcgtacgatatgttccctctccgaatgaacactggctatggtgcccgtactccggaggtgaaatgcgcaagttggaggcttgctgtggaagcacacaacatctttggctttgagaccattcctgaagagtgcgttgaagcaacaaatgaatacatccatggcgaacaatatagattagactccaaaacacttaaacaacaagcttacttttatgccaaagacctcgaagttcaatcc

SEQ ID NO: 236109 - DNA, 360 bp, Glycine max
gattatatttgagttcaaacatatcaaagccatggccaactccaacttctctattgttctctccgtctccctatccttccttttggtgcaacttaccaaggcacactcaaccgataccgtatctttcatcttcaataagttcaacccattccaaccaaacattatgctccaaagtgatgctagtatttcatcctctggggtgttacaactcaccaaagttggcaccatcggcgtgcccagctcgggatctctcagtcgtgccctttacgctgcaccaatccagatttgggacagcgacaccggcaatgtaaccagctgggctacatcctttaaattcaacattttcgcatccaacagatc

SEQ ID NO: 236110 - DNA, 354 bp, Glycine max
ggcacaagtgagtttgttgatcgagataactagatgcagtgtgatgaatatgaaggtccctgttttcttcgttgctacaattttggtagcatggcaatgccatacgtacgatatgttccctctccgactgaatactggctatggtgcccgtactccggaggtgaaatgcgcaagttggacgcttgctgtggaagcacacaacatctttggctttgagaccattcctgaagagtgcgttgaatcaacaatggaatagatccatggcgaacaatatagatcagactccacagcagttagacaacaagcttacatttatgccagagacctcgaagtcatcccaaggacacatttgtg

SEQ ID NO: 236111 - DNA, 327 bp, Glycine max
gatagcgaaacagagagtggtttcagtgagtgatcggtgttcacttgatccttcataagtcgtcatcatcatcatcatcatcaccgttgattgaagaagatgccgatcagaaacatcgccatcggaaggcctgaagaggctactcagcccgacacgttgaaggcggggttggctgagttcatctccaccttgatcttcgtgttcgccggttcaggttccggcatcgcctacaacaagctcaccgacaacggcgccgccactcccgccggcctcatctccgcttccatcgcccatgctttcgccctcttcgtcgccgtctccgtcggc

SEQ ID NO: 236112 - DNA, 304 bp, Glycine max
ggcacaagtgagtttgttgatcgagataactagaaacagtgtgatgaaaatgaaggtccttgttttcttcgttgctacaattttggtagcatggcaatgccatgcgtacgatatgttccctctccgaatgaacactggctatggtgcccgtactccggaggtgaaatgcgcaagttggaggcttgctgtggaagcacacaacatctttggctttgagaccattcctgaagagtgcgttgaagcaacaaaggaatacatccatggcgaacaatatagatcagactccaaaacagttaaccaacaa

SEQ ID NO: 236113 - DNA, 321 bp, Glycine max
ggattgtatatcatttacaatttcaatctctctcgctctctgtctctctctctctagacttagattttgtgaatggctgaagtggaagagggacaggtcatcggcgtccacaccgttgatgagtggaagctgcaactccagaatgcagaagactccaaagaactgattgtggtggattttactgcttcctggtgtggtccatgccgttttatggccccagttcttgcagagattgcaaagaagactcctgaattgatcatcctcagagtggatgtggatgaagtgaggcctgttgctgaggaatattccattgaggccatg

SEQ ID NO: 236114 - DNA, 319 bp, Glycine max
ggggtgccattgttgctgtcatcatccgcagctgctgttattcgcaccgcgagcagacagtgagccatggccgtcggaaagaacaagcgcagctccaaggggaaaaagggtggcaagaagaaggcagctgatccctttgccaagaaggattggtatgagggtagggccccttctctttttcaagtgaaaaatgttggcaaaaccctcgtctctcgtacgcagggtagcaagattgcttctgaaggacttaggcatagagtgtttgaggtctcctgtgctgatggtcaaggggatgaggatcatgcattcaagaagatta

SEQ ID NO: 236115 - DNA, 377 bp, Glycine max
gacagcatatcaataatctattttatactatacccacattttgataattatttttctagttgataagccatggctactcgaggaaagcttgaggttgacgttgatctcaagtctaacgcagacaagtactggcaaacccttaggaactccactgaaatattccccaaggccttccccaatgattacaaaagcattgaggttcttgagggtgatggcaaatcacctggttctatccgccacataagttatggtgaaggttcaccacttgtgaagtcatcctttgagaagattgaggctgttgatgaagaaaagaaggtactgtcgtacactatcatgtatggagaactcctccagcactacgaaacattcaagggaga

SEQ ID NO: 236116 - DNA, 352 bp, Glycine max
ggcacaagtgagtttgttgatcgagataactagaaacagtgtgatgaaaatgaaggtccttgttttcttcgttgctacaattttggtagcatggcaatgccatgcgtacgatatgttccctctccgaatgaacactggctatggtgcccgtactccggaggtgaaatgcgcaagttggaggcttgctgtggaagcacacaacatctttggctttgagaccattcctgaagagtgcgttgaagcaacaaaggaatacatccatggcgaacaatatagatcagactccaaaacagttaaccaacaagcttacttttatgccagagacctcgaagtccatcccaaggacacattt

SEQ ID NO: 236117 - DNA, 360 bp, Glycine max
  unsure (1)..(360): unsure at all n locations
gcctcaacaaaaaacagcacaacgaaccactctgaagccgctcacgttatccacaacactctcaaccctccttaaaccctaaccaatccaaccatggcttcttcttccaccttcactgcaatgtccgcctgcaagctctcctcctccgccgccatctcctccttcccctcgcgccgccgctccaacgccgtcgttctgtcgaggcgcagccgcgccgccagggtctccgccatggccaaggagttgcacttcaacaaagacggcaccgcaattaagaagctccagagcggtgtgaacaagctcgcggatctggttggggtcacgcttggtcncaaaggaagaaatgttgttctcgagagc

SEQ ID NO: 236118 - DNA, 305 bp, Glycine max
gacagatatcttgctaaggttttaggaaaagacactgtccccccagttaacacaggttacagcaatggctttctttggtagaattgggaatttattaagacagacagcaagcacgcaggttagttcaaaagtgcgatcatccccttcgttttttcaggctatatgcaatatgtcatctgctccaagcacaaagctgtttatcggaggtgtttcatattctactgacgagcaaagtttgagggaagctttttcaaaatatggtgaagttgttgatgctacgataattacggatcgtgaaactggta

SEQ ID NO: 236119 - DNA, 338 bp, Glycine max
gatagcgaagcagagagtggtttcagtgagtgatcggtgttcacttgatccttcaaaagtcgtcatcatcatcatcatcatcaccgttgattgaagaagatgccgatcagaaacatcgccatcggaaggcctgaagaggctactcaccccgacacgttgaaggcggggttggctgagttcatctccaccttgatcttcgtgttcgccggttcaggttccggcatcgcctacaacaagctcaccgataacggcgccgccactcccgccggcctcatctccgcttccatcgcccatgctttcgccctcttcgtcgccgtcaccgtcagcgccaacatctc

SEQ ID NO: 236120 - DNA, 323 bp, Glycine max
ggggaacatcatcacattacattagattggtggtaatggcagcgtcactacaagcagcagctagtttcatgcaacccagcaagttgaacaggagcaacactttgcagcaaaagtctagccagtccatttccaaggcttttggtttggaaacagttggagctaagaatgtcacatgcccccttcaggctgatcttaacgatctggctcacaagtgtgttgatgctaccaaaattgcatgattcgcccttgccacctctgccctcgtagtctctgaggcaagtgctgaaggtgttccacagaggctaaccgtcgacgaaatccag

SEQ ID NO: 236121 - DNA, 351 bp, Glycine max
ggttcactttcttccaacctctaacctacctctttttcttctctctcaacaacttcaccttcttcctcctcgatcatgtctcacttcaagggcaagtaccatgatgagcttatcgccaatgctgcgtacattggcactcctggaaagggtattcttgctgctgatgagtcaacagggacaattggcaagcgtttggccagcatcagtgtagagaacattgaatccaacaggcgagctcttagggagctgcttttcactgctcctggtgttcttcaatatctcagtggtatcatcctctttgaggaaaccctctaccagagcacagctgcaggcaagccctttgtgaatgtc

SEQ ID NO: 236122 - DNA, 315 bp, Glycine max
ccataagtccagatgcggggaaattccgcaccagcaaaaacactcttcgttatcttttctcatactccgcggcgtacatgcgatgagttcgggaaaccttaacgcatcataggaactcaagtcatggctggacctgcacctgacggatcacagttcgatactcgtcaatattattctaagatgattgacttactttcatctgatggacaggacttcttcacatcctatgacgaggtttatgatggttttgacgctataggtttgcacgaaaatcttctcaggggaatttacgcagatggttttgagaagccaact

SEQ ID NO: 236123 - DNA, 359 bp, Glycine max
ggttctagtgtgtgattgtttgttgttgtaactcgttcttcttcttttgttgttctgtgtttgtgtttgttttttctctcacctgaaaatgtcttgctgcggtggtaactgtggttgcggaagctcctgcaagtgcggcaacggctgcggaggctgcaagatgtacccagacttgagctacactgagtcaaccaccaccgagaccttggtcatgggagtggcacctgttaaggctcaatttgagggtgctgaaatgggtgtgcccgctgagaacgatggctgcaaatgtggaccaaactgctcctgcaacccctgcacttgcaagtgaagtgttgggaaagcaagcttcaagcagagat

SEQ ID NO: 236124 - DNA, 353 bp, Glycine max
gctacagttttggtaacatatgaatgccatggctcaaactaccaaaagttccctccccaaatgaaaactgggtttggtgggcaatacaacaatgaagtgtgcaagtgccaatttgaggcgtttggtgtaaacacacaccgtatataaatgtcacactgtgcccgcacatttcgcagagtatatatctcactacattctctgtgaccccaatagatcatcattccacaacacattccaccaaacttattatctactactcaacccccaacctcatcaccaacaatgtcgtcgtcgtcgtcgttgtcgacaatactctccccaatcaccactattttgctaaccatccaattttt

SEQ ID NO: 236125 - DNA, 340 bp, Glycine max
ggcacaagtgagtttgttgatcgagataactagaaacagtgtgatgaaaatgaaggtccttgttttcttcgttgctacaattttggtagcatggcaatgccatgcgtacgatatgttccctctccgaatgaacactggctatggtgcccgtactccggaggtgaaatgcgcaagttggaggcttgctgtggaagcacacaacatctttggctttgagaccattcctgaagagtgcgttgaagcaacaaaggaatacatccatggcgaacaatatagatcagactccaaaacagttaaccaacaagcttacttttatgccagagacctcgaagtccatcca

SEQ ID NO: 236126 - DNA, 395 bp, Glycine max
ggcacaagtgagtttgttgatcgagataactataaacagtgtgatgaaaatgaaggtccttgttttcttcgttgctacaattttggtagcatggcaatgccatgcgtacgatatgttccctctccgaatgaacactggctatggtgcccgtactccggaggtgaaatgcgcaagttggaggcttgctgtggaagcacacaacatctttggctttgagaccattcctgaagagtgcgttgaagcaacaaaggaatacatccatggcgaacaatatagatcagactccaaatcagttaaccaacaagcttacttttatgccagagacctcgaagtccatcccaaggacacatttgtgttcagtatagatggcaccgtactctctaatattccatact

SEQ ID NO: 236127 - DNA, 397 bp, Glycine max
gggtcgactcagtcgtgagtacagatgcaaacagaaggggatagcgaaacagagagtggtttcagtgagtgatcggtgttcagttgatccttcataagtcgtcatcatcatcatcatcatcaccgttgattgaagaagatgccgatcagaaacatcgccatcggaaggcctgaagaggctactcaccccgacacgttgaaggcggggttggctgagttcatctccaccttgatcttcgtgttcgccggttcaggttccggcatcgcctacaacaagctcaccgacaacggcgccgccactcccgccggcctcatctccgcttccatcgcccatgctttcgccctcttcgtcgccgtctccgtcggcgccaacatctccggggggcacgttaaccccg

SEQ ID NO: 236128 - DNA, 362 bp, Glycine max
gggccattggaacaggaaaggttgcaactcctgctcaggctcaagaggttcatgctgatttaaggaaatgggttcatgacaatgtgagtgctgaagttgctgcatctgtaagaattatctatggaggctctgtaaatggaggaaactgcaaagaattggcagcacagcccgatgttgatggatttttggttggtggtgcatccctcaaggcggaatttgtggacatcataaacgctgctactgtgaagaagaattgaaattcgtagttaggaactgataatgctgcctttcaagctgcttcggaaattgctgtttttgggttctgggttctgtgctttgtgggcaatgtattgaactcggtt

SEQ ID NO: 236129 - DNA, 340 bp, Glycine max
gagattcgtcctttcgttttctctttctttctttcgggcaacggagagcacactactttcactgcagcagcatcaatggcggcgaccgagatcgagaacataacgacaatagacccagagacggagtttctggcgtcgaggatacggaactggaacgactgggagaccttcaaggataacgtgaggccgctcaacagaggccgcaacgtcaacctcttgaaccactccctcaactcccacaccgattacgaactcaagatatccctcatggaacaacgaatgaagctgattgaagccatccaagaataccaaggtgatgacgctcttcttccctggatac

SEQ ID NO: 236130 - DNA, 395 bp, Glycine max; identical to SEQ ID NO: 234808

SEQ ID NO: 236131 - DNA, 393 bp, Glycine max
gacagcatatatatcaataatctattttatactatacctacattttgataattttctttgtagttgatagccatggctacccgtggaaagcttgaggttgacattgatctcaagtccaacgcagacaagtactggcaaacccttaggaattctactgaaatattccctaaggccttcccacatgattacaaaagcattgaggttcttgagggtgatggcaagtctcctggttctatccgccacataagttatggtgaaggttcaccacttgtgaaatcatcctttgagaagattgaggctgttgatgaggaaaagaaggtagtgtcgtacactatcattgatggggaactcctccagcactacaaaacattcaagggagacatttcagtgact

SEQ ID NO: 236132 - DNA, 385 bp, Glycine max
ggtgcacaagtgagtttgttgatcgagataactagaaacagtgtgatgaaaatgaaggtccttgttttcttcgttgctacaattttggtagcatgggaatgccatgcgtacgatatgttccctctccgaatgaacactggctatggtgcccgtactccggaggtgaaatgcgcaagttggaagcttgctgtggaagcacacaacatctttggctttgagaccattcctgaagagtgcgttgaagcaacaaaggagtacatccatggcgaacaatatagatcagactccaaaacagttaaccaacaagcttacttttatgccagagacctcgaagtccatcgcaaggacacatttgtgttcagtatagatggcaccgtactctcta

SEQ ID NO: 236133 - DNA, 377 bp, Glycine max
gaaggtgcaagagtttgttgtgagctataagctagtttatcgtgaggagaatatgaagttgtttgttttctttgttgctgcagtagttttggtagcatggccatgccatggagcatgctaccaaaggttccctctccgaatgaaaactggctatggtgagcgttcttcggaggtaaaatgcgcaagttttaggcttgctgtggaagcacacaatatccgagcctttaaaaccattcctgaagagtgcgttgaaccaacagaggactacattaatggcgaacaatttagatcagactctaaaacagttaaccaacatgctttcttttatgctagtgaacgcgaagtccatcacaacgacatatttatattcggcatag

SEQ ID NO: 236134 - DNA, 328 bp, Glycine max
  unsure (1)..(328): unsure at all n locations
agggcagttcaattccaatatattccattctctctgtgtatttccctacctctcncttcaagatgcagatcttcgtcaagaccctcaccggcaagaccatcacccttgaggtggaaagctctgacaccatcgacaacgtcaaggccaagatccaggacaaggaaggaatccccccggaccagcaacgtctcattttcgccggaaagcaacttgaggacggccgtacccttgctgactacaacattcagaaggagagtactcttcacctcgtcctccgtctccgtggtggcatgcagatcttcgttaagacactcaccgggaagaccat

SEQ ID NO: 236135 - DNA, 319 bp, Glycine max
  unsure (1)..(319): unsure at all n locations
ggaagcttganactttcatttcccacacattcccgagcgagagatagagattttcgctctcgacataacatacacacgtctagatggctcgtacaaagcaaatcgcgcgtacgtctaccggtggaatcgcgccacgtaagcagatcgccaccaacgcagcgatgaagtcagcgccagagaccgtgagaatgaacacgcctcaacggttcaggacggaacgggtgccgctgacggataatctcgaggaccacaagttcatcgagcttgacatcaggactcatctatttcagaagcacgttagagacatcacgcaggattt

SEQ ID NO: 236136 - DNA, 372 bp, Glycine max
gacaccattctcacaaaacaactttcaaactctgagaaagaatggctgccaacacattgatgagtactgctatctcagccttcccatctctcctttcttcctcaaaatccagatttgccaccgcagttcctctttctagctttggtgtcaccaatgcctcttcttctcgcttttctatgagtgctgactggatgccaggccagcctagacctccttaccttgatggttcagcacctggtgactttggattcgaccctcttcgtcttggtgaagtaccagagaatcttgataggttcaaagagtcagaactcattcactgcagatgggccatgcttgctgttccatcgattttggttccagaagcattgggct

SEQ ID NO: 236137 - DNA, 357 bp, Glycine max
  unsure (1)..(357): unsure at all n locations
ggaacttctcacgttcatttctacacatccctagctctgtcgttccgtcgttgacgatggcgtttcgggtgcgaagccctgacctccgctctctctttcttctctctctcttgtccatcgcttccgccaatgtcttcttcgaagagcgtttcgatgacgggtgggaaaatcgatgggttaaatcagattggaaaaaagatgagaacgtggctggggagtggaaccacacctctggtcaatggaatggagacgctaatgacaaaggtattcanaccagtgaggattacagattctatgctatttcagctgagtaccctgaattcagcaacaagggtaagacactagtccttcaatttt

SEQ ID NO: 236138 - DNA, 398 bp, Glycine max
agagacgacagaagggggatgcagatgcagcctatcatggcagcctactaccccaacaacgtcaccactgatcacattcaacagtacctggatgagaacaagtccttgatcctgaagattgttgaaagccagaattctggcaagctgagcgagtgtgcagagaaccaatcaaggctgcagagaaatctcatgtacctagctgcaatagctgattctcaaccccaaccatctccaatgcctggtcagtatccttctagtggacttatgcagcagggagcacactacatgcaggctcagcaggctcagcagatgtcacaacaacagctaatggcttcgcgctcctcactcttgtactcccaacagcctttctcagtgcttcaacagcagcaaggcatgca

SEQ ID NO: 236139 - DNA, 386 bp, Glycine max
  unsure (1)..(386): unsure at all n locations
gacagcanaacaattttcaaactcaattaccattccataacctaaatctcctctttgtttccgagtcagagagcaatggcacgtaccaagcaaaccgctcgcaagtccaccggcggaaaggcgccgaggaagcaattggcgactaaagccgctcgcaagtcagctccggccaccggcggagtgaagaagccccaccgcttcaggcccggaacggtggctctgagggagatcagaaagtaccagaagagcactgaacttctgatccgaaaactcccattccagaggctcgtcagagaaatcgctcaggatttcaaaacagatcttcgtttccagagcagcgctgtttctgcgcttcaggaagccgcagaagcttatctcgttggact

SEQ ID NO: 236140 - DNA, 370 bp, Glycine max
ggcacacgtttgttgagatagctagaagcactatcatgaaaatgaaagtgcttgttttgtttgttgccacagttttggtaacatatgaatgccatggctcagactaccagaagttccctctccaaatgaaaactgggtttggtgggcactacaccaatgacgtggcatgtgacagttggaggcttgacgtggaagcacatcacgtactcaactgtcacactgttccagctgcttgcgtacagtacaaaactgactactttctacgagaccactctatactaaagtccatcacagttaatcactcaagcttacttctaagctaaatccctcaaactcaccaacagtatatgtccttgacgtggacgttgac

SEQ ID NO: 236141 - DNA, 384 bp, Glycine max; identical to SEQ ID NO: 235861

SEQ ID NO: 236142 - DNA, 296 bp, Glycine max
  unsure (1)..(296): unsure at all n locations
naggggcacaagtgagtttgttgatcgagataactagaaacagtgtgatgaaaatgaaggtccttgttttcttcgttgctacaattttggtagcatggcaatgccatgcgtacgatatgttccctctccgaatgaacactggctatggtgcccgtactccggaggtgaaatgcgcaagttggaggcttgctgtggaagcacacaacatctttggctttgagaccattcctgaagagtgcgttgaagcaacaaaggaatacatccatggcgaacaatatagatcagactccaaaaca

SEQ ID NO: 236143 - DNA, 347 bp, Glycine max
ggcatcaattcaaaatatatcatcagttataatcatgggtttgtggaacacaacgaatgcaatgtcttgccgctttcacaactttggtgacgaccatgagaatctggtcgtccaatgtgatgccacgtcttcttccatgggcatacaactcacaaagttagactgtggaggaaatccactgggtggcagtgtggggagagtgttacacgcttctccagtgcacctttgcgaaagctctacaatggtcccaagctttgaaatcgacttcaccttttccatctcatcagactctactactccatgtgatggccttgccttcatcaatgcaccatatgtcactaccatcc

SEQ ID NO: 236144 - DNA, 357 bp, Glycine max
ggcacaagtgagtttgttgatcgagataactagaaacagtgtgatgaaaatgaacgtccttgttttcttcgttgctacaattttggtagcatggcaatgccatgcgtacgatatgttccctctccgaatgaacactggctatggtgcccgtactccggaggtgaaatgtgcaagttggatgcttgctgtggaagcacacaacatctttggctttgagaccattcctgaagagtgcgttgaagcaacaaaggaatacatccatggcgaacaatatagatcagactccaaaacagttaaccaacaagcttacttttatgccagagacctcgaagtccatcccaaggacacatttgtgtt

SEQ ID NO: 236145 - DNA, 299 bp, Glycine max
ggcacaagtttgttgagatatcgagaagcaataagatggtgtggaaagtgcatgggccgttggttcctacattcttggaattatggaacagtgacagtgcaaaccatcaaaaatttcccctcccaaataaaactgggttaggggggccgtacaccagtaatgtaacatgtaacatttgggggttccgtgtgaacgcaaaaaatgtattgaattggcacaatgcccctacaatttgctgaaactacatagggaattatctactgcgaaaccaatatatttcagacccaaacacatttacc

SEQ ID NO: 236146 - DNA, 372 bp, Glycine max
ggcccttctagctttttcccagtccaagcagcctccaattcgtgccactctcttcaaaatggccgttaccttctcaaatctccacacagaatcaggtctcaagtccctcgacgacttcctctctgggaaggtctacgtttctggggatcagttcacaaaggacgacatcaaagtgtatggtgctgttttggagaagccaggtgactcttttcccaatgctgccaagtggtacgaggttgtctcatctcagcttgctgcaagcttccccggcaatgctcaaggggtgagattcagtggcaaagcttctgctccagcggaggctgctcctgcgaaaccggatgcttctgctgctgaagatgatgatgaccttga

SEQ ID NO: 236147 - DNA, 392 bp, Glycine max
ggcacaagtgagtttgttgatcgagataactagatccagtgtgatgaaaatgaatgtccttgttttcttcgttgctacaattttggtagcatggcaatgccatgcgtacgatatgttccctctcagaatgaacactggctatggtgcccgtactccggaggtgaaatgcgcaagttggacgcttgctgtggaagcacacaacatctttggcgttgagaccattcctgaacagtgcgttgaagcaacataggaatacatccatggcgaacaatatacatcagactccaaaacagttaaccaacaagcttacttttatgccagagacctcgaagtcgatcccaaggacacatttgtgttcagtatagatggcaccgtactctctaatattccat

SEQ ID NO: 236148 - DNA, 366 bp, Glycine max
gacgccgtttaaatttgaggtaaagctttgatacgattgtgctgttccaagtcccagaccatcgatgggaatcgatcttaaggctgggggtaagagcataacgaccaaaagaacagcaccaaaatccaatgacatctacctcaaattacttgtcaagctttatcggttccttgttcgaatgactggcagcaatttcaatgctgttatactcacgcgcttgttcatgagcaaggttaacaagcctccagtttctttgtcaacgttaattaagtatacagatgggaatgaggataaaattgctgtaatactggcgactgtaactgatgatatcagattatatgaagttccagcattgataattacagc

SEQ ID NO: 236149 - DNA, 388 bp, Glycine max; identical to SEQ ID NO: 235949

SEQ ID NO: 236150 - DNA, 386 bp, Glycine max
gaaggtgcaagagtttgttgtgagctataagctagtttatcgtgaggagaatatgaagttgtttgttttctttgttgctgcagtagttttggtagcatggccatgccatggcgcaggctaccaaaggttccctctccgaatgaaaactggctatggtgagcgttcttcggaggtaaaatgcgcaagttttaggcttgctgtggaagcacacaacatccgagcctttaaaaccattcctgaagagtgcgttgaaccaacaaaggactacattaatggcgaacaatttagatcagactctaaaacagttaaccaacaagctttcttttatgctagtgaacgcgaagtccatcacaacgacatatttatattcggcatagataacaccg

SEQ ID NO: 236151 - DNA, 387 bp, Glycine max
gaaggtgcaagagtttgttgtgagctataagctagtttatcgtgaggagaatatgaagttgtttgttttccttggtgctgcagtagttttggtagcatggccatgccatggcgcaagctaccaaaggttccctctccgaatgaaaactggctatggtgaacgttcttcggaggtaaaatgcgcaagttttaagcttgctgtggaagcacacaacatccgagcctttaaaaccattcctgaagagtgcgttgaaccaacaaaggactacattaatggcgaacaatttagatcagactctaaaacagttaaccaacaagctttcttttatgctagtgaacgcgaagtccatcacaacgacatatttatattcggcatagataacaccgt

SEQ ID NO: 236152 - DNA, 382 bp, Glycine max
gacgaaagcaaattcgtcaatttaaacacagaaacataatcaccaccttcaaagtcatctctctcgagaatcatcgaataaaactagggtttccgatcgtcgtcgaggagaatgccgaagaacaagggaaagggaggaaagaaccggaagcgcgggaagaacgatgcggacgacgagaagcgggagcttgtgttcaaggaggacggccaggagtacgcgcaggtgctccggatgctggggaacggtcgctgcgaggcgatgtgcatcgacggcaccaagcgcctctgccatatccgcggcaagatgcacaagaaggtctggatcgccgccggcgacatcatcctcgtcggcctccgcgactaccaagacgacaaagccgacg

SEQ ID NO: 236153 - DNA, 367 bp, Glycine max
  unsure (1)..(367): unsure at all n locations
ggagcaaaaccctaatccctatttttcttcctcagtagtgtcatttacgcttctcttctctgcagcaactatgcctaaccctaaggtcttcttcgacatgaccatcggcggtcaatctgctggccgcatcgtgatggagctctacgccgacgtcactccccgcaccgccgagaacttccgcgcgctttgcaccggcgagaagggcgtanggcggagcggcaagcccctccactacaagggctcgtccttccaccgcgtgatcccgagtttcatgtgtcagggtggcgacttcaccgccggaaacggaaccggcggcgagtcgatttatggcgccaagttcgccgacgaaaacttcgtgaagaagcac

SEQ ID NO: 236154 - DNA, 387 bp, Glycine max
ggcacaagtttgttgagatagctagaagcaataagatgacaatgaaagtgcttgttttgtttgttgctacagttttggtagcatatgaatgccatggcgcagactaccagaagttccctctccaaatgaaaactgggtttggtgggcaatacagcaatgaggtggcatgtgccagttggaggcttggcgtggaagcaaacaacgtagtcaagtggcaaactgttcctgcagcttgcggagagtacatagctgactacgttctacgagaccaatatagatcagattccaatacagttaaccaacaagcttatttctatgctagatccctcaaactcaccaacaaagatgtctttgtcttggacgttgacgacactactctctccaatc

SEQ ID NO: 236155 - DNA, 397 bp, Glycine max
ggtgcacaagtgagtttgttgatcgagataactagaaacagtgtgatgaaaatgaaggtccttgttttcttcgttgctacaattttggtagcatggcaatgccatgcgtacgatatgttccctctccgaatgagcactggctatggtgcccgtactccggaggtgaaatgcgcaagttggaggcttgctgtggaagcacacaacatctttggctttgagaccattcctgaagagtgcgttgaagcaacaaaggaatacatccatggcgaacaatatagatcagactccaaaacagttaaccaacaagcttacttttatgccatagacctcgaagtccatcccaaggacacatttgtgttcagtatagatggcaccgtactctctaaaaatccatact

SEQ ID NO: 236156 - DNA, 367 bp, Glycine max
ggcacaagtttgttgagatatctagaagcaatacgatgaacatgaaagtgcttgttttgtttgttgctacagttttggtaccatatgaatgccatggctcagactaccagaagttccctctccaaatgaaaactgggtttggtgggcaatacagcaatgaggtggcatgtgccagttggaggcttggcgtggaagcaaacaacgtactcaagtggcaaactgttcctgcagcttgcggagagtacatatctgactacgttctaggagaccaatatagatcagattccaaaacagttaaccaacaagcttatttccatgctaaatccctcaaactcaccaacaaagatgtccttgtcctggacgttga

SEQ ID NO: 236157 - DNA, 349 bp, Glycine max
ggcacaagtgagtttgttgatcgagataactagaaacagtgtgatgaaaatgaacgtccttgttttcatcgttgctacaattttggtaacatggcaatgccatgcgtacgaaatgttccctcgccgaatgaacactggctatggtgcccgtactccggacgtgaaatgcgcaagttggaggcttgctgtggaagcacacatcatctttggctttgagaccattcctgaagagtgcgttgaagcaacatcggagtacatccatggcgtaaaatacagatcagactccacaacagttaaccaacaagcttacttttatgacagacacctcgaagtccatcccaatgacaca

SEQ ID NO: 236158 - DNA, 348 bp, Glycine max
ggaacatcaagggcaacaaatgttgtgctgtgccgccacttccgtaagcagtatcaatggcctcaacgcccatgactttgacctttgaagacgtagctaagcacagcaacaaaaaggattgcaggattattatcaatggaaaggtgtctgataacacaccatttttggatgaacatccatgaggtgatgaaattttgctgacgtcaacagggaaggatgccagcattgattttgaacatgtgggctacattgattctgctatagaaatcatggaaagatacttcattgggaaagttgacacttcaactcttccacacacatttatccataatctgcaacaccctatac

SEQ ID NO: 236159 - DNA, 278 bp, Glycine max
ggcagaggaagggttagaaatatagaaagatgaagatactacagcgtcgcatatttcctcttctctgcttcggaagaatgacacatgaaacacgtcactggcgttcgcatcattcctgggtagagtcgtcttcgcttctgtcatcatactcgcagcctaccagttatttaatgaatttggaattgatgtgggacctgctacaagggcactcagatcgaaatttgatgccattacacatctggtgcattctctgatgggctttcagattccatagatta

SEQ ID NO: 236160 - DNA, 358 bp, Glycine max
gatagcagtatctttgctcatctatattcaccaatgtacactgcatttcacttcggcgtttgcgatcatcagagcaatggcacgtgtcaccatgacgctcacacgtctaacagatgaaatgctccgaagaagcaattggcatccaaagcctctcccaaatgagccccggcgaccttcggagtgtacaatcgacacagcttcaggccattaacggtggcactaacggagattctacagtagcagcatagcacgaatcctctgatgacgaaactcccatatcagacgctcgtcaaataaatcgctcaggatatcaaaacgcatcacagctttcagtccaacgccatgtcggatcttcatg

SEQ ID NO: 236161 - DNA, 386 bp, Glycine max
ggcacaagtgagtttgttgatcgagataactagaaacagtgtgatgaaaatgaaggtccttgttttcttcgtcgctacaattttggtagcatggcaatgccatgcgtacgatatgttccctctccgaatgaacactggctatggtgcccgtactccggaggtgaaatgcgcaagttggaggcttgctgtggaagcacacaacatctttggctttgagaccattcctgaagagtgcgttgaagcaacaaaggaatacatccatggcgaacaatatagatcagactccaagacagttaaccaacaagcttacttttatgccagagacctcgaagtccatcccaaggacacatttgtgttcagtatagatggcaccgtactctctaata

SEQ ID NO: 236162 - DNA, 387 bp, Glycine max
gaataaaattagaactgtcttttcatatagatatcccttcaacacaacataggtcagccaaaggattcctaagacccaccaatgcacgaaaaccgggatctttcacaaaatggattcctattcgaagggtgcataaccgcatggataacctcacaccaacccgtcaatttgggatccaattcggttccttaggaagtatccggaacgaattttggaatgatcaaacatcgattcatacagatacagaagaaagggttcactattgattcaaacgctctatctacgacatagggatatagaaagaggacaaaaccgaagatttcacatactacttttggtcgaaaaatccatctgattttattcgtacatttcgctcaatgatgaaat

SEQ ID NO: 236163 - DNA, 382 bp, Glycine max
ggttctagtgtgtgattgtttgttgttgtaactcgttcttcttcttttgttgttctgtgtttgtgtttgttttttctctcacctgaaaatgtcttgctgcggtggtaactgtggttgcggaagctcctgcaagtgcggcaacggctgcggaggctgcaagatgtacccagacttgagctacactgagtcaaccaccaccgagaccttggtcatgggagtggcacctgttaaggctcaatttgagggtgctgaaatgggtgtgcccgctgagaacgatggctgcaaatgtggaccaaactgctcctgcaacccctgcacttgcaagtgaggtgttgggagagcaagcttcaagcagagatagcccttaattaggaataatgat

SEQ ID NO: 236164 - DNA, 382 bp, Glycine max
ggcacaagtttgttgagatagctagaagcaataagatgaaaatgaaagtgcttgttttgtttgttgctacagttttggtagcatatgaatgccatggctcagactaccagaagttccctctccaaatgaaaactgggtttggtgggcaatacagcaatgaggtggcatgtgccagttggaggcttggcgtggaagcaaacaacgtagtcaagtggcaaactgttcctgcagcttgcggagagtacatagctgactacattctaggagaccaatatagatcagattccaaaacagttaaccaacaagcttatttctatgctaaatccctcaaactcaccaacaaagatgtctttgtcttggacgttgacgacactactctctc

SEQ ID NO: 236165 - DNA, 361 bp, Glycine max
gaaagtgcaagagtttgttgtgagctataagctaatttatcgtgaggagaatatgaagttgtttgttttctttgttgctgcagtagttttggtagcatggccatgccatggcgcaggctaccacaggttccctctccgaattaaaactggctatggtgagctttcttcggaggtaaaatgcgcaagttttaagcttgctgtggaagcacacatcatccgagcctttaaaaccattcatgaagagtgcgttgaaccaacagaggactacattaatggctaagaatttagatcatactctaaaacagttaaccaacaagctttcttttatgctagtgaacgcgaagtccatcacaacgacata

SEQ ID NO: 236166 - DNA, 388 bp, Glycine max
ggaatcctgattctttcattttccatagattagcgagcgagagagagagagaatggttcgggaagtatcagagagttgcgttgatagcttgttgacggagatggtggcgtgctattgcaatcgattctatgccaacaagcctgaactcgccgcacgcaagatcgaggccattggatatcaggtcggtcaccagctctctgaaaggtataccatggagcggcctcggttcacggatcatctcgaggccatcaagttcatctgcaaggatttttggtctgagctcttcaagaagcagattgacaacttgtagacataccatatgggcacatttgtattgcaagataataaatttcgctggcttgcacggatgtcaattgattcaaccaac

SEQ ID NO: 236167 - DNA, 302 bp, Glycine max
aaaaaggaagctgaagtcatagaagagaacaaagaagtggaagtgacggaacagaacaatgaaattgaagtaacagaagagaagaaggaagctgaagtcatacaagagaagaaggaattggaagtgaccgaagacaagaacgaaattgaagtagcagaagagaagaaggtagcagaagtgacacaacagaagaaggaaggggaagtgacggaacagacgaaggaagttgaagtgacggaagagaagaaggaaccggaagtgatactagaatagaagaatgaagttgaactgacggaagagaa

SEQ ID NO: 236168 - DNA, 385 bp, Glycine max
gattttcgcggcgcacagcagaactctgcttcttcggattccgatcgcacgcgccgtcaccatggtgaacgttccgaaaacaaagaagacatactgcaagagtaaggagtgcatgaagcacacgctgcacaaggttacccaatacaagaagggtaaggatagcattgctgcccaaggaaaacgccgttatgatcgcaaacaatccggttatggtggacaaactaagcccgtcttccacaagaaggctaaaaccaccaagaagattgttctgaggttgcaatgccagggttgcaagcatgtctcccaacacgctattaagaggtgcaagcactttgagattggtggtgacaagaatggcaagggaacatcactcttctagtttgag

SEQ ID NO: 236169 - DNA, 361 bp, Glycine max
gaaggtgcaagagtttgttgtgagctataagctagtttatcgtgaggagaatatgaagttgtttgttttctttgttgctgcagtagttttggtagcatggccatgccatggcgcaggctaccaaaggttccctctccgaatgaaaactggctatggtgagcgttcttcggaggtaaaatgcgcaagttttaggcttgctgtggaagcacacaacatccgagcctttaaaaccattcctgaagagtgcgttgaaccaacaaaggactacattaatggcgaacaatttagatcagactctaaaacagttaaccaacaagctttcttttatgctagtgaacgcgaagtccatcacaacgacata

SEQ ID NO: 236170 - DNA, 392 bp, Glycine max
gaaggtgcaagagtttgttgtgagctatatgctagtttatcgtgaggagaatatgaagttgtttgttttctttgttgctgcagtagttttggtagcatggccatgccatggcgcaggctaccaaaggttccctctccgaatgaaaactggctatggtgagcgttcttctgaggtaaaatgcgcaagttttaggcttgctgtggaagcacacaacatccgagcctttaaaaccattcctgaagagtgcgttgaaccaacacaggactacattaatggctaacaatttagatcagactctaaaacagttaaccatcaagctttcttttatgctagtgaacgcgaagtccatcacaacgacatatttatattcggcatacataacaccgtactct

SEQ ID NO: 236171 - DNA, 382 bp, Glycine max; identical to SEQ ID NO: 235220

SEQ ID NO: 236172 - DNA, 310 bp, Glycine max
ggaaaagtttgttttgttaaccaaaataactaaaaccattgtgataaaaattaaggtccttgtttccaccgttgcggcaattttggaacaagggcaatcccatgattacaaaatgtccctcccccaaataactatgggcaatggtgcccgtaatcccgaggtgaaatgtgcaaattggaggcttgccgtgaaagcaaacaacatctttggctttaaaaccattcctgaaaattgcgttaaggcaacaaaggaatacatccaaggagaccattatcgatcagattccaaaacatttaaccaacaagcttac

SEQ ID NO: 236173 - DNA, 379 bp, Glycine max
ggcatcaattcataatatatcatcaattataagcatgggtttgtggaacacaacgaatgcagtgtcctgccgctttcacaagtttggtgatgaccaaaagaatctggtcttccaaggtgatgccacgtcttcttccaggggcatagaactcacaaagttagacggtggaggaaaaccagtgggtggcagtgtggggagagtgttatactattctccagtgcacctttgggaaagctctacagtggtcgcaagctttgaaaccgacttcaccttttccatctcatcagactctactactccaggtgatggccttgccttcttcattgcaccatttgacactaaaatccctccaaactctggtgggaacaaccctggactc

SEQ ID NO: 236174 - DNA, 321 bp, Glycine max
ggcacaagtttgttgagatagctagaagcaataacatgaatatgaaagtgcttgttttgtttgttgctacagttttggaaacatatgaatgccatggctcaaactaccacaagtcccctctccaaatgaaaactgcgtttggtgggcaatacagcaatgaggtggcatgtgccagttggaggcttggcgtggaagcaaacaacgtagtcaagtcgcaaactgttcctgcagcttgcggagagtacatagctgactacgttctaggagaccaatatagatcacattccaaaacagttaatcaacatgcttatttctatgcca

SEQ ID NO: 236175 - DNA, 358 bp, Glycine max; identical to SEQ ID NO: 234733

SEQ ID NO: 236176 - DNA, 388 bp, Glycine max
ggcacaagtgagtttgttgatcgagataactagaaacagtgtgatgaaaatgaaggtccttgttttcttcgttgctacaattttggtagcatggcaatgccatgcgtatgatatgttccctctccgaatgaacactggctatggtgcccgtactccggaggtgaaatgcgcacgttggaagcttgctgtggaagcacacaacatctttggctttgataccattcctgaatagtgcgttgaagcaacaaaggaatacatccatggcgaacactatagatcagactccaaatcagttaaccaacaagcttacttttatgccagagacctctaagtccatcccaaggacacatttgtgttcagtataaattgcaacgtactctctaatatt

SEQ ID NO: 236177 - DNA, 394 bp, Glycine max
ggtctatttaaagaagcaaatcctcgatgaggaaagtgcacaagtgagtttgttgatcgagataactagaaacagtgtgatgaaaatgaaggtccttgttttcttcgttgctacaattttggtagcatggcaatgccatgcgtacgatatgttccctctccgaatgaacactggctatggtgcccgtactccggaggtgaaatgcgcaagttggaggcttgctgtggaagcacacaacatctttggctttgagaccattcctgaagagtgcgttgaagcaacaaaggaatacatccatggcgaacaatatagatcagactccaaaacagttaaccaacaagcttacttttatgccagagacctcgaagtctacccaaggacacatttgtgttca

SEQ ID NO: 236178 - DNA, 392 bp, Glycine max
gcacaagtgagtttgttgatcgagataactagaaacagtgtgatgaaaatgaaggtccttgttttcttcgttgctacaattttggtagcatggcaatgccatgcgtacgatatgttccctctccgaatgaacactggctatggtgcccgtactccggaggtgaaatgcgcaagttggaggcttgctgtggaagcacacaacatctttggctttgagaccattcctgaagagtgcgttgaagcaacaaaggaatacatccatggcgaacaatatagatcagactccaaaacagttaaccaacaagcttacttttatgccagagacctcgaagtccatcccaaggacacatttgtgttcagtatagatggcaccgtactctctaatattccata

SEQ ID NO: 236179 - DNA, 385 bp, Glycine max
ggcacaagtgagtttgttgatcgagataactagaaacagtgtgatgaaaatgaaggtccttgttttcttcgttgctacaattttggtagcatggcaatgccatgcgtacgatatgttccctctccgaatgaacactggctatggtgcccgtactccggaggtgaaatgcgcaagttggaggcttgctgtggaagcacacaacatctttggctttgagaccattcctgaagagtgcgttgaagcaacaaaggaatacatccatggcgaacaatatagattagactccaaaacagttaaccaacaagcttacttttatgccagagacctcgaagtccatcccaaggacacatttgtgttcagtatagatggcaccgtactctctaat

SEQ ID NO: 236180 - DNA, 381 bp, Glycine max
ggcacaagtgagtttgttgatcgagataactagaaacagtgtgatgaaaatgaatgtccttgttttcgtcgttgctacaattttggtagcatggcaatgccatgcgtacgatatgttccctctccgaatgaacactggctatggtgcccgtactccggaggtgaaatgcgcaagttggaggcttgctgtggaagcacacaacatctttggctttgagaccattcctgaagagtgcgttgaagcaacaaaggaatacatccatggcgaacaatatagatcagactccaagacagttaaccaagaggcttacttttatgccagagacctcgaagtccatcccaaggacacatttgtgttcagtagagatggcaccgtactctc

SEQ ID NO: 236181 - DNA, 350 bp, Glycine max
gtggaacacttgcttagagatgtgaaagatacaaccattatcacccttgccacagaggtaagtgcaacactcacagccttgaatggtttggatgcaagacctaaacagatcaggggttaccttgaccttgttattgatggaaagcttccactaaaccatgagatcctgtaccatctgcaggacctgtttaacctgccaccaaatctcaatgttgctgatcttatcaatgcttttgcagtgaaaacaaatgatatgatgctggtaatatacctctcatctctcattagaagtgtaattgcactccacaacttgattaacaacaagatgcttaacacggaacatgagcgggc

SEQ ID NO: 236182 - DNA, 378 bp, Glycine max
agggtgtcaaccatgaaaacttcttcaatgagtgtaagaaacctgcttggtattttgtggcaaaggattatggccactctgacatgctagatgatgacaccaagggaattagggggaaagctaccaactgtctatgcaaaaatggagagtcaaggaaacctatgagaaggtttgttggaggagtcattgttgcattcttgaaagcttacttgcatgatgataatgaggacttgttgaccataagagacaggcatgtgagtctaccagtggagatcaaatttgattcttttctgtgaaaatcagagaagatggtggggagcatatatttctgttattatcatgacacatatgactgaacttttcagttacacatacaca

SEQ ID NO: 236183 - DNA, 399 bp, Glycine max
ggcacaagtgagtttgttgatcgagataactagaaacagtgtgatgaaaatgaaggtccttgttttcttcgttgctacaattttggtagcatggcaatgccatgcgtacgatatgttccctctccgaatgaacactggctatggtgcccgtactccggaggtgaaatgcgcaagttggaagcttgctgtggaagcacacaacatctttggctttgagaccattcctgaagagtgcgttgaagcaacacaggaatacatccatggcgaacaatatagatcagactccacaacagttaaccaacaaacttacttttatgccagagacctcgaagtccatcccaaggacacatttgtgttcagtatagatggcaccgtactctctaatattccatactacaa

SEQ ID NO: 236184 - DNA, 351 bp, Glycine max
ggttgtgagctataagctagtttatcgtgaggagaatatgaagttgtttgttttctttgttgctgcagtagttttggtagcatggccatgccatggcgcaggctaccaaaggttccctctccgaatgaaaactggctatggtgagcgttcttcggaggtaaaatgcgcaagttttaggcttgctgtggaagcacacaacatccgagcctttaaaaccattcctgaagagtgcgttgaaccaacaaaggactacattaatggcgaacaatttagatcagactctaaaacagttaaccaacgagctttcttttatgctagtgaacgcgaagtccatcccaacgacatatttat

SEQ ID NO: 236185 - DNA, 396 bp, Glycine max
gacagcatatatatcaataatctattttatactatacctacattttgataattttctttgtagttgatagccatggttacccgtggaaagcttgaggttgacattgatctcaagtccaacgcagacaagtactggcaaacccttaggaattctactgaaatattccctaaggccttcccacatgattacaaaagcattgaggttcttgagggtgatggcaagtctcctggttctatccgccacataagttatggtgaaggttcaccacttgtgaaatcatcctttgagaagattgaggctgttgatgaggaaaagaaggtagtgtcgtacactatcattgatggggaactcctccagcactacaaaacattcaaggggagacatttcagtgactcc

SEQ ID NO: 236186 - DNA, 290 bp, Glycine max
ggcgaagggttttatactttagtcgttctgcggttaaatacaaatagagagagagagtgagatatgacggtcctatggatggacgagtctcctagtcgcgcatgcctcgtgtcaaaatccgcgagctgagtgactactacgccagtttcgagctcagcgacaccgtcgccagtatgtccaatgcgctgctgcgcgtgatgatctcggaggtgccgacagtcgccatctacctagtagacatcgaggtctactcgtcggtgctcaacgacgagttcatcgcgcacaggctc

SEQ ID NO: 236187 - DNA, 379 bp, Glycine max
ggttcaaagcacgccgtgtttcgctgtctctcccatcctttcgcattctcaatacccttttgatttgtgaaaggaaagcaaacatggttgatcaggtccaacaccctacaatcatggacaaggttgctggtcagctccatctccgttctggtctttcatctggtattagaagttatgatggagcctaccgccacccagctatgtaccaaagaccctcttttgggaattactcgaatgctgcattgcagtttcctgtgatgcccacatgcaaagctaccatggatttgtctgctactgcaacatctgcctcacccgtctttgttgctgctccagcagagaaaggccattttcttttagactttcccatgggaagtgtttc

SEQ ID NO: 236188 - DNA, 383 bp, Glycine max
ggcacaagtgagtttgttgatcgagataactagaaacagtgtgatgaaaatgaaggtccttgttttcttcgttgctacaattttggtagcatggcaatgccatgcgtacgatatgttccctctccgaatgaacactggctatggtgcccgtactccggaggtgaaatgcgcaagttggaggcttgctgtggaagcacacaacatctttggctttgagaccattcctgaagagtgcgttgaagcaacaaaggaatacatccatggcgaacaatatagatcagactccaaaacagttaaccaacaagcttacttttatgccagagacctcgaagtccatcccaaggacacatttgtgttcagtatagatggcaccgtactctcta

SEQ ID NO: 236189 - DNA, 329 bp, Glycine max
ggaatgtgtgagataggagttcctgatctttcgcgaaagtgtgactaacatgagggtccgtgattccaacagtgaacgcacttctcagtcaccgcgatcgtccacatcgtgtcaggagtactttctgcaaagaaaactggtgatgtgacggatctgcaaagtggtgtgaggcatagaccagtcgcatgctgagttcaggcatacaagggtgacatattcaatcaatactgcagggtaaatttcagtgacagaacagtgatcgattctagctttgatagaatcaatccaattgaagttgagcttggaactgagttagtgatcacaggttg

SEQ ID NO: 236190 - DNA, 386 bp, Glycine max; identical to SEQ ID NO: 235704

SEQ ID NO: 236191 - DNA, 380 bp, Glycine max
ggctgcgagcgaatccctctctctctttctctttctctctcatccagatcttgcagaaaaaaaaaaacacaatggcagcgagcgctcccactccacgcgaagagttcgtgtacatggcgaagctggcggagcaggccgagcgctacgaggagatggtggagttcatggagaaggtctccgcctccgccgagagcgaggagctgaccgtggaggagcgcaacctcctctccgtcgcctacaagaacgtaatcggcgctcgccgcgcctcctggcgcatcatctcctccattgagcagaaggaggagagccgcggcaacgaggaccacgtcgccgtcatccgtgactaccgctccaagatcgaggccgagctctccaacatc

SEQ ID NO: 236192 - DNA, 334 bp, Glycine max
ggggggggttttgagaagggttttacattttattcgttctccggtgaaacagaaacagagagagagagtgagaaaaaacgaaacgatggagggaggagtctcctacgcgcgcatgcctcgtgtcaaaatccgcgagctgaaggacgactacgccaagttcgagctccgcgacaccgacgcgagtatagccaacgcgctgcggcgcgtgatgatcgcggaggtgccgacggtcgccatcgacctcgtggagatcgaggtcaactcgtcggtgctcaacgacgagttcatcgcgcacaggctcggcctcattcacctcacgagcgagcgccccatg

SEQ ID NO: 236193 - DNA, 436 bp, Glycine max
ggtcgacgcacgcgtcagagacgacagaagggggtgattttacacaaggaaatggaatgggtggagaatcaatttacggagagaagtttgctgatgagaacttcaagttaaagcatactggaccaggacttctatcaatggcaaatgctggtcctaataccaatggttcacaatttttcattacaactgtgacaactagctggttggacggaaggcatgttgtttttggtaaagttctttctggaatggatgttgtttacaagattgaagctgaaggaacacaaagtggcattcccaagagcaaggttgtgattgttgacagtggtgaactccctctataattgtacttcttgattctcaatcaggacttgttgaaggtgttcccagttttcatttcaattccatctacgagactacttatcctttataagcatgt

SEQ ID NO: 236194 - DNA, 385 bp, Glycine max
  unsure (1)..(385): unsure at all n locations
gagcgaaacagagagtgatttcagtgagtgatcggtgttcacttgatctcatcataatcgtcagcgtcaattgaagaagatgccgatcagaaacatcgccgtcggaaggcctgaagaggcgactcaccccgacacgttgaaggcggctttggctgagttcatctcaaccttcatcttcgtgttcgccggctcaggctccggcatcgcctacaacaagctcaccgacaacggcgctgccacccctgccggcctcatctccgcctccatcgcccatgcattcgccctcttcgtcgccgtctccgtcggcgccaacatctccggcggccacgtcaaccccgccgtcaccttcggcgccttcgtcngcggcaacatcaccttcctccgc

SEQ ID NO: 236195 - DNA, 387 bp, Glycine max; identical to SEQ ID NO: 235921

SEQ ID NO: 236196 - DNA, 388 bp, Glycine max
ggcacaagtttgttgagatatctagaagcaataagatgataatgaaagtgcttgtgttgtttgttgctacagttttggtagcatatgaatgccatggctcagactaccagaagttccctctccaaatgaaaactgggtttggtgggcaatacagcaatgaggtggcatgtgccagttggaggcttggcgtggaagcaaacaacgtagtcaagtggcaaactgttcctgcagcttgctgagagtacatagctgactacgttctaggagaccaatatagatcagattccaaaacagttaaccaacaagcttatttctatgctaaatccctcaaactcatcaacaaagatgtctttgtcttggacgttgacgacactactctctctaatct

SEQ ID NO: 236197 - DNA, 395 bp, Glycine max
ggcacaagtgagtttgttgatcgagataactagaaacagtgtgatgaaaatgaaggtccttgttttcttcgttgctacaattttggtagcatggcaatgccatgcgtacgatatgttccctctccgaatgaacactggctatggtgcccgtactccggaggtgaaatgcgcaagttggaggcttgctgtggaagcacacaacatctttggctttgagaccattcctgaagagtgcgttgaagcaacaaaggaatacatccatggcgaacaatatagatcagactccaaaacagttaaccaacaagcttacttttatgccagagacctcgaagtcgatcccaaggacacatttgtgttcagtatagatggcaccgtactctctaatattccatact

SEQ ID NO: 236198 - DNA, 388 bp, Glycine max
ggtgcacaagtgagtttgttgatcgagataactagaaacagtgtgatgaaaatgaaggtccttgttttcttcgttgctacaattttggtagcatggcaatgccatgcgtacgatatgttccctctccgaatgaacactggctatggtgcccgtactccggaggtgaaatgcgcaagttggaggcttgctgtggaagcacacaacatctttggctttgagaccattcctgaagagtgcgttgaagcaacaaaggaatacatccatggcgaacaatatagatcagactccaaaacagttaaccaacaagcttacttttatgccagagacctcgaagtccatcccaaggacacatttgtgttcagtatagatggcaccgtactctctaata

SEQ ID NO: 236199 - DNA, 383 bp, Glycine max
  unsure (1)..(383): unsure at all n locations
ggaaaggaaaggaaaggaaaagaagaaaacaagaagggtttggtagtttgtttgattatctacgggttgttatcatttccatccatttaattccccacaaccacgctcacctaagtttcaatttcaatcccttttctttttccgttacaaaataattcaaaattccctccctcatttacccttgtttgtgtaaagtagtagcagagtgagactaggtatcatcgatagcagggtacaagggcgatgacgaatacgattacctcttcaagctggttctcatcggcgattccggtgtcggcaagtccaacctgctttcgcgcttcacgaggaacgagttcaatttggagtccaagtccaccatangggttgagttcgccaccaag

SEQ ID NO: 236200 - DNA, 375 bp, Glycine max
gactcgcagttgtattgttgaacaagggtttctctgtctgcttcttcactttctctcgtttcaatcgaaaccaaaacaaaaacatgggcagaaaattcttcgtcggtggcaactggaaatgcaatgggaccactgaggaggtaaagaagattgttactactttgaatgaggctaaagtccctggagaagatgtcgtagaagttgttgtgagccctccttttgtgttccttcctgttgtaaaaagtttgctgcgccctgatttccatgtttcggcacaaaactgttgggttcgcaaaggtggtgcttataccggtgaggttagtgctgaaatgcttgttaatttgggaattccttgggttattattggtcactctg

SEQ ID NO: 236201 - DNA, 332 bp, Glycine max
cgtcagagacgacagaagggggagggaggggagaagagacagagggacggagacatttatgggaagctcattcccatcccctaaatcccgcacactcattccatgttttacctttcgctcgtcgctcgcaaacgtcaacttcttaagaacaaggttttagccatggcatcgacgcggatcttgaaggaactcaaggatgtccagaaggatgctcttaattcatgcagtgctggtcctgttgctgaagacatgtttcactggctagcaatagttgtgggtcttccatagattccttatgctggaggtgtgttcttagtaactatgcatttgtg

SEQ ID NO: 236202 - DNA, 404 bp, Glycine max
agtcagaatgcgacagaaggggaaggtgcaagagtttgttgtgagttataagctagtttatcgtgaggagaatatgaagttgtttgttttctttgttgctgcagtagttttggtagcatggccatgccatggcgcaggctaccaaaggttccctctccgaatgaaaactggctatggtgagcgttcttcggaggtaaaatgcgcaagttttaggcttgctgtggaagcacacaacatccgagcctttaaaaccattcctgaagagtgcgttgaaccaacaaaggactacattaatggcgaacaatttagatcagactctaaaacagttaaccaacaagctttcttttatgctagtgaacgcgaagtccatcacaacgacatatttatattcggcatagataaca

SEQ ID NO: 236203 - DNA, 392 bp, Glycine max
ggcacaagtttgttgagatagctagaagcaataagatgaaaatgaaagtgcttgttttgtttgttgctacagttttggtagcatatgaatgccatggctcagactaccagaagttccctctccaaatgaaaactgggtttggtgggcaatacagcaatgaggtggcatgtgccagttggaggcttggcgtggaagcaaacaacgtagtcaagtggcaaactgttcctgcagcttgcggagagtacatagctgactacgttctaggagaccaatatagatcagattccaaaacagttaaccaacaagcttatttctatgctaaatccctcaaactcaccaacaaagatgtctttgtcttggacgttgacgacactactctctctaatctccag

SEQ ID NO: 236204 - DNA, 333 bp, Glycine max
gaggttttcttagtcagacttaccccttgctaccaacactgagcttaaccgagcttcgcaaagatgaatcgggaaaagttaatgaagatggccggttcggttagaactggaggaaagggtactgtgagaagaaagaagaaggctgtccacaagacaacacccacagatgacaaaaggcttcagagcaccctgaagagaataggggtgactgccatccctgctattgaagaggtcaatatctttaaggatgacgtagttatccagtttctaaatcccaaacttcaagcatccattgctgctaatacttgggttgtcagtgggtcaccgcaaaca

SEQ ID NO: 236205 - DNA, 397 bp, Glycine max
gagaaaattaggatggggatgcacaagtttgttgagatagctagaagcaataagatgaaaatgaaagtgcttgttttgtttgttgctacagttttggtagcatatgaatgccatggctcagactaccagaagttccctctccaaatgaaaactgggtttggtgggcaatacagcaatgaggtggcatgtgccagttggaggcttggcgtggaagcaaacaacgtagtcaagtggcaaactgttcctgcagcttgcggagagtacatagctgactacgttctaggagaccaatatagatcagattccaaaacagttaaccaacaagcttatttctatgctaaatccctcaaactcaccaacaaagatgtctttgtcttggacgttgacgacactactc

SEQ ID NO: 236206 - DNA, 358 bp, Glycine max
  unsure (1)..(358): unsure at all n locations
gatagtagagtgaccaaaaggagagtgcaataactcgttgtacattcctagtgtgtgggagagacatggctaagatgtgtgttttggtgttggttcttgctctggctgtggccacaagtgccagaaacgttcccaaccccaaggatgctggtcttaaggaccagaagaacttcatcagctatggtggagttggtggttattccgggattgggaacaatggactgccttttggaggagctggtgccggaatangtggtggttttggcggaggtggtggacttggtggtggcctcggcggtcctaccggtgggatcggacggtttggcagtaccggtagcggtgtcggtggcggtattgg

SEQ ID NO: 236207 - DNA, 387 bp, Glycine max
gaaggtgcaagagtttgttgtgagctataagctagtttatcgtgaggagaatatgaagttgtttgttttctttgttgctgcagtagttttgggagcattgccatgccatggcgcaggctaccaaaagttccctctccgaatgaaaactggctatggtgagcgttcttcggatgtaaaatgcgcaagttttatgcttgctgtggaagcacacagcatccgagcctttaaaaccattcctgaagagtgcgttgaaccaacagaggactacattaatggcgaacaatttagattagactctaaaacagttaatcaacaagctttcttttatgctagtgaacgcgaagtccatcacaacgacatatttatattcggcatagataacaccgt

SEQ ID NO: 236208 - DNA, 376 bp, Glycine max
gaaggtgcaagagtttgttgtgagctataagctagtttatcgtgaggagaatatgaagttgtttgttttctttgttgctgcagtagttttggtagcatggccatgccatggcgcaggctaccaaaggttccctctccgaatgaaaactggctatggtgagcgttcttcggaggtaaaatgcgcaagttttaggcttgctgtggaagcacacaacatccgagcctttaaaaccattcctgaagagtgcgttgaaccaacaaaggactacattaatggcgaacaatttagatcagactctaaaacagttaaccaacaagctttcttttatgctagtgaacgcgaagtccatcacagcgacatatttatattcggcata

SEQ ID NO: 236209 - DNA, 389 bp, Glycine max
ggagtcagattcgcacgcattgcttcgcctcacaacagcagctgcagcagcaatggctcccaaacgaggtggaaaggctccggctcttgccgctaagaagaagcctgagaaggtcacgaatccgttgttcgagaagcgtccgaagcagttcggaatcggaagggcgttgcctccgatgagagacttgactaggttcgtgaagttgccaacgaatgttcaaattcagaggaagaatatgattctgaagcacaggttgaaggttcccccagctttgaaccagtttaccaaaactcttgacataaacctagcaacaagtctgttcaagttgcatctgaagtgcatgcccgaggacaaagctgaaatcaatgagatgctcttgaaaaaggctc

SEQ ID NO: 236210 - DNA, 177 bp, Glycine max
ccttatgcttctgatgggctagagatatgggatgccatcaagtcctgggtgcatgaatatgtctcattctactataactcggatgcggcaattcaacaagatctcgagcgggtccttggtggacagcacttgtcgacgtgggtcgtggtgatttcgttcatctgtcatggtggcatg

SEQ ID NO: 236211 - DNA, 346 bp, Glycine max
gaaggggacttcaactcccacacattccaatctctctctgcattgcgctaactctcccttcgacatgcagatcctcctcaataccgtcaccggcacgatgatcagccttgcagtggagagctctgacacgatcgacaacttcatggctaagatccacaacagtgcaagaatccccccggaccagcaccgtctcattttcgccgcaacacaacttgaggacggccgtgcccttgctgactacagcattcacaacgacagtattcttcaactcgtcctccgtctccctgctggcatgcagctcttccttaagatactcaccggcaagaccatgtccctagatgttcca

SEQ ID NO: 236212 - DNA, 418 bp, Glycine max
gaccaacgcgtaagagacgacagaagggggatgcagatgcagcctatcatggcagcctactaccccaacaacgtcaccactgatcacattcaacagtacctggatgagaacaagtccttgatcctgaagattgttgaaagccagaattctggcaagctgagcgagtgtgcagagaaccaatcaaggctgcagagaaatctcatgtacctagctgcaatagctgattctcaaccccaaccatctccaatgcctggtcagtatccttctagtggacttatgcagcacggagcacactacatgcaggctcagcaggctcagcagatgtcacaacaacagctaatggcttcgcgctcctcactcctgtactcccaacaacctttctcagtgcgtcaacagcagcaaggcaagcacagccaac

SEQ ID NO: 236213 - DNA, 387 bp, Glycine max
agagacgacagaagggggatgcagatgcagcctatcatggcagcctactaccccaacaacgtcaccactgatcacattcaacagtacctggatgagaacaagtccttgatcctgaagattgttgaaagccacgaattctggcaagctgagcgagtgtgcagagaaccaatcaaggctgcagagaaatctcatgtacctagctgcaatagctgattctcaaccccaaccatctccaatgcctggtcagtatccttctagtggacttatgcagcatggagcacactacatgcacgctcagcaggctcagcagatgtcacaacaacagctaatggcttcgcgctcctcactcctgtactcccaacagcctttctcaagtgcttcaacagc

SEQ ID NO: 236214 - DNA, 322 bp, Glycine max
cgcgtaagacacgacataagggggatgcagatgcagcctagcatgggagcctactaccccaacaacgtcaccactgatcacactcaacagtacctggatgagaacaagtccctgatgctgaagattgttgaaagccagaattctggcaagctgagcgagtgtgcagagaaccaatcagggctgcagagaaatctcatgtaccgacctgcaatagctgagtctcaaccccaaccatctccaatgcctggtcagtatccttctagtggacttacgcagcagggagcacactacatgcaggctcagcaggctcagcagatctcac

SEQ ID NO: 236215 - DNA, 384 bp, Glycine max
ggcacaagtgagtttgttgatcgagataactagaaacagtgtgatgaaaatgaaggtccttgttttcttcgttgctacaattttggtagcatggcaatgccatgcgtacgatatgttccctctccgaatgaacactggctatggtgcccgtactccggaggtgaaatgcgcaagttggaggcttgctgtggaagcacacaacatctttggctttgagaccattcctgaagagtgcgttgatgcaacacaggaatacatccatggcgaacaatatagatcagattccaaaccagttaaccaacaagcttacttttatgctagagacctcgaagtccatcccaaggacacatttgtgttcagtatagatggcaccgtactctctaa

SEQ ID NO: 236216 - DNA, 372 bp, Glycine max
ggtgctctgctcgtgcctctagggttatcatatctccatttccatttcctctctctcagtttccaagaatcttaagctatgggaaagtcttacccaaccgtgagcgctgattaccagaaggccgttgagaaggcgaagaagaagctcagaggcttcatcgctgagaagagatgcgctcctccaatgctccgtttggcatgggactctgctggaacttacgacgtgagctcgaagaccggtggtcccttcggaaccattaagcacccctccgaactcgctcacggcgctaacaacggtcttgacatcgctgttaggcttttggagccactcaaagcggagtttcctattttgagctacgccgatttctaccag

SEQ ID NO: 236217 - DNA, 361 bp, Glycine max
ggcacaagtttgttgagatagctagaagcaataagatgaaaatgaaagtgcttgttttgtttgttgctacagttttggtagcatatgaatgccatggctcagactaccagaagttccctctccaaatgaaaactgggtttggtgggcaatacagcaatgaggtggcatgtgccacttggaggcttggcgtggaagcacacaacgtagtcaagtggcaaactgttcctgcagcttgcggagagtacatatctgactacgttctatgagaccaatatagatcagattcgaggacagttaaccaacaagcttatttctatgctaaatccctcaaactcaccaacacagatgtccttgtcctgga

SEQ ID NO: 236218 - DNA, 386 bp, Glycine max
gagtgcacaagtgagtttgttgatcgagataactagaaacagtgtgatgaaaatgaaggtccttgttttcttcgttgctacaattttggtagcatggcaatgccatgcgtacgatatgttccctctccgaatgaacactggctatggtgcccgtactccggaggtgaaatgcgcaagttggaggcttgctgtggaagcacacaacatctttggctttgagaccattcctgaagagtgcgttgacgcaacaaaggaatacatccatggcgaacaatatagatcagactccaaaacagttaaccaacaagcttacttttatgccagagacctcgaagtccatcccaaggacacatttgtgttcagtatagatggcaccgtactctcta

SEQ ID NO: 236219 - DNA, 237 bp, Glycine max
gagtgcacaagtgagtttgttgatcgagataactagaaacagtgtgatgaaaatgaaggtccttgttttcttcgttgctacaggtttggtagcatgggaatgccatgccgtacgatatgtgccctctccgaatgaagactggctatggtgcccgtactccggaggtgagatgcgcaagttggaggcttgctgttgaagcagacagcatctttggccttgagagcattcctgaagagt

SEQ ID NO: 236220 - DNA, 389 bp, Glycine max
ggtgcacaagtgagtttgttgatcgagataactagagacagtgtgatgaaaatgaatgtccgtgatttcttcgttgctacaattttggtagcatggcaatgacatgcgtacgatatgttccctctccgaatgagcactggctatggtgctcgtactccggatgtgaaatgcgcactttgggggcatgctgtggaagcacacaacatctttggctttgagaccattcctgaagagtggcttgaagcaacagaggaatatatcaatggccaacaatagatattatactccaacacagttaaccaacacgcttacttttatgccatagacctcgaagtccatcccaaggacacatttgtgtgcagtagacatggcaccgtactctctaataa

SEQ ID NO: 236221 - DNA, 355 bp, Glycine max
ggcagaggaagggttggaaatatataactatgacgatactacagcgtcgtacatttcctcttctctgcttcggaggattgagattgaaacacgtcactggcgttcgcttcgttcctcggtagagtcgtcttcgcttctgtcatcagactcgttgcttaccagttatttaatgactttggacttgatgtgggacctgctagaagtgcactcgaaacgaagtttgatgcctttacacatctggtgcattctctgatcggctttcacattccatagattaatctgaagtttttaagtgctggggctattgctctgaaaggtcttggacgggttccttacacaccaggcggctcttttg

SEQ ID NO: 236222 - DNA, 226 bp, Glycine max
ggcacaagtgagtttgttgatcgagataactagaaacagtgtgatgaaaatgaaggtccttgttttcttcgttgctacagttttggtagcatggcaatgccatgcgtaggatatgttccctctccgaatgaacactggctatggtgcccgtactccggacgtgaaatgcgcaagttggacgcttgctgtggaagcacacaacatcgttggctttgataccattccc

SEQ ID NO: 236223 - DNA, 379 bp, Glycine max
gaaggtgcaagagtttgttgtgagctatatgctagtttatcgtgaggagaatatgaagttgtttgttttctttgttgctgcagtagttttggtagcatggccatgccatggcgcaggctaccaaaggttccctctccgaatgaaaactggctatggtgagcgttcttcggaggtaaaatgcgcaagttttaggcttgctgtggtagcacacaacatccgagcctttaaaaccattcctgaatagtgcgttgaaccaacataggactacattaatggcgaacaatttagatcagactctaaaacagttaaccaacaagctttcttttatgctagtgaacgcgaagtccatcacaacgacatatttatattcggcatagat

SEQ ID NO: 236224 - DNA, 202 bp, Glycine max
gaaggtgcaagagtttgttgtgagctatatgctagtttatcgtgaggagaatatgatgttgtttgttttctttgttgctgcagtagttttggtagcatggccatgccatggcgcaggctaccagaggttccctctccgggtgagagctggctatggtgagcgttcttcggacgtaaaatgctcaggttttaggcttgctgtg

SEQ ID NO: 236225 - DNA, 355 bp, Glycine max
ggcacaagtgagtttgttgatcgagataactagaaacagtgtgatgaaaatgaaggtccttgttttcttcgttgctacaattttggtagcatggcaatgccatgcgtacgatatgttccctctccgaatgaacactggctatggtgcccgtactccggaggtgaaatgcgcaagttggaggcttgctgtggaagcacacaacatctttggctttgagaccattcctgaagagtgcgttgaagcaacaaaggaatacatccatggcgaacaatagagattagactccagaacagttaaccaacaagcttacgtttatgccagagacctcgaagtccatcccaaggacacatttgtg

SEQ ID NO: 236226 - DNA, 379 bp, Glycine max
gatcgaagcaaaaaatgaaaacccaaagtgcttctctcctctgtctttttctctctcttgctatccttttggctagtggcactgctgcaagtgcaactccaagaagcgcagtgccaagccaccatgtttcaacattcaacagaagcctttttccttccacttttctctttggaattggttcttctgcttaccaggcagaaggagcagcaagtgtagatgggagaggaccaagcatatgggacacctacactagacagcatactgaaaagatttgggatcatagcaccggtgacatgggagctgatttttatcatcgatacaagggtgacataaaaatagcgaaagaaattgggctggactctttcagattctctatctc

SEQ ID NO: 236227 - DNA, 386 bp, Glycine max
gcacaagtgagtttgttgatcgagataactagaaacagtgtgatgaaaatgaaggtccttgttttcttcgttgctacaattttggtagcatggcaatgccatgcgtacgatatgttccctctccgaatgaacactggctatggtgcccgtactccggaggtgaaatgcgcaagttggaggcttgctgtggaagcacacaacatctttggctttgagaccattcctgaagagtgcgttgaagcaacaaaggaatacatccatggcgaacaatatagatcagactccaaaacagttaaccaacaagcttacttttatgccagagacctcgaagtccatcccaaggacacatttgtgttcagtatagatggcaccgtactctctaatat

SEQ ID NO: 236228 - DNA, 361 bp, Glycine max
gcacaagtgagtttgttgatcgagataactagaaacagtgtgatgaaaatgaaggtccttgttttcttcgttgctacaattttggtagcatggcaatgccatgcgtacgatatgttccctctccgaatgaacactggctatggtgcccgtactccggaggtgaaatgcgcaagttggaggcttgctgtggaagcacacaacatctttggctttgagaccattcctgaagagtgcgttgaagcaacaaaggaatacatccatggcgaacaatatagatcagactccaagacagttaaacaacaagcttacttttatgccagagacctcgaagtccatcccaatgacacatttgtgttcagta

SEQ ID NO: 236229 - DNA, 247 bp, Glycine max
ggcacaagtgagtttgttgatcgagatacctagagacagtgtgatgaatctgaatgtccttgttttcttcgttgctagaattttggtagcatcagactgacatatgtttcacgcgttgaatctacgaatgaaaactgtgctattgtgcccgtagtcaggaggtgaagttcgcaagttggaggcttgctatagaatatcattggatttttgaccattacagaatacttcattaatgcattgaaggaat

SEQ ID NO: 236230 - DNA, 350 bp, Glycine max
agcccacgcgtccgacaggagcgaaagggacacagaacggggttcaaagcacgccgtgtttcgctgtctctctcatccttacgcattcacactacccttttgatttgggagacgaaagcaaagatagttgatcaagtccaacaccctacaagcatggacaaggttgctggtcaactccatctccgttcaggtctttcagctggtattacaagttatgattgagcctaacgccacccacctatgtatcaaagaccctcttttgggaattactcgaatgctgcattgcagtatcctgtaatgcccacatgcaaagcgaccatggatttgtctgacactgcaccatctgcctc

SEQ ID NO: 236231 - DNA, 235 bp, Glycine max
cacggggttcaaatcatgccgtgtttcgctgtctctctgatcctttcgcattctcactacccttttgatttgtgtcaggaaatcatggatgattgatcaagtccaacaccctacattcatggataaggttgctggtcaactccatctcggttctggtcgttcatctcgtattacaacgttatgatggagcctagcgccacccatctatgtagcagataccctcttttgggaatta

SEQ ID NO: 236232 - DNA, 335 bp, Glycine max
ggcacaagtttgttgagatagctagaagcaataagatgaaaatgaaagtgcttgttttgtttgttgctacagttttggtagcatatgaatgccatggctcagactaccagaagttccctctccaaatgaaaactgggtttggtgggcaatacagcaatgaggtggcatgtgccagttggaggcttggcgtggaagcaaacaacgtagtcaagtggcaaactgttcctgcagcttgcggagagtacatagctgactacgttctaagagaccaatatagatcagattccaaaacagttaaccaacaagcttagttctatggcaaatccctcaaactc

SEQ ID NO: 236233 - DNA, 382 bp, Glycine max; identical to SEQ ID NO: 235220

SEQ ID NO: 236234 - DNA, 359 bp, Glycine max
ggcacaagtgagtttgttgatcgagataactagaaacagtgtgatgaaaatgaaggtccttgttttcttcgttgctacaattttggtagcatggcaatgccatgcgtacgatatgttccctctccgaatgaacactggctatggtgcccgtactccggaagtgaaatgcgcaagttggaggcttgctgtggaagcacacaacatctttggctttgagaccattcctgaagagtgccttgaagcaacaaaggaatacatccatggcgaacaatatagatcagactccaaaacagttaaccaacaagcttacttttatgccagagacctcgaagtccatcccaaggacacatttgtgttca

SEQ ID NO: 236235 - DNA, 388 bp, Glycine max
ggcacttcaattgcactcaaattagttcattctctttgcgcagttccctacctctcctttcaagatgcagatcttcgtcaagaccctcaccggaaagaccatcacccttgaggtggaaagctctgacaccatcgacaacgtcaaggccaagatccaggacaaggaaggaattcccccggatcagcaacgtctcatcttcgccggaaagcagctcgaggacggccgtaccctcgccgactacaacatccagaaggagtcaacccttcaccttgtccttcgtctccgtggtggcatgcagatcttcgtcaagactctcactgggaaaaccattaccctagaggtcgaaagctctgacaccattgacaacgtccaggccaagatcaggaca

SEQ ID NO: 236236 - DNA, 430 bp, Glycine max
cgatcaagcagcaagagaaaagaaaatcctcaattttctgagcagccaaacactctctctctgtctctcgaaaattctcagtttgcagagaaaatctgaatcatgtcgtggcaagcgtatgtcgacgatcaccttctgtgtgacatcgaaggtaaccacctcactcacgctgctatcatcggccaagacggcagcgtttgggctcagagtaccgacttccctcagttcaaacctgaggagataactgccatcatgaatgactttaatgagcctggatcacttgctccaactggattgtatctcggtggcaccaaatatatggtcatccagggtgaacccggtgctgtcattcgagggaagaaaggtcctggtggtgttactgtgaagaagaccggtgcggccttgatcattggcatttatgatgaaccaa

SEQ ID NO: 236237 - DNA, 206 bp, Glycine max
gactacgacggtcggggaaggtgcatgagtttgttccgacctttaagcttgtttatcgtgaggagaatatcaggttgtttgtcttctttgctgctgcactagatttggtagcatggccatgccatggcgcaggctaccaaaggttccctctccgaatgaacactggctattggtgagcgttcttcccacgtagaatgcccacgttt

SEQ ID NO: 236238 - DNA, 386 bp, Glycine max
ggttttgatgtgcatggctgtgatgagtgcaccaatgatggtgcaagccgtgtcatgcaatgatgtttctgtgaacctagcaccgtgcctatcttacctgatgcagggtggagatgttccagaatcgtgctgtagcggagtgaggaacattctgggttctgccagcaccacctttgacaaacaaaccgtgtgcaaatgtcttcagcaagctgctaataactatggcatcaacgacgaatacgctcaggcactccccgcccgctgcaatgtcagcgtcccttacaagatcagccgatccaccaactgcgactccatcaagttctaaaggagcgggtagctttgccaatttcttccgcgggataatgaggcaacgtatgctgtaacac

SEQ ID NO: 236239 - DNA, 379 bp, Glycine max
gccatggaaaatacatggcttgctgtctcatgtaccggggtgatgttatgcctaaagatgttaatgcagctgtgggaattatcaagaccaagcgcactattcaatttgttgactggtgccccactggtttcaagtgtggaatcaattaccagcctccaactgttgttcctggcggtgatcttgccaaggttcagagggctgtgtgcatgatctccaattccaccagtgttgttgaggtcttctctcgcatcgaccacaaatttgacctcatgtatgccaagagggcttttgttcattggtatgttggtgagggtatggaagagggagagttctctgaggctcgtgaagatcttgctgccctggagaaagattatgagga

SEQ ID NO: 236240 - DNA, 315 bp, Glycine max
acccacgcgtcagaccgctcctacatgctgatgcgaggggacaacaaaagggggtgcactgctgactttgttgatcgagatatctaccgactgtgtgattaaaatgaacgtccgtaattacctcgatgctacacatttggcaacatgttgataggatccctacgagttttacctgcggcaactgatcactgcctcctgtgcccgtaccccgcaggtgtaatgcccaagttgaaagggtcctgtgcaagctcacaacatccatggcttttatagcagtcctgacgagtatcttgcagcaaccttggattacatcca

SEQ ID NO: 236241 - DNA, 367 bp, Glycine max; identical to SEQ ID NO: 235843

SEQ ID NO: 236242 - DNA, 354 bp, Glycine max
ggcacaagtgagtttgttgatctagataactagatacagtgtgatgaaaatgatggtccttgttttcttcgttgcgacaactttggtaccatggcaatgccatgcgtacgatatgttccctctccgaatgaacactggctatggtgcccgtactccggaggtgatatgcgcaagttggaggcttgctgtggaagcacacaacatctttggctttgagaccattcctgaagagtgcgttgagacaactgcggaatacctccatggggaacaatctagatcagactccataactgttaacccacaagcttacttttatgccagagacctcgaggtacatcccacggacacatttgt

SEQ ID NO: 236243 - DNA, 384 bp, Glycine max
ggttctagtgtgtgattgtttgttgttgtaactcgttcttcttcttttgttgttctgtgtttgtgtttgttttttctctcacctgaaaatgtcttgctgcggtggtaactgtggttgcggaagctcctgcaagtgcggcaacggctgcggaggctgcaagatgtacccagacttgagctacactgagtcaaccaccaccgagaccttggtcatgggagtggcacctgttaaggctcaatttgagggtgctgaaatgggtgtgcccgctgagaacgatggctgcaaatgtggaccaaactgctcctgcaacccctgcacttgcaagtgaggtgttgggagagcaagcttcaagcagagatagcccttaattaggaataatgatag

SEQ ID NO: 236244 - DNA, 314 bp, Glycine max
aacgacagaaggggagagtggtggagtgtgcaaaagagcgtcgtagtcgcaaccctaatcagaagaagcgcagcttcaagcgagtgacagccaccagccatgggtcgtatgcacagccgcggtaagggtatatcctcttctgctttgccctacaaaaggacacctcctagctggctcaagatctcttcgcaagatgtcgaagaaaatatctgcaagtttgcgaagaaaggtttgaccccgtctcagattggtgtcattctcagagattctcacggtattgctcaggtcaataacgtcactgggagcaaaatcct

SEQ ID NO: 236245 - DNA, 294 bp, Glycine max
ggctgacaagccaatcctttgtgtaggtgctcaaccctagtaagccgcaatggtgaagtactcaagggagcctgacaacccaactaagtcttgcaaggctagaggcgccgaccttagggttcattttaagaacacaagggaaactgcctttgcaatcaggaagttgcccttggtcaaggctaataggtacttggaagatgttcttgcccacaagcaggcacttccattcagacgtttttgtcgaggtgttggaaggacagcccaggctaagaatagacactctaatgggcaagg

SEQ ID NO: 236246 - DNA, 373 bp, Glycine max
gaaggtgcaagagtttgttgtgagctataagctagtttatcgtgaggagaatatgaagttgtttgttttctttgttgctgcagtagttttggtagcatggccatgccatggcgcaggctaccaaaggttccctctccgaatgaaaactggctatggtgagcgttcttcggaggtaaaatgcgcaagttttaggcttgctgtggaagcacacaacatccgagcctttaaaaccattcctgaagagtgcgttgaaccaacagaggactacattaatggggaacaatttagatcagactctaaaacagttaaccaacaagctttcttttatgctagtgaacccgaagtccatcacaacgacatatttatattccgg

SEQ ID NO: 236247 - DNA, 271 bp, Glycine max
cgtcagacgggtacgagaaacgacacaagggggcacaagtgagtttgttgatcgagataactagaaacagtgtgatgaaaatgcaggtccttgttttcgtcggtgctacagttttgggggcatggcaatgccatgcctacgatatgttccctctccaaatgaacactggctatggtgcccgtactccggaggtgacatgcgcaagttggaggcttgctgtggtagcagacgacagcgttggctttgacgaccattcctgaaggagtgcctt

SEQ ID NO: 236248 - DNA, 330 bp, Glycine max
ggttctagtgtatgtgattgttgtgactcgttcttcttcgtcgttatcttcttcttttgttgtttgtgtgtttgttttttctctcacctgaaaatgtcttgctgcggtggtaactgtggttgcggaagcgcctgcaagtgcggcaacggctgcggaggctgcaagatgtacccagacttgagctacaccgagtcaaccaccaccgagaccttggtcatgggagtggcaccagttaaggctcaattcgagagtgctgaaatgggtgttccccctgagaacgatggctgcaaatgtggagctaactgcacctgcaacccctggacttgcaag

SEQ ID NO: 236249 - DNA, 260 bp, Glycine max
ggggggtcgcggtttgtagatggcacacaagttttatcatggggttgtgggacacaacgaatgcaatgtcctgccggtttcagaaatttggtgatgaccaaaagaatctggtcttccaaggtgatgccacgtcttcttccaggggcatagaactcacaaagttatacggtggaggaaaaccagtgggtggcaatgtggggagagtgttatactcttctccaatgcacctttgggaaagctctacagtgggcggcaagctt

SEQ ID NO: 236250 - DNA, 245 bp, Glycine max
ggctgtggggggctctcgtgggtttgttcgtcgggtggctggggcggtgtggtgggtgtgggtgtcgttgttttcttcgttgctggggttttggtggcctggcggtgcggtgcgtggggtctgttccctctccgtggtggctctggctgtggtgctcgtgctccgggcgtggggtgcgccggttggcggcttgctgtgggcgcccgcggcgtctttggctttgggtcctttcctgggggcgtgcg

SEQ ID NO: 236251 - DNA, 367 bp, Glycine max
attggtggagaaagcaaaagcttgggtggttggtgatccttttgatcctaaagttcaacaagggcctcaggttgacaagaagcaatttgaaaagattctttcctatatcgagcaaggaaagaaagaaggggcaactcttttgacagggggcaaaagagtgggcaacaagggttactacattgagcctacaattttctctaatgttaaggaggacatgctcatagtacaagatgaaatatttggccctgtgatggctttgatgaagtttaagactattgaggatgcaattaagattgccaacaatacaagatatggcctagcatcaggcattgtgacaaagagtttggacacagccaacactgtgtca

SEQ ID NO: 236252 - DNA, 368 bp, Glycine max
ggcacaagtgagtttgttgatcgagataactagaaacagtgtgatgaaaatgaaggtccttgttttcttcgttgctacaattttggtagcatggcaatgccatgcgtacgatatgttccctctccgaatgaacactggctatggtgcccgtactccggaggtgaaatgcgcaagttggaggcttgctgtggaagcacacaacatctttggctttgagaccattcctgaagagtgcgttgaagcaacaaaggaatacatccatggcgaacaatatagatcagactccaaaacagttaaacaacaagcttacttttatgccagagacctcgaagtccatcccaaggacacatttgtgttcagtatagatg

SEQ ID NO: 236253 - DNA, 312 bp, Glycine max
ggccattgttgctgtcatcatccgcagctgctgttattcgcaccgcaaacaaacagtgagccatggccgtcggaaagaacaagcgcatctccaaagggaaaaagggtggcaagaagaaggcagctgatccctttgccaagaaggattggtatgacattaaggccccttctctttttcaagtgaaaaatgttggcaaaaccctcgtctctcgtacgcagggtaccaagattgcttctgaaggacttaaacatagagtgtttgaggtctccttggctgatcttcaaggggatgaagatcatgcattcaagaaga

SEQ ID NO: 236254 - DNA, 287 bp, Glycine max
ggcacaagtgagtttgttgatcgagataactagaaacagtgtgatgaaaatgaaggtccttgttttcttcgttgctacaattttggtaccatgggaatgccatgcgtacgatatgttccctctccgaatgaacactggctatggtgcccgtactccggaggtgaaatgcgcaagttggatgcttgctgtggaagcacacaacatctttggctttgacaccattcctgaagagtgccttgaaagaacaccggaatacatccatggggaacactatacatcagactcca

SEQ ID NO: 236255 - DNA, 367 bp, Glycine max
gaagtgccttcattcgggactttcactagccgcagcagcctcaggaggagaataaggatgtctcacaggaagttcgagcacccaaggcacgggtcactgggatttctccccaggaagcgtgctgctcgtcacaggggaaaagtgaaggcattccccaaggatgacccatccaaggcacccaagctcactgcattcttgggttacaaggctggtatgactcacattgttagagaggtcgagaagccaggatcaaagcttcacaagaaggaaacatgtgagcctgttacaattattgagacccctccaatggttattgttggtgttgtgggttatgtgaaaactccccgtggtctccgaacattgaaca

SEQ ID NO: 236256 - DNA, 364 bp, Glycine max
gctagtggcagtgaccaaactccatttctcactcgccgtcgtctcttccgtctagggtttctcctcttcacaaaaatggttgccgcaaaaaaaactaagaagacccatgagagcatcaacaacaggctcgctctcgtcatgaagagtggcaaattcaccctcggttacaagaccgttctcaaatctcttaggagctccaaagggaaattgattatcattgctaacaactgcccccctttgaggaagtcagagattgaatactatgctatgttggcaaaggttggggttcatcattacaatgggaacaatgtggatttgggcactgcatgtggcaaatattacagagtgtgctgccttagcatta

SEQ ID NO: 236257 - DNA, 382 bp, Glycine max
gaggactgaagaagtgagggcaagaactttgcagcataccagcatgagcatgaagctcttccagctcttctccctactcccattcttcctctacttctacacaatagaagcagccgttggcccattgcaactgacacacccactggaccccttaactcagcaagaaatcaccctcgtcaaaaccatagtcctaaaaaagtaccccaagccagccaaccgcgtcttcttccactacgtcggcctcgacgatcctgacaaggccgccgtcctcaaatggctctcctccggcgcccggacgccgcgcaacgccttttccatcgccctcatcaatggccaaatccacgagctcaccgtcaaccttctctccccgcgaaacgttgtc

SEQ ID NO: 236258 - DNA, 370 bp, Glycine max
gacaacactcatagtagagtaaccaaaaggagagtgcaataactcgttgtacattcctagtgtgtgggagagacatggctaagatgtgtgttttggtgttggttcttgctctggctgtggccacaagtgccagaaacgttcccaaccccaaggatgctggtcttaaggaccagaagaacttcatcagctatggtggagttggtggttattccgggattgggaacaatggactgccttttggaggagctggtgccggaataggtggtggttttggcggaggtggtggacttggtggtggcctcggcggtcctaccggtgggatcggaaggtttgggcgtaccggtaacggtgtcggtggcggtattggtgg

SEQ ID NO: 236259 - DNA, 390 bp, Glycine max
ggttcaaagcacgccgtgtttcgctatctctcccattctctcgcatctcaatacccttttgatttgtgaaaggaaagcaaacatgcttgatcaggtccaacaccctacaatcatggacaaggttgctggccagctccatctccgttctggtgtttctggtattaggagttatgaaggagcctactgccaccccacaatgtaccaaagaccctcttttgggaattactcgaatgctgcattgcagtatcctgtgatgccctcatgcaaagctactatggatttgtctgctgctgcaacaactgcctcccccgtctttgttgctgctccagcagagaaaggccattttcttatagactttctcatgggaggtgtttcagcagctgtctcaaa

SEQ ID NO: 236260 - DNA, 379 bp, Glycine max
ggcacaagtgagtttgttgatcgagataactagaaacagtgtgatgaaaatgaaggtccttgttttcttcgttgctacaattttggtagcatggcaatgccatgcgtacgatatgttccctctccgaatgaacactggctatggtgcccgtactccggaggtgaaatgcgcaagttggaggcttgctgtggaagcacacaacatctttggctttgagaccattcctgaagagtgcgttgaagcaacacaggaatacatccatggcgaacaatatagatcagactccaaaacagttaaccaacaagcttacttttatgccagagacctcgaagtccatcccaaggacacatttgtgttcagtatagatggcaccgtactc

SEQ ID NO: 236261 - DNA, 378 bp, Glycine max
ggcacaagtgagtttgttgatcgagataactagaaacagtgtgatgaaaatgaaggtccttgttttcttcgttgctacaattttggtagcatggcaatgccatgcgtacgatatgttccctctccgaatgaacactggctatggtgcccgtactccggaggtgaaatgcgcaagttggaggcttgctgtggaagcacacaacatctttggctttgagaccattcctgaagagtgcgttgaagcaacaaaggaatacatccatggcgaacaatatagatcagactccaaaacagttaaccaacaagcttacttttatgccagagacctcgaagtccatcccaaggacacatttgtgttcagtataaaaggcaccgttct

SEQ ID NO: 236262 - DNA, 384 bp, Glycine max
  unsure (1)..(384): unsure at all n locations
cttctttttggtgctacttaccaaggcacactcgaccgataccgtttctttcaccttcaacaagttcaacccagtccaaccaaacattatgctccaaaaagatgctagtatttcatcctctggggtgttacaactcaccaaagttggcagcaacggcgtgcccacctcgggatctctcggtcgtgccctttacgctgccccaatccagatttgggacagcgaaaccggcaaggtagccagctgggctacatcctttaaattcaacattttcgcacccaacaaatcaaactcagctgacgggcttgccttcttcttggcacccgtcgggtctcagccccaatccgacgatggatttcttggtcttttcaacagtcncctaaagga

SEQ ID NO: 236263 - DNA, 374 bp, Glycine max
ggaacttctcacgttcatttctacacatccctagctctgtcgttccgtcgttgacgatggcgtttcgggtgcgaagccctgacctccgctctctctttcttctctctctcttgtccatcgcttccgccaatgtcttcttcgaagagcgtttcgatgacgggtgggaaaatcgatgggttaaatcagattggaaaaaagatgagaacgtggctggggagtggaaccacacctctggtcaatggaatggagacgctaatgacaaaggtattcaaaccagtgaggattacagattctatgctatttcagctgagtaccctgaactcagcaacaagggtaagacactagtctttcaattttctgctaagcacgaacag

SEQ ID NO: 236264 - DNA, 363 bp, Glycine max
ggttgcctatttaaagaagctaaccctccacaaggaattaaggtgcaagagtttgttgtgagctataagctagtttatcgtgaggagaatatgaagttgtttgttttctttgttgctgcagtagttttggtagcatggccatgccatggcgcaggctaccaaaggttccctctccgaatgaaaactggctatggtgagcgttcttcggaggtaaaatgcgcaagttttaggcttgctgtggaagcacacaacatccgagcctttaaaaccattcctgaagagtgcgttgaaccaacaaaggactacattaatggcgaacaatttagattagactctaaaacagttaaccaacaagctttcttt

SEQ ID NO: 236265 - DNA, 379 bp, Glycine max; identical to SEQ ID NO: 235217

SEQ ID NO: 236266 - DNA, 246 bp, Glycine max
cggtcaggccttcccggctcgacacacgcgtcaggtgctgtgacagctgatatggttatgctttctacagatgaaccagagaagaagaaaaaagcagcaagtaacggaaatggcggttctcagaatggtaactcaatgcactatgggaccctggttggggaagtgaaagctaatttgaagaaaggtattggagcgaatgaattgctgtcccaacctttaacacatcctggaactgctcaagaaaag

SEQ ID NO: 236267 - DNA, 348 bp, Glycine max
  unsure (1)..(348): unsure at all n locations
gggggatgttgctgatggtgtgccttgttaaggtttcgtctgatcaaagagagaagaagaaatactggaagaagaactacattttcccgataacgagccacttattgtgagagacgggaacagaaggctaatgcaagacatagattgtggtgggttgtgcaagacgaagtgcagtgcacattcgagacccaacttgtgcactaaggcgtgtggcacgtgctgtgtgaggtgtaagtgtgtcccacctggcacatctggaaatanggaactatgtggaacttgctacactgatatgactacccaatggaacaagaccaagtgcccttagagaaaaaacccattgggaaa

SEQ ID NO: 236268 - DNA, 357 bp, Glycine max
  unsure (1)..(357): unsure at all n locations
agnctgtacagacgactacaaaaaggggcacaagtgtgattacgaaacttaaatcaatgatatgaaaaataaagtgcatggtttgtatgatgctagacttttggtaccacatgactgccattgtgcaaactagcaaaagttacgtctccaaaagataactgcgtttggtgggcactagagcaatgacgtgtgatgtgccagttagatgcttagcttggaagcatacaatgtaatcaaatggcatactgtgcctgtagattactgataatacatacctgacaacgttctaggagaccaatctagatcagattccaaaatagttaaccaacaaacttaattctatgccaaatctctaaa

SEQ ID NO: 236269 - DNA, 433 bp, Glycine max
agtccaggcgtcagacggctacgaaaaggggacagaaggggaattcacaactgagtttggtgatttaaatgactagaaacaatgtgattaaaatgaacggccttggtatcctcggtgctacgaatttgggaacattgcaattgcatgcgtacgatatgttccctctccaaaatgacactagctaaggagcccgtactccgaatgtgaaatgcgcaagttggacgcatgctgtgtaagcacataatatcattggctttgagaccattcctgaagagtgcgtagacgcatcagaggaatacatccattgtgaacactagatatcagactccaaaacagttatccaacacgcttacctttatgtcagagacctcgatctccatctcaaagatacatttgtgttcactatagatggcagcgtactctctaatattcc

SEQ ID NO: 236270 - DNA, 379 bp, Glycine max
gattgttggcttttgcgccgcccgtggctccagggttaacagaactcgatgtccaattgcgctctctcagtttcgaagaatcgtatgccatgggaaagtcggacccaaccgttcgcgctgatcaacatactgacgtagagaaagctaatacgatgctcagaggactcatcactgagaagagattcactcctctaacgctccgtttggtatgacactctgctcgaacatagtgacgtgagctcgaagacctgtagtaccttcggaaccatataccagccctcagacctcgactacggtactaactacggtcataacatcgctgcaaggccactagagccactcgaagcggacttgactatcttgagctactccgatttca

SEQ ID NO: 236271 - DNA, 330 bp, Glycine max
gggacaactgagtttgttgatcgagatgacgataaacagtgtgatgaaaatgaaggtccatgttttcgtcgttgccacaattttggtagcatggcactgccatgcggtacgatatgttccctctccgaatgaacactggctatggtgcccgtactccggatgtgaaatgcgcaagttagaggcttgctgtggaagcacacaacatctttggctttgagaccattcctgaagagttcgttgaagctacaatggaatacatccatggcgatacatatacatcagactccataacagttaaccaatcagcttacttttatgcgatagatctcg

SEQ ID NO: 236272 - DNA, 402 bp, Glycine max
gacagcgaaacagagagtgatttcagtgagtgatcggtgttcacttgatctcatcataatcgtcagcgtcaattgaagaagatgccgatcagaaacatcgccgtcggaaggcctgaagaggcgactcaccccgacacgttgaaggcggctttggctgagttcatctcaaccttcatcttcgtgttcgccggctcaggctccggcatcgcctacaacaagctcaccgacaacggcgctgccacccctgccggcctcatctccgcctccatcgcccatgcattcgccctcttcgtcgccgtctccgtcggcgccaacatctccggcggccacgtcaaccccgccgtcaccttcggcgccttcgtcggcggcaacatcaccttcctccgcggcatcgtctacgtc

SEQ ID NO: 236273 - DNA, 371 bp, Glycine max
gagactatagagatcacgccgatggaagatgaagtgatgagtgaagtggctgctccacctcgtcgtgttcttcttgtatcggctggtgccagccacagtgtggcacttctgagtggaaatgttgtttgttcgtggggacgaggagaggatggacagttaggccatggtgacactgatgatcgactatttcctacaaaactgagtgcattggatggccaagacataatatgtgttacttgtggagctgatcatactatggcacgttctgagtctggcagggatgtatatagttggggaatggggtgactttggaaggttgggtcatggtgatcatagtgacttgctcattcctcatcccataaaagcattac

SEQ ID NO: 236274 - DNA, 372 bp, Glycine max
ggcacaagtttgttgagatagctagaagcaataagatgaaaatgaaagtgcttgttttgtttgttgctacagttttggtagcatatgaatgccatggctcagactaccagaagttccctctccaaatgaaaactgggtttggtgggcaatacagcaatgaggtggcatgtgccagttggaggcttggcgtggaagcaaacaacgtagtcaagtggcaaactgttcctgcagcttgcggagagtacatagctgactacgttctaggagaccaatatagatcagattccaaaacagttaaccaacaagcttatttctatgctaaatccctcaaactcaccaacaaagatgtctttgtcttggacgttgacgaca

SEQ ID NO: 236275 - DNA, 375 bp, Glycine max
gaaggtgcaagagtttgttgtgagctataagctagtttatcgtgaggagaatatgaagttgtttgttttctttgttgctgcagtagttttggtagcatggccatgccatggcgcaggctaccaaaggttccctctccgaatgaaaactggctatggtgagcgttcttcggaggtaaaatgcgcaagttttaggcttgctgtggaagcacacaacatccgagcctttaaaaccattcctgaagagtgcgttgaaccaacaaaggactacattaatggcgatcaatttagatcagactctaaaacagttaaccaacaagctttcttttatgctagtgaacgcgaagtccatcacaacgacatatttatattcggcat

SEQ ID NO: 236276 - DNA, 368 bp, Glycine max
ggaacttggtttcggtgttccaagttagttagaggcattgttgcttgcatagatctctgatctgaaaatgagtgcgtcgaggttcattaagtgcgtcaccgtcggcgacggtgctgtcggcaaaacctgcttgttgatttcctacaccagcaacacttttcccacggactatgtgcccaccgtttttgacaatttcagtgctaatgtggtggtggatggaagcaccgtaaacctaggattgtgggatacagctggtcaggaggattacaatagattaagacccttgagctatcgaggagctgatgtcttcatacttgccttttctctcataagcaaggctagctatgaaaatattgcaaagaagtgga

SEQ ID NO: 236277 - DNA, 391 bp, Glycine max
gatagcaaattccagtgcaagaaaaaatgaccaagatcttctttgtattgctgttatgtctgatcatagcagcttcttctgggttcgtgaattgctttgatgttgaaaagaaggaaaagattggaatatttgagctcaataaaggtgacctttctttgaaggtcaccaactggggtgcttcaattttgtccctggtgattcctgataagaatggaaagttgagtgatgttgttcttggatatgattctgttaaggattacactaatgatacaacatattttggagcaactgttggccgggttgctaacagaattggaggagctcagtttactctaaatggaatccattacaaattagttgctaatgaaggaaacaatacacttcatggtgg

SEQ ID NO: 236278 - DNA, 420 bp, Glycine max
aaacaaaaaaagggggaaaagttaatttgtttattcaaaatactaaaaacaattttaataaaaagaagggccttgttttcctcgttgccacaattttggtagcattgcaatgccatgcgtacgatatgttccctctccgaatgaacactggctatggtgcccgtactccggaagtgaaatgcgcaagttggaggcttgctgtggaagcacacaacatctttggctttgagaccattcctgaagagtgcgttgaagcaacaaaggaatacatccatggcgaacaatatagatcagactccaaaacagttaaccaacaagcttacttttatgccagagacctcgaagttcatcccaaggacacatttgtgttcagtatagatggcaccgtactctctaatattccatactacaaaaaacatg

SEQ ID NO: 236279 - DNA, 406 bp, Glycine max
ggcacaagtgagtttgttgatcgagataactagaaacagtgtgatgaaaatgaaaggccctggtttcctccttgccacaattttgggaacaaggcaatgccaagcgtacgatatgttccctccccgaatgaacactggctatggtgcccgtactccggaggtgaaatgcgcaagttggaggcttgctgtggaagcacacaacatctttggctttgagaccattcctgaagagtgcgttgaagcaacaaaggaatacatccatggcgaacaatatagatcagactccaaaacagttaaccaacaagcttacttttatgccagagacctcgaagttcatcccaaggacacatttgtgttcagtatagatggcaccgtactctctaatattccatactacaaaaaacat

SEQ ID NO: 236280 - DNA, 402 bp, Glycine max
agggggacaagtttgttgagaaaaccagaagcaataagatgaaaatgaaagtgcctggtttggttggtgccacaattttgggaacaaaagaatggcaagggtcaaactaacagaagtttcctctccaaatgaaaactgggtttggtgggcaatacagcaatgaggtggcatgtgccagttggaggcttggcgtggaagcaaacaacgtagtcaagtggcaaactgttcctgcagcttgcggagagtacatagctgactacgttctaggagaccaatatagatcagattccaaaacagttaaccaacaagcttatttctatgctaaatccctcaaactcaccaacaaagatgtctttgtcttggacgttgacgacactactctctctaatctccagtattttg

SEQ ID NO: 236281 - DNA, 400 bp, Glycine max
gaagaagaactagtctaagcagaaatggcctcttcagtgatggcatctgtggccctcaaacctgcccctttcactgttgagaggtcctcagttagaggccttccctccctctcaaggaactcctcttcattcagagttgtggccagtggtggcaagaagatcaagactgacaagccttatggaattaatggtggcatggctttgagggaaggagttgatgcatctggcatgaaaggaaagggaaagggcgtttaccagtttgtagacaaatacggtgctaatgtcgatggttacagtcctatctacgacaccaaggactggtctccaaccggtgatgtctacgctggcggtacgactggcttggctatctgggctgtgactctacttggtcttcttgctg

SEQ ID NO: 236282 - DNA, 400 bp, Glycine max
ggcgtgcacaggcgaaaaccctaatcctgaggcactgaaagtgtgatatggcaagagtcatttcctcttcctgcgcacgcctcgcaatgcgcctcttctccaccaccaccacagccaccgcgttcgccgtcactttacccaaaccctcatcactctccctctcatcgcgtcgattcctcttccctctctcccatgccatcgtccctccctccacccgcgtcgccggaatccggtgccgcgttaaccgcgccggagactcggcgtactcaccgctgaactcggggtcgtcgtcttcgtcgttcagcgaccgcccccccacggagatggcgccgctcttccccggctgcgactacaaccactggctcatcgtcatggagaatcccggtggtgagggcgccaa

SEQ ID NO: 236283 - DNA, 400 bp, Glycine max
ggcagtgatagatataagaaaatgtggcttgtgcagctctcaaccccatttctgaacggacatggtcattccaccacccttctctccaagcacagttcggcggtgactcagatccactgggccccaccgagtttcctgcctcaaatcaatgcgatgaagacactgcatgggagagtggtgtgctccaccagcgacaagacggtggcagtggatgtggtgcagctggcccctcacccatagtacaacaagcgcgtgaggaagaataagaagtaccaggcccacgatcccgataaccaattcaaagtcggcgacatcgtccagctccagaagatcaggcccatcagcacgatcaacgcctttctcgcacttcccgtgcccaaaatgccctccagcatgcccg

SEQ ID NO: 236284 - DNA, 372 bp, Glycine max
ggcatcaattcaaaatatatcatcaattataagcatgggtttgtggaacacaacgaatgcagtgtcttgccgctttcacaagtttggtgatgaccaaaagaatctggtcttccaaggtgatgccacgtcttcttccaggggcatagaactcacaaagttagacggtggaggaaaaccagtgggtggcagtgtggggagagtgttatactcttctccagtgcacctttgggaaagctctacagtggtcgcaagctttgaaaccgacttcaccttttccatctcatcagactctactactccaggtgatggccttgccttcttcattgcaccatttgacactaaaatccctccaaactctggtgggagcaacct

SEQ ID NO: 236285 - DNA, 369 bp, Glycine max
ggcacaagtttgttgagatagctagaagcaataagatgaaaatgaaagtgcttgttttgtttgttgctacagttttggtagcatatgaatgccatggctcagactaccagaagttccctctccaaatgaaaactgggtttggtgggcaatacagcaatgaggtggcatgtgccagttggaggcttggcgtggaagcaaacaacgtagtcaagtggcaaactgttcctgcagcttgcggagagtacatagctgactacgttctaggagaccaatatagatcagattccaaaacagttaaccaacaagcttatttctatgctaaatcgctcaaactcaccaacaaagatgtctttgtcttggacgttgacg

SEQ ID NO: 236286 - DNA, 367 bp, Glycine max
gagttcaattccaatatattccattctctctgtgtatttccctacctctcccttcaagatgcagatcttcgtcaagaccctcaccggcaagaccatcacccttgaggtggaaagctctgacaccatcgacaacgtcaaggccaagatccaggacaaggaaggaatccccccggaccagcaacgtctcattttcgccggaaagcaacttgaggacggccgtacccttgctgactacaacattcagaaggagagtactcttcacctcgtcctccgtctccgtggtggcatgcagatcttcgttaagacactcaccggcaagaccataaccctagaggttgaaagctccgacaccatcgataacgtcaag

SEQ ID NO: 236287 - DNA, 397 bp, Glycine max; identical to SEQ ID NO: 234774

SEQ ID NO: 236288 - DNA, 224 bp, Glycine max
gggacaagtgagtttgttgatcgagataactagaaacagtgtgatgaaaatgaaaggccctggtttcctcggtgccacaaatttgggaacacgggaatgccatgcgtacgaaaagttccctctccgaatgaacactggctaaggtgcccgtactccggaagtgaaatgcgcaagtttgaagcttgctgtggaaacacacaacaaccttggctttgagaacaatc

SEQ ID NO: 236289 - DNA, 401 bp, Glycine max
  unsure (1)..(401): unsure at all n locations
gataccatagaagaagcacaaagagaagcattagcactaagagcagcaacaactagtcccagctgaaatggcctcttcagtgatggcatctgtgggcctcaaacctgcccctttcactgttgagaagtcctcagtgagaggccttccctctctctcaaggaactcttcttcattcagagttgtggccagtggcaagaagatcaagactgacaaaccttatggaattaatggtggcatggctttgagggatggaactgatgcatctggcangaaaggaaagggaaagggtgtttaccagtttgtagacaaatacggtgctaatgtcgatggttacagtcctatctacgacaccaaggactggtctccaaccggtgatgtctacgctggcggtacgactggct

SEQ ID NO: 236290 - DNA, 405 bp, Glycine max
aaaagggaatccaatcacaactgaaaccaaaactgaaaaaaaaacaaacaataccaaaacaagggttcctccaacaacaactcctcctttccaacaacaacccccttaacccccctcaacaaaacaacaatccccttccttcaaggcaacccctactcctccgccccctcgcgccacgcgcctccatgtccgcctcagcgccgccctacgacttcggatcgttccggttcgatccgattagagagtcgattgtgtcgcgcgagatgacccgcaggtacatgatcgacatggtcacccacgccgacaccgacgtcgtcatcgttggcgcgggctccgcgggtctctcgtgcgcctacgagctctccaaaaacccctccatcaacatcgccattgttgagcagtccg

SEQ ID NO: 236291 - DNA, 400 bp, Glycine max
ggcacaagtgagtttgttgatcgagataactagaaacagtgtgatgaaaatgaaggtccttgttttcttcgttgctacaattttggtagcatggcaatgccatgcgtacgatatgttccctctccgaatgaacactggctatggtgcccgtactccggaagtgaaatgcgcaagttggaggcttgctgtggaagcacacaacatctttggctttgagaccattcctgaagagtgcgttgaagcaacacaggaatacatccatggcgaacaatatagatcagactccaaaatagttaaccaacaagcttacttttatgccagagacctcgaactccatcccaaggacacatttgtgttcagtatagatggcaccgtactctctaatattccatactacaaa

SEQ ID NO: 236292 - DNA, 403 bp, Glycine max
ggaaacggcctgtgcatcagtccatggtgccaataggcttggtgcaaattcacttctggatatcgttgtttttggtagagcttgtgctaatagagttgcagaaatccgtagaccaggagagaagcaaaagcctctagagaaggatgctggtcagagaacaattgcatggctggacaaattgagaaattcaaatggttcattgccaacttcgcaaattcggttgaatatgcaacgagtaatgcaaaccaatgctgctgtgttccgtacacaagaaacattagaagaaggttgtcaattaattgataaaacatgggagagcttccatgatgtccaggtgaaggaccgcagtttaatctggaactctgacttgattgagactattgaattggaaaatcttttgata

SEQ ID NO: 236293 - DNA, 400 bp, Glycine max
gacggctcagttgtgtattctcgttctgcacgaaggaaaaaccctagcttccgttcgatcaacaatgacaggagagacagtgaaccccaaagcttaccctttggccgatgcccaactctcaataaccatactagatcttgttcaacaagctgccaactacaagcagctcaaaaaaggtgctaatgaagccactaaaaccctgaacagaggtatctctgaatttgttgtcatggctgctgatactgaaccccttgaaattcttctccatcttcctctactcgccgaggataagaatgtgccctacgtgtttgtcccttcaaaacaagcacttgggcgtgcatgtggggtcaccaggccagtgattgcttgttctgtgacaactaatgaagggagtcaattg

SEQ ID NO: 236294 - DNA, 401 bp, Glycine max
gatccatcccttgtggaagaagtattttttgggaatgttcttagtgctaatttggggcaagctcctgcaagacaagctgctcttggagcaggaatatccaattcagttatctgcactaccgttaacaaagtttgtgcatcaggaatgaaagctgcaatgcttgctgcacagagtattcaattaggcacaaatgatgttgttgtggctggtggtatggaaagcatgtctaatgtacccaagtacctggctgaagcaaggaaaggatcacgccttggacatgattcacttgttgatgggatgttgaaagatggtttgtgggatgtctataaggatgttggcatgggagtgtgtgctgagctatgtgcagataaccatgcattaacaagagacgaccaggataa

SEQ ID NO: 236295 - DNA, 480 bp, Glycine max
  unsure (1)..(480): unsure at all n locations
agggtcagtggttnaagcaataatcacaagcgtagcgtcaaacacggtcaggacttcccggctcgacccacgcgtcagggcgaggaacgtgccctagtttgggccaagctctacatcactctctcaagcaaggagaaagaggaagactttctcgccatgaagggttgtaagcttcctcagcgacccaaaaagagagccaaaatcatccaaagaagcttacttttggtgagtcctgtggcgtggttgtctgatatgtgcaaaatgaatgatgcacaaagtaatcaaaagcggccgctctagaggatccaagcttacttacacgtgcatgctatgtcatatctcttctatagtgtcacctaaattcaattcattggccgtcgttttacaacctcgtgactgagaaaaccctggcgttacccaacttaatcgccttgcagcacatccccctttcactatctggcgtaatagctaaaaggcccg

SEQ ID NO: 236296 - DNA, 368 bp, Glycine max
ggttcaaagcacgccgtgtttcgctgtctctcccatcctttcgcattctcaatacccttttgatttgtgaaaggaaagcaaacatggttgatcaggtccaacaccctacaatcatggacaaggttgctggtcagctccatctccgttctggtctttcatctggtattagaagttatgatggagcctaccgccacccagctatgtaccaaagaccctcttttgggaattactcgaatgctgcattgcagtttcctgtgatgcccacatgcaaagctaccatggatttgtctgctactgcaacatctgcctcacccgtctttgttgctgctccagcagagaaaggccattttcttttagactttctcatg

SEQ ID NO: 236297 - DNA, 372 bp, Glycine max
gacctcaccgagtcgcagcgatcgaagtttcacatcagccttatccagtttagggtttcggttccttaccctacctttgacgtatcgaaaccttaaatttgggattaggtctgagcaatctggttggtagaacctttggtcttagagagtcaagttttatgtctggattagacgatcaaattcctactgccttcgatccttttgctgatgcaaatgctgatgactcgggtgctgggtcaaaggagtatgtgcatattcgcgttcagcagcgaaatggtaggaaaagcctgacaaccgttcagggattgaaaaaagaattcagctataacaagatacttaaagacgttaagaaagagttctgttgcaatggaa

SEQ ID NO: 236298 - DNA, 370 bp, Glycine max
aggcaagagtttgttgtgagctataagctagtttatcgtgaggagaatatgaagttgtttgttttctttgttgctgcagtagttttggtagcatggccatgccatggcgcaggctaccaaaggttccctctccgaatgaaaactggctatggtgagcgttcttcggaggtaaaatgcgcaagttttaggcttgctgtggaagcacacaacatccgagcctttaaaaccattcctgaagagtgcgttgaaccaacaaaggactacattaatggcgaacaatttagatcagactctaaaacagttaaccaacaagctttcttttatgctagtgaacgcgaagtccatcacaacgacatatttatattcggca

SEQ ID NO: 236299 - DNA, 428 bp, Glycine max
gaagacgacagaaggggacttgtaataattcttataacacaacacaacccatggccaccacctccgcattcctcccccttccctcctcctgctgctccacctcgccatcgccgctcacggcatcggcatcaactacggcacgctcggcgacaaccttccaccgcccgcggccgtggcgaacttcctgaagacgaagacgaccatcgaccgcgtgaagatctacgacgtgaacccggacatcctgcgggccttcgccggcagcggcatctccgtgacggtgaccgcccccaacggcgacatcgccgccttaaccaaaatcgactcggcgaggcagtgggtggcgacgcacatcaaaccctttcaccctcagaccaaaattaattacatcctcgtcggcagcgaggttctccactggggcgacaccaaca

SEQ ID NO: 236300 - DNA, 416 bp, Glycine max
taaaggggtccgaattcgatgattgaagtggtaaacatggattacattaacaaagcctttgaaacgttggagaagaacgatgtgagatacacgtttgtagtggatgtcaaaggcagcaaacttgttgattactaaaagaaagtataccagcacgacacccgcaacatccatccatcatcatcaagagtctggaaaagtttttcattgaactaaagctgtgtttgtttattaaaaagagtgctctgtattctctgttttggttacacgccgttcattaaaatatttgatatcaaattctcgtggaaagcaaaagataccaaacttcctgtttgaccatagctttgctgtgtaaaaaaaatgttgtattgttccgccattaaaagaaagacaaaagaagttggatactaaaaataaaa

SEQ ID NO: 236301 - DNA, 435 bp, Glycine max
agccacgcgtccgaaaggggttcaatttcaataaattccattccctctgtgtaatttccctacctctcccttcaagatgcagatcttcgtcaagaccctcaccggcaagaccatcacccttgaggtggaaagctctgacaccatcgacaacgtcaaggccaagatccaggacaaggaaggaatccccccggaccagcaacgtctcattttcgccggaaagcaacttgaggacggccgtacccttgctgactacaacattcagaaggagagtactcttcacctcgtcctccgtctccgtggtggcatgcagatcttcgttaagacactcaccggcaagaccataaccctagaggttgaaagctccgacaccatcgataacgtcaaggccaagatccaggacaaggagggtatccccccggaccagcaacgtctcat

SEQ ID NO: 236302 - DNA, 395 bp, Glycine max
gaaggtgcaagagtttgttgtgagctataagctagtttatcgtgaggagaatatgaagttgtttgttttctttgttgctgcagtagttttggtagcatggccatgccatggcgcaggctaccaaaggttccctctccgaatgaaaactggctatggtgagcgttcttcggaggtaaaatgcgcaagttttaggcttgctgtggaagcacacaacatccgagcctttaaaaccattcctgaagagtgcgttgaaccaacaaaggactacattaatggcgaacaatttagatcagactctaaaacagttaaccaacaagctttcttttatgctagtgaacgcgaagtcgatcacaacgacatatttatattcggcatagataacaccgtactctcta

SEQ ID NO: 236303 - DNA, 380 bp, Glycine max
ggttgtgtgagtgaagaagcagagggagtagcggcattaaaaatgcagatcttcgtgaaaactctgacagggaagactataaccctcgaggtcgagagcagcgacaccatcgacaatgtcaaggccaagattcaagacaaggaaggcattcctccggatcagcagcgtttgattttcgccggaaagcagcttgaagatggaaggaccctggccgattacaacatccagaaggaatcaacccttcatctcgtcctcaggcttcgtggtggcatcattgagccttccctcatggctttggctcgcaaatacaaccaggacaagatgatttgccgcaagtgctatgcccgtctgcatcctaaggctgtgaactgccgcaagaa

SEQ ID NO: 236304 - DNA, 388 bp, Glycine max
gggaggttgatagttaatctatctgcaacagcaacattgtgacagtgacagtgtcgtaggatggagaaggtggtatgtgtgaccggcggcagcggctgcattggttcatggctcgtccatctcctcttggatcgcggctacaccgttcacgccaccgtccaaaacctcaacgatgaagccgagacgaagcatcttcaatccctcgacggagcgtccacgcgcctccgcctcttccagatggatctcctccgccacgacaccgtcctcgccgccgtgcgtggctgcgccggcgtcttccacctcgcctctccctgcattgtcgaccaagtccacgacccccagaaggagcttctggacccggcgattaagggaaccatgaacgtgctca

SEQ ID NO: 236305 - DNA, 407 bp, Glycine max
ggcacaagtttgttgagatagctagaagcaataagatgaaaatgaaagtgcttgttttgtttgttgctacagttttggtagcatatgaatgccatggctcagactaccagaagttccctctccaaatgaaaactgggtttggtgggcaatacagcaatgaggtggcatgtgccagttggaggcttggcgtggaagcaaacaacgtagtcaagtggcaaactgttcctgcagcttgcggagagtacatagctgactacgttctaggagaccaatatagatcagattccaaaacagttaaccaacaagcttatttctatgctaaatccctcaaactcaccaacaaagatgtctttgtcttggacgttgacgacactactctctctaatctccagtattttgctaaccat

SEQ ID NO: 236306 - DNA, 372 bp, Glycine max
ggcgagatagaagagaaagccgtcgctatcctagtctcttcttcccctctacccatttcagtttcaggatggaatctcaggtgaagcacgcccttgttgtcaaagttatgggtcgtactgggtctagggggcaggtgactcaggttagagtgaagtttttggatgatcaaaaccgacacatcatgaggaacgtgaagggacccgtgagagaaggagacattctcaccctacttgagtctgaaagagaagcaagaaggttgcgctagaggatctcttcatggtttggctcaggacttaaacaaaacatcgttgttttgttgtagttaaaggatgtcaaatgttaattgtcatggacctgaattatgcacctac

SEQ ID NO: 236307 - DNA, 367 bp, Glycine max
ggtgcacaagtgagtttgttgatcgagataactagaaacagtgtgatgaaaatgaaggtccttgttttcttcgttgctacaattttggtagcatggcaatgccatgcgtacgatatgttccctctccgaatgaacactggctatggtgcccgtactccggaggtgaaatgcgcaagttggaggcttgctgtggaagcacacaacatctttggctttgagaccattcctgaagagtgcgttgaagcaacaaaggaatacatccatggcgaacaatatagatcagactccaaaacagttaaccaacaagcttacttttatgccagagacctcgaagtccatcccaaggacacatttgtgttcagtatag

SEQ ID NO: 236308 - DNA, 366 bp, Glycine max
gactcctttccgtcacttttggggaagaggtcgagtttcacagcagcaatggtgtacgtcaaggctcagaaatcaaaagcctacttcaagagatatcaagtcaagttcaagagaagaagagagggaaaaaccgattaccgtgccaggattcggttgattaatcaggacaagaacaaatataacactccgaaataccgatttgttgttcgctttagcaacaaggacattgttgcacaaataatatctgctagcattgctggcgatattgttcttgctgcagcatatgcacatgagctgccacaatatggtcttgaagtagggcttacaaattatgctgcagcttattgcactggtctcctgttggcc

SEQ ID NO: 236309 - DNA, 405 bp, Glycine max
ggcacaagtgagtttgttgatcgagataactagaaacagtgtgatgaaaatgaacgtccttgttttcttcgttgctacaattttggtagcatggcaatgccatgcgtacgatatgttccctctccgaatgaacaccggctatggtgcccgtactccggaggtgaaatgcgcaagttggaggcttgctgtggaagcacacaacatctttggctttgagaccattcctgaagagtgcgttgaagcaacaaaggaatacatccatggcgaacaatatagatcagactccaaaacagttaaccaacaagcttacttttatgccagagacctcgaagtccatcccaaggacacatttgtgttcagtatagatggcaccgtactctctaatatttcatactacaaaaaaca

SEQ ID NO: 236310 - DNA, 406 bp, Glycine max
ggcaaaagtgaatttgttgattgagaaaactaaaaacagtgtgatgaaaatgaaggtccttgttttcttcgttgctacaattttggtagcatggcaatgccatgcgtacgatatgttccctctccgaatgaacactggctatggtgcccgtactccggaggtgaaatgcgcaagttggaggcttgctgtggaagcacacaacatctttggctttgagaccattcctgaagagtgcgttgaagcaacaaaggaatacatccatggcgaacaatatagatcagactccaaaacagttaaccaacaagcttacttttatgccagagacctcgaagtccatcccaaggacacatttgtgttcagtatagatggcaccgtactctctaatattccatactacaaaaaacat

SEQ ID NO: 236311 - DNA, 390 bp, Glycine max
ggcctgcaagtgtgagtgatatttgagcttaaaccctagccgctcttctcttcattcttcactttggaaacaatcataatggcgttctgtaataaggttggaaatgtcttgaggcagggtgctgctcgcagcacacatgcccctgttgcgtccatgcttaattacatccgctgcatgtcttcaagcaagcttttcattggaggcctttcatatggagttgatgaccagtctcttaaggatgcattttctggctttggagatgtggttgatgcaaaagttataactgatagagacagtggaagatcaaggggatttggatttgtcaacttctccaatgatgagtctgcaagttcggcactctctgcaatggacgggaaggatctaaatggg

SEQ ID NO: 236312 - DNA, 312 bp, Glycine max
acgcgagacgacaacacaacggggagagaaacagagaaattgataatacaggagtgttatcggcgaacgatgcattcggcaatcctgagttcgccgtagaacggacctacgcgaacgtgtccagagcactacagacggtaactgggaagatcgtggcgctgaagatgactcttctccacgatgactaacaacgtgtctctcacaccacgcaccgtgaggtttccattctgcgactgcgctctcgcaatacccatgtccttacgttaatcgatgtcacagaatgtcacgacgatgaacggaatacagtactct

SEQ ID NO: 236313 - DNA, 393 bp, Glycine max
ggcacatcagcacaacacaacaattcactaagctaaaatcacttcatcatggcttcctcgtgtgcttcctctgccattgcagctgttgccatctccacaccaagttcccagaagaatggatcactcttgggaagcacaaaagcttcttttcttagtgggaggaaactgaaggtgaacaactttacagcaccagttggagcacgatccagcactacagtttgcgcagttgctgagcctgataggcccctgtggttcccaggcagcacccctcctccatggctagatggcagtttgccaggagattttggctttgatcctctaggtcttgcatctgatcctgagagcctgagatggaatgtccaagcagagcttgtgcactgcagatgggccatg

SEQ ID NO: 236314 - DNA, 402 bp, Glycine max
gacgttcacattcaggaatcgttttcttcagaaatttgccatcgttgagagaagcgtgagagccttagtcgttcaagatgagagctaagtggaagaagaagcgcatgaggaggttgaagaggaagcgccgaaagatgagacaaagatctaagtaggtgcttgagcaggagttgagatgagctttccatctgctaccagcctcatgacattttaggctgttatggctcttatgatcttgaggtctagtcgctaggggagcttcactcttgacttagtttgctttactggtcctggtcctggtccaagactattgagtgtgggttaagttgtgatgtttagtgttttgtggtatctaattatgtactggtttttatactttttggttgaatagctatatattag

SEQ ID NO: 236315 - DNA, 370 bp, Glycine max
gaattcaaaatatatcatcaattatgagcatgggtttgtggaacacaacgaatgcagtgtcttgccgctttcacaagtttggtgataaccaaaataatcaggtcttccaaggtgatgccacgtcttcttccagaggcatacaactcacaaagttatacggtggacgaaaaccagttggtggcactgtggggagagtgttatactcttctccagtgcacctttgggaaagctctacagtggtcgcaacctttgacatcgacctcaccttttccatctcatcacactctactactccaggtgatggccttgccgtcttcattgcaccatttgacactaaaatcgctccaaactctggtgggagcaaccttgg

SEQ ID NO: 236316 - DNA, 367 bp, Glycine max
ggcacaagtgagtttgttgatcgagataactagatacagtgtgatgaaaatgaaggtccttgttttcttcgttgctataattttggtagcatggcaatgccatccgtacgatatgtcccctctccgaatgaacactggctatattgcccgtactccggaggtgaaatgcgcacgttggaggcttgctgttgaagcacacaacatctttggctttgagagcattcctgaatcagtgcgttgaagcaacacacgaataaatccatggcgaacaatatagatgagactccagatcagtgaatcaacaaccttacatatatgccagagacctcgaactccaactcacggacacatttgtgttcagtataga

SEQ ID NO: 236317 - DNA, 403 bp, Glycine max
aagggaaagtgcaagaatttgttgtgagccaaaaaccaatttaaccttaagaagatatgaagttggttggtttccttggtgccgcaataattttggtaacatggccatgccatggcgcaaggcaacaaaagttccctctccgaatgaaaactggctatggtgagcgttcttcggaggtaaaatgcgcaagttttaggcttgctgtggaagcacacaacatccgagcctttaaaaccattcctgaagagtgcgttgaaccaacaaaggactacattaatggcgaacaatttagatcagactctaaaacagttaaccaacaagctttcttttatgctagtgaacgcgaagtccatcacaacgacatatttatattcggcatagataacaccgtactctctaatat

SEQ ID NO: 236318 - DNA, 406 bp, Glycine max
ggcacaagtgagtttgttgatcgagataactagaaacagtgtgatgaaaatgaaggtccttgttttcctcgttgctacaattttgggagcatggcaatgccatgcgtacgatatgttccctctccgaatgaacactggctatggtgcccgtactccggaggtgaaatgcgcaagttggaggcttgctgtggaagcacacaacatctttggctttgagaccattcctgaagagtgcgttggagcaacaaaggaatacatccatggcgaacaatatagatcagactccaaaacagttaaccaacaagcttacttttatgccagatacctcgaagtccatcccaaggacacatttgtgttcagtatagatggcaccgtactctctaatattccatactacaaaaaacat

SEQ ID NO: 236319 - DNA, 400 bp, Glycine max
gagaactgatgagttgaataatcaaaggcaaaaagaagaagcaaaaccaaaggcagtactgtgttcaccgtggaactgttcttctctctcataacatgccctctgcccaggatccattttacgttgtcgaggccgagattcaagattctattgataagctgcaatctacttttcaccaatgggaaagcaagtccggtgctgcggaacaaggacatcttacaaaggaggttcttgctggatgcgaaagcatagagtggcaggtggatgaattggataaggcaattgctatagcatctagagatccttcttggtatgggatagatgaagctgaggtcgaaagccgaaggagatggacaagtaacactcgttctcaggttggcacaatgaagaaagcagtgga

SEQ ID NO: 236320 - DNA, 384 bp, Glycine max
gacagcactgcactcttcgcaacacaacaaaaaaagacaacccagagagcgcgtcttaataaacgctcttctctgaaaacccccagttcttttcttctttcttcttctctttcgcttcttcgatcttcgatcttcgtcgctgaaaatgagagggtgcatttcaatccacatcggccaggccgggattcaggttggaaacgcctgctgggagctttactgcctcgaacacggcattcagcctgatgggcagatgccaagtgacaagaccgttggtggaggtgatgatgctttcaacaccttcttcagtgaaactggggcaggaaagcacgtgccccgtgcgatttttgtagatcttgagcccactgtgattgatgaggttaggac

SEQ ID NO: 236321 - DNA, 380 bp, Glycine max
ggagcgaagaagatattagggtttttgagtgcggtgcggcgatcctagcactctcttctgcagctttcgccgacagcttcattcaccatggctgagcaaaccgagaaggcttttttgaaacaaccaaaagtgtttctcagctcgaagaaaactgggaagggaaagagacccggaaagggtgggaaccgcttttggaaatccattgggcttggatttaagactcccagggaagccatcgaaggaacctacattgacaagaagtgccccttcactggcaatgtttccatccgtggccgtatcttggctggaacatgtcacagtgctaagatgaacaggactattattgttaggaggaattatctccattttatcaagaagta

SEQ ID NO: 236322 - DNA, 360 bp, Glycine max
gggcgcagtgagatggaagaagaaggtgttccggtggaaggttcttcaggtacggtgagtcgggcacggaagcttctgtttcggcgaatgctggtggggatcaaagacggaaggttcttcttgggctccttctactgcatcgacaagcaaggcaacatcattctccaggacgccgtcgaatatcgcagcacgcgccaatcttcgccttctcccatggaacagaggtgcctcggccttattctcattccttcctcttgccgcacctcttgtcacgtcgattgcgctatccacgaacagttatctctcctttcgctgaatcaaacaccaccgcactagccagggttttactgtgccccttca

SEQ ID NO: 236323 - DNA, 369 bp, Glycine max
ggaatcaaagtcaagttaaagggcaaaacctgataaccgcaaaattaaaaattgaaaattaaaatttaaaacagatgttgaaagtaaagtcggtggtatgattcatcattctctttcagtttttggcattgaagaatctgagatcggaaaattcacctctccaacccccaatcccatcgttgcaaatgatccgattcattctgttgcagaacaggcagggcaagacccgtcttgccaaatactacgttcctctcgaggattccgagaagcacaaggtggaatacgaggttcaccgcctcgtcgtaaacagagaccctaaatacacaaatttcgtcgagtttcgtacgcacaagataatatacaggcgat

SEQ ID NO: 236324 - DNA, 133 bp, Glycine max
ggggcacacgtgagtttgttgatcgagattgctagaagcagtgtgatgaacatgaaggtccttgttttcctcgttgctacagttttgggaccatggccatgcccttgccttcatatgcttccctctcccactc

SEQ ID NO: 236325 - DNA, 405 bp, Glycine max
agggagaacaagcaaacacaactctgctaacctcctctctctctccccgaattcctgccccggttaacaagggggaaaatcaataatccttttcccccaacaaaattaacccttccggaaaacctggtcaaaatgaacaagctttgaacgctgtccggtccggaaaaaactcctttggaaataaaacttgcaattgaattttcaattccaccgaaaaaaaattgcatctatatgggttgatgaagcatcagtccagaaaattcagttattaacaccaaatataggtgtcgtatatagtggcatgggtcctgattttcgagttttggttcggaaaagcaagaaacaagccgagcagtatcaccgtttatataaagaaccaattcctgtcactcaacttgtcaggga

SEQ ID NO: 236326 - DNA, 401 bp, Glycine max
agggggacaagtgaatttggtgatcgagataaccagaaacagtgtgatgaaaatgaaaggccctggtttcctcggtgccacaaatttgggaacaaggcaatgccatgcctacgaaaagttccctccccgaatgaacactgggcaaggtgcccgtactccggaagggaaatgcccaagttggaaggcttgccgttgaagcacacaacatctttggctttgagaacattcctgaagagtgcgttgaagcaacaaaggaatacatccatggcgaacaatatagatcagactccaaaacagttaaccaacaagcttacttttatgccagagacctcgaagtcgatcccaaggacacatttgtgttcagtatagatggcaccgtactctctaatattccatactac

SEQ ID NO: 236327 - DNA, 399 bp, Glycine max
gcacaagtgagtttgttgatcgagataactagaaacagtgtgatgaaaatgaaggtccttgttttcttcgttgctacaattttggtagcatggcaatgccatgcgtacgatatgttccctctccgaatgaacactggctatggtgcccgtactccggaggtgaaatgcgcaagttggaggcttgctgtggaagcacacaacatctttggctttgagaccattcctgaagagtgcgttgaagcaacaaaggaatacatccatggcgaacaatatagatcagactccaaaacagttaaccaacaagcttacttttatgccagagacctcgaagtccatcccaaggacacatttgtgttcagtatagatggcaccgtactctctaatattccatactacaaa

SEQ ID NO: 236328 - DNA, 352 bp, Glycine max
ggcacaagtgagtttgttgatcgagataactagaaacactgtgatgaaaatgaaggtccatgttttcctccttgcaacaattttggtagcatggcaatgccatgcgtacgatatgttccctctccgaatgaacactggctatggtgcccgtactccggacgtgaaaagcacaccttagaagcttgctgtggaagcacacgacatctttggctttgagaccattcctgaagagtgcgttgaatcaacaaatgaatacatccatggcgaacaatatacatcagactccacaacagttaaccagcaagcttacatttatgccacagtactccaagtccatcccaacgacacattt

SEQ ID NO: 236329 - DNA, 374 bp, Glycine max
gacaagtgagtgtgatgatcgagatcactacaaacagtgtgatgaaaatgaaggtccttgttctcttcgtagctacaattttggtagcatggcaatgccacgcgtacgagatcttccctctccgaatgaacactgtctatggtgctcgtactccggaggtgaaaggcgcatgttggaggcttgctgtggaagcagacaacatctttggctttgagaccattcctgaagagtgcgttgacgcagcatacgaatacatccatggcgaacaatatagatcagactccaaaacagttaaccatcaagcttacatttacgccagagacctcgaagtccatctcaaggacacatttgtgttcagtatagatggcaacgta

SEQ ID NO: 236330 - DNA, 400 bp, Glycine max
gagtgcacaagtgagtttgttgatcgagataactagaaacagtgtgatgaaaatgaaggtccttgttttcttcgttgctacaattttggtagcatggcaatgccatgcgtacgatatgttccctctccgaatgaacactggctatggtgcccgtactccggaggtgaaatgcgcaagttggacgcttgctgtggaagcacacaacatctttggctttgagaccattcctgaagagtgcgttgaagcaacaaaggaatacatccatggcgaacaatatagatcagactccaaaacagttaaccaacaagcttacttttatgccagagacctcgaagtccatcccaaggacacatttgtgttcagtatagatggcaccgtactctctaatattccatactac

SEQ ID NO: 236331 - DNA, 375 bp, Glycine max
ggaacttctcacgttcatttctacacatccctagctctgtcgttccgtcgttgacgatggcgtttcgggtgcgaagccctgacctccgctctctctttcttctctctctcttgtccatcgcttccgccaatgtcttcttcgaagagcgtttcgatgacgggtgggaaaatcgatgggttaaatcagattggaaaaaagatgagaacgtggctggggagtggaaccacacctctggtcaatggaatggagacgctaatgacaaaggtattcaaaccagtgaggattacagattctatgctatttcagctgagtaccctgaattcagcaacaagggtaagacactagtctttcaattttctgttaagcacgaacaga

SEQ ID NO: 236332 - DNA, 373 bp, Glycine max
gagggcactcgttttcgttctcgtccaggtctaaacatctttgcgaacgacgttcacagcgctcacccctacatgcagaacgatgaaggacagatcactgagctttacattcctaggaactgctccgcgcacaacacattgattaccgctaaagatcaagcctcggttcagatcaacattgggcatctcgaagaaaatggagtcgacaatggacaattctcgacatttgccctctgccgattcagccgtgctcaaggtgatactgacagtgctcgacaccgcttgtggcacatcaagacagttgaagttaagcagcagtagacacccacgatagcatgtaacatcgtgaggtatgcatttccactcttgctac

SEQ ID NO: 236333 - DNA, 383 bp, Glycine max
  unsure (1)..(383): unsure at all n locations
agggattcataccaaaactttcactttcccaaagaaaattgggacctggctccggtgttaaagtttggaattttttttgaatgggtggattgagaaaactgggcaagctttggaacttcttcaaaagtctggtacttcaatggctactgaagaggttaatanacttcaatcacttcctccttaccctgagatgatagtgaaagcacttgaagccctgaatgaggctgatggatcgagtaaatcagcgatatcaaagtacatagaaaccacctacggtgagttgccagatgaaactgttttggggagtcacctgaacaagatgaaagagagtggagagcttgcgttcaaacagaacaattacatgaaagctgatccaaatgccc

SEQ ID NO: 236334 - DNA, 420 bp, Glycine max
gctttttgatttaattcaatgcaaccatgtttggctatgcagcagcaataattgcagcaatcctcttcttccaatacttcttccataggagacgatgttgcaaacaccccattttgacagaataccctatcattggcatgctaacacaattactcttcaatttatggcgtgcccatgactattcaactcaggtgttgcaacgacatggtggcactggtgagttcattggaccatggtttaccaacatggactatttggtcacttgcgaccccatcaacgtccaccacatgctgagcaagaatttccacaactacgtcaagggacccgagtttcgtcacatttttcatgccttcggagacgggattttcgccgctgattctgaagcatggaactacagcacggatctcttacattctctct

SEQ ID NO: 236335 - DNA, 391 bp, Glycine max
  unsure (1)..(391): unsure at all n locations
gaaccccacttccctcaccgctccgaattanggttttccaattcgcagagcaactcaacacaacgaaccaaaccaacaatgtcgcagccgcagcctcagtcgcagccgcaacacgggcaagcggcgctggagcaggtgcagtgcttcggtcgcaagaagacggcggtggccgtgacctactgcaagcgcgggcgcggcctcatcaagatcaacggctgccccatcgagctcgtcgagccggagatcctccgctttaaggccttcgagcccatcctcctgttgggaaagagccgcttcgccggcgtcgacatgcgcatccgcgtcaagggcggcggccacacctcccagatctacgccattcgccagagcatcgccaaggcgctcgtcgcgt

SEQ ID NO: 236336 - DNA, 397 bp, Glycine max
ggggttattggacacattcttcagcgactgcgtttttggatcggaacctcttctgcggcgtagcaatgggacactccaacgtttggaactctcacccaaaaaactacggtcctggttctcgcacttgccgtgtgtgtgggaatccacatggactgatcaggaagtatggccttatgtgctgcaggcagtgcttccgtagcaatgccaaggaaattggcttcatcaagtatcgctaaaagagcagttgtcaactacggaccaatattgtgttctggcactaggatgttttgaggatgttatgtttgaagaaacttgagactttcttttttcatctaattaattatcagacgtaatttgtggtactaagaatacttttatataaattgttttgaaccat

SEQ ID NO: 236337 - DNA, 407 bp, Glycine max
ggcacaagtgagtttgttgatcgagataactagaaacagtgtgatgaaaatgaaggtccttgttttcttcgttgctacaattttggtagcatggcaatgccatgcgtacgatatgttccctctccgaatgaacactggctatggtgcccgtactccggaggtgaaatgcgcaagttggaggcttgctgtggaagcacacaacatctttggctttgagaccattcctgaagagtgcgttgaagcaacaaaggaatacatccatggcgaacaatatagatcagactccaaaacagttaaccaacaagcttacttttatgccagagacctcgaagtccatcccaaggacacatttgtgttcagtatagatggcaccgtactctctaatattccatactacaaaaaacatg

SEQ ID NO: 236338 - DNA, 409 bp, Glycine max
  unsure (1)..(409): unsure at all n locations
gaaggaaactaggcattggtttctctctctagcttggacgagtgaattagattcatcatcaagatgtcgtctctgatagcagaagatgtgaagagcagatcagaggtgtaccacggggacgaaatgtgccaagtgaagtccaaggagcttctcaaggaaatcgccctcccgaacggccttcttcccctcaaggacatggaggagtgcggctacgacagacaaaccggcttcgtctggctcaaacaaaagaagagttacacccacaagttcgacaagatcggaaagcttgtctcctacgcgcccgaggtaactgctcatgtccaacaaggtaaaattaccaaactcaccggggtntaagacaaggagctcttgctctggattacgctcagtgatatctatgttgatgacc

SEQ ID NO: 236339 - DNA, 371 bp, Glycine max
ggcacaagtgagtttgttgatcgagataactagaaacagtgtgatgaaaatgaaggtccttgttttcttcgttgctacaattttggtagcatggcaatgccatgcgtacgatatgttccctctccgaatgaacactggctatggtgcccgtactccggaggtgaaatgcgcaagttggaggcttgctgtggaagcacacaacatctttggctttgagaccattcctgaagagtgcgttgaagcaacaaaggaatacatccatggcgaacaatatagatcagactccaaaacagttaaccaacaagcttacttttatgccagagacctcgaagtccatcccaaggacacatttgtgttcagtatagatggca

SEQ ID NO: 236340 - DNA, 124 bp, Glycine max
tatgtgccaaatcgtcctcccttaatgagaagattaatcccatttccagaggatgaggcagaatatgccaatttcttagcagatccccaaaagtatttcctaaatgcgttgcccagcgtgttac

SEQ ID NO: 236341 - DNA, 370 bp, Glycine max
gatagaaggttgtggggttagggctttagagtgtcttttcttctttttcttcttcttcttcttcgttgaatcgcgattgttctgttgtgcgactgaaagaagagagatcgaaaatggcgttggctttcgacgagttcggaaggcctttcataatcctgaaggaacaggagcagaagagcagacttcgaggtttggacgctcagaaagccaacatctccgccggcaaagccgtcgctcgcatcctccgaacctccctcggccccaaaggcatggacaagatgctccagagccccgacggcgacgtcactatcacgaacgacggtgccacgatccttgaccagatggacgtggacaaccaaatcgcgaagct

SEQ ID NO: 236342 - DNA, 154 bp, Glycine max
agagacttccgactggggcacatgtgagtctgctgctcctgataactagatgcagtgtgattacaatgaatgtccttgttttcttcgttgccacaggttttggagcatggcaatcccatgcgtgcaatatatgccctctccgagtaaggtactg

SEQ ID NO: 236343 - DNA, 365 bp, Glycine max
cgggacacgtacatcatcaaaaaacacacacgacacactctcatacacacacgttgtctcgcacacattccttcattccgcagcagcaaacatctttatcttaaacgacaacaatggccgatgccgaggatattcaacccctcgtttgcgataatggaaccggaatggtcaaggctggttttgccggagatgatgcgccgagggcggtgttccccagcattgtggggcgtccacgtcacacgggagtgatggttgggatggggcagaacgatgcgtatgttggggacgacgctcaatccaagaggggtattttgactctcaaatacccaattgagcatggaattgtgagtaactgggacgacatg

SEQ ID NO: 236344 - DNA, 355 bp, Glycine max
ggcacaagtgagtttgttgatcgagataactagaaacagtgtgatgaaaatgaaggtccttgttttcttcgttgctacaattttggtagcatggcaatgccatgcgtacgatatgttccctctccgaatgaacactggctatggtgcccgtactccggaggtgaaatgcgcaagttggaggcttgctgtggaagcacacaacatctttggctttgagaccattcctgaagagtgcgttgaagcaacaaaggaatacatccatggcgaacaatatagatcagactccaaaacagttaaccaacaagcttacttttatgccagagacctcgaagtccatcgcaaggacacatttgtg

SEQ ID NO: 236345 - DNA, 376 bp, Glycine max
ggcacaagtttgttgagatagctagaagcaataagatgaaaatgaaagtgcttgttttgtttgttgctacagttttggtagcatatgaatgccatggctcagactaccagaagttccctctccaaatgaaaactgggtttggtgggcaatacagcaatgaggtggcatgtgccagttggaggcttggcgtggaagcaaacaacgtagtcaagtggcaaactgttcctgcagcttgcggagagtacatagctgactacgttctaggagaccaatatagatcagattccaaaacagttaaccaacaagcttatttctatgctaaatcgctcaaactcaccaacaaagatgtctttgtcttgggcgttgacgacactac

SEQ ID NO: 236346 - DNA, 316 bp, Glycine max
gacagcgaaacagagagtgatttcagtgagtgatcggtgttcacttgatctcatcataatcgtcagcgtcaattgaagaagatgccgatcagaaacatcgccgtcggaaggcctgaagaggcgactcaccccgacacgttgaaggcggctttggctgagttcatctcaaccttcatcttcgtgttcgccggctcaggctccggcatcgcctacaacaagctcaccgacaacggcgctgccaaccctgccgggctcatctccgcctccatcgcccatgcattcgccctcttcgtcgccgtctccgtcggcgccaaca

SEQ ID NO: 236347 - DNA, 366 bp, Glycine max
gaaggtgcaagagtttgttgtgagctataagctagtttatcgtgaggagaatatgaagttgtttgttttctttgttgctgcagtagttttggtagcatggccatgccatggcgcaggctaccaaaggttccctctccgaatgaaaactggctatggtgagcgttcttcggaggtaaaatgcgcaagttttaggcttgctgtggaagcacacaacatccgagcctttaaaaccattcctgaagagtgcgttgaaccaacaaaggactacattaatggcgaacaatttagatcagactctaaaacagttaaccaacaagctttcttttatgctagtgaacgcgaagtccatcacaacgacatatttat

SEQ ID NO: 236348 - DNA, 367 bp, Glycine max
ggtgttccacattcagatgttccttgcgtttccctttcattttccctcactttctcgctcgctaaacgcccctctctcgcctccaatggccgaccagctcaccgacgaccagatcgccgagttcagggaggccttcagcctcttcgacaaggacggcgatggttgtattactactaaggaacttgggactgtgatgcggtcactacggcaaaacccagctgaggcagaactgcacgatatgattaatgaggttgatgctgatggcaatggaaccatcgactcgccagagttcctcaacctgatggctcgcaagatgatagacaccgactccgaggaggagcttaacgacgctttccgtgtgttcgac

SEQ ID NO: 236349 - DNA, 389 bp, Glycine max
gagcgccttatctcctctcccaataatgcctatttccgcgtcccccacagaggagagagccacactctcgtggcgcaaaattccccacttcaaatacgacgccgttcagccccgcctccgtcgcaacaccaccaccaccctcactttcgccaccgccaccggcggctctaaattcgcctccgtctccgtggcggagcccaaactgcaccacgatttcatgcccacgccgtcccagctcttcaagaaccccctcgccgccttcgccatcgtgccccgtgacgccgctctcttctccgccggagccaacgccggcgccgccgccaaaaccgtcaacgcgccgctcgaccgcatcaagctcctcatgcagactcatggtgtgcgtcttgggc

SEQ ID NO: 236350 - DNA, 365 bp, Glycine max
ggagcgaagaagatattagggtttttgagtgcggtgcggcgatcctagcactctcttctgcagctttcgccgacagcttcattcaccatggctgagcaaaccgagaaggcttttttgaaacaaccaaaagtgtttctcagctcgaagaaaactgggaagggaaagagacccggaaagggtgggaaccgcttttggaaatccattgggcttggatttaagactcccagggaagccatcgaaggaacctacattgacaagaagtgccccttcactggcaatgtttccatccgtggccgtatcttggctggaacatgtcacagtgctaagatgaacacgactattattgttaagaggaattatctcca

SEQ ID NO: 236351 - DNA, 387 bp, Glycine max
  unsure (1)..(387): unsure at all n locations
ggcacaagtttgttgagatagctagaagcaataagatgaaaatgaaagtgcttgttttgtttgttgctacagttttggtagcatatgaatgccatggctcagactaccagaagttccctctccaaatgaaaactgggtttggtgggcaatacagcaatgaggtggcatgtgccagttggaggcttggcgtggaagcaaacaacgtagtcaagtggcaaactgttcctgcagcttgcggagagtacatagctgactacgttctangagaccaatatagatcagattccaaaacagttaaccaacaagcttatttctatgctaaatccctcaaactcaacaacanagatgtctttggcttggacgttgacgacactactctctctaatc

SEQ ID NO: 236352 - DNA, 370 bp, Glycine max
gacccgcccgtcaggtaccttgtgcaagtgtgagaagaccaacaagtgtgagatatatggggtgaatcccatgaagaaggtgatggaaggagatggcacaagcagattctccacagttcatgggaaacccattttccatttcttgaacacttcgactttctcggagtacacggtggtggattcggcctgtgtggtgaagtttgtgagcacagaccacagtctcagcatcaagaacctcaccttgctcagttgtggtgtctccacaggggttggagctgcttggaatacagctaatgtgcattcgggttcaactgtagctgttttcggcttaggagctgttgggctcgctgttgctgaaggggcacgagct

SEQ ID NO: 236353 - DNA, 291 bp, Glycine max
ggcacaagtgagtttgttgatcgagataactagaaacagtgtgatgaaaatgaaggtccttgttttcttcgttgctacaattttggtagcatggcaatgccatgcgtacgatatgttccctctccgaatgaacactggctatggtgcccgtactccggaggtgaaatgcgcaagttggaggcttgctgtggaagcacacaacatctttggctttgagaccattcctgaagagtgcgtttaagcaacaaaggaatacatccatggcgaacaatatagatcagactccaaaac

SEQ ID NO: 236354 - DNA, 368 bp, Glycine max
ggatataacactgtcactcttacaatctcagctcatagcattcttcttccaacgagaatcagtctttgtgttccaaatggctcgtacgaagcaaacagcaagaaagtccaccggaggaaaagctccaaggaagcagctcgccaccaaggcagtacgtaagtccgctccggcgacgggcggcgtgaagaagccccaccgtttcaggccggggacagtggctctgagggagattcggaagtaccagaagagcacggagcttctcataaggaagcttcctttccagaggctcgtaagggaaatcgctcaagacttcaagaccgatctacgcttccagagcagtgctgtctccgctcttcaggaagccgctg

SEQ ID NO: 236355 - DNA, 354 bp, Glycine max
  unsure (1)..(354): unsure at all n locations
gattccaaccattctccaccattcacaatctaagcatcccaaaactaactattgtgctagctacttagttgtgtaagatggcttccaagggaaatgttgcatccacttatgttgcactactcatgtgtctctatttgctttcattcaccatggtgagctctcaaatctcaaccccaccaccaatgccttctcaaaacggtacatgtcctataaatgtacttcgattgggtgtgtgtgccaatgtgttgaacctggtcaatgttacactaggatcaccaccaaccctcccctgttgcaccctcattcanggtttggctgatgttgatgttggtgtttgcctttgcactgccctca

SEQ ID NO: 236356 - DNA, 367 bp, Glycine max
gggcacaagtttgttgagatagctagaagcaataagatgaaaatgaaagtgcttgttttgtttgttgctacagttttggtagcatatgaatgccatggctcagactaccagaagttccctctccaaatgaaaactgggtttggtgggcaatacagcaatgaggtggcatgtgccagttggaggcttggcgtggaagcaaacaacgtagtcaagtggcaaactgttcctgcagcttgcggagagtacatagctgactacgttctaggagaccaatatagatcagattccaaaacagttaaccaacaagcttatttctatgctaaatccctcaaactcaccaacaaagatgtctttgtctttgacgttg

SEQ ID NO: 236357 - DNA, 358 bp, Glycine max
ggcacaagtgagtttgttgatcgagataactagaaacagtgtgatgaaaatgaacgtccttgttttcttcgttgctacaattttggtagcatggcaatgccatgcgtacgatatgttccctctccgaatgaacactggctatggtgcccgtactccggaggtgaaatgcgcaagttggaggcttgctgtggaagcacacaacatctttggctttgagaccattcctgaagagtgcgttgaagcaacaaaggaatgcatccatggcgaacaatatagatcagactccaaaacagttaaccaacaagcttacttttatgccagagacctcgaagtccatcccaaggacacatttgtgttc

SEQ ID NO: 236358 - DNA, 392 bp, Glycine max
  unsure (1)..(392): unsure at all n locations
aataacanaacaacatttggaacctaacttgggtgggctcactgttgagcaggctatccagagcaagaagctgttcatcttagatcaccatgactatctcattccatatttgaggaaaataaatgcaactaccacaaagacttatgctaccagaaccatatttttcttgaaaagtgatggaactttgacgccattggccattgagttaagtaagccgcatcctcaaggtgaagaatatggtcctgttagcgaagtctacgtgccttcgagcgaaggagttgaagcttatatttggttattggcaaaggcttatgttgttgtaaatgactcgtgctaccatcaactcgttagccattggctaaacactcatgcngttgttgagccatcgtcat

SEQ ID NO: 236359 - DNA, 460 bp, Glycine max
  unsure (1)..(460): unsure at all n locations
taccggtctatgattcncgggcgcaaccacgcgtccatatacggtggcaaaaaacaacaaaaggggaagcaaagcagtgaccacggagagagagagagaggttttgacgcaacacactttcactgagaaaggatctctatctaccaaggagcagaataaaacccttctctctggtaagtgaataagagaatggcttcagatcggaaacttcacactttcgaggaggtggcaaagcacgaccagaccaaggattgctggctcatcatttctggcaaggtgtatgatgtcacccctttcatggaggatcatcccggaggtgatgaggttttgttatctgcaacagggaaagatgcaaccaatgattttgaagatgttggacacagtgattctgctagaggtatgatggaaaaatactacattggtgagattgattcatcaactgtaccactaaaacgtacct

SEQ ID NO: 236360 - DNA, 398 bp, Glycine max
  unsure (1)..(398): unsure at all n locations
ggaacttctcacgttcatttctacacatccctagctctgtcgttccgtcgttgacgatggcgtttcgggtgcgaagccctgacctccgctttctctttcttctctctctcttgtccatcgcttccgccaatgtcttcttcgaagagcgtttcgatgacgggtgggaaaatcgatgggttaaatcagattggaaaaaagatgagaacgtggctggggagtggaaccacacctctggtcaatggaatggagacgctaatgacaaaggtattcaaaccagtgaggattacagattctatgctatttcagctgagtaccctgaattcagcaacaagggtaagacactagtcttttcaatttcctgttaagcacgancagaagcttgactgtggtggtggcta

SEQ ID NO: 236361 - DNA, 465 bp, Glycine max
  unsure (1)..(465): unsure at all n locations
taccggtctgaggattcccgggcccaaccaagccttcagacaagccttcgttacggtggcaaaaaaacaacaaaagggggaaaaaaccccggaaccaaaccaacaattgggaaataaaaaaaaaaaaagaaaaaaaaaaaaaaaaaaacccttacccttcccaaacgcccgctttcctttgacgcttctgacccttgctttgtctgcgtcttccttccttccttccttctttctccgtgtgtcctaatggctctcccagaatcctcctcccgtcgcaactccctgatcccctccttcaactactcctcttcctccaaaacgctcnctctccaccacatgctcaacaccgcctccgctgccgccgccgccgctccctccccggccgccgggcaatctcgacgcccgatcgcgtggcctcatgattccctctcccagcgagtcacgcaagatcgagttgtactcccc

SEQ ID NO: 236362 - DNA, 344 bp, Glycine max
ggaaacagagagtgatttcagtgagtgatctgtgttcagttgatctcatcacaatcgtcaccgtcaattgaagaagatgccgatcagatacatcgccgtcggaacgcctggagaggcgacgcaacccgacacgttgaatgcggcgttggctgagttcatctcaaccttcatcttcgcgttcgccggctcaggctccggtatcgcctagaacaagctcagcgaaaacggcgctgcgatccctgccgggctcatctcagcctccatcgcacatgcaatcgccctcttcgtcgccgtctccgtctggtccaacatctccggtggccacgtcaaacccgccgtcacct

SEQ ID NO: 236363 - DNA, 320 bp, Glycine max
gacacaccgtttgttctattcttaactcaacttctgctacccactctcttcttccaagtccaaccacgcttttctctacagtcatgggcaaggtcaagatcggaatcaacggatttggaagaattggccgtttggttgccagagtcgctctgcaaagagacgatgtggagctcgttgccgttaacgaccctttcattaccaccgattacatgacatacatgtttaaatacgacagtgttcacggacactggaagcatcacgatgtcaccgttaaggacgagaagacccttctcttcggtgacaagccagtcactgttttt

SEQ ID NO: 236364 - DNA, 370 bp, Glycine max
ggcacaagtgagtttgttgatcgagataactagaaacagtgtgatgaaaatgaaggtccttgttttcttcgttgctacaattttggtagcatggcaatgccatgcgtacgatatgttccctctccgaatgaacactggctatggtgcccgtactccggaggtgaaatgcgcaagttggaggcttgctgtggaagcacacaacatctttggctttgagaccattcctgaagagtgcgttgaagcaacaaaggaatacatccatggcgaacaatatagatcagactccaaaacagttaaccaacaagcttacttttatgccagagacctcgaagtccatcccaaggacacatttgtgttcagtatagatggc

SEQ ID NO: 236365 - DNA, 354 bp, Glycine max
ggcacaagtgagtttgttgatcgagataactagaaacagtgtgatgaaaatgaaggtccttgttttcttcgttgctacaattttggtagcatggcaatgccatgcgtacgatatgttccctctccgaatgaacactggctatggtgcccgtactccggaggtgaaatgcgcaagttggaggcttgctgtggaagcacacaacatctttggctttgagaacattcctgaagagtgcctttgagcaacaaaggattaatccaatggcgaacaatataaataagactccaaaacatttaacaaacaagcttacttttatccagagacctcgaagtccatcccaaggacacatttgtg

SEQ ID NO: 236366 - DNA, 372 bp, Glycine max
gacaaatctttcgctaacactcattaattgcaagaatggcacttcgttgcttggtgatgtccctttctgttctcttcactcttggtcttgcgagagaaagccatgccagagacgaagatttttggcatgctgtttggccaaacactcccattccaagttcattgcgagatcttctaaagcctggccctgcaagtgttgaaatcgatgatcaccctatgcaaattgaagaaacacagtacccgaaaaccttcttctataaagaagaccttcatccaggcaaaacaatgaaagtataattcagcaagcctccctttcaacaaccatggggtgttggtacatggttaaaggaaattaaagacactactaaagaag

SEQ ID NO: 236367 - DNA, 356 bp, Glycine max
  unsure (1)..(356): unsure at all n locations
ggcacaagtgagtttgttgatcgagataactagaaacagtgtgatgaaaatgaaggtccttgttttcttcgttgctacaattttggtagcatggcaatgccatgcgtacgatatgttccctctccgaatgaacactggctatggtgcccgtactccggaggtgaaatgcgcaagttggaggcttgctgtggaagcacacaacatctttggctttgagaccattcctgaagagtgcgttgaagcaacaaaggaatacatccatggcgaacaatatagatcagactccanaacagttaaccaacaagcttacttttatgccagagacctcgaagtcaatcncaaggacacatttgtgt

SEQ ID NO: 236368 - DNA, 384 bp, Glycine max
  unsure (1)..(384): unsure at all n locations
gacgcagcttcatccctaacgcgtgcatagcagagtcagagacagagacgcagccatggggcggagacctgcgaggtgttataggcaaattaagaacaagccataccccaagtcacgtttctgccgtggtgttcctgatcccaagatcaggatttatgatgttggtatgaagaagaagggtgttgatgagtttcctttctgtgtccatctggttagttgggagaaggaaaatgtttcaagtgaggccctggaagctgctcgcattgcttgcaacaagtacatggccaaatttgctggaaaggatgctttccacttgagagtcagggtgcacccattccatgttcttaggattcacangatgctttcgtgtgctggtgctgatag

SEQ ID NO: 236369 - DNA, 396 bp, Glycine max
gctttaaagagacttttggatttactccatcatggcttttgtggcttagatatagcagcttcttagttttgtatccaacaggcataagcagtgaagttggtttaatatacattgccttaccattcattaaggcgtctgggaagtattgcataaggatgccaaacaaatggaactcatcatttgattacttctatgctgcgattgttgcaatgggaatctacgttccaggtagccctcacttgtacacatacatgcttgctcagaggaagaaagctctctccaaatcgaagagagagtaatgcaacatcagtaattttcattgattttgggtcaaacgtaggatatatacacatgtcatatcttggtttggattccaatataggtatcagggaaacg

SEQ ID NO: 236370 - DNA, 397 bp, Glycine max
ggcacaagtgagtttgttgatcgagataactagaaacagtgtgatgaaaatgaaggtccttgttttcttcgttgctacaattttggtagcatggcaatgccatgcgtacgatatgttccctctccgaatgaacactggctatggtgcccgtactccggaggtgaaatgcgcaagttggaggcttgctgtggaagcacacaacatctttggctttgagaccattcctgaagagtgcgttgaagcaacaaaggaatacatccatggcgaacaatatagatcagactccaaaacagttaaccaacaagcttacttttatgccagagacctcgaagttcatcccaaggacacatttgtgttcagtatagatggcaccgtactctctaatattccatactac

SEQ ID NO: 236371 - DNA, 464 bp, Glycine max
taccggtctatgattcccgggtccacccacgcgtccagaacgggttggcaaaaagacaacagaaggggactcaccacttcaaaacactcataacacaaagcacaaagcagagctcatccttgagttaaaaaatggcagcagcttcttccatggctctctcatccccatccttggctggcaaggccgtgaagctgggcccatcagccccagaagtgggaagggtgagcatgaggaagaccgtcaccaagcaggtctcctcaggaagcccatggtacggcccagaccgagtcaagtacttgggcccattctctggcgagcccccgtcctacctaaccggtgagttcccaggcgactacggctgggacactgctgggctttccgcagacccagaaaccttcgccaagaaccgtgaactcgaagtgatccactccaggtgggccatgctcggagccttgggctgcgtc

SEQ ID NO: 236372 - DNA, 347 bp, Glycine max
ggaacctttgcattcgattcattcaagattcagcagctgcgttttggaagcagagaccgaaatacttcgagatggcccgtacaaagcaaactgctcgtaagtcaactggaggaaaagctcccaggaagcagcttgcaaccaaggctgcacgtaagtctgcaccaacaactggtggtgtgaagaagcctcatcgttatcgccctggaactgttgctcttcgtgagattaggaaataccagaagagcactgagctcctaatcaggaagcttcctttccagatgttggctcgtgaaattgcccaggatttcaagactgatctgcgtttccagaaccatgctgtgcttgca

SEQ ID NO: 236373 - DNA, 350 bp, Glycine max
atcagtggtgccccccaggataacaacataatgctgtggaatgctgtcatatttggtcccgatgatactccatgggatggaggcacgttcaagttgacactccaatttactgaggactatccaaataaaccaccgactgtacgatttgtgtctcgcatgtttcatccaaatatttatgctgatggaagtatttgtttggatatattacaaaatcagtggagtcctatttatgatgtggctgctatactcacatctatccagtcattgctttgtgatcccaacccaaattctcctgcaaactctgaagcagctcgaatgtttagtgagaacaagcgtgagtacaatcgaag

SEQ ID NO: 236374 - DNA, 375 bp, Glycine max
gagggttgatgttgggcagtgagacgatgggggagagcgagaaaggagagcgatggagcggagcgatgacgaatctgacggagatggcctccaatctcgactctctccagaagcttctcctcaccaaagccgtcttcgtcgacgacgacaccttctccaaagcctccctcgccgccgaccaagcccgctccatcaagctcctccaccaacgagtccaaaccttggagagagaggtcgacgctgccatcaccgccgccgcccgcgctcgctccgagaagcgccaggccgaggccgctcagaaatccgccgaatcgcgcgctcaacaactcaccgccgaactcgagaacaccacaagtatcatcatcatcatcatca

SEQ ID NO: 236375 - DNA, 364 bp, Glycine max
gactcacaactccataacacaaggcagaaagcaagctcatcctagagttttaaaaatggcagcagcctcctccatggctctctcttccccatccttggctggcaaggccgtgaagctgggcccatcagcccccgaagtcgggagggtcagcatgaggaagaccgtcaccaagcaggcctcctccggaagcccatggtacggcccagaccgcgtcaagtacttgggcccattctctggcgagcccccgtcctacctcactggcgagttcccaggtgactaccgctgggacactgctgggctttcggccgacccagaaaccttcgccagaaaccgtgagctcgaagtgatccactccaggtggggc

SEQ ID NO: 236376 - DNA, 358 bp, Glycine max; identical to SEQ ID NO: 234733

SEQ ID NO: 236377 - DNA, 361 bp, Glycine max
ggctgtgagtgagacaccgatagatagagagcgcggcataacctaaacctatctttcttctctctctgtgtgtgcgcttcaacggcaaccagaagcagccatggccactgcgaggactgtgaaggatgtttcacctcatgagttcgttaaggcgtactcctctcacctcaagcgatccggcaagatggagctgccagagtggactgatattgtgaaaactgcaagatttaaggagttggctccttatgatcctgactggtactatgtcagagctgcttccatggcaagaaagatctacttgagaagaggacttggtgttggtgcctttcagaggatttatggtgggagcaagaggaatggt

SEQ ID NO: 236378 - DNA, 393 bp, Glycine max
gaggactgaagaagtgagggcaagaactttgcagcataccagcatgagcatgaagctcttccagctcttctccctactcccattcttcctctacttctacacaatagaagcagccgttggcccattgcaactgacacacccactggaccccttaactcagcaagaaatcaccctcgtcaaaaccatagtcctaaaaaagtaccccaagccagccaaccgcgtcttcttccactacgtcggcctcgacgatcctgacaaggccgccgtcctcaaatggctctcctccggcgcccggacgccgcgcaacgccttttccatcgccctcatcaatggccaaatccacgagctcaccgtcaaccttctctccccgcgaaacgttgtcttggacaaaat

SEQ ID NO: 236379 - DNA, 396 bp, Glycine max
  unsure (1)..(396): unsure at all n locations
ggcacaagtgagtttgttgatcgagataactagaaacagtgtgatgaaaatgaacgtccttgttttcttcgttgctacaattttggtagcatggcaatgccatgcgtacgatatgttccctctccgaatgaacactggctatggtgcccgtactccggaagtgaaatgcgcaagttggaggcttgctgtggaagcacacaacatctttggctttgagaccattcctgaagagtgcgttgaagcaacaaatgaatacatccatggcgaacaatatagatcagactccaaaacagttaaccaacaagcttacttttatgccagagacctcgaagtccatccncaagacacatttgtgttcagtatagatggcaccgtactctctaataatccacacta

SEQ ID NO: 236380 - DNA, 398 bp, Glycine max
ggaaggtaaaatgtcttggaggccctgaacgtacaggtagcgtaactattgttggtgctgtttcgccacctggaggagatttctcagatcctgtgacatctgcaaccctgagcatagttcatgttttctggggtttggacaaaaagcttgctcagaggaagcactttccttctgtaaactggcttatttcttattcaaaatactcaacggcacttgaaaccttttatgagcaatttgatccagattttatcaacattacgacaaaggctcgtgaagttctgcaaagggaagatgacctgaatgaaattgttcagcttgtgggcaacgatgctttagctgaaggagataagatcaccttagaaactgcaaagcttttgacagaggattatcttgctcaa

SEQ ID NO: 236381 - DNA, 364 bp, Glycine max
ggcacaagtgagtttgttgatcgagataactagaaacagtgtgatgaaaatgaaggtccttgttttcttcgttgctacaattttggtagcatggcaatgccatgcgtacgatatgttccctctccgaatgaacactggctatggtgcccgtactccggaggtgaaatgcgcaagttggaggcttgctgtggaagcacacaacatctttggctttgagaccattcctgaagagtgcgttgaagcaacaaaggaatacatccatggcgaacaatatagatcagactccaaaacagttaaccaacaagcttaattttatgccagagacctcgaagtccatcccaaggacacatttgtgttcagtata

SEQ ID NO: 236382 - DNA, 305 bp, Glycine max
ggcacaagtgagtttgttgatcgagataactagaaacagtgtgatgaaaatgaaggtccttgttttcttcgttgctacaattttggtagcatggcaatgccatgcgtacgatatgttccctctccgaatgaacactggctatggtgcccgtactccggaggtgaaatgcgcaagttggaggcttgctgtggaagcacacaacatctttggctttgagaccattcctgaagagtgcgttgaagcaacaaaggaatacatccatggcgaacaatatagattagactccaaaacagttaaacaacaag

SEQ ID NO: 236383 - DNA, 256 bp, Glycine max
ggcacaagtgagtttgttgatcgagataactagaaacagtgtgatgaaaatgaaggtccttgttttcttcgttgctacaattttggtagcatggcaatgccatgcgtacgatatgttccctctccgaatgaacactggctatggtgcccgtactccggaggtgaaatgcgcaagttggaggcttgctgtggaagcacacaacatctttggctttgagaccattcctgaagagtgcgttgaagcaacaaaggaatac

SEQ ID NO: 236384 - DNA, 367 bp, Glycine max
  unsure (1)..(367): unsure at all n locations
gattgttggcttgtgctctgctcgtgcctctagggttatcatatctccatttccatttcctctctctcagtttccaagaatcttaagctatgggaaagtcttacccaaccgtgagcgctgattaccagaaggccgttgagaaggcgaagaagaagctcagaggcttcatcgctgagaagagatgcgctcctctaatgctccgtttggcatggcactctgctggaacttacgacgtgagctcgaagaccggtggtcncttcggaaccataaagcacccctccgaactcgctcacggcgctaacaacggtcttgacatcgctgttaggcttttggagccactcaaagcggagtttcctattttgagcta

SEQ ID NO: 236385 - DNA, 371 bp, Glycine max
tgcatcaacactggtgaaggttgtcactttcaaaattccaacttcactcaaaattggtctcagccagatgcagaaagtgctggcttttgcctttggcccttctaaagttgtggctccagggattgcaacttcaggagcaaaaacgtctggcatcatgaaggcagcagtatctactgaaaagattcgagcagttgctcacagtgttatagcctctgccggaaaaaacagtatttcagtcatgagaagagctttctatgaaataatggggaagcgaaaggtgcagcctgttgggttcttgccttgggctacattggcaggctgcattggaacttcttcaggcttgcttttgtatggtgatgggattgagtgtg

SEQ ID NO: 236386 - DNA, 209 bp, Glycine max
gatacagaagtggtgttgatgatcgcgttaaatatgcaaactgtaacaaaaattacggaccttgatttcatcgatagccacaatttaggcagtcatggcaacaccactgcgtacgaggaagttcactcctccgacattgacactagaatatgatacctcttatctggatgagaatcgcttaacatgatggcttgctgtgcacacacaca

SEQ ID NO: 236387 - DNA, 340 bp, Glycine max
gacagcacaacgcaacacaacgcgcactctctcttttctctcttaacacaaaaaccctatcgttcttcgcggtttcgccgattctcgccatgccgaaagccagatccgacgccaaagccgccgatagccggttgaagcgcaagggcgctggtgctggaaggaagcaatcgaagaaagctgctaaggatcctaacaagccaaagagacctccaagcgctttcttcgttttcatgtccgagttcagagagcagtttaagaaggagcatcctaacaacaaatccgtcgctgttgtcggtaaagctggtggtgacaaatggaaatcgctgtctgatgctgaaaa

SEQ ID NO: 236388 - DNA, 367 bp, Glycine max
gactcaccacttcaaaacactcataacacaaagcacaaagcaaagctcatccttgagttaaaaaatggcagcagcttcttccatggctctctcatccccatccttggctggcaaggccgtgaagctgggcccatcagccccagaagtgggaagggtgagcatgaggaagaccgtcaccaagcaggtctcctcaggaagcccatggtacggcccataccgagtcaagtacttgggcccattctctggcgagcccccgtcctacctaaccggtgagttcccaggcgactacggctgggacactgctgggctttccgcagacccagaaaccttcgccaagaaccgtgaactcgaagtgatccactccagg

SEQ ID NO: 236389 - DNA, 400 bp, Glycine max
  unsure (1)..(400): unsure at all n locations
ggcacaagtgagtttgttgatcgagataactagaaacagtgtgatgaaaatgaaggtccttgttttcttcgttgctacaattttggtagcatggcaatgccatgcgtacgatatgttccctctccgaatgaacactggctatggtgcccgtactccggaggtgaaatgcgcaagttggaggcttgctgtggaagcacacaacatctttggctttgagaccattcctgaagagtgcgttgaagcaacaaaggaatacatccatggcgaacaatatagatcagactccaaaacagtttaacaaacaagcttacttttatgccagagacctcgaagtccatcncaaggacacatttgtgttcagtatagatggcaccgtactctctaatattccatactacaa

SEQ ID NO: 236390 - DNA, 397 bp, Glycine max
ggcacaagtgagtttgttgatcgagataactagaaacagtgtgatgaaaatgaaggtccttgttttcttcgttgctacaagtttggtagcatggcaatgccatgcgtacgatatgttccctctccgaatgaacactggctatggtgcccgtactccggaggtgaaatgcgcaagttggaggcttgctgtggaagcacacaacatctttggctttgagaccattcctgaagagtgcgttgaagcaacaaaggaatacatccatggcgaacaatatagatcagactccaaaacagttaaccaacaagcttacttttatgccagagacctcgaagtcgatcccaacgacacatttgtgttcagtatagatggcaccgtactctctaatattccatactac

SEQ ID NO: 236391 - DNA, 429 bp, Glycine max
  unsure (1)..(429): unsure at all n locations
agagtgccaaaagaccgacagaagggaaccaaaccaaaaagtgatttcagtgattgatcggtgttcacttgatctcatcataatcgtcagcgtcaattgaagaagatgccgatcagaaacatcgccgtcggaaggcctgaagaggcgactcaccccgacacgttgaaggcggctttggctgagttcatctcaaccttcatcttcgtgttcgccggctcaagctccggcatcgcctacaacaagctcaccgacaacggcgctgccacccctgccggcctcatctccgcctccatcgcccatgcattcgccctcttcgtcgccgtctccgtcggcgccaacatctccggcggccacgtcanacccgccgtcaccttcggcgccttcgtcggcggcaacatcaccttcctccgcggcatcgtctacgtcatc

SEQ ID NO: 236392 - DNA, 373 bp, Glycine max
gacaccaacaccaaaacaaacccactaagatggcttcctttgtatccttcctagtgctgcttcttgcagcccttatcctcatgcctcaagggcttgctacttactacaaaccaattaagaagccaccagtgtacaagcctccagtgtacaagccaccagtgtacaaaccaccggtttataagccaaaaccaccggtttacaagccgaaaccaccggtttacaagccaccatataagaggccaccatacaagaaaccaccttatggaaagtaccctccagtagaggacaacacccatgcctaaagcaagcaatgaggtctattatctacttaataaataagaggaactgctttgtgttttctagcattgtgatt

SEQ ID NO: 236393 - DNA, 351 bp, Glycine max
ggcacaagtgagtttgttgatcgagataactagaaacagtgtgatgaaaatgaaggtccttgttttcttcgttgctacaattttggtagcatggcaatgccatgcgtacgatatgttccctctccgaatgaacactggctatggtgcccgtactccggaggtgaaatgcgcaagttggaggcttgctgtggaagcacacaacatctttggctttgagaccattcctgaagagtgcgttgaagcaacaaaggaatacatccatggcgaacaatatagatcagactccaaaacagttaaccaacaagcttacttttatgccagagacctcgaagtccatcccaaggacacatt

SEQ ID NO: 236394 - DNA, 355 bp, Glycine max
aggcaagagacaagctcaagatgaaattgagaagcaattgagtgccaaaaaacagaagataaatgaggttgctcagaaacaaaaggaggcaaaggtgcaaaagaaggaaagtagttcagatgattcttcttcagaatctgaagatgagaaacctgcacccaaatctgctgttctttcaaaaaagatacctgctaagaatggtgctgcccctccaaagaaaggcaagctcgcctccagttcttctgaagatgactcctctgatgaggatggtgtgcgtgcaaagaagccacagaaaatggttgctgagaaacggaagaatggagcaactgtacaaaagaaaacagaagcggggggc

SEQ ID NO: 236395 - DNA, 356 bp, Glycine max
ggttgcggcacaaagcattcactgtgtcggaaaaagaagaagagaaaaaagatgagcgacggaggaaaacgacaaggtggaagagcgttgccgccgccgccaagaggccctccgcctcctcccccctctcgccctcgcctcgaacccgtcgatcgcgaaaagacatgtccgttactgctgcgagtgttcactaagattgggagtcaccattccatggaagactttgccgtcagaggcaaagagcccaaagacgaggttcagatttacacctggaaggacgctactctccgagaactcaccgatcttgtcaaagaagttgctccggctgcaaagaaaagaaacgccaaactctcctt

SEQ ID NO: 236396 - DNA, 316 bp, Glycine max
ggagagaagttattagggtttttgagtgcggcggtccaaacactcttctctgcagcttttgcctacaactcccttcaccatggctgaacaaaccgagaaagcttttctgaagcaaccaaaagtgtttctcagcacaaagaagactgggaagggaaagagacctggaaaaggtgggaaccgcttttggaagtccattgggcttggatttaagactcccagggaagccatcgaaggaacctatattgacaagaagtgccccttcactggcaatgtttccatccgtggccgtatcttggctggaacatgtcacagtgct

SEQ ID NO: 236397 - DNA, 459 bp, Glycine max
  unsure (1)..(459): unsure at all n locations
gtacggtctatnattccgggctcaccacgcgtcagagcgagaagacaacagaagggggcacaagtgagtttgttgatcgagataactagaaacagtgtgatgaaaatgaacgtccttgttttcttcgttgctacaattttggtagcatggcaatgccatgcgtacgatatgttccctctccgaatgaacactggctatggtgcccgtactccggaggtgaaatgcgcaagttggaagcttgccgtggaagcacacaacatctttggctttgagaccattcctgaagagtgcgttgaagcaacaaaggaatacatccatggcgaacaatatagatcagactccaaaacagttaaccaacaagcttacttttatgccagagacctcgaagtccatcncaaggacacatttgtgttcagtatagatggcaccgtactctctaatattccatactacanaaaa

SEQ ID NO: 236398 - DNA, 403 bp, Glycine max
cacgcgtcagaacgggtgcaaaaaaaacacaggcaggggaaaataagttgaacggcctttccaaaaacataccccttcaacacaacagtacgtcatctacaaggatctcgaagacccaggaacgcacgaaagccgggatctttcagaaaatggattcctaatcgaacggtgcataaccgcatggataagctcacactaaaccgtcaatttgggatgcaattcggttccttaagaagtatcgggaacgaattttggaatgtaataatatcgattcatacagatacagaataaatggttctctattgattcaaacgctctacctacgagataaggatagagaatgaggaaaaaaccgaggatttcacatagtacttttggtcgaaaaatcgatcagaattttttc

SEQ ID NO: 236399 - DNA, 358 bp, Glycine max; identical to SEQ ID NO: 234733

SEQ ID NO: 236400 - DNA, 327 bp, Glycine max
ggcacaagtgagtttgttgatcgagataactagaaacagtgtgatgaaaatgaaggtccttgttttcttcgttgctacaattttggtagcatggcaatgccatgcgtacgatatgttccctctccgaatgaacactggctatggtgcccgtactccggaggtgaaatgcgcaagttggaggcttgctgtggaagcacacaacatctttggctttgagaccattcctgaagagtgcgttgaagcaacaaaggaatacatccatggcgaacaatatagatcagactccaaaacagttaaccaacaagcttactcttatgccagagacct

SEQ ID NO: 236401 - DNA, 339 bp, Glycine max
agactttcgtttccacagcacgtggtaggaaatatcccgtgactgtcaacctatggcaaccagagaaaaatgcttttgaatgggctacatctttgaaagcccctcacacagaggatgcaattcgggttactcagtccacagcaaactttttcataagtgaagctaggaaatccacaaacacacctgatgctcaaaaagtgcgagataatctcgtctacaattacaaacctacttttggtggaacggctgggaaaggatatgatcaagtgtatctcttcgaataattctatctgtaggaggtgtccttgaatttgattttatgcacaataaattatgaac

SEQ ID NO: 236402 - DNA, 364 bp, Glycine max
gactcaccacttcaaaacactcataacacaaagcacaaagcaaagctcatccttgagttaaaaaatggcagcagcttcttccatggctctctcatccccatccttggctggcaaggccgtgaagctgggcccatcagccccagaagtgggaagggtgagcatgaggaagaccgtcaccaagcaggtctcctcaggaagcccatggtacggcccagaccgagtcaagtacttgggcccattctctggcgagcccccgtcctacctaaccggtgagttcccaggcgactacggctgggacactgctgggctttccgcagacccagaaaccttcgccaagaaccgtgaactcgaagtgatccactcc

SEQ ID NO: 236403 - DNA, 360 bp, Glycine max
atcccttcgaagtattgttcatatatgggtcatgagcaagaagggccctctctatgttgcaatgtttaagccaattggaatcatctttgcggtcatcatgggaattgcctttcttggtgactctatctatcttggaagtgtgcttggagcatccatagtgggtattggtttttatgctgttatttgggggaaaagccaagagcaagcaaaggaagagtgtgaagtttatgatgactcggaatcatactcacgcgttgtccctcttttgaagaacaagagaatggaggaatagaatcataacaatcatttaatttctctagctttaatataaatgtctcatgtagtattttgaaaacacat

SEQ ID NO: 236404 - DNA, 396 bp, Glycine max
  unsure (1)..(396): unsure at all n locations
gacattgactgaagccagcgagtgagcgagcgagcgaggtagggttttcgttgttcccccgtctttgaattcagttcgcgacgatggggtccatccccgatccaggcgagttgagcgagttgactcagccgagcttcgacgagttccagcgccaaacttccctcatgaccagctgcaccctcctctggaaggagctctccgaccacttctcctccctcgagcaagacctcaaccacaaatccgaagccctcaaacgcaagattcgcaccctcgacaacactacttccgactcnctccgcctcctcgatcgccgcgaaacctccctcgacgccacgctccagatcgccctccgcacgctcgacacgcgccgcaccgctgccctctccgccctcctca

SEQ ID NO: 236405 - DNA, 398 bp, Glycine max
ggaacctttgcattctattcattcaagattcagcaagtgcgttttggaagcagagaccgaaatacttcgagatggcccgtacaaagcaaactgctcgtaagtcaactggaggaaaagctcccaggaagcagcttgcaaccaaggctgcacgtaagtctgcaccaacaactggtggtgtgaagaagcctcatcgttatcgccctggaactgttgctcttcgtgagattaggaaataccagaagagcactgagctcctaatcaggaagcttcctttccagaggttggttcgtgaaattgcccaggatttcaagactgatctgcgtttccagagccatgctgtgcttgcattgcaagaggctgctgaggcataccttgttgggctctttgaggacactaac

SEQ ID NO: 236406 - DNA, 389 bp, Glycine max
ggcacaagtgagtttgttgatcgagataactagaaacagtgtgatgaaaatgaatgtccttgttttcttcgttgctacaattttggtagcatggcaatgccatgcgtacgatatgttccctctccgaatgaacactggctatggtgcccgtactccggaggtgaaatgcgcaagttggaggcttgctgtggaagcacacaacatctttggctttgagaccattcctgaagagtgcgttgaagcaacaaaggaatacatccatggcgaacaatatagatcagactccaaaacagttaaccaacaagcttacttttatgccagagaactcgaagtcaatcccaaggacacatttgtgttcagtatagatggcaccgtactctctaatattc

SEQ ID NO: 236407 - DNA, 371 bp, Glycine max
gaccacaagcaagagcacttgttcaccaattacgagttctgaagaaattgagtatatatctatccatttgttttgaaaatggcttccaagagtattgcatgcattgttcttctctccctcaacctccttttctttaccatggtcagccccaacaccattgccccttcccctgcgatacaaccaccaccaccgccacgtgagtgtcccgagttgggtctttgcctcgatattttgggtttgggtcaagggtctccatcaaaagattgctgccccatcctccgtggacttattgaggttggtgccattgtatgcatttgcgacaaactcaggtccgctacattaggaatcaacatagatgttaatcttgccct

SEQ ID NO: 236408 - DNA, 363 bp, Glycine max
ggaacctttgcattctattcattcaagattcagcaagtgcgttttggaagcagagaccgaaatacttcgagatggcccgtacaaagcaaactgctcgtaagtcaactggaggaaaagctcccaggaagcagcttgcaaccaaggctgcacgtaagtctgcaccaacaactggtggtgtgaagaagcctcatcgttatcgccctggaactgttgctcttcgtgagattaggaaataccagaagagcactgagctcctaatcaggaagcttcctttccagaggttggttcgtgaaattgcccaggatttcaagactgatctgcgtttccagagccatgctgtgcttgcattgcaagaagctgctg

SEQ ID NO: 236409 - DNA, 358 bp, Glycine max; identical to SEQ ID NO: 234733

SEQ ID NO: 236410 - DNA, 363 bp, Glycine max
ggcacaagtgagtttgttgatcgagataactagaaacagtgtgatgaaaatgaaggtccttgttttcttcgttgctacaattttggtagcatggcaatgccatgcgtacgatatgttccctctccgaatgaacactggctatggtgcccgtactccggaggtgaaatgcgcaagttggaggcttgctgtggaagcacacaacatctttggctttgagaccattcctgaagagtgcgttgaagcaacaaaggaatacatccatggcgaacaatatagatcagactccaaaacagttaaccaacaagcttacttttatgccagagacctcgaagtccatcccaaggacacatttgtgttcagtat

SEQ ID NO: 236411 - DNA, 331 bp, Glycine max
  unsure (1)..(331): unsure at all n locations
ggaaaacaaaacaatccttggaacaaaacaaanaaagacaacacaaagaaaaacgtcttaataaacggtcttctctgaaaaacctgatttcttctcttcttctcttctctttcgtttcgatcttcgatctctgaaaatgagagagtgcatttcaatccacatcggtcaggccggtattcaggtcggaaacgcctgctgggagctctactgcctcgaacacggcattcagcctgatgggcagatgccaagtgataagactgttggtggacgtgatgatgctttcaacaccttcttcagtgaaactggggctggaaagcacgtgcctcgtgcg

SEQ ID NO: 236412 - DNA, 402 bp, Glycine max
gaaggtgcaagagtttgttgtgagctataagctagtttatcgtgaggagaatatgaagttgtttgttttctttgttgctgcagtagttttggtagcatggccatgccatggcgcatgctaccaaaggttccctctccgaatgaaaactggctatggtgagcgttcttcggaggtaaaatgcgcaagttttaggcttgctgtggaagcacacaacatccgagcctttaaaaccattcctgaagagtgcgttgaaccaacaaaggactacattaatagcgaacaatttagatcagactctaaaacagttaaccaacaagctttcttttatgctagtgaacgcgaagtccatcacaacgacatatttatattcggcatagataacaccgtactctctaatatcca

SEQ ID NO: 236413 - DNA, 432 bp, Glycine max
cgaaccacgccataatggtggcaaaaagacaacggaaggggactttcaattctcttcaaacctaaggcagcatcgctattcgcttcattcaagggcgtttgcccaaccaagaaaccgtggattacccaattttcaaacccgttaacgtcggaaatgggggcacaggaaagaaaacctttgtgaaaaggcatctcaccggataattcgagaggaaatatgagccatacatcggttgtggatgttcacccattggattttttcacaaactgtggaaagattcgattttactgctgggatactgctggacatgagaaatttggtggcctcagagatggatactatatccatggacaatgtgctattaacatgtttgatgttactgccgggctacatacataaatgttcccactggcaacgtgatctttgcacggt

SEQ ID NO: 236414 - DNA, 327 bp, Glycine max
ggcacaagtgagtttgttgatcgagataactagaaacagtgtgatgaaaatgaaggtccttgttttcttcgttgctacaattttggtagcatggcaatgccatgcgtacgatatgttccctctccgaatgaacactggctatggtgcccgtactccggaggtgaaatgcgcaagttggaggcttgctgtggaagcacacaacatctttggctttgagaccattcctgaagagtgcgttgaagcaacaaaggaatacatccatggcgaacaatatagatcagactccaaaacagttaaccaacaagcttacttttatgccagagacct

SEQ ID NO: 236415 - DNA, 402 bp, Glycine max
gactcgtaagaagaagacattggggagtggtgcaccgtgcactgctctaaggtcctataaatttgcctagggtttatattaatcttttcactgttcctcctactttccaagcttcctggcacactttgataagttttttgtgcagctccaatggcaacctctcaaatcacttcatcattgaggaacttgcctgcatttgaaaggtttcaaccttcaacgcttcgatttccttctgctgggcacgtcagaattgggacactgacacaaacctcgtttccctctttcgttgtcaaagccgccactgttgtcgcccccaagcacaccactgttaagcctctgggtgataaagtactggggaaaatttagggttcctagggaaaaaactgcaggtgggattttact

SEQ ID NO: 236416 - DNA, 347 bp, Glycine max
gattggcattagatggcatgccacaatggttgtccctcttaggcactttcttgttttctctctcaccctcatatccatcatcttccacacccatggagcgttctctgagcaatcaataatcaagttacccacagaccaaccaagggtagagaaactgacccacttgcattttttctaccacgacatcttagagggcaagaacatcacggtggtgaaaatcatcgagccatcagcgagcgaggttcgtgaagcaactgggtttggaaccactttcatgatggacaatgttttgaccgagggtccagagctgagctcgaagcacgttgggagggctcaagggctgtttg

SEQ ID NO: 236417 - DNA, 401 bp, Glycine max
ggacaagtgagtttgttgatcgagataactagaaacagtgtgatgaaaatgaaggtccttgttttcttcgttgctacaattttggtagcatggcaatgccatgcgtacgatatgttccctctccgaatgaacactggctatggtgcccgtactccggaggtgaaatgcgcaagttggaggcttgctgtggaagcacacaacatctttggctttgagaccattcctgaagagtgcgttgaagcaacaaaggaatacatccatggcgaacaatatagatcagactccaaaacagttaaccaacaagcttacttttatgccagagacctcgaagtccatcccaaggacacatttgtgttcagtatagatggcaccgtactctccaataatccatactacaaaaa

SEQ ID NO: 236418 - DNA, 357 bp, Glycine max
tacgacagaaggggaaggtgcaagagtttgttgtgagctataagctagtttatcgtgaggagaatatgaagttgtttgttttctttgttgctgcagtaattttggtagcatggccatgccatggcgcaagctaccaaatgttccctctccgaatgaaaactggctatggtgagcgttcttcggaggtaaaatgcgcaagttttaggcttgctgtggaaacacacaacatccgagcctttaaaaccattcctgaagagtgcgttgatgcaacacaggaatacatccatggcgaacaatatagatcagactccaaaacagttaaccaacaagcgtacttttatgccacagacctcgaag

SEQ ID NO: 236419 - DNA, 347 bp, Glycine max
  unsure (1)..(347): unsure at all n locations
gcacaagtttgttgagatagctagaagcaataagatgaaaatgaaagtgcttgttttgtttgttgctacagttttggtagcatatgaatgccatggctcagactaccagaagttccctctccaaatgaaaactgggtttggtgggcaatacagcaatgaggtggcatgtgccagttggaggcttggcgtggaagcaaacaacgtagtcaagtggcaaactgttcctgcagcttgcggagagtacatagctgactacgttctangagaccaatatagatcagattccaaaacagttaaccaacaagcttatttctatgctaaatccctcaaactcaccaacaaagatg

SEQ ID NO: 236420 - DNA, 358 bp, Glycine max
ggcacaagtgagtttgttgatcgagataactagaaacagtgtgatgaaaatgaaggtccttgttttcttcgttgctacaattttggtagcatggcaatgccatgcgtacgatatgttccctctccgaatgaacactggctatggtgcccgtactccggaggtgaaatgcgcaagttggaggcttgctgtggaagcacacaacatctttggctttgagaccattcctgaagagtgcgttgaagcaacataggaatacatccatggcgaacaatatagattagactccaaaacagttaaccaacaagcttacttttatgccagagacctcgaagtccatcccaaggacacatttgtgttc

SEQ ID NO: 236421 - DNA, 359 bp, Glycine max
gaggaacaagaagcgaaaatataacaaataatttgtactttcatcaaaacaaaatcccgttgtatttttctcagatggctcgaacgaagcaaacggcccgcaagtccaccggcggcaaggcgccgcggaagcagctggcgactaaggcggctcgcaagtcggctccggcgaccggcggcgtgaagaagccgcacagattcaggccgggaaccgtggcgctgcgcgagatccggaagtatcagaagagcacggagctactcatccggaagcttccgttccagcgcttggtccgcgagatcgcgcaggacttcaagaccgacctccggttccagagctccgccgtctccgcgctccaagaa

SEQ ID NO: 236422 - DNA, 352 bp, Glycine max
gaaactacttgttcttcgactccatactcgttgggtagttgctgcaggtggcttcttaacacattcagtgcccttatatgcaacaggtgttgaagtgtcaccactctgttcgtatgctggtgaaaacctggaaccaatatgtcgaggaagaacatttcatgcaccttgtgagatctcgttctagttccaccctgtttgtgcggcttttttgtgacttacactacaatgagggagttctcagtcccatacatgttgcaagattactttgcgtatgccactcatcattcacagttatcaatgtatattatcttctccaatctgtttctgattggtttgtggttttttccttttt

SEQ ID NO: 236423 - DNA, 329 bp, Glycine max
ggccattgttgttgccattatcatccgcagctgcttttattcgcaccgcaaacagtgagccatggccgtcggaaagaacaagcgcatctccaaggggaagaagggtggcaagaagaaggcagctgatccctttgccaagaaggattggtatgacattaatgctccttctgtttttcaagtgaaaaatgttggcaaaaccctcgtctctcgtactcagggtaccaagattgcttctgaaggactcaagcatagagtgtttgatgtctccttggctgatcttcaaggggatgatgatcatgcattcaagaagattacgttgagagctgaac

SEQ ID NO: 236424 - DNA, 349 bp, Glycine max; identical to SEQ ID NO: 235961

SEQ ID NO: 236425 - DNA, 339 bp, Glycine max
ggttcaaagcacgccgtgtttcgctgtctctcccatcctttcgcattctcaatacccttttgatttgtgaaaggaaagcaaacatggttgatcaggtccaacaccctacaatcatggacaaggttgctggtcagctccatctccgttctggtctttcatctggtattagaagttatgatggagcctaccgccacccagctatgtaccaaagaccctcttttgggaattactcgaatgctgcattgcagtttcctgtgatgcccacatgcaaagctaccatggatttgtctgctactgcaacatctgcctcaaccgtccttgttgctgctccagcagaga

SEQ ID NO: 236426 - DNA, 394 bp, Glycine max
gagggtttcagatccttaatcggccaggaccaaacagcatccgcggcagcgacggtaaccctccaacaacaacacttccgctgcgaaaaatgtctctggtggcgaacgaggatttccagcacattctgcgtgtgctgaacaccaacgtggatgggaagcagaagataatgttcgcaatgacctccatcaagggtattggaaggagattcgccaacatcgcttgcaagaaggctgatgttgacatgaacaaaagggctggtgagttgactgctgctgagttggatagtgtgatgactgtggtggcgaaccctaagcagttcaagattccagactggtttttgaacagaaagaaggattacaaggatggcaaatactctcaagttgtgtctaatgc

SEQ ID NO: 236427 - DNA, 396 bp, Glycine max
gagaagaaagcataagatatggcaatgttcacgtaccacgttgaaacggttcaatcatggttggcactgagcagacttcacatactgatccacttagtggcagtgttgtcgctgtgttactaccgcataactcacttgttactggaacctccaacagcgccatggcttctgatgaccgtagcggagcttcttctctcggtgctctggttcttcaaccaagccttccggtggcggacggtgtcgcggagcgtcatgacggataagctgccgacggatgagaagctgccggggcttgacatcttcgtgtgcacgctggattccgaaaaacgagcccaccgtggacgtcatggaacagatcatctccgcagtggccatggattacccctccgacaagct

SEQ ID NO: 236428 - DNA, 293 bp, Glycine max
ggcacaagtttgttgagatagctagaagcactaagatgaaaatgaaagtgcttgttttgtttgttgctacagttttggtagcatatgaatgccatggctcagactaccataagttccctctccaaatgaaaactgggtttggtgggcaatacagcaatgaggtggcatgtgccagttggaggcttggcgtggaagcaaacaacgtagtcaagtggcaaactgttcctgcagcttgcggatagtacatagctgactacgttctaagagaccaatatagatcagatttccaaaca

SEQ ID NO: 236429 - DNA, 410 bp, Glycine max
cggtctagaattcacgggccgacgcacgcgtcagatgtataagcatggacttctagcatactattgtttgattaaccaagttcttccatattggttgaggaagcctcgagtcaatatttagtttttgctgccatctgtgggtttctgatggatgatgccgggcatcgtgaaaatggaaggcacaaagcagcagatcaatataaatctgctcagggacagtggttgatgcaacatcagccttccatgaagcagattatggcaattatggctgaaagagatgtagccattcaagaaagaaatctggccatttccgagaaaaaagcagcatatgctgagcgcgatatggcattcatgcagcgagatgctgcaattgctgaacgtaataatgcaattttggaacgagataatgc

SEQ ID NO: 236430 - DNA, 341 bp, Glycine max
gacaacacagaacaaaaacatagaaaaaaaaaaacccttagccaacacaaccatcatggccacctctgctattcagcaatcagcatccactggtcaaactgctctgaagcagctcaatgagttcgtccgcaagaccggtggcgccggcaaaggtcgcactaacatgcgccgcaccgtcaagagtgctcctcagagcatttggtatggccctgaccgtcccaagtacttgggtccattctcggagcagattccatcatacttgaccggagaattccctggtgactacggatgggacactgctggattatcagctgacccggaaaccttcgccaggaaccggg

SEQ ID NO: 236431 - DNA, 353 bp, Glycine max
  unsure (1)..(353): unsure at all n locations
ggcacaagtttgttgagatagctagaagcaataagatgaaaatgaaagtgcttgttttgtttgttgctacagttttggtagcatatgaatgccatggctcagactaccagaagttccctctccaaatgaaaactgggtttggtgggcaatacagcaatgaggtggcatgtgccagttggaggcttggcgtggaagcaaacaacgtagtcaagtggcaaactgttcctgcagcttgcggagagtacatagctgactacgttctangagaccaatatagatcagattccaaaacagttaaccaacaagcttatttctatgctaaatccctcaaactcaccaacaaagatgtcctt

SEQ ID NO: 236432 - DNA, 356 bp, Glycine max
gacaagtgagtttgttgatcgagataactagaaacagtgtgatgaaaatgaaggtccttgttttcttcgttgctacaattttggtagcatggcaatgccatgcgtacgatatgttccctctccgaatgaacactggctatggtgcccgtactccggaggtgaaatgcgcaagttggaggcttgctgtggaagcacacaacatctttggctttgagaccattcctgaagagtgcgttgaagcaacaaaggaatacatccatggcgaacaatatagatcagactccaaaacagttaaccaacaagcttacttttatgccagagacctcgaagtccatcccaaggacacatttgtgttc

SEQ ID NO: 236433 - DNA, 395 bp, Glycine max
gataatagaaggttgtggggttagggctttagagtgtcttttcttctttttcttcgtcttcttcttcgttgaatcgcgattgttctgttgtgcgactgaaagaagagagatcgaaaatggcgttggctttcgacgagttcggaaggcctttcataatcctgaaggaacaggagcagaagagcagacttcgaggtttggacgctcagaaagccaacatctccgccggcaaagccgtcgctcgcatcctccgaacctccctcggccccaaaggcatggacaagatgctccagagccccgacggcgacgtcactatcacgaacgaacggtgcacgatccttgaccaggtggacgtggacaaccaaatcgcgaagctgatggtggagctctcgcggagt

SEQ ID NO: 236434 - DNA, 339 bp, Glycine max
gaaggtgcaagagtttgttgtgagctataagctagtttatcgtgaggagaatatgaagttgtttgttttctttgttgctgcagtagttttggtagcatggccatgccatggcgcaggctaccaaaggttccctctccgaatgaaaactggctatggtgagcgttcttcggaggtaaaatgcgcaagttttaggcttgctgtggaagcacacaacatccgagcctttaaaaccattcctgaagagtgcgttgaaccaacaaaggactacattaatggcgaacaatttagatcagactctaaaacagttaaccaacaagctttcttttatgctagtgaacg

SEQ ID NO: 236435 - DNA, 349 bp, Glycine max
ggcacaagtgagtttgttgatcgagataactagaaacagtgtgatgaaaatgaaggtccttgttttcttcgttgctacaattttggtagcgtggcaatgccatgcgtacgatatgttccctctccgaatgaacactggctatggtgcccgtactccggaggtgaaatgcgcaagttggaggcttgctgtggaagcacacaacatctttggctttgagaccattcctgaagagtgcgttgaagcaacaaaggaatacatccatggcgaacaatatagatcagactccaaaacagttaaccaacaagcttacttttatgccagagacctcgaagtccatcccaaggacaca

SEQ ID NO: 236436 - DNA, 370 bp, Glycine max
gacacacagctattcctcttaagcttgctactgagtttccacactgcataccttaggtcttccgaattcgaagttaatttgcaagatggctaaggaaaaggctcagatcaacattgtggtggttggtcatgtggaccctgaggaggcaaccaccattaacgagctgaagaagcctgttgtggagaaagaagctccagggcatgccgtatgagggcatgcacgtacggcctcggaggggaaccagaaaattatgttaacaaaataatctggaaccctaatgtatcagtgtcatcatcagtgtgtagtttaagctagctttgctatggttacgttctttgagatgagagtcctgatgaacaattccaatccg

SEQ ID NO: 236437 - DNA, 367 bp, Glycine max
gactctcacttctcttcacacactgagacacacagagagagaaaaataaagggtgtgatgggtgtcttactgagtgttttctttttataatgaacaaagaactgcacaccctcttcttcaccgaagaagaagatggcaattcagcaccacaatgaccaactagagcataatgaaaatgtctcatctgtccttgatgccctttactgtgacgaaggaaagtgggaagaggaagaggaggagaaagaagaagaagaagatgaaggtgaaaatgaaagtgaagtgacaacaaacactgcaacttgtcttttccctctgctcttgttggagcaagacttgttctgggaagatgaggaactaaactccaacc

SEQ ID NO: 236438 - DNA, 351 bp, Glycine max
gacacaccgtttgttctattcttaactcaacttctgctacccactctcttcttccaagtccaaccacgcttttctctacagtcatgggcaaggtcaagatcggaatcaacggatttggaagaattggccgtttggttgccagagtcgctctgcaaagagacgatgtggagctcgttgccgttaacgaccctttcattaccaccgattacatgacatacatgtttaaatacgacagtgttcacggacactggaagcatcacgatgtcaccgttaaggacgagaagacccttctcttcggtgacaagccagtcactgtttttggacacaggaatcctgaagagatccatgggg

SEQ ID NO: 236439 - DNA, 345 bp, Glycine max
ggcacagagagagagagagagagagtgagggagagagagtgaggcttcttctacccagatttgtttcattttaaccaaagaagaatctctcagaaatggcgtcaagagcaattgttcaacaacaacaagccagaggtgaagcagtagtaaggggaggaaaacagcagaagaagaacggtgttgcggatggaaggaaccgcaaggcattgggtgacattgggaatttggccaatataagaagtgccgttgaagtcaagccaaatcgcgctatcacaaggagttttggtgcgcaattacttgccaatgcacaagcggcaacagctgctgggaataaccagaagcaag

SEQ ID NO: 236440 - DNA, 339 bp, Glycine max
gaaggtgcaagagtttgttgtgagctataagctagtttatcgtgaggagaatatgaagttgtttgttttctttgttgctgcagtagttttggtagcatggccatgccatggcgcaggctaccaaaggttccctctccgaatgaaaactggctatggtgagcgttcttcggaggtaaaatgcgcaagttttaggcttgctgtggaagcacacaacatccgagcctttaaaaccattcctgaagagtgcgttgaaccaacaaaggactacattaatggcgaacaatttagattagactctaaaacagttaaccaacaagctttcttttatgctagtgaacg

SEQ ID NO: 236441 - DNA, 383 bp, Glycine max
gaaggtgcaagagtttgttgtgagctataagctagtttatcgtgaggagaatatgaagttgtttgttttctttgttgctgcagtaattttggtagcatggccatgccatggcgcaggctaccaaaggttccctctccgaatgaaaactggctatggtgagcgttcttcggacgtaaaatgcgcaagttttaggcttgctgtggaagcacacaacatccgagcctttaaaaccattcctgaaaagttcgttgaaccaacaaaggactacattaatggccatcaatttagatcagactctaaaacagttaaacaacaatgctttcttttatgctagtgaacgcgaagtccatcactacgacatatttatattccgcattagatac

SEQ ID NO: 236442 - DNA, 368 bp, Glycine max
ggcagtgatagatataagaaaatgtggcttgtgcagctctcaaccccatttctgaacggacatggtcactccaccacccttctctccaagcacagttcggcggtgactcagacccactgggccccagcgagtttcctgcctcaaatcaatgcgatgaagacaatgcacgggagagtggtgtgctccaccagcgacaagactgtggcagtggaggtggtgcggctggcccctcacccaaagtacatgaggcgcgtgaggaagaagaagaagtaccaggcccacgactccgataaccaactcaaagtctgcgacatcgtccagctccagaagaccatgcccatcagcacgaacaatgcctttctcgcact

SEQ ID NO: 236443 - DNA, 351 bp, Glycine max
ggtgcacaagtgagtttgttgatcgagataactagaaacagtgtgatgaaaatgaaggtccttgttttcttcgttgctacaattttggtagcatggcaatgccatgcgtacgatatgttccctctccgaatgaacactggctatggtgcccgtactccggaggtgaaatgcgcaagttggaggcttgctgtggaagcacacaacatctttggctttgagaccattcctgaagagtgcgttgaagcaacaaaggaatacatccatggcgaacaatatagatcagactccaaaacagttaaccaacaagcttacttttatgccagagacctcgaagtccatcccaaggacaca

SEQ ID NO: 236444 - DNA, 358 bp, Glycine max
ggcacaagtgagtttgttgatcgagataactagaaacagtgtgatgaaaatgaagggccttggtttcctcgttgctacaattttggtagcatggcaatgccatgcgtacgatatgttccctctccgaatgaacactggctatggtgcccgtactccggaagtgaaatgcgcaagttggaagcttgctgtggaagcacacaacatctttggctttgagaacattcctgaagagtgcgttgaagcaacaaaggaatacatccatggcgaacaatatagatcagactccaaaacagttaaccaacaagcttacttttatgccagagacctcgaagtccatcccaaggacacatttgtgttc

SEQ ID NO: 236445 - DNA, 341 bp, Glycine max; identical to SEQ ID NO: 235137

SEQ ID NO: 236446 - DNA, 403 bp, Glycine max
ggcacaagtgagtttgttgatcgagataactagaaacagtgtgatgaaaatgaaggtccttgttttcttcgttgctacaattttggtagcatggcaatgccatgcgtacgatatgttccctctccgaatgaacactggctatggtgcccgtactccggaggtgaaatgcgcaagttggaggcttgctgtggaagcacacaacatctttggctttgagaccattcctgaagagtgcgttgaagcaacaaaggaatacatccatggcgaacaatatagatcagactccaaaacagttaaccaacaagcttacttttatgccagagacctcgaagtcccatccaaggacacatttggtgtcaattaaaaatggaacggtactctctaatattccatactacaaaaa

SEQ ID NO: 236447 - DNA, 346 bp, Glycine max
aggggaatttcccaaggggcttaataccccccccaacttgtgccaacccttaggtcaaagtataaccatccattccaaccttccccccttccccctcaacccaaacccaaacccccaacccggttccccccccgtaccgttcataaaaggaggaaatccaaaaaccgaatctagaaaacccgttccaaaacttgcggtaattaaaaaggaagccgcaacaaaggctaggaaacccgccggaaagggaaaggcaccgaaggaccctataagcccaaaaaggctccaaattgcttcctccgttttcatggaggatttcaggaaggtattcacaaaagagaatcctgaa

SEQ ID NO: 236448 - DNA, 409 bp, Glycine max
gatcattctcatatcctcaatcaccccccctcgcactcgctcttcccttcctctggtggcgacaatgtcgactcctgctaggaagaggctgatgagagacttcaagaggctgcaacaagacccgcctgcagggatcagtggtgccccccaggataacaacataatgctgtggaatgctgtcatatttggtcctgatgatactccatgggatggaggcacgttcaagttgacactccaatttactgaggactatccaaataaaccaccgactgtacgatttgtgtctcgcatgtttcatccaaatatttatgctgatggaagtatttgtttggatatattacaaaatcagtggaatcctaattatgaagttgctggcaaaatccacatctatccagtcattgctttgtga

SEQ ID NO: 236449 - DNA, 345 bp, Glycine max
ggtacgcagcttcatccccaacgcgtgcatagcagagtcagagacagagacgcagccatggggcggagacctgcgaggtgttataggcaaattaagaacaagccataccccaagtcacgtttctgccgtggtgttcctgatcccaagatcaggatttatgatgttggtatgaagaagaagggtgttgatgagtttcctttctgtgtccatctggttagttgggagaaggaaaatgtttcaagtgaggccctggaagctgctcgcattgcttgcaacaagtacatggccaaatttgctggaaaggatgctttccacttgagagtcagggtgcacccattccatgtt

SEQ ID NO: 236450 - DNA, 360 bp, Glycine max
gacagcatatatatcaataatctattttatactatacctacattttgataattttctttgtagttgatagccatggctacccgtggaaagcttgaggttgacattgatctcaagtccaacgcagacaagtactggcaaacccttaggaattctactgaaatattccctaaggccttcccacatgattacaaaagcattgaggttcttgagggtgatggcaagtctcctggttctatccgccacataagttatggtgaaggttcaccacttgtgaaatcatcctttgagaagattgaggctgttgatgaggaaaagaaggtagtgtcgtacactatcattgatggggaactcctccaacaa

SEQ ID NO: 236451 - DNA, 349 bp, Glycine max
gatataagatcgattatactcacaagttttgttctttcctagcaattcggcgcaatcgtcttctgcttcaaggaaggagagcttgttattctctatcaacaaggaaaatgtcagggtatgattgtttttctctctgaagaggttgttgttgcagctgagccagctgctgccatcccatgcgagcctatggacatcatgactgccttgcaacttgtgcgcagaaaatctctggcttatggtggtcttgcacgatgccttcacgaacgggcaaaagtgattgataagcatgctgcacaactctgtgttctagcagaagactgtgaccagcctgactatgttaaactggtta

SEQ ID NO: 236452 - DNA, 356 bp, Glycine max
gacgattactaccaagtgaaaaagcaattaactaagcatatatagcgtgtaagacagtgagaaaaaaagtgttgtgtagagagaaatggctaggtggtgcatcttggtggttcttgcccttgtcgtggttgcaagtgccagaaacatgcccaatgacgcaggtttggaggaccagaagaacttcctcgggtatgggttctctggagttggcaacaatgggcttccctttggaggagtgggttctgggtttgatggtaatatgggtgggccttctgggctcggtggatttggaggattcggtgggcctagcgggctcggaggtcttggtaacggtgaagggcccaaccttcctctcc

SEQ ID NO: 236453 - DNA, 373 bp, Glycine max
  unsure (1)..(373): unsure at all n locations
ggcagccaaagaaaagaaaatcctcaattttctgagcagccaaacactctctctctgtctctcgaaaattctcagtttgcagagaaaatctgaatcatgtcgtggcaagcgtatgtcgacgatcaccttctgtgtgacatcgaaggtaagcacctcactcacgctgctatcatcggccaagacggcagcgtttgggctcagagtaccgacttccctcagttcaaatctgaggagataactgccatcatgaatgactttaatgagcctggattacttgctccaactggattgtatctcgggtggcacaaatatatggtcatccaaggtgaacccggtgctgtcattcgagggaagaangggtctggtggtgtta

SEQ ID NO: 236454 - DNA, 344 bp, Glycine max
  unsure (1)..(344): unsure at all n locations
tgggaccacattccaaaacacaaacacatacattgtagtatcacttttgtctcggaatttgttcttttgagttacggcaagcttaaaggttgcatgtgtggttttgatgtgcatggctgtgatgattgcaccaatcatggtgcaagccgtgtcatgcaatgatgtttctgtgaacctagcaccgtgcctatcttatctgatgcanggtggacatgttccagaatcgtgctgtaacggagtgaggaacattctgggttctgccagcaccatctttgacaaacataccgtgtgcaaatgtcttcagcaagctggcaatatatatggcatcaacgactaatacgctc

SEQ ID NO: 236455 - DNA, 350 bp, Glycine max
ggaagcgcagacctaggatttcggccgtttgctccccaaggaaagaagcagagtgtttcttttgaaatcagctagaaaagatgtcaggtgaagaggtagctgttgcagctgaggcacctgctgcttcaattccaggtgagccaatggacatcatgactgctctacagcttgtgctgagaaaatctctggcctatggtggtcttgcacgaggtcttcatgaaggtgctaaggtgatcgagaagcatgctgcacagctctgcgttctagcagaagattgtgaccaacctgattatgtgaaactggtgaaggctctttgtgcagagcacaatgttagccttttgacagttcca

SEQ ID NO: 236456 - DNA, 358 bp, Glycine max
ggcacaagtgagtttgttgatcgagataactacaaacagtgtgatgaaaatgaatgtccttgttttcttcgttgctacaattttggtagcatggcaatgccatgcgtacgatatgttccctctccgaatgaacactggctatggtgcccgtactccggacgtgaaatgcgcaagttggaagcttgctgtggaagcacacaacatctttggctttgagaccattcctgaatagtgcgttgaagcaacaaaggaatacatccatggcgaacaatatatatcagactccaaaacagttaaccaacaagcttacctttatgccagagacctcgaagtccatcccaaagacacatttgtgttc

SEQ ID NO: 236457 - DNA, 405 bp, Glycine max
gactcaccacttcaaaacactcataacacaaagcacaaagcaaagctcatccttgagttaaaaaatggcagcagcttcttccatggctctctcatccccatccttggctggcaaggccgtgaagctgggcccatcagccccagaagtgggaagggtgagcatgaggaagaccgtcaccaagcaggtctcctcaggaagcccatggtacggcccagaccgagtcaagtacttgggcccattctctggcgagcccccgtcctacctaaccggtgagttcccaggcgactacggctgggacactgctgggctttccgcagacccagaaaccttcgccaagaaccgtgaaatccaagttattcaatccaagttgggccatgctcggagccttgggctgcgtcttcccgg

SEQ ID NO: 236458 - DNA, 368 bp, Glycine max
aggggaacttcaagggcaaaaaaagttgtgctgtgccgcctcttccgtaggcagcagcaatggcctcaaatcccaaaactttgacctttgaggaggtagctaagcacaacaacaaaaaggattgctggattattatcaatggaaaggtgtatgatatcacaccatttttggatgagcatccacgaggtgatgaagttttgctgacgtcaacagggaaggatgccaccattgattttgaagatgtgggccacagtgattctgctatagaaatgatggaaaaatacttcattgggaaggttgacacttccactcttccacccaaagttagccatagtctgccacaacctacacaaacacatggcgccaac

SEQ ID NO: 236459 - DNA, 354 bp, Glycine max
gcctcttctctcgcgtcgctccgcaccagtttcaccgcacgaatatcttgttgtttggagcgatccgagaaaaactctgtaaacatgttggtttaccaggacctccttacaggtgatgagcttctctctgactccttccgttacaaggaaattgagaatggaatgctgtgggaagttgaggggaagtgggttgttaaaggagcagttgatgtagacattggtgcaaacccttctgctgagggtggaggagaagatgagggagttgatgatgcagctgttaaggttgttgacattgttgacacattcagacttcaggagcaacccgcattcgataagaagcagtttgttaccttc

SEQ ID NO: 236460 - DNA, 368 bp, Glycine max
gattgcatcgttgttgttcccttcttttttctttctccgccccttttttgttgttccttcttctcgttcgtcgctttgtgatctctctctgcaaccatgtccgtcgagaaagagagagagacccaggtttacttggccaagcttgccgagcaggccgagagatacgaagaaatggttgagtgtatgaagaaagtagcaaaacttgatcttgatctgactgtggaagaaaggaaccttctctcagtgggatacaaaaatgtgattggtgcacgaagggcctcttggcgcataatgtcctcaattgagcagaaggaagagtctaagggaaatgagcacaatgttaaactgatcaagagttactggcaaaa

SEQ ID NO: 236461 - DNA, 337 bp, Glycine max
gattattctaaaaaaatacaggatttgaaatttcatttttgaatcttcttactttcattttaatataatatctctattagttaatctattaatatctattagttaatctattaatagaatataagtaatatagaatctaagtaattcacggttaggatagatctaaaccagctcattatatatatattacaacttactatgccaactatgaaacaacttattagaaacacaagacagccaatccgaaacgtcacaaaatccccagctcttcggggatgccctcagcgccgaggaacgtgtaccaaggtgtatgtgcgactcgttcagatttatatac

SEQ ID NO: 236462 - DNA, 397 bp, Glycine max
gaaggtgcaagagtttgttgtgagctataagctagtttatcgtgaggagaatatgaagttgtttgttttctttgttgctgcagtagttttggtagcatggccatgccatggcgcaggctaccaaaggttccctctccgaatgaaaactggctatggtgagcgttcttcggaggtaaaatgcgcaagttttaggcttgctgtggaagcacacaacatccgagcctttaaaaccattcctgaagagtgcgttgaaccaacaaaggactacattaatggcgaacaatttagatcagactctaaaacagttaaccaacaagctttcttttatgccagttgacgcgaagtccaacacagcgacatatttaaattcggcatagataacaccgtactctctaat

SEQ ID NO: 236463 - DNA, 384 bp, Glycine max
gacacttcgctagatccagccccatcatggcttcagagaagcaagcggctcttgccgtcactccctctgatgctgatgctcctaccatatttgacaagatcatcaataaggagattccttctactgtggtttatgaggatgacaaggtgcttgccttcagggacataactcctcaagctcctacacatattcttatcattcctaaattcaaagacgggttaagtggtctatccaaggctgaggagaggcactttgagattcttggccgccttctgtacactgccaagctggttgcgaagcaagaaggactcgacgacggcttcaggattgtaattaacgatgggccgaaaggatgccaatcagtttaccacattcatgttgcac

SEQ ID NO: 236464 - DNA, 382 bp, Glycine max
gagtgagaagaagatggggtcagagtgagaaagagaaagagagaattcgtaaaccctaatttcggaaagatcggcgatgactgcctccaaggatcgcgagaacttcgtctacatcgccaaactcgccgagcaagccgagcgttacgaagagatggtggaatcaatgaagaacgttgcgaatctcgacgttgaactgacggtggaggagcggaatttgctttctgttgggtacaagaatgtgattggtgctcgcagagcgtcctggaggatcctgtcttccattgagcacaaggaagaaacaaaagggaacgagttgaatgcgaagcggattaaggagtacagacagaaggttgaattggagctatcgaacatctgtaatgat

SEQ ID NO: 236465 - DNA, 351 bp, Glycine max
agcagggaatttttctccacagccttttatagattaattcttattgcaattggtgctggcatatgtttgtttgtaaatattttcatataccccatctggtctggggaggatctgcataaattggtggtgaaaaatttcaatggagttgctgcatctttagaaggtttgcttgaatttcctcatgttctgaatcctcgcaaagattttttggtgttttttatgcctagttcctgtatttaattttctgttgttgtcactctgagttggttcctttgtaactttgtttaggctgtgttaatggttacctgcaatgtgttgcatatgagagggtcccttcaaaaattcctgttt

SEQ ID NO: 236466 - DNA, 341 bp, Glycine max
gatacattctcttgtcacagttttctgtgtcaccggaactcgtttctttcaaaacacttcaaacatctcgaacgctctctttccggcaactaggttaaagttcatcaatggcaggtcgcggcaaaaccctaggatctagcgccgccaagaaggctacctcaaggagcagcaaagccggcctccaattccccgtcggccgtatcgcccgtttcctcaaggccggaaaatacgctgagcgtgtcggcgccggcgcccctgtctacctcgccgccgtactcgaatatctcgcggctgaggttttggaattggctggaaacgctgcgagagacaacaagaagact

SEQ ID NO: 236467 - DNA, 350 bp, Glycine max
gaaaacaattagagagaaggcaagcttattgtcggagtcccaagacatactatccaccattgaaattgagacacaggatattccagatgctcggacctatcttctgactttgaaggaaataagagtcaagagaggtcttacagatgatcttggtgcggaggctctgatgatagatgcattggacaaagttgaaaaggatttaaaaaaacctttactgagaaatgataagaaaggaatggaccttctcttggctgagtttgataagattaataagaaacttggaattcgaaaggaagatctaccgaagtatgaagaggagctagaacttaaagtagccaaagcacaactgg

SEQ ID NO: 236468 - DNA, 358 bp, Glycine max
ggcacaagtgagtttgttgatcgagataactagaaacagtgtgatgaaaatgaaggtccttgttttcttcgttgctacaattttggtagcatggcaatgccatgcgtacgatatgttccctctccgaatgaacactggctatggtgcccgtactccggaggtgaaatgcgcaagttggaggcttgctgtggaagcacacaacatctttggctttgagaccattcctgaagagtgcgttgaagcaacaaaggaatacatccacggcgaacaatatagattagactccaaaacagttaaccaacaagcttacttttatgccagagacctcgaagtccatcccaaggacacatttgtgttc

SEQ ID NO: 236469 - DNA, 357 bp, Glycine max
ggtgcacaagtgagtttgttgatcgagataactagaaacagtgtgatgaaaatgaaggtccgtgttttcttcgttgctacaattttggtagcatggcaatgccatgcgtacgatatgttccctctccgaatgaacactggctatggtgcccgtactccggaggtgaaatgcgcaagttggaggcttgctgtggaagcacacaacatctttggctttgagaccattcctgaagagtgcgttgaagcaacaaaggagtacatccatggcgaacaatatagatcagactccaaaacagttaaccaacaagcttacttttatgccagagacctcgaagtccatcccaaggacacatttgtg

SEQ ID NO: 236470 - DNA, 323 bp, Glycine max
  unsure (1)..(323): unsure at all n locations
ggagaagggttttacattttattcgttctccggtgaaacagaaacagagagagagagtgagaaaaaacgaaacgatggagggaggagtctcctacgcgcgcatgcctcgtgtcaaaatccgcgagctgaaggacgactacgccaagttcgagctccgcgacaccgacgcgagtatagccaacgcgctgcggcgcgtgatgatcgcggaggtgccgacggtcgccatcgacctcgtggagatcgaggtcaactcgtcggtgctcaacgacgagttcatcgcgcacaggctcggcctcattcncctcacgagcgagcgcgccatg

SEQ ID NO: 236471 - DNA, 230 bp, Glycine max
ggcacaagtgagtttgttgatcgagataactataaacagtgtgatgaaaatgaaggtccttgttttcgtcgttgctacaattttggtagcatggcaatgccatacgtacgatatgttccctctccgaatgaacactggctatggtgcccgtactccggaggtgaaatgcgcaagttggaggcttgctgtggaagcacacaacatctttggctttgagaccattcctgaaa

SEQ ID NO: 236472 - DNA, 428 bp, Glycine max
  unsure (1)..(428): unsure at all n locations
agacgggaagacgacagaaggggaaaagagcactgaccaaaccattttattttatttttgaatcaagggtgagggccttccatggcttccgcttgtgcttcctctgcaattacagctgttgccatctctacgccgagttccgggcagaagaatggatcaggaggttgttttcttagtggaaggaaattgagggtgaaaaaggagagagcagcaattggaggacgatcgatgggcactacagtgtgcgcagttgctgagcctgacagacctctatggttcccaggcagcacccctcctccatggcttgatggcactctacctggagacttcggctttgaccctcttggtcttggatctgacccggagagtctgagatggaatgttcaagcanagctagtgcactgcanatgggcaatgttgggtgctgc

SEQ ID NO: 236473 - DNA, 309 bp, Glycine max
ggcacaagtgagtttgttgatctagataacgataaacagtgttatgaaaatgaaggtccttgttttcgtcgctgctacaattttggcagcatggaactgccatacgtactatatgttccctcaccgattaagcagtggctatcgtgctcgtactccggaggtgaaatgcgcagattgatcgcttgctgtgggaccatacatcatcattggctttgacaccattcctgaagagtgcgttgaaccatcagttgaatacatcaatggtcatcaatatatatcagactctagaacagtttaccaacaagctta

SEQ ID NO: 236474 - DNA, 306 bp, Glycine max
gatcaacaagaatactcataataatatagtggctagcatagagctagtaataatattaatattgttaagctagctctaagccatggctaatgaacgtgatctgttctcggcggagattgtgaaccgtggaattgaatcgtcaggaccaaacgctgggtcgttgacgttttcggtgatggtgagaaggcgcttaccggattttcttcaatcggtgaaccttaagtacgtgaaattgggttaccattatctgagaaaccatggcatatacttgttcaccataccggttcttctcgtggtgtttagtgc

SEQ ID NO: 236475 - DNA, 350 bp, Glycine max
gacaacacaacgcaacacaacgcgcactctctcttttctctcttaacacaaaaaccctatcgttcttcgcggtttcgccgattctcgccatgccgaaagccaaatccgacgccaaagccgccgatagccggttgaagcgcaagggcgctggtgctggaaggaagcaatcgaagaaagctgctaaggatcctaacaagccaaagagacctccaagcgctttcttcgttttcatgtccgagttcagagagcagtttaagaaggagcatcctaacaacaaatccgtcgctgttgtcggtaaagctggtggtgacaaatggaaatcgctgtctgatgctgaaaagggccccttc

SEQ ID NO: 236476 - DNA, 403 bp, Glycine max
gggtgcaagagtttgttgtgagctataagctagtttatcgtgaggagaatatgaagttgtttgttttctttgttgctgcagtagttttggtagcatggccatgccatggcgcaggctaccaaaggttccctctccgaatgaaaactggctatggtgagcgttcttcggaggtaaaatgcgcaagttttaggcttgctgtggaagcacacaacatccgagcctttaaaaccattcctgaagagtgcgttgaaccaacaaaggactacattaatggcgaacaatttagatcagactctaaaacagttaaccaacaagctttcttttatgctagtgaacgcgaagtccatcacaaccacattattaaaatccggactagataacacggtactctctaataccccat

SEQ ID NO: 236477 - DNA, 331 bp, Glycine max
gacagcagcagagcaaaagaaagaaagaaagaaagtgcaacttcctctgttttgctcccctgtttaagccttatcataagcttagaatggcacacaaggaattttccattgccctagtgactctcattgttctctttgtcaacacgaacctccaaggtgccacggctgactatggtggtggttggcagagtgctcatgccactttctatggtgggggtgatgcttctggcacaatgggtggagcatgtgggtatggaaatttgtatagccagggatatggaactgacactgtggctctaagcactgctttgttcaacaatggcttaagctg

SEQ ID NO: 236478 - DNA, 330 bp, Glycine max
ggtctcgtggaagtgtaagcaagcaaaaccctagcggcgcctgctttctttgttcgtgttttgcatcaggatggagtctcaggtgaagcacgcacttgttgtcaaagttatgggtcgtactggatccagaggacaagtgacccaggttagagtgaagtttttggatgatcagaaccgtcacatcatgaggaatgtgaaaggacctgtgagagaaggagacattctcaccctacccgagtctgaaagggaagcaagaagattgcgctagatggtctcttttttttggcttgcctccaaattcgaacaaaagcaatatttttcttgatattt

SEQ ID NO: 236479 - DNA, 355 bp, Glycine max
ggcacaagtttgttgagatagctagaagcaataagatgaaaatgaaagtgcttgttttgtttgttgctacagttttggtagcatatgaatgccatggctcagactaccagaagttccctctccaaatgaaaactgggtttggtgggcaatacagcaatgaggtggcatgtgccagttggaggcttggcgtggaagcaaacaacgtagtcaagtggcaaactgttcctgcagcttgcggagagtacatagctgactacgttctaggagaccaatatagatcagattccaaaacagttaaccaacaagcttatttctatgctaaatccctcaaactcaccaacaaagatgtccttgg

SEQ ID NO: 236480 - DNA, 349 bp, Glycine max
ggcacaagtgagtttgttgatcgagataactagaaacagtgtgatgaaaatgaaggtccttgttttcttcgttgctacaattttggtagcatggcaatgccatgcgtacgatatgttccctctccgaatgaacactggctatggtgcccgtactccggaggtgaaatgcgcaagttggaggcttgctgtggaagcacacaacatctttggctttgagaccattcctgaagagtgcgttgaagcaacaaaggaatacatccatggcgaacaatatagattagactccaaaacagttaaccaacaagcttacttttatgccagagacctcgaagtccatcccaaggacaca

SEQ ID NO: 236481 - DNA, 352 bp, Glycine max
ggcacaagtttgttgagatagctagaagcaataagatgaaaatgaaagtgcttgttttgtttgttgctacagttttggtagcatatgaatgccatggctcagactaccagaagttccctctccaaatgaaaactgggtttggtgggcaatacagcaatgaggtggcatgtgccagttggaggcttggcgtggaagcaaacaacgtagtcaagtggcaaactgttcctgcagcttgcggagagtacatagctgactacgttctaggagaccaatatagatcagattccaaaacagttaaccaacaagcttatttctatgctaaatccctcaaactcaccaacaaagatgtcct

SEQ ID NO: 236482 - DNA, 350 bp, Glycine max
gacagcactgcactcttcgcaacacaacaaaaaaagacaacccagagagcgcgtcttaataaacgctcttctctgaaaacccccatttcttttcttctttcttcttctctttcgcttcttcgatcttcgatcttcgtcgctgaaaatgagagagtgcatttcaatccacatcggccaggccgggattcaggttggaaacgcctgctgggagctttactgcctcgaacacggcattcagcctgatgggcagatgccaagtgacaagaccgttggtggaggtgatgatgctttcaacaccttcttcagtgaaactggggcaggaaagcacgtgccccgtgcgatttttgtag

SEQ ID NO: 236483 - DNA, 387 bp, Glycine max
gaatcagagaaattctctgtatccacaagtaatcgattctaaccccgatgctccctcacctctccttatcaccaatcactcgtcctcttcgcaaccctgcctctacccttccgttgactacaacgacctcgtcgagaacctattctctgaggatgccaccgccgcctgttccccctctgcgccgccggaggccaccgaggaagtcctcttccggatccccggcgcgatcctcaacctcgtcgacaaggactacagcgtcgagctcgcatgcggcgacttctccgtgattcgtctccggcagggcgacaacgccgtcgccgtgtacgcgcgcgtcgccgacgagatccaatggccgctcgcgaaggacgccgccgccgtgaaactcga

SEQ ID NO: 236484 - DNA, 336 bp, Glycine max
gagagtggtggagtgtgcaaaagagcgtcgtagtcgcaaccctaatcagaagaagcgcagcttcaagcgagtgacagccaccagccatgggtcgtatgcacagccgcggtaagggtatatcctcttctgctttgccctacaaaaggacacctcctagctggctcaagatctcttcgcaagatgtcgaagaaaatatctgcaagtttgcgaagaaaggtttgaccccgtctcagattggtgtcattctcagagattctcacggtattgctcaggtcaatagcgtcactggcagcaaaatccttcgcatcctcaaagctcacggacttgcgcctgaaa

SEQ ID NO: 236485 - DNA, 384 bp, Glycine max
gaaagagagaagagaagtcaaagacaatgtcagggatcattcacaagattgaggagacccttcatgtgggaggccacaagaaggaggaggagcacaagggtgagcagcaccatggtggagaatacaaaggggagcatcatggtgaacacagtactgaatacaaaggagagcatcatgttggtgagcacaagccggagcaccatggaggagaagagcacaaagaggggttcctagacaagatcaaggacaagatccacggcgaggagggtggcgccaccgccgagggcgagaagaagaagaagaagaagaagcatgaacatggccatgacagcagcagcagcagtgacagtgattagattatctcccactgctgcatcacctgta

SEQ ID NO: 236486 - DNA, 367 bp, Glycine max
ggttctagtgtgtgattgtttgttgttgtaactcgttcttcttcttttgttgttctgtgtttgtgtttgttttttctctcacctgaaaatgtcttgctgcggtggtaactgtggttgcggaagctcctggaagtgcggcaacggctgcggaggctgcaagatgtacccagacttgagctacactgagtcaatcaccaccgagaccttggacatgggagtggcacctgttaaggttcaatttgagggtgctgaaatgggtgtgcccgctgagaacgatggctgcaaatgtggaccaaactgctcctgcaacccctgcacttgcaagtgatgtgttgggagagcaatcttctaacagagatagccctta

SEQ ID NO: 236487 - DNA, 364 bp, Glycine max
gacttgttcactttcttccaacctctcaagtccaacctacccctttttcttctcccaccaacttcaccgtcttcttcctcgatcatgtctcacttcaagggcaagtaccatgatgagcttattgccaatgctgcttacattggcactcctggaaagggtattcttgctgctgatgagtcaacagggacaattggcaagcgtttggccagcatcagtgtagagaatgttgaatccaacaggcgtgctcttagggagctgcttttcaccgctcccggtgctcttaaatatctcagtggtgtcatcctctttgaggaaactctctaccagagcacagctgcaggcaagccctttgtggaagtcttga

SEQ ID NO: 236488 - DNA, 345 bp, Glycine max
ggtcttgcaggcgaagagatggccaccgttccagggcagctcgtgtgggagatcgtcaagaaaaacaattccttcttggtcaagcagtttggaaggggcacccagagcgtcgaattcagcagagagagcaacaatctctacaacctcaattcgttcaagtactctggtttggcaaacaagaaaactgttactgttcagcctgagggcaaagatcaggctgtgttgttggctacaaccaagacaaagaagcgaaacaagcccgctgcattgctccacaaatctgtgatgaagaaggagttcaagaggatggcaaaagctgttgaaaaccaggtggccaaaaattac

SEQ ID NO: 236489 - DNA, 358 bp, Glycine max; identical to SEQ ID NO: 234733

SEQ ID NO: 236490 - DNA, 382 bp, Glycine max
gactcaagcacaacatctcgatcgagtaaattaactatgaagcctaccctactattatccctttccttcctgcctctctttgctttcctggctctttcagaagatgttgaacaagttgtggacataagtggcaaccccattttcccaggtggcacatattacattatgccatcaacttggggcgctgccggtggtggattgaaactaggccggacaggaaactcaaactgcccagttactgttttgcaagattactcagaaatcttccgtggcacaccagtcaaattcagcatacctgggataagccctggaatcatctttacaggtactccacttgaaatcgagttcgcagagaaaccttattgtgctgaatcctccaaat

SEQ ID NO: 236491 - DNA, 366 bp, Glycine max
tggggcacaagtgagtttgttgatcgagataactagaaacagtgtgatgaaaatgaaggtccttgttttcttcgttgctacaattttggtagcatggcaatgccatgcgtacgatatgttccctctccgaatgaacactggctatggtgcccgtactccggaggtgaaatgcgcaagttggaggcttgctgtggaagcacacaacatctttggctttgagaccattcctgaagagtgcgttgaagcaacaaaggaatacatccatggcgaacaatatagatcagactccaaaacagttaaccaacaagcttacttttatgccagagacctcgaagtccatcccaaggacacatttgtgttcagtat

SEQ ID NO: 236492 - DNA, 397 bp, Glycine max
gcacaagtgagtttgttgatcgaaataactagaaacagtgtgatgaaaatgaaggtccttgttttcttcgttgctacaattttggtagcatggcaatgccatgcgtacgatatgttccctctccgaatgaacactggctatggtgcccgtactccggaggtgaaatgcgcaagttggaggcttgctgtggaagcacacaacatctttggctttgagaccattcctgaagagtgcgttgaagcaacaaaggaatacatccatggcgaacaatatagatcagactccaaaacagttaaccaataagcttacttttatgccagagacctcgaagtccatcccaaggacacatttgtgttcagtataaatggcaccgtactctctaatattccatactaca

SEQ ID NO: 236493 - DNA, 375 bp, Glycine max; identical to SEQ ID NO: 235693

SEQ ID NO: 236494 - DNA, 363 bp, Glycine max; identical to SEQ ID NO: 236410

SEQ ID NO: 236495 - DNA, 370 bp, Glycine max
gaccacattccaaaacacaaacacatacattgtagtatcacttttgtctcggaatttgttcttttgagttatggcaagcttaaaggttgcatgtgtggttttgatgtgcatggctgtgatgagtgcaccaatgatggtgcaagccgtgtcatgcaatgatgtttctgtgaacctagcaccgtgcctatcttacctgatgcagggtggagatgttccagaatcgtgctgtagcggagtgaggaacattctgggttctgccagcaccacctttgacaaacataccgtgtgcaaatgtcttcagcaagctgctaataactatggcatcaacgacgaatacgctcaggcactccccgcccgctgcaatgtcagc

SEQ ID NO: 236496 - DNA, 352 bp, Glycine max
ggcagcgcttgataccaagccccactcaaccaccataccactctctctgctcttcctctacctttcacgtttttagagtatgaagatggaagagacattcctatgtaacacagagtcggtgtacgacggacacactgacaggctctgcgtccaaatctccgatgctgtcctcgacgcttgcctcgaacaggactcagacagtagagttgcctgcgatacatgcacgacttccaagcttggtcatggtcttcggagatctcacgactaacgctaatgttgactacagataagatactgcatgacacctgcacgaacatctgcgtcgtctcaaatggtgtgggatcggctcacg

SEQ ID NO: 236497 - DNA, 363 bp, Glycine max
  unsure (1)..(363): unsure at all n locations
gattggtaccgcgaaacgcacatttcactattcattctcgtttccctttcgactgtgattgtttgttaactgaacttttcgagcaaaatgtctggacgtggaaaggggggcaagggtttgggaaagggaggagcgaaacgacaccgtaaggtgttgcgcgataacattcagggaatcaccaagcctgcgattcggcgtttggctcgcaggggtggtgtgaagcgtatcagtggtctcatctacgaggagacacgtggcgtgctcaagatctttctggagaacgtgattcgtgacgccgttacctacactgagcacgctangagaaagaccgttacggcaatggataaggtttatgctctcaag

SEQ ID NO: 236498 - DNA, 375 bp, Glycine max
gatcaattcaaaatatatcatcaattataagcatgggtttgtggaacacaacgaatgcagtgtcttgccgctttcacaagtttggtgatgaccaaaagaatctggtcttccaaggtgatgccacgtcttcttccaggggcatagaactcacaaagttagacggtggaggaaaaccagtgggtggcagtgtggggagagtgttatactcttctccagtgcacctttgggaaagctctacagtggtcgcaagctttgaaaccgacttcaccttttccatctcatcagactctactactccaggtgatggccttgccttcttcattgcaccatttgacactaaaatccctccaaactctggtgggagcaaccttggac

SEQ ID NO: 236499 - DNA, 421 bp, Glycine max
gaccacgcgtcccatacgggctgcgaagaaaaacgacaagaaagggaagacagacacacactcggttctgccttcacaaaaaaattatcgagatcccctttttctcctaagaaaagccatggctaagggtcccggtctctactctgacatcggcaagaaagccagggatctgctgttcaaggactaccacagtgaccagaagttcaccatcaccacctactcacccactggagttgctataacagcatcaggaaccaggaaaagtgaactgtttgtggctgatgtcaacacccagttgaagaacaaaaacatcactactgatatcaaagttgatacagattctaatctcttcacaactatcactgttaataaacctgctcctggtctgaaggctatttttagcttcaaagttcctgaccaa

SEQ ID NO: 236500 - DNA, 317 bp, Glycine max
ggcacaagtgagtttgttgatcgagataactagaaacagtgtgatgaaaatgaaggtccttgttttcttcgttgctacaattttggtagcatggcaatgccatgcgtacgatatgttccctctccgaatgaacactggctatggtgcccgtactccggaggtgaaatgcacaagttggaggcttgctgtggaagcacacaacatctttggctttgagaccattcctgaagagtgcgttgaagcaacaaaggaatacatccatggcgaacaatatagatcagactccaaaacagttaaccaacaagcttacttttatg

SEQ ID NO: 236501 - DNA, 372 bp, Glycine max
gaattaaacaccgcgcccaacccttttcctctcccttctcccacctcaaacgccgtcgtttcgaccaccttcttcggtcgcggcacaaccaataaccatgtcgctgccagattgtcccgccgtccaacttgcccaactcctgggcccaaataccacaaacgctgccgccgccgcctccttcatctgcgaccggttcaccgccgtggacaacaagttcgtcgacacggccttcgcggtcgacaacacttacctcctcttctccgcctacctcgtcttctcgatgcagctcggcttcgccatgctctgcgccggctccgtccgcgccaagaacaccatgaacatcatgctcaccaacgtcctcgacgccgccgc

SEQ ID NO: 236502 - DNA, 380 bp, Glycine max; identical to SEQ ID NO: 235270

SEQ ID NO: 236503 - DNA, 361 bp, Glycine max
gaaggtgcaagagtttgttgtgagctagaagctagtttatcgtgaggagaatatgaagttgtttgttttctttgttgctgcaatagttttggtagcatggccatgccatggcgcatgctaccaaaggttccctctccgaatgaaaactggctatggtgaacgttcttcggaggtaaaatgcgcaagttttacgcttgctgtggaagcacacaacatccgagcctttaaaaccattcctgaagagtgcgttgaaccaacaaaggactacattaatggcgaacaatttagatcagactctaatacagttaaccaacaagctttcatttatgcgagttaacgcgaattccatcacaacgacata

SEQ ID NO: 236504 - DNA, 223 bp, Glycine max
gaccgatatgagggtgtcggagtcgttgcagagctgcgcgttcatctatacgaatggcgaagataaaggtgtactagttgaggaataacaccaatgctgatctactgaaccagctcacggatctcaaggcagaactagccctgccccgcatcgccaacgttaccggcggcaccccacacaagctctccaatactcaagtggtgaggctatcgatagcgcacgt

SEQ ID NO: 236505 - DNA, 369 bp, Glycine max
ggcacatgtgagtttgttgatcgagataactagaaacagtgtgatgaaaatgagtgtccgtgttttcctcggtgctacaattttggtaacatggcaatgccatgcgtacgatatgttccctctccgaatgaacactggctatggtgcccgtactccggatgtgaaatgcgcatgttggacgcttgctgtggaagcacacaacatctttggctttgagaccattcctgaagagtgcgttgacgcaacaagggaatacatccatggcgaacaatatatatcagactccaaaacagttaaccaacaagcttacttttatgccagagacctcgatgtccatcccaaggacacatttgtgtacagtatagatgg

SEQ ID NO: 236506 - DNA, 371 bp, Glycine max
gaccacattccaaaacacaaacacatacattgtagtatcacttttgtctcggaatttgttcgtttgagttatggcaagcttaaaggttgcatgtgtggttttgatgtgcatggctgtgatgagtgcaccaatgatggtgcaagccgtgtcatgcaatgatgtttctgtgaacctagcaccgtgcctatcttacctgatgcagggtggagatgttccagaatcgtgctgtaacggagtgaggaacattctgggttctgccagcaccacctttgacaaacaaaccgtgtgcaaatgtcttcagcaagctgctaataactatggcgtcaacgacgaatacgctcaggcactcttcgcccgctgcaatgtcagcg

SEQ ID NO: 236507 - DNA, 360 bp, Glycine max
gaaggtgcaagagtttgttgtgagctataagctagtttatcgtgaggagaatatgaagttgtttgttttctttgttgctgcagtagttttggtagcatggccatgccatggcgcaggctaccaaaggttccctctccgaatgaaaactggctatggtgagcgttcttcggaggtaaaatgcgcaggttttaggcttgctgtggaagcacacaacatccgagcctttaaaaccattcctgaagagtgcgttgaaccaacaaaggactacattaatggcgaacaatttagatcagactctaaaacagttaaccaacaagctttcttttatgctagtgaacgcgaagtccatcacaacgacat

SEQ ID NO: 236508 - DNA, 367 bp, Glycine max
gaaggtgcaagagtttgttgtgagctacaagctactttatcgtgaggagaatatgaagttgtttgttgtctttgttgctgcagtagttttggtagcatggccatgccatggcgcaggctaccaaaggttccctctccgaatgaaaactggctatggtgagcgttcttcggaggtagaatgcgcaagttttaggctcgctgtggaagcacacaacatccgagcctttaaaaccattcctgaagagtgcgttgaaccaacaaaggactacattaatggcgaacaatttagatcatactctacaacagttaaccaacaagctttcttctatgctactgaacgcgaagtccatcacaacgacatatttata

SEQ ID NO: 236509 - DNA, 367 bp, Glycine max; identical to SEQ ID NO: 235109

SEQ ID NO: 236510 - DNA, 383 bp, Glycine max
gaccacattccaaaacacagacacatacattgtagtatcacttttgtctcggaatttgttcttttgagttatggcaagcttaaaggttgcatgtgtggttttgatgtgcatggctgtgatgagtgcaccaatgatggtgcaagccgtgtcatgcaatgatgtttctgtgaacctagcaccgtgcctatcttacctgatgcagggtggagatgttccagaatcgtgctgtagcggagtgaggaacattctgggttctgccagcaccacctttgacaaacaaaccgtgtgcaaatgtcttcagcaagctgctaataactatggcatcaacgacgaatacgctcaggcactccccgcccgctgcaatgtcagcgtcccttacaaga

SEQ ID NO: 236511 - DNA, 379 bp, Glycine max
gacaagtgagtttgttgatcgagataactagaaacagtgtgttgaaaatgaaggtccttgttttcttcgttgccacaattttggtagcatggcaatgccatgcgtacgatatgttccctctccgaatgaacactggctatggtgcccgtactccggaggtgaaatgcgcaagttggaggcttgctgtggaagcacacagcatctttggctttgagaccattcctgaagagtgcgttgaagcaacaaaggaatacatccatggcgaacaatatagatcagactccaaaacagttaaccaacaagcttacttttatgccagagacctcgaagtccatcccaaggacacatttgtgttcagtatagatggcaccgtactctc

SEQ ID NO: 236512 - DNA, 359 bp, Glycine max
ggggcgaggtagccagagagtgatacaatacagagtgcgttgttgctccttcgccacaactccctgccaacatgggtatctccagagattctatgcacaagaggcgtgccactggtggcaagaagcaggcatggaggaagaagagaaagtatgagcttggtcgccagcctgctaacactaagctgtcaagcaacaagacagtcaggaggatccgggttagaggtggaaatgtgaagtggagggcactgagattggatactggaaattactcctggggaagtgaagctgtaactcgcaagactcgtatactagatgtggtttacaatgcctcaaacaacgagcttgtgcgtactcagact

SEQ ID NO: 236513 - DNA, 328 bp, Glycine max
acgcgtcagaggcagcataggaacgggcagctgcagtgaatgcatctacaggttaagagagtctgggatgtcatctgttctgttggatgtgagaccatgggacgattatactgacatgcataagcacgaccaaacagtgtgatctgtgcaaatggaacggttgctttggggtgcatccatacttgtacctgttgggtactgtatcaagagactgcatgttatgcttactattgtggatgacctagtttctgttgctactcttattgaggaacatctcacagtttagcccatcaatgaatatgtccatagttgtgacattgtggacttc

SEQ ID NO: 236514 - DNA, 366 bp, Glycine max
ggcacaagtgagtttgttgatcgagataactagaaacagtgtgatgaaaatgaaggtccttgttttcttcgttgctacaattttggtagcatggcaatgccatgcgtacgatatgttccctctccgaatgaacactggctatggtgcccgtactccggaggtgaaatgcgcaagttggaggcttgctgtggaagcacacaacatctttggctttgagaccattcctgaagagtgcgttgaagcaacaaaggaatacatccatggcgaacaatatagatcagactccaaaacagttaaccaacaagcttacttttatgccagagacctctaagtccatcccaaggacacatttgtgttcagtataga

SEQ ID NO: 236515 - DNA, 370 bp, Glycine max
gagccacgtacgcaactgaaaaggaaaaccctaagagatgaagagaactcctatcttgttccctctcttctttcttctttgtgccttcacctcatatctaccttcagccaccgctgatgatgatcatgtgtacgacactgacggcgataagcttcaatacggtgtcaattatttcgtgttgccagtgataagaggaaatggcggtggaatacaagtagcaaaagcaggaaacgaaacttgccctctgactgtggtgcaatctggcaacgagctctctgaggggttaccgataaagattgcatctcgatcagcaggagtcgctttcatcacccaaggccagctttttaagagcattcagttcggtgtgttt

SEQ ID NO: 236516 - DNA, 356 bp, Glycine max
gaccaacacaaacaatagtgcatagcgtttttcattgtgcattattcaatggccaccacagcagctctatccggaaccatggtgagcacctccttcatgaggaagcaacctatgacgaccaagagcctaaagacattccccaacgctctttttggtctgaaaggtggacgaggtggtcgtgtaacttgcatggcctcgtacaaggtgaagctcataaccccagaaggagaagtggagtttgaatgcccagatgatgttttcattgttgacaaggctgaggaagaaggcattgaacttccctactcgtgcagggctggttcttgcgtttcatgtgttgggaaaattgtgaaaggtga

SEQ ID NO: 236517 - DNA, 372 bp, Glycine max
gacacaccatccgttctagtctcaacttctgcccttccaactcctacaacgcttttcactgcactcatgggcaaggtcaagatcggcatcaccggctttgggagaattggtcgtttggttgccagagtcgctctgcacagagacgatgttgaactcgttgccgttaacgaccctttcattaccaccgattacatgacatacatgtttaaatacgacagtgttcacggacactggaagtatcacgatgtcaccgttaaggacgagaagacccttctcttcggtgacagagcagtcactgtttttggacacagaaagcctgaagagatcccatgggggtcaactggagctgacagcattgttgagtccaccgga

SEQ ID NO: 236518 - DNA, 383 bp, Glycine max
gagggtttacactgaggaggcacaccttcaggagcattcatggttctcaaaaccgagctgtgccgattcagcggtgccaagatctacccagggaaacgcatcagatttgttcgtggtgattctcatgttttcctgtttgctaactcaaaatgtaagacgtatttccacaacaagttgaacccgtcaaagctcacgtggactgcaatgtaccgaaagcagcataagaaggatattgctcaagaagctgtgaagaagagaagacgtgctaccataaaaccttactctacgtctaatgttggtgctactttagaagttatccacaaaaagagaaccgagaagccataagttcgagatgcagctaaggaagcacaacttcgtgaaat

SEQ ID NO: 236519 - DNA, 356 bp, Glycine max
ggcacaagtgagtttgttgatcgagataactagaaacagtgtgatgaaaatgaaggtccttgttttcttcgttgctacaattttggtagcatggcaatgccatgcgtacgatatgttccctctccgaatgaacactggctatggtgcccgtactccggaggtgaaatgcgcaagttggaggcttgctgtggaagcacacaacatctttggctttgagaccattcctgaagagtgcgttgaagcaacaaaggaatacatccatggcgaacaatatagatcagactccaaaacagttaaccaacaagcttacttttatgccagagacctcgaagtccgtcccaaggacacatttgtgt

SEQ ID NO: 236520 - DNA, 359 bp, Glycine max
gaaatatataacttcttctatgtgtccggaaatcgttcctatcatcacttctcaggtctcggatcccctcgttcgtgccgatcactaagtcacacttcatcaatggcgggcagaggcaaaaccctaagatccaacgccgctaagaacgccacctcaaggagcagcaaagccggcctccaattccccgtcggtcgtatcgccaggttcctcaaggccggaaagtacgccgagcgcgtctgcgccggagcccccgtctacgtcaccgccgttctcgaatatctcgctgctgaggttttggaattggctggaaactctgcgagagataacacgaagactctaattgttccacaccacatcca

SEQ ID NO: 236521 - DNA, 364 bp, Glycine max
gacactaaacaagttaaaagaagagcatcactgaactaacaaagcaaccctatgtcgaatgtggtttgtgtcaccggagccagcggcgccatcggatcatgggtggtcctactcctcctccagcgtggttacaccgtccatgccaccgtccaagatatcaaggatgaaaatgagacgaaacatttggaggaaatggaaggagcaaagagtcatctccatttttttgaaatggatcttcttgacatcgactccattgccgctgccataaagggttgttccggcgtaatccaccttgcatgtcctaacatcattggtcaagtcgaagatcccgagaaacagatattggaaccggcgataaaaagaa

SEQ ID NO: 236522 - DNA, 370 bp, Glycine max
gagcatagcgaaacagagagtggtttcagtgagtgatcggtgttcacttgatccttcataagtcgtcatcatcatcatcatcatcaccgttgattgaagaagatgccgatcagaaacatcgccatcggaaggcctgaagaggctactcaccccgacacgttgaaggcggggttggctgagttcatctccaccttgatcttcgtgttcgccggttcaggttccggcatcgcctacaacaagctcatcgacaacggcgccgccactcccgccggcctcatctccgcttccatcgcccatgctttcgccctcttcgtcgccgtctccgtcggcgccaacatctccggcggccacgtcaaccccgccgtcacct

SEQ ID NO: 236523 - DNA, 376 bp, Glycine max
gacaaccaattccattattaatcggataagcctcaaccttgcaacccaacacaaccagacattcgctacttgttaacggctgcactataccacaatgtctcacggaagaggcagtgcatctttgcctattgtggtcactgtggtttcactactgtgccttttggaacgtgctaccgcatgcaacttactccgttggaggacctgcgggattgaccttcaacactaacgcttggcccaatggaaaacgattcagagctggtgatatcctaatcttcaactatgactcaccgacccacaatgtggttgctgtggacagaagtcgatacaacacctgctcgacaccagggggtgctaaagtgttcagttcaaggaaaga

SEQ ID NO: 236524 - DNA, 361 bp, Glycine max
gaaggtgcaagagtttgttgtgagctataagctagtttatcgtgaggagaatatgaagttgtttgttttctttgttgctgcagtagttttggtagcatggccatgccatggcgcaggctaccaaaggttccctctccgaatgaaaactggctatggtgagcgttcttcggaggtaaaatgcgcaagttttaggcttgctgtggaagcacacaacatccgagcctttaaaaccattcctgaagagtgcgttgaaccaacataggactacattaatggcgaacaatttagatcagactctaaaacagttaaccaacaagctttcttttatgctagtgaacgcgaagtccatcacaacgacata

SEQ ID NO: 236525 - DNA, 336 bp, Glycine max
gaaagtcgagaagattattatggacatgtatcaactttggagcaagaaaataacgttgtgatcgttcgcctttgttccgcttttcctatcggcctcatcagacgacgtcgttgtgcgctctgaagataacttctcagaaagaaattggtcacgactgatgagctctcgttgagttctatgctccttgttgtagacactgcgaaaagcttgctccagaatatgcattgcttggtagcagcttcaagaaagccacatctgtattagtccgcacagttgactgtcaccatcacatcaattcgtgcaccatatatggactctctgggtatcgaacaattc

SEQ ID NO: 236526 - DNA, 389 bp, Glycine max
agaaggggacctacaaaaatccattctcaattgagaaagcgaaacgcatagaatcgaaagaggggaaaagaaaaagaaaagttagggttagggattttgagagatggcatcgactaagaagatcaccctgaagagttcggacggtgaggccttcgaggtggaggaggcggtggcgctggagtcgcagacgatcaagcacatgatcgaggacgactgcgccgacagtggaatccctctccccaatgtcaccagcaagattctggcgaaggttatcgagtactgcaagaagcacgttgaggcgaacagtgctgatgagaagcccagtgaggatgtgctcaaggcttgggacgtggatttcgtcaacgttgatcaggccactctcttcgatt

SEQ ID NO: 236527 - DNA, 391 bp, Glycine max
caaaaagggggacaagtgaatttggtgattgataaaactagaaacagtgtgataaaatgaaggtcctgttttcttcgttgctacaattttggtagcatggcaatgccatgcgtacgatatgttccctctccgaatgaacactggctatggtgcccgtactccggaggtgaaatgcgcaagttggaggcttgctgtggaagcacacaacatctttggctttgagaccattcctgaagagtgcgttgaagcaacaaaggaatacatccatggcgaacaatatagatcagactccaaaacagttaaccaacaagcttacttttatgccagagacctcgaagtccatcccaaggacacatttgtgttcagtatagatggcaccgtactctccaat

SEQ ID NO: 236528 - DNA, 385 bp, Glycine max; identical to SEQ ID NO: 235632

SEQ ID NO: 236529 - DNA, 372 bp, Glycine max
gaattaagaaccacattcacattagtcctccgaagatgacagtgacgagtggagaagaagaaggcgccgttggaggagttcagatccaacacaggagcagaatggtgctcccagattttctccagagcgtgaatctcaggtacgtgaaattaggttaccacgacttgatctccaacctcgtaaccttagtccttgtccctcttatcctcgtcacgctcattcaggtttttcagaccatcgacatcgaccacctccgccacctctggctccacctccagtacaacctcctcaccatcctcacctgctccgccgtcctcgtcttcggcctcactctctacgccgtcactcgcccccgcgccgtctacctcctcg

SEQ ID NO: 236530 - DNA, 381 bp, Glycine max
  unsure (1)..(381): unsure at all n locations
ggcacangtgagtttgttgatcgagataactagaaacagtgtgatgaaaatgaaggtccttgttttcttcgttgctacaattttggtagcatggcaatgccatgcgtacgatatgttccctctccgaatgaacactggctatggtgcccgtactccggaggtgaaatgcgcaagttggaggcttgctgtggaagcacacaacatctttggctttgagaccattcctgaagagtgcgttgaagcaacaaaggaatacatccatggcgaacaatatagatcagactccaaaacagttaaccaacaagcttacttttatgccagagacctcgaagtccatcccaaggacacatttgtgttcagtatagatggcaccgtactctc

SEQ ID NO: 236531 - DNA, 384 bp, Glycine max
  unsure (1)..(384): unsure at all n locations
ggcacagcacagcactctttgcaacacaacanaaaaagacaacacagagagaagcgtcttaataaacgctcttctctgaaaaacctgatttcttctcttcttctcttctctttcgtttcgatcttcgatctctgaaaatgagagagtgcatttcaatccacatcggtcaggccggtattcaggtcggaaacgcctgctgggagctctactgcctcgaacacggcattcagcctgatgggcagatgccaagtgataagactgttggtggaggtgatgatgctttcaacaccttcttcagtgaaactggggctggaaagcacgtgcctcgtgcgatttttgtagatctcgagcctactgtgattgatgaagttaggactgggacat

SEQ ID NO: 236532 - DNA, 355 bp, Glycine max
ggcacaagtttgttgagatagctagaagcaataagatgaaaatgaaagtgcttgttttgtttgttgctacagttttggtagcatatgaatgccatggctcagactaccagaagttccctctccaaatgaaaactgggtttggtgggcaatacagcaatgacgtggcatgtgccagttggaggcttggcgtggaagcaaacaacgtagtcaagtggcaaactgttcctgcagcttgcggagagtacataactgactacgttctaggagaccaatatagatcagattccaaatcagttaaccaagaggcttatttctatgccaaatccctcaaactcaccaataaagatgtcattgt

SEQ ID NO: 236533 - DNA, 358 bp, Glycine max; identical to SEQ ID NO: 234733

SEQ ID NO: 236534 - DNA, 371 bp, Glycine max
ggcaaaagtgagtttgttgatcgagattcatacacacagtgtgatgaaaatgaacgcccttgatttcttcgatgctacacttttggtaccatggcaatgccatgcgtattataggttccctctctgaatgaacactggctatggtgcccgtactcaggacgtgaaatgcacacgttggaagcatgctgtggacacatacaacatctttgactttgagaacagtcgtgaacactgcgttgaagcaatccaggaagacatccatggtcaacatgtatagatgacactctagtagagttaacctacacgcttacattcaagcgagagacctcaaagtccatcacgtcgacacatttgtgttcagtataaatggc

SEQ ID NO: 236535 - DNA, 378 bp, Glycine max
ggcacaagtttgttgagatagctagaagcaataagatgaaaatgaaagtgcttgttttgtttgttgctacagttttggtagcatatgaatgccatggctcagactaccagaagttccctctccaaatgaaaactgggtttggtgggcaatacagcaatgaggtggcatgtgccagttggaggcttggcgtggaagcaaacaacgtagtcaagtggcaaactgttcctgcagcttgcggagagtacatagctgactacgttctaggagaccaatatagatcagattccaaaacagttaaccaacaagcttatttctatgctaaatccctcaaactcaccaacaaagatgtctttgtcttggacgttgacgacactactc

SEQ ID NO: 236536 - DNA, 374 bp, Glycine max
ggcacaagtgagtttgttgatcgagataactagaaacagtgtgatgaaaatgaaggtccttgttttcttcgttgctacaattttggtagcatggcaatgccatgcgtacgatatgttccctctccgaatgaacactggctatggtgcccgtactccggaggtgaaatgcgcaagttggaggcttgctgtggaagcacacaacatctttggctttgagaccattcctgaagagtgcgttgaagcaacaaaggaatacatccatggcgaacaatatagatcagactccaaaacagttaaccaacaagcttacttttatgccagagacctcgaagtccatcccaaggacacatttgtgttcagtatagatggcaccg

SEQ ID NO: 236537 - DNA, 374 bp, Glycine max
gatcacatcacatcgcatagagagagagatccatcgatcaattaatttccaatgggcgatcagctcaccgacgaacagatctctgagttcaaggaagcctttagcctcttcgacaaggacggcgatggttgtattaccaccaaggaacttgggactgtgatgcggtcgcttgggcagaacccaactgaggctgagctgcaggacatgataaatgaggttgatgctgatgggaatggtaccattgatttcccagaattcctcaatctcatggcgcgcaagatgaacgacactgattcagaggaagagctgaatgaggctttccgtgtgtttgacaaggatcagaatggtttcatctctgccgcaaagctccgcca

SEQ ID NO: 236538 - DNA, 382 bp, Glycine max
ggcatcaattcagaatatagcatcaattatgagcatgggtttgtggaacacaacgaatgcagtgtcttgccgctttcacaagtttggtgatgaccaaacgaatctggtcttccacggtgatgctacatcctcgtccagtggcacagaactcaccctgttagacagtggaggaaaaccagtgggtggcagtgtggggagagtgtcatactcttctccagtgcagctttgggaaaactctacagtggacgcaagctttgacaccgacttcagcctttccatctcatcagactctactatgccaagtgatggacttgccttcctcattgcaccatttaacactaaaatccctccagactctggtgggagcaatcttggactcttc

SEQ ID NO: 236539 - DNA, 365 bp, Glycine max; identical to SEQ ID NO: 234752

SEQ ID NO: 236540 - DNA, 454 bp, Glycine max
ggtctagaattaacgggccgacgcacgcgtccagtggtatccatccgcgcatattctcatttcaatttgcatttgcatttgcgtttcatttggcgttttgtttcattctggaagcttcgttcgggcatcaatggcgtccttcgatgaagctcctcccggaaactccaataacagggataagatcttcaaaatcaagtgcgctcaatgggacaccgtcgacaaaggtgccgggcacaaataaggacccaatctgaatggtttgtttggaagacaatctggtagaactcctggaaattcctattctactgctaacaaaaacatggccgtgatttgggaggaaaagaccctctatgattacttgctcaaccccaaaaagtatattctaggaacgaagatggtatttcctggtcttaagaaacctcatgaacgtgcagatcatagtgcataacttaaa

SEQ ID NO: 236541 - DNA, 369 bp, Glycine max
ggcacttcaattgcaatcaaattagttcaattccctttgcgcagttccctagctctcctttcaagatgcagatcgtcgtcaagaccctcaccggaaagaccatcacccttgaggtggaaagctctgacaccatcgacaacgtcaaggccaagatccaggacaaggaatgaattcccccggatcagcaacgtctcatcttcgccggaaagcagctcgaggacggccgtaccctcgccgactacaacatccagaaggagtcaacccttcaccttgtccttcgtctccgtggtggcatgcagatcttcgtcaagactctcactggcaaaaccataaccctagaggtcgaaagctctgacaccattgacaacg

SEQ ID NO: 236542 - DNA, 361 bp, Glycine max
ggcacaagtgagtttgttgatcgagataactagaaacagtgtgatgaaaatgaaggtccttgttttcttcgttgctacaattttggtagcatggcaatgccatgcgtacgatatgttccctctccgaatgaacactggctatggtgcccgtactccggaggtgaaatgcgcaagttggaggcttgctgtggaagcacacaacatctttggctttgagaccattcctgaagagtgcgttgaagcaacaaaggaatacatccatggcgaacaatatagatcagactccaaaacagttaaccagcaagcttacttttatgccagagacctcgaagtccatcccaaggacacatttgtgttcagt

SEQ ID NO: 236543 - DNA, 363 bp, Glycine max; identical to SEQ ID NO: 236029

SEQ ID NO: 236544 - DNA, 374 bp, Glycine max
  unsure (1)..(374): unsure at all n locations
ggagagagagagagaaatggagaagacaggagtgttatcggcgaaggatgcattcgagaagcttgaaaaggtgggagaagggacatatgggaaggtgtacagagcaagagagaaggcaactgggaagatcgtggctctgaagaagactcgtctccacgaggacgaagaaggtgtccctcccaccactctccgtgaggtttccattctgcgaatgctctctcgcgatccccatgtcgttaggttaatggatgtcaaacaaggtcagaacaaggaagggaatacagtgctctacttggtatttgagtacatggacaccgatctcaagaaattcatacgctccttccgtcaatctggggaaaccattcctcnccata

SEQ ID NO: 236545 - DNA, 365 bp, Glycine max; identical to SEQ ID NO: 234752

SEQ ID NO: 236546 - DNA, 356 bp, Glycine max
gattctcccaaactaacaaacacatcccagggagccaccaaccatggcttccaagctctgcgactcatgcaaatcagccactgctaccttgtactgccgccccgacgcggccttcctctgcggcgcctgtgactctaaggttcatgccgccaacaagctcgcatcgcgccacccgcgcgtcgtgctctgcgaggtgtgcgagcaggcgcccgcgcatgtgacctgtaaagccgacgccgccgcgctctgccttgcctgcgatcgcgatatccactccgccaaccccctcgccagccgccacgagcgcatccccgtcacgccgttcttcgagtccgtacattcagtcaaggcctcct

SEQ ID NO: 236547 - DNA, 374 bp, Glycine max
gggttttagagtggtggagtgtgcagaagagcgtcgcagtcgcaaccctaatcagaagaagcgcagcttcaagcgagtgacagccaccagccatgggtcgtatgcacagccgcggtaagggtatatcctcttctgctttgccctacaaaaggacacctcctagctggctcaagatctcttcgcaagatgtcgaagaaaatatctgcaagtttgcgaagaaaggtttgaccccgtctcagattggtgtcattctcagagattctcacggtattgctcaggtcaatagcgtcactggcagcaaaatccttcgcatcctcaaagctcacggacttgcgcctgaaattccagaggacctgtaccatttgattaagaag

SEQ ID NO: 236548 - DNA, 385 bp, Glycine max
ggcacaagtgagtttgttgatcgagataactagaaacagtgtgatgaaaatgaatgtccttgttttcttcgttgctacaattttggtagcatggcaatgccatgcgtacgatatgttccctctccgaatgatcactgggtatggtgcccgtactccggaggtgaaatgcgcaagttggaggcttgctgtggaagcacacaacatctttggctttgagaccattcctgaagagtgcgttgaagcaacaaaggaatacatccatggcgaacaatatggatcagactccaaaacagttaaccaacaagcttacttttatgccagagacctcgaagtccatcccaaggacacatttgtgttcagtatagatggcaccgtactctctaat

SEQ ID NO: 236549 - DNA, 377 bp, Glycine max
aactctcacgccttcggattaatccccctcccaattcaagggttccaaaatggacgctggcggaaagatcaagaagggcgccggaggaagaaagggcggcggccctaagaagaagccggtttcaaggtccgtcaaggccggtctccaattccccgtcggaagaattggccgttatttgaagaaaggaaggtacgcccagcgtgtcggtaccggtgctcccgtttacttggccgcagttctcgagtacctagctgctgaggtgcttgagttggctgggaatgctgcacgtgacaacaagaagaacaggattattccgagacatgtgctgttggctgtaaggaacgatgacgagttggggaaattgcttgctggtgtca

SEQ ID NO: 236550 - DNA, 374 bp, Glycine max
  unsure (1)..(374): unsure at all n locations
ggtgcacaagtgagtttgttgatcgagataactagaaacagtgtgatgaaaatgaaggtccttgttttcttcgttgctacaattttggtagcatggcaatgccatgcgtacgatatgttccctctccgaatgaacactggctatggtgcccgtactccggaggtgaaatgcgcaagttggaggcttgctgtggaagcacacaacatctttggctttgagaccattcctgaagagtgcgttgaagcaacaaaggaatacatccatggcgaacaatatagatcagactccaaaacagttaaccaacaagcttacttttatgccagagacctcgaagttcatcncaaggacacatttgtgttcagtatagatggcac

SEQ ID NO: 236551 - DNA, 329 bp, Glycine max
ggtgcacaagtgagtttgatgatcgagataactagaaacagtgtgatgaagatgaaggtcgttgttttcttcgttgctacaagtttggtagcatggcaatgcgatgcgtatgatatgttccctcgccgaatgaacactggctatggtgcccgtactcgggatgtgaaatgcgcaagttggaggcttgctgtggaagcacacaacatcgttggctttgagaccattcctgaatagtgcgttgaagcaacataggaatacatccatggcgaacaatatagatgagactcgaaaagagttaaccaacaggcttacttttatgccagggacgt

SEQ ID NO: 236552 - DNA, 330 bp, Glycine max
ctaaagtatggaacaagggcgcataatttattaaagccacgaaagagaaaacaacatagtgaagtctcttacatgacttgttgacacacagctgaaacaacataaagtgaagctagtgcccctatttgaacgcatcttattacatatagatagataggagcaagtgagtttgttgatcgagataactagaaacagtgtgatgaaaatgaaggtccttgttttcttcgttgctacaattttggtagcatggcaatgccatgcgtacgatatgttccctctccgaatgaacactggctatggtgcccgtactccggaggtgaaatgcgcaag

SEQ ID NO: 236553 - DNA, 363 bp, Glycine max
gaccacattccaaaacacaaacacatacattgtagtatcacttttgtctcggaatttgttcttttgagttatggcaagcttaaaggttgcatgtgtggttttgatgtgcatggctgtgatgagtgcaccaatgatggtgcaagccgtgtcatgcaatgatgtttctgtgaacctagcaccgtgcctatcttacctgatgcagggtggagatgttccagaatcgtgctgtaacggagtgaggaacattctgggttctgccagcaccacctttgacaaataaaccgtgtgcaaatgtcttcagcaagctgctaataactatggcatcaacgacgaatacgctcagggactccccgcccgctgcaa

SEQ ID NO: 236554 - DNA, 349 bp, Glycine max; identical to SEQ ID NO: 235961

SEQ ID NO: 236555 - DNA, 361 bp, Glycine max
gagtgcacaagtgagtttgttgatcgagataactagaaacagtgtgatgaaaatgaaggtccttgttttcttcgttgctacaattttggtagcatggcaatgccatgcgtacgatatgttccctctccgaatgaacactggctatggtgcccgtactccggaggtgaaatgcgcaagttggaggcttgctgtggaagcacacaacatctttggctttgagaccattcctgaagagtgcgttgaagcaacaaaggaatacatccatggcgaacaatatagatcagactccaaaacagttaaccaacaagcttacttttatgccagagacctcgaagtccatcccaaggacacatttgtgttc

SEQ ID NO: 236556 - DNA, 378 bp, Glycine max
gaaccacatcactctttctttcaaatctagggtttcctccttctgcaaccatcaatgtcggcaatcgcggctccccaacacagatcctcgaagacagagtcctacgtggacaataagcgcaaggaggatatccgccatgccaacatcgtggccgcacgctcagtcgccaacgcggttcgcaccagtctgggccctaagggcatggacaagatgatctccacctcctcctcctttcccacggcatccaccccaccgtcgtctccgacgccctccacaaggctgccgtcaaggccgtcgacgttctcaccgccatggccgtccgtcgtcgaactctccgaccgcgactccctcgtgaagtccggcagcacttccctcaaa

SEQ ID NO: 236557 - DNA, 361 bp, Glycine max
gagtgcacaagtgagtttgttgatcgagataactagaaacagtgtgatgaaaatgaaggtccttgttttcttcgttgctacaattttggtagcatggcaatgccatgcgtacgatatgttccctctccgaatgaacactggctatggtgcccgtactccggaggtgaaatgcgcaagttggaggcttgctgtggaagcacacaacatctttggctttgagaacattcctgaagagtgcgttgaagcaacaaaggaatacatccatggcgaacaatatagatcagactccaaaacagttaaccaacaagcttacttttatgccagagacctcgaaatccatcccaaggaaacatttgtgttc

SEQ ID NO: 236558 - DNA, 394 bp, Glycine max; identical to SEQ ID NO: 235067

SEQ ID NO: 236559 - DNA, 380 bp, Glycine max
ggcacaagtgagtttgttgatcgagataactagaaacagtgtgatgaaaatgaaggtccttgttttcttcgttgctacaattttggtagcatggcaatgccatgcgtacgatatgttccctctccgaatgaacactggctatggtgcccgtactccggaggtgaaatgcgcaagttggaggcttgctgtggaagcacacaacatctttggctttgagaccattcctgaagagtgcgttgaagcaacaaaggaatacatccatggcgaacaatatagattagactccaaaacagttaaccaacaagcttacttttatgccagagacctcgaagtccatcccaaggacacatttgtgttcagtatagatggcaccgtactct

SEQ ID NO: 236560 - DNA, 364 bp, Glycine max; identical to SEQ ID NO: 235154

SEQ ID NO: 236561 - DNA, 385 bp, Glycine max
  unsure (1)..(385): unsure at all n locations
ggtccttttgccacgcttaagatcacccaagagagaacctaagacacacaacacaacacaaacacacagagttagaggagaaatcatcatggcatcagcagcatctgggtttgtgttgtcacttaatgttgcagctgccaccacaaactcaagggtggtcatgttcaacacaaagaacaacgcttctaggcttgttgtaagggcttcagatgagcctgcagcggcggcacccgccaccgccacacccccagctgaagctgaagctaaaccaaagccaccacctattggccccaagagaggtgctaaggtgaagattcttacgaaggaatcttactggtacaaatgcactggttcagtggttgctgttgatcanggacccaacact

SEQ ID NO: 236562 - DNA, 371 bp, Glycine max
agggatcgcatttgagatcactcatcctcagtaccatcacgaaagcataaccgaaaccttttttcgaaatcgctgacattcccacaggcaccggctaacgcagagtagaagccagtggagatgacaccaccagcggatcaagcaacagcggagaagaagccgaaggcggagaacatgatcacgaatgacggacgcagcgagaagctgaagaagcgcacgaacaagaacgtggagagctaggctatctacatctacatcgtctcacgcaagtacatgctcacattggtacgtccagcaacgccatgggcatcatcaccagcctcatctgcgacatcttcgagaagcttctcaacgaagcgtcgcgtttggtc

SEQ ID NO: 236563 - DNA, 372 bp, Glycine max
ggcgagagaagttagtagggtttttgagtgcggcggtccaaacactcttctctggagcttttgcccacaactcccttcaccatggctgaacaaaccgagaaagcttttctgaagcaaccacaagtgtttctcagcacaaagaagactgggaagggaaagagacctgtaaaaggtgggaaccgcttttggaagtccattgggcttggatttaagactcacaaggaagccatcgaacgaacctatattgacaagaagtgccccttcactggcaatgtttccatccgtggccgtatcttggctggaacatgtcacagtgctaagatgaacaggactattactgttagaacgaattatctccattttatcaagaag

SEQ ID NO: 236564 - DNA, 330 bp, Glycine max
ccagttgtcagacagcagcgaaagggggacagataagttagttgggtttttgagtgagacggtctatgaacacttcgctggtccttgtgctcatacgtcccatcactatggttgaacagcactacaaagcgtatcagaagtaaccactcctgtttctcaccacatataatactgggaacgcaaagagacctgtaacaggtttgaacggcttttgtgagtccattgggcatggatttaatactcacaaggaatccatcgtgcgtacctacattgacaggatatatcccttcactggcaatgttatcatccgtgaacatatcttggctggaa

SEQ ID NO: 236565 - DNA, 358 bp, Glycine max
gattatatttgagttcaaacaaatcaaagccatggccacctccaacttctctattgttctctccgtctccctagccttctttttggtgctacttaccaaggcacactcgaccgataccgtttctttcaccttcaacaagttcaacccagtccaaccaaacattatgctccaaaaagatgctagtatttcatcctctggggtgttacaactcaccaaagttggcagcaacggcgtgcccacctcgggatctctcggtcgtgcccttaacgctgcccaaatcaagatttgggacagcaaaaccggcaaggtacccagctgggcaacatcctttaaattcacaattttgccacccagaaaa

SEQ ID NO: 236566 - DNA, 381 bp, Glycine max
ggcacaagtttgttgagatagctagaagcaataagatgaaaatgaaagtgcttgttttgtttgttgctacagttttggtagcatatgaatgccatggctcagactaccagaagttccctctccaaatgaaaactgggtttggtgggcaatacagcaatgaggtggcatgtgccagttggaggcttggcgtggaagcaaacaacgtagtcaagtggcaaactgttcctgcagcttgcggagagtacatagctgactacgttctaggagaccaatatagatcagattccaaaacagttaaccaacaagcttatttctatgctaaatccctcaacctcaccaacaaagatgtccttgtcctggacgttgacgacactactctct

SEQ ID NO: 236567 - DNA, 391 bp, Glycine max
ggcacaagtgagtttgttgatcgagataactagaaacagtgtgatgaaaatgaagggccttgttttcttcgttgcgacaattttggtagcatgggaatgccatgcgtacgatatgttccctctccgaatgaacactggctatggtgcccgtactccggaggtgaaatgcgcaagttggaggcttgctgtggaagcacacaacatctttggctttgagagcattcctgaagagtgcgttgaagcaacacaggaatacatccatggcgaacaatatagatcagactccaaaacagttaaccaacaagcttacttttatgccagagacctcgaagtccatcccaaggacacatttgtgttcagtatacatggcaccgtactctccaatattcca

SEQ ID NO: 236568 - DNA, 379 bp, Glycine max
ggcacaagtttgttgagatagctagaagcagtaagatgataatgaaagtgcttgttttgtttgttgctacagttttggtagcatatgaatgccatggctcaaactaccagaagttccctctccaaatgaaaactgggtttggtgggcaatacagcaatgaggtggcatgtgccagttggaagcttggcgtggaagcatacaacgtagtcaagtggcaaactgtccctgcagcttgcggagagtacatatctgactacgttctatgagaccaatatagatcagattccattacagttaaccaacaagcttatgtctatgctaaatccctcagactcaccaacaaagatgtctttgtcttggaccttgacgatactactct

SEQ ID NO: 236569 - DNA, 391 bp, Glycine max
ggcacaagtttgttgagatagctagaagcaataagatgaaaatgaaagtgcttgttttgtttgttgctacagttttggtagcatatgaatgccatggctcagactaccagaagttccctctccaaatgaaaactgggtttggtgggcaatacagcaatgaggtggcatgtgccagttggaggcttggcgtggaagcaaacaacgtagtcaagtggcaaactgttcctgcagcttgcggagagtacatagctgactacgttctaggagaccaatatagatcagattccaaaacagttaaccaacaagcttatttctatgctaaatccctcaaactcaccaacaaagatgtctttgtcttggacgttgacgacactactctctccaatcccca

SEQ ID NO: 236570 - DNA, 366 bp, Glycine max
ggtcagcttcttctgtgtgccaccccctctttaattttttttttctttagcttttggagtttggagtctcttgaaccatggctaagaatagaggagagttgaggattcatgagagtgtggatgagctaaggactgatttggcagactatgttgctgagttatcagaggcatctgtgaaagagcgaggagtctttgccattgctttatctggtggttctctcattggcttaatgggaaaactctgtgaagctccttataacaagacagtggactggtccaagtggtatatcttctgggctgacgagcacgttgtggcgaaaaaccatgccgatagcaattataagcttgctaaagatggccttttgt

SEQ ID NO: 236571 - DNA, 376 bp, Glycine max
ggagcgaagaagatattagggtttttgagtgcggtgcggcgatcctagcactctcttctgcagctttcgccgacagcttcattcaccatggctgagcaaaccgagaaggcttttttgaaacaaccaaaagtgtttctcagctcgaagaaaactgggaagggaaagagacccggaaagggtgggaaccgcttttggaaatccattgggcttggatttaagactcccagggaagccatcgaaggaacctacattgacaagaagtgccccttcactggcaatgtttccatccgtggccgtatcttggctggaacgtgtcacagtgctaagatgaacaggactattattgttaggaggaattatctccattttatcaaga

SEQ ID NO: 236572 - DNA, 385 bp, Glycine max
gagagcactgcactcttcgcaacacaacaaagcaagacaacccagagagcgcgtcttaataaacgctcttctctgaaaacccccatttcttttcttctttcttcttctctttcgcgtcttcgatcttcgtcgctgaaaatgagagagtgcatttcaatccacatcggccaggccgggattcaggttggaaacgcctgctgggagctttactgcctcgaacacggcattcagcctgatgggcagatgccaagtgacaagaccgttggtggaggtgatgatgctttcaacaccttcttcagtgaaactggggcaggaaagcacgtgccccgtgcgatttttgtagatcttgagcccactgtgattgatgacgttaagactgggacat

SEQ ID NO: 236573 - DNA, 366 bp, Glycine max
gacagctattcctcttaagcttgctactgagtttccacactgcataccttaggtcttccgaattcgaagttaatttgcaagatggctaaggaaaaggctcagatcaacattgtggtggttggtcatgtggaccctgaggaggcaaccaccattaacgagctgaagaagcctgttgtggagaaagaagctccagggcatgccatatgatggcatgcacgtacggcctcggaggggaaccagaaaattatgttaacaaaataatctggaaccctaatgtatcagtgtcatcatcagtgtgtagtttaagctagctttgctatggttacgttctttgagatgagagtcttgatgaacagtaccattctg

SEQ ID NO: 236574 - DNA, 393 bp, Glycine max
ggcacaagtgagtttgttgatcgagataactagaaacagtgtgatgaaaatgaaggtccttgttttcttcgttgctacacttttggtagcatggcaatgccatgcttacgatatgttccctctccgaatgaacactggctatggtgcccgtactccggaagtgaaatgcgcaagttggaggcatgctgtggaagcacacaacatctttggctttgagaccattcctgaagagtgcgttgaagcaacaaaggaatacatccatggcgaacaatatatatcagactccaaaacagttaaccaacaagcttacttttatgccaaagacctcgaagtctatcccaaggacacatttgtgttcagtaaagatggcatcgtactctccaatattccata

SEQ ID NO: 236575 - DNA, 386 bp, Glycine max
  unsure (1)..(386): unsure at all n locations
ggcacaagtgagtttgttgatcgagataactagaaacagtgtgatgaaaatgaacgtccttgttttcttcgttgctacaattttggtaacatggcaatgccatgcgtacgatatgttccctctccgaatgaacactggctatggtgcccgtactccggaggtgaaatgcgcatgttggaggcttgctgtggaagcacacaacatctttggctttgagaccattcctgaagagtgcgttgaagcaacaaaggaatacatccatggcgaacaatatatatcagactccaaaacagttaaccaacaagcttacttttatgccagagacctcgaagtccatcncaaggacacatttgtgttcagtatagatggcaccgtactctctaata

SEQ ID NO: 236576 - DNA, 364 bp, Glycine max
gaaggtgcaagagtttgttgtgagctagaagctagtttatcgtgaggagaatacgacgttgtttgttttctttgttgctgcagtagttttggtagcatggccatgccacggcgcatgctaccaaaggttccctctccgaatgaaaactggctatggtgagcgttctccggaggtaaaatgcgcaagttttacgcttgctgtggaagcacacaacatccgagcctttaaaaccattcctgaagagtgcgttgaaccaacaaaggattacattaatggcgaacaatttagatcagactctaatacagttaaccaataagctttcatttatgcgagtgaacgcgaagtccatcacaacgacatattt

SEQ ID NO: 236577 - DNA, 319 bp, Glycine max
ggagagtcagattcacaggcattgcttcgcctcacaacaacagctgcatcaacaatggctcccaaacgacgtggaaaggctccggctcttgccgctaagaagaagcctgaaaaggtcacgaatccgttgttcgagaagcgtctgaagcacttcggaatcagaggggcgttgcctcctacgagagacgtgactaggttcgtgaagtggccagctaatgttcacattcagatgaagaacatgattctgaatcataagttgatcgttcccccagctttgagacagtttgccaaaactcttgacaaaatcctagcatcaagtc

SEQ ID NO: 236578 - DNA, 366 bp, Glycine max
gacactcaagcccctcactccaaaacaaaacctaaacattttactcttttcggttttttttttttgtttcacacatgccgtcgtcgaattccggcgagagtcgccgagcgagcaagccgcagagctcgggcggagcggcgccgccgccgccggagcaggaaaacccgccgtgcccgcgatgcgactccaccaacaccaagttctgctactacaacaactacaactactcccagccacgccacttctgcaagtcctgccgccgctactggacccacggcggcactctccgcgacattcccgtcggcggcggcagccgcaagaacgccaagcgctcccgcacccaccacgtcgccgccacatcatcct

SEQ ID NO: 236579 - DNA, 344 bp, Glycine max
ggaaaccgagaagaagaagatggagatgtatcagatctggagcacgagaagagcgttgggagcgttcgcgtgtgttctgcttttcctagcggcctcagcagacgacgtcgttgtgcgctctgaagatgacttcgagaatgaagttggtcatgatagaggagctctcgttgagttctaggctccatggtgtggagactgcaaagagcttgctccagaatatgaaaagcttggtcgcagctgcaataaagccaaatctgtgttaatcggcattgttgactgtgatgagcacatagagtttgtgcagcacatatggagtctctgggtacccacctattcagtggttt

SEQ ID NO: 236580 - DNA, 392 bp, Glycine max
ggcttcaagatgcctatcattggattgggcgtgtggcgcatggaaggaaacgaaatcagggacctaattctcaattccatcaaaattggttatcgccattttgattgtgctgctgactacaaaaacgaagcagaagttggagatgcgcttaaggaggcttttgatagtggccttgtgaagagagaggatctcttcattaccaccaagctttggaattctgatcaaggccacgttcttgaggcgtgtaaagacagtctcaagaagcttcagttaacgtatctagatttatatcttgttcactttcctgttgccgtaaggcatactggggttggtaatacttctagtcctttgggtgatgatggggtcctggacatagataccaacatatccct

SEQ ID NO: 236581 - DNA, 397 bp, Glycine max
ggcacaagtgagtttgttgatcgagataactagaaacagtgtgatgaaaatgaaggtccttgttttcctcgttgctacaattttggtagcatggcaatgccatgcgtacgatatgttccctctccgaatgaacactggctatggtgcccgtactccggaggtgaaatgcgcaagttggaggcttgctgtggaagcacacaacatctttggctttgagaccattcctgaagagtgcgttgaagcaacaaaggaatacatccatggcgaacaatatagatcagactccataacagttaaccaacaagcttacttttatgccagagacctcgaagtccatcccaatgacacatttgtgttcagtatagatggcaccgtactctctaatattccatactac

SEQ ID NO: 236582 - DNA, 382 bp, Glycine max
ggcacaagtttgttgagatagctagaagcaataagatgaaaatgaaagtgcttgttttgtttgttgctacagttttggtagcatatgaatgccatggctcagactaccagaagttccctctccaaatgaaaactgggtttggtgggcaatacagcaatgaggtggcatgtgccagttggaggcttggcgtggaagcaaacaacgtagtcaagtggcaaactgttcctgcagcttgcggagagtacatagctgactacgttctaggagaccaatatagatcagattccaaaacagttaaccaacaagcttatttctatgctaaatccctcaaactcaccaacaaagatgtctttgtcttggacgttgacgacactactctctc

SEQ ID NO: 236583 - DNA, 390 bp, Glycine max
ggagagaagagagatggatccagacgcgttggcaaaggcattcgtggagcactactacagcaccttcgacaccaaccggaacggtttagcgaatctgtatcaggagggttccatgctgaccttcgaagggcagaagatccatggcgcttccagcatcgtcgctaagctcacttccctccctttccagcagtgccaccactccatctccaccgtcgactgccagccctccggtgtcaacgctggtatgcttgtctttgtcagcggcaacctccagctcgctggcgaacagcacactctcaagttcagccagatgttccatttgataccatcgcctcagggaagctattatgtgttgaatgacatattccgtctgaactatgcatgaagata

SEQ ID NO: 236584 - DNA, 370 bp, Glycine max
atcagtggtgccccccaggataacaacataatgctgtggaatgctgtcatatttggtcctgatgatactccatgggatggaggcacgttcaggttgacactccaatttactgatgactatccaaataaaccaccgactgtacgatttgtgtctcgcatgtttcatccaaatatttatgctgatggaagtatttgtttggatatattacaaaatcagtggagtcctatttatgatgtggctgctatactcacatctatccagtcattgctttgtgatcccaacccaaattctcctgcaaactctgaagcagctcgaatgtttagtgagaacaagcgtgagtacaatcgaatagtgagggacattgtggatc

SEQ ID NO: 236585 - DNA, 391 bp, Glycine max
ggcacaagtttgttgagatagctagaagcaataagatgaaaatgaaagtgcttgttttgtttgttgctacagttttggtagcatatgaatgccatggctcagactaccagaagttccctctccaaatgaaaactgggtttggtgggcaatacagcaatgaggtggcatgtgccagttggaggcttggcgtggaagcaaacaacgtagtcaagtggcaaactgttcctgcagcttgcggagagtacatagctgactacgttctaggagaccaatatagatcagatcccaaaacagttaaccaacaagcttatttctatgctaaatccctcaaactcaccaacaaagatgtctttgtcttggacgttgacgacactactctctctaatctcca

SEQ ID NO: 236586 - DNA, 385 bp, Glycine max
ggacaagccaatcctttgtgtaggtgctcaaccctagtaagccgcaatggtgaagtactcaagggagcctgacaatccaactaagtcttgcaaggctagaggcgccgaccttagggttcattttaagaacacaagggaaactgcctttgcaatcaggaagttgcccttggtcaaggctaaaaggtacttggaagatgttcttgcccacaagcaggcaattccattcagacgtttttgtcgaggtgttggaaggacagcccaggctaagaatagacactctaatggccaaggacggtggcctgtcaagtcagcaaaattcattcttgatttgctcaaaaatgctgagagcaatgctgaagtgaaaagtttggatgttgatgcactg

SEQ ID NO: 236587 - DNA, 341 bp, Glycine max
cggggcacaagtgagtttgttgatcgagataactagaaacagtgtgatgaacatgaaagtccgtgttttcatcgttgccatactttgggtaacatggcaatgctatgcgtcagatatgtaccctctcggaatgagcactggctatcagtgcccgtaccccggacgtgagatgcgcagtgtttgaggcatgctgttgaagcacacaacatctttggctttgagactattcgtgaagagtgcgttgaagcaacacaggaatacatctatggcgaacaagatcgatgacactcgactagacttatccaacaagctcacctttatgctacacacctcgaagtcca

SEQ ID NO: 236588 - DNA, 393 bp, Glycine max
gcacaagtgagtttgttgatcgagataactagaaacagtgtgatgaaaatgaaggtccttgttttcttcgttgctacaattttggtagcatggcaatgccatgcgtacgatatgttccctctccgaatgaacactggctatggtgcccgtactccggaggtgaaatgcgcaagttggaggcttgctgtggaagcacacaacatctttggctttgagaccattcctgaagagtgcgttgaagcaacaaaggaatacatccatggcgaacaatatagattagactccaaaacagttaaccaacaagcttacttttatgccagagacctcgaagtccatcccaaggacacatttgtgttcagtatagatggcaacgtactctctaatattccatac

SEQ ID NO: 236589 - DNA, 393 bp, Glycine max
gacacaccgtttgttctattcttaactcaacttctgctacccactctcttcttccaagtcgaaccacgcttttctctacagtcatgggcaaggtcaagatcggaatcaacggatttggaagaattggccgtttggttgccagagtcgctctgcaaagagacgatgtggagctcgttgccgttaacgaccctttcattaccaccgattacatgacatacatgtttaaatacgacagtgttcacggacactggaagcatcacgatgtcaccgttaaggacgagaagacccttctcttcggtgacaagccagtcactgtttttggacataggaaccctgaagagatcccatgggggtcaactggagctgatatcattgttgagtccaccggagttt

SEQ ID NO: 236590 - DNA, 397 bp, Glycine max
gaaggtgcaagagtttgttgtgagctataagctactttatcgtgaggagaatatgaagttgtttgttttctttgttgctgcagtagttttggtagcatggccatgccatggcgcaggctaccaaaggttccctctccgaatgaaaactggctatggtgagcgttcttcggaggtaaaatgcgcaagttttaggttgctgtggaagcacacaacatccgagcctttaaaaccattcctgaagagtgcgttgaaccaacaaaggactacattaatggcgaacaatttagatcagactctaaaacagttaaccaacaagctttcttttatgctagtgaacgcgaagtccatcactacgacatatttatattcggcatagattacaccgtactctctaata

SEQ ID NO: 236591 - DNA, 383 bp, Glycine max
ggcagaactttgttgagatatctacaagcaataagatgaacatgaaagtgcttgttttgtttgttgctacagttttggtaccatatgaatgccatggctcagactaccagaagttccctctccaaatgaaaactgggtttggtgggcaatacagcaatgacgtggcatgtgccagttggaggcttggcgtggaagcaaacaacgtactcaagtggcaaactgttcctgcagcttgcggagagtacatatctgactacgttctacgagaccaatatagatcagattccaatacagttaaccaacaagcttatttctatgctaaatcactcaaactcaccaccaaatatgtcattgtcatggacgttgaccacactactctctct

SEQ ID NO: 236592 - DNA, 392 bp, Glycine max
ggcacaagtgagtttgtagatcgagatacctagagataatgtgatgaatgatgagtgtcgttggtttcttcattgctagaattttggtaacatggcaatgcaaagcataagatatgttctctctccgaatgaacactgtctagtgtgcccgtaatccggaggttaaatgctgcaagttggaagcttgctgttgaaacacacaacatctttggctttgagaccattcctgaagagtgcgtgaaagtaacaaacgaatacatttataggaaacaataaagatcagactccaaaacagttaaccaacaagcttacttttatgccagagacctcgaagtccatcccaaggacatactttgtgttagtatagatggacacgtactctccaatactcc

SEQ ID NO: 236593 - DNA, 377 bp, Glycine max
ggaatttttgattcttttcccctagattcagccacagtttcggaggagaagaaaatactcgttcgagatggcccgtacgaagcaaactgctcgtaagtccacaggaggaaaggctcctaggaagcagcttgcaaccaaggctgcacgtaagtctgcaccaactactggtggtgtgaagaagccacatcgttaccgtcctggtaccgttgctcttcgtgagattaggaaataccagaagagtaccgagcttttgatcaggaagctccccttccagaggctggttcgtgaaattgctcaggacttcaagactgatctgcgtttccagagccacgccgtgcttgcattgcaagaagctgctgaggcataccttgttgggc

SEQ ID NO: 236594 - DNA, 390 bp, Glycine max
ggcacaagtgagtttgttgatcgagataactagaaacagtgtgatgaaaatgaaggtccttgttttcttcgttgctacaattttggtagcatggcaatgccatgcgtacgatatgttccctctccgaatgaacactggctatggtgcccgtactccggaggtgaaatgcgcaagttggaggcttgctgtggaagcacacaacatctttggctttgagaccattcctgaagagtgcgttgaagcaacaaaggaatacatccatggcgaacaatatagattagactccaaaacagttaaccaacaagcttacttttatgccagagacctcgaagtccatcccaaggacacatttgtgttcagtatagatggcaccgtactctctaatattca

SEQ ID NO: 236595 - DNA, 353 bp, Glycine max
gtaagtccgccgtgtcttcatcatggtcaactgtgacgatttgatgcctgaatatctcatcgttgtcaacggtactgtggattctgaagatcttcctcgcaacatttctaaagaaatgccgcaccagaacaagatcctgaaagtcatcaggaataacttggtcaagaactgcatttagatgttcgctgaaattgctgacaacatcgaagactataacaagttttatgaagccttctctaagaacctgaaacttggtattcatgacgattctcagaactcgacatcgctagctgaattgcacaagtatcactccactaagagtgatgatgagatgaccagcctcaacgactatg

SEQ ID NO: 236596 - DNA, 392 bp, Glycine max
gcacaagtgagtttgttgatcgagataactagaaacagtgtgatgaaaatgaaggtccttgttttcttcgttgctacaattttggtagcatggcaatgccatgcgtacgatatgttccctctccgaatgaacactggctatggtgcccgtactccggaggtgaaatgcgcaagttggaggcttgctgtggaagcacacaacatctttggctttgagaccattcctgaagagtgcgttgaagcaacaaaggaatacatccatggcgaacaatatagatcagactccaaaacagttaaccaacaagcttacatttatgccaagagacctcgaagtccatcccaaggacacatttgtgttcagtatagatggcaccgtactctctaatattccaa

SEQ ID NO: 236597 - DNA, 360 bp, Glycine max
ggtgcacaagtgagtttgttgatcgagataactagaaacagtgtgatgaaaatgaaggtccttgttttcttcgttgctacaattttggtagcatggcaatgccatgcgtacgatatgttccctctccgaatgaacactggctatggtgcccgtactccggaggtgaaatgcgcaagttggaggcttgctgtggaagcacacaacatctttggctttgagaccattcctgaagagtgcgttgaagcaacaaaggaatacatccatggcgaacaatatagatcagaccccaaaacagttaaccaacaagcttacttttatgccagagacctcgaagttcatcccaaggacacatttgtgttc

SEQ ID NO: 236598 - DNA, 348 bp, Glycine max
caatgggatgtttgattaaggttttctcattaacgcatcttctctcttcacactgcgaaagtgcaacctgatagcctccaaatccaatggcttcagacaacaaactttcgaacccaatgagggagataaaagtgcacatgctcgtcctcaatacccctgttggcgacagtggagatcgtctcaccacagccgccaaggtgttggaataacttactggccataccccactgttttccacatcacggtacactgtacgttcctttgggattagaagaaatgagaagattgcatgctatgtcactgtcagaggtgacaacgcaatgcatcttttggagagtggattgaaag

SEQ ID NO: 236599 - DNA, 360 bp, Glycine max
gggggtgccattgttgctgtcatcatccgcagctgctgttattcgcaccgcaaacaaacagtgagccatggccgtcggaaagaacaagcgcatctccaaagggaaaaagggtggcaagaagaaggcagctgatccctttgccaagaaggattggtatgacattaaggccccttctctttttcaagtgaaaaatgttggcaaaaccctcgtctctcgtacgcagggtaccaagattgcttctgaaggacttaaacatagagtgtttgaggtctccttggctgatcttcaaggggatgaggatcatgcattcaagaagattacgttgagagctgaagatgtgcaacggaagaatgtcctgac

SEQ ID NO: 236600 - DNA, 379 bp, Glycine max
ggcgtgcagttcaaagcgaagaaagattcgaaacgaagaaagaaagcgttgtgaagaatggcggaagagggacaagtgatcggtgtccacagcgtagaggagtggaaggaacatctcaagaagggagaagagtccaagaaattgattgtggtggattttactgcttcttggtgcggtccatgccgtttcattgccccaattcatgcagagtttgctaaaaagttgccgaatgtcaccttcctcaaggtggatgtggatgaattggagactgtttccaaggagtggggaattgaggctatgccaaccttcctgttcttgaaagaatgcaagctggtggacaacgttgtgggtgccaagaaagatgagctgcaattgacaa

SEQ ID NO: 236601 - DNA, 384 bp, Glycine max
gacacacagctattcctcttaagcttgctactgagtttccacactgcataccttaggtcttccgaattcgaagttaatttgcaagatggctaaggaaaaggctcagatcaacattgtggtggttggtcatgtggaccctgaggaggcaaccaccattaacgagctgaagaagcctgttgtggagaaagaagctccagggcatgccatatgagggcatgcacgtacggcctcggaggggaaccagaaaattatgttaacaaaataatctggaaccctaatgtatcagtgtcatcatcagtgtgtagtttaagctagctttgctatggttacgttctttgagatgagagtcttgatgaacagtagcattctgatgtattgccttcc

SEQ ID NO: 236602 - DNA, 405 bp, Glycine max; identical to SEQ ID NO: 234594

SEQ ID NO: 236603 - DNA, 391 bp, Glycine max
gaaaagaaggttaagtgaaaagtgaaaagtgaaaatggacttggaagcagtgaagaggtacttagagaaaggaggagaaacagcatcggcggtggatgggttgcctccgaggtttctggaaccgttaataatgaacgctcttaaggtcgatctcatcgaaactggtcgcgttgtctgctccatgaagatacctccgcgtttactcaatgctgggaattcgttacacggtggcgccatcgctgctctggtcgacgtggtggggtccgctgcgattcccaccgttggatattcggctcccaatactggggtttctgttgagattaatgtttcgtatttggatgctgcctatgccgatgaggagattgagatcgaggccagcgctttgcgtgta

SEQ ID NO: 236604 - DNA, 381 bp, Glycine max
gagcgaaacagagagtgatttcagtgagtgatcggtgttcacttgatctcatcataatcgtcagcgtcaattgaagaagatgccgatcagaaacatcgccgtcggaaggcctgaagaggcgactcaccccgacacgttgaaggcggctttggctgagttcatctcaaccttcatcttcgtgttcgccggctcaggctccggcatcgcctacaacaagctcaccgacaacggcgctgccacccctgccggcctcatctccgcctccatcgcccatgcattcgccctcttcgtcgccgtctccgtcggcgccaacatctccggcggccacgtcaaccccgccgtcaccttcggcgccttcgtcggcggcaacatcaccttcct

SEQ ID NO: 236605 - DNA, 391 bp, Glycine max
ggcacaagtgagtttgttgatcgagataactagaaacagtgtgatgaaaatgaaggtccttgttttcttcgttgctacaattttggtagcatggcaatgccatgcgtacgatatgttccctctccgaatgaacactggctatggtgcccgtactccggaggtgaaatgcgcaagttggaggcttgctgtggaagcacacaacatctttggctttgagaccattcctgaagagtgcgttgaagcaacaaaggaatacatccatggcgaacaatatagatcagactccaaaacagttaaccaacaagcttacttttatgccagagacctcgaagtccatcccaaggacacatttgtgttcagtatagatggcaccgtactctctaataatcca

SEQ ID NO: 236606 - DNA, 384 bp, Glycine max
ggcgtacgcagcttcatccctaacgcgtgcatagcggagtcagagacagagacgcagccatggggcggagacctgcgaggtgttataggcaaattaagaacaagccataccccaagtcacgtttctgccgtggtgttcctgatcccaagatcaggatttatgatgttggtatgaagaagaagggtgttgatgagtttcctttctgtgtccatctggttagttgggagaaggaaaatgtttcaagtgaggccctggaagctgctcgcattgcttgcaacaagtacatggccaaatttgctggaaaggatgctttccacttgagagtcagggtgcacccattccatgttcttaggatcaacaagatgctttcgtgtgctggtgctg

SEQ ID NO: 236607 - DNA, 411 bp, Glycine max
  unsure (1)..(411): unsure at all n locations
gaggaacgttatttttggacatttacctttacatactaactagaacctccctcgcgcttttcttcgtttccaaacccgaaaggcccaaccacagagtctccattgcccctcgctctctctattggttcacgcgcggcaattggagattcacgcgccaccatggcctcaccaccgacactccctatctcctcccaatccagcgcctccggcggctccgcctcgcagtcccagcctccgatcgcaacgccggcgttccgcgccttcatctcccgcatctcctcgtccctccgtcacgcctttgcgcagcgccgcccgtgggcggagctcatcgaccggagctccatgtcncgacctgacaccctcgccgaagcatactctcggattcgcangaacttcggctacttccgcgtc

SEQ ID NO: 236608 - DNA, 364 bp, Glycine max
ggctggaatatgcagggcatagaaatggaaaggttgtcgtcttcatcggtgatcgcgcacaacacatgggaactcgagaagaacatcatcccgatggacactccgggcggcgccgctaactccgccaccgctacgaccatgaccaatgccgacgactcgatcttccactacgacgaggcggggcagaacgagttccaacgcgacaagccctgtgccaatgaccctcactacttcaagtgcgtgaagatctccgcactcgcgctcctcaagatggtcgtccacgcgcgctccggcggcatgatcgacgtcatgggtctcatgcacggcaagaccgacgccgaagccatcatcgtcatggacgcct

SEQ ID NO: 236609 - DNA, 405 bp, Glycine max
gaaggtgcaagagtttgttgtgagctataagctagtttaccgtgacgagaataataagttgtttgttttctttgttgctgcagtaattttggtaacatggacatgccatggcgcaggctaccaaacgttccctctccgaatgaaaactggctatggtgagcgttcttcggaggtaaaatgcgcaagttttaggcttgctgtggaagcacacaacatccgagcctttaaaaccattcctgaatagtgcgttgaaccaacacacgactacattaatggcgaacaatttacatcagactctaaacagttaaccaacaagctttcttttatgctagtgaacgcgaagtccatcacaacgacatatttatattcggcatagactacagcgtactctctaatatcccatac

SEQ ID NO: 236610 - DNA, 381 bp, Glycine max
gaaggtgcaagagtttgttgtgagctataagctagtttatcgtgaggagaatatgaagttgtttgttttctttgttgctgcagtagttttggtagcatggccatgccatggcgcaggctaccaaaggttccctctccgaatgaaaactggctatggtgagcgttcttcggaggtaaaatgcgcaagttttaggcttgctgtggaagcacacaacatccgagcctttaaaaccattcctgaagagtgcgttgaaccaacaaaggactacattaatggcgaacaatttagatcagactctaaaacagttaaccaacaagctttcttttatgctagtgaacgcgaagtccatcacaacgacatatttatattcggcatagatta

SEQ ID NO: 236611 - DNA, 405 bp, Glycine max
gagtgagagagagagaaggcaagatgtcgaacagaggacgcggtggttcggcggggaacaagttccggatgtcgctgggtctgccggtggcggcgacggtgaactgcgccgacaatacgggggcgaagaacctctacatcatatcggtgaaagggatcaaagggcgtttgaaccgtctcccctcggcttgcgttggcgacatggtgatggccaccgtgaagaacgggaaacccgatctgaggaagaaggttttgccagctgtcattgttcgccagcgcaagccatggcgccgaaaggacggcgtctacatgtatttcgaagataatgctggtgttattgtcaatcccaaaggagaaatgaaaggttctgctatcactggtcccattggaaaagagtgtgctgatc

SEQ ID NO: 236612 - DNA, 335 bp, Glycine max
gactcaccacttcagaacactcataatacaaagcacaaagcagagctcatccttgaattaaattatggcatgcagcttcttccatggctctctcatccccatccttggctggcaaggccgtgaagctgggcccatcagccccagaagtgggaagggttagcatgacgaataccgtcaccaagcacgtctcttcatgaagcacatggtactgcccagactgagtcaagtaattgggcctattctctggcgagctttcgtactacttaatcggtgagttcccaagcgactacggctgggagactgctgcgctttctgcatacccaaaaatcttcgcc

SEQ ID NO: 236613 - DNA, 380 bp, Glycine max
gcacaagtgagtttgttgatcgagataactagaaacagtgtgatgaaaatgaaggtccttgttttcttcgttgctacaattttggtagcatggcaatgccatgcgtacgatatgttccctctccgaatgaacactggctatggtgcccgtactccggaggtgaaatgcgcaagttggaggcttgctgtggaagcacacaacatctttggctttgagaccattcctgaagagtgcgttgaagcaacaaaggaatacatccatggcgaacaatatagatcagactccaaaacagttaaccaacaagcttacttttatgccagagacctcgaagtccatcccaaagacacatttgtgttcagtatagatggcaccgtactctc

SEQ ID NO: 236614 - DNA, 363 bp, Glycine max
ggaacttctcatgtgcagttctacacatccctagctctgtcgttccgtcggtgaggatggggtttcgggtgcgaagccctgatctccgcactctctttcttctctctctcttgtccatcgcttccgccaatgtcttcttctaatagcgtttcgatgacgggtgggaaaatcgatgggttaaatcatattggaaaaaagatgagaacgtggctggggagtggcaccacacctctggtcaatggaatggagacgctaatgacaaaggtaatcaaaccattgaggattacagattctatgctatttcagctgagtactctgaattcagcaacaatggtaagacacgaatctttcaattttctgtta

SEQ ID NO: 236615 - DNA, 367 bp, Glycine max
ggaactctcgcaagcttgttttcttgccttctttttctcttattctctactacaacattttttttgtgtgaaatttctctacaactaaatttccatataggctgcaagaccctcatcaacctacaattagtttgttacatatatagctaggttgaacaatatgggaaggtcaccatgctgtgagaagacagggctaaagaaagggccatggacaccagaggaagaccaaaagctcattgctttcatcgaaaagcatggccatggaagctggcgtgcattgcctgcaaaagctaggcttagaagatgtggaaagagttgcagacttagatggtcgaattatctccgacctgatataaaacgatgaaag

SEQ ID NO: 236616 - DNA, 383 bp, Glycine max
gaaagtgcaagagtttggtgtgagcgataacctagtttatcgtgcggagaatatgaagttgtttggtgtctttgttgccgcagtagttttggcaacatgggcatgccatggcgcaggctaccacaggttccctctccgaatgaaaactgggtatggtgagcgttcatcggcggtaaaatgcgcaagttttaggcttgctgtgggagcacacaacatccgagcctttaaaaccattcctgaagagtgcgttgaaccaggacaggactacattaatggcgaacaatttagatcagactctaaaacagttaaccaacaagctttcttttatgcgagtgaatgcgaagtccatcacaacgacatatgtatattcagcatacatgaca

SEQ ID NO: 236617 - DNA, 384 bp, Glycine max
ggatgcacaagtttgttgagatagctagaagcaataagatgaaaatgaaagtgcgtgttttgtttgttgctacagttttggtagcatatgaatgccatggctcagactaccagaagttccctctccaaatgaaaactgggtttggtgggcaatacagcagtgaggtggcatgtgccagttggaggcttggcgtggaagcaaacaacgtagtcaagtggcaaactgttcctgcagcttgcggagagtacatagctgactacgttctaggagaccaatatagatcagattccaaaacagttaaccaacaagcttatttctatgctaaatcactcaaactcaccagcaaagatgtctttgtcttggacgttgaccacactactctct

SEQ ID NO: 236618 - DNA, 296 bp, Glycine max
ggagcaaaaccctaatccctatttttcttcctcagtagtgtcatttacgcttctcttcgctgcagcaactatgcctaaccctaaggtcttcttcgacatgaccatcggcggtcaatctgctggtcgcatcgtgatggagctctatgccgacgtcactccccgcaccgtcgagaatttccgcgcgctttgcaccggcgagaaaggcgtagggcggagctgcaagcctctccactacaatggctcgtccttccaacgcgtgatcccgagtttcatgtgtcatggttgcgacttcaccg

SEQ ID NO: 236619 - DNA, 406 bp, Glycine max
gaaggtgcaagagtttgttgtgagctataagctagtttatcgtgaggagaatatgaagttgtttgttttctttgttgctgcagtagttttggtagcatggccatgccatggcgcaggctaccaaaggttccctctccgaatgaaaactggctatggtgagcgttcttcggaggtaaaatgcgcaagttttaggcttgctgtggaagcacacaacatccgagcctttaaaaccattcctgaagagtgcgttgaaccaacaaaggactacattaatggcgaacaatttagatcagactctaaaacagttaaccaacaagctttcttttatgctagtgaacgcgaagtccatcacaacgacatatttatattcggcatagataacaccgtactctctaatatcccatac

SEQ ID NO: 236620 - DNA, 403 bp, Glycine max
ggcacaagtgagtttgttgatcgagataactagaaacagtgtgatgaaaatgaaggtccttgttttcttcgttgctacaattttggtagcatggcaatgccatgcgtacgatatgttccctctccgaatgaacactggctatggtgcccgtactccggaggtgaaatgcgcaagttggaggcttgctgtggaagcacacaacatctttggctttgagaccattcctgaagagtgcgttgaagcaacaaaggaatacatccatggcgaacaatatagatcagactccaaaacagttaaccaacaagcttacttttatgccagagacctcgaagtccatcccaaggacacatttgtgttcagtatagatggcaccgtactctctaataatccaaaactacaaaaa

SEQ ID NO: 236621 - DNA, 400 bp, Glycine max
ggtgcacaagtgagtttgttgatcgagataactagaaacagtgtgatgaaaatgaaggtccttgttttcttcgttgctacaattttggtagcatggcaatgccatgcgtacgatatgttccctctccgaatgaacactggctatggtgcccgtactccggaggtgaaatgcgcaagttggaggcttgctgtggaagcacacaacatctttggctttgagaccattcctgaagagtgcgttgaagcaacacaggaatacatccatggcgaacaatatagatcagactccaaaacagttaaccaacacgcttacttttatgccagagacctcgaagtccatcacaaggacacatttgtgctcagtatagatggcaccgtactctctaatattccatactaca

SEQ ID NO: 236622 - DNA, 405 bp, Glycine max
gattgttggcttgtgctctgctcgtgcctctagggttatcatatctccatttccatttcctctctctcagtttccaagaatcttaagctatgggaaagtcttacccaaccgtgagcgctgattaccagaaggccgttgagaaggcgaagaagaagctcagaggcttcatcgctgagaagagatgcgctcctctaatgctccgtttggcatggcactctgctggaacttacgacgtgagctcgaagaccggtggtcccttcggaaccataaagcacccctccgaactcgctcacggcgctaacaacggtcttgacatcgctgttaggcttttggagccactcaaagcggagtttcctattttgagctacgccgattttctacagttggctggcgttgttgccgttg

SEQ ID NO: 236623 - DNA, 362 bp, Glycine max
ggatgaggagtatgaaggaaatgttgaggctactggagaggattattccgtggaacctgctgagagcaggaggccattccgtgctctccttgatgttggtcttattaggactacaaccggtaaccgtgtgtttggtgcccttaagggagctctggatggggggttggatattcctcacagtgacaagaggtttgctgggtttgataaggagaagaaggagcttgatgcagaggttcatcggaaatatgtttttggtggacatgttgctgcctatatgaggatcttggcggaagatgaaccagagaaataccagtcacacttcagtgaatacatcaagcgtgggatagaagctgatggtattg

SEQ ID NO: 236624 - DNA, 260 bp, Glycine max
ggcacaagtttgttgagatagctagaagcaataagatgaagatgaaagtgcttgttttgtttgttgctacagttttggtagcatatgaatgccatggctcagactaccagaagttccctctccaaatgaaaactgggtttggtgggcaatacagcaatgaggtggcatgtgccactttgatgcttggcgtggaagcaaacaacgtagtcaagtggcaaactgttcctgcagctttcagagagtacatagctgactacgtt

SEQ ID NO: 236625 - DNA, 376 bp, Glycine max
  unsure (1)..(376): unsure at all n locations
gagaatagagagctcctccaattagggtttttgtgatctgcagctacgatgggtaagggaacggggagtttcggtaagaggaggaacaagacccacaccctctgtgtgaggtgtggccgccgcagcttccacctccagaagagtcgttgctctgcgtgcgcttaccccgctgcgcgcaccaggaaatataactggagcgtgaaggccattacgagaaagaccaccggaactggaaggatgaggtacttgcgtaacgtgcctcgcagattcaagagcggcttcagagagggtaccgaagctgcacccaggaagagaggagctgctgcctctgcctaagctttgaatgaatgacagcaatttntgctgggtcagtgaa

SEQ ID NO: 236626 - DNA, 408 bp, Glycine max
ggcacaagtgagtttgttgatcgagataactagaaacagtgtgatgaaaatgaaggtccttgttttcttcgttgctacaattttggtagcatggcaatgccatgcgtacgatatgttccctctccgaatgaacactggctatggtgcccgtactccggaggtgaaatgcgcaagttggaggcttgctgtggaagcacacaacatctttggctttgagaccattcctgaagagtgcgttgaagcaacaaaggaatacatccatggcgaacaatatagatcagactccaaaacagttaaccaacaagcttacttttatgccagagacctcgaagtccatcgcaaggacacatttgtgttcagtatagatggcaccgtactctctaatattccatactacaaaaacatgga

SEQ ID NO: 236627 - DNA, 358 bp, Glycine max
gacagctattcctcttaagcttgctactgagtttccacactgcataccttaggtcttccgaattcgaagttaatttgcaagatggctaaggaaaaggctcagatcaacattgtggtggttggtcatgtggaccctgaggaggcaaccaccattaacgagctgaagaagcctgttgtggagaaagaagctccagggcatgccatatgagggcatgcacgtacggcctcggaggggaaccagaaaattatgttaacaaaataatctggaaccctaatgtatcagtgtcatcatcagtgtgtagtttaagctagctttgctatggttacgttctttgagatgagagtcttgatgaacagta

SEQ ID NO: 236628 - DNA, 350 bp, Glycine max
  unsure (1)..(350): unsure at all n locations
gattcaaaatggagacgtaatcaatgttgacatcaagaataggagaattgatgttttggtatcagatgaggagatggaagcacgcaggaaaaagtggactgctcctccatacaaagctaaccgaggagctctgtacaagtatattaaaaatgtgacacctgcttctagtggatgcgtaacagacgagtagaaagacatacctgcagagcaaaagctgatagtatgccttggtgaaattttgtcttgtgtttccagaacaagttggtaaaaattcanaaacaaacctcatttcagagaatttacaacaatgggaatgaattgctactattgattagtgactatttaatatt

SEQ ID NO: 236629 - DNA, 384 bp, Glycine max
gacccagttgcagaaagaaaagaccatcaaagtttcacttcagccttatccggtttagggtttcggtttttgacccaacctttgacgtatcgaaaccttaagtttcggatcaggtctgagcaatctggttggtagaacctttggtcttagagagtcaagttttatgtctgaattagacgatcaaattcctactgccttcgatccttttgctgatgcaaatgctgatgactcgggtgctgggtcaaaggagtatgtgcatattcgcgtacagcagcgaaatggaaggaaaagcctgacaaccgttcaaggattgaaaaaagaattcagctacaacaagatacttaaagatgttaagaaagagttctgttgcaatggaacagttgt

SEQ ID NO: 236630 - DNA, 397 bp, Glycine max; identical to SEQ ID NO: 235450

SEQ ID NO: 236631 - DNA, 395 bp, Glycine max
  unsure (1)..(395): unsure at all n locations
ggcagcatcagctttgaacgccgaagaaggttcatccaatccccgaagcccttcaccgcattgcaaccatgtcgaggagaaaggtcagagagccaaaggaagaaaacgtgactctgggcccagctgttagggatggtgaacatgtctttggcgtcgctcgcatctttgcctccttcaatgataccttcattcatgtcactgatttgtctgggagggaaacgcttgtccgcatcactggtggaatgaaggttaaggctgacagagatgaatcgtctccttatgctgctatgcttgcagctcaagatgttgctgccagatgcaaggaacttggcataactgctcttcatatcaagctccgttgcactggtggaaacaagacanagacacctggccct

SEQ ID NO: 236632 - DNA, 316 bp, Glycine max
  unsure (1)..(316): unsure at all n locations
ggagcaaaaccctaatccctatttttcttcctcagtagtgtcatttacgcttctcttctctgcagcaactatgcctaaccctaaggtcttcttcgacatgaccatcggcggtcaatctgctggccgcatcgtgatggagctctacgccgacgtcactccccgcaccgccgagaacttccgcgcgctttgcaccggcgagaagggcgtanggcggagcggcaagcccctccactacaagggctcgtccttccaccgcgtgatcccgagtttcatgtgtcagggtggcgacttcaccgccggaaacggaaccggcggc

SEQ ID NO: 236633 - DNA, 380 bp, Glycine max
gatctggcagcagaagaacaagtagttgagaactaagaaggagaagcaaatggcttcctcaatgatctcttccccagctgttaccactgtcaaccgtgccggtgccggcatggttgctccattcactggcctcaagtccatggctggcttccccaccagaaagaccaacaatgacattacctccattgctagcaacggtggaagagtgcaatgcatgcaggtgtggccaccagttggcaagaagaagtttgagactctttcctacctgccagaccttgatgatgcacaattggcaaaggaagtagaataccttcttaggaagggatggattccttgcttggaattcgagttggagcacggtttcgtgtaccgtgagcaca

SEQ ID NO: 236634 - DNA, 383 bp, Glycine max
gcacttcaattgcaatcaaattagttcattctctttgcgcagttccctacctctcctttcaagatgcagatcttcgtcaagaccctcaccggaaagaccatcacccttgaggtggaaagctctgacaccatcgacaacgtcaaggccaagatccaggacaaggaaggaattcccccggatcagcagcgtctcatcttcgccggaaagcagctcgaggacggccgtaccctcgccgactacaacatccagaaggagtcaacccttcaccttgtccttcgtctccgtggtggcatgcagatcttcgtcaagactctcactggcaaaaccataaccctagatgtcgaaagctctgacaccattgacaacgtcaatgccaagattca

SEQ ID NO: 236635 - DNA, 358 bp, Glycine max; identical to SEQ ID NO: 234733

SEQ ID NO: 236636 - DNA, 376 bp, Glycine max
cagaaggggactcacacctaccttgacacattttaaatgtagccactactaactttatcataccactcactcttacatcattgtccctaaatggcggaaaccctgatccaaatcggcgtggttgggtgcgccgacatagcccggaaggtctcccgcgccatcacgctcgcccccaacgccgccctctgcgccgtggcgagccgctctcacgacaaggcagccgcattcgccgccgccaacggcttccctctctcagccaaagtgtacggctcctacgagtcccttctggaggaccccgacgtggacgccgtctacatgccactccccaccagcctccatcttcactgggccgtgctcgcggcccagaacaagaaac

SEQ ID NO: 236637 - DNA, 298 bp, Glycine max
  unsure (1)..(298): unsure at all n locations
aggggattangggttgtcattagcacttcttcttttcacactgccgctgcaacaatggcttcagagaagaaactttcgaacccaatgatggagataaaagtgcagaagctcgttctcaatatctctgttggcgagagtggagatcgtctcaccagagccgccaaggtgctggaacaacttagtggccaaaccccagtgttttccaaagcaaggtacactgttcgttcctttgggagtagaagaaatgagaagattgcatgctatgtcactgtcagaggtgacaaggcaatgcaacttt

SEQ ID NO: 236638 - DNA, 383 bp, Glycine max
  unsure (1)..(383): unsure at all n locations
ggttgagatctgaatcaaaatcagaaacgataatggctacaccggaccacctcttcaacctccgcaacaacttctacctcggcgcttaccaagccgccatcaacagcagcgacgttgccaacctctcccaagaagataccctcgagcgcgacaccctcgtccaccgctgctacatcgccctcggccagctccagttcgtcatctccgagatccacgacgatgctcccacaccactccaagccgtcaaactcctcgccctctatttctcctctcccgacaccaaggattccgccatcgcgagtctcaaggagtggctcgccgattccgctattggaaacaacgccacgctgaggctcgtccgcggtctcgtcntcctccacgag

SEQ ID NO: 236639 - DNA, 369 bp, Glycine max
  unsure (1)..(369): unsure at all n locations
gacacaccgtttgttctattcttaactcaacttctgctacccactctcttcttccaagtccaaccacgcttttctctacagtcatgggcaaggtcaagatcggaatcaacggatttggaagaattggccgtttggttgccagagtcgctctgcaaagagacgatgtggagctcgttgccgttaacgaccctttcattaccaccgattacatgacatacatgtttaaatacgacagtgttcacggacactggaagcatcacgatgtcaccgttaaggacgagaagacccttctcttcggtgacaagccagtcactgtttttggacacaggaaccctgaagagatccatggnggtcaactggagctgatat

SEQ ID NO: 236640 - DNA, 376 bp, Glycine max
  unsure (1)..(376): unsure at all n locations
tgaatcaaacgagtttgtgggagataaagttgcctatgcacttcaacaaggtctaaaagttattgcatgcattggggagactctcgaacagcgtgaagctggtacaacaacggctgttgtttctgagcaaacaaaagcaattgcagctaaaatatcaaattgggacaatgttgttttggcctacgagccagtttgggccattggaacaggaaaggttgctactcctgctcaggctcaagaggtccatgctgatttgaggaaatgggttcatgacaatgtgagtgccgaagttgctgcatctgtaagaattatctatggaggttctgtaaatggaaganactgcaaaaaattggccgcacagcccgatgttgatgga

SEQ ID NO: 236641 - DNA, 351 bp, Glycine max; identical to SEQ ID NO: 236443

SEQ ID NO: 236642 - DNA, 369 bp, Glycine max
ggttctagtgtgtgattgtttgttgttgtaactcgttcttcttcttttgttgttctgtgtttgtgtttgttttttctctcacctgaaaatgtcttgctgcggtggtaactgtggttgcggaagctcctgcaagtgcggcaacggctgcggaggctgcaagatgtacccagacttgagctacactgagtcaaccaccaccgagaccttggtcatgggagtggcacctgttaaggctcaatttgagggtgctgaaatgggtgtgcccgctgagaacgatggctgcaaatgtggaccaaactgctcctgcaacccctgcacttgcaagtgaggtgttgggagagcaagcttcaagcagagatagcccttaat

SEQ ID NO: 236643 - DNA, 365 bp, Glycine max
ggagcttgcggggaacgctgcgagggacaacaagaagacgaggatcgttccgaggcacattcaactggcggttaggaacgacgaggagttgagcaagctgatgggatctgtgaccattgccaacggtggtgttctgcctaacattcaccagaatttgttgcccaagaaggtcgctggcaaggggaagaccgagattggatctgctagtcaggagttttagatttaaggctcttgttttcgtatgtagttggttgccttatatagtaagattaggattgacattggatgatgtatagtcctttaacatttgaaaataattagttgttttctaacatggttcctgcatacttttcatttatttgagt

SEQ ID NO: 236644 - DNA, 355 bp, Glycine max
ggtgcacaagtgagtttgttgatcgagataactagaaacagtgtgatgaaaatgaaagtccttgttttcttcgttgctacaattttggtagcatggcaatgccatgcgtacgatatgttccctctccgaatgaacactggctatggtgcccgtactccggaggtgaaatgcgcaagttggatgcttgctgtggaagcacacaacatctttggctttgagaccattcctgaagagtgcgttgaagcaacaaaggaatacatccatggcgaacaatatagatcagactccaaaacagttaaccaacaagcttacttttatgccagagacctcgaagtccatcccaaggacacatttg

SEQ ID NO: 236645 - DNA, 367 bp, Glycine max
gggcgaggaagccacatatagacacaatacagagtgagttgttgctccttcgccacagctctctgccaacatgggtatctccagagattctatgcacaagaggcgtgccactggtggcaagaagaacgcctggaggaaaaagagaaagtatgagcttggtcgccagcctgctaacactaagctgtcaagcaacaagacagtcaggaggattcgtgttagaggtggaaatgtgaaatggatggcatttgagattggatactggaaattactcctggggaagttaagctgtaactcgcaagactcgtgtactagatgtgggttacaatgcctcaaacaatgagcttgtgcgtactcagaatcttgtcaa

SEQ ID NO: 236646 - DNA, 385 bp, Glycine max
agggggacaagttaatttgttgattgaaaatactaaaaacaatgtgatgaaaatgaaaggccttgttttcctcgttgctaaaattttggtaacaaggcaatgccatgcgtacgatatgttccctctccgaatgaacactggctatggtgcccgtactccggaggtgaaatgcgcaagtttgaggcgtgctgtggaagcacacaacatcttttgctttgagaccattcctgaatagtgcgttgaagcaacaaatgaatacatccatggcgaacaatatagatcagactccaaaacagttaaacaacaagcttacatttatgccagagacctcgaagtctatcccaaggacacatttgtgttcagtatagatggcaacgtactctct

SEQ ID NO: 236647 - DNA, 344 bp, Glycine max
aggcatgccactttggtcagagatatttttatttttagacatcatcactaacgatcagccctctatatatatacagcctgcacaacctcattaggaaccccccattactcacttttcatccttcgatcatacacttagttgcttccaattaagatggttctgctagagaagctctgggatgatgttgtggctggccctcaacctgagcgtggccttggcaagctcagaaaactcaccaccctcaaaagtattgatgaaggagaaagtaacaagctgcagaagacgttgtcgatgccgtcgacaccaacaaccccgatgactccgacgactccaacgacaccggg

SEQ ID NO: 236648 - DNA, 383 bp, Glycine max
  unsure (1)..(383): unsure at all n locations
ggcacaagtttgttgagatagctagaagcaataagatgaaaatgaaagtgcttgttttgtttgttgctacagttttggtagcatatgaatgccatggctcagactaccagaagttccctctccaaatgaaaactgggtttggtgggcaatacagcaatgaggtggcatgtgccagttggaggcttggcgtggaagcaaacaacgtagtcaagtggcaaactgttcctgcagcttgcggagatgtacatagctgactacgttctangagaccaatatagatcagattccaaaacagttaaccaacaagcttatttctatgctaaatccctcaaaactcacaacanagatgtctttgtcttggacgttgacgacactactctctc

SEQ ID NO: 236649 - DNA, 347 bp, Glycine max
gagggttttgcgctgttgttgctgctcatcctccgtaacctccgagctctgcaccgatgaacgaagccatggggaagacacatggaatgggatctgctcgcaagctcaagtcccaccgcatgaggcacaggtgggctgacaagtcatacaggaaatcacatcttggaaatgaatggcagaaaccttttgctggttcatcccatgccaagggaattgtccttgacaagataggtattgaggctaagcagcccaactctgccattcgtaagtgtgccagggttcaacttatcaagaatgggaagaagattgccgcttttgtccctaatgacagttgcttgaactacatt

SEQ ID NO: 236650 - DNA, 340 bp, Glycine max
gactctgcgaaggtgcaacctgacagcctccaaatccaatggcttcagagaagaaactttcgaacccaatgagggagataaaagtgcagaagctcgtcctcaatatctctgttggcgagagtggagatcgtctcaccagagccgccaaggtgttggaacaacttagtggccaaaccccagtgttttccaaagcacggtacaccgttcgttcctttgggattagaagaaatgagaagattgcatgctatgtcactgtcagaggtgacaaggcaatgcaacttttggagagtggtttgaaggtgaaggaatatgaacttcttagaaggaacttcagtgatac

SEQ ID NO: 236651 - DNA, 374 bp, Glycine max
agagaagttattagggtttttgagtgcggcggtccaaacactcttctctgcagcttttgcctacaactcccttcaccatggctgaacaaaccgagaaagcttttctgaagcaaccaaaagtgtttctcagcacaaagaagactgggaagggaaagagacctggaaaaggtgggaaccgcttttggaagtccattgggcttggatttaagactcccagggaagccatcgaaggaacctatattgacaagaagtgccccttcactggtaatgtttccatccgtggccgtatcttggctggaacatgtcacagtgctaagatgaacaggactattattgttagaaggaattatctccattttatcaagaagtaccag

SEQ ID NO: 236652 - DNA, 371 bp, Glycine max
gactctgcgaaggtgcaacctgacagcctccaaatccaatggcttcagagaagaaactttcgaacccaatgagggagataaaagtgcagaagctcgtcctcaatatctctgttggcgagagtggagatcgtctcaccagagccgccaaggtgttggaacaacttagtggccaaaccccagtgttttccaaagcacggtacaccgttcgttcctttgggattagaagaaatgagaagattgcatgctatgtcactgtcagaggtgacaaggcaatgcaacttttggagagtggtttgaaggtgaaggaatatgaacttcttagaaggaacttcagtgatactggttgcttcggctttggtattcaagagcat

SEQ ID NO: 236653 - DNA, 358 bp, Glycine max; identical to SEQ ID NO: 234733

SEQ ID NO: 236654 - DNA, 315 bp, Glycine max
  unsure (1)..(315): unsure at all n locations
gggcttccatctctcaaaagctcaaccacttgccatggcagcagcagcgtcaatgtgtatgagcttcaacctggcaacagcattcaagggtctctctttttcttcttcctcctcatcgttcttcgctggaagtggtagttattctctccgcgcgggtcccacctcggtggtgtcgctgccccggcgctgcccgctgaccatatagaacgcccacaagaaaggggctggcagcatgaanaacggacgcgactcgcaaggcaagcgtctcggagtcaagatatactgcgaccaggtcgccaagcccggctccatcat

SEQ ID NO: 236655 - DNA, 384 bp, Glycine max
gaaggtgcaagagtttgttgtgagctataagctagtttatcgtgaggagaatatgaagttgtttgttttctttgttgctgcagtagttttggtagcatggccatgccatggcgcatgctaccaaaggttccctctccgaatgaaaactggctatggtgagcgttcttcggaggtaaaatgcgcaagttttaggcttgcttgtggaagcacacaacatccgagcctttaaaaccattcctgaagagtgcgttgaaccaacaaaggactacattaatggcgaacaatttagatcagactctaaaacagttaaccaacaagctttcttttatgctagtgaacgcgaagtccatcacaacgacataattatattcggcataaataaca

SEQ ID NO: 236656 - DNA, 375 bp, Glycine max
ggcggcacaaagcattcactgtgtcggaaaaagaagaagagaaaaaagatgagcgacggaggaaaacgacaaggtggaagagcgttgccgccgccgccaagaggccctccgcctcctcccccctctcgccctcgcctcgaacccgtcgatcgcgaaaagacatgtccgttactgctgcgagtgttcactaagattgggagtcaccattccatggaagactttgccgtcagaggcaaagagcccaaagacgaggttcagatttacacctggaaggacgctactctccgagaactcaccgatcttgtcaaagaagttgctccggctgcaaggagaagaaacgccaaactctccttcgcctttgtattccccgacaaa

SEQ ID NO: 236657 - DNA, 363 bp, Glycine max
gaattgcaatcaaattagttcattctctttgcgcagttccctacctctcctttcaagatgcagatcttcgtcaagaccctcaccggaaagaccatcacccttgaggtggaaagctctgacaccatcgacaacgtcaaggccaagatccaggacaaggaaggaattcccccggatcagcaacgtctgatcttcgccggaaagcagctcgaggacggccgtaccctcgccgacgacaacatccagaaggagtcaacccttcaccttgtccttcgtctccgtggtggcatgcagatcttcgtcaagactctcactggcaaaaccataaccctagaggtcgaaagctctggacacattgacaacgtc

SEQ ID NO: 236658 - DNA, 380 bp, Glycine max
  unsure (1)..(380): unsure at all n locations
gagcatatatatcaataatctattttatactatacctacattttgataattttctttgtagttgatagccatggctacccgtggaaagcttgaggttgacattgatctcaagtccaacgcagacaagtactggcaaacccttaggaattctactgaaatattccctaaggccttcccacatgattacaaaagcattgaggttcttgagggtgatggcaagtctcctggttctatccgccacataagttatggtgaaggttcaccacttgtgaaatcatcctttgagaagattgaggctgttgatgacgaaaagaaggtagtgtcgtacactatcattgatggggaactcctccagcactacannacaatcaagggagaca

SEQ ID NO: 236659 - DNA, 152 bp, Glycine max
ggcacaattgagtttgttgctcgagataactagaaccactgtgaggaaaatgacggtccttgttttcgtcgttgcggcaggtttggtatcatgggaatgcgatgcgtacgatatgtgctctctccgactgacggcaggtcatggggcccgta

SEQ ID NO: 236660 - DNA, 359 bp, Glycine max
gacaagtttgttgagatagctagaagcactaagatgaatatgaaagtgcttgttgtgtttgtcgccacagttttggtaacatatgaatgccatggctcacactaccagaagttccctctccaactgaaaactgggtttggtgggcactatagcactgaggtggcatgtgccagttggaggcttggcgtggaagcaaacaacgtactctagtggcaaactgttcctgcagcttgcggagagtacatagctgactacgttctaggagaccaatatagatcagattccaaaacagttaaccaacaagcttacttctatgctaaatccctcaaactcaccaccaaagatgtctttgtcttgga

SEQ ID NO: 236661 - DNA, 381 bp, Glycine max
cccacgcgtccgagacgacagaagggggcacaagtgagtttgttgatcgagataactagaaacagtgtgatgaaaatgaaggtccttgtcttcttcgttgctacaattttggtagcatggcaatgccatgcgtacgatatgttccctctccgaatgaacactggctatggtgcccgtactccggaggtgaaatgcgcaagttggaggcttgctgtggaagcacacaacatctttggctttgagaccattcctgaagagtgcgttgaagcaacaaaggaatacatccatggcgaacaatatagatcagactccaaaacagttaaccaacaagcttacttttatgccagagacctcgaagtccatcgcaaggacacatttgtg

SEQ ID NO: 236662 - DNA, 367 bp, Glycine max
gattctcccaaactaacaaacaaatcccagggagccaccaaccatggcttccaagctctgcgactcatgcaaatcagccactgctaccttgtactgccgccccgacgcggccttcctctgcggcgcctgtgactctaaggttcatgccgccaacaagctcgcatcgcgccacccgcgcgtcgtgctctgcgaggtgtgcgagcaggcgcccgcgcatgtgacctgtaaagccgacgccgccgcgctctgccttgcctgcgatcgcgatatccactccgccaaccccctcgccagccgccacgagcgcatccccgtcacgccgttcttcgagtccgtacattcagtcaaggcctcctcgccgatcaac

SEQ ID NO: 236663 - DNA, 376 bp, Glycine max
  unsure (1)..(376): unsure at all n locations
ggcacaagtttgttgagatagctagaagcaataagatgaaaatgaaagtgcttgttttgtttgttgctacagttttggtagcatatgaatgccatggctcagactaccagaagttccctctccaaatgaaaactgggtttggtgggcaatacagcaatgaggtggcatgtgccagttggaggcttggcgtggaagcaaacaacgtagtcaagtggcaaactgttcctgcagcttgcggagagtacatagctgactacgttctangagaccaatatagatcagattccaaaacagttaaccaacaagcttatttctatgctaaatccctcaaactcnacaacaaagatgtctttggcttggacgttgacgacactac

SEQ ID NO: 236664 - DNA, 309 bp, Glycine max
gatctggcagcagaagaacaagtagttgagaactaagaaggagaagcaaatggcttcctcaatgatctcttccccagctgttaccactgtcaaccgtgccggtgccggcatggttgctccattcactggcctcaggtccatggctggcttccccaccagaaagaccaacaatgacattacctccattgctagcaacggtgtgaagagtgcaatgcatgcaggtgtggccaccagttggcaagaagatgtttgagactctttcctacctgccagaccttgatgatgcacaattggcaaaggaagtagaat

SEQ ID NO: 236665 - DNA, 362 bp, Glycine max
agggggagctgagtttctgtaatgtgttttggctgtggacaatggctctgtcttctgggcttttcttgtgttcttcttcccgtgttctcccaccaccagaaacccacactttcatgaggaccaggccttcttctgctgccttgcgcaccatttccgttagctgttgcaccgtctctcagtcgtctaagccagcccgcaaaatccgtggtatcatgaaaccccgcaaagtctcccccgagatggaagacctcgtcggcgctcccgagatggctcgaacccaagtcctcaaacggatttgggcttacattaaggacaacaatcttcaggaccctacagacaagaggactataaattgcgatgag

SEQ ID NO: 236666 - DNA, 327 bp, Glycine max
ggcgagagaagttattatggtttttgagtgcggcggtccaaacactcttctctgcagcttttgcctacaactcccttcaccatggctgaacaaaccgagaaagcttttctgaagcaaccaaaagtgtttctcagcacaaagaagactgggaagggaaagagacctggaaaaggtgggaaccgcttttgggagtccattgggtgtggatttaagactcccagggaagccatcgaaggaacctatattgagaagaagtgccccttcactggcaatgtttccatccgtggccgtatcttggctggaacatgtcacagtgctaagatgaac

SEQ ID NO: 236667 - DNA, 379 bp, Glycine max
gacccacagggaggcgaacagagaaactcagagacccgaaggcagatttcaagatgaagttcaacattgcgaatcccaccaccggttgtcagaagaagctggagatcgatgatgacctgaagctgcgagcattttgggacaagaggatctcacaagaggttgttggtgatgctctgggtgaggaattcaaaggttatgtcttcaaaattactggaggttgcgacaagcaaggatttccaatgaagcaaggagtgttgacccctggtcgtgttcgcctcttgctgcatagaggaactccttgtttccgtggttacggaaggcgcaatggagagcgtaggaggaagtctgttcgtgggtgcattgtcagccctgacctctc

SEQ ID NO: 236668 - DNA, 371 bp, Glycine max
  unsure (1)..(371): unsure at all n locations
ggtgctctgctcgtgcctctagggttatcatttctccatttccattttctctctcacttttcaagaatcgtaagctatgggaaagtcttacccaactgtgagtgctgattaccagaaggccgttgagaaggcgaagaagaagctcagaggcttcatcgctgagaagagatgcgctcctctaaagctccgtttggcgtggcactctgctggaacctttgacaagggcacgaagaccggtggatgccttcggaaccatcaagcaccctgccgaactggctcacagcgctaacaacggtcttgacatcgctgttaggcttttggagccactcnaagcggagttccctattttgagctacgccgatttctaccag

SEQ ID NO: 236669 - DNA, 378 bp, Glycine max
  unsure (1)..(378): unsure at all n locations
ggcagcggtccatacaattcaggagcagcatataagaatccttcaacacaagaggcatcgcctacaacaatggcagataattcaactgctcaaggaagcaacaccctattttctccttacaagatgcctaaattcaacctctctcatagggtggttttggctccgatgacaagatgcagagcgttgaactggattccccaggaagcacttgctgaatactacgctcaaagatcaacaccaggaggatttctcatcagcgaaggcaccttgatctctctcactgctcctgggtttccacatgtgcctgngatatattcagatgaacaagtggaggcgtggagaaacatagtggatgccgtgcatgccaaaggcagcatt

SEQ ID NO: 236670 - DNA, 379 bp, Glycine max
gttctagtgtgtgattgtttgttgttgtaactcgttcttcttcttttgttgttctgtgtttgtgtttgttctttttctcacctgaaaatgtcttgctgcggtggtaactgtggttgcggaagctcctgcaagtgcggcaacggctgcggaggctgcaagatgtacccagacttgagctacatggagtcaaccaccgccgagaccttggtcatgggagtggcacctgttaaggctcaatttgagggtgctgaaatgggtgtgcccgctgagaacgatggctgcaaatgtggaccaaactgctcctgcaacccctgcacttgcaagtgaggtgttgggagagcaagcttcaagcagagatagcccttaattaagaataatg

SEQ ID NO: 236671 - DNA, 366 bp, Glycine max
gaccctcatctttctctcaactcccttaaccaaaaccaaaacaatggccacccaaagaagctatcattcccctatcttattttcgtccctcatcttaacccttttcgttctctacttcccaagatgccaccacgccattcccaacaaccccatcaaaaccgtcgtcgttttggtaatggaaaatcgctccttcgaccacatgctgggctggatgaagagactaaacccggccatcgatggcgtgaccgggtcggagtccaatccgctgtccgtgtccgacccagactcgaagcggttcttcttcagggaccgggcccatttcgtggacccggaccctggtcactcgttccaggccatccgggaaca

SEQ ID NO: 236672 - DNA, 368 bp, Glycine max
ggcacaagtgagtttgttgatcgagataactagaaacagtgtgatgaaaatgaaggtccttgttttcttcgttgctgcaattttggtagcatggcaatgccatgcgtacgatatgttccctctccgaatgaacactggctatggtgcccgtactccggaggtgaaatgcgcaagttggaggcttgctgtggaagcacacaacatctttggctttgagaccattcctgaagagtgcgttgaagcaacaaaggaatacatccatggcgaacaatatagatcagactccaaaacagttaaccaacaagcttacttttatgccagagacctcgaagtccatcccaaggacacatttgtgttcagtatagatg

SEQ ID NO: 236673 - DNA, 370 bp, Glycine max
gatccctgtgccacctagtttcggagtttcaacattcaacaatggtacctcaagctttgtcagtgcctgcgagttccaacttgggtaacgcttctcgcaacaaaagtccctcccaactcgtattttctcaaagaaacccgtgctcgatagcttcctccttgccaaacccatatggccattcatcggaagttgggttatcaagtaaaagccgtggctttcctttaaaacatgatgagaaaaatatccatggtgctagtacaagttatggtgcaattgaagccaaggggaatccgccgataactccagcagtgatgactcctggaggacctcttgatctcacatctgttttgttcaggaatcgtatgatctt

SEQ ID NO: 236674 - DNA, 381 bp, Glycine max
ggcacaagtgagtttgttgatcgagataactagaaacagtgtgatgaaaatgaaggtccttgttttcttcgttgctacaattttggtagcatggcaatgccatgcgtacgatatgttccctctccgaatgaacactggctatggtgcccgtactccggaggtgaaatgcgcaagttggaggcttgctgtggaagcacacaacatctttggctttgagaccattcctgaagagtgcgttgaagcaacaaaggaatacatccatggcgaacaatatagatcagactccaaaacagttaaacaacaagcttacttttatgccagagaactcgaagtccatcccaaggacacatttgtgttcagtatagatggcaccgttctctc

SEQ ID NO: 236675 - DNA, 378 bp, Glycine max
  unsure (1)..(378): unsure at all n locations
ggcaagagtttgttgtgagctataagctagtttatcgtgaggagaatatgaagttgtttgttttcgttgttgctgcagtagttttggtagcatggccatgccatggcgcaggctatcaaaggttccctctccgaatgaaaactggctatggtgagcgttcttcggaggtaaaatgcgcaagttttaggcttgctgtggaagcacacaacatccgagcctttaaaaccattcctgaagagtgcgttgaaccaacaaaggactacattaatggcgaacaatttagatcagactctaaaacagtttaacaacaagctttcttttatgctagtgaaacccangtccatcacaacgacatatttatattccgcatagataaca

SEQ ID NO: 236676 - DNA, 328 bp, Glycine max
ggcacaagtgagtttgtcgatcgagataactagaaacagtgtgatgaaaatgaaggtccttgttttcttcgttgctacaattttggtagcatggcaatgccatgcgtacgatatgttccctctccgaatgaacactggctatggtgcccgtactccggaggtgaaatgcgcaaggtggaggcttgtgtgggaagcacacaatgatctttggctttgagaccattcctgaagagtgcgttgaagcaactgaggaatacatccatggcgaacaatatagatcagactccaaaacagttaaccaacaagcttacttttatgccagagacct

SEQ ID NO: 236677 - DNA, 289 bp, Glycine max
aaaggaaagtaagagaagagaagaatggccgaagagggacaagtgattggtgtccacagcgtggaggagtgggaggaacatctcaagaagggacaagagtccaagaaattgattgtggtggattttactgcttcttggtgcggcccatgccgtttcattgccccaattcttgcggatatggctaaaaagttgccgaatgtcaccttcctcaaggtggatgtggatgaattggcgactgtttccagggagtgggaagttgaggctatgccaaccttcctattcttgaaag

SEQ ID NO: 236678 - DNA, 330 bp, Glycine max
  unsure (1)..(330): unsure at all n locations
gagagtggtggagtgtgcaaaagagcgtcgtagtcgcaaccctaatcagaagaagcgcagcttcaagcgagtgacagccaccagccatgggtcgtatgcacagccgcggtaagggtatatcctcttctgctttgccctacaaaaggacacctcctagctggctcaagatctcttcgcaagatgtcgaagaaaatatctgcaagtttgcgaagaaaggtttgaccccgtctcagattggtgtcattctcagagattctcacggtattgctcaggtcaatagcgtcactggcagcanaatccttcgcatcctcaaggctcacggacttgcgc

SEQ ID NO: 236679 - DNA, 360 bp, Glycine max
ggattagggtttgtcattagcacttcttcttttcacactgccgctgcaacaatggcttcagagaagaaactttcgaacccaatgagggagataaaagtgcagaagctcgttctcaatatctctgttggcgagagtggagatcgtctcaccagagccgccaaggtgttgtgacaacttagtggtgaaaccccagtgtgttccaaagcaaggtacactgttcgttcctttgggattagaagaagtgagaagattgcatgctatgtcactgtcagaggtgacaaggcaatgcaacttttggagagtggtttgaaggttaaggaatatgaacttctcagaaggaatttcagtgatactggttgc

SEQ ID NO: 236680 - DNA, 367 bp, Glycine max
  unsure (1)..(367): unsure at all n locations
ggcacaagtgagtttgttgatcgagataactagaaacagtgtgatgaaaatgaaggtccttgttttcttcgttgctacaattttggtagcatggcaatgccatgcgtacgatatgttccctctccgaatgaacactggctatggtgcccgtactccggaggtgaaatgcgcaagttggaggcttgctgtggaagcacacaacatctttggctttgagaccattcctgaagagtgcgttgaagcaacaaaggaatacatccatggcgaacaatatagatcagactccaaaacagttaaccaacaagcttacttttatgccagagacctcgaagtccatcncaaggacacatttgtgttcagtatagat

SEQ ID NO: 236681 - DNA, 375 bp, Glycine max
ggcacaagtttgttgagatagctagaagcaataagatgaaaatgaaagtgcttgttttgtttgttgctacagttttggtagcatatgaatgccatggctcagactaccagaagttccctctccaaatgaaaactgggtttggtgggcaatacagcaatgaggtggcatgtgccagttggaggcttggcgtggaagcaaacaacgtagtcaagtggcaaactgttcctgcagcttgcggagagtacatagctgactacgttctaggagaccaatatagatcagattccaaaacagttaaccaacaagcttatttctatgctaaatccctcaaactcaccaacaaagatgtctttgtcttggacgttgacgacacta

SEQ ID NO: 236682 - DNA, 362 bp, Glycine max
gcacacaccgtttgttctattcttaactcaacttctgctacccactctcttcttccaagtccaaccacgcttttctctacagtcatgggcaaggtcaagatcggaatcaacggatttggaagaattggccgtttggttgccagagtcgctctgcaaagagacgatgtggagctcgttgccgttaacgaccctttcattaccaccgattacatgacatacatgtttaaatacgacagtgttcacggacactggaagcatcacgatgtcaccgttaaggacgagaagacccttctcttcggtgacaagccagtcactgtttttggacacaggaaccctgaagagatccatgggggtcaactgga

SEQ ID NO: 236683 - DNA, 345 bp, Glycine max
  unsure (1)..(345): unsure at all n locations
gacaagtttgttgagatagctagaagcaataagatgaaaatgaaagtgcttgttttgtttgttgctacagttttggtagcatatgaatgccatggctcagactaccagaagttccctctccaaatgaaaactgggtttggtgggcaatacagcaatgaggtggcatgtgccagttggaggcttggcgtggaagcaaacaacgtagtcaagtggcaaactgttcctgcagcttgcggagagtacatagctgactacgttctaggagaccaatatagatcagattccaaaacagttaaccaacaagcttatttctatgctaaatcnctcaaactcaccaacaaagat

SEQ ID NO: 236684 - DNA, 344 bp, Glycine max
  unsure (1)..(344): unsure at all n locations
gacaacaaaatttgccaattgccatttcaatcctcagtttctttcttcaacgtttccatcatacacagatcccaatcctctctcaagccctaatttcccctcatttccatggccacagaagagcccactgtcgcggtggaacccgctcccgaacctgcctccgccgatcctcccgcggaggagaatgtggagaccaaacctgaagccaaggctaagaaaaccaaggagcccaaacctaaaaaggtttgcagacctcgcaaccctcccactcatccttcctacgaagagatggttaaagatgcaattacctcgctgaaggagaanacggttcgagccaatacgcg

SEQ ID NO: 236685 - DNA, 370 bp, Glycine max
  unsure (1)..(370): unsure at all n locations
ggtttttcttcctcccagtgcagtatcgttgagaaataaggggaaaaaatggtgtcgctgaaactgcagaagcggctggccgcaagcgtgctcaagtgtggcagaggaaaggtgtggcttgaccccaatgaagtcaacgaaatctccatggccaattctcggcaaaacatcaggaagttggttaaggatgggtttatcatcaggaagccaaccaagattcactcacgctcgcgtgctcgtangatgaaggaggcanagaagaagggccggcactctggttatggtaagagaaagggtacacaggaggcgaggcttcccaccaagatactttggatgagaaggatgcgtgtgctcaagcggttgcttcgta

SEQ ID NO: 236686 - DNA, 380 bp, Glycine max
gagtttgttgatcgagataactagaaacagtgtgatgaaaatgaacgtccttgttttcttcgttgctacaattttggtagcatggcaatgccatgcgtacgatatgttccctctccgaatgaacactggctatggtgcccgtactccggaggtgaaatgcgcaagttggaggcttgctgtggcgtgacacaacatctttggctttgagaccattcctgaagagtgcgttgaagcaacaaaggatgacatccatggcgaacaatatagatcagactccaaaacagttaaccaacaagcttacttgtatgccagagacctcgaagtccatcccaaggacacatttgtgttcagtatagatggcaccgtactctccaatattc

SEQ ID NO: 236687 - DNA, 356 bp, Glycine max
  unsure (1)..(356): unsure at all n locations
ggcagcaacattgatggcagcaacaagttctggcactcttaaagcaactcctttcctaggccaaggcaagggtgccaatgccaatgctcttagggatgttgtttccatgggaactgggaagtacaccatgggcaatgatttgtggtatggaccagacagagtgaaatacttgggacccttttcagctcagaccccttcatacttgaaaggagaattcccaggggattatggatgggacactgctggcttatctgctgacccggaagtatttgccaagaacagggctcttgaggttatccatgggagatgggccatgcttggagcactangatgcatcaccccagaggtgctagaga

SEQ ID NO: 236688 - DNA, 367 bp, Glycine max
  unsure (1)..(367): unsure at all n locations
ggcacaagtgagtttgttgatcgagataactagaaacagtgtgatgaaaatgaaggtccttgttttcttcgttgctacaattttggtagcatggcaatgccatgcgtacgatatgttccctctccgaatgaacactggctatggtgcccgtactcctgaggtgaaatggggaagttggaggcttgctgtggaagcacacaacatctttggctttgagaccattcctgaagagtgcgttgaagcaacaaaggaatacatccatggcgaacaatatagatcagactccaaaacagttaaccaacaagcttacttttatgccagagacctcgaagtccatcncaaagacacatttgtgttcagtatagat

SEQ ID NO: 236689 - DNA, 376 bp, Glycine max
  unsure (1)..(376): unsure at all n locations
ggcacaagtgagtttgttgatcgagataactagaaacagtgtgatgaaaatgaaggtccttgttttcttcgttgctacaattttggtagcatggcaatgccatgcgtacgatatgttccctctccgaatgaacactggctatggtgcccgtactccggaggtgaaatgcgcaagttggaggcttgctgtggaagcacacaacatctttggctttgagaccattcctgaagagtgcgttgaagcaacanaggaatacatccatggcgaacaatatagatcagactccaaaacagttaaccaacaagcttacttttatgccggagacctcgaagtccatcccaaggacacatttgtgttcagtatagatggcaccgta

SEQ ID NO: 236690 - DNA, 344 bp, Glycine max
ggtggttcttgtttgcgagatagaagcgtaagcagcggctaccctaacctcgtcttcctctctactaatttcagctatggccgacgaagctgtggttgttccagatcccacccagatcgatgtcaagctctttaaccgctggagcttcgaggatattggggttactgaccgtgcactggctgattgcattggagttgcggcatccaagcacgccacatatgttcctcacatggccggaaggtactccgtgaagcggttcaggaaggcgcagtgccccattgttgagaggctcaccaactctctcatgatgcacggtagaaacaatggcaagaaactcttggctg

SEQ ID NO: 236691 - DNA, 367 bp, Glycine max
gataatcaatcaatggcaatggcttcttcaatccctaatgcgccttctgcgttcaattctcagagctacgttggtctcagagcgccactgaggaccttcaacttttcttctcctcaagctgccaaaattcctcgctcccaacgccttttcgtcgtcagagcctccgattcggagttcgaagccgccgttgtcgccggtaaggttccgccggcgcctcccgtgccgcccagaccggcggctccggttggaacaccggtggttccttcacttccacttcaccggcgtcctcgtcggaaccggaagtcgccggcgcttcggtcggcttttcaggaaacgagcatttcgccggcgaatttcgtgtatccgc

SEQ ID NO: 236692 - DNA, 373 bp, Glycine max
gacaacaatgccgtcgataccagaagaacgactcctgactccgaacccagaccggttctgcatgttcccaatccaataccctcaaatctgggaaatgtataagaaagccgaggcctccttctggacggcggaggaggtggacctctcgcaggacctccgccactgggccaccctcagcgacggcgagcgccacttcatcacccacgtcctcgccttcttcgccgcctccgacggcatcgtcctagaaaacctcgccggccgcttcaccaaagaaatccaactcccggaggcccgcgctttctacggcttccaaatcgccatcgaaaatatccactccgaaatgtacagcctcctcttagaaacctacatcaaa

SEQ ID NO: 236693 - DNA, 365 bp, Glycine max; identical to SEQ ID NO: 234752

SEQ ID NO: 236694 - DNA, 329 bp, Glycine max
  unsure (1)..(329): unsure at all n locations
ggtgcacaagtgagtttgttgatcgagataactagaaacagtgtgatgaaaatgaaggtccttgttttcttcgttgctacaattttggtagcatggcaatgccatgcgtacgatatgttccctctccgaatgaacactggctatggtgcccgtactccggaggtgaaatgcgcaagttggaggcttgctgtggaagcacacaacatctttggctttgagaccattcctgaagagtgcgttgaagcaacaaaggaatacatccatggcgaacaatatagatcagactccanaacagttaaccaacaagcttacttttatgccagagacct

SEQ ID NO: 236695 - DNA, 235 bp, Glycine max
gaaggtgcaagagtttgttgtgagctataagctagtttatcgtgaggagaatatgaagttgtttgttttctttgttgctgcagtagttttggtagcatggccatgccatggcgcaggctaccaaaggttccctctccgaatgaaaactggctatggtgagcgttcttcggatgtaaaatgcgccgtgtttaggcttgcggtggaaccacacaacatccaaccctttaaaacaatt

SEQ ID NO: 236696 - DNA, 309 bp, Glycine max
gacagctattcctcttaagcttgctactgagtttccacactgcataccttaagtcttccgaattcgaagttaatttgcaagatggctaaggaaaaggctcagatcaacattgtggtggttggtcatgtggaccctgacgaggcaaccaccattaacgagctgaagaagcctgttgtggagaaagaagctccagggcatgccatatgagggcatgcacgtacggcctcggaagggaaccagaaaattatgttaacaaaataatctggaaccctaatgtaacagtgtcatcatcagtgtgtagtttaagct

SEQ ID NO: 236697 - DNA, 383 bp, Glycine max
  unsure (1)..(383): unsure at all n locations
ggcacaagtgagtttgttgatcgagataactaggaacagtgtgatgaaaatgaaggtccttgttttcttcgttgctacaattttggtagcatggcaatgccatgcgtacgatatgttccctctccgaatgaacactggctatggtgcccgtactccggaggtgaaatgcgcaagttggaggctgtgctgtggaagcagagaacatctttggctttgagaccattcctgaagagtgcgttgaagcaacaaaggaatacatccatggcgaacaatatagatcagactccaaaacagttaaccaacaagcttacttttatgccagagacctcgaagtccatcncaaggacacatttgtgttcagtatagatggcaccgtactctct

SEQ ID NO: 236698 - DNA, 332 bp, Glycine max
gacagtgcatcagtttgttgtgagcgataagctagtttatcttaaggagaatacgaacttgtttgtcttcgttgctgctgcactagtattggcaccatggccatgccatggcgcatgctatcacaggttccctccccgaaagacaactggctatggtgagcgttcttcggcagtaaaatgcccagcttttaggcttgctgtggcagcacacatcatccgaacccttaaaaccattcttgaagagtgcgttgaaccaacacaggactaccttaatggctaacaattgagatcagactctaaaacagcttacctacaagctttcttttacgcta

SEQ ID NO: 236699 - DNA, 384 bp, Glycine max
gaaggtgcaagagtttgttgtgagctataagctagtttatcgtgaggagaatatgaagttgtttgttttctttgttgctgcagtagttttggtagcatggccatgccatggcgcaggctaccaaaggttccctctccgaatgaaaactggctatggtgagcgttcttctgaggtaaaatgcgtgagttttaggcttgcggtggaagcacacaacatccgagcctttaaaaccattcctgaatggtgcgttgaaccaacaaaggactacattaatggcgaacaatttagatcagactctaaaacagttaaccaacaagctttcttttatgctagtgaacgcgaagtcgatcacaacgacatatttatattcggcatagataacac

SEQ ID NO: 236700 - DNA, 354 bp, Glycine max
ggcacaagtttgttgagatagctagaagcaataagatgaaaatgaaagtgcttgttttgtttgttgctacagttttggtagcatatgaatgccatggctcagactaccagaagttccctctccaaatgaaaactgggtttggtgggcaatacagcaatgaggtggcatgtgccagttggaggcttggcgtggaagcaaacaacgtagtcaagtggcaaactgttcctgcagcttgcggagagtacatagctgactacgttctaggagaccaatatagatcagattccaaaacagttaaccaacaagcttatttctatgctaaatccctcaaactcaccaacaaagatgtctttg

SEQ ID NO: 236701 - DNA, 349 bp, Glycine max
gcacaagtgagtttgttgatcgagataactagaaacagtgtgatgaaaatgaaggtccttgttttcttcgttgctacaattttggtagcatggcaatgccatgcgtacgatatgttccctctccgaatgaacactggctatggtgcccgtactccggaggtgaaatgcgcaagttggaggcttgctgtggaagcacacaacatctttggctttgaaaccattcctgaaaattgcgttgaaccaccaaaggaatacatccatggcgaacaatatagatcagactccaaaacagttaaccaacaagcttacttttatgccagaaacctcaaagtccatcccaaggacacat

SEQ ID NO: 236702 - DNA, 375 bp, Glycine max
gactcaccaagtgaaccaatatagcccaagccctatacaaccaaaccctaatacacacccatttgattcagtttccatggctagcctcaaggttgcatttttggctgcagtgctctgcatggttgtggtgagtgcacccatggcacatgcagctatcacgtgcgggcaggtgacgaatagcctgatcaattgcatcggttacctccagaacggaggaacgccgccgtcgggatgctgcaacggagtgaagagcctcaatgccgccgccaagaccaccgccgaccgccagacggcgtgcaactgcctcaagtcggccgccagccaaatctccggcttcaaagccaacaacgccgcctcgctccccggcaaatgcgg

SEQ ID NO: 236703 - DNA, 368 bp, Glycine max
  unsure (1)..(368): unsure at all n locations
gacaagtgagtttgttgatcgagataactagaaacagtgtgatgaaaatgaaggtccttgttttcttcgttgctacaattttggtagcatggcaatgccatgcgtacgatatgttccctctccgaatgaacactggctatggtgcccgtactccggaggtgaaatgcgcaagttgggaggcttgctgtggaagcacacaacgtgtttggctttgagaccattcctgaagagtgcgttgaagcaacatgggaatacatccatggcgaacaatatagatcagactccanaacagttaaccaacaagcttacttttatgccagagaactcgaattcaatccaaggacacatttgtgttcaatatagatggc

SEQ ID NO: 236704 - DNA, 327 bp, Glycine max
agaaaacaacaaaagggggttgtttaattaaaaaacaaaggaattggcggaattaaaattgagattctccggaaaaatctgacaggaaaaacataacctccagtcaaaacaacacacaaccacaatttcaaaggcaagattcaagacaaggaaggcattcctccggattagcggcgtttgattttcgcccgaaagcagcttgaagatggaaaggacctggccgattacaacatccagaaggaatcaacccttcaactcgtcctcatgcttcgtggtggcatcaatgaaccttccctcatgggtttgactcccaaatacaaccaagac

SEQ ID NO: 236705 - DNA, 447 bp, Glycine max
taacggttaggaagtcccgggctacgactacgcatgaatgcggatgcgacaagaaggggacaagaaaatttggttgttcaaaatactaaaaacagtgtgatgaaaatgaaagccctgttttcttcgttgctacaattttggtagcatggcaatgccatgcgtacgatatgttccctctccgaatgaacactggctatggtgcccgtactccggaggtgaaatgcgcaagtttgaggcttgctgtgtgagcacacaacatgtgtggctttgagaccattcctgaagagtgcgttgaagcaacaaatgaatacatccatggcgaacaatatagatcagactccaaaacagttaaccaacaagcttacttttatgccagagacctcgaagtccatcccaaggacacatttgtgttcagtatagatggcaccgttacctctaatattccaa

SEQ ID NO: 236706 - DNA, 355 bp, Glycine max
  unsure (1)..(355): unsure at all n locations
gaccacattccaaaacacaaacacatacattgtagtatcacttttgtctcggaatttgttcttttgagttatggcaagcttaaaggttgcatgtgtggttttgatgtgcatggctgtgatgagtgcaccaatgatggtgcaagccgtgtcatgcaatgatgtttctgtgaacctagcaccgtgcctatcttacctgatgcagggtggagatgttccagaatcgtgctgtagcggagtgaagaacattctgggttctgccagcaccacctttgacaaacaaaccgtgtgcaaatgtcntcagcaagctgctaataactatggcatcaacgacgaatacgctcagggactcccccgc

SEQ ID NO: 236707 - DNA, 357 bp, Glycine max
gagccacgtacgcaactgaaaaggaaaaccctaagagatgaagagaactcctatcttgttccctctcttctttcttctttgtgccttcacctcatatctaccttcagccaccgctgatgatgatcatgtgtacgacactgacggcgataagcttcaatacggtgtcaattgtttcgtgttgtgatgtgataagaggatgtggcggtggaatacaagtagcaaaagcaggaaacgaaacttgcctgctgactgtggtgcaatctggcaacgagctctctgaggggttaccgataaagattgcatctcgatcagcaggagtcgctttcatcacgcaatggcagcttttcaagagcattc

SEQ ID NO: 236708 - DNA, 386 bp, Glycine max
  unsure (1)..(386): unsure at all n locations
ggcacaagtgagtttgttgatcgagataactagaaacagtgtgatgaaaatgaaggtccttgttttcttcgttgctacaattttggtagcatggcaatgccatgcgtacgatatgttccctctccgaatgaacactggctatggtgcccgtactccggaggtgaaatgcggaagttggaggtgtgctgtggaagcacgcgacatcgttggctttgagaccattcctgaagagtgcgttgaagcgacaaaggaatacatccatggcgaacaatatagatcagactccaaaacagttaaccaacaagcttacttttatgccagagaactcgaagttcatcncaaggacacatttgtgttcagtatagatggcaccgtactctctaata

SEQ ID NO: 236709 - DNA, 365 bp, Glycine max
gagaagaaaacataagatatggcaatgttcacgtaccacgttgaaacggttcaatcatggttggcactgagcagacttcacatactgatccacttagtggcagtgttgtcgctgtgttactaccgcataactcacttgttactggaacctccaacagcgccatggcttctgatgaccgtagcggagcttcttctctcggtgctctggttcttcaaccaagccttccggtggcggccggtgtcgcggagcgtcatgacggagaagctgccgagggatgagaagctgccggggcttgacatcttcgtgtgcacgctggatcccgagaaggagcccaccgtggaggtcatggacaccatcatctccgc

SEQ ID NO: 236710 - DNA, 365 bp, Glycine max
gacaagtgagtttgttgatcgagataactagaaacagtgtgatgaaaatgaaggtccttgttttcttcgttgctacaattttggtagcatggcaatgccatgcgtacgatatgttccctctccgaatgaacactggctatggtgcccgtactccggaggtgaaatgcgcaagttggaggcttgctgtggaagcacacaacatctttggctttgagaccattcctgaagagtgcgttgaagcaacaaaggaatacatccatggcgaacaatatagatcagactccaaaacagttaaccaacaagcttacttttatgccatagacctcgaagtccatcccaaggacacatttgtgttcagtatagat

SEQ ID NO: 236711 - DNA, 278 bp, Glycine max
agacgtcagacagacggcatcaggggaacagaaagtgctgcatcagtgcgttcgctcatgattaggattagcgacagtgtccttgatttcaacgtcgatgctctctccgttgatagcattttggtcgcagtggaatcacacccacactagatggtcactcttcggaggcctcatgccctcaggtgcttctatgttccgatgtgaagtgtgcagcttttacgcacactgtgtaggaacatcagaccattgatgctgagaccattcttgaagagtgtgtt

SEQ ID NO: 236712 - DNA, 397 bp, Glycine max
  unsure (1)..(397): unsure at all n locations
ggcacaagtgagtttgttgatcgagataactagaaacagtgtgatgaaaatgaaggtccttgttttcttcgttgctacaattttggtagcatggcaatgccatgcgtacgatatgttccctctccgaatgaacactggctatggtgcccgtactccggaggtgaaatgcgcaagttggaggcttgctgtggaagcacacaacatctttggctttgagaccattcctgaagagtgcgttgaagcaacaaaggaatacatccatggcgaacaatatagatcagactccanaacagttaaccaacaagcttacttttatgccagagacctcgaagtccatcgcaaggacacatttgtgttcagtatagatggcaccgtactctctaatatttcatactac

SEQ ID NO: 236713 - DNA, 314 bp, Glycine max
ggaacctttgcattcgatgcactcaagattcagcaagtgtgttttggaaacaaagatccatgtactccgcgatggcacgtatttggcaacatgctcgtacctcacctggaagaaatgctcccacgaagcaacttgcaagctatgctgcacgtacgtcggcagtaacatgcgctggtttgaagaatgctcagcgttcacaccctagaactggcgctcatagtaagcctaagaaataccttaagaccactgaggacctaatccagagccatccatatcaatcgtacgcccgtgcaattgcccaagattcttacatt

SEQ ID NO: 236714 - DNA, 400 bp, Glycine max
ggcacaagtgagtttgttgatcgagataactagaaacagtgtgatgaaaatgaaggtccttgttttcttcgttgctacaattttggtagcatggcaatgccatgcgtacgatatgttccctctccgaatgaacactggctatggtgcccgtactccggaggtgaaatgcgcaagttggaggcttgctgtggaagcacacaacatctttggctttgagaccattcctgaagagtgcgttgaagcaacaaaagaatacatccatggcgaacaatatagatcagactccaaaacagtttaccaacaagcttacttttatgccagagacctcgaagtccatcccaaagacacatttgtgttcagtatagatggcaacgtactctctaatattccatactacaaa

SEQ ID NO: 236715 - DNA, 400 bp, Glycine max
  unsure (1)..(400): unsure at all n locations
ggcagttagaagtgtgtagttcgacttcgtgaaaaagcatcatgagccgctacgacagccgctccggcgacccaacttcctatcgtgaccggaggagcgattctgggctaggtgcacctacagggtttggtggttctgtacaacactcttcatcaaacaggagggattatgaagatggtgggtcaccanagaggaacctcagtttggatggtttacctcattttgagaaaaacttctacgttgagtcaccagctgtaagggcaatgacagatgctgaagttaatgagtaccggcagcagagggaaataactgttgaaggtcgagatatcccgaaacctgtcaagtcctttcatgatgctggttttccagaatatgtaatggaagaaattacaaaagctgg

SEQ ID NO: 236716 - DNA, 385 bp, Glycine max; identical to SEQ ID NO: 235632

SEQ ID NO: 236717 - DNA, 397 bp, Glycine max; identical to SEQ ID NO: 234774

SEQ ID NO: 236718 - DNA, 398 bp, Glycine max
ggcacaagtttgttgagatagctagaagcaataagatgaaaatgaaagtgcttgttttgtttgttgctacagttttggtagcatatgaatgccatggctcagactaccagaagttccctctccgaatgaaaactgggtttggtgggcaatacagcaatgaggtggcatgtgccagttggaggcttggcgtggaagcaaacaacgtagtcaagtggcaaactgttcctgcagcttgcggagagtacatagctgactacgttctaggagaccaatatagatcagattccaaaacagttaaccaacaagcttatttctatgctaaatccctcaaactcaccaacaaagatgtctttgtcttggacgttgacgacactactctctctaatctccagtatttt

SEQ ID NO: 236719 - DNA, 397 bp, Glycine max
ggcacaagtgagtttgttgatcgagataactagaaacagtgtgatgaaaatgaaggtccttgttttcttcgttgccacaattttggtagcatggcaatgccatgcgtacgatatgttccctctccgaatgaacactggctatggtgcccgtactccggaggtgaaatgcgcaagttggaggcttgctgtggaagcacacaacatctttggctttgagaccattcctgaagagtgcgttgaagcaacaaaggaatacatccatggcgaacaatatagatcagactccaaaacagttaaccaacaagcttacttttatgccagagacctcgaagtccatcccaaggacacatttgtgttcagtatagatggcaccgtactctctaatattccatactac

SEQ ID NO: 236720 - DNA, 372 bp, Glycine max
ggagttgaatcggtgagtcagtgaccgagttgaaccatgtcggacgaagagcaccatttcgaatccaaggccgatgccggagcctccaagacctatcctcagcaggccggaaccatccgcaaaaacggctacatcgtcatcaagggtcgcccctgcaaggttgttgaagtttctacttccaagactggtaagcacggccatgctaagtgtcactttgttgggattgatattttcactgccaagaagcttgaagatattgtgccctcttcccacaactgtgatgttccccatgtgaatcgtactgattaccagttgattgacattgctgaggatggatttcttagcttgcttactgaaaatgggaacaccaag

SEQ ID NO: 236721 - DNA, 333 bp, Glycine max
gacagctattcctcttaagcttgctactgagtttccacactgcataccttaggtcttccgaattcgaagttaatttgcaagatggctaaggaaaaggctcaaattaacattgttgtgggttgtcaagttgacccttaaggaggcaaccaacaataacgaacttaaaaaaccttgtgtggagaaagaaacttcaagggatgccattataaggcatgcaacttccggctccggagggaaacaacaaattaagtttacaaaattatcctgaaaccctaaggtaccattttcaccaccattttgtatttaagccaaccttgccaatggtaacttcct

SEQ ID NO: 236722 - DNA, 365 bp, Glycine max
gaaggtgcaagagtttgttgtgagctataagctagtttatcgtgaggagaatatgaagttgtttgttttctttgttgctgcagtagttttggtagcatggccatgccatggcgcaggctaccaaaggttccctctccgaatgaaaactggctatggtgagcgttcttcggaggtaaaatgcgcaagttttaggcttgctgtggaagcacacaacatccgagcctttaaaaccattcctgaagagtgcgttgaaccaacaaaggactacattaatggcgaacaatttagatcagactctaaaacagttaaccaacaagctttcttttatgctagtgaacgcgaagtccatcacaacgacatattta

SEQ ID NO: 236723 - DNA, 286 bp, Glycine max
gaaggtgcaagagtttgttgtgagctataagctagtttatcgtgaggagaatatgaagttgtttgttttctttgttgccgcagtagttttgggaacatgggcatgccatggcgcaagctaccaaagggtccctccccgaatgaaaactggctaaggtgaacgttcctccgaaggaaaatgcccaagttttaagcctgccgttgaaacacacaacaaccgaacctttaaaaccaatcctgaaaaatgccttgaaccaacaaaggagctacattaatggcgaacaatt

SEQ ID NO: 236724 - DNA, 354 bp, Glycine max
ggcacaagtgagtttgttgatcgagataactagaaacagtgtgatgaaaatgaaggtccatgttttcatcgatgctacaatttcggtagcatggcaatgccatgcgtacgataagttccctccccgcaagaacactggctaaggtgtccgtactccggaggtgaaatgcgcaagttggaggcttgctgtggaagcacacaacatctttggctttgagaccattcctgaagagtgcgttgaagcaacaaaagaatacatccatggcgaacaatatagatcagactccagaacagttaaccaacaagcttacttttatgccagagacctccaaatccatcccaaagacacatttgt

SEQ ID NO: 236725 - DNA, 392 bp, Glycine max
  unsure (1)..(392): unsure at all n locations
ggtgcacaagtgagtttgttgatcgagataactagaaacagtgtgatgaaaatgaaggtccttgttttcttcgttgctacaattttggtagcatggcaatgccatgcgtacgatatgttccctctccgaatgaacactggctatggtgcccgtactccggaggtgaaatgcgcaagttggaggcttgctgtggaagcacacaacatctttggctttgagaccattcctgaagagtgcgttgaaacaacaaaggaatacatccatggcgaacaatatagatcagactccanaacagttaaccaacaagcttacttttatgccagagacctcgaagtccatcccaaggacacatttgtgttcagtatagatggcaccgtactctctaatattcc

SEQ ID NO: 236726 - DNA, 405 bp, Glycine max
gacatctttcactcgttctctgaaattttaattgacttttctcccctcataaaaaaaacctaccaatggctcccgcaaaggcagagaagaagcccgcggagaagaagccggcagagaaggccccagcggagaagaagccgaaggcggagaagaagatatcgaaggaaggaggaagcgagaagaagaagaagagaacaaagaagagcgttgagacctacaagatctacatcttcaaggtgttgaagcaagtgcaccccgacatcgggatctccagcaaggctatggggatcatgaacagtttcataaacgacatcttcgagaagctcgcccaggagtcatcgcgtctcgctaggtacaacaagaagcccaccattacttccagggagattcaaacggcggtgcgtt

SEQ ID NO: 236727 - DNA, 402 bp, Glycine max
ggcacaagtgagtttgttgatcgagataactagaaacagtgtgatgaaaatgaaggtccttgttttcttcgttgctacaattttggtagcatggcaatgccatgcgtacgatatgttccctctccgaatgaacactggctatggtgcccgtactccggaggtgaaatgcgcaagttggaggcttgctgtggaagcacacaacatctttggctttgagaacattcctgaagagtgcgttgaagcaacaaaggaatacatccatggcgaacaatatagatcagactccaaaacagttaaccaacaagcttacttttatgccagagacctcgaagtccatcccaaggacacatttgtgttcagtatagatggcaccgtactctctaatattccatactacaaaaa

SEQ ID NO: 236728 - DNA, 378 bp, Glycine max
gaatctaccgttgggtcaactcataacctccatttcgaaaggcatcctcgacgtcaatttcgaacccagcgatgcacataagtctcgagcactgcccatctatgtctctgttggttagagtgaatatggtctcaggatgccagacacggtcttcgaacagattatgtgccacacgccactgttttccacagcatcatacacagtgcgtacatttgagattagtataaatgcgacaatggccagcgatatcactgtcatcagtaagacagcattgcagcttatggaaagtggctcgacggtgacagaatattcacttcttatgaagaacttcagtgagactggatgccacggctgtgatatgcaggtgcataccgagtt

SEQ ID NO: 236729 - DNA, 397 bp, Glycine max; identical to SEQ ID NO: 234774

SEQ ID NO: 236730 - DNA, 392 bp, Glycine max
ggccgaaaaccctaacaacacaggcgcagagcgtgatccattgacgaagatggtgcagcgtctcacctaccgcaagaggcacagctatgccaccaaatccaaccaacacagggtcgtcaaaacccctggtgggaagctcgtttatcagaccaccaagaagagggccagcgggcccaagtgccccgtcactggcaagaggattcaggggattccacacttgaggcctgcagagtacaagagatcaaggttacccagaaaccgtaggactgtcaaccgtgcatatggcggagttttgtctggaagtgctgtcagggagaggattatccgagctttcttagttgaagagcaaaagattgtgaagaaggtcttgaagatccagaaggcaaaggaaa

SEQ ID NO: 236731 - DNA, 366 bp, Glycine max
ggttttagagtggtggagtgtgcagaagagcgtcgcagtcgcaaccctaatcagaagaagcgcagcttcaagcgagtgacagccaccagccatgggtcgtatgcacagccgcggtaagggtatatcctcttctgctttgccctacaaaaggacacctcctagctggctcaagatctcttcgcaagatgtcgaagaaaatatctgcaagtttgcgaagaaaggtttgaccccgtctcagattggtgtcattctcagagattctcacggtattgctcaggtcaatagcgtcactggcagcaaaatccttcgcatcctcaaagctcacggacttgcgcctgaaattccagaggacctgtaccatttgat

SEQ ID NO: 236732 - DNA, 351 bp, Glycine max
gattcaaatttcccttgcgttcccctttcatttccccccacttccccgcccgcaaaaggccctcccccccctccaatgggcggacaactcaacgacgaacaaattgccgaattcaagggaggcttcagacccctcgacaaggacagcgaagggtgtattactactaaggaacctgggactgtgatgcggtcactagggcaaaacccaactgagggaaaactgcaggatatgattaaagagggtgaagctgatggcaatggaaccatcgacttcccagagttcctcaacctgatggctcgcaagatgaaagacgccgactccgaggaggagcttaaggaggttttccgtgtg

SEQ ID NO: 236733 - DNA, 366 bp, Glycine max
gctacagattcttcagcaactgcgattttggatcggaacctcttctgcggcgtagcaatgggacactccaacgtttggaattctcacccaaaaaaactacggtcctggttctcgcacttgccgagtgtgtgggaatccacatggattaatcaggaagtatggccttatgtgctgcaggcagtgcttccgtagcaatgccaaggaaattggcttcatcaagtatcgctaaaagagctgttgtcacctacggaccaatattatgttctggcactaggatgttttgaagatgttatgtttgaagaaacttgagacttgtttttttcatctattttattatcagacataatgtgtggaacgaagaatact

SEQ ID NO: 236734 - DNA, 361 bp, Glycine max; identical to SEQ ID NO: 236169

SEQ ID NO: 236735 - DNA, 390 bp, Glycine max
gaacatgaacattagcagaaaataaataagacccacttgttagattggttacactagcagcacgcagggttctgttctgctttgcattctccgccatcatcatgcaagcgcttcactctcccaccctccgcgcttctcccttggaccctcttcgtggccccaacaatgccgccgccaaccgccgctcctccagcgccaagcgcgtgttcttcgtctccgccacggtggcgccgaaggtgtccgccccgcatcgacagaaggaccccaagaagcgcgttgtgatcaccggaatgggcctcgcgtcggtgttcggtaacgacgtggagggttactacgagaagctcctcgccggcgagagcggcatcaccgccatcgaccgcttcgacgcct

SEQ ID NO: 236736 - DNA, 397 bp, Glycine max
ggcacaagtgagtttgttgatcgagataactagaaacagtgtgatgaaaatgaaggtccttgttttcttcgttgctacaattttggtagcatggcaatgccatgcgtacgatatgttccctctccgaatgaacactggctatggtgcccgtactccggaggtgaaatgcgcaagttggaggcttgctgtggaagcacacaacatctttggctttgagaccattcctgaagagtgcgttgaaccaacaaaggaatacatccatggcgaacaatatagattagactccaaaacagttaaccaacaagcttactttgatgccagagacctcgaagtccatcccaacgacacatttgtgttcagtatagatggcaccgtactctccaatgatccatactac

SEQ ID NO: 236737 - DNA, 401 bp, Glycine max
ggcacaagtgagtttgttgatcgagataactagaaacagtgtgatgaaaatgaaggtccttgttttcttcgttgctacaattttggtagcatggcaatgccatgcgtacgatatgttccctctccgaatgaacactggctatggtgcccgtactccggaggtgaaatgcgcaagttggaggcttgctgtggaagcacacaacatctttggctttgagaccattcctgaagagtgcgttgaagcaacaaagggaatacatccatggcgaacaatatagatcagactccaaaacagttaaccaacaagcttacttttatgccagagacctcgaagtccatcccaaggacacatttgtgttcagtatagatggcaccgtactctctaatattccatactacaaa

SEQ ID NO: 236738 - DNA, 402 bp, Glycine max; identical to SEQ ID NO: 234890

SEQ ID NO: 236739 - DNA, 398 bp, Glycine max
ggcacaagtgagtttgttgatcgagataactagaaacagtgtgatgaaaatgaaggtccttgttttcttcgttgctacaattttggtagcatggcaatgccatgcgtacgatatgttccctctccgaatgaacactggctatggtgcccgtactccggaggtgaaatgcgcaagttggaggcttgctgtggaagcacacaacatctttggctttgagaccattcctgaagagtgcgttgaagcaacaaaggaatacatccatggcgaacaatatagatcagactccaaaacagttaaccaacaagcttacttttatgccagagacctcgaagtccatcccaaggacacatttgtgttcagtatagatggcaccgtactctctaatattccatactaca

SEQ ID NO: 236740 - DNA, 398 bp, Glycine max; identical to SEQ ID NO: 236739

SEQ ID NO: 236741 - DNA, 399 bp, Glycine max
ggttcaaagcacgccgtgtttcgctgtctctcccatcctttcgcattctcaatacccttttgatttgtgaaaggaaagcaaacatggttgatcaggtccaacaccctacaatcatggacaaggttgctggtcagctccatctccgttctggtctttcatctggtattagaagttatgatggagcctaccgccacccagctatgtaccaaagaccctcttttgggaattactcgaatgctgcattgcagtttcctgtgatgcccacatgcaaagctaccatggatttgtctgctactgcaacatctgcctcacccgtctttgttgctgctccagcagagaaaggccattttcttttagactttctcatgggacgtgtttcagcagctgtctccaaaactg

SEQ ID NO: 236742 - DNA, 365 bp, Glycine max; identical to SEQ ID NO: 234752

SEQ ID NO: 236743 - DNA, 366 bp, Glycine max
gactgtccgaagtagaattgatgtgccggaagacagaaatgaggggactgtccaaagtagaattgatgtgccggaagacagaagtgaggatttggttacaatgcaaaccttatcctgtgagaatgatgcaaaatcaaagttagtatgccctctatgcagagggcaaataaaagagtggaaagtagtggaggcggctcgtcatttcatgaatgaaaaatcaaggagctgttcttgtgagacttgcaacttcagtggcacatacccagatcttaggaagcatgcaagacttgaacatcctcttgagcgcccatctgcagtagacccagagcgtcagcgtagctggaggaggttggagcgccagaggga

SEQ ID NO: 236744 - DNA, 354 bp, Glycine max
gacgattactaccaagtgaaaaagcaattaactaagcatatatagcgtgtaagacagtgagaaaaaaagtgttgtgtagagagaaatggctaggtggtgcatcttggtggttcttgcccttgtcgtggttgcaagtgccagaaacatgcccaatgacgcaggtttggaggaccagaagaacttcctcgggtatgggttctctggagttggcaacaatgggcttccctttggaggagtgggttctgggtttgatggtaatatgggtgggccttctgggctcggtggatttggaggattcggtgggcctagcgggctcggaggtcttggtaacggtgaagggcccaaccttcctct

SEQ ID NO: 236745 - DNA, 364 bp, Glycine max
gaaggtgcaagagtttgttgtgagctataagctagtttatcgtgaggagaatatgaagttgtttgttttctttgttgctgcagtagttttggtagcatggccatgccatggcgcaggctaccaaaggttccctctccgaatgaaaactggctatggtgagcgttcttcggaggtaaaatgcgcaagttttaggcttgctgtggaagcacacaacatccgagcctttaaaaccattcctgaagagtgcgttgaaccaacaaaggactacattaatggcgaacaatttagatcagactctaaaacagttaaccaacaagctttcttttatgctagtgaacgcgaagtccatcacaacgacatattt

SEQ ID NO: 236746 - DNA, 403 bp, Glycine max
ggaacctttgcattctattcattcaagattcagcaagtgcgttttggaagcagagaccgaaatacttcgagatggcccgtacaaagcaaactactcgtaagtcaactggaggaaaagctcccaggaagcagcttgcaaccaaggctgcacgtaagtctgcaccaacaactggtggtgtgaagaagcctcatcgttatcgccctggaactgttgctcttcgtgagattaggaaataccagaagagcactgagctcctaatcaggaagcttcctttccagaggttggttcgtgaaattgcccaggatttcaagactgatctgcgtttccagagccatgctgtgcttgcattgcaagaggctgctgaggcataccttgttgggctctttgaggacactaacttgtg

SEQ ID NO: 236747 - DNA, 236 bp, Glycine max
ggaacctttggattctagtcattccacattcagcagctgcgttttggaaccagagaccgaaatacttcgacatggcccgtagaaagcagactactcgtaagtcaactggaggaaaagctcccacgaagcagcttgcaatcaacgctgcacgtaagtctgcagcatcaactggtggtgtcaacaacgctcatcgttatcgccctgtaatctgttgctcttcgtgagattatgaaata

SEQ ID NO: 236748 - DNA, 398 bp, Glycine max
gaccacaccaccctactacattcccacctttagtcttgttcttagagatggcttgtgaaaccaagtcatggttggttatgtttcttgttttcttggttgctaattgcatgcaacattgtgtccacggggtgtctcaagtgccttgcctttttatctttggggactctatgtctgatagtggaaacaacaatgaacttccaaccacttcaaaatctaatttcagaccatatgggatcgactttccattaggaccaactgggagatataccaatggccgaacagaaattgacataatcactcaatttctgggatttgagaaatttatcccaccctttgcaaacactagtggttcagacatacttaaaggtgttaactatgcatcaggtggatctggtata

SEQ ID NO: 236749 - DNA, 393 bp, Glycine max; identical to SEQ ID NO: 235894

SEQ ID NO: 236750 - DNA, 226 bp, Glycine max
ggtcatagtattatcattcattctcatctttctctcttctctctccacccaaaccctaactcccgaccctgttcccctctcgtatccgtcatgaaaggaggaaagtccaagaccgaatctaagagagccgattccaaacttgctgtgaataacaagggagccgccaccagagctaggaaacccgccggcaaggggaacgcaccgaaagaccctaacaagccaaaga

SEQ ID NO: 236751 - DNA, 396 bp, Glycine max; identical to SEQ ID NO: 235023

SEQ ID NO: 236752 - DNA, 400 bp, Glycine max; identical to SEQ ID NO: 234828

SEQ ID NO: 236753 - DNA, 364 bp, Glycine max
ggctctggcagtaaagaatccatgccatcttaacatggcagcctgtttgattaagctgaaccgctacgaagaagccataggacaatgcagcattgtactgggtgaggatgagaacaatgtgaaggcattatttaggcgaggtaaggctagagcagcacttgggcaaacggatactgccagggaagattttctaaaggcaagtaaatatgcccctcaagacaaagcaattgctaaagaattgagattgcttgctgaacatgacaaggctgtttaccaaaagcagaaagagatatataaaggaatatttggaccaaggcctcaaccagttcctaagccaagaaattggctcatacttatttggcag

SEQ ID NO: 236754 - DNA, 361 bp, Glycine max
ggcacaagtttgtcgagatagctagaagcaataagatgaaaatgaaagtgcttgttttgtttgttgctacagttttggtagcatatgaatgccatggctcagactaccagaagttccctctccaaatgaaaactgggtttggtgggcaatacagcaatgaggtggcatgtgccagttggaggcttggcgtggaagcaaacaacgtagtcaagtggcaaactgttcctgcagcttgcggagagtacatagctgactacgttctaggagaccaatatagatcagattccaaaacagttaaccagcaagcttatttctatgctaaatccctcaaactcaccaacaaagatgtcttcgtcttgga

SEQ ID NO: 236755 - DNA, 362 bp, Glycine max
gcctgagcaaaaccctaatccctatttttcttcctcagtagtgtcatttacgcttctcttctctgcagcaactatgcctaaccctaaggtcttcttcgacatgaccatcggcggtcaatctgctggccgcatcgtgatggagctctacgccgacgtcactccccgcaccgccgagaacttccgcgcgctttgcaccggcgagaatggcgtagggcggagcggcaagcccctccactacaagggctcgtccttccaccgcgtgatcccgagtttcatgtgtcagggtggcgacttcaccgccgaaaacggaaccggcggcgagtcgatttatggcgccaagttcgccgacgagaacttcgtga

SEQ ID NO: 236756 - DNA, 390 bp, Glycine max; identical to SEQ ID NO: 235939

SEQ ID NO: 236757 - DNA, 370 bp, Glycine max
ggcacaagtttgttgagatatctataagcagttagatgaaaatgaaagtgcttgttttgtttgttgcgacagttttggcagcataggaatgccatggctcacactaccataagttccctctccaaatgacaaccgggtttggtgggcaatacagcaatgacgtggcatgtgccagttggacgcttggcgtggaagcacacaacgtactcacgtggccaactgttcctgcagcatgcggagagtatatatctgactacgttctaggagacccctagacatcagattccaaatcagttcaccaacagtcttacttctatgctacatctctcacactcaccatcaaatatgtccttgtcatggacgttgatga

SEQ ID NO: 236758 - DNA, 385 bp, Glycine max
ggaacttctcacgttcatttctacacatccctagctctgtcgttccgtcgttgacgatggcgtttcgggtgcgaagccctgacctccgctctctctttcttctctctctcttgtccatcgcttccgccaatgtcttcttcgaagagcgtttcgatgacgggtgggaaaatcgatgggttaaatcagattggaaaaaagatgagaacgtggctggggagtggaaccacacctctggtcaatggaatggagacgctaatgacaaaggtattcaaaccagtgaggattacagattccatgctatttcagctgagtaccctgaattcagcaacaagggtaagacactagtctttcaattttctgttaagcacgaacagaagcttgactg

SEQ ID NO: 236759 - DNA, 403 bp, Glycine max
ggtgcacaagtgagtttgttgatcgagataactagaaacagtgtgatgaaaatgaaggtccttgttttcttcgttgctacaattttggtagcatggcaatgccatgcgtacgatatgttccctctccgaatgaacactggctatggtgcccgtactccggaggtgaaatgcgcaagttggaggcttgctgtggaagcacacaacatctttggctttgagaccattcctgaagagtgcgttgaagcaacaaaggaatacatccatggcgaacaatatagatcagactccataacagttaaccaacaagcttacttttatgccagagacctcgaagtccatcccaaggacacatttgtgttcagtatagatggcaccgtactctctaatattccatactacaaaa

SEQ ID NO: 236760 - DNA, 361 bp, Glycine max
ggcacaagtgagtttgttgatcgagataactagaaacagtgtgatgaaaatgaaggtccttgttttcttcgttgctacaattttggtagcatggcaatgccatgcgtacgatatgttccctctccgaatgaacactggctatggtgcccgtactccggaggtgaaatgcgcaagttggaggcttgctgtggaagcacacaacatctttggctttgagaccattcctgaagagtgcgttgaagcaacaaaggaatacatccatggcgaacaatatagatcagactccaaaacagttaaccaacaagcttacttttatgccagagacctcgaagtccatcccaaggacacatttgtgttcagt

SEQ ID NO: 236761 - DNA, 385 bp, Glycine max; identical to SEQ ID NO: 235632

SEQ ID NO: 236762 - DNA, 401 bp, Glycine max
gaaaacaatgacaacacttcccgaaacccccaccgtttcccccatggaaaacgaaaacaccatcctccgaaacggcaccgccaagaaacccaagctcacgcacgccatttccgaggctgagatccgcgaagaattctcccaccaccagcgcggcgtcgcaagaatcaacaacggtagcttcggcagctgcccgcgctccgtcctcaacgcacagtccatctggcagctccgcttcctccagcatcccgacgacttctacttcaactcgctccgccccggcatcctcgcctcacgcgccgccatcaaagatatcatcaatgccgaacacgtggacgacgtctcgctcgtcgacaacgccaccaccgccgccgccgtcgtcctccagcagatcggccgccact

SEQ ID NO: 236763 - DNA, 401 bp, Glycine max
ggcacaagtgagtttgttgatcgagataactagaaacagtgtgatgaaaatgaaggtccttgttttcttcgttgctacaattttggtagcatggcaatgccgtgcgtacgatatgttccctctccgaatgaacactggctatggtgcccgtactccggaggtgaaatgcgcaagttggaggcttgctgtggaaacacacaacatctttggctttgagaccattcctgaagagtgcgttgaagcaacaaaggaatacatccatggcgaacaatatagatcagactccaaaacagttaaccaacaagcttacttttatgccagagacctcgaagtccatcccaaggacacatttgtgttcagtatagatggcaccgtactctctaatattccatactacaaaa

SEQ ID NO: 236764 - DNA, 371 bp, Glycine max
ggcacaaggggggtgcaagagtttgttgtgagctataagctagtttaccgtgaggagaatatgaagttgtttgttttcattgttgctgcagtagttttggtatcatggccatgccatggcgcaggctaacaaaggttccctcaccgaatgataactggctatggtgagcgttcttcggatgtaagatgctcaagttttaggcttgctgtggaagcacacaacatccgagccattaaaaccattcctgaagagtgcgttgaatcaacaaaggactacattaaaggtgaacaatttagatcagactctaggacagttaaccaacaagctttcatttatgctagtgaacgcgaagtcaatcacaacgacatatt

SEQ ID NO: 236765 - DNA, 356 bp, Glycine max; identical to SEQ ID NO: 234809

SEQ ID NO: 236766 - DNA, 364 bp, Glycine max
ggcggctgcagtagagaagcactcttcgttcttcgactgtctacgatctgctttctctgaattgtgaaaatgtcgctcggagaaactgcttgttcatacgcagctctcatccttcatgaagatggaattagtgtaactgctgacaagatcagcaccttgttgaaaactgcaaaggttccagtagactcttattggccaaccttgtttgctaaacttgctgagaagaaaaatcttggcgatttgatagcaaatgcggcaggcggtggtgcaccagttgctgttgcagctgccccagttgctgctgctgctggtggtgctgctgccgcagctccagctgctgaggagaaaaagaatgaagaaccgg

SEQ ID NO: 236767 - DNA, 390 bp, Glycine max
gactacacagagccacagtccaaagaatataagaagaggaaagcgaattcccaagcatccattcatcagagaaaccgcaaaatggcttcagtagcgactaagcagcaagagggtgagaaaccggccaagagaaaaccggttttcaccaaagtggatcagctgaaaccgggaaccaacggtcacactctggttgcaaaggtgttgtcctccaacactgtgttgcagaagggacgaccctcttcttcgcacaacattcgccccactctcatcgccgagtgcctcatcggcgacgacaccggcaccatcatcttcaccgcgcgcaacgaacaagttgacataatgaaaaccgacaacactgtgattcttcgtaatgcaaagattgacatgttt

SEQ ID NO: 236768 - DNA, 397 bp, Glycine max
ggcacaagtgagtttgttgatcgagataactagaaacagtgtgatgaaaatgaaggtccttgttttcttcgttgctacaattttggtagcatggcaatgccatgcgtacgatatgttccctctccgaatgaacactggctatggtgcccgtactccggaggtgaaatgcgcaagttggaggcttgctgtggaagcacacaacatctttggctttgagaccattcctgaagagtgcgttgaagcaacaaaggaatacatccatggcgaacaatatagatcagactccaaaacagttaaccaacaggcttacttttatgccagagacctcgaagtccatcccaaggacacatttgtgttcagtatagatggcaccgtactctctaatattccatactac

SEQ ID NO: 236769 - DNA, 385 bp, Glycine max
ggagtacaacttcacattttagaagaataccccctcttttgctgcatcagaggagttgtaaattaagagcatggctgcacaagctcttgtatcatcatcttctcttaccttctcagcggaggctgcaagacaaagtcttggaccaagatcactccaatctccatttggcttctccagaaaagcctcctttcttgttaaggcagctgctaccccccctgtcaagcaaggatcagacagacctttgtggtttgcatcaaagcaaagtctttcttacttggatggcagccttccgggtgactatggatttgactctctgggactttcagaccctgaaggaacaggagggttcattgagccgaaatggctagcatatggtgagataatc

SEQ ID NO: 236770 - DNA, 397 bp, Glycine max; identical to SEQ ID NO: 234774

SEQ ID NO: 236771 - DNA, 397 bp, Glycine max
gaaggtgcaagagtttgttgtgagctataagctagtttatcgtgaggagaatatgaagttgtttgttttctttgttgctgcagtagttttggtagcatggccatgccatggcgcaggctaccaaaggttccctctccgaatgaaaactggctatggtgagcgttcttcggaggtaaaatgcgcaagttttaggcttgctgtggaagcacacaacatccgagcctttaaaaccattcctgaagagtgcgttgaaccaacaaaggactacattaatggcgaacaatttagatcagactctaaaacagttaaccaacaagctttcttttatgctagtgaacgcgaagtccatcacaacgacatatttatattcggcatagataacaccgtactctctaat

SEQ ID NO: 236772 - DNA, 370 bp, Glycine max
ggcagagctgaatttggtgatcaacataactagaatcaatgtgatgaagatgaaggtccttgttgtcttcgttgcgggaattgtggtagcatggcaatgccaagcgtacgagatgttccctctccgattcaacactggatatggtgcccgtactccggaggtgacatgcgcaggttggaggcttgctgtggaaccacacatcatctttggctttgacaccattcctgaagactgcgttgaagcatcacatgaatacatccatgacgaacaatatagataagactccatatcagttaagcaagaagcttagttttatgcgagagacctcgaaattcatcccaaggatccatttgtgtacagtatagatggc

SEQ ID NO: 236773 - DNA, 364 bp, Glycine max
ggaggaagccacatagagacacaatacagagtgagttgttgctccttcgccacaactctctgccaacatgggtatctccagagattctatgcacaagaggcgtgccactggtggcaagaagaaggcctggaggaaaaagagaaagtatgagcttggtcgccagcctgctaacactaagctgtcaagcaacaagacagtcaggaggatccgtgttagaggtggaaatgtgaaatggagggcattgagattggatactggaaattactcctggggaagtgaagctgtaactcgcaagactcgtgtactagatgtggtttacaatgcctcaaacaatgagcttgtgcgtactcagactcttgtcaaa

SEQ ID NO: 236774 - DNA, 365 bp, Glycine max; identical to SEQ ID NO: 234752

SEQ ID NO: 236775 - DNA, 363 bp, Glycine max
ggcacaagtttgttgagatagctagaagcaataagatgaaaatgaaagtgcttgttttgtttgttgctacagttttggtagcatatgaatgccatggctcagactaccagaagttccctctccaaatgaaaactgggtttggtgggcaatacagcaatgaggtggcatgtgccagttggaggcttggcgtggaagcaaacaacgtagtcaagtggcaaactgttcctgcagcttgcggagagtacatagctgactacgttctaggagaccaatatagatcagattccaaaacagttaaccaacaagcttatttctatgctaaatccctcaaactcaccaacaaagatgtctttgtcttggacg

SEQ ID NO: 236776 - DNA, 355 bp, Glycine max
gatgcagaatcaaagtacctagcaggccttggagtttctcgtcagcgccaagccatagttgatgggctaagagacagtgttctagcattttctggtaatgtgcctggaacatcatcaaaggatatcatggacatggttctcatgactcaatattttgacacaatgaaggagattggtgcatcctccaaatccaatgctgttttcattccacatggacctggtgctgtgagtgatgttgcttcacaagtaaggaatggtcttctccaaggaaatgcaacaacagagtcttgaagacatacacatatatcatcataccatgatttcctcctccaggcacttgtactttagctttgca

SEQ ID NO: 236777 - DNA, 397 bp, Glycine max; identical to SEQ ID NO: 234774

SEQ ID NO: 236778 - DNA, 375 bp, Glycine max
ggctgtgaagtgtgaattaaaatatattcaattttgcgtttctctgcctaaaaggattgaaagatgggtcaagcattcggttgctaccaagtcgatcagtcaaatgtggctatcaaggagcattttggaaaatttgatgatgtcctagagcctggatgtcactgcctgccttggtgtcttgggtaccagattgctggtagtctgtcgctgcgagtgcagcaacttgatgttcgatgtgagacgaaaaccaaggacaatgtctttgtcaatgtggttgcatctgtgcaataccgagctgtgtctgagaaagcatctgatgcattctataggcttaccaacacaagggagcagatccaatcatatgtttttgatgtc

SEQ ID NO: 236779 - DNA, 397 bp, Glycine max; identical to SEQ ID NO: 234774

SEQ ID NO: 236780 - DNA, 402 bp, Glycine max
gatgcacaagtttgttgagatagctagaagcaataagatgaaaatgaaagtgcttgttttgtttgttgccacagttttggtagcatatgaatgccatggctcagactaccagaagttccctctccaaatgaaaactgggtttggtgggcaatacagcaatgaggtggcatgtgccagttggaggcttggcgtggaagcaaacaacgtagtcaagtggcaaactgttcctgcagcttgcggagagtacatagctgactacgttctaggagaccaatatagatcagattccaaaacagttaaccaacaagcttatttctatgctaaatccctcaaactcaccaacaaagatgtctttgtcttggacgttgacgacactactctctctaatctccagtattttgc

SEQ ID NO: 236781 - DNA, 397 bp, Glycine max
  unsure (1)..(397): unsure at all n locations
gacattgtgagtatcaacaagaatactcataatataggtagcatatagagctatagttatattgatattgctatttgttaagctcttatttcctcggccatggctaataatgaacgtgatctcttctcggcggagattgtgaatcgtggaattgaaccgtcgggacccaacgctggctcgttgacattctctgtgagggtgaggaggcgcttaccggattttctgcaatcggtgaaccttaagtacgtgaaatggggttaccattatctcataaaccatggcatatacttgttcaccatacccgttcttctcgtggtgtttagtgctgaggttgggagcctcagcanagaggacctatggaagaagctttgggaagacgcgcgttacgaccttgcta

SEQ ID NO: 236782 - DNA, 398 bp, Glycine max
ggaaaaagggagtgcctgataacccataaccgaccgcaccaccgttttcctttgctttgcgttctacaatgtcgaaaacctcagagattattacatgcaaagctgctatttgctggggaataggaaaacctgtgactgtggaagagatacaagtagaccctcccaaagccaccgaagttcgagttaagatgctttgtgccagtatatgctccacagacatctctagcacaaaaggattcccacataccaattttcctatagcacttggacacgaaggagttggtattatagagagtgtcggtgatcaagtaacgaatctgaaagaaggggatgtggtaattccaacatacataggcgagtgccaagaatgtgagaattgtgtttcagaaaaaaccaat

SEQ ID NO: 236783 - DNA, 399 bp, Glycine max
ggcacaagtgagtttgttgatcgagataactagaaacagtgtgatgaaaatgaaggtccttgttttcttcgttgctacaattttggtagcatggcaatgccatgcgtacgatatgttccctctccgaatgaacactggctatggtgcccgtactccggaggtgaaatgcgcaagttggaggcttgctgtggaagcacacaacatctttggctttgagaccattcctgaagagtgcgttgaagcaacaaaggaatacatccatggcgaacaatatagattagactccaaaacagttaaccaacaagcttacttttatgccagagacctcgaagtccatcccaaggacacatttgtgttcagtatagatggcaccgtactctctaatattccatactacaa

SEQ ID NO: 236784 - DNA, 399 bp, Glycine max
ggcacaagtttgttgagatatctagaagcaataagatgatgatgaaagtgcttgtgttgtttgttgctacagttttggtagcatatgaatgccatggctcaaactaccagaagttccctctccaaatgaaaactgggtttggtgggcactacagcaatgaggtggcatgtgccagttggaggcttggcgtggaagcaaacaacgtagtcaagtggcaaactgttcctgcagcttgcggagagtacatagctgactacgttctaggagaccaatatagatcagattccaaaacagttaaccaacaagcttatttctatgctaaatccctcaaactcaccaacagggatgtctttgtcttagtcgttgacgacactactctctctaatctccagtattttg

SEQ ID NO: 236785 - DNA, 367 bp, Glycine max
gatatacgtctaggggattggaaggctgctgatattgaaattttgaattcctttcagttgctgactgccaagcctgttgtatacttggttaatatgacagaaaaagattaccaaagaaaaaagaacaagtttctgcccaaaattcatgcatggtgtaaatgatgggatggaagaatgtctctatgtctggtctacgattatggcttgatgcacataggatatgccaattttcactcctaacattccattcctggtcttgactcatatcagcaatagggtccaagagcacggtggtgagactattattcctttcagctgtgccttggaaaggaatcttgcagatatgccaccagatgaagctgctaag

SEQ ID NO: 236786 - DNA, 363 bp, Glycine max; identical to SEQ ID NO: 236410

SEQ ID NO: 236787 - DNA, 366 bp, Glycine max
gattatatttgagttcaaacatatcaaagccatggccacctccaacttctctattgttctctccgtctccctagccttctttttggtgctacttaccaaggcacactcgaccgataccgtttctttcaccttcaacaagttcaacccagtccaaccaaacattatgctccaaaaagatgctagtatttcatcctctggggtgttacaactcaccaaagttggcagcaacggcgtgcccacctcgggatctctcggtcgtgccctttacgctgccccaatccagatttgggacagcgaaaccggcaaggtagccagctgggctacatcctttaaattcaacattttcgcacccaacatatcaaactc

SEQ ID NO: 236788 - DNA, 406 bp, Glycine max
ggaaggtgcaagagtttgttgtgagctataagctagtttatcgtgaggagaatatgaagttgtttgttttctttgttgctgcagtagttttggtagcatggccatgccatggcgcaggctaccaaaggttccctctccgaatgaaaactggctatggtgagcgttcttcggaggtaaaatgcgcaagttttaggcttgctgtggaagcacacaacatccgagcctttaaaaccattcctgaagagtgcgttgaaccaacaaaggactacattaatggcgaacaatttagatcagactctaaaacagttaaccaacaagctttcttttatgctagtgaacgcgaagtccatcacaacgacatatttatattcggcatagataacaccgtactctctaatatcccata

SEQ ID NO: 236789 - DNA, 403 bp, Glycine max
ggaaagacaccgacacagatctgtcttccgaagcaggaactaaatatggctgacttgttggaatggtcaaagcaagataagaaacgaatgcttcatgtcgtctaccgtgttggtgaccttgatcgcaccatcaaattttacacagaatgtttaggaatgaagcttttgaggcaaagagatatcccagaggagaaatatgctaatgcttttcttggatttggccctgaagaatcccattttgttgttgaattaacatataattatggggttacctcgtatgacattggcgatggctttggacattttgcaattgcaactcaggacatttataaattggttgagcacatcagggccaagggtggaaacatcacaagggaacctggtccagttcaaggtggaacta

SEQ ID NO: 236790 - DNA, 393 bp, Glycine max
gaaataaaaacgtgattagctcacagtcgtttcggggtagcattcttgcgcactcagttattctctctctctctctggagcgtcgtcgtttcgttagggcacaaaaccccttttcggatcggtggagcaaggcctcgccggcgagattcccgaggctgttcaatcagcgatcgagcaccggcgaaaagcggcgaagatgaaggttttcgtgaagactctcaagggcacgcacttcgaaattgaagtgaacccttcggacacgctttctgaagtgaagaaaaatatagaaactgttcagggtgcagatgtctatcctgctgcacagcaaatgcttattcatcaaggaaaagttctaaaggatggtactactttggaggaaaataaagtagctga

SEQ ID NO: 236791 - DNA, 403 bp, Glycine max
ggaaacagagagtgatttcagtgagtgatcggtgttcacttgatctcatcataatcgtcagcgtcaattgaagaagatgccgatcagaaacatcgccgtcggaaggcctgaagaggcgactcaccccgacacgttgaaggcggctttggctgagttcatctcaaccttcatcttcgtgttcgccggctcaggctccggcatcgcctacaacaagctcaccgacaacggcgctgccacccctgccggcctcatctccgcctccatcgcccatgcattcgccctcttcgtcgccgtctccgtcggcgccaacatctccggcggccacgtcaaccccgccgtcaccttcggcgccttcgtcggcggcaacatcaccttcctccgcggcatcgtctacgtcatcgcc

SEQ ID NO: 236792 - DNA, 397 bp, Glycine max; identical to SEQ ID NO: 234774

SEQ ID NO: 236793 - DNA, 373 bp, Glycine max
gattatatttgagttcaaacaaatcaaagccatggccacctccaacttctctattgttctctccgtctccctagccttctttttggtgctacttaccaaggcacactcgaccgataccgtttctttcaccttcaacaagttcaacccagtccaaccaaacattatgctccaaaaagatgctagtatttcatcctctggggtgttacaactcaccaaagttggcagcaacggcgtgcccacctcgggatctctcggtcgtgccctttacgctgccccaatccagatttgggacagcgaaaccggcaaggtagccagctgggctacatcctttaaattcaacattttcgcacccaacacatcaaactcagctgac

SEQ ID NO: 236794 - DNA, 397 bp, Glycine max
ggcacaagtgagtttgttgatcgagataactagaaacagtgtgatgaaaatgaaggtccttgttttcttcgttgctacaattttggtagcatggcaatgccatgcgtacgatatgttccctctccgaatgaacactggctatggtgcccgtactccggaggtgaaatgcgcaagttggaggcttgctgtggaagcacacaacatctttggctttgagaccattcctgaagagcgcgttgaagcaacaaaggaatacatccatggcgaacaatatagatcagactccaaaacagttaaccaacaagcttacttttatgccagagacctcgaagtccatcccaaggacacatttgtgttcagtatagatggcaccgtactctctaatattccatactac

SEQ ID NO: 236795 - DNA, 351 bp, Glycine max; identical to SEQ ID NO: 236393

SEQ ID NO: 236796 - DNA, 361 bp, Glycine max
ggggcgaggtagccagagagtgatacaatacagagtgcgttgttgctccttcgccacaactccctgccaacatgggtatctccagagattctatgcacaagaggcgtgccactggtggcaagaagaaggcatggaggaagaagagaaagtatgagcttggtcgccagcctgctaacactaagctgtcaagcaacaagacagtcaggaggatccgggttagaggtggaaatgtgaagtggagggcactgagattggatactggaaattactcctggggaagtgaagctgtaactcgcaagactcgtatactagatgtggtttacaatgcctcaaacaacgagcttgtgcgtactcagactct

SEQ ID NO: 236797 - DNA, 364 bp, Glycine max
ggcacgagtttgttgtgagctataagctactttatcgtgtggagaatatgtcgttgtctgtgttctctgctgctgcagtacttttggtaccatggccatgccatggtgcacgctattaaatgttccctctccgaatgaaaactggctatggtgaccgttcgtcagatgtacaatgcgcaagttttatgcttgctgtggaagcacacaacatccgagcctttatcaccattcctgaatagtgcgttgaaccaacaacagactacattaatggtgaacattttagatcatactctataacagttaaccatcaagctttcttttatgctactgaacgcgaagtccatcacaacgacatatttatatt

SEQ ID NO: 236798 - DNA, 338 bp, Glycine max
ggggtgccattgttgttgctattatcatccgcagctgcttttattcgcaccgcaaacagtgagccatggccgtcggaaagaacaagcgatctccaaggggaagaagggtggcaagaagaaggcagctgatccctttgccaagaaggattggtatgacattaaggctccttctgtttttcaagtgaaaaatgttggcaaaaccctcgtctctcgtactcagggtaccaagattgcttctgaaggactcaagcatagagtgtttgaggtctccttggctgatcttcaaggggatgaggatcatgcattcaagaagattaggttgagagctgaagatgtgc

SEQ ID NO: 236799 - DNA, 364 bp, Glycine max
gaaggtgcaagagtttgttgtgagctataacctagtttatcgtgaggagaatatgaacttgtttgttttctttgttgctgcactacttttggtagcatggctatgccatggcgcaagctaccaaaggttccctctccgaatgacaactggctatggtgagcgttcttcggaagtgaaatgcccaagttttaggcttgctgtggaagcacacaacatccgagcctttaacaccattcctgaagagtgtgttgaagcaacaaaggactacattattggcgaacaatttagatcagactctaagacagttatccaacatgctttcttttatgctagtgaactcgaagtctatcacaacgacatattt

SEQ ID NO: 236800 - DNA, 347 bp, Glycine max
ggaacctttgcattctattcattcaagattcagcaagtgcgttttggaagcagagaccgaaatacttcgagatggcccgtacaaagcaaactgctcgtaagtcaactggaggaaaagctcccaggaagcagcttgcaaccaaggctgcacgtaagtctgcaccaacaactggtggtgtgaagaagcctcatcgttatcgccctggaactgttgctcttcgtgagattaggaaataccagaagagcactgagctcctaatcaggaagcttcctttccagaggttggttcgtgaaattgcccaggatttcaagactgatctgcgtttccagagccatgctgtgcttgca

SEQ ID NO: 236801 - DNA, 373 bp, Glycine max
ggagctggtatagatgttacctttgattgtgctggttttgacaaaaccatgtctacagcactgagtgctactcagccaggtggcaaagtttgcctagtgggaatgggacattctgaaatgactgtcccactcaccccagctgcagcaagggaagttgatgtggttggagtttttcgctatatgaacacatggcctctttgccttgagtttctaaggagtggcaaaattgatgtgaaaccccttataacgcacaggtttggattctctcaaaaggaagtggaagaagcctttgaaacaagtgctcgtggtggtaacgccatcaaggtcatgttcaatctttagatactggactgtgactttacaaactgtcgta

SEQ ID NO: 236802 - DNA, 348 bp, Glycine max
ggcacaagtgagtttgttgatcgagataactagaaacagtgtgatgaaaatgaaggtccttgttttcttcgttgctacaattttggtagcatggcaatgccatgcgtacgatatgttccctctccgaatgaacactggctatggtgcccgtactccggaggtgaaatgcgcaagttggaggcttgctgtggaagcacacaacatctttggctttgagaccattcctgaagagtgcgttgaagcaacaaaggaatacatccatggcgaacaatatagatcagactccaaaacagttaaccaacaagcttacttttatgccagagacctcgaagtccatcccaaggacac

SEQ ID NO: 236803 - DNA, 295 bp, Glycine max
gatagcgaaacagagagtggtttcagtgagtgatcggtgttcacttgatccttcataagtcgtcatcagcatcagcatcatcaccgttgattgaagaagatgccgatcagaaccatcgccatcggaaggcctgaagaggctactcagcccgacacgttgaaggcggggttggcggagttcatctccaccttgatcttcgtgtacgccggttcaggttccggcatcgcctagaacatgctcaccgatatcggcgccgccactcacgccggcctcatctacgcttccatcgcatatg

SEQ ID NO: 236804 - DNA, 365 bp, Glycine max
ggcacaagtgagtttgttgatcgagataactagaaacagtgtgatgaaaatgaaggtccttgttttcttcgttgctacaattttggtagcatggcaatgccatgcgtacgatatgttccctctccgaatgaacactggctatggtgcccgtactccggaggtgaaatgcgcaagttggaggcttgctgtggaagcacacaacatctttggctttgagaccattcctgaagagtgcgttgaagcaacaaaggaatacatccatggcgaacaatatagattagactccaaaacagttaaccaacaagcttacttttatgccagagacctcgaagtccatcccaaggacacatttgtgttcagtatag

SEQ ID NO: 236805 - DNA, 375 bp, Glycine max
ggttgtggtgtagactgtcgagcagtgaataccagttgttcctatagccggcgctcaacaacatggcggacaaggcagtcaccatccgaaccagaaagttcatgacgaacaggcttctctccagaaagcaattcatcgttgatgtccttcatccagggagggctaatgtttccaaggctgaactgaaggagaaattgggcagaatgtatgacgtgaaagacactaacactgtatttgtcttcaagtttcgaactcattttggtggtggcaagtccactgggtttggtttgatctatgattcagttgagaatgccaagaagtacgagcccaagtacaagcttatcaggaatggacttgatactaaagtagagaaat

SEQ ID NO: 236806 - DNA, 290 bp, Glycine max
ggagtttacctgcagaaggtaaagaaagagaaaaatggagagcataaagcacagaacggtggaagtgaacggcataaagatgcatgttgcagagaaaggagaaggagcagtggtgttgttcttgcacggcttcccagaactctggtactcatggcgccaccagattctagctctgagctccctcggttaccgtgcggtggcacctgatctccgtggctacggtgacacagaggccccttctacggtgaacagctacacgtgttttcatctggtgggtgatatcattgctc

SEQ ID NO: 236807 - DNA, 341 bp, Glycine max
gggggaacctaattccgccaagtgagtggaaaatgcggtagccttgctctccaagaaggatcgtccataagcgcgtcaaaaaatttataagcacccacagtggtcgcaagatgtccgtcaaggcaagctggcgcagacccaagggtattgatttctcgtgtcatgagaaagttcaaacgatgcactttgatgcccaacattggttatggctcagacaagaaataccggcattatctaccaaatggtttcaagaaatttgtcgtgcacaatgtgaaaaacctgtaacatctcatgatgcaaaacatgacataatgtgctgagattgctcacaatgtatccac

SEQ ID NO: 236808 - DNA, 392 bp, Glycine max
gacttgcggctgcagcagagaagcactcatcattcttcgtttgtctaagatccgccttctctgaattgtaaaaatgtcgctcggagaaactgcttgttcatacgcagctctcatccttcatgaagatggaatcagtgtaactgccgacaagatcagcaccttgttggaaactgcaaaggttcaagtagatacctattggccaaccttatttgctaaacttgctgagaagaaaaatcttggcgatttgatagccaatgcagcaggcggtggtgcaccagttgctgttgcagctgcccctgttgctgcctcaggtggtggtggtgctgctgctgccgccccagctgctgaggagaaaaagaaggaggaacctgaagaagagagtgatgatgata

SEQ ID NO: 236809 - DNA, 358 bp, Glycine max
ggagcttttctttctttctctgctctcttttcttttaggtttccactctcacacactctccctcttctctttctctgcaataatctctcttctcttcttcactctctcaactcctgccaaacccccatttccgcagttcttaaatttggagtctgatgtctccgccattgctggttaccgaagatgaagggcagtgccatgcctcgatggtagcatctgcatcttcaccatccctgaactgtttctccctaaatgaggccggatttaaagaatgcaattacctgggattgtcagattgctcttcggtggacagttctactgtcccgaatttgtctgatgagaaaaaggagaatctgaa

SEQ ID NO: 236810 - DNA, 359 bp, Glycine max
ggcacaagtgagtttgttgatcgagataaccagaaacagtgtgatgaacatgaacgtccttgctttcctcgctgcgacaattttggtagcatggcaatgccatgcgtacgacatgttccctctccgaatgaacactggctatggtgcccgtactccggaggtgaaatgcgcaagttggaggcttgctgtggaagcacacaacatctttggctttgagagcattcctgaagagtgcgttgaagcaccacaggaatacatccatggcgaacaatatagattagactccaaagcagttaagcaccacgcttacttttacgccagagacctcgaagtccatcccaaggacacatttgtgttca

SEQ ID NO: 236811 - DNA, 368 bp, Glycine max
gtgcacaagtgagtttgttgatcgagataactagaaacagtgtgatgaaaatgaaggtccttgttttcttcgttgctacaattttggtagcatggcaatgccatgcgtacgatatgttccctctccgaatgaacactggctatggtgcccgtactccggaggtgaaatgcgcaagttggaggcttgctgtggaagcacacaacatctttggctttgagaccattcctgaagagtgcgttgaagcaacaaaggaatacatccatggcgaacaatatagatcagactccaaaacagttaaccaacaagcttacttttatgccagagacctcgaagtccatcccaaggacacatttgtgttcagtatagat

SEQ ID NO: 236812 - DNA, 369 bp, Glycine max
ggaaaccgagaagaagaagatggagatgtatcagatctggagcaggagaatagcgttgggagcgttcgcgtttgttctgcttttcctatcggcctcagcagacgacgtcgttgtgctctctgaagataacttcgagaaggaagttggtcaggacagaggagctctcgttgagttctatgctccttggtgtggacactgcaaaaagcttgctccagaatatgaaaagcttggtagcagcttcaagaaagccaaatctgttttaatcggcaaggttgactgtgatgagcacaagagtttgtgcagcaaatatggagtctctgggtacccaacaattcagtggtttccaaaaggatctcttgaacccaaaaa

SEQ ID NO: 236813 - DNA, 365 bp, Glycine max
ggatagaagaagcagaaagagaagcattagcaaaagcaagaagaactagtctaagcagaaatggcctcttcagtgatggcatctgtggccctcaaacctgcccctttcactgttgagaagtcctcagttagaggccttccctccctctcaaggaactcctcttcattcagagttgtggccagtggtggcaagaagatcaagactgacaagccttatggaattaatggtggcatggctttgagggaaggagttgatgcatctggcaggaaaggaaagggaaagggcgtttaccagtttgtagacaaatacggtgctaatgtcgatggttacagtcctatctacgacaccaaggactggtctccaac

SEQ ID NO: 236814 - DNA, 375 bp, Glycine max
gaattgaatttcaattgagttcaacgcaatgcgatattaccctcctgaccattaaaggttcagataaccttttagggaacaagcctcttggagaaggttggttccggtatcaagcacttaaccaggtggaaaagtactgccaagctccagtatacggctcgtcttctcccagatcttcaacttcttcgcagtcatcgaaggcatcgccagggcagtcgtaacatctcagacgatggcatacactgcgattaaccaacacaggactacattattagccatcaatttatattagactctaaaacagttaaccatcaggctttcttttatgctagtgaacgctaggtcgatcacatcgacatatttatagtcggcata

SEQ ID NO: 236815 - DNA, 389 bp, Glycine max
  unsure (1)..(389): unsure at all n locations
gactactaccaagtgaaaaagcaactaagcatagtgtgtaagaaagggagaaaaacaagtgctgtgtagagagaaaaatggctaggtggtgcatgatcttggtggttcttgctcttgccgtggttgcaagtgccagaaacatgcccaatgacgctggtttggaggaccagaagaacttccttgggtatgggttttcgggagttggcaacaatggccttccctttggtggagtgggttctgggtttgatggtaatatgggtgggccttctgggctcggaggacttggangattcggtgggcctggtgggcttggcggactccgaggtcctggtaacggtaaaggacccagtcttcctctcccttgagagttgagaacacacaccttcgtg

SEQ ID NO: 236816 - DNA, 439 bp, Glycine max
  unsure (1)..(439): unsure at all n locations
attcaagggccgaccgacgcgtccaacggctgcaaaaaaacccaaaagggaataaaatttaattccaacaaatccaaaccaatggcaacttcaaactccccaatggtcccccccttctcccaaccctcctttttggggcaacttaccaaggcaaactcaaccgataccgtttctttcaccttcaacaagttaaacccagtccaaccaaacattatgctccaaaaagatgctagtatttcatcctctggggtgttacaactcaccaaagttggcagcaacggcgtgcccacctcgggatctctcggtcgtgccctttacgctgcnccaatccagatttgggacagcgaaaccggcaaggtagccagctgggctacatcctttaaattcaacattttcgcacccaacaaatcaaactcagctgacgggcttgccttcttct

SEQ ID NO: 236817 - DNA, 325 bp, Glycine max
aaggtcaaaattttggttttagcctataacctagtttatcgttaggagaatatgaaattgtttgttttctttgttgctgcagtagttttggtagcatggccatgccatggcgcaggctaccaaaggttccctctccgaatgaaaactggctatggtgagcgttcttcggaggtaaaatgcgcaagttttaggcttgctgtggaagcacacaacatccgagcctttaaaaccattcctgaagagtgcgttgaaccaacaaaggactacattaatggcgaacaatttagattagactctaaaacagttaaccaacaagctttctttt

SEQ ID NO: 236818 - DNA, 361 bp, Glycine max; identical to SEQ ID NO: 236760

SEQ ID NO: 236819 - DNA, 373 bp, Glycine max
gattgttggcttgtgctctgctcgtgcctctagggttatcatatctccatttccatttcctctctctcagtttccaagaatcttaagctatgggaaagttttacccaaccgtgagcgctgattaccagaaggccgttgagaaggcgaagaagaagctcagaggcttcatcgctgagaagagatgcgctcctctaatgctccgtttggcatggcactctgctggaacttacgacgtgagctcgaagaccggtggtcccttcggaaccataaagcacccctccgaactcgctcacggcgctaacaacggtcttgacatcgctgttaggcttttggagccactcaaagcggagtttcctattttgagctacgccga

SEQ ID NO: 236820 - DNA, 380 bp, Glycine max
  unsure (1)..(380): unsure at all n locations
gtagaatagagagctcccccaattagggtttttgtgatctgcagctacgatgggtaagggaacggggagtttcggtaagaggaggaacaagacccacaccctctgtgtgaggtgtggccgccgcagcttccacctccagaagagtcgttgctctgcgtgcgcttaccccgctgcgcgcaccaggaaatataactggagcgtgaaggccattangagaaagaccaccggaactggaaggatgaggtacttgcgtaacgtgcctcgcagattcaagagcggcttcagagagggtaccgaagctgcacccaggaagagaggagctgctgcctctgcctaagctttgaatgaatgacagcaatttttgctgggtcagtgaatta

SEQ ID NO: 236821 - DNA, 360 bp, Glycine max
ggcacaagtgagtttgttgatcgagataactagaaacagtgtgatgaaaatgaaggtccttgttttcttcgttgctacaattttggtagcatggcaatgccatgcgtacgatatgttccctctccgaatgaacactggctatggtgcccgtactccggaggtgaaatgcgcaagttggaggcttgctgtggaagcacacaacatctttggctttgagaccattcctgaagagtgcgttgaagcaacaaaggaatacatccatggcgaacaatatagattagactccaaaacagttaaccaacaagcttacttttatgccagagacctcgaagtccatcccaaggacacatttgtgttcag

SEQ ID NO: 236822 - DNA, 299 bp, Glycine max
gacggacgagggtttcgtttcgggtttgacgttgttcacaatcactttctgcgcttcactcactcccttcgtgcggttttctttctttgtcgaactcgtgcgaaaatgcgtgagattcttcacatacagggagggcaatgcggaaaccagatcggagcgaagttctgggaggtggtgtgcgcggagcacgggatcgattccacggggaggtaccagggggacaactagttgcaactcgagcgagtcaacgtctattacaatgaagcgagttgcggaaggttcgtgccgagggcggtgct

SEQ ID NO: 236823 - DNA, 334 bp, Glycine max
ggaacttctcacgttcatttctacacatccctagctctgtcgttccgtcgttgacgatggcgtttcgggtgcgaagccctgacctccgctctctctttcttctctctctcttgtccatcgcttccgccaatgtcttcttcgaagagcgtttcgatgacgggtgggaaaatcgatgggttaaatcagattggaaaaaagatgagaacgtggctggggagtggaaccacacctctggtcaatggaatggagacgctaatgacaaaggtattcaaaccagtgaggattacagattctatgctatttcagctgagtaccctgaattcagcaacaaggg

SEQ ID NO: 236824 - DNA, 374 bp, Glycine max
ggcattggggcatgcttttaatttcctagatctcccaaacaaattgtagcataagtcccatggccaaagagactagtgttgtttatctatatcccagcaaatcacaagtttggggtgagaattttgatcataaaaaacttgtaataacaacactagctgctaatggaaagaaggaggagagtaatggagcacctaatgacacatatcctgcgtttcccgggtggtatgctgatgtttcctggccaggagaagcacacacatataaaatagaaaagattctattccacgggaaatcagaattccaagagcttcttgtatttgagtcttctagacaaggcaaggttgcaattcttgatgggcatatccagctgaca

SEQ ID NO: 236825 - DNA, 384 bp, Glycine max
gattcttaggttgggaaaccgaaacaagtaacgagagaccaaagtagccaagaacgaagcttgacgttgtcttgaagtcattacaatttcatacccacattccgctttctttggaacactctcgctttcgccttcttccttcacactcagcaaatgagtcgctatccagaagttctgtgggcacaacgttctgataaggtttaccttactgttgctctacctgatgccaagaatgtttctgtgaagtgtgagcctcagggtttgtttactttctctgcttctggggttcaagaagaagcctacagctttagcttggagctgtacggatgcattgaacctgagggttgtaaaactaaatctggcttaagaaacatactaagctca

SEQ ID NO: 236826 - DNA, 404 bp, Glycine max
  unsure (1)..(404): unsure at all n locations
agaagggggcacaaagtggagtttgtttgattcgnagataaactagaaaacagtgtgattaaaaatgaaggtccttgttttcttcgttgctacaattttggtagcatggcaatgccatgcgtacgatatgttccctctccgaatgaacactggctatggtgcccgtactccggaggtgaaatgcgcaagttggaggcttgctgtggaagcacacaacatctttggctttgagaccattcctgaagagtgcgttgaagcaacaaaggaatacatccatggcgaacaatatagatcagactccaaaacagttaaccaacaagcttacttttatgccagagacctcgaagtccatcncaaggacacatttgtgttcagtatagatggcaccgtactctctaatattc

SEQ ID NO: 236827 - DNA, 363 bp, Glycine max
gactcacattagcattccacctcaaagcaacacaagaacactctcttgaacattcatggatccagtgagcgtgtggggtaacacgcccttggcgacggtggatcccgagatccatgacctcatcgagaaggagaagcaccgccaatgccgcggcatcgagctcatcgcctccgagaacttcaactccttcgcagtcatcgaggccctcggcagcgccctcaccaacaaatactccgagggcatgcccggcaaccgctactacggcggcaacgaattcatcgaccagatcgaaaacctctgccgctcacgcgccctccaggccttccacctcgacgcccaatcctggggcgtcaatgtgcaccc

SEQ ID NO: 236828 - DNA, 376 bp, Glycine max
cctttgggaaaccattattataacctaatcctccaataactcgaacgctgggcaataacctcctcctggatgcagaacattgaatgaactgctctacatctgctgtacgtcacctctcatcaagtggtgttgatgtatatactgctattgctggggctgttggagctctatatggacctcttcatggtggagccaatgaggctgtcctcaaaatgttgagtgaaattggaactgttgagaacattccagcattcattgagggtgctaaagccaggaaacggaagctcagtggttttggacatcgtgtgtacaaaaattatgatccaagagcaaaggtcttgaggaaactgacagaggaagtgttttccattgttgg

SEQ ID NO: 236829 - DNA, 362 bp, Glycine max
gacctcaaaaaacaaagatcaataccttagagaaaacaaaagcacagaatcgaaagaagagttcttttttgagagagattgggatggcttcgacgaagaagatcacactgaagagttcggacggcgaggccttcgaggtggaggaggcggtggcggtggagtcccagacgatcaagcacatgatcgaggacaactgcgccgacagcggaattcctctccccaatgttaccagcaagattctggccaaggttatcgagtattgcaagaagcacgttgaggccaattgcgctgatgagaagcccagtgaggatgaactcaaggcttgggacgctgatttcgtcaacgttgatcgggccacactc

SEQ ID NO: 236830 - DNA, 376 bp, Glycine max
gcacaagtgagtttgttgatcgagataactagaaacagtgtgatgaaaatgaaggtccatgttttcttcgttgctacaattttggtagcatggcaatgccatgcgtaagatatgttccctctccgaatgaacactggctatggtgcccgtaatccggaagtgaaatgcgcaagttggaggcttgctgtggaagcacacaacatctttggctttgagaccattcctgaagagtgcgttgaagcaacaaaggaatacatccatggcgaacaatatagatcagactccaaaacagttaaccaagaagcttacttttatgcaagagacctccatgtccatcccaaggacacatttgtgttcagtatagaaggcaccgtac

SEQ ID NO: 236831 - DNA, 168 bp, Glycine max
ggcacaagtgagtttgtcgatcgagatcactcgcaccagtgtgctgaagttgaaggtccttgtattctgcgttgctgcgcttctggcagcatggcactgccatgcgtatcatgagtccgctctgcgaatgaacacatggctatcgcgcccgtcccctggaggtgtcca

SEQ ID NO: 236832 - DNA, 258 bp, Glycine max
taatttgggaattattgctcccatcgccattggtttcattgtcggcgctaacattttgttgggtggggccttctctggagcggccatgaaccccgctgtgacatttgggcctgctgtcgtgagctggacctggaccaaccactggatctactgggccgggcctctcatcggtggtggaatcgctggccttgtttacgaggttgtctttatcagccacacccacgagcagcttcccaccactgactactagaggggggg

SEQ ID NO: 236833 - DNA, 363 bp, Glycine max
gacacaccgtttgttcgattcttaactcaacttctgctacccactctcttcttccaagtccaaccacgcttttctctacagtcatgggcaaggtcaagatcggaatcaacggatttggaagaattggccgtttggttgccagagtcgctctgcaaagagacgatgtggagctcgttgccgttaacgaccctttcattaccaccgattacatgacatacatgtttaaatacgacagtgttcacggacactggaagcatcacgatgtcaccgttaaggacgagaagacccttctcttcggtgacaagccagtcactgtttttggacacatgaaccctgaagagattccatgggggtcaactggag

SEQ ID NO: 236834 - DNA, 390 bp, Glycine max
gacaacacaacgcaacacaacgcgcactctctcttttctctcttaacacaaaaaccctatcgttcttcgcggtttcgccgattctcgccatgccgaaagccaaatccgacgccaaagccgccgatagccggttgaagcgcaagggcgctggtgctggaaggaagcaatcgaagaaagctgctaaggatcctaacaagccaaagagacctccaagcgctttcttcgttttcatgtccgagttcagagagcagtttaagaaggagcatcctaacaacaaatccgtcgctgttgtcggtaaagctggtggtgacaaatggaaatcgctgtctgatgctgaaaagggccccttcgttgccacgggcgaaaagaaagaacaagagtatgagaaaa

SEQ ID NO: 236835 - DNA, 380 bp, Glycine max
gaatccccaaatttcccaatcccccattcctccccggagcccccattaatcccaaggggtcctaaaattggttccccaacggtcgccccctggagaaacaacaacacaatcttcaatcacatgggcaaacgcagcatctggtatggcagtccatgatgactgcaagttgaggtttttggagctgaagggataaaggacacaccgtttcatagtttttaagattgaggagcagcagaagcaggtcattgtggagaagcttggtgagcctgcccagggctatgaagatttcactgccagccttcctgctgacgagtgccgttatgctgtttatgattttgagtatctgactgaagggaatgtcgctaaaagcagaatttttt

SEQ ID NO: 236836 - DNA, 311 bp, Glycine max
  unsure (1)..(311): unsure at all n locations
gagattcgtcttcagtttcagcctttctctcncactcactcactcacaggtaagcaatggcgggaaaaggagggaaggggcttcttgcagcgaaaaccaccgcggcgaataaggacaaagacaaggacaagaagagacctatttctcgctcttcccgtgctggaatccagtttcctgtgggacgtatccataggcagctgaaacaaagggtccaagccaatggacgtgttggggcaacagctgcagtgtacttagcctcaattctagagtatctgactgctgaagttcttgaacttgctgggaatgcaagc

SEQ ID NO: 236837 - DNA, 358 bp, Glycine max; identical to SEQ ID NO: 234733

SEQ ID NO: 236838 - DNA, 354 bp, Glycine max
gcatatccaaaggaacaaaaatattattaagatgatcaacattattggagcacttgttctactctttgcatttctcttcctcagttgtgtgtatgcacaagacacaacaacccttgtgcctgcaatcataacttttggtgattctgctgtggatgtagggaacaatgactatcttcccacccttttcaaggctgattaccctccttatgggagggactttgttaaccaccaacctactgggaggttttgcaatggcaaattagctactgatttcactgctgacacattgggtttcaagacctatgctccagcatatcttagcccacatgcatcagggaaaaacctccttaatgg

SEQ ID NO: 236839 - DNA, 346 bp, Glycine max
gacgaaagcaaattcttcaatttaaacacagaaacaaaatcaccaccttcaaagtcttctctctcgagaatcatcgaataaaactagggtttccgatcgtcgtcgaggagaatgccgaagaacaagggaaagggaggaaagaaccggaagcgcgggaagaacgaggcggacgacgagaagcgggagcttgtgttcaaggaggacggccaggagtacgcgcaggtgctccggatgctggggaacggccgctgcgaggcgatgtgcatcgacggcaccaagcgcctctgccacatccgcggcaagatgcacaagaaggtctggatcgccgccggcgacatcatcctcg

SEQ ID NO: 236840 - DNA, 336 bp, Glycine max
gaccgcacagaattagggttttccaattcacagagcaacacaacgaaccaacaatggcgcagcctcagccgcagtcgcagccgcagcacgggcaagcagcgctggagcaggtgcagtgcttcggtcgcaagaagaccgccgtggccgtgacctactgcaagcgcgggcgcggtctcatcaagatcaacggctgccccattgagctcgtggagccggagatcctccgcttcaaggccttcgagcctatcctcctgttgggtaagagccgcttcgccggcgtcgacatgcgcatccgcgtcaagggtggcggccacacctcccagatctacgccatcc

SEQ ID NO: 236841 - DNA, 350 bp, Glycine max
gataagaggaaagagtagaaacgtgaaccagaaccagaatggatcttcaacaacgaccactgaaacttcactttattccttacctgtcaccggggcatgtgatccctctctgcggcattgcaacactcttcgcctcacgcgggcagcacgtgacggtgatcaccactccctactacgcccaaatcctccgcaagtcaagcccctccctccaactccacgtcgttgactttcccgccaaagatgtgggccttcccgacggcgtcgaaatcaagtccgctgtcaccgacctcgctgacactgcaaagttctaccaagccgccatgctcctccgcagacccatctcccatttc

SEQ ID NO: 236842 - DNA, 360 bp, Glycine max
aggcaaaagaccaaaaaaagggaacaaaaatcaattttttaactgaaatttcctcaacctcccccggttccccaaagaaacctggattaacctgtaacaatctcccaaggacaaaatgaaggtggatcttccgggatttctggccaagtccatttgggatgagggtcgggattgcacttgctgaaaagggtatcgaatatgagtacaaagaagaggacttgaggaacaagagtcctcttctcttacaaatgaacccggttcacaagaagattccggttctcatccacaatggcaaacccatttccgaatccctcattgctgttcagtacattgacgaggtttggaatgacagaaatccct

SEQ ID NO: 236843 - DNA, 398 bp, Glycine max
  unsure (1)..(398): unsure at all n locations
gcacaagtgagtttgttgatcgagataactagaaacagtgtgatgaaaatgaaggtccttgttttcttcgttgctacaattttggtagcatggcaatgccatgcgtacgatatgttccctctccgaatgaacactggctatggtgcccgtactccggaggtgaaatgcgcaagttggaggcttgctgtggaagcacacaacatctttggctttgagaccattcctgaagagtgcgttgaagcaacaaaggaatacatccatggcgaacaatatagatcagactccanaacagttaaccaacaagcttacttttatgccagagacctcgaagtcaatcccaaggacacatttgtgttcagtatagatggcaccgtactctctaatatttcatactacaa

SEQ ID NO: 236844 - DNA, 307 bp, Glycine max
agggattcaacaaagaaggaaattgaattttggggggtgggttaatggccaatggggggcaattaaaacaactttcccccgaatgaaaaacttgaaattgccctccgacgctcttcccccgcaaaacccccttaaccctcgctcccaactttttgattcgccgcttctgtgaagaggttaggggttgttttctcgacaagtctgaggtcacagatcgcgtcatttcctgcgtcaaaaacttccagaaagttgatccttcaaaggttaaccctaatgctcacttccagaatgaccttggattggatag

SEQ ID NO: 236845 - DNA, 382 bp, Glycine max
gatagctattcgcagttcccaaattcagtttaatcctaattctgcacttcttgatcattcgatttttctcctcaagatgcagatattcgtaaaaactttgaccggcaagaccatcacccttgaggtggaatcctccgacaccattgacaacgtaaaagctaagattcaagacaaggaatggatcccacctgaccagcagagacttatctttgcgggtaaacaacttgaggatggtcgcacccttgccgattacaacatccaaaaggaatcaaccctccatctcgtgcttcgcctcaggggtggcatgcaaatctttgtcaagactttgaccgggaagaccatcacccttgaagtggaatcctcggacaccattgataatgtt

SEQ ID NO: 236846 - DNA, 348 bp, Glycine max
ggcacaagtttgttgagatagctagaagcaataagatgaaaatgaaagtgcttgttttgtttgttgctacagttttggtagcatatgaatgccatggctcagactaccagaagttccctctccaaatgaaaactgggtttggtgggcaatacagcaatgaggtggcatgtgccagttggaggcttggcgtggaagcaaacaacgtagtcaagtggcaaactgttcctgcagcttgcggagagtacatagctgactacgttctaggagaccaatatagatcagattccaaaacagttaaccaacaagcttatttctatgctaaatccctcaaactcaccaacaaagatg

SEQ ID NO: 236847 - DNA, 338 bp, Glycine max
gactcaccacttcagaacactcataacacaaagcacaaagcaaagctcatccttgagttaaaaaatggcagcagcttcttccatggctctctcatccccatccttggctggcaaggccgtgaagctgggcccatcagccccagaagtgggaagggtgagcatgaggaagaccgtcaccaagcaggtctcctcaggaagcccatggtacggcccagaccgagtcaagtacttgggcccattctctggcgagcccccgtcctacctaaccggtgagttcccaggcgactacggctgggacactgctgggctttccgcagacccagaaaccttcgccaaga

SEQ ID NO: 236848 - DNA, 337 bp, Glycine max
gaattcaaaatatatcatcaattataagcatgggtttgtggaacacaacgaatgcagtgtcttgccgctttcacaagtttggtgatgaccaaaagaatctggtcttccaaggtgatgccacgtcttcttccaggggcatagaactcacaaagttagacggtggaggaaaaccagtgggtggcagtgtggggagagtgttatactcttctccagtgcacctttgggaaagctctacagtggtcgcaagctttgaaaccgacttcaccttttccatctcatcagactctactactccaggtgatggccttgccttcttcattgcaccatttgacactaa

SEQ ID NO: 236849 - DNA, 354 bp, Glycine max
ggcacaagtgagtttgttgatcgagataactagaaacagtgtgatgaaaatgaaggtccttgttttcttcgttgctacaattttggtagcatggcaatgccatgcgtacgatatgttccctctccgaatgaacactggctatggtgcccgtactccggaggtgaaatgcgcaagttggaggcttgctgtggaagcacacaacatctttggctttgagaccattcctgaagagtgcgttgatgcaacacaggaatacatccatggcgaacaatatagatcagactccaaaacagttaaccaacaagcttacttttatgccagagacctcgacgtccatcccaaggacacatttgt

SEQ ID NO: 236850 - DNA, 363 bp, Glycine max
gaaccattttacatttacagtaacagtattgaaatttcggaaaaaatggcgatggctttcaagatggcgacgactggaatgtgggttacagatgagtgcaagaactcgttcatggatatgaaatggaagaaggagcacagatacattgttttcaagatcgacgaaggatcaaggctcgtcaccgttgataaactcggtggccccaccgagggctatgatgatctcaccgcctccttgcccaccgatgattgccgatacgcggtttttgacttcgactttgtcaccgttgataactgccgcaagagcaagatcttcttcattgcatggtctccaacagcatcaaggattagagcaaagattcta

SEQ ID NO: 236851 - DNA, 367 bp, Glycine max
ggtgcacaagtgagtttgttgatcgagataactagaaacagtgtgatgaaaatgaaggtccttgttttcttcgttgctacaattttggtagcatggcaatgccatgcgtacgatatgttccctctccgaatgaacactggctatggtgcccgtactccggaggtgaaatgcgcaagttggaggcttgctgtagaagcacacaacatctttggctttgagaccattcctgaagagtgcgttgaagcaacaaaggaatacatccatggcgaacaatatagatcagactccaaaacagttaaccaacaagcttacttttatgccaaagaactccaagtccaacccaaaggcacaattggggtcaattaaa

SEQ ID NO: 236852 - DNA, 397 bp, Glycine max
gaaggtgcaagagtttgttgtgagctataagctagtttatcgtgaggagaatatgaagttgtttgttttctttgttgctgcagtagttttggtagcatggccatgccatggcgcaggctaccaaaggttccctctccgaatgaaaactggctatggtgagcgttcttcggaggtaaaatgcgcaagttttaggcttgctgtggaagcacacaacatccgagcctttaaaaccattcctgaagagtgcgttgaaccaacaaaggactacattaatggcgaacaatttagatcagactctaaaacagttaaccaacaagctttcttttatgctagtgaacgcgaagtccatcacaacgacatatttatattcggcatagataacaccgcactctctaat

SEQ ID NO: 236853 - DNA, 342 bp, Glycine max
  unsure (1)..(342): unsure at all n locations
gaaggtgcaagagtttgttgtgagctataagctagtttatcgtgaggagaatatgaagttgtttgttttctttgttgctgcagtagttttggtagcatggccatgccatggcgcaggctaccaaaggttccctctccgaatgaaaactggatatggtgagcgttcttcggaggtaaaatgcgcaagttttaggcttgctgtggaagcacacaacatccgagcctttaaaaccattcctgaagagtgcgttgaaccaacaaaggactaacattaatggcgaacattttagatcagactctanaacagttaaacaacaagctttccttttatgctagtgaacgc

SEQ ID NO: 236854 - DNA, 396 bp, Glycine max
gatcgcatttcatagcactcaccctcattaccaacacgaaagcatagccaaaaccttttttcgaagtctctgattttcctaatggctccggcaaaggcagagaagaagccggcggagaagaagccagcggcggagaaggcaccggcggagaagaagccgaaggcggagaagaagatctcgaaggaaggagggagcgagaagaagaagaagcgcacgaagaagagcgtggagacctacaagatctacatcttcaaggtcctcaagcaggttcaccccgacattggtatttccagcaaggccatgggcatcatgaacagcttcatcaacgacatcttcgagaagctcgccaagaaacgtcgcgtttggctcgctacaacaagaagccaacatcacctc

SEQ ID NO: 236855 - DNA, 351 bp, Glycine max; identical to SEQ ID NO: 236393

SEQ ID NO: 236856 - DNA, 344 bp, Glycine max
gacgattactaccaagtgaaaaagcaattaactaagcatatatagcgtgtaagacagtgagaaaaaaagtgttgtgtagagagaaatggctaggtggtgcatcttggtggttcttgcccttgtcgtggttgcaagtgccagaaacatgcccaatgacgcaggtttggaggaccagaagaacttcctcgggtatgggttctctggagttggcaacaatgggcttccctttggaggagtgggttctgggtttgatggtaatatgggtgggccttctgggctcggtggatttggaggattcggtgggcctaacgggctcggaggtcttggtaacggtgaagggccca

SEQ ID NO: 236857 - DNA, 370 bp, Glycine max
ggtgtgtgtgaaaagaagaaactttgtaagctcaatttgtttccaaggttgctctgggaatccgaggttctaaactctgcaactaactttaatggcaactgggcaagtcattaataaacctccttcacttcctccgtaccctgagatgattcgggaggcaattgaagcactgaatgaagagaatggttcgaataaatcatcaatttcgaagtacatcgaatccacctatggtggattgcctcaggcccacaaggttttgctcaatgtgcacctcgcgaaaatgagggaaagtggagtgctagtgttttggaagaacaactacaccaagcgtgacccaaatgcgccgccacggccgggccgttgcaaggca

SEQ ID NO: 236858 - DNA, 362 bp, Glycine max
gaattctttgtgtaggtgctaaatccctagtaagccgccatggtgaagtactcaagggagcctgacaatccaaccaagtcttgcaaggctagaggcgccgaccttagggttcattttaagaacactagggaaactgcctttgcaatcaggaagttgcccttggttaaagctaaaaggtacttggaagatgttcttgcgcacaagcaggccattccgttcagacgtttctgtcgtggtgttggaaggacagctcaagcaaagaatagacactctaatggccaaggaaggtggcctgtcaagtcagcaaaattcatccttgatttgctcaaaaatgctgagagcaatgctgaagtgaaaggttt

SEQ ID NO: 236859 - DNA, 354 bp, Glycine max
gaattaagaatgaagctgggtggactgaaatcggtggagaacgcgcacgatgattcggtgtgggcggtcacctgggtacccgcaaccgccaaccgaccaccgctcctcctaaccggttccctcgacgagaccgtcaggctctggcgctccgacgacctcgttttggaccgcaccaacaccggccactgcctcggcgtcgcctccgtcgccgcccaccccctcggctctgtcgccgcctcctcctccctcgacagcttcgtccgcgtcttcgatgtcgattccaacgccaccatcgccaccctcgaggctcctccctctgaagtttggcaaatgcgcttcgatcccaagggtgcc

SEQ ID NO: 236860 - DNA, 309 bp, Glycine max
aaaaggggcacaagtttgtttagataactagaaacaataagatgaaaatgaaagtgcttgttttgtttgttgctacagttttggtagcatatgaatgccatggctcagactaccagaagttccctctccaaatgaaaactgggtttggtgggcaatacagcaatgaagtggcatgtgccagttggaggcttggcgtggaagcaaacaacgtagtcaagtggcaaactgttcctgcagcttgcggagagtacatagctgactacgttctaggagaccaatatagatcagattccaaaacagttaaccaac

SEQ ID NO: 236861 - DNA, 260 bp, Glycine max
gggcgcggcacacacagacacacacatttcgtcggaatgggaagggtgattcgcgcacagcgtaagggtgcggggtcggtgttcaagtcccacacccaccaccgcaagggtccggcgaggttccgcagcctcgacttcggcgagcgcaacggctacctcaaaggggtcgtcaccgatatcatccacgaccctggtcgcagtgctcgactagccaacgtgtcgtgacgacaacacttccgctacaagaagcagatggagct

SEQ ID NO: 236862 - DNA, 388 bp, Glycine max
  unsure (1)..(388): unsure at all n locations
agggcacaagtgagtttgttgatcgagataactagaaacagtgtgatgaaaatgaaggtccttgttttcttcgttgctacaattttggtagcatggcaatgccatgcgtacgatatgttccctctccgaatgaacactggctatggtgcccgtactccggaggtgaaatgcgcaagttggaggcttgctgtggaagcacacaacatctttggctttgagaccattcctgaagagtgcgttgaagcaacaaaggaatacatccatggcgaacaatatagattagacaacanaacagtttaccaacaagcttacttttatgccagagacctcgaagtccatcccaaggacacatttgtgttcagtatagatggcaccgtactctctaata

SEQ ID NO: 236863 - DNA, 280 bp, Glycine max
gaggcgcggcgggatcatcacgagattgcaaaatgaagttcaacattgcaaatcccaccactgggtgccacaagaagctggaaatcgatgacgacctgaagcttcgggcattttgggacaagaggatctcccaagaggtccttggtgacgccctgtgtgaggagtttaaaggatatgttttcaaaatcactggtgggtgtgacaaacaacgattcccaatgaagcaaggagtgttgacccctggtcgtgttcgactcttgctccatagaggaactccttg

SEQ ID NO: 236864 - DNA, 361 bp, Glycine max
ggcgaaacagagagtgatttcagtgagtgatcggtgttcacttgatctcatcataatcgtcagcgtcaattgaagaagatgccgatcagaaacatcgccgtcggaaggtctgaagaggcgactcaccccgacacgttgaaagcggctttggctgagttcatctcaaccttcatcttcgtgttcgccggctcaggctccggcatcgcctacaacaagctcaccgagaacggcgctgccacccctgccggcctcatctccgcctccatcgcccatgcattcgccctcttcgtcgccgtctccgtcggcgccaacatctccggcggccacgtcaaccccgccgtcaccttcggcgccttcgtcg

SEQ ID NO: 236865 - DNA, 361 bp, Glycine max
ggaacctttgcattctattcattcaagattcagcaagtgcgttttggaagcagagaccgaaatacttcgagatggcccgtacaaagcaaactgctcgtaagtcaactggaggaaaagctcccaggaagcagcttgcaaccaaggctgcacgtaagtctgcaccaacaactggtggtgtgaagaagcctcatcgttatcgccctggaactgttgctcttcgtgagattaggaaataccagaagagcactgagctcctaatcaggaagcttcctttccagaggttggttcgtgaaattgcccaggatttcaagactgatctgcgtttccagagccatgctgtgcttgcattgcaagaggctgc

SEQ ID NO: 236866 - DNA, 385 bp, Glycine max
ggcacaagtgagtttgttgatcgagataactagaaacagtgtgatgaaaatgaaggtccttgttttcttcgttgctacaattttggtagcatggcaatgccatgcgtacgatatgttccctctccgaatgaacactggctatggtgcccgtactccggaggtgaaatgcgcaagttggaggcttgctgtggaagcacacaacatctttggctttgagaccattcctgaagagtgcgttgaagcaacaaaggaatacatccatggcgaacaatatagatcagactccaaaacagttaaccaacaagcttacttttatgccagagacctcgaagtccatcccaaggacacatttgtgttcagtatagatggcaacgtactctctaat

SEQ ID NO: 236867 - DNA, 358 bp, Glycine max; identical to SEQ ID NO: 234733

SEQ ID NO: 236868 - DNA, 359 bp, Glycine max
gatccacacctctctctctctctcagaagttctagctatctcctgtttcaatttcaacaacggttactcctttttcgttttgagtttcaatcaagccatcatcatgtctaccgcatcgcaacccaaggccaagaaaacggcgtcgtccaagaagcccctctctcaccctcccttcgccgtgatgatagcagaggcgattgcgagtctgaaagagagaaccggttcgagccaatacgcgataaccatatacatcgaagggaagcacaatgagttgcctgcaatctatatgaagcttgtcctcgttcatctcaagaaatctgttgctgctggcaagcttgttaaggtgaaaaactccttta

SEQ ID NO: 236869 - DNA, 348 bp, Glycine max
ggcacaagtgagtttgttgatcgagataactagaaacagtgtgatgaaaatgaaggtccttgttttcttcgttgctacaattttggtagcatgacaatgccatgcgtacgatatgttccctctccgaatgaacactggctatggtgcccgtactccggaggtgaaatgcgcaagttggaggcttgctgtggaagcacacaacatctttggctttgagaccattcctgaagagtgcgttgaagcaacaaaggaatacatccatggcgaacagtatagatcagactccaaaacagttaaccaacaagcttacttttatgccagagacctcgaagtccatcccaaagacac

SEQ ID NO: 236870 - DNA, 286 bp, Glycine max
gacgattactaccaagtgaaaaagcagttaactaagcatatatagcgtgtaagacagtgagaaaaagactgttgtgtagacagaaatggctatgtggtgcatcttggtggttcttgcccttgtcgtggctgcaagtgccagaaacatgcccaatgacgcacgtttggaggaccagaagaacttcctcgggtatgggttctctggagttggcaacaatgggcttccctttggaggactgggttctgggtttgatggtaatatgggtgggccttctgggctcagtgga

SEQ ID NO: 236871 - DNA, 337 bp, Glycine max
gactcaccacttcaaaacactcataacacaaagcacaaagcaaagctcatccttgagttaaaaaatggcagcagcttcttccatggctctctcatccccatccttggctggcaaggccgtgaagctgggcccatcagccccagaagtgggaagggtgagcatgaggaagaccgtcaccaagcaggtctcctcaggaagcccatggtacggcccagaccgagtcaagtacttgggcccattctctggcgagcccccgtcctacctaaccggtgagttcccaggcgactacggctgggacactgctgggctttccgcagaccagaaaccttcgccaaga

SEQ ID NO: 236872 - DNA, 288 bp, Glycine max
gatctggcagcagaagaacaagtagttgagaactaagaaggagaagcaaatggcttcctcaatgatctcttccccagctgttaccactgtcaagcgtgccggtgccggcatggttgctccattcactggcctcaagtccatggctggcttccccaccagatagaccagcaatgacattacctccattgctagcaacggtggaagagtgcaatgcatgcatgtgtggccaccagttggcaagaagaagtttgagactcgttcctacctgccagaccttgatgatgcaca

SEQ ID NO: 236873 - DNA, 397 bp, Glycine max
ggcacaagtttgttgagatagctagaagcaataagatgaaaatgaaagtgcttgttttgtttgttgctacagttttggtagcatatgaatgccatggctcagactaccagaagttccctctccaaatgaaaactgggtttggtgggcaatacagcaatgaggtggcatgtgccagttggaggcttggcgtggaagcaaacaacgtagtcaagtggcaaactgttcctgcagcttgcggagagtacatagctgactacgttctaggagaccaatatagatcagattccagaacagttaaccaacaagattatttctatgctaaatccctcaaactcaccaacaaagatgtctttggcttggacgttgacgacactactctctctaatctccagtattt

SEQ ID NO: 236874 - DNA, 355 bp, Glycine max
ggcacaagtgagtttgttgatggacataactagaaacagtgtgatgaaaatggaggtccttgttttcttcgttgctacaattttggtagcatggcaatgccatgcgtacgatatgttccctctccgaatgaacactggctatggtgcccgtactccggaggtgaaatgcgcaagttggaggcttgctgtggaggcacacaacatctttgggtttgagaccattcctgaagagtgcgttgaagcaacaaaggaatacatccatggcgaacagtatagatcagactccaaaacagttaaccaacaagcttacttttatgccagagacctcgaagtccatcccaaggacacatttgtg

SEQ ID NO: 236875 - DNA, 175 bp, Glycine max
caaaggggcacaagtgagtttgttggtctagatgagtagaaagagtgtgaggaaaatgaaggtccgtgttgtcttcgttgctacaattttggtagcatggcaactgccaggggtgacacgtgttccctctccgaatgaacagtggctatggtgcccgtactccggatgtgaaatt

SEQ ID NO: 236876 - DNA, 356 bp, Glycine max
ggtgtggaagtatttgcagaactttgtttcccaacctccattgcctccgcttctacctcgctaccatgatcattcctgagaagaaccgcaaggagatctgcaaatacctcttccaagagggaatttgctttgcgaagaaggacttcaatttggcgaagcaccctgagattgacgtgccgaatctgcaggtgattaagctgatgcagagtttcaagtctcgcgagtatgtgagggagacttttgcttggatgcactattactggttcctcaccaacgatggaatcgagtttctcagaacttaccttaaccttccttccgaaattgtccctgctactttgaagaaacaagccaagcca

SEQ ID NO: 236877 - DNA, 333 bp, Glycine max
ggcacaagtgagtttgttgatcgagataactagaaacagtgtgatgaaaatgaaggtccttgttttcctcgttgctacaattttggtagcatggcaatgccatgcgtacgatatgttccctctccgaatgaacactggctatggtgcccgtactccggaggtgaaatgcgcaagttggaggcttgctgtggaagcacacaacatccttggctttgagaccattcctgaagagtgcgttgaagcaacaaaggaatacatccatggcaaacaatatagatcagactccaaaacagttaaccaacaagcttacttttatgccagagacctcgaagt

SEQ ID NO: 236878 - DNA, 378 bp, Glycine max
ggcacaagtgagtttgttgatcgagataactagaaacagtgtgatgaaaatgaaggtccttgttttcttcgttgctacaattttggtagcatggcaatgccatgcgtacgatatgttccctctccgaatgaacactggctatggtgcccgtactccggaggtgaaatgcgcaagttggaggcttgctgtggaagcacacaacatctttggctttgagaccattcctgaagagtgcgttgaagcaacaaaggaatacatccatggcgaacaatatagatcagactccaaaacagttaaccaacaagcttacttttatgccagagacctcgaagtccatcccaaggacacatttgttgtcagtatagatggcaccgtact

SEQ ID NO: 236879 - DNA, 357 bp, Glycine max
ggcacaagtgagtttgttgatcgagataactagagacagtgtgatgaaaatgaaggtccttgttttcttcgttgctacaattttggtagcatggcaatgccatgcgtacgatatgttccctctccgaatgaacactggctatggtgcccgtactccggaggtgaaatgcgcaagttggaggcttgctgtggaagcacacaacatctttggctttgaaacaatcctgaagaattccttgaagcaaccaaagaatacatccatggcgaacaatatagattaagatccaaaacagtttaccaacaaacttacatttatgccagagacctctaagtccatcccaaggacacatttgtgttc

SEQ ID NO: 236880 - DNA, 354 bp, Glycine max
  unsure (1)..(354): unsure at all n locations
gttgctctcgatttgtgccctgttgacggaccctaatcctgatgatcctttggtccgcgaaatagcccacatgtacaagacagacagaaacaagtacgagtcaactgccagaagctggacccagaaatatgccatgggttaagtgacctgtggtatgtgtgaggaagagcctttctactcccagtgtttaggcctctcagcccttgtatgaatatttgtcgtttttaataaagcccctccagttgaagattgatggagcaaaacgtttctcctgttgtttgtactgcanatgttaatttagaacagtgaaatgtttgccccaatcacatatgctcaaatttttaggccgttcta

SEQ ID NO: 236881 - DNA, 384 bp, Glycine max
  unsure (1)..(384): unsure at all n locations
gaaggtgcaagagtttgttgtgagctataagctagtttatcgtgaggagaatatgaagttgtttgttttctttgttgctgcagtagttttggtagcatggccatgccatggcgcaggctaccaaaggttccctctccgaatgaaaactggctatggtgagcgttcttcggaggtaaaatgcgcangttttaggcttgctgtggaagcacacaacatccgagcctttanaaccattcctgaagagtgcgttgaaccaacanaggactacattaatggcgaacaatttagatcagactctanaacagttaaccaacaagctttcttttatgctagtgaacgcgaagtccatcacaacgacatatttatattcggcatagataacac

SEQ ID NO: 236882 - DNA, 375 bp, Glycine max
gggtattctattcttcaagattcaggtactgcgtttcggaagcagacacagatggctcgtacgaagcaaaccgctcgtaagtccacaggaggaaaggctcctaggaagcagcttgcaaccaaggctgcacgtaagtctgcaccaactactggtggtgtgaagaagccccaccgttatcgtcctggtaccgttgctcttcgtgagattaggaaataccagaagagtaccgagcttttgatccggaagctccccttccagaggctggttcgtgaaattgctcaggacttcaagactgatctgcgtttccagagccacgccgtgcttgcattgcaagaagctgctgaggcataccttgttgggctctttgaggacact

SEQ ID NO: 236883 - DNA, 402 bp, Glycine max
gagtgccagacgcagtgactaaaccaaacctctcactcgccgtcgtagggtttctcctttcgtttagcaacaacaacaatggttgcagccaagaaaaccaagaagacccatgagagcatcaacaacaggctcgctcttgtcatgaagagtggaaaattcaccctcggttacaagacggttctcaaatcacttaggagctccaaagggaaattgattatcattgctaacaactgcccccctttgaggaaatcagagattgaatactatgctatgttggccaaggttggagttcatcattacaatgggaacaatgtggatttgggcactgcatgtggaaaatattacagagtgtgctgccttagcattattgatcctggtgattctgatatcatcaagacacta

SEQ ID NO: 236884 - DNA, 390 bp, Glycine max
gaacacgcggctgccgccggaggtgaaccgcgtgctgtacgttcggaaccttcccttcaacatcacgagcgaggagatgtacgacatcgtcggcaggtacggcgccattcggcagatccgcatcggcaccaacaaggacactcgcggaacggccttcatcgtctacgaggacatctaggacgccaaaaccgccgtcgacgacctctccggcttcagcgtcgccaaccgctacctcatcgttctctactaccagcaagcgaagatgagcaagaagttcgatcagaagacgaaggaggacgagatcgcgcgcatgcacgagaagtacggcgtctccacgaaagataagtagattaagtacttccttctcggaaatgccgagggttagggtta

SEQ ID NO: 236885 - DNA, 385 bp, Glycine max
gacacattagcattccacctcaaagcaacacaagaacactctcttgaacattcatggatccagtgagcgtgtggggtaacacgcccttggcgacggtggatcccgagatccatgacctcatcgagaaggagaagcaccgccaatgccgcggcatcgagctcatcgcctccgagaacttcacctccttcgcagtcatcgaggccctcggcagcgccctcaccaacaaatactccgagggcatgcccggcaaccgctactacggcggcaacgaattcatcgaccagatcgaaaacctctgccgctcacgcgccctccaggccttccacctcgacgcccaatcctggggcgtcaatgtgcagccctactccggctcccctgccaactt

SEQ ID NO: 236886 - DNA, 383 bp, Glycine max; identical to SEQ ID NO: 236188

SEQ ID NO: 236887 - DNA, 376 bp, Glycine max
ggcacaagtgagtttgttgatcgagataactagaaacagtgtgatgaaaatgaaggtccttgttttcttcgttgctacaattttggtagcatggcaatgccatgcgtacgatatgttccctctccgaatgaacactggctatggtgcccgtactccggaagtgaaatgcgcaagttggaagcttgctgtggaagcacacaacatctttggctttgagaccattcctgaagagtgcgttgaagcaacaaaggaatacatccatggcgaacaatatagatcagactccaaaacagttaaccaacaagcttacttttatgccagagacctcgaagtccatcccaaggacacatttgtgttcagtatagatggcaccgta

SEQ ID NO: 236888 - DNA, 374 bp, Glycine max
gcagcatctcctcaaacacaaacatccctcttgatttgaaggttgttttgtgcttatagataaaagttctgccaaatcaagaggggttttcagatcatagtgtgtgtgtgtgtgtgttaaacaatggctaagttctttgctgctatgatcttggcactcattgccatttccatgcttcaaacagtggttatggctgctaatgagcaaggaggccacttgtatgacaacaagagcaaatatggaagtgggagtgtcaagagataccaatgcccatcacaatgctcgaggagatgtagccagacccaatatcacaagccctgcatgtttttctgtcagaagtgctgcaggaaatgcctgtgtgtgcccccggggta

SEQ ID NO: 236889 - DNA, 374 bp, Glycine max
gcacaagtgagtttgttgatcgagataactagaaacagtgtgatgaaaatgaaggtccttgttttcttcgttgctacaattttggtagcatggcaatgccatgcgtacgatatgttccctctccgaatgaacactggctatggtgcccgtactccggaggtgaaatgcgcaagttggaggcttgctgtggaagcacacaacatctttggctttgagaccattcctgaagagtgcgttgaagcaacaaaggaatacatccatggcgaacaatatagattagactccagaacagttaaccaacaagcttacttttaatgcagagacctcgaagtccatcgcaaggacacatttgtgttcagtagagatggcaccgt

SEQ ID NO: 236890 - DNA, 358 bp, Glycine max
gcacaagtgagtttgttgatcgacataactagaaacactgtgatgaaaatgaaggtccttgttttcttcgttgctacaattttggtagcatggcaatgccatgcgtacgatatgttccctctccgaatgaacactggctatggtgcccgtactccggaggtgaaatgcgcaagttggaggcttgctgtggaggcacacaacatctttggctttgagaccattcctgaagagtgcgttgaagcagcagaggaatacatccatggcgaacactatagatcagactccagaacagttaaccaacaagcttacttttatgccagagacctcgaagtccatcccaaggacacatttgtgttca

SEQ ID NO: 236891 - DNA, 351 bp, Glycine max
ggaacctttgcattctagtcattcaagattcagcaagtgcgttttggaagcagagaccgaaatacttccagatggcccgtacaaagcaaactgctcgtaagtcaactggaagaaaagctcccaagaagcaacttgcaaccaaggctgcacgtaagtctgcaccaacaactggtggtgtgaagaagcctcatcgttatcgccctggaactgttgctcttcgtgagattaggaaataccaaaagagcactgaactcctaatcaggaagcttcctttccagaggttggttcgtgaaattgcccaggatttcaagactgatctgcgtttccagagccatgctgtgcttgcattgc

SEQ ID NO: 236892 - DNA, 336 bp, Glycine max
ggtgctctgctcgtgcctctagggttatcatttctccatttccattttctctctcacttttcacgaatcgtaagctatgggaaagtcttactcaactgtgagtgctgattaccacaacgccgttgagaacgctaagaagaagctcagaggcctcatcgctgagaagagatgcgctcctcgaatgctcctttgggcatggcactctgctggaacctttgacaagggcactaacactggtgtatccttcggaagcatcgagcaccctcccgaactggctcagatcgctaacaacggtcttgacatcgctgttacgcttttggagccactcaaggcgga

SEQ ID NO: 236893 - DNA, 376 bp, Glycine max
ggccgatacgaagccagctgtttcactcttttctctctttccctttctattatctctccaacttcactccttttattcccttatcacttcttagttctttccttatcctttcgctatccagacatgtaatctctcctttaccaagttttgttttactatttgatcggatcggatcggatcttgctttcgccattaattactcatggagatccgtgccgatgcagataccagctccttttcaagtttgttcgcagctgtgtcatatggatttacatcaatggccatggtttttatcagcaaggctgttcttatgcagtatgcatattcaatgactctcctcactctgcagcaattggttaccaccttgcttattcac

SEQ ID NO: 236894 - DNA, 401 bp, Glycine max
ggcacaagtgagtttgttgatcgagataactagaaacagtgtgatgaaaatgaaggtccttgttttcttcgttgctacaattttggtagcatggcaatgccatgcgtacgatatgttccctctccgaatgaacactggctatggtgcccgtactccggaggtgaaatgcgcaagttggaggcttgctgtggaagcacacaacatctttggctttgagaccattcctgaagagtgcgttgaagcaacaaaggaatacatccatggcgaacaatatagatcagactccaaaacagttaaccaacaagcttacttttatgccagagacctcgaagtccatcccaaggacacatttgtgttcagtatagatggcaccgtactctctaatattccatactacaaaa

SEQ ID NO: 236895 - DNA, 376 bp, Glycine max
ggtgcacaagtgagtttgttgatcgagataactagaaacagtgtgatgaaaatgaacgtccttgtcttcttcgttgctacaattttggtatcatggcaatgccatgcgtacgagatgttccctctccgaatgaacactggctatggtgctcgtactccggaggtgaaatgcgcatgttggatgcctgctgtggaagcacacaacatcgttggctttgagaccattcctgaatactgcgttgaagcaacagaggaatacatccatggcgaacaatattgatcagactccacaatagttaaccaacaagcttacttttatgccagagacctcgacgtccatcccaaggacacatttgtgttcagtatagatggcatcg

SEQ ID NO: 236896 - DNA, 375 bp, Glycine max
ggtggtggggtgtgcagaagagcgtcgcagttgtaaccctaatcagaagaagcgcagcttcaagcgagtgacagccaccagccatgggtcgtatgcacagccgcggtaagggtatatcctcttctgctttgccctacaaaaggacacctcctagctggctcaagatctcttcgcaagatgtcgaagaaaatatctgcaagtttgcgaagaaaggtttgaccccgtctcagattggtgtcattctcagagattctcacggtattgctcaggtcaatagcgtcactggcagcaaaatccttcgcatcctcaaagctcacggacttgcgcctgaaattccagaggatctgtaccatttgattaagaaggcagtttcaa

SEQ ID NO: 236897 - DNA, 368 bp, Glycine max
ggagaaagtagacacagccatgtccactactggtactgttctggcttccactccaacacaaaggctattaggcaaagtggcattggttactggtggagcgtctggaattggagaaagcattgtgcgcctcttccatatccatggtgctaaaatatgtatagctgatgtgcaagacaaccttggaaagcaggtctgtcagtctcttggtgatgaagcaaatgttgtttttgtccattgtgatgttacagtagaggatgatgtttcccatgcagtggacttcactgtgggtaaatttggcacccttcacatcatagtcaacaatgccggaatttctggatcaccttgttccgatatccgcaatgcagact

SEQ ID NO: 236898 - DNA, 350 bp, Glycine max
gaacacagagataagaagacagaaagatccaacactcactcttccaacttccactctctctctttccgaccaaaatgtcgatcaacagcgaatcgacgccgccagcggtgatcggaaaaatcgggccttacaccgtcttcatgacgccgccgtctacacccaaacccgccgacgacaagcccgttaccagcaccaagatcgcacctccgccgcctcagattcccaaagccgttccttctcccaaaggcaagccgcgcgccgattccgacgattccgttttcggcttcttcagacacgccgttgccaaggtccaaaccgcccactcaggtttggatgatcaagtggcacgt

SEQ ID NO: 236899 - DNA, 401 bp, Glycine max
gacttgtaataattcttataacgcaacacaacccatggccaccacctccgcattcctcctccttcccctcctcctgctgctccacctcgccatcgccgctcacggcatcggcatcaactacggcacgctcggcgacaaccttccaccgcccgcggcggtggcgaacttcctgaagacgaagacgaccatcgaccgcgtgaagatctacgacgtgaacccggacatcctgcgggccttcgccggcagcggcatctccgtgacggtgaccgcccccaacggcgacatcgccgccttaaccaaaatcgactcggcgaggcagtgggtggcgacgcacatcaaaccctttcagcctcagaccaaaattaattacatcctcgtcggcagcgaggttctccactggg

SEQ ID NO: 236900 - DNA, 402 bp, Glycine max
ggcgtgcacaggcgaaaaccctaatcctgaggcactgaaagtgtgatatggcaagagtcatttcctcttcctgcgcacgcctcgcaatgcgcctcttctccagcaccaccacagccaccgcgttcgccgtcactttacccaaaccctcatcactctccctctcatcgcgtcgattcctcttccctctctcccatgccatcgtccctccctccacccgcgtcgccggaatccggggccgcgttaaccgcgccggagactcggcgtactcaccgctgaactcggggtcgtcgtcttcgtcgttcagcgaccgcccccccacggagatggcgccgctcttccccggctgcgactacaaccactggctcatcgtcatggagaatcccggtgttgagggcgccaaca

SEQ ID NO: 236901 - DNA, 397 bp, Glycine max
ggcacaagtgagtttgttgatcgagataactagaaacagtgtgatgaaaatgaaggtccttgttttcttcgttgctacaattttggtagcatggcaatgccatgcgtacgatatgttccctctccgaatgaacactggctatggtgcccgtactccggaggtgaaatgcgcaagttggaggcttgctgtggaagcacacaacatctttggctttgagaccattcctgaagagtgcgttgaagcaacaaaggaatacatccatggcgaacaatatagatcagactccaaaacagttaaccaacaagcttacttttatgccagagacctcgaagtccatcccaaggacacatttgtgttcagtatagatgggcacgtactctctaatattccatactac

SEQ ID NO: 236902 - DNA, 321 bp, Glycine max
gaccacaccttcaaaccctaaccctagaagaagaaaaaaaccacaaccaccaccatctagggtttttctttttctcatggctagtttgtcaactaggattttcttcatcatgtcccttgtgtgcctggctctcggtccaatggcacaaggggaaatgacatgtggccaggttgtgagcaacctgaccccatgcatctcctatgtggtgtatggtggaaccaatgttcctgaacagtgctgcaatgggataagaaatctctatggcatggctcagaccaaaccaaaccgccaagctgtttgcaactgcatcaagaacggtgt

SEQ ID NO: 236903 - DNA, 380 bp, Glycine max; identical to SEQ ID NO: 235270

SEQ ID NO: 236904 - DNA, 393 bp, Glycine max; identical to SEQ ID NO: 235441

SEQ ID NO: 236905 - DNA, 392 bp, Glycine max
agggggcacaagtttgttgagatagctagaagcagtaagatgaaaatgaaagtgcttgttttgtttgttgctacagttttggtagcatatgaatgccatggctcagactaccagaagttccctctccaaatgaaaactgggtttggtgggcaatacagcaatgaggtggcatgtgccagttggaggcttggcgtggaagcaaacaacgtagtcaagtggcaaactgttcctgcagcttgcggagagtacatagctgactacgttctaggagaccaatatagatcagattccaaaacagttaaccaacaagcttatttctatgctaaatccctcaaactcaccaacaaagatgtctttgtcttggacgttgacgacactactctctctaatct

SEQ ID NO: 236906 - DNA, 386 bp, Glycine max
ggcacaagtgagtttgttgatcgagataactagaaacagtgtgatgaaaatgaaggtccttgttttcttcgttgctacaattttggtagcatggcaatgccatgcgtacgatatgttccctctccgaatgaacactggctatggtgcccgtactccggaggtgaaatgcgcaagttggaggcttgctgtggaagcacacaacatctttggctttgagaccattcctgaagagtgcgttgaagcaacaaaggaatacatccatggcgaacaatatagatcagactccaaaacagttaaccaacaagcttacttttatgccagagacctcaaagtccatcccaaggacacatttgtgttcagtatagatggcaccgtactctctaata

SEQ ID NO: 236907 - DNA, 365 bp, Glycine max
agaaaggggagctttagattcatttccccgacattcagccagagttggaagtaagaaaaaagttgttcgagatggcacgtacgaagcaaactgctcgtaaatccacaggaggaaaggcacctaggaagcagctcgcaaccaaggctgcacgtaagtctgcaccaactactggtggtgtgaagaagccacatcgttatcgtcctggtaccgttgctcttcgtgagattaggaaataccagaagagtaccgagcttttgatcaggaagctccccttccagaggctggttcgtgaaattgctcacgacttcaagactgatctgcgtttccagaaccatgctgtgcttgcattgcaagaagctgcttag

SEQ ID NO: 236908 - DNA, 394 bp, Glycine max
ggcacaagtgagtttgttgatcgagataactagaaacagtgtgatgaaaatgaaggtccttgttttcttcgttgctacaattttggtagcatggcaatgccatgcgtacgatatgttccctctccgaatgaacactggctatggtgcccgtactccggaggtgaaatgcgcaagttggaggcttgctgtggaagcacacaacatctttggctttgagaccattcctgaagaatgcgttgaagcaacaaaggaatacatccatggcgaacaatatagatcagactccaaaacagttaaccaacaagcttacttttatgccagagacctcgaagtccatcccaagaacacatttgtgttcagtatagatgggcacgtactctctaatattccatac

SEQ ID NO: 236909 - DNA, 381 bp, Glycine max
gaagcacaacatctctatcgagtaaattaactatgaagcctagcctactattatccccttccttcctgcctctctttgctttcctggctctttcagaagatgttgaacaagttgtggacataagtggcaaccccattttcccaggtggcacatattacattatgccatcaacttggggcgctgccggtggtggattgaaactaggccggacaggaaactcaaactgcccagttactgttttgcaagattactcagaaatcttccgtggcacaccagtcaaattcagcatacctgggataagccctggaatcatctttacaggtactccacttgaaatcgagttcgcagagaaaccttattgtgctgaatcctccaaatggg

SEQ ID NO: 236910 - DNA, 379 bp, Glycine max
ggcacaagtgagtttgttgatcgatataactataaacagtgtgatgaaaatgaaggtccttgttttcttcgttgctacaattttggtagcatggcaatgccatgcgtacgatatgttccctctccgaatgaacactggctatggtgcccgtactccggaggtgaaatgcgcaagttggaggcttgctgtggaagcacacaacatctttggctttgagaccattcctgaagagtgcgttgaagcaacaaaggaatacatccatggcgaacaatatagatcagactccaaaacagttaaccaacaagcttacttttatgccagagacctcgaagtccatcccaaggacacatttgtgttcagtatagatgggaacgtactc

SEQ ID NO: 236911 - DNA, 383 bp, Glycine max
ggttggcttgtgctctgctcgtgcctctagggttatcatatctccatttccatttccgctctctcagtttccaagaatcttaagctatgggaaagtcttacccaaccgtgagcgctgattaccagaaggccgttgagaaggcgaagaagaagctcagaggcttcatcgctgagaagagatgcgctcctctaatgctccgtttggcatggcactctgctggaacttacgacgtgagctcgaagaccggtggtcccttcggaaccataaagcacccctccgaactcgctcacggcgctaacaacggtcttgacatcgctgttaggcttttggagccactcaaagcggagtttcctattttgagctacgccgatttctaccaattg

SEQ ID NO: 236912 - DNA, 377 bp, Glycine max
gacaacaaaatttgccaattgccatttcaatcctcagtttctttcttcaacgtttccatcatacacagatcccaatcctctctcaagccctaatttcccctcatttccatggccacagaagagcccactgtcgcggtggaacccgctcccgaacctgcctccgccgatcctcccccggaggagaaggaggagaccaaacctgaagccaaggctaagaagaccaaggagcccaaacctaaaaaggtttccagacctcgcaaccctcccactcatccttccctacgaagagatggttaaagatgcaattacctcgctgaaggagaaaaccggttcgagccaatacgcgattgcgaagttcatcgaagagaagcacaagc

SEQ ID NO: 236913 - DNA, 380 bp, Glycine max
  unsure (1)..(380): unsure at all n locations
gaagcttctgtgagttgtttttgcaatgtcttgttgaattgatgacatatatagtaatcagtttctttgagttgtttttgaaatgtcttgttgaattttctcgagtgacctaaatattctttctgcgtgctgtcagcgaatgctcaaggctgatggttactttccatcagaaagctggatcagggaaactcaccggtgtatatagaaagtacaatacatggaagtatggctgtgccgcgaaaatagaaccagccctgtttctactggataattaagggaatgcaagtaatcttctagtttctaatgcattgctttggttgttntgagagtttgcttgtgctagaagtttgttttgagagcttcagagacctatcaacaga

SEQ ID NO: 236914 - DNA, 364 bp, Glycine max
gacgttcacattcaggaatcgttttcttcagaaatttgccatcgttgagagaagcgtgagagccttagtcgttcaagatgagagctaagtggaagaagaagcgcatgaggaggttgaagaggaagcgccgaaagatgagacaaagatctaagtaggtgcttgagcaggagttgagatgagctttccatctgctaccagcctcatgacattttaggctgttatggctcttatgatcttgaggtctaatcgctaggggagcttcactcttgacttagtttgctttactggtcctggtcctggtccaagactattgagtgtgggttaagttgtgatgtttagtgttttgtggtatctaaatatgtac

SEQ ID NO: 236915 - DNA, 271 bp, Glycine max
gggtgtgtcactcaaacattgtttgttgtaggaagaggaatcttgacaaatggcaagggacagcaatagcaagattctgttcatcggatggactggttacatcggacaattcatcgtggaagccagctccaaagctggccacccaacattccttttggtgatggagtccactctctccatccccgcagaatcacccctcatcaacaatttcaaacgcctccgtgtcaatcttgttttaggagatctatacgatcaccaaagtttggtgagt

SEQ ID NO: 236916 - DNA, 396 bp, Glycine max
tcaggcaaaaaaacaacaaaagggaaaccaaaaccctaatccctctttcttcctcttcctcagtattgcaattttcaattctcttctctgcaactatgcctaaccctaaggtcttcttcaacatgaccatcggcggtcaacctgccggccgcatcgtgatggagctctacgccgacgtgactccgagcaccgccgagaacttccgcgcgctctgcaccggcgagaagggcgccgggcggagcggcaagcccctccactacaaaggctcgtccttccaccgcgtgatcccgaacttcatgtgccagggcggcgacttcaccgccggaaacggcaccggaggcgagtcgatctacggcgccaaatttccccaacagaacttcgtgaagaagcacactg

SEQ ID NO: 236917 - DNA, 395 bp, Glycine max
gacaagtgagtttgttgatcgagataactagaaacagtgtgatgaaaatgaaggtccttgttttcttcgttgctacaattttggtagcatggcaatgccatgcgtacgatatgttccctctccgaatgaacactggctatggtgcccgtactccggaggtgaaatgcgcaagttggaggcttgctgtggaagcacacaacatctttggctttgagaccattcctgaagagtgcgttgaagcaacaaaggaatacatccatggcgaacaatatagatcagactccaaaacagttaaccaacaagcttacttttatgccagagacctcgaagtcgatcccaaggacacatttgtgttcagtatagatggcaccgtactctctaatattccatactac

SEQ ID NO: 236918 - DNA, 397 bp, Glycine max
ggcacaagtgagtttgttgatcgagataactagaaacagtgtgatgaaaatgaaggtccttgttttcttcgttgctacaattttggtagcatggcaatgccatgcgtacgatatgttccctctccgaatgaacactggctatggtgcccgtactccggaggtgaaatgcgcaagttggaggcttgctgtggaagcacacaacatctttggctttgagaccattcctgaagagtgcgttgaagcaacaaaggaatacatccatggcgaacaatatagatcagactccaaaacagttaaccaacaagcttacttttatgccagagacctcgaagtcgatcccaaggacacatttgtgttcagtatagatggcaccgtactctctaatattcaatactac

SEQ ID NO: 236919 - DNA, 356 bp, Glycine max
  unsure (1)..(356): unsure at all n locations
ggcacaagtgagtttgttgatcgagataactagaaacagtgtgatgaaaatgaaggtccttgttttcttcgttgctacaattttggtagcatggcaatgccatgcgtacgatatgttccctctccgaatgaacactggctatggtgcccgtactccggaggtgaaatgcgcaagttggaggcttgctgtggaagcacacaacatctttggctttgagaccattcctgaagagtgcgttgaagcaacanacgaatacatccatggcgaacaatatagatcagactccaaaacagttaaccaacaagcttacttttatgccagagacctcgaagtccatcccaatgacacatttgtgt

SEQ ID NO: 236920 - DNA, 391 bp, Glycine max
  unsure (1)..(391): unsure at all n locations
gtgacaaatctgcttgctaccatcttgatcttcctaattgtgatatacttccaaggatttcgtgtggttttgcctgtgagatcaaagaatgcccgtggacagcaggggtcttatccaatcaagttattttatacctccaacatgcccattattcttcagtctgcccttgtttccaatctctacttcatttctcagcttctacgcagaaagtacagtggaaacttcattgtagatctattgggcaaatggaaggagtctgaatatggaggtggtcagtctgttcctgttggtggtattgcatactacatcactgcaccttccagcttagctgatatggcagccagtcctttcgatgcantattctaccttgtgtttatgttgtcagcctgtg

SEQ ID NO: 236921 - DNA, 376 bp, Glycine max
ggtagtagtataaatgcatctagcagcaagtgttgaatacgagtagcgatggagaagaagaagggtgagctaaagtcaattttccttcctttcctttccactagtcacataatcccgctagtggacatggccagactcttcgccttgcacgacgtcgacgtcaccatcatcaccaccgcacatatcgccaccgttttccaaaagtccatcgatttagatgcgagtcgcggtcgccccatcagaacgcacgttgtcaacttccccgccgcacaagtgggtctccccgttgggatcgaacccttcaacgtcgatacgcctcgggaaatgacccccagaatctacatgggcctatcccttctccaacaagtcttcgaaa

SEQ ID NO: 236922 - DNA, 273 bp, Glycine max
ggcacaagtgagtttgttgatcgagataactagaaacagtgtgatgaaaatgaaggtccttgttttcttcgttgctacaattttggtagcatggcaatgccatgcgtacgatatgttccctctccgaatgaacactggctatggtgcccgtactccggaggtgaaatgcgcaagttggaagcttgctgtggaagcacacaacatctttggctttgagaccattcctgaagagtgcgttgaagcaacaaaggaatacatccatggcgaacaata

SEQ ID NO: 236923 - DNA, 391 bp, Glycine max
gattggacacattcttcagcgactgcgtttttggatcggaacctcttctgcggcgtagcaatgggacactccaacgtttggaactctcacccaaaaaactacggtcctggttctcgcacttgccgtgtgtgtgggaatccacatggactgatcaggaagtatggccttatgtgctgcaggcagtgcttccgtagcaatgccaaggaaattggcttcatcaagtatcgctaaaagagcagttgtcaactacggaccaatattgtgttctggcactaagatgttttgaggatgttatgtttgaagaaacttgagactttctttttttcatctaattaattatcagacgtaatttgtgggactaagaatacttttatataaattgttttgaact

SEQ ID NO: 236924 - DNA, 428 bp, Glycine max
ttcattacggatggcaaaagaacaacaaaagggggaaaaattgattttgttgttcaagatacctaaaaaaattttaatgaaaatgaaggtccttgttttcttcgttgcaacaattttggtagcatggaaatgccatgcgtacgatatgttccctctccgaatgaacactggctatggtgcccgtactccggaggtgaaatgcgcaagttggaagcttgctgtggaagcacacaacatctttggctttgagaccattcctgaagagtgcgttgaagcaacaaaggaatacatccatggcgaacaatatagatcagactccaaaacagttaaccaacaagcttacttttatgccagagacctcgaagtccatcccaaagacacatttgtgttcagtatagatggcaacgtactctctaatattccatact

SEQ ID NO: 236925 - DNA, 393 bp, Glycine max
gggtgttgtcttgttggtaaagaaagaaagagaagagaagaatcgaagacgaagatggaggacgcatcagcatcaaagttcattccacaccaaatcggaggggtccaaaacgacgcgcttcgattcggtctccatggagtcaagagcgacatcgttggttctcaccctcttcaatcttcactccaatctacaaggaaaatggatgaagcgatgaagaggcaatgcaaagttaacctgtacggaactgcttttcccatgaaggaggagcttgacaggcaaatcctgtccaggctccagcggcctcctgggacaattccttcttcaatgctgggtttggagactgttacaggaagtgttgatcactttggttttgaggaatgtctaaatgacccc

SEQ ID NO: 236926 - DNA, 344 bp, Glycine max
ggatttgtggtgtgaagagagattttgagagacacatatgtgtgttgtgttgtgtctcataggagagaaaatgtgagatgtggacagtgtgtcccctcgcgacatatagactcgcgttctcgtgcgatatcactctgttggcaaccagaataacaacacgcgtctcatgtgagacattctcgacaacatataagacacatctagtgatagtgattttgtgtcaaacactgtgtctcgtgaatatagatgtgctcgtgtggcgttttgagatagtgcagggcaagagagatttagatctcacactccgctctatatgagatactcctctggtgcggatagagtat

SEQ ID NO: 236927 - DNA, 221 bp, Glycine max
gaaggtgcaagagtttgttgtgagctataagctagtttatcgtgaaggaaaaaagaaattggttggtttccttggtgctgcaataattttgggaacaagggcaagccaaggggcaaggtaacaaagggtccctctccgaatgaaaactggctaaggtgaacgttcctccgaggtgaaatgcgcaagttttaagcctgccgtgggagcacacaacatccgag

SEQ ID NO: 236928 - DNA, 398 bp, Glycine max
gctccgaaaaccctaacaacacaggcgcagacgcaaacgcaaacgcaaacgcaaacgcaaacgcagagcgtgatccattgacgaagatggtgcagcgtctcatctaccgcaagcggcacagctatgccaccaagtccaaccaacacagggtcgtcaaaacccctggtgggaagctcgtttatcagactaccaagaagagggccagcggacccaagtgccccgtcactggcaagaggattcaggggattccacacttgaggcctgcagagtacaagaggtcaaggttacccagaaaccgtaggactgtcaaccgtgcatatggtggagttttatctggaagtgccgtcagggagaggattatccgagccttcttagttgaagagcacaagattgtgaag

SEQ ID NO: 236929 - DNA, 382 bp, Glycine max
  unsure (1)..(382): unsure at all n locations
ggcacaagtttgttgagatagctagaagcaataagatgaaaatgaaagtgcttgttttgtttgttgctacagttttggtagcatatgaatgccatggctcagactaccagaagttccctctccaaatgaaaactgggtttggtgggcaatacagcaatgaggtggcatgtgccagttggaggcttggcgtggaagcaaacaacgtagtcaagtggcaaactgttcctgcagcttgcggagagtacatagctgactacgttctangagaacantatagatcagatttccaaaacagttaaccaacaagcttagttctatgctaaatccctcaaactcaccaacaaagatgtctttgtcttggacgttgacgacactactctct

SEQ ID NO: 236930 - DNA, 279 bp, Glycine max
gagttcaattccaatatattccattctctctgtgtatttccctacctctcccttcaagatgcagatcttcgtcaagaccctcaccggcaagaccatcacccttgaggtggaaagctctgacaccatcgacaacgtcaaggccaagatccaggacaaggaaggaatccccccggaccagcaacgtctcattttcgccggaaagcaacttgaggacggccgtacccttgctgactacaacattcagaaggagagtactcttcaactcgtcctccgtctccg

SEQ ID NO: 236931 - DNA, 398 bp, Glycine max; identical to SEQ ID NO: 236739

SEQ ID NO: 236932 - DNA, 368 bp, Glycine max
  unsure (1)..(368): unsure at all n locations
gttgtgagctataagctagtttatcgtgaggagaatatgaagttgtttgttttctttgttgctgcagtagttttggtagcatggtcatgccatggcgcaggctacgaaaggttccctctccgaatgaaaactggctatggtgagcgttcttcggaggtaaaatgcgcaagttttaggcttgctgtggaagcacacaacatccgagcctttatgaccattcctgaagagtgcgttgaaccaacaaaggactacattaatggcgaacaatttagatcagactctaaaacagttaaacaacaagctttcttttatgctagtgaacgcgaagtcgatcacaacgacatanttatattcggcatagataacac

SEQ ID NO: 236933 - DNA, 360 bp, Glycine max
gagttgcactgctaccgacccagaccttaactacaagccggtgatcggaatcctgacccaccccggcgacggtgcctctggccggctcagcaacgccaccggggtttcttacatcgccgcctcctacgttaacttcctggaatccggtggtgctacagttattccccgtatctacaatgagtcagctgagaaccttaacaagaagctcgatttggtcaatggagtgctcttcactggtgggtgggctgtttctggtccataattggatactcttggcaacatttttaagaaagctttagagaataatgttgctggagaccatttcccagtaattgccttcaacttatgtggaaacctcgt

SEQ ID NO: 236934 - DNA, 354 bp, Glycine max
ggcacaagtgagtttgttgatcgacataactagaaacagtgtgatgaaaatgaaggtccttgttttcttcgttgctacaattttggtagcatggcattgccatgcgtacgatatgttccctctccgaatgaacactggctatggtgcccgtactccggacgtgaaatgctcaagttggaggcttgctgtggaatcacacaacatctttggctttgagaccattcctgaagagtgcgttgaagcaacaaaggaatacatccatggcgaacaatatagatcagactccaaaacagttaaccaacaagcttacttttatgccagagacctcgaagtccattccaaagacacatttgt

SEQ ID NO: 236935 - DNA, 239 bp, Glycine max
ggaacctttgaattcaatccattaaggattcagcaggtgctttttgaaaccagaaaccgaaatatttcgaaatggcccgtacaaagcaaactgctcgtaggtcaggtggaggaaaagctcacaggaagcatcttgcaaccaaggctgcacgtaagtctgcaccaacatctggtggtgtgaaaaagcctcatcgttaccgccctgaaagtgttgctcttcgtgatattaggaaataccag

SEQ ID NO: 236936 - DNA, 397 bp, Glycine max
gaacacaaacacaaattacatagcctcagtaatctgagagagaaacaaaaacaatgaaggtttccattgccaagttccactcccttcccctatgttttttccttctcttggccttcaacacaaaacccctcctagcagcagaaccagagccagtggttgataagcaagggaaccctttggagccaggagtagggtactacgtgtggccactttgggctgatgaaggaggcctcacactaggccaaacaaggaacaagacatgccctctttatgttatccgtgacccttcattcattggcaccccagtttcattcttagcaccaggccttgaccatgttccaacactcactgatctaaccattgatttccctgtggtgacagtgtgtaaccagccaac

SEQ ID NO: 236937 - DNA, 336 bp, Glycine max
gatagaaggtgtgtggagttagggctttacagtgtttcacttccttcgtcatcttcttcgtcatcttcttcgttgaatcgcgattgttctgtgcgagagaaagaagagagagatcgagcatggcgttggctttcgacgagttcggaacgccgttcataatcctgaatgagcatgatcagaacagcagactccgaggattggacgctcagaatgccaacatctccgccggcaaatccgtggctcgcatcctccgaagctgcctcggccgcaaatgtatggacaggatgctccaaatccccgactgcgacgtcagcatcacgaacgatggagccacga

SEQ ID NO: 236938 - DNA, 388 bp, Glycine max
gagtgcacaagtgagtttgttgatcgagataactagaaacagtgtgatgaaaatgaaggtccttgttttcttcgttgctacaattttggtagcatggcaatgccatgcgtacgatatgttccctctccgaatgaacactggctatggtgcccgtactccggaggtgaaatgcgcaagttggaggcttgctgtggaagcacacaacatctttggctttgagaccattcctgaagagtgcgttgaagcaacaaaggaatacatccatggcgaacaatatagatcagactccaaaacagttaaccaacaagcttacttttatgccagagacctcgaagtccatcccaaggacacatttgtgttcagtatagatggcaccgtactctctaat

SEQ ID NO: 236939 - DNA, 358 bp, Glycine max
  unsure (1)..(358): unsure at all n locations
ggcacaagtgagtttgttgatcgagataactagaaacagtgtgatgaaaatgaaggtccttgttttcttcgttgctacaattttggtagcatggcaatgccatgcgtacgatatgttccctctccgaatgaacactggctatggtgcccgtactccggaggtgaaatgcgcaagttggaggcttgctgtggaagcacacaacatctttggctttgagaccattcctgaagagtgcgttgaagcaacaaaggaatacatccatggcgaacaatatagatcagactccanaacagttaaccaacaagcttacttttatgccagagacctcgaagtccatcncaaggacacatttgtgttc

SEQ ID NO: 236940 - DNA, 385 bp, Glycine max
gattcatattttccttgcgtttccctttcattttccctcactttctcgctcgccaaacgcccctctctctcctccaatggccgaccagctcaccgacgaccagatcgccgagttcaaggaggccttcagcctcttcgacaaggacggcgatggttgtattactactaaggaacttgggactgtgatgcggtcactagggcaaaacccaactgaggcagaactgcaggatatgattaatgaggttgatgctgatggcaatggaaccatcgacttcccagagttcctcaacctgatggctcgcaagatgaaagacaccgactccgaagaggagcttaaagaagctttccgtgtgttcgacaaggatcagaatggtttcatctctgca

SEQ ID NO: 236941 - DNA, 386 bp, Glycine max
cgtccactgggagacaacaacagacaggcagggagtcggaattacgttgcgtatctctttcattatccatcattttctcgctcgccaagcgcgcgtctctctcatccaatggtcgatcagctcaacgtcgagcaaatcgtcgagttcaatgaggccttcagactcttctggatggacggctatggatgtattactactaaggaacttgggactgtgatgcggtcactaaggcagcacccaactgatgcagaactgtccgatataattcatgaggttgatgctggtggcaatggaaccatcgacttcccagagttcctcaacctgattgctcgcaagatcatagacaccgactccgaagatgagcttaaagaggctttccgtgtgtt

SEQ ID NO: 236942 - DNA, 334 bp, Glycine max
ggcacaagtgagtttgttgatcgagataactagaaacagtgtgatgaaaatgaaggtccttgttttcttcgttgctacaattttggtagcatggcaatgccatgcgtacgatatgttccctctccgaatgaacactggctatggtgcccgtactccggaggtgaaatgcgcaagttggaggcttgctgtgggagcacacaacatctttggctttgagaccattcctgaagagtgcgttgatgcatcgaagagcagtggtcacttcggaaacataaagctaacctccgaactcgctcacggagctaacaacggtcatgacatcgatgttaagctt

SEQ ID NO: 236943 - DNA, 375 bp, Glycine max
ggctgtgagtgagattacccatagatagagagcgcggcataacctaaacttacccttcttctctctgtgtgtgtgcgcatcaaatgcaaccagaagcagccatggccactgcaagaactgtgaaggacgtttctcctcatgagttcgtcaaagcttactcttctcacctcaagcgatctggcaagatggagctgccagagtggactgatattgtgaaaactgcaagatttaaggagttggctccttatgatcctgactggtactatgtcagagctgcttccatggcaagaaagatctacttgagaggaggacttggtgttggtgcctttcagaggatttatggtgggagcaagaggaatggtagccgccctcctc

SEQ ID NO: 236944 - DNA, 363 bp, Glycine max
ggcacaagtgagtttgttgatcgagataactagaaacagtgtgatgaaaatgaaggtccttgttttcttcgttgctacaattttggtagcatggcaatgccatgcgtacgatatgttccctctccgaatgaacactggctatggtgcccgtactccggaggtgaaatgcgcaagttggacgcttgctgtggaagcacacaacatctttggctttgagaccattcctgaagagtgcgttgaagcaacaaaggaatacatccatggcgaacaatatagatcagactccaaaacagttaaccaacaagcttacttttatgccagagacctcgacatccatcccaatgacacatttgtgttcagtat

SEQ ID NO: 236945 - DNA, 375 bp, Glycine max
  unsure (1)..(375): unsure at all n locations
gattgttggcttgtgctctgctcgtgcctctagggttatcatatctccatttccatttcctctctctcagtttccaagaatcttaagctatgggaaagtcttacccaaccgtgagcgctgattaccagaaggccgttgagaaggcgaagaagaagctcagaggcttcatcgctgagaagagatgcgctcctctaatgctccgtttggcatggcactctgctggaacttacgacgtgagctcgaagaccggtggtcncttcggaaccataaagcacccctccgaactcgctcacggggctaacaacggtcttgacatcgctgttaggcttttggagccactcaaagcggagtttcctattttgagctacgccgatt

SEQ ID NO: 236946 - DNA, 328 bp, Glycine max
ggtgcacaagtgagtttgttgatcgacataactagacacagtgtgatgaaaatgaaggtccttgttttcttcgttgctacaattttggtagcatggcaatgccatgcgtacgatatgttccctctcagactgaacactggctatggtgcccgtactccggatgtgaaatgcgcaagttggaggcatgctgtggaagcacacaccatctttggctttgagaccattcctgaagagtgcgtagaagcaacaaaggaatacatccatggcgagcaatatagattagactccatgacagttaaccaccaggcttacttttatgccagagacc

SEQ ID NO: 236947 - DNA, 243 bp, Glycine max
ggcacacgtgagtttgttgatcgatataactagaaacagtgtgatgaatatgaatgtccgtgtttgcttcgttgctagaattttggtagcatgcaaatgacatgcatgcgatatgttccctctccgaatgaacactggctatggtgcccgtactccggacgtgagttgcgcacgttggatgcttgctgtggaagcacacaacatctttggctttgagaccaatcatgaatagtgcgttgatgc

SEQ ID NO: 236948 - DNA, 361 bp, Glycine max
gcacaagtgagtttgttgatcgagataactagaaacagtgtgatgaaaatgaaggtccttgttttcttcgttgctacaattttggtagcatggcaatgccatgcgtacgatatgttccctctccgaatgaacactggctatggtgcccgtactccggaggtgaaatgcgcaagttggaggcttgctgtggaagcacacaacatctttggctttgagaccattcctgaagagtgcgttgaagcaacaaaggaatacatccatggcgaacaatatagatcagactccaaaacagttaaccaacaagcttacttttatgccagagacctcgaagtccatcccaaggacacatttgtgttcagta

SEQ ID NO: 236949 - DNA, 300 bp, Glycine max
  unsure (1)..(300): unsure at all n locations
agcccacacgtccgaaacgacagaagggggtttctaaaacactatcccttttacggtttattgacaaagagaaacaatcggaggatctgttctgttccataagatggctggacttttaggatataggagccttccacctaatgcaaagaatctggtanttgctgggggtttgacagcttttgtctttggtgcatacttctacaccatgagggctgttggaggcactgatgaactgcaggtagcaattgataagtttgaagctgacaagagcaagaatgacggtgaagccaacatgccatc

SEQ ID NO: 236950 - DNA, 349 bp, Glycine max; identical to SEQ ID NO: 235961

SEQ ID NO: 236951 - DNA, 373 bp, Glycine max
ggctactcactcacattacacacaccacctcgcactcgcagggacagagagtggggaaggaaaaacacagactaaatggcgccaaatgctctctttctcttctctttcctcgccatgctcctccttctgctccgctcaaccgccgccggccacaactaccgcgacgccctccgcaaaagcattctcttcttcgaaggccaacgctccggcaaactccccgccgaccaacgcctccgctggcgccacgactctgcattgcacgacggcgccaccgccggagtggacttgagtggagggtactacgacgccggggataacataaagttcgggtttccgatggcgttcacgacgacgatgctgtcgtggagcgtga

SEQ ID NO: 236952 - DNA, 379 bp, Glycine max
gaaggtgcaagagtttgttgtgagctataagctagtttatcgtgaggagaatatgaagttgtttgttttctttgttgctgcagtagttttggtagcatggccatgccttggcgcaggctaccaaaggttccctctccgaatgaaaactggctatggtgagcgttcttcggaggtaaaatgcgcaagttttaagcttgctgtggaagcacacaacatccgagcctttaaaaccattcctgaagagtgcgttgaaccaacaaaggactacattaatggcgaacaatttagatcagactctaaaacagttaaccaacaagcttacttttatgccagagacctcgaagtccatcccaaggacacatttgtgttcagtatagat

SEQ ID NO: 236953 - DNA, 358 bp, Glycine max; identical to SEQ ID NO: 235190

SEQ ID NO: 236954 - DNA, 343 bp, Glycine max
ggcacaagtgagtttgttgatcgagataactagaaacagtgtgatgaaaatgaaggtccttgttttcttcgttgctacaattttggtagcatggcaatgccatgcgtacgatatgttccctctccgaatgaacactggctatggtgcccgtactccggaggtgaaatgcgcaagttggaggcttgctgtggaagcacacaacatctttggctttgagaccattcctgaaaagtgcgttgaagcaacaaaggaatacatccatggcgaacaatatagatcagactccaaaacagttaaccaacaagcttacttttatgccagagacctcgaagtccatcccaag

SEQ ID NO: 236955 - DNA, 348 bp, Glycine max; identical to SEQ ID NO: 236846

SEQ ID NO: 236956 - DNA, 344 bp, Glycine max
ggatgcacaagtttgttgagatagctagaagcaatatgatgatgatgaaactgcttgtgttggttgctgcaacagttttggtatcatatgaatgccatggctcagactaccagaagttccctctccaaatgaaaactgggtttggtgggcactacagcaatgaggtagcatgtaccagttggatgcttgtcgtggaagcaaacatcgtcgtctagtggcaaactgttcctgcatcctgcggatagtacatagctgactaccttcgaggagaccaatattcatcatcttccacaatagttcaccaacatgcttacttcgatgctacatccctcatcatcaccaac

SEQ ID NO: 236957 - DNA, 363 bp, Glycine max
gagtgtgtgattgtttgttgttgtaactcgttcttcttcttttgttgttctgtgtttgtgtttgttttttctctcacctgaaaatgtcttgctgcggtggtaactgtggttgcggaagctcctgcaagtgcggcaacggctgcggaggctgcaagatgtacccagacttgagctacactgagtcaaccaccaccgagaccttggtcatgggagtggcacctgttaaggctcaatttgagggtgctgaaatgggtgtgcccgctgagaacgatggctgcaaatgtggaccaaactgctcctgcaacccctgcacttgcaagtgaggtgttgggagagcaagcttcaagcagagatagcccttaa

SEQ ID NO: 236958 - DNA, 322 bp, Glycine max
gattcacagattagtttgttgatcgagacaaccatcatcagtgtgatgaacatgatagtgtccttggtttcttcgctgctacaattttggcatcatggcaatgccatgcttactacatgttccctctccgattgaacactggctatggtgcccgtactccggaggtaaaatgcacatattggaagcctgctgtgaaagcacacatcatcattggatttgaaactattcctgaacagtgcgttgatgcagcaatggattacatccatgacgaatattatatatcatactccacaacagttaaccagcaagcttacatttatgc

SEQ ID NO: 236959 - DNA, 369 bp, Glycine max
gaccgtgcgctagttctgagtattctgatcgctccctgagagagctcgtcgcggcggttgcagaagaagattgcaagatgaagttcaacatcgcgaatcccaccactggatgccagaagaagctcgagatcgacgacgatctgaaactgcgagcattttgggacaagaggatctcacaggaggtcatcggagatgcactcggtgaggaatttaagggctatgtcttcaaaattaccggaggttgtgacaaacaaggatttccaatgaagcagggagtgctgactcctggtcgtgttagacttttgcttcacaggggaactccttgcttccgtggatatggaaggcgtaatggagagcgtaagagaaagt

SEQ ID NO: 236960 - DNA, 295 bp, Glycine max
ggtgttgcgttgtgcgtgagaaagtgcgcgtggtgaaaaagcatggcttctcagctcctgagacgaaccttcggaagtcgtttccttgcaaaccctagggccttctcctccgctgcttccactccgatccgcgccactctcttccccggcgacggcatcggccccgagatcgccgattccgtcaaacagatattccaagcagctgatgtcgcaatagaatgggaagagcactatgtaggaactgaaattgaccctagaacgcagagctttctgacatgggaaagtttagaatctg

SEQ ID NO: 236961 - DNA, 377 bp, Glycine max
ggcacaagtttgttgagatagctagaagcaataagatgaaaatgaaagtgcttgttttgtttgttgctacagttttggtagcatatgaatgccatggctcagactaccagaagttccctctccaaatgaaaactgggtttggtgggcaatacagcaatgaggtggcatgtgccagttggaggcttggcgtggaagcaaacaacgtagtcaagtggcaaactgttcctgcagcttgcggagagtacatagctgactacgttctatgagaccaatatagatcagattccaaaacagttaaccaacaagcttatttctatgctaaatccctcaaactcaccaacaaagatgtctttgtcttggacgttgacgacactact

SEQ ID NO: 236962 - DNA, 383 bp, Glycine max
ggcacaagtttgttgagatagctagaagcaataagatgaaaatgaaagtgcttgttttgtttgttgctacagttttggtagcatatgaatgccgtggctcagactaccagaagttccctctccaaatgaaaactgggtttggtgggcaatacagcaatgaggtggcatgtgccagttggaggcttggcgtggaagcaaacaacgtagtcaagtggcaaactgttcctgcagcttgcggagagtacatagctgactacgttctaggagaccaatatagatcagattccaaaacagttaaccaacaagcttatttctatgctaaatccctcaaactcaccaacaaagatgtctttgtctcggacgttgacgacactactctctct

SEQ ID NO: 236963 - DNA, 381 bp, Glycine max
gaaggtgcaagagtttgttgtgagctataagctagtttatcgtgaggagaatatgaagttgtttgttttctttgttgctgcagtagttttggtagcatggccatgccatggcgcaggctaccaaaggttccctctccgaatgaaaactggctatggtgagcgttcttcggaggtaaaatgcgcaagttttaggcttgctgtggaagcacacaacatccgagcctttaaaaccattcctgaagagtgcgttgaaccaacaaaggactacattaatggcgaacaatttagatcagactctaaaacagttaaccaacaagctttcttttatgctagtgaacgcgaagtccatcacaacgacatatttatattcggcatagataa

SEQ ID NO: 236964 - DNA, 359 bp, Glycine max
gatagtattatcattcattctcatctttctctcttctctctccacccaaaccctaactcccgaccctgttcccctctcgtatccgtcatgaaaggaggaaagtccaagaccgaatctaagagagccgatcccaaacttgctgtgaataagaagggagccgccaccaaggctaggaaacccgccggcaaggggaaggcagcgaaagaccctaacaagccaaagaggcctccaagtgctttcttcgttttcatggaggagttcaggaaggtattcaacaaagaacatcctgaaaacaaagcagtgtctgctgtgggcaaagctgctggagcaaaatggaagaccatgtctgatgctgaaaa

SEQ ID NO: 236965 - DNA, 360 bp, Glycine max; identical to SEQ ID NO: 236821

SEQ ID NO: 236966 - DNA, 349 bp, Glycine max; identical to SEQ ID NO: 235961

SEQ ID NO: 236967 - DNA, 374 bp, Glycine max
gacaacacaacgcaacacaacgcgcactctctcttttctctcttaacacaaaaaccctatcgttcttcgcggtttcgccgattctcgccatgccgaaagccaaatccgacgccaaagccgccgatagccggttgaagcgcaagggcgctggtgctggaaggaagcaatcgaagaaagctgctaaggatcctaacaagccaaagagacctccaagcgctttcttcgttttcatgtccgagttcagagagcaatttaagaaagagcatcctaacaacaaatccgtcgctgttgtcggtaaagctggtggtgacaaatggaaatcgctgtctgatgctgaaaaagcccccttcgtttgcacggccgaaaagaagaaa

SEQ ID NO: 236968 - DNA, 378 bp, Glycine max
ggaacaagggtttctctttctctttctctgtctgcttcttcactttctctcgtttcaatcgaaaaaaatcatgggcagaaaattcttcgtcggtggcaactggaaatgcaatgggaccactgaggaggtgaagaagattgttactactttaaatgaagctaaagtccctggagaagatgttgtagaagttgttgtgagccctccttttgtgttccttccttttgtaaaaagtttgctgcgccctgatttccatgtctcggcccaaaattgttgggttcgcaaaggtggtgcttatactggagaggttagtgctgaaatgcttgttaatttgggaattccttgggttattattggtcactctgaacggaggcagctttt

SEQ ID NO: 236969 - DNA, 369 bp, Glycine max
gagggtttttgtcgttgcgactaagagttgctgcttcttccgccactcagcacttcgctccctctgtgcttcaccaaccatggccgaaatcgaagctaccgttccagatccctctcaaatcgacgtcaaacttttcaaccgctggagcttcgacgacgttgaggttactgatatgtctctggctgattacattggagtgtccccgtcaaagcatgctacatatgttcctcacactgctggtaggtactcagtgaagaggttcaggaaggcgcagtgccccattgttgagagactcaccaactctctcatgatgcacggaaggaacaatggaaagaagctcatggctgtcaggattatcaagcatgcaat

SEQ ID NO: 236970 - DNA, 358 bp, Glycine max
ggcacaagtgcgtttgttgatcgagataactagaaacagtgtgatgaaaatgaaggtccttgttttcttcgttgctacaattttggtagcatggcaatgccatgcgtacgatatgttccctctccgaatgaacactggctatggtgcccgtactccggaggtgaaatgcgcaagttggaggcttgctgtggaagcacacaacatctctggctttgagaccattcctgaagagtgcgttgaagcaacaaaggaatacatccatggcgaacaatatagatcagactccaaaacagttaaccaacaagcttacttttatgccagagacctcgaagtccatcccaaggacacatttgtgttc

SEQ ID NO: 236971 - DNA, 360 bp, Glycine max
  unsure (1)..(360): unsure at all n locations
gaccacattccaaaacacaaacacatacattgtagtatcacttttgtctcggaatttgttcttttgagttatggcaagcttaaaggttgcatgtgtggttttgatgtgcatggctgtgatgagtgcaccaatgatggtgcaagccgtgtcatgcaatgatgtttctgtgaacctagcaccgtgcctatcttacctgatgcagggtggagatgttccagaatcgtgctgtagcggagtgaggaacattctgggttctgccagcaccacctttgacaaacaaaccgtgtgcanatgtcttcagcaagctgctaataactatggcatcaacgacgaatacgctcaagcactccccgcccgctg

SEQ ID NO: 236972 - DNA, 382 bp, Glycine max
ggaaacagagagtgatttcagtgagtgatcggtgttcacttgatctcatcataatcgtcagcgtcaattgaagaagatgccgatcagaaacatcgccgtcggaaggcctgaagaggcgactcaccccgacacgttgaaggcggctttggctgagttcatctcaaccttcatcttcgtgttcgccggctcaggctccggcatcgcctacaacaagctcaccgacaacggcgctgccacccctgccggcctcatctccgcctccatcgcccatgcattcgccctcttcgtcgccgtctccgtcggcgccaacatctccggcgggcacgtcaaccccgccgtcaccttcggcgccttcgtcggcggcaacatcaccttcctccgc

SEQ ID NO: 236973 - DNA, 358 bp, Glycine max
gatccttcatttccaaacatatctcatttatagtttactattgaaagatgggtttgaaaatggcaatactgatcctaggcctgctggccatgttccttttggtctcctcagaggtggcatccacgaattcaaaagaggtgacgaatggagttgaagatgccaaatatcctggtggaggctatggtgggggttacccaggcaatggcggtggtggctatcctggccgtggtggtggctaccctggtcgtggtggtggctatccaggtcgcggtggtggttaccctggtcgtggtggcggctatccaggccgtggaggagggtattgtcgctatggctgttgcggtggccggacatacaa

SEQ ID NO: 236974 - DNA, 359 bp, Glycine max
ggaacttctcacgttcatttctacacatccctagctctgtcgttccgtcgttgacgatggcgtttcgggtgcgaagccctgacctccgctctctctttcttctctctctcttgtccatcgcttccgccaatgtcttcttcgaagagcgtttcgatgacgggtgggaaaatcgatgggttaaatcagattggaaaaaagatgagaacgtggctggggagtggaaccacacctctggtcaatggaatggagacgctaatgacaaaggtattcaaaccagtgaggattacagattctatgctatttcagctgagtaccctgaattcagcaacaagggtaagacactagtctttcaattttct

SEQ ID NO: 236975 - DNA, 404 bp, Glycine max
gcacaagtgagtttgttgatcgagataactagaaacagtgtgatgaaaatgaaggtccttgttttcttcgttgctacaattttggtagcatggcaatgccatgcgtacgatatgttccctctccgaatgaacactggctatggtgcccgtactccggaggtgaaatgcgcaagttggaggcttgctgtggaagcacacaacatctttggctttgagaccattcctgaagagtgcgttgaagcaacaaaggaatacatccatggcgaacaatatagatcagactccaaaacagttaaccaacaagcttacttttatgccagagacctcgaagtccatcccaaggacacatttgtgttcagtatagatggcaccgtactctctaatatttcatactacaaaaaaca

SEQ ID NO: 236976 - DNA, 381 bp, Glycine max
ggcacaagtgagtttgttgatcgagataactagaaacagtgtgatgaaaatgaaggtccttgttttcttcgttgctacaattttggtagcatggcaatgccatgcgtacgatatgttccctctccgaatgaacactggctatggtgcccgtactccggaggtgaaatgcgcaagttggaggcttgctgtggaagcacacaacatctttggctttgagaccattcctgaagagtgcgttgaggcaacaaaggaatacatccatggcgaacaatatagatcagactccaaaacagttaaccaacaagcttacttttatgccagagacctcgaagtccatcccaaggacacatttgtgttcagtatagatggcaccgtactccc

SEQ ID NO: 236977 - DNA, 371 bp, Glycine max
ggcacaagtgagtttgttgatcgagataactagaaacagtgtgatgaaaatgaaggtccttgttttcttcgttgctacaattttggtagcatggcaatgccatgcgtacgatatgttccctctccgaatgaacactggctatggtgcccgtactccggaggtgagatgcgcaagttggaggcttgctgtggaagcacacaacatctttggctttgagaccattcctgaagagtgcgttgaagcaacaaaggaatacatccatggcgaacaatatagattagactccaaaacagttaaccaacaagcttacttttatgccagagacctccaagtccatcccaacgacacatttgtgttcagtatacatggca

SEQ ID NO: 236978 - DNA, 379 bp, Glycine max
gagagaaagagagagaaagatgtcgaagcgtggtcgtggtggttcggcggggaacaagttccgcatgtcgctgggtcttccagtggcggcgacggtgaactgcgccgacaacacgggggcgaagaacctctacatcatttcggtgaaagggatcaaaggccgtttgaaccgtcttccctcggcctgcgttggcgacatggtgatggccaccgtgaagaagggaaaacccgatctgaggaagaaggtcttgccagctgtcatcgttcgccagcgcaagccatggcgccgaaaggacggcgtctacatgtacttcgaagataatgctggtgttattgtcaatcccaagggagaaatgaaaggttctgctatcactggtccc

SEQ ID NO: 236979 - DNA, 351 bp, Glycine max
ggcagcagcacacggcacacacaaagaacaaaagacaaagacagagagaaacaatgtcttccccaagcaaacgccgagacatggacttggtgaagctgtcatcaggatgatgagtgattacaaggtggagacggtcaacgatggcatgcaagagttctttgtggaattccacggacccaaagacagtccttatcaaggtggtgtgtggaaagtaagggtggatctacctgatgcctatccttataagtctccatctattggctttgtcaacatatttttccatcgtaatgtggatgagatgtctggttctgtttgcttagatgttattagccagacctggggtccaatgtt

SEQ ID NO: 236980 - DNA, 368 bp, Glycine max
ggtcaagcctgccgagaaaaccctagttcgcttgcagtcacacaagaggccaatcctattcatagctcgagatgggtgaagaagtgaaggtagttgttccagaatcagtgttgaagaagcgcaagagggaggaggaatgggcgttagccaagaagcaagaactcgatgctgccaagaagaagagagccgagagccgcaaactcatctacaacagagctaagcagtacgctaaggagtacgatcaccaggagaaggaattgattcggttgaaacgctaggccaagctgaaaggtgggttctatgtggatccacaggctaaactgttgtttattaatcccattcgtggtattaatgccatggaccccaaa

SEQ ID NO: 236981 - DNA, 354 bp, Glycine max
gacacaacatcactgcaattcctttttccctcgagcaacgacgatggacgacgcggaagcggcgaacacgcttcgcattctggtggcgacggactgccacctcggttacatggagaaggatgaggtgcgccgccacgactccttccacgccttcgaggagatttgcgccgtcgccgagcgccaccgcgtcgacttcgtcctcctcggcggcgacctcttccacgagaacaagccctctcgctccacgctcgtcaaggccatcgagattctccgccgctactgcctcaacgaccgccccgtccccttccaggtcgtcagcgaccagacgctcaatttccagaacgcgtttggtca

SEQ ID NO: 236982 - DNA, 345 bp, Glycine max
ggtgcgtgaatcatgtcggacgaagagcatcacttcgattctaaggcggatgcgggagcgtccaagacgtatcctcagcaggctggtaccattcgcaagaatggctacatcgtcatcagatccaggccttgcaaggttgtagaggtctctacgtcaaagacaggcaagcatggacatgcaaagtgtcactttgttgcaattgatatttttaatgggaaaaagcttgaagatattgttccatcatcccacaactgtgatgttccacatgtgaatcgcactgactatcagcttattgatatctctgaagacggctttgtgagtctgttgactgataatggaaatacc

SEQ ID NO: 236983 - DNA, 355 bp, Glycine max
ggcacaagtgagtttgttgatcgagataactagaaacagtgtgatgaaaatgaaggtccttgttttcttcgttgctacaattttggtagcatggcaatgccatgcgtacgatatgttccctctccgaatgaacactggctatggtgcccgtactccggaggtgaaatgcgcaagttggaggcttgctgtggaagcacacaacatctttggctttgagaccattcctgaagagtgcgttgaagcaacaaaggaatacatccatggcgaacaatatagattagactccaaaacagttaaccaacaagcttacttttatgccagagacctcgaagtccatcccaaggacacatttgtg

SEQ ID NO: 236984 - DNA, 382 bp, Glycine max
ggcaagtcacacatacacgatatgataccccgtcctccctctcttcacttttgactattgacttcctcaaccgatccactcttctctctatctgcagatggcaagtgggtttggggaatcaacagggagatcacccccaagcccttcctacttcaacaacagtaataacaatgatgctgccaattttgaatgcaacatttgctttgaattagcgcaagacccgataattactttgtgtggtcatcttttctgctggccctgtctttacaaatggcttcactttcactcacaatcacgagaatgcccggtgtgcaaggccctcgtggaggaggagaagctggttcccttgtatgggagaggaaagtcgtcgactgatccaaga

SEQ ID NO: 236985 - DNA, 377 bp, Glycine max
ggcacaagtttgttgagatagctagaagcaataagatgaaaatgaaagtgcttgttttgtttgttgctacagttttggtagcatatgaatgccatggctcagactaccagaagttccctctccaaatgaaaactgggtttggtgggcaatacagcaatgaggtggcatgtgccagttggaggcttggcgtggaagcaaacaacgtagtcaagtggcaaactgttcctgcagcttgcggagagtacataactgactacgttctacgagaccaatatagatcagattccaaaacagttaaccaacaagcttatttctatgctaaatccctcacactcaccaacaaagatgtctttgtcttggacgttgacgacactact

SEQ ID NO: 236986 - DNA, 379 bp, Glycine max
ggaacttctcacgttcatttctacacatccctagctctgtcgttccgtcgttgacgatggcgtttcgggtgcgaagccctgacctccgctctctctttcttctctctctcttgtccatcgcttccgccaatgtcttcttcgaagagcgtttcgatgacgggtgggaaaatcgatgggttaaatcagattggaaaaaagatgagaacgtggctggggagtggaaccacacctctggtcaatggaatggagacgctaatgacaaaggtattcaaaccagtgaggattacagattctatgctatttcagctgagtaccctgaattcagcaacaagggtaagacactagtctttcaattttctgttaagcacgaacagaagct

SEQ ID NO: 236987 - DNA, 383 bp, Glycine max
gaaggtgcaagagtttgttgtgagctataagctagtttatcgtgaggagaatatgaagttgtttgttttctttgttgctgcagtagttttggtagcatggccatgccatggcgcaggctaccaaaggttccctctccgaatgaaaactggctatggtgagcgttcttcggaggtaaaatgcgcaagttttaggcttgctgtggaagcacacaacatccgagcctttaaaaccattcctgaagagtgcgttgaaccaacaaaggactacattaatggcgaacaatttagatcagactctaaaacagttaaccaacaagctttcttttatgctagtgaacgcgaagtccatcacaacgacatatttatattcggcatagataaca

SEQ ID NO: 236988 - DNA, 391 bp, Glycine max
ggcacaagtttgttgagatagctagaagcaataagatgaaaatgaaagtgcttgttttgtttgttgctacagttttggtagcatatgaatgccatggctcagactaccagaagttccctctccaaatgaaaactgggtttggtgggcaatacagcaatgaggtggcatgtgccagttggaggcttggcgtggaagcaaacaacgtagtcaagtggcaaactgttcctgcagcttgcggagagtacatagctgactgcgttctaagagaccaatatagatcagattccaaaacagttaaccaacaagcttatttctatgctaaatccctcaaactcaccaacaaagatgtccttgtcctggacgttgacgacactactctccccaaacccca

SEQ ID NO: 236989 - DNA, 357 bp, Glycine max
attcaagctcggatgtgggtagcactgtcaaccttcttcttgacggtattaactctcttacgccaagttgcataccctgtgaccaagaaatttccagcattaccttccaatgatgataagagtacttcaaaaccacttcctgatacaacaaacatggaagttcttcctccttcatcaactccatcatgtacagaggaaaatctccttccctccatgctgaaaaggttaggtgagcttgaagagaaggttgacacactccaatctaagccatctgagatgccttatgagaaagaggaattgttgaatgctgctgtatgccgggtggatgctttggaacctgagttaaatgcaactaaa

SEQ ID NO: 236990 - DNA, 355 bp, Glycine max; identical to SEQ ID NO: 235231

SEQ ID NO: 236991 - DNA, 349 bp, Glycine max; identical to SEQ ID NO: 236480

SEQ ID NO: 236992 - DNA, 366 bp, Glycine max
gcacaagtgagtttgttgatcgagataactagaaacagtgtgatgaaaatgaaggtccttgttttcttcgttgctacaattttggtagcatggcaatgccatgcgtacgatatgttccctctccgaatgaacactggctatggtgcccgtactccggaggtgaaatgcgcaagttggaggcttgctgtggaagcacacaacatctttggctttgagaccattcctgaagagtgcgttgaagcaacaaaggaatacatccatggcgaacaatatagatcagactccaaaacagttaaccaacaagcttacttttatgccagagacctcgaagtccatcccaaggacacatttgtgttcagtatagat

SEQ ID NO: 236993 - DNA, 396 bp, Glycine max
gataacacaaacacaaattacatagcctcagtaatctgagagagaaacaaaaacaatgaaggtttccattgccaagttccactcccttcccctatgttttttccttctcttggccttcaacacaaaacccctcctagcagcagaaccagagccagtggttgataagcaagggaaccctttggagccaggagtagggtactacgtgtggccactttgggctgatgaaggaggcctcacactaggccaaacaaggaacaagacatgccctctttatgttatccgtgacccttcattcattggcaccccagtttcattcttagcaccaggccttgaccatgttccaacactcactgatctaaccattgatttccctgtggtgacagtgtgtaaacaacc

SEQ ID NO: 236994 - DNA, 332 bp, Glycine max
aattcccgggccgacccacgcgtcagtccaggcgtcagacggctgcaaaaagagaaatgaaggggacaacacaaatcatcaacatcgaccaagagttaggcttatgcaccagatccatcatgggcacctctgctattcagctctcagcaatcactggtcaaactgcgctgaagcatctcaatgagttcgtccgcatcatcggtggcaccggcaagagtcgcactataatacgacggcaggtcaagagtgcgcctcatagcattcggtaaggctctgaccgtccgatgtacttgggtctattcgcggaacatattccatcacacctgatcgga

SEQ ID NO: 236995 - DNA, 376 bp, Glycine max
  unsure (1)..(376): unsure at all n locations
gataaaaaaacttctaataaccccaaagggttgccttggggttcggtttgtgctgccggattcgtatgttgatcctgaaaacaaggactatggtgctgaattatttgtgaatggagagatcgtccagagatcacctgaaagacagagaagggtggaaccacagccacaaaggcatcatgacagaccacgatacaatgatagaacaaggtatgtccggcgcagagaaaacatgcagtgaaggaccaatttgagatanggagagggatgtgatgtacatacactatggaagtactttgttacatgcactattttagtcttgcctttggagacattccatatatttccggtggggtaactcaaatgtttgttgtcaaac

SEQ ID NO: 236996 - DNA, 388 bp, Glycine max
ggttgcagaagacacaaaagaagtcacaaaatgtatcgcgttcttcaccgcgctttctgcaccgccaccgagcccgccaccaccgccaccgtcaccgtttccatcaagtccatttcggaggatctgtacaaggaagtgaagctaaagaatgtggtggagaagttcaagaaagcctcggacatcgaccgcttccgcaaaaaaaccggcatctacgaagacaccgtccgccgcctcgccggcgcccgacgcttccggtggatccgcgacatcctcgagcaccagaagcagtactccgacatctccaacgagggcttctccgcgcgcctcatctccctgtacggcaagtccggcatgaccaagcacgcgcgcaaggtgttcgacgaaatgc

SEQ ID NO: 236997 - DNA, 364 bp, Glycine max
ggcacttcaattgcaatcaaattagttcattctctttgcgcagttccctacctctcctttcaagatgcagatcttcgtcaagaccctcaccggaaagaccatcacccttgaggtggaaagctctgacaccatcgacaacgtcaaggccaagatccaggacaaggaaggaattcccccggatcagcaacgtctcatcttcgccggaaagcagctcgaggacggccgtaccctcgccgactacaacatccagaaggagtcaacccttcaccttgtccttcgtctccgtggtggcatgcagatcttcgtcaagactctcactgggaaaaccataaccctagaggtcgaaagctctgacaccattgac

SEQ ID NO: 236998 - DNA, 403 bp, Glycine max
ggtcaagaataccgggtcgagccacgcgtccagtttacgcattgaacgaaaattagggtttgtactgtagcaggaagaagcagcaatggcgccgcagagaacacgtaatgttagcagaaaccctgaattgataacgggaatcggaaagtactcgaggtcgcacatgtaccacaagaggggcatttgggctatcaaggccaaaaacggtggcgttttacctcgccacgaccctaaacccaagcctgaagctcctgctgaaaaaccacccaaattttacccagctgatgatatcaacaagccccttgtcaacaaccacataccgataccagctaagctcagggctaacactactctcgggacagtgttgattcgtcttgccggtagatttaacggaaacagggta

SEQ ID NO: 236999 - DNA, 359 bp, Glycine max
ggcacaagtgagtttgttgatcgagataactagaaacagtgtgatgaaaatgaaggtccttgttttcttcgttgctacaattttggtagcatggcaatgccatgcgtacgatatgttccctctccgaatgaacactggctatggtgcccgtactccggaggtgaaatgcgcaagttggaggcttgctgtggaagcacacaacatctttggctttgagaccattcctgaagagtgcgttgaagcaacaaaggaatacatccatggcgaacaatatacatcagactccaaaacagttaaccaacaagcttacttttatgccagagacctcgaagtccatcccaaggacacatttgtgttca

SEQ ID NO: 237000 - DNA, 342 bp, Glycine max
ggcgaaacagagagtgatttcagtgagtgatcggtgttcacttgatctcatcataatcgtcagcgtcaattgaagaagatgccgatcagaaacatcgccgtcggaaggcctgaagaggcgactcaccccgacacgttgaaggcggctttggctgagttcatctcaaccttcatcttcgtgttcgccggctcaggctccggcatcgcctacaacaagctcaccgacaacggcgctgccacccctgccggcctcatctccgcctccatcgcccatgcattcgccctcttcgtcgccgtctccgtcggcgccaacatctccggcggccacgtcaaccccgccgtc

SEQ ID NO: 237001 - DNA, 359 bp, Glycine max
gcacaagtgagtttgttgatcgagataactagaaacagtgtgatgaaaatgaaggtccttgttttcttcgttgctacaattttggtagcatggcaatgccatgcgtacgatatgttccctctccgaatgaacactggctatggtgcccgtactccggaggtgaaatgcgcaagttggaggcttgctgtggaagcacacaacatctttggctttgagaccattcctgaagagtgcgttgaagcaacaaaggaatacatccatggcgaacaatatagatcagactccaaaacagttaaccaacaagcttacttttatgccagagacctcgaagtccatcccaaggacacatttgtgttcag

SEQ ID NO: 237002 - DNA, 445 bp, Glycine max
tcccgggccgacccacgcgtcagaagacgacagaaggggtctctttttgctgtgggaagaggaaccctagctagggtttggaagaagctgatccgagaagatggtgcagcgtctcacctaccgcaaacgccacagctatgctaccaaatccaaccagcacagagtcgtcaagactcccggtggcaagcttgtttatcagaccacgaagaagagggccagcggacccaagtgccctgtcactggaaagaggattcaagggattccacatttaaggccagcagagtataatagatcaaggttacacagaaaccgaaggactgtgaaccgtgcatatggtggtgtgttgtctggcagtgctgttagagaaagaatcattcgagctttcttggttgaagagcaaaagattgtgaaaaaggtcttgaagatccaaaagacaaaggaaaaa

SEQ ID NO: 237003 - DNA, 368 bp, Glycine max
tgggattcggagaggttctcaatctccggttcggcacagaatgctcgatcaatctcatgcactgtcacatctactgcacaagcgacagtcacgcgaccaaatccaaccagcacatcgtcatcaggactcccggtggcatgcttgtgtagcagacgacgactaggagggccagctgttgcaactgccctgtcactgggaagaggattcaagggattccacatatagagccagcacagtatcatgtatcaatgttacacagtggccggccgactgtgagccgtgcatatggtagtgtgttgtctggcagtgctgttagagattgaatcattcaagctttcgtggatgaggagcaaaggattgtgacaaag

SEQ ID NO: 237004 - DNA, 359 bp, Glycine max
  unsure (1)..(359): unsure at all n locations
gagggtttacaccgaggagacacaccttcagcagcagcagccatggttctcaaaaccgaactatgccgattcagcggtgccaagatctacccagggaaaggcatcagatttgttcgtggtgattctcaggttttcctgtttgctaactcgaaatgtaagaggtatttccacaacaggttgaagccatcaaagctcacctggactgcaatgtacagaaagcaacacaagaaggacattgctcaagaagctgtgaagaaaagaagacgtgctgccaaaaagccttactccaggtccattgtcggtgccactttggaagttatccagaanaagagagctgagaagccagaagttcgagatgc

SEQ ID NO: 237005 - DNA, 381 bp, Glycine max
ggagggcgaggaagccacatagagacacaatacagagtgagttgttgctccttcgccacaactctctgccaacatgggtatctccagagattctatgcacaagaggcgtgccactggtggcaagaagaaggcctggaggaaaaagagaaagtatgagcttggtcgccagcctgctaacactaagctgtcaagcaacaagacagtcaggaggatccgtgttagaggtggaaatgtgaaatggagggcattgagattggatactggaaattactcctggggaagtgaagctgtaactcgcaagactcgtgtactaaatgtggtttacaatgcctcaaacaatgagcttgtgcgtactcagactcttgtcaaaagtgctatcgt

SEQ ID NO: 237006 - DNA, 386 bp, Glycine max
ggcagttcaaagcgaagaaagattcgaaacgaagaaagaaagcgttgtgaagaatggcggaagagggacaagtgatcggtgtccacagcgtagaggagtggaaggaacatctcaagaagggagaagagtccaagaaattgattgtggtggattttactgcttcttggtgcggtccatgccgtttcattgccccgattcttgcagagtttgctaaaaagttgccgaatgtcaccttcctcaaggtggatgtggatgaattggagactgtttccaaggagtggggaattgaggctatgccaaccttcctgttcttgaaagaaggcaagctggtggacaaggttgtgggtgccaagaaagaggagctgcaattgacaatagccaaacat

SEQ ID NO: 237007 - DNA, 385 bp, Glycine max
ggacgaattcaagggtagataagaaaaagaaaaaatgtgtagcctcgagaagcgtggcaacgcctgggtactaaccctcgacggcgacgacggcgacgtccaacaccgcctcaacccaaccctaattgattccctcctctcaacgcttaaccgtctcgcatctcaagccactcccggctccgtcctcgtcaccaccgccaccggcaaattcttctccaacggcttcgacctttcctgggcgcgcgccgccgcttccgcctccgccgccaccgaccgcctccagttcatggtggactccctcaagcccgtcttggcggcgatcatgtcccttcccatgcccaccatcgtcgccatcaacggccacgcctccgccgccggggttcct

SEQ ID NO: 237008 - DNA, 351 bp, Glycine max
gacagcaaaacaattttcaaactcaattaccattccataacctaaatctcctctttgtttccgagtcagagagcaatggcacgtaccaagcaaaccgctcgcaagtccaccggcggaaaggcgccgaggaagcaattggcgactaaagccgctcgcaagtcagctccggccaccggcggagtgaagaagccccaccgcttcaggcccggaacggtggctctgagggagatcagaaagtaccggaagagcactgaacttctgatccgaaaactcccattccagaggctcgtcagagaaatcgctcaggatttcaaaacagatcttcgtttccagagcagcgctgtttctgcg

SEQ ID NO: 237009 - DNA, 366 bp, Glycine max
ggcacgcactagcactgtctctcactgaaacttgttcgcacattttcacggatctaactaagttatcgccatgaatcgccaccacgatcccaatcccttcgaagaagaagaagtcaatcctttttcgaatggcactactgctcctgcatcaaagtcacgtattccaccattagcatctgagtcactgggctttggtcaaaggcatgatgctacagttgatattcctttggatactacaaatgactccaagaaaaaaggtcaagagctagcagcttgggaagcagatttaaaacggagagagaaggaaataaaaagaagagaagaggctgtttctaaagctggtgttcctgttgatgataagaattg

SEQ ID NO: 237010 - DNA, 349 bp, Glycine max
  unsure (1)..(349): unsure at all n locations
ggcacaagtttgttgagatagctagaagcaataagatgaaaatgaaagtgcttgttttgtttgttgctaccgttttggtagcatatgaatgccatggctcagactaccagaagttccctctccaaatgaaaactgggtttggtgggcaatacagcaatgaggtggcatgtgccagttggaggcttggcgtggaggcaaacaacgtagtcaagtggcaaactgttcctgcagcttgcggagagtacatagctgactacgttctangagaacaatatagatcagattccanaacagttaaccaacaagcttatttctatgctaaatccctcaaactcaccaacaaagatgt

SEQ ID NO: 237011 - DNA, 365 bp, Glycine max
acggcagcaagacaaaaagggaccaccactactaccaagtgaaaaagcaactaagcatagtgtgtaagaaagggagaaaaacaagtgctgtgtagagagaaaaatggctaggtggtgcatgatcttggtggttcttgctcttgccgtggttgcaagtgccagaaacatgcccaatgacgctggtttggaggaccagaagaacttccttgggtatgggttttcgggagttggcaacaatggccttccctttggtggagtgggttctgcgttagttcgcaatattgctggttactctgcgctaagaggacttggaggattcggtgggcctggtgggcttggcggactcggaggtcctggtaacggtg

SEQ ID NO: 237012 - DNA, 377 bp, Glycine max
  unsure (1)..(377): unsure at all n locations
gacttgtaataattcttataacacaacacaacccatggccaccacctccgcattcctcctccttcccctcctcctgctgctccacctcgccatcgccgctcacggcatcggcatcaactacggcacgctcggcgacaaccttccaccgcccgcggcggtggcgaacttcctgaagacgaagacgaccatcgaccgcgtgaagatctacgacgtgaacccggacatcctgcgggccttcgccggcagcggcatctccgtgacggtgaccgcccccaacggcgacatcgccgccttaaccaaaatcgactcggcgaggcagtgggtggcgacgcacatcanaccctttcaccctcagaccanaattaattacatcctcg

SEQ ID NO: 237013 - DNA, 365 bp, Glycine max; identical to SEQ ID NO: 236722

SEQ ID NO: 237014 - DNA, 85 bp, Glycine max
ggcacaagtgagtttgttgatcgaaataactagaaacagtgtgatgaaaatgaaaggccttgatttcttcgttgctagaattttg

SEQ ID NO: 237015 - DNA, 302 bp, Glycine max
gattatatttgagttcaaacaaatcaaagccatggccacctccaacttctctattgttctctccgtctccctagccttctttttggtgctacttaccaaggcacactcgaccgataccgtttctttcaccttcaacaagttcaacccagtccaaccaaacattatgctccaaaaagatgctagtatttcatcctctggggtgttacaactcaccaaagttggcagcaacggcgtgcccacctcgggatctctcggtcgtgccctttacgctgccccaatccagatttgggacagcgaaaccg

SEQ ID NO: 237016 - DNA, 361 bp, Glycine max
ggaacttctcacgttcatttctacacatccctagctctgtcgttccgtcgttgacgatggcgtttcgggtgcgaagccctgacctccgctctctctttcttctctctctcttgtccatcgcttccgccaatgtcttcttcgaagagcgtttcgatgacgggtgggaaaatcgatgggttaaatcagattggaaaaaagatgagaacgtggctggggagtggaaccacacctctggtcaatggaatggagacgctaatgacaaaagtattcataccagtgaggattacagattctatgctaattcagctgagtaccctgaattcaacaacaagggtaagacactagtcttttcattttctgt

SEQ ID NO: 237017 - DNA, 383 bp, Glycine max; identical to SEQ ID NO: 236188

SEQ ID NO: 237018 - DNA, 375 bp, Glycine max
gacttgtaataattcttataacacaacacaacccatggccaccacctccgcattcctcctccttcccctcctcctgctgctccacctcgccatcgccgctcacggcatcggcatcaactacggcacgctcggcgacaaccttccaccgcccgcggcggtggcgaacttcctgaagacgaagacgaccatcgaccgcgtgaagatctacgacgtgaacccggacatcctgcgggccttcgccggcagcggcatctccgtgacggtgaccgcccccaacggtgacatcgccgccttaaccaaaatcgactcggcgatgcagtgggtggcgacgcacatcaaaccctttcaccctcagaccacaattaattacatcct

SEQ ID NO: 237019 - DNA, 373 bp, Glycine max
  unsure (1)..(373): unsure at all n locations
tcccgggccaaccaagccttcattacggttgcaaaagaacacaaaaagggttggaatttggattgctcgttaacattgtgggagtttcgtatccttacgcgaggttcttccacgaagtggacgaagggcttctcaacaaccttattaaggttaacgttgttggaaccactaaggtcacgcaagctgttctgccagggatgctcangagaaagaagggggcgattgttaacattggttctggagctgctattgttattccttctgatcctctttatgctgtttatgccgccaccaaagcgtacatcgaccagttttcgagatgtctctatgttgaatacaagaagagtgggattgacgttcagtgtcagattcc

SEQ ID NO: 237020 - DNA, 385 bp, Glycine max
ggcacaagtgagtttgttgatcgagataactagaaacagtgtgatgaaaatgaaggtccttgttttcttcgttgctacaattttggtagcatggcaatgccatgcgtacgatatgttccctctccgaatgaacactggctatggtgcccgtactccggaggtgaaatgcgcaagttggaggcttgctgtggaggcacacaacatctttggctttgagaccattcctgaagagtgcgttgaagcaacaaaggaatacatccatggcgaacaatatagatcagactccaaaacagttaaccaacaagcttacttttatgccagagacctcgaagtccatcccagggacacatttgtgttcagtatagatggcaccgtactctctaat

SEQ ID NO: 237021 - DNA, 436 bp, Glycine max
tcccgggccgacccacgagtcagtcggatacgacaacagaagggggaaaagttgatttggttgttcaaaataactagaaccattgtgatgaaaatgaaggcccttgttttcttcgttgctacaattttggtaccatggaaatgccatgcgtacaatatgttccctctccgaatgaacactggctatggtgcccgtactccggaggtgaaatgcgcaagttggaggcttgctgtggaagcacacaacatctttggctttgagaccattcctgaagagtgcgttgaagcaacaaaggaatacgtccatggcgaacaatatagatcagactccaaaacagttaaccaacaagcttacttttatgccagagacctcgaagtccatcccaaggacacatttgtgttcagtatagatggcaccgtactctctaatattccaa

SEQ ID NO: 237022 - DNA, 389 bp, Glycine max
gacacagtctcttcgtcttgcaattccttcctcgttatggagtcgcgagtgctgtcacgcgccggaaccttgtcctccctccctcacctccgcaagccgccgcgggaggccgtctccagcgcctccctcgtcgccgtgaaggccgtgggctccgtcgcggacggcggaaacctgatttgggggaggcagctgcgcccggagctctgctcgccggtgctgaagaaggaggctgtcctcctccggccatgcctcgccgccgcctcctcgccggccgagggtagtgattccgccggagaagcaaaggttgctccggcggggttcttcgacaagtacccggctctggtcaccggatttttcatcttcacgtggtacttcttgaacgtgatttt

SEQ ID NO: 237023 - DNA, 380 bp, Glycine max; identical to SEQ ID NO: 235270

SEQ ID NO: 237024 - DNA, 385 bp, Glycine max
ggcacccaaaggtgcaaaaatattaagatgataaacattggagcacttgttgtactctttgcatttctcttcctcagttgtgcctatgcacaagacacaacaacccttgtgcctgcaatcataacttttggtgactcagccgtggatgtatggaataatgactatcttcccacccttttcaaggctgattaccctccttatgggagggactttgctaaccaccaacctactgggaggttttgcaatggcaaattagctactgattttactgctgacactttgggttttaagacctatgctccagcatatcttagcccacaggcatcagggaaaaacctccttattggagcaaactttgcttctgctgcatctggttatgatgaaa

SEQ ID NO: 237025 - DNA, 387 bp, Glycine max
ggggaaccctaattctgcgaggtgagtgaaaatggcggtacccttgctctccaagaagatcgtgaagaagcgcgtcaagaagtttatacgcccccagagtgatcgcaagatctccgtcaagccaagctggcgcagacccaagggtattgattctcgtgtcaggagaaagttcaaaggatgcactttgatgcccaacattggttatggctcagacaagaaaacccgccattatctaccaaatggtttcaagaaatttgtcgtgcacaatgtgaaagacctggaacttctcatgatgcataacaggacatattgtgctgagattgctcacaatgtatccacaaggaagaggaaggacatagttgagagagctgctcagcttgatgttgt

SEQ ID NO: 237026 - DNA, 366 bp, Glycine max
gaccgcgaaacacacatttcacgagtcattctcgtttccctttcgactgcgattgtttgttaactgaacttttcgaccaaaatgtctggacgtggaaaggggggcaagggtttgggaaagggaggagcgaaacgacaccgtagggtgttgcgcgataacattcagggaatcaccaagcctgcgattcggcgtttggctcgcatgggtggcgtgaagcgtatcactggactcatctacgaggagacacgtggcgtgctcaagatctttctggagaacgtgattcgtgacaccgttacctacactgaacacgctacgagaaagaccgttacggcaatggatgtggtttatgctctcaatagacaagga

SEQ ID NO: 237027 - DNA, 380 bp, Glycine max
gacgtacgcaactgaaaaggaaaaccctaagagatgaagagaactcctatcttgttccctctcttctttcttctttgtgccttcacctcatatctaccttcagccaccgctgatgatgatcatgtgtacgacactgacggcgataagcttcaatacggtgtcaattatttcgtgttgccagtgataagaggaaatggcggtggaatacaagtagcaaaagcaggaaacgaaacttgccctctgactgtggtgcaatctggcaacgagctctctgaggggttaccgataaagattgcatctcgatcagcaggagtcgctttcatcacccaaggccagcttttcaagagcattcagttcggtgtgtttccatccacactcag

SEQ ID NO: 237028 - DNA, 382 bp, Glycine max
gacagcgaaacagagagtgatttcagtgagtgatcggtgttcacttgatctcagcataatcgtcagcgtcaactgaagaagatgccgatcagaaacatcgccgtcggaaggcctgaagatgcgactcaccccgacacgttgaaggcggctttggctgagttcatctcaaccttcatcttcgtgttcgccggctcaggctccggcatcgcctataacaagctcaccgacaacggcgctgccacccctgccggcctcatctccgcctccatcgcccatgcattcgccctcttcgtcgccgtctccgtcggcgccaacatctccggcggccacgtgaaccccgccgtcaccttcggcgccttcgtcggcggcaacatcaccttcc

SEQ ID NO: 237029 - DNA, 368 bp, Glycine max; identical to SEQ ID NO: 235666

SEQ ID NO: 237030 - DNA, 421 bp, Glycine max
ccgggccgactacgattcgatggcaaaaaaccaccaaaggggaaaaaacccaataaccggtaattggggccggccaatccgcccttcccggcaacttcggaaccaatggatccaacatccaggtcggacaaaaagcacaatttcagtcaaaggcgacccggagcctccaaacctaccctcagcaagccggtaccatccgcaagagcggctacatcgtcatcaaaggccgcccctgcaaggttgtggaagtttcgacttccaaaactggaaagcacggtcacgctaagtgtcactttgttggaattgatattttcactgccaagaaacttgaggatattgtgccctcttctcacaactgtgatgttcctcatgtgaatcgtactgattaccagctcattgatattgctgaggatggattttt

SEQ ID NO: 237031 - DNA, 382 bp, Glycine max
  unsure (1)..(382): unsure at all n locations
ggactgcaactttgccctcggtgaggcttcaatttccaattagggtttcgcttagagtaaccaattaccatgggagtcttcacctttgtcgttcgcaaatccggcgccgaatggagcgccaagcaacattccggcgacatcgaggcctccgccgactccacctacgatctccaaaggaagctcgtgcaagccgctctcgccgttgattcctccggtggagtccagtcctccttctctcccgtgtctcctacctccgctgtgttccaggtgatagtgggtggtgctgtatacgttggaggtggcggtggtgctgttgcagctgcacctgcangtggtgctgctgcagctgatgctgccccggctgctgagaaaaaggaagaaa

SEQ ID NO: 237032 - DNA, 364 bp, Glycine max
gaaagatgaactggggaattgactagtgcggcgcgctcctattatcaccgtagacggcggaggtggcggtggtggtgtagacacggcgtgacggcgatctcttgagataaatgttggttgaaagaggaagaacaacaacagttgtattgtagaatgagccaaccaacggtgatacttgccactgcgagctatgatcacactattcgtttttgggaggccaatagtggccgttgctaccgcaccatccaatatcctgattcgcaagtaaaccggctggagataaccccggataaacgcttcctggctgcagctggcaatccacacatacgactgtttgatgttaactcaaatagtcctcaaccag

SEQ ID NO: 237033 - DNA, 385 bp, Glycine max
gatgcacaagtttgttgagatagctagaagcaataagatgaaaatgaaagtgcttgttttgtttgttgctacagttttggtagcatatgaatgccatggctcagactaccagaagttccctctccaaatgaaaactgggtttggtgggcaatacagcaatgaggtggcatgtgccagttggaggcttggcgtggaagcaaacaacgtagtcaagtggcaaactgttcctgcagcttgcggagagtacatagctgactacgttctaggagaccaatatagatcagattccaaaacagttaaccaacaagcttatttctatgctaaatccctcaaactcaccaacaaagatgtctttgtcttggacgttgacgacactactctctct

SEQ ID NO: 237034 - DNA, 340 bp, Glycine max
ggcacaagtgagtttgttgatcgagataactagaaacagtgtgatgaaaatgaaggtccttgttttcttcgttgctacaattttggtagcatggcaatgccatgcgtacgatatgttccctctccgaatgaacactggctatggtgcccgtactccggaggtgaaatgcgcaagttggaggcttgctgtggaagcacacaacatctttggctttgagaccattcctgaagagtgcgttgaagcaacaaaggaatacatccatggcgaacaatatagatcagactccaaaacagttaaccaacaagcttacttttatgccagagacctcgaagtccatccc

SEQ ID NO: 237035 - DNA, 374 bp, Glycine max
ggaaacagagagtgatttcagtgagtgatcggtgttcacttgatctcatcataatcgtcagcgtcaattgaagaagatgccgatcagaaacatcgccgtcggaaggcctgaagaggcgactcaccccgacacgttgaaggcggctttggctgagttcatctcaaccttcatcttcgtgttcgccggctcaagctccggcatcgcctacaacaagctcaccgacaacggcgctgccacccctgccggcctcatctccgcctccatcgcccatgcattcgccctcttcgtcgccgtctccgtcggcgccaacatctccggcggccacgtcaaccccgcagtcaccttcggcgccttcgtcagcggcaacatcacct

SEQ ID NO: 237036 - DNA, 378 bp, Glycine max
gataccatagaagaagcacaaagagaagcattagcactaggagcagcaacaactagtctcagctgaaatggcctcttcagtgatggcatctgtggccctcaaacctgcccctttcactgttgagaagtcctcagtgagaggccttccctctctctcaaggaactcttcttcattcagagttgtggccagtggcaagaagatcaagactgacaaaccttatggaattaatggtggcatggctttgagggatggaactgatgcatctggcaggaaaggaaagggaaagggtgtttaccagtttgtagacaaatacggtgctaatgtcgatggttacagtcctatctacgacaccaaggactggtctccaaccggtgatgt

SEQ ID NO: 237037 - DNA, 380 bp, Glycine max
ggcagcagttgggaggaggcactgtggcagaagtcttaggagtgtaaaacagagacgcacaatgaagacgattctatcgtccgagaccatgaatattcccgacggtgtgagcatcaaggttcacgctaaggttatcgaagttgatggccctcgtggaaaactcgtgcgagacttccaccatctgaacttggacttccaacttattaccgacgatggcggtaaaaggaagctcaagattgattcttgggttggttctcgtaaaacctccgccgccatccgcaccgccctcagccacgttgagaatttgatcaccggcgtcaccaatggatagcgatacaaaatgagattcgtgtgcgctcattttccgatcaacgctatca

SEQ ID NO: 237038 - DNA, 358 bp, Glycine max; identical to SEQ ID NO: 234733

SEQ ID NO: 237039 - DNA, 346 bp, Glycine max
  unsure (1)..(346): unsure at all n locations
ggcacctctttctccttttgtcaaattcttctgttcaacaggtgtgtgctttggaatcagcatttggctatttggtctttgccaatggatgctaagtcggctgtagaattaatggagtcttcctcagaggttcatttttctggatttcacatggatggttttgagcaaagaaaggctagcatagaacaaccaacaacctcagaaactgacatgtataaacaaccttttgtcatangtgttgctgggggtgcagcatctggcaagacaacagtttgtgatatgattattcagcagcttcatgatcaacgagttgtacttgttaatcaggattctttttacaataact

SEQ ID NO: 237040 - DNA, 388 bp, Glycine max
attccaattcaaacagaaaacctaatttctcaaatttgatttcgcacaaaattttcctcactaaaatgtctggtcgtggaaagggtggcaagggtttgggaaagggaggtgccaagaggcacaggaaggttctgcgcgataacattcaaggaatcacgaaacctgcgattcgtaggttagcgagaagaggtggcgtgaaaaggatcagtggtttgatctacgaggaaaccagaggagttctgaagatattcttggagaacgtgattcgtgatgctgtgacctacactgagcacgctaggaggaggacagtgactgctatggacgtggtttatgctcttaagaggcaaggaaggaccctctacggttttggaggctgaacaattccttt

SEQ ID NO: 237041 - DNA, 383 bp, Glycine max
gaccacattccaaaacacaaacacatacattgtagtatcacttttgtctcggaatttgttcttttgagttatggcaagcttaaaggttgcatgtgtggttttgatgtgcatggctgtgatgagtgcaccaatgatggtgcaagccgtgtcatgcaatgatgtttctgtgaacctagcaccgtgcctatcttacctgatgcagggtggagatgttccagaatcgtgctgtagcggagtgaggaacattctgggttctgccagcaccacctttgacaaacaaaccgtgtgcaaatgtcttcagcaagctgctaataactatggcatcaacgacgaatacgctcaggcactccccgcccgctgcaatgtcagcgtcccttacaaga

SEQ ID NO: 237042 - DNA, 381 bp, Glycine max
caagacgttcggggagtgcacgctgaaggacacggtgaagcccgtgctgatcccctgctacgacctcgtcacgcgcgcgccgttcgttttctcgcgcgccgacgcgcttgaagtggacggctacgatttcaagatgcgcgatgtgtgcgccgccacgtcagcggacccatcctctgcccccacagagatgcggtccgtcgacggcaggaccaggatcatggccgtcgacggaggcgtcgccatgaacaatccaacggctgccgccatcacgcacgtgctcaataacaaacatgagttcccgttctgtaacggcgtttccgacctcctcgtactctccctcggtaacggagagtcagactttaacgccgttaagtcctcctc

SEQ ID NO: 237043 - DNA, 378 bp, Glycine max
gaaggtgcaagagtttgttgtgagctataagctagtttatcgtgaggagaatatgaagttgtttgttttctttgttgctgcagtagttttggtagcatggccatgccatggcgcaggctaccaaaggttccctctccgaatgaaaactggctatggtgagcgttcttcggaggtaaaatgcgcaagttttaggcttgctgtggaagcacacaacatccgagcctttaaaaccattcctgaagagtgcgttgaaccaacaaaggactacattaatggcgaacaatttagatcagactctaaaacagttaaccaacaagctttcttttatgctagtgaacgcgaagtccatcacaacgacatatttatattcggcataga

SEQ ID NO: 237044 - DNA, 380 bp, Glycine max
gaaggatcagcagggagaattaggtttttagggtttacaccgagcagccacacctcccgcagcagccatggttctcaaaactgaactatgccgattcagtggtgccaagatctacccaggaaagggcatcagatttgttcgtggtgattctcaggttttcctgtttgcaaactcaaaatgtaagaggtatttccacaatcgcctgaagccttcaaagctcacctggactgcaatgtacagaaagcaacacaaaaaggacattgctcaagaagctgtgaggaagaggagacgtgctgccaaaaagccttactctaggtccattgttggtgcgaccttggaagtaatccagaaaaagagagctgagaagccagaagttcgag

SEQ ID NO: 237045 - DNA, 383 bp, Glycine max
ggcacaagtgagtttgttgatcgagatcactacaaacagtgtgatgaaaatgaacgtccttgttttcatcgttgctacaattttggtacgcatggcaatgccatgcgtacgatatgttctctctccgaatgaacagagggtacggtgcacgtacatccagacgtgaaatgcgcacattataggcttgctgtggaagcacacaagatctttggctttgataccattcctgaagagtgcgttgatcgcaacaagagaatacatccatggcgaacaatacatatcagactccagcacagttaaccaacacacatacttatatgccagatacctcgatgtatatcccaacgacacatgtgtgttcagtagatatggcaccgtactct

SEQ ID NO: 237046 - DNA, 381 bp, Glycine max
gacaagtgagtttgttgatcgagataactagaaacagtgtgatgaaaatgaaggtccttgttttcttcgttgctacaattttggtagcatggcaatgccatgcgtacgatatgttccctctccgaatgaacactggctatggtgcccgtactccggaggtgaaatgcgcaagttggaggcttgctgtggaagcacacaacatctttggctttgagaccattcctgaagagtgcgttgaagcaacaaaggaatacatccatggcgaacaatatagatcagactccaaaacagttaaccaacaagcttacttttatgccagagacctcgaagtccatcccaaggacacatttgtgttcagtatagatggcaccgtactctcta

SEQ ID NO: 237047 - DNA, 369 bp, Glycine max
ggcacaagtgagtttgttgatcgagataactagaaacagtgtgatgaaaatgaaggtccttgttttcttcgttgctacaattttggtagcatggcaatgccatgcgtacgatatgttccctctccgaatgaacactggctatggtgcccgtactccggaggtgaaatgcgcaagttggaggcttgctgtggaagcacacaacatctttggctttgagaccattcctgaagagtgcgttgaagcaacaaaggaatacatccatggcgaacaatatagatcagactccaaaacagttaaccaacaagcttacttttatgccagagacctcgaagtccatcccaaggacacatttgtgttcagtatagatgg

SEQ ID NO: 237048 - DNA, 371 bp, Glycine max
attgttaaggaggtctcttcctacttgaagaaagtatgatatacccctgacaagattccttttgttcctatctctggctttgagggagacaacatgattgacaggtccagaaaccttgactggtacaacggtccaactctgcttgatgcacttgaccagattattgagcccaagaagccctctgacaagcccctcaggcttccccttcaggatgtgtacaacattggacgtattggaactgtgccagtgggacgtgttgagaccggtgtcttgaagcctggaatggtggagacttttgcaccaactggactgacaactgaagtcaaatctgtggaaatgcaccattgatcacttacatacgcacatccagg

SEQ ID NO: 237049 - DNA, 375 bp, Glycine max
gattctataatcaatcaatggcaatggcttcttcaatccctaatgcgccttctgcgttcaattctcagagctacgttggtctcagagcgccactgaggaccttcaacttttcttctcctcaagctgccaaaattcctcgctcccaacgccttttcgtcgtcagagcctccgattcggagttcgaagccgccgttgtcgccggtaaggttccgccggcgcctcccgtgccgcccagaccggcggctccggttggaacaccggtggttccttcacttccacttcaccggcgtcctcgtcggaaccggaagtcgccggcgcttcggtcggcttttcaggaaacgagcatttcgccggcgaatttcgtgtatccgcttt

SEQ ID NO: 237050 - DNA, 372 bp, Glycine max
gcaaaagagaaagaagcgcttatcgaactcggacggaagcactgagttgactcggagggagtggaaagtgttgttgcgtaatgtctggtggtatcgctcgtggacgcctcaccgaggagcgcaagtcgtggcagaagaaccatccccatggttttgttgcgaagccggagacgctgcccgatggaaccgtgaatttgatggtgtggcattgcactattcccgggaagactgggactgattgggagggtggctacttcccacttacgctgcactttagtgaagactaccctagcaagcctccaaagtgtaaattcccacaaggtttcttccaccctaatgtttatccttctgggactgtttgcttgtctatac

SEQ ID NO: 237051 - DNA, 386 bp, Glycine max
ggcacaagtgagtttgttgatcgagataactagaaacagtgtgatgaaaatgaaggtccttgttttcttcgttgctacaattttggtagcatggcaatgccatgcgtacgatatgttccctctccgaatgaacactggctatggtgcccgtactccggaggtgaaatgcgcaagttggaggcttgctgtggaagcacacaacatctttggctttgagaccattcctgaagagtgcgttgaagcaacaaaggaatacatccatggcgaacaatatagatcagactccaaaacagttaaccaacaagcttacttttatgccagagacctcgaagtccatcccaaggacacatttgtgttcagtatagatggcaccgtactctcaaata

SEQ ID NO: 237052 - DNA, 385 bp, Glycine max
ggagtgtgagagaaaccagtgactgacttttcgagaaagaaaaacaaaaatgagtttccgtcattccatcatgaacgctcttcccattctcctcttcttcctcttcgtttctgcattagtttctgcgaagaaaactggtgatgtgacggagctgcaaattggcgtgaagcataaaccagtatcatgtgaagttcaggcacacaaaggtgacagagtcaaagtacactataggggaaaactcactgatggaactgttttcgattctagctttgaaagaaataatccaattgaatttgagcttggtactggtcaagtgatcaaaggttgggaccagggattattgggaatgtgtcttggtgagaagcgtaagctgaaaataccatca

SEQ ID NO: 237053 - DNA, 375 bp, Glycine max
ggcacaagtgagtttgttgatcgagataactagaaacagtgtgatgaaaatgaaggtccttgttttcttcgttgctacaattttggtagcatggcaatgccatgcgtacgatatgttccctctccgaatgaacactggctatggtgcccgtactccggaggtgaaatgcgcaagttggaggcttgctgtggaagcacacaacatctttggctttgagaccattcctgaagagtgcgttgaagcaacaaaggaatacatccatggcgaacaatatagatcagactccaaaacagttaaccaacaagcttacttttatgccagagacctcgaagtccatcccaaggacacatttgtgttcagtataaatggcaccgg

SEQ ID NO: 237054 - DNA, 350 bp, Glycine max
gatatctctctctcacacacacagtctcttcttcttgcaattccttcctcgttatggagtcgcgagtgctgtcacgcgccggaaccttgtcctccctccctcacctccgcaagccgccgcgggaggccgtctccagcgcctccctcgtcgccgtgaaggccgtgggctccgtcgcggacggcggaaacctgatttgggggaggcagctgcgcccggagctctgctcgccggtgctgaagaaggaggctgtcctcctccggccatgcctcgccgccgcctcctcgccggccgagggtagtgattccgccggagaagcaaaggttgctccggcggggttcttcgacaagtac

SEQ ID NO: 237055 - DNA, 382 bp, Glycine max; identical to SEQ ID NO: 235220

SEQ ID NO: 237056 - DNA, 379 bp, Glycine max
gacaccgttccatttctcaacaacttctgctacttcctactccaaccgcacttctgctccgcaattatcatgggcaaggtcaagatcggaatcaacggatttggaagaattggccgtttggtagccagagtggctctgcagagagacgatgttgaactcgttgccgttaacgaccctttcatcaccaccgattacatgacatacatgtttaaatacgacagtgttcatggacactggaagcatcacgatgtcaccgttaaggacgagaagacccttctcttcggtgacaagccagtcactatttttggacacagaaaccctgaagagatcccatgggggtcaactggagctgacatcattgttgagtccaccggagttt

SEQ ID NO: 237057 - DNA, 377 bp, Glycine max
gaccacattccaaaacacaaacacatacattgtagtatcacttttgtctcggaatttgttcttttgagttatggcaagcttaaaggttgcatgtgtggttttgatgtgcatggctgtgatgagtgcaccaatgatggtgcaagccgtgtcatgcaatgatgtttctgtgaacctagcaccgtgcctatcttacctgatgcagggtggagatgttccagaatcgtgctgtagcggagtgaggaacattctgggttctgccagcaccacctttgacaaacaaaccgtgtgcaaatgtcttcagcaagctgctaataactatggcatcaacgacgaatacgctcaggcactccccgcccgctgcaatgtcagcgtctctt

SEQ ID NO: 237058 - DNA, 391 bp, Glycine max
ggcacaagtgagtttgttgatcgagataactagaaacagtgtgatgaaaatgaaggtccttgttttcttcgttgctacaattttggtagcatggcaatgccatgcgtacgatatgttccctctccgaatgaacactggctatggtgcccgtactccggaggtgaaatgcgcaagttggaggcttgctgtggaagcacacaacatctttggctttgagaccattcctgaagagtgcgttgaagcaacaaaggaatacatccatggcgaacaatatagatcagactccaaaacagttaaccaacaagcttacttttatgccagagacctcgaagtccatcccaaggacacatttgtgttcagtatagatggcaccgtactctctaatattcca

SEQ ID NO: 237059 - DNA, 385 bp, Glycine max
ggttgtgcgtcggagctgtctgtgcaaatttgcgttgttcttcgcggcacacctcactcactgaacggtaagtatggcggacaaggctgttacaatccgaacccgaaagttcatgaccaacaggcttctttccaggaagcagtttgtcgttgatgtccttcatccagggagggcaaatgtttccaacgctgaacttaaggagaagctggctaggatgtatgaagtgaaagaccctaatactgtatttgtcttcaaattccgaacacattttggaggtggcaaatccactggatttggtttgatttatgatacagtggagaatgccaagaagtatgagcccaaatacaggcttatcaagaacggccttgacaccaaggtagaaaag

SEQ ID NO: 237060 - DNA, 385 bp, Glycine max
gcacaagtgagtttgttgatcgagataactagaaacagtgtgatgaaaatgaaggtccttgttttcttcgttgctacaattttggtagcatggcaatgccatgcgtacgatatgttccctctccgaatgaacactggctatggtgcccgtactccggaggtgaaatgcgcaagttggaggcttgctgtggaagcacacaacatctttggctttgagaccattcctgaagagtgcgttgaagcaacaaaggaatacatccatggtgaacaatatagatcagactccaaaacagttaaccaacaagcttacttttatgccagagacctcgaagtccatcccaaggacacatttgtgttcagtatagatggcaccgtactctctaata

SEQ ID NO: 237061 - DNA, 383 bp, Glycine max
tggtagtgagattcgcagtgttgttctggctgggcgtcgcttttatgagaaagagggtctacctgcttttcccatgggtaacattgatcaaacccgcatgtggaaggttggtgagcgtgtccgatctacaagagcagccggtgatcaaggcccattatatcctttcactgctggtgtctttgtggcattgatgatggcccagattgagatcctgaggaagaaagggcattcctactcggaaatcattaatgagagtgtcatcgaggcagttgactctttgaatcctttcatgcatgctcgtggtgtttctttcatggttgataactgttcaaccacagctaggttgggttcgaggaaatgggctccacgatttgactacatcc

SEQ ID NO: 237062 - DNA, 384 bp, Glycine max
gaaacaaaaaccatcagcaacataaaaaaaaaaaaatatagaaagaaaaatgatgctcggagaacaccatcgcgggaatccgacggtcctcgtgccaccgtggccagcccacgacgatccgacggctgagatgtactccgcgttcttaacaaacgacgtcaatgctggtgagtactctccgtaccatcttcaagaagcactaacggcgctgcagcgttttctgccgtcaaacgaaacggacgcagactcggactcctcggaggcggctcagcccgacgcggcggtggacgcgtacacgtgcgaccatttccgcatgtacgagttcaaggtccgtcgatgcgcacgtggcaggtcacacgactggacggagtgtccgtacgcgca

SEQ ID NO: 237063 - DNA, 369 bp, Glycine max
gattctgaatcagaagaagcgagcgaagatgtcgggtcgtggaaagggaggcaagggtttgggaaagggaggagccaagaggcacaggaaggtgcttcgtgacaacatccagggtatcaccaaacccgcaattcggcgtttggctcgcagaggtggtgttaagagaatcagtggtctcatctacgaggagacacgtggcgtcctcaagatcttcctcgagaacgttattcgcgacgctgttacctacaccgagcacgctagaagaaagaccgttaccgctatggatgttgtttatgctctcaagaggcagggcaggactctctacggtttcggtggttaatttctaaggtttccatcggcgtagcagct

SEQ ID NO: 237064 - DNA, 386 bp, Glycine max
ggtcaagcctgccgagaaaaccctagttcgcttgcagtcacacaagaggccaatcctattcatagctcgagatgggtgaagaagtgaaggtagttgttccagaatcagtgttgaagaagcgcaagagggaggaggaatgggcgttggccaagaagcaagaactcgatgctgccaagaagaagagagccgagagccgcaaactcatctacaacagagctaagcagtacgctaaggagtacgatcaccaggagaaggaattgattcggttgaaacgcgaggccaagctgaaaggtggtttctatgtggatccagaggctaagctgttgtttattattcgcattcgtggtattaatgccatggaccccaaatcaaggaagatcctgcag

SEQ ID NO: 237065 - DNA, 371 bp, Glycine max
ggcacttcaattgcaatcaaattagttcattctctttgcgcagttccctacctctcctttcaagatgcagatcttcgtcaagaccctcaccggaaagaccatcacccttgaggtggaaagctctgacaccatcgacaacgtcaaggccaagatccaggacaaggaaggaattcccccggatcagcaacgtctcatcttcgccggaaagcagctcgaggacggacgtaccctcgccgactacaacatccagaaggagtcaacccttcaccttgtccttcgtctccgtggtggcatgcagatcttcgtcaagactctcactggcaaaaccataaccctagaggtcgaaagctctgacaccattgacaacgtca

SEQ ID NO: 237066 - DNA, 385 bp, Glycine max; identical to SEQ ID NO: 235632

SEQ ID NO: 237067 - DNA, 389 bp, Glycine max
ggcagttcaattccaatatattccattctctctgtgtacttccctacctctcccttcaagatgcagatcttcgtcaagaccctcaccggcatgaccatcacccttgaggtggaaagctctgacaccatcgacaacgtcaaggccaagatccaggacaaggaaggaatccccccggaccagcaacgtctcattttcgccggaaagcaacttgaggacggccgtacccttgctgactacaacattcagaaggagagtactcttcacctcgtcctccgtctccgtggtggcatgcagatcttcgttaagacactcaccggcaagaccataaccctagaggttgaaagctccgacaccatcgataacgtcaaggccaagatccaggacaagga

SEQ ID NO: 237068 - DNA, 413 bp, Glycine max
  unsure (1)..(413): unsure at all n locations
agaacaacaagaaagggggaaacctttgtgcaattccaatccaatccaggattccagcaagttgcgttttgggaagcaagaaaaccgaaaatactttcgagaagggcccgtacanagcaaactgctcgtaagtcaactggaggaaaagctcccaggaagcagcttgcaaccaaggctgcacgtaagtctgcaccaacaactggtggtgtgaagaagcctcatcgttatcgccctggaactgttgctcttcgtgagattaggaaataccagaagagcactgagctcctaatcaggaagcttcctttccagaggttggttcgtgaaattgcccaggatttcaagactgatctgcgtttccagagccatgctgtgcttgcattgcaagaggctgctgaggcataccttgttgggct

SEQ ID NO: 237069 - DNA, 385 bp, Glycine max; identical to SEQ ID NO: 235632

SEQ ID NO: 237070 - DNA, 369 bp, Glycine max
ggcagccaagaaaagaaaatcctcacccattttcttcgtagccaaacactctgaaattctcagttatgtcgtggcaagcgtatgtggatgatcacctactgtgtgaaatcgaaggtaaccacctcactcacgccgctatcatcggccaagacggaagcgtttgggctcagagcaccaacttccctcagttcaaacctgaggaaataactgccatcaataatgactttaatgagcctggatcacttgctccaactggattgtatatcggtggcaccaaatacatggtcatccagggtgagcctggtgctgtcattcgagggaagaagggtcctggtggtgttactgtgaagaagaccggtgcggccttga

SEQ ID NO: 237071 - DNA, 380 bp, Glycine max
gacactaaacaagttaaaagaagagcatcactgaactaacaaagcaaccctatgtcgaaggtggtttgtgtcaccggagccagcggcgccatcggatcatgggtggtcctactcctcctccagcgtggttacaccgtccatgccaccgtccaagatatcaaggatgaaaatgagacgaaacatttggaggaaatggaaggagcaaagagtcatctccatttttttgaaatggatcttcttgacatcgactccattgccgctgccataaagggttgttccggcgtaatccaccttgcatgtcctaacatcattggtcaagtcgaagatcccgagaaacagatattggaaccggcgataaaaggaacggttaatgtgttgaa

SEQ ID NO: 237072 - DNA, 379 bp, Glycine max
gcacaagtgagtttgttgatcgagataactagaaacagtgtgatgaaaatgaaggtccttgttttcttcgttgctacaattttggtagcatggcaatgccatgcgtacgatatgttccctctccgaatgaacactggctatggtgcccgtactccggaggtgaaatgcgcaagttggaggcttgctgtggaagcacacaacatctttggctttgagaccattcctgaagagtgcgttgaagcaacaaaggaatacatccatggcgaacaatatagatcagactccaaaacagttaaccaacaagcttacttttatgccagagacctcgaagtccatcccaaggacacatttgtgttcagtatagatggcaccgtactct

SEQ ID NO: 237073 - DNA, 383 bp, Glycine max
gattgacttaatagagaaacagagaaaagtaaggtgcgaaaagagtgaggcggagaaaaatgaagtgcccgtattgttcggcggcgcaggggcgttgcgccaccacgagcggcgggcgttcgatcacggaatgcacgtcttgcgggcgcgtggtggaagagcgacagtcgcatccccaccacgtgttccacgtgcgcgcccaggacaaccctctgtgtctcgtcacatcggatctcgctctccccgcgctcaatcaaaacaacgacgaggaggaccctttcgagcccacgggcttcatcaccgccttctccacctgggccctcgagcccaacccactttacctccagtcctccctctccttctccggctacctcgccgagctc

SEQ ID NO: 237074 - DNA, 375 bp, Glycine max
gaaggtgcaagagtttgttgtgagctataagctagtttatcgtgaggagaatatgaagttgtttgctttctttgttgctgcagtagttttggtagcatggccatgccatggcgcaggctaccaaaggttccctctccgaatgaaaactggctatggtgagcgttcttcggaggtaaaatgcgcaagttttaggcttgctgtggaagcacacaacatccgagcctttaaaaccattcctgaagagtgcgttgaaccaacaaaggactacattaatggcgaacaatttagatcagactctaaaacagttaaccaacaagctttcttttatgctagtgaacgcgaagtccatcacaacgacatatttatattcggcat

SEQ ID NO: 237075 - DNA, 379 bp, Glycine max; identical to SEQ ID NO: 235217

SEQ ID NO: 237076 - DNA, 387 bp, Glycine max
ggcacaagtttgttgagatagctagaagcaataagatgaaaatgaaagtgcttgttttgtttgttgctacagttttggtagcatatgaatgccatggctcagactaccagaagttccctctccaaatgaaaactgggtttggtgggcaatacagcaatgaggtggcatgtgccagttggaggcttggcgtggaagcaaacaacgtagtcaagtggcaaactgttcctgcagcttgcggagagtacatagctgactacgttctaggagaccaatatagatcagattccaaaacagttaaccaacaagcttatttctatgctaaatccctcaaactcaccaacaaagatgtctttgtcttggacgttgacgacactactctctctaatc

SEQ ID NO: 237077 - DNA, 385 bp, Glycine max
ggttctagtgtgtgattgtttgttgttgtaactcgttcttcttcttttgttgttctgtgtttgtgtttgttttttctctcacctgaaaatgtcttgctgcggtggtaactgtggttgcagaagctcctgcaagtgctgcaacagctgcagaggctgcaatatgtacccacacttgagctacactgattcaaacaccaccgagaccttggtcatgggagtggcacctgttaaggctcaatttgacggtgctgaaatgggtgtgcccgctgagaacgatggctgcaaatgtggaccaaactgctcctgcaacacctgcacttgcaagtgagatgttgggagagcaagcttcatgcagagatagcccttaattatgaataatgataaa

SEQ ID NO: 237078 - DNA, 379 bp, Glycine max
gacacacacacacactctctttccatgggtccgtttcgtaaacccttccttgcatttctctcggttgttctatttctgggtctctatgaggcagcagcagaacagactcagactcacaagagtacttacattgtacacgtggcgaaatcggagatgcccgagagcttcgagcaccacgctgtgtggtatgagtcgtcactgaagaccgtgtctgactcggcggagatgatttacacctacgacaacgccatccacggctacgcgacgagattaaccgctgaggaagcgcgtttgctccagcgccaaacggggattctggctgttttgccggagacgaggtacgagcttttcacgacgcgaacgcctttgtttctcggac

SEQ ID NO: 237079 - DNA, 377 bp, Glycine max
gagaaaagaaaaaggaaaccctagctggataggtcaaacatcatcatgtcggacgaagagcaccatttcgagtccaaggcagacgccggtgcctccaaaacctaccctcagcaagccggtaccattcgcaagaacggctacatcgtcatcaaaggacgcccctgcaaggttgtggaagtttcgacttccaaaactggaaagcacggtcacgccaagtgccactttgttggaattgatattttcactgccaagaaacttgaggatattgtgccctcttctcacaactgtgatgttcctcatgtgaatcgtactgattaccagctcattgatattgctgaggatggatttttgagtctgcttactgaaaatgggaacac

SEQ ID NO: 237080 - DNA, 373 bp, Glycine max
gagattcagatccactgcactgcactcgtccaatttcactcactctcacattcccaatttctccatgaaaccctaatttcagccatggttgttacatccaaaccttctccaatggcgctagatctcaaaacctccttcactctccccaaaaccctaaagctcaagacgaagcagcaagagcttctgatccgcgtcgccacgctctccctcatctacgtcctcgccttcatcacgcgcctcttcagcgtgctccgctacgagtccatgatccacgagttcgacccctacttcaactaccgcaccacgctcttcctcactcgcaacggcttcgccgagttctggaactggttcgactcggaatcatggtacccgc

SEQ ID NO: 237081 - DNA, 368 bp, Glycine max; identical to SEQ ID NO: 235349

SEQ ID NO: 237082 - DNA, 378 bp, Glycine max
  unsure (1)..(378): unsure at all n locations
ggatttcatttcgtttgcaattgaatttcaatttccctaggggcttaatatctcccctcacttgtgcctagccttatgtcatagtattatcattcattctcatctttctctcttctctctccacccaaaccctaactcccgaccctgttcccctctcgtatccgtcatgaaaggaggaaagtccaagaccgaatctaagagagccgatcccaaacttgctgtgaataagaagggagccgccaccaaggctaggaaacccgccggcaaggggaaggcagcgaaagaccctaacaagccaaagaggcctccaagtgctttcttcgttttcatggaggagttcaggaaggtattcaacanagaacatcctgaaaacaaagc

SEQ ID NO: 237083 - DNA, 378 bp, Glycine max; identical to SEQ ID NO: 235798

SEQ ID NO: 237084 - DNA, 379 bp, Glycine max; identical to SEQ ID NO: 235217

SEQ ID NO: 237085 - DNA, 382 bp, Glycine max
gacagcagagcaaaagaaagaaagaaactgcaacttcctctgttttgctcccctgtttaggccttttcataagcttagaatgacacacaaggaattttccattgctctagtgactctcattgctgttctctttgtcaacatgaacatccaaggtgccactgctgactatggtagttggcagagtgctcatgccactttttatggcgggggtgatgcttctggcacaatgggtggagcatgtgggtatggaaatttgtatagccagggctatggaactgacactgtggctctaagcactgctttgttcaacaatggcttaagctgtggatcttgctatgaaatgagatgtgatgatgacccaagatggtgcaaacctggctcc

SEQ ID NO: 237086 - DNA, 391 bp, Glycine max
gacagagaagggtttcgtcgggggtcacgtttcacaatcacgttttgcgcatctctcactcactgactcctctgctgccgcatcatgtggggttccatcgcgaagtcaagggacaaggcatgagatgcttcatatccagggagggcaatgcgggaaccagatttgatccaaggtctgggacgtagtgtgtacggatgacgggatcgaatcaacggggaggtaccatagggacaatcaggtgcaacgcgatcgagtcaaagtcgactacaatgatgcgaattgcggtaggttcgtgcctaaggcagtgctcaaggattcggacccatagaccatggacagcgtcatctatggtcactacagtcatatattccggacagataacatcgtcctc

SEQ ID NO: 237087 - DNA, 387 bp, Glycine max
gagagaaagagagagaaagatgtcgaagcgtggtcgtggtggttcggcggggaacaagttccgcatgtcgctgggtcttccagtggcggcgacggtgagctgcgccgacaacacgggggcgaagaacctctacatcatttcggtgaaagggatcaaaggccgtttgaaccgtcttccctcggcctgcgttggcgacatggtgatggccaccgtgaagaagggaaaacccgatctgaggaagaaggtcttgccagctgtcatcgttcgccagcgcaagccatggcgccgaaaggacggcgtctacatgtacttcgaagataatgctggtgttattgtcaatcccaagggagaaatgaaaggttctgctatcactggtcccattgggaa

SEQ ID NO: 237088 - DNA, 392 bp, Glycine max
gagcgaaacagagagtgatttcagtgagtgatcggtgttcacttgatctcatcataatcgtcagcgtcaattgaagaagatgccgatcagaaacatcgccgtcggaaggcctgaagaggcgacccaccccgacacgttgaaggcggctttggctgagttcatctcaaccttcatcttcgtgttcgccggctcaggctccggcatcgcctacaacaagctcaccgacaacggcgctgccacccctgccggcctcatctccgcctccatcgcccatgcattcgccctcttcgtcgccgtctccgtcggcgccaacatctccggcggccacgtcaaccccgccgtcaccttcggcgccttcgtcgggggcaacatcaccttcctccgcgggaacg

SEQ ID NO: 237089 - DNA, 387 bp, Glycine max; identical to SEQ ID NO: 237076

SEQ ID NO: 237090 - DNA, 423 bp, Glycine max
gacccacgcgtcaggacagaaggggacaggcaaaaaccctagccttcgaaaaccctaatcctgaggcactgtgatatggcaagagccgtttcctcttcctgcgcgcgcctcacaatgcgcctcttctccaccaccaccaccaccaccaccaccaccgctgcgttcgccgttacattacccaaaccctcgtcactctcagtctcaacgcgtcgattcctcttccctctctcccatgccatcgtccctccctccacccgcgtcgccggaatccggtgccgtgtcaaccgcgccggcgactcatcgtactcgccgctgaactcagcttcgtcatcgtcgtcgtcgttcagcgaccggcctcccacggagatggcgccgctctttcacggctgcgactacaaccactggctcatcgtcatggaccat

SEQ ID NO: 237091 - DNA, 388 bp, Glycine max
gaaggtgcaagagtttgttgtgagctataagctagtttatcgtgaggagaatatgaagttgtttgttttctttgttgctgcagtagttttggtagcatggccatgccatggcgcaggctaccaaaggttccctctccgaatgaaaactggctatggtgagcgttcttcggaggtaaaatgcgcaagttttaggcttgctgtggaagcacacaacatccgagcctttaaaaccattcctgaagagtgcgttgaaccaacaaaggactacattaatggcgaacaatttagatcagactctaaaacagttaaccaacaagctttcttttatgctagtgaacgcgaagtccatcacaacgacatatttatattcggcatagataacaccgtt

SEQ ID NO: 237092 - DNA, 314 bp, Glycine max
ggcagttcaaagcgaagaaagattcgaaacgaagaaagaaagcgttgtgaagaatggcggaagagggacaagtgatcggtgtccacagcgtagaggagtggaaggaacatctcaagaagggagaagagtccaagaaattgattgtggtggattttactgcttcttggtgcggtccatgccgtttcattgccccaattcttgcagagtttgctaaaaagttgccgaatgtcaccttcctcaaggtggatgtggatgaattggagactgtttccaaggagtggggaattgaggctatgccaaccttcctgttcttg

SEQ ID NO: 237093 - DNA, 381 bp, Glycine max
ggagcaagagtgaagagcgaagagaatggctcccaagggtttaatctttttggctgtgttatgcttctcagcactgtcactgagtcgttgtcttgcggaggataatggacttgttatgaacttctacaaggaatcatgccctcaggctgaagacatcatcaaagaacaagtcaagcttctctacaagcgccacaagaacactgctttctcctggctcagaaacatcttccatgactgtgctgttcagagttgtgatgcttcactgttgctggactccacaagaaggagcttgtctgagaaggaaacagatagaagctttgggttgagaaatttcaggtacattgagaccatcaaagaagctttggaaagggaatgcccagg

SEQ ID NO: 237094 - DNA, 380 bp, Glycine max
ggttgaatgtataacgctgctgccgaaacccttcccaatccctaaagtaagtgagtcctcggtggctgcgaatcgtggagaatgctaacggtacgaaggaagacgtggttaccatacagtccaccattaacctccacaaacgcctccactggctgcacatttaagaatacagctcctaaagctatgcaggagatacagaaatttgcccataacgccatggggaccaatgatgttacggtggatgtgaagttgaacacatttgtctggagccatagaatcaagactcttccacagatgattaaggtactaactgctcgcccgaggaatgacaattacaatgccaaggaagatctatactcacttgtcaccgttgttgagac

SEQ ID NO: 237095 - DNA, 381 bp, Glycine max
gagggcgaggaagccacatagagacacaatacagagtgagttgttgctccttcgccacaactctctgccaacatgggtatctccagagattctatgcacaagaggcgtgccactggtggcaagaagaaggcctggaggaaaaagagaaagtatgagcttggtcgcgaacctgctaacactaagctgtcaagcaacaagacagtcaggaggatccgtgttagaggtggaaatgtgaaatggagggcattgagattggatactggaaattactcctggggaagtgaagctgtaactcgcaatactcatgtactagatgtggtttacaatgcctcaaacaatgagcttgtgcgtactcagactcttgtcaaaagtgctatcgtt

SEQ ID NO: 237096 - DNA, 363 bp, Glycine max
acgacagaaaggggcacaagtgaatatgttgatctagataactagaaacagtgtgatgaaaatgaaagtccttgttttcatcgttgctacaattttggtagcatggcaatgccatgcgtaagatatgttccctctccgaacgaacactggctatggtgcccgtactccggatgtgaaatgtgcaagttggaggcttgctgttgaagcacacaacatctttggctttgagaccattcatgaacagtgcgttgaagcatcaacggaatacatccatggcgaacaatatagatcagactccaaaacagttaaacttcaagcttacttttatgccagagacctcgacctccatctcaatgacacagt

SEQ ID NO: 237097 - DNA, 294 bp, Glycine max
  unsure (1)..(294): unsure at all n locations
ggcacaagtttgttgagatagctagaagcaataagatgaaaatgaaagtgcttgttttgtttgttgctacagttttggtagcatatgaatgccatggctcagactaccagaagttccctctccaaatgaaaactgggtttggtgggcaatacagcaatgaggtggcatgtgccagttggaggcttggcgtggaagcaaacaacgtagtcaagtggcaaactgttcctgcagcttgcggagagtacatagctgactacgttctangagaacaatatagatcagattccaaaacag

SEQ ID NO: 237098 - DNA, 358 bp, Glycine max
tgtgatggtaatgaaggtccttgatttcttcgatgctacaattttggtagcatggcaatgccatgcgtacgcattgttcccactccgaatgaacactggctatggtgcccgtactccggatgtgaaatgcgcaagttggaagcttgctgtggaatcacacaacatctttggctttgagaccattcctgaagagtgcgttgaagcaacaaacgaatacatccatggcgaacaatatagatcagactccaaaacagttaaccaacaagcttacttttatgccagatacctcgaggtccatcccaacgacacatttgtgttcagtatagatggcaccgtactctctaatattccatactac

SEQ ID NO: 237099 - DNA, 389 bp, Glycine max
ggtgccctgctcgtgcctctagggttatcatttctccatttccattttctctctcacttttcaagaatcgtaagctatgggaaagtcttacccagctgtgagtgctgattaccagaaggccgttgagaaggcgaagaagaagctcagaggcttcatcgctgagaagagatgcgctcctctaatgctccgtttggcatggcactctgctggaacctttgacaagggcacgaagaccggtggacccttcggaaccatcaagcaccctgccgaactggctcacagcgctaacaacggtcctgacatcgctgttaggcttttggagccactcaaggcggagttccctattttgagctacgccgattttctacagttggctggcgttgttgccg

SEQ ID NO: 237100 - DNA, 159 bp, Glycine max
ggagcataaccctaatccctacttttcttcctcactactgtcatttacgcttctcttctctgcagcaactattcctaaccctaaggtcttccttgacatgactatcggcggtcaatctgctggccgcatcgtgatggacctctacgctcacatgtctcc

SEQ ID NO: 237101 - DNA, 343 bp, Glycine max
gcatcactctcttcatcttcgatttccattgcgacgcgtgactttttcatcttctttctcgtcattttcttcgctcttcgatcttcgtcaggggactgctccgactaccagcagtaccactcactggtggccacgatcggacgcttacacgattcccaaagctctcacaacagcgtctaaactgacaccctcgctcgattcgccgtagtcgatcacttcagatggcataattcgcttctggagtttgctacggtggttatggcacaggaacaggttgttgctggaaccctgcatcatcttaaccttgaggctatttacgctggtcacaacaagctctatgaag

SEQ ID NO: 237102 - DNA, 397 bp, Glycine max
gactcaccacttcaaaacactcataacacaaagcacaaagcaaagctcatccttgagttaaaaaatggcagcagcttcttccatggctctctcatccccatccttggctggcaaggccgtgaagctgggcccatcagccccagaagtgggaagggtgagcatgaggaagaccgtcaccaagcaggtctcctcaggaagcccatggtacggcccagaccgagtcaagtacttgggcccattctctggcgagcccccgtcctacctaaccggtgagttcccaggcgactacggctgggacactgctgggctttccgcagacccagaaaccttcgccaagaaccgtgaactcgaagtgattcactccaggtgggccatgctcggagccttgggctgcgtc

SEQ ID NO: 237103 - DNA, 410 bp, Glycine max
  unsure (1)..(410): unsure at all n locations
gaaggatcagcagggagaattaggtttttagggtttacaccgagcagccacacctcccgcagcagccatggttctcaaaactgaactatgccgattcagtggtgccaagatctacccaggaaagggcatcagatttgttcgtggtgattctcaggttttcctgtttgcaaactcaaaatgtaagaggtatttccacaatcgcctgaagccttcaaagctcacctggactgcaatgtacagaaagcaacacaaaaaggacattgctcaagaagctgtgaggaagaggagacgtgctgccaaaaagccttactctaggtccattgttggtgcgaccttggaagtaatccagaanaagagagctgagaagccagaagttcgagatgcagctagggaagctgctcttcgtgaaa

SEQ ID NO: 237104 - DNA, 193 bp, Glycine max
acccacacgtccaccggctgctacatgcggctgcaaggtgactacagaagggtatcggtcttttgataagccctctgataagaataatgggtacttgcttcccatgcccaagatggttaactcggatcttgccaggattagtaagtctgacgaggttcagtctgttgtgaggcccattaagaaggatgtgaag

SEQ ID NO: 237105 - DNA, 255 bp, Glycine max
acgacgcgtccgatacagcagtcagaacacgcactcaaaggggcacaagtgagtgtgttgatggagagagttatggcacattgttaatgaatttgaaagtccgtctggttctcatgactacggatgagagtatgcgcttaatatcctcagatctgttactcctccgtggggaaatcgtgcctgctgtccgtctacgcgcggtaagatttcaacatgcaatccatggccaccatatgcgtcaagttccaggctcag

SEQ ID NO: 237106 - DNA, 372 bp, Glycine max
ggcctcagccctaaaacccaaggctgctgagtgttgcagaggcatgtctgagtcggacacgaagaagaagaagcagcagcagcgcagcggcggaaagcatgaaggagaagaagggttgatgatcaagccccagagcttcactccccccatcgacacctcccaatggcccattctcctcaaaaactacgagcgcctcaacgtccgcaccggccactacacccccattccctccggctactcccccctgaagcgccccctctccgagtacctcaaatacggcgtcctcaacctcgacaagcccgccaacccttcctcccacgaggtcgtggcctggatcaagcgcctcctccgcgtcgaaaaaaccggccactc

SEQ ID NO: 237107 - DNA, 379 bp, Glycine max
gatccaaattcaagttcgcaccaaattttcctcccaaaatgtcaggccgtggaaaaggtgggaagggtttgggaaagggaggagctaagaggcacagaaaggttcttcgtgacaacattcaaggaatcacgaaacctgcgattcgtaggttagcgagaagaggtggcgtgaagaggatcagtggtttgatttacgaggaaaccagaggagttctgaagatattcttggagaacgtgattcgcgatgctgtaacctacactgagcacgctaggaggaaaactgttactgctatggatgtcgtttatgctctcaagagacagggaaggaccctctatggctttggaggctaaagaatagaatctttaagtttaatgactgt

SEQ ID NO: 237108 - DNA, 216 bp, Glycine max
atgtgttctttctttttttttttctgtttttttttctttttattttttttcttttttctttcctttttttttttgtcttctttttttttttcttttttgtctttttactattctttgtttttcttcttgtttttttttttcctattttttgtttttttttttttttgtttttctttctctttctttcctctttcttttttttttcgcttttttttt

SEQ ID NO: 237109 - DNA, 391 bp, Glycine max
gacaacacaacgcaacacaacgcgcactctctcttttctctcttaacacaaaaaccctatcgttcttcgcggtttcgccgattctcgccatgccgaaagccaaatccgacgccaaagccgccgatagccggttgaagcgcaagggcgctggtgctggaaggaagcaatcgaagaaagctgctaaggatcctaacaagccaaagagacctccaagcgctttcttcgttttcatgtccgagttcagagagcagtttaagaaggagcatcctaacaacaaatccgtcgctgttgtcggtaaagctggtggtgacaaatggaaatcgctgtctgatgctgaaaaggcccccttcgttgccacggccgaaaagaagaaacaagagtatgagaaaac

SEQ ID NO: 237110 - DNA, 364 bp, Glycine max
ggcacaagtgagtttgttgatcgagataactagaaacagtgtgatgaaaatgaacgtccatgttatcttcgttgctacaattttggtagcatggctatgccatgcgtacgatatgttccctctccgaatgaacactggctatggtgcccgtacgccggatgtgaaatgcgcaagttggacgcttgctgtggaagcacacagcatctttggctttgagaccattcctgaacagtgctttgaagcaacataggaatacatccatggggagcaatatacatcagactccataacagttaaccatcaagcttacatttatgccagatacctccaagtccatcccaaggacatatttgtgttcagtata

SEQ ID NO: 237111 - DNA, 266 bp, Glycine max
ggaagcgcttgagaccaagccccactcaaccaccacaccactctctctgctcttcttctacctttcaagtttttaaagtagtaagatggcagagacattcctatttacctcagagtcagtgaacgagggacaccctgacaagctctgcgaccacgatctccgatgccgtcctcgacgcttgccttgaacaggacgcagatcgcactgttgcctgcgaaagcatgcactaacaccaacttggtcatcgccttcggagagatcaccac

SEQ ID NO: 237112 - DNA, 398 bp, Glycine max
  unsure (1)..(398): unsure at all n locations
cgacgcgtccaaccggaagcaanaggacaacagaagggggcacaagtgagtttgttgatccagataactagaatcagtgtgatgaaaatgaaggtccttgttttcttcgctgctacaattttggtaacatggaaatgccatgcgtagcgatatgttcccgctccgaatgaagcactggctatggtgcccgtactccggacgtgagatgcacaaattggacgcctgctgtggaagcacacagcatctttggctttgacaccattcctgaatagtgcgttgaatcaacaaaggaatatatccatggcgaacaatatagatcagactccagaacagttaaccaacaagcttacttttatgccagagacctccaagtccatcccaaggacacatttgtgttc

SEQ ID NO: 237113 - DNA, 385 bp, Glycine max
gagcgaaacagagagtgatttcagtgagtgatcggtgttcacttgatctcatcataatcgtcagcgtcaattgaagaagatgccgatcagaaacatcgccgtcggaaggcctgaagaggcgactcaccccgacacgttgaaggcggctttggctgagttcatctcaaccttcatcttcgtgttcgccggctcaggctccggcatcgcctacaacaagctcaccgacaacggcgctgccacccctgccggcctcatctccgcctccatcgcccatgcattcgccctcttcgtcgccgtctccgtcggcgccaacatctccggcggccacgtcaaccccgccgtcaccttccgcgccttcgtcggcggcaacatcaccttcctccgc

SEQ ID NO: 237114 - DNA, 417 bp, Glycine max
attctagggccgacccacgcgtccagagagagagagagaaatggagaagacaggagtgttatcggcgaaggaggcattcgagaagcttgaaaaggtgggagaagggacatatgggaaggtgtacagagcaagagagaaggcaactgggaagatcgtggctctgaagaagactcgtctccacgaggacgaagaaggtgtccctcccaccactctccgtgaggtttccattctgcgaatgctctctcgcgatccccatgtcgttaggttaatggatgtcaaacaaggtcagaacaaggaagggaagacagtgctctacttggtatttgagtacatggacaccgatctcaagaaattcatacgctctttccgtcaatctggggaaaccattcctccccatatcatcaaaagcttgatgta

SEQ ID NO: 237115 - DNA, 205 bp, Glycine max
ggcacaagtgagtttgttgatcgagataaccataaacagtgtgatgatcatgaaggtccttgtcttcgtcgttgctaccattttggtagcatggcaatgccatgcgtactatatgttctctctcctattgaatcctggctatggtacccgtactctggacgtgaattgcgctggttggatgcctggtttgtagcctaacgagatc

SEQ ID NO: 237116 - DNA, 350 bp, Glycine max
ggaacaagtacatagaggaaccaaagcggcggttacaggagaccaagcagaggttgggtcgagtgagaccgaaaacggttcaaatgtcatctcggcaggtgataaagcctcaccagtcggtcatgaacctgcacttctagaccatgaagatgcttctggacgaagtggcgatacttccgtcggaaatgctaatgaacacgatcacgaggttctcgacgcacctgatgaagctcatcaagaacgggactgtgcgcagcaacaccgtcaatctccacgacgacgagctcaagctccacaaggacgtcctcgaccacctcatcgacatcatcaccgaccacatcgacgtcaac

SEQ ID NO: 237117 - DNA, 392 bp, Glycine max
  unsure (1)..(392): unsure at all n locations
ggaagcccaacatgtcaacttttggtgctgaccaattcgatgacttcagacccaaagaaaaagtgctaaaagtttcatacttcaactggtggtcgtttaacactgcatttggcactttagccgctacactgtttgttgtgtacattcaagagaggtttgggtggggattggggtatggaatatcagcgattggttttctagttgcctctgttaccttctttatgggtgttccaatatataggcataaatccagaaaggggaagagccatgcaaaggagtttttcagtgtccctgttgttgctttcagaaatangaagcttcaacttcctagtagcccttctgaactgcatgagtgtgagatgcaacattacattgatangggaagacgacaa

SEQ ID NO: 237118 - DNA, 397 bp, Glycine max
gtagcaacaatgtccaagcgaagtccccgaagatccgcgggaaacaagttccgcatgtccctgggtcctgccggtggcggcaaccgtgaactgcgccgacaacaccggcgcgaacaacctctacatcatatcagttaaagggattaagggtacgctgacacggttgccgtcagcttgcgtccgagacatggttatggccaccgtcaataacggaaagcccgatctccgtaagaaggtgctgctcgccgtcatcgtccgccagcgcaagccttggcgccgaaacgacggtgtttacatgtacttcgaagataatgctggtgttatcgtgaatcccaatggtgaaatgaaacgttctgctatcactggtccaattgggaaagactttgctgatctgtgg

SEQ ID NO: 237119 - DNA, 405 bp, Glycine max
gacagaacggggcacaagtgagtttgttgatcgagataactagaaacagtgtgatgaaaatgaaggtccttgttttcttcgttgctacaattttggtagcatggcaatgccatgcgtacgatatgttccctctccgaatgaacactggctatggtgcccgtactccggatgtgaaatgcgcaagttggaggcttgctgtggaagcacacaacatctttggctttgagaccattcctgaagagtgcgttgaagcaacaaaggaatacatccatggccaacaatatagatcagactccaaaacagttaaccaacaagcttacttttatgccagagacctcgaagtccatcccaatgacacatttgtgtttagtatagatgggcacgtactctctaatattccatact

SEQ ID NO: 237120 - DNA, 344 bp, Glycine max
ggaggtgcaagagtttgttgtgagctataagctagtttatcgtgaggagaatatgaagttgtttgttttctttgttgctgcagtagttttggtagcatggccatgccatggcgcaggctaccaaaggttccctctccgaatgaaaactggctatggtgagcgttcttcggaggtaaaatgcgcaagttttaggcttgctgtggaagcacacaacatccgagcctttaaaaccattcctgaagagtgcgttgaaccaacaaaggactacattaatggcgaacaatttagatcagactctaaaacagtttaacaacaagctttcgtttatgctagtgaacgcgaag

SEQ ID NO: 237121 - DNA, 351 bp, Glycine max; identical to SEQ ID NO: 236393

SEQ ID NO: 237122 - DNA, 260 bp, Glycine max
gacacattgtgagtatcaacaagaatactcataatataggtagcatatagagctatagttatattgatattgctatttgttaagctcttatttccgcggccatggctaataatgaacgtgatctcttctcggcggagattgtgaatcgtggaattgaaccgtcggggaccaacgctggctcgttgacattctctgtgacggtgaagaggcgctttacggattttctgcaatcggtgaaccttaagtacgttaaatttggt

SEQ ID NO: 237123 - DNA, 358 bp, Glycine max
ggcacaagtgagtttgttgatcgagataactagaaacagtgtgatgaaaatgaaggtccttgttttcttcgttgctacaattttggtggcatggcaatgccatgcgtacgatatgttccctctccgaatgaacactggctatggtgcccgtactccggaggtgaaatgcgcaagttggaggcttgctgtggaagcacacaacatctttggctttgagaccattcctgaagagtgcgttgaagcaacaaaggaatacatccatggcgaacaatatagatcagactccaaaacagttaaccaacaagcttacttttatgccagagacctcgaagtccatcccaaggacacatttgtgttc

SEQ ID NO: 237124 - DNA, 323 bp, Glycine max
ggctgccgctctctgagaaaaacagatagtgtgggagagagaagagcggaagagaaaatgacgaccaggttcaagaagaacaggaagaagagaggtcacgtcagcgccggacacggccgtatcggaaagcaccgcaagcatcccggaggtcgcggtaacgccggtggcatgcatcaccgccgtatcctcttcgacaagtaccatcctggtttcttcgggaaggtacgcatgcgctacttccacaaacttcgcaacaaattctacaatccgatcatcaacatcgacaagctgtggtccctcctcccccaggaggccaaaaacaa

SEQ ID NO: 237125 - DNA, 327 bp, Glycine max
gactcatcgttctctctgttctttctctctcaaaggaaagaaaaggaaagaaaagaaaagaaaaagaagagagtgtaggtaaacagaagcacacactacacagttaccaaaatcaggttcaaacgcacagatctgggagaagagaagaagaagaagaagaagatgggacaggatcagaaccagagatcgctgatctacgcgttcgtgtctcgcggcacggtgattctcgccgagtacactgaattcagtggcaacttcaacacaatcgcgttccagtgcctccagaagctccctggctccaacaacaagttcacctacaactgtgac

SEQ ID NO: 237126 - DNA, 350 bp, Glycine max
ggcacaagtgagtttgttgatcgagataactagaaacagtgtgatgaaaatgaaggtccttgttttcttcgttgctacaattttggtaacatggcaatgccatgcgtacgatatgttccctctccgaatgaacactggctatggtgcccgtactccggaggtgaaatgcgcaagttggaggcttgctgtggaagcacacaacatctttggctttgagaccattcctgaagagtgcgttgaagcaacaaaggaatacatccatggcgaacaatatagatcagactccaaaacagttaaccaacaagcttacgtttatgccagagacctcgaagtccatcccaaggacacat

SEQ ID NO: 237127 - DNA, 405 bp, Glycine max
  unsure (1)..(405): unsure at all n locations
gaacaacaagtcttacattatgtggaggatatttggaaacagctagcaactatggctctcatgcagcttactagctctcctgttgccttattgctccgtttcatagtaatatttgctctatgttacagaacaatggctttggtgaagttgccaccaaacgcttcatcagttccggcggttttagcgtttggagattcgatcgtggactcaggcaacaacaacaacataaaaacactgattaagtgcaacttcncaccttatggaaaagattttcagggaggaaaaccaactggtcgattttgcaatggaaaaattcttctgacctaatagttgaacaattgggtantaaggagtatttgcctgcatatttggatccgaatctcaaatctagcgatcttgttaccg

SEQ ID NO: 237128 - DNA, 473 bp, Glycine max
  unsure (1)..(473): unsure at all n locations
gtaacggtctagaattcccgggccgacccacgcgtcaaggaagtcgccgtttgttttcttttcgttcgcatcttctctctctctcagaaagatgaaggtggtcgccgcgtatttgctcgccgtcctcggtggcaacaacagcccctccgccgatgtcatcaaggaaatccttggctccgttggagtagaagcagatgaagataggattgaatcgtttttgtctgaagttaagggtaaggatatagttgagcttattgctgccggtagggaaaagttggccacggttccttctggtggtggtggtgccgttgccgtcgccgcagctcctgngggaggtgctgctgctgctgctcctgctgctgaggcaaagaaggangaaaaggtggangagaaagaagaatctgatgatgatatgggtttcagtctcttcgattaattggtgtagtctattcagcttttttgttcagaacata

SEQ ID NO: 237129 - DNA, 406 bp, Glycine max
  unsure (1)..(406): unsure at all n locations
ggcacaagtgagtttgttgatcgagataactagaaacagtgtgatgaaaatgaaggtccttgttttcttcgttgctacaattttggtagcatggcaatgccatgcgtacgatatgttccctctccgaatgaacactggctatggtgcccgtactccggaggtgaaatgcgcaagttggaggcttgctgtggaagcacacaacatctttggctttgagaccattcctgaagagtgcgttgaagcaacaaaggaatacatccatggcgaacaatatagatcagactccaaaacagttaaccaacaagcttacttttatgccagagacctcgaagtcaatctccaagacacatttgtgttcagtatagatggcaacgtactctctaatattccatactacanaaaacat

SEQ ID NO: 237130 - DNA, 409 bp, Glycine max
  unsure (1)..(409): unsure at all n locations
gactcaccacttcaaaacactcataacacaaagcacaaagcaaagctcatccttgagttaaaaaatggcagcagcttcttccatggctctctcatccccatccttggctggcaaggccgtgaagctgggcccatcagccccagaagtgggaagggtgagcatgaggaagaccgtcaccaagcaggcctcctccggaagcccatggtacggcccagaccgcgtcaagtacttgggcccattctctggcgagcccccgtcctacctcactggcgagttcncaggtgactacggctgggacactgctgggcttttcggccgaccagaaaccttcgccagaaaccgtgagctcgaagtgatccactccaagtgggccatgctcnggggcttgggctgcgtcttccccgaactg

SEQ ID NO: 237131 - DNA, 177 bp, Glycine max
ggcacaagtgagtttgttgatcgagataactagaaacagtgtgatgaaaatgaaggtccttgttttcgtcgttgctacaattttggtagcatggcaatgccatgcgtacgatatgttccctctccgaatgaacactggctatggtgcccgtactccggaggtgaaatgcgcaagttg

SEQ ID NO: 237132 - DNA, 352 bp, Glycine max
ggcacaagtgagtttgttgatcgagataactagaaacagtgtgatgaaaatgaaggtccttgttttcttcgttgctacaattttggtagcatggcaatgccatgcgtacgatatgttccctctccgaatgaacactggctatggtgcccgtactccggaggtgaaatgcgcaagttggaggcttgctgtggaagcacacaacatctttggctttgagaccattcctgaagagtgcgttgaagcaacaaaggaatacatccatggcgaacaatatagatcagactccaaaacagttaaccaacaagcttacttttatgccagagacctcgaagtccaacccaaggacacattt

SEQ ID NO: 237133 - DNA, 205 bp, Glycine max
ggcacaagtgagtttgttgatcgagataactagaaacagtgtgatgaaaatgaaggtccttgttttcttcgttgcgacaattttggtagcatggcagtgccatgcgtacgatatgttccctctccgaatgaacactggctatggtgcccgtactccggaggtgaaatgcgcaagttggaagcttgctgtggaagcacacaacatc

SEQ ID NO: 237134 - DNA, 367 bp, Glycine max
ggttctagtgtgtgattgtttgttgttgtcactcgttcttcttcttttgttgttctgtgtttgtgtttgttttttcgctcacctgaaaatgtcttgctgcggtggtaactgtggttgcggaagctcctgcaagtgcggcaacggctgcggaggctgcaagatgtacccatacttgagctacactgagtcaaccaccaccgagaccttggtcatgggagtggcacctgttaaggctcaatttgagggtgctgaaatgggtgtgcccgctgagaactatggctgcaaatgtggaccaaactgctcctgcaacccctgcacttgcaagtgaggtgttgggagagcaagcttcaagcagagatagccctta

SEQ ID NO: 237135 - DNA, 214 bp, Glycine max
gaaggtgcaagagtttgttgtgagctataagctagtttatcgtgaggagaatatgaagttgtttgttttctgtgttgctgcagtagtggtggtagcatgggcatgccatggcgcacgctaccaaaggttccctctccgaatgaaaactggctagggtgagcgttcttcggaggtaaaatgcgcaggttttaggcgtgcggtggaaccacacaac

SEQ ID NO: 237136 - DNA, 307 bp, Glycine max
ctacaattttggtagcatggcaatgccatgcgtacgatatgttccctctccgaatgaacactggctatggtgcccgtactccggaggtgaggtgcgcaagttggaggcttgctgtggaagcacacaacatctttggctttgggaccattcctgaagagtgcgttgaagcaacaaaggaatacatccatggcgaacaatatagatcagactccaaaacagttaaccaacaagcttacttttatgccagagacctcgaagtccatcccaaggacacatttgtgttcagtatacgtggcagcgtactcgc

SEQ ID NO: 237137 - DNA, 320 bp, Glycine max
ggcacaagtgagtttgttgatcgagataactagaaacagtgtgatgaaaatgaaggtccttgttttcttcgttgctacaattttggtagcatggcaatgccatgcgtacgatatgttccctctccgaatgaacactggctatggtgcccgtactccggaggtgaaatgcgcaagttggaggcttgctgtggaagcacacaacatctttggctttgagaccattcctgaagagtgcgttgaagcaacaaaggaatacatccatggcgaacaatatagatcagactccaagacagttaaccaacaagcttacttttaagcca

SEQ ID NO: 237138 - DNA, 391 bp, Glycine max
  unsure (1)..(391): unsure at all n locations
gatgtcatagtattatcattcattctcatctttctctcttctctctccacccaaaccctaactcccgaccctgttcccctctcgtatccgtcatgaaaggaggaaagtccaagaccgaatctaagagagccgatcccaaacttgctgtgaataagaagggagccgccaccaaggctaggaaacccgccggcaaggggaaggcagcgaaagaccctaacaagccaaagaggcctccaagtgctttcttcgttttcatggaggagttcaggaaggtattcaacanagaacatcctgaaaacaaagcagtgtctgctgtgggcaaagctgctggagcaaaatggaagaacatgtctgatgctgaaaaagcaccttatgtggcaaagtctgagaa

SEQ ID NO: 237139 - DNA, 410 bp, Glycine max
  unsure (1)..(410): unsure at all n locations
ggcacaagtgagtttgttgatcgagataactagaaacagtgtgatgaaaatgaaggtccttgttttcttcgttgctacaattttggtagcatggcaatgccatgcgtacgatgtgttccctctccgaatgaacactggctatggtgcccgtactccggaggtgaaatgcgcaagttggaggcttgctgtggaagcacacaacatctttggctttgagaccattcctgaagagtgcgttgaagcaacaaaggaatacatccatggcgaacaatatagatcagactccaaaacagttaaccaacaagcttacttttatgccaaagacctcgaagtccatcccaaggacacatttgtgttcagtatagatggcaccgtactctctaatattccatactacaanaaacatggat

SEQ ID NO: 237140 - DNA, 398 bp, Glycine max
ggcatcaattcaaaatatatcatcaattataagcatgggtttgtggaacacaacgaatgcagtgtcttgccgctttcacaactttggtgatgagcaaaagaatctggtcttccaaggtgatgccacgtcttcttccaggggcatagaactcacaaagttagactgtggaggaaaaccagtgggtggcagtgtggggagagtgttatactcgtctccagtgcacctttgggaaagctctacagtggtcgcaagctttgaaaccgacttcaccttttccatctcatcatactcgactactccaagtgatggccttgccttcttcattgcaccatttgacacgaatatcgctccaaactctggtgggagcaaccttggactcgtcccatcacacaatgttg

SEQ ID NO: 237141 - DNA, 395 bp, Glycine max
ggcacaagtgagtttgttgatcgagataactagaaacagtgtgatgaaaatgaaggtccttgttttcttcgttgctacaattttggtagcatggcaatgccatgcgtacgatatgttccctctccgaatgaacactggctatggtgcccgtactccggaggtgaaatgcgcaagttggaggcttgctgtggaagcacacaacatctttggctttgagaccattcctgaagagtgcgttgaagcaacaaaggaatacatccatggcgaacaatatagatcagactccaaaacagttaaccaacaagcttacttttatgccagagacctcgaagtcaatcccaaggacatttgtgttcagtatagatggcaccgtactctctaatattccatactac

SEQ ID NO: 237142 - DNA, 352 bp, Glycine max
ggcacaagtgagtttgtagatcgagataactagaaacagtgtgatgaaaatgaaggtccttgttttcttcgttgctacaattttggtagcatggcaatgccatgcgtacgatatgttccctctccgaatgaacactggctatggtgcccgtactccggaggtgaaatgcgcaagttggaggcttgctgtggaagcacacaacatctttggctttgagaccattcctgaagagtgcgttgaagcaacaaaggaatacatccatggcgaacaatatagatcagactccaaaacagttaaccaacaagcttacttttatgccagagacctcgaagtccatcccaaggacacattt

SEQ ID NO: 237143 - DNA, 253 bp, Glycine max
  unsure (1)..(253): unsure at all n locations
ggcacaagtttgttgagatagctagaagcaataagatgaaaatgaaagtgcttgttttgtttgttgctacagttttggtagcatatgaatgccatggctcagactaccagaagttccctctccaaatgaaaactgggcttggtgggcaatacagcaatgaggtggcatgtaccagttggaggcttggcgtggaagcanacaacgtagtcaagtggcaaactgtccctgcagcttgcggagaatacatagctga

SEQ ID NO: 237144 - DNA, 348 bp, Glycine max
agcacaagtgagtttgttgatcgagataactagaaacagtgtgatgaaaatgaaggtccttgttttcttcgttgctacaattttggtagcatggcaatgccatgcgtacgatatgttccctctccgaatgaacactggctatggtgcccgtactccggaggtgaaatgcgcaagttggaggcttgctgtggaagcacacaacatctttggctttgagaccattcctgaagagtgcgttgaagcaacaaaggaatacatccatggcgaacaatatagatcagactccaaaacagttaaccaacaagcttacttttatgccagagacctcgaagtcaatccaaggacaca

SEQ ID NO: 237145 - DNA, 204 bp, Glycine max
gaagaaaggaagaaacataccgaatgagagcatcaaactcttcttcttcgatttccattgcgaagcgttactttttcttcttctttctcttcattttcgtcgctcttcgatcttcgtccggggactgctccgaataccacgacgaccactccgccgatggccacgatcggaggcatacacgactccaaatgctctcaaaacagc

SEQ ID NO: 237146 - DNA, 217 bp, Glycine max
ggcacaagtgagtttgttgatcgagataactagaaacagtgtgatgaaaatgaaggtccttgttttcttcgttgctacaattttggtagcatggcaatgccatgcgtacgatatgttccctctccgaatgaacactggctatggtgcccgtactccggaggtgaaatgcgcaagttggaggcttgctgtggaagcacacaacatctttggctttgag

SEQ ID NO: 237147 - DNA, 367 bp, Glycine max
gatccagatctggcagactagtatccgatcctctgtcctctcgaagctttcatcgttcaacatattctcaccatctcagtcatgggcctgctatcttgttttaggtctaccgtcctgagaaaatgttccaaaggaagctctggcatgtcaagattcctgtatacgaacaattttcaacgaaacttgatttcgtctggtggcaatgaatcgtattatgggtattttaacaggagatcatacacttcactttatatgggaactggaactgtgggtgggattacaagtgctagaatcagggtgccaaatgtaggatgtgaaggattcatgtgctcaagtcatctgtcaatcactcaaagaaattcaagat

SEQ ID NO: 237148 - DNA, 399 bp, Glycine max
gacaacaaaaaatttctttagttcactatatccatggcaatgtcttaccaaattagaaattctggtgtcttctttttcctttgtgttcttctctttggtgtgtctgctctgggtcgaccagccacttttctgcaagactttcatgtcacgtggtctgactcccacatcaagcaacttgatcaaggcagggcaatccaactcagacttgaccaaagctctggatgtggatttgcttccaaggtgaagtacatgttcgggcgtgttagcatgaagattaaactcgtccccggagactctgctggcacggtcactgcattttatttgaactctgacacgaactacgttcgcgacgagcttgatttcgagttcttgggcaaccgtactgggcaaccttacaca

SEQ ID NO: 237149 - DNA, 407 bp, Glycine max
gaaggtgcaagagtttgttgtgagctataagctagtttatcgtgaggagaatatgaagttgtttgttttctttgttgctgcagtagttttggtagcatggccatgccatggcgcaggctaccaaaggttccctctccgaatgaaaactggctatggtgagcgttcttcggaggtaaaatgcgcaagttttaggcttgctgtggaagcacacaacatccgagcctttaaaaccattcctgaagagtgcgttgaaccaacaaaggactacattaatggcgaacaatttagatcagactctaaaacagttaaccaacaagctttcttttatgctagtgaacgcgaagtccatcacaacgacatatttatattcggcatagataacaccgtactctctaatatcccatact

SEQ ID NO: 237150 - DNA, 91 bp, Glycine max
gaaggtgcaagagtttgttgtgagctataagctagtttatcgtgaggagaatatgaagttggttgtgttcgttgctagcgcagtagttttg

SEQ ID NO: 237151 - DNA, 379 bp, Glycine max
gaaggtgcaagagtttgttgtgagctataagctagtttatcgtgaggagaatatgaagttgtttgttttctttgttgctgcagtagttttggtagcatggccatgccatggcgcaggctaccaaaggttccctctccgaatgaaaactggctatggtgagcgttcttcggaggtaaaatgcgcaagttttacgcttgctgtggaagcacacaacatccgagcctttaaaaccattcctgaagagtgcgttgaaccaacaaaggactacattaatggcgaacaatttagatcagactctaaaacagttaaccaacaagctttcgtttatgcgattgaacgcgaagtccatcacaacgacatatttaaattccgcatagat

SEQ ID NO: 237152 - DNA, 162 bp, Glycine max
ggtgagttgtggaaattgattagaattggaaataatgtctggttcggaggactatggaggagaagagtgtctctgcaagatcgtcagaatcggagactccgccgtggggaaatcgaacctgctgtcccgctacgcccggaacgagtttagcatgcagtccaa

SEQ ID NO: 237153 - DNA, 304 bp, Glycine max
gacttgtaataattcttataacacaacacaacccatggccaccacctccgcattcctcctccttcccctcctcctgctgctccacctcgcgatcgccgctcacggcatcggcatcaactacggcacgctcggcgagaaccttccaccgcccgcggcggtggcgaacttcctgaagacgaagacgacgatcgaccgcgtgaagatctacgacgtgaacccggacatcctgcgggccttcgccggcagcggcatcgccgtgacggtgaccgcccccaacggcgacatcaccgcgttaaccaaaatc

SEQ ID NO: 237154 - DNA, 219 bp, Glycine max
gatgcacaagtttgttgagatagctagaagcaataagatgaaaatgaaagtgcttgttttgtttgttgcgagaggttgtggtagcatatggagtgcatggcggcggactagcagaggttccctctccagatgaaaagtgggtttggtgggcaatagagcaatgaggtggcatgtgccagttgggggcgtggcgtgggagcagagaaggtagtcaagtgg

SEQ ID NO: 237155 - DNA, 289 bp, Glycine max
gggcatcaattcaaaatatatcatcaattataagcatgggtttgtggaacacaacgaatgcagtgtcttgccgctttcacaagtttggtgatgaccaagagaatctggtcttccaaggtgatgccacgtcttcttccaggggcatagaactcacagagttagacggtggaggaaaaccagtgggtggcagtgtggggagagtgttatgctcttctccagtgcacctttgggaaagctctacagtggtcgcaagctttgaaaccgacttcaccttttccatctcatcaga

SEQ ID NO: 237156 - DNA, 398 bp, Glycine max
ggcacaagtgagtttgttgatcgagataactagaaacagtgtgatgaaaatgaaggtccttgttttcttcgttgctacaattttggtagcatggcaatgccatgcgtacgatatgttccctctccgaatgaacactggctatggtgcccgtactccggaggtgaaatgcgcaagttggaggcttgctgtggaagcacacaacatctttggctttgagaccattcctgaagagtgcgttgaagcaacaaaggaatacatccatggcgaacaatatagatcagactccaaaacagttaaccaacaagcttacttttatgccagagacctcgaagtccatcccaaggacacatttgtgttcagtatagatggcaccgtactctctaatatttcatactaca

SEQ ID NO: 237157 - DNA, 290 bp, Glycine max
gcacaagtgagtttgttgatcgagataactagaaacagtgtgatgaaaatgaaggtccttgttttcttcgttgctacaattttggtagcatggcaatgccatgcgtacgatatgttccctctccgaatgaacactggctatggtgcccgtactccggaggtgaaatgcgcaagttggaggcttgctgtggaagcacacaacatctttggctttgagaccattcctgaagagtgcgtttaagcaacaaaagaatacatccatggcgaacaatatagattagactccaaaac

SEQ ID NO: 237158 - DNA, 364 bp, Glycine max
  unsure (1)..(364): unsure at all n locations
ggtcacttttctcagctgctgttcctgcgcgtgaacaagcctcaggtaagccaaagccatggttaagcataacaatgttatccccaacggacacttccgtaagcactggcagaactatgtgaagacctggttcaatcagccagcacggaagacaagaaggcggttggctcgtcagaagaaagctgtgaagattttccccagacctacagctggacctcttagacccattgtacatggtcaaactttgaaatacaacatgaaagtgagagctggaaggggattttcccttgaagaactcaaggcagcanggattcccaaaaagcttgcaccaacaattggtaatgctgttgatcatcgccgcaag

SEQ ID NO: 237159 - DNA, 251 bp, Glycine max
gacttgtgataattcttataacacaacacaacccatggccaccacctccgcattcctcctccttcgcctcctcctgctgctccacgtcgccatcgccgctcacgggatcggcatcaactacggtacgctcggggacaaccttccaccgcccgcggcggtggcgaacttcctgaagacgaagacgaccatcgaccgcgtgaagatctacgacgctgaacccggacatcctgcgggccttctccagcagcggc

SEQ ID NO: 237160 - DNA, 341 bp, Glycine max
gggccgacgcacgcgtccaggcagccaaagaaaagaaaatcctcaattttctgagcagccaaacactctctctctgtctctcgaaaattctcagtttgcagagaaaatctgaatcatgtcgtggcaagcgtatgtcgacgatgaccttctgtgtgacatcgaaggtaaccacctcactcacgctgctatcatcgggcaagacgggagcgtttgggctcagagtaccgacttccctcagttcaaacctgaggagataactgccatcatgaatgactttaatgagcctggattacttgttccaactggattgtaactcggtgggaccaaatatatggtcatcc

SEQ ID NO: 237161 - DNA, 350 bp, Glycine max
ggtgcacaagtgagtttgttgatcgagataactagaaacagtgtgatgaaaatgaaggtccttgttttcttcgttgctacaattttggtagcatggcaatgccatgcgtacgatatgttccctctccgaatgaacactggctatggtgcccgtactccggaggtgaaatgcgcaagttggaggcttgctgtggaagcacacaacatctttggctttgagaccattcctgaagagtgcgttgaagcaacaaaggaatacatccatggcgaacaatatagatcagactccaaaacagttaaccaacaagcttacttttatgccagagacgccagagtccatcccaaggacac

SEQ ID NO: 237162 - DNA, 351 bp, Glycine max
ggtgcacaagtgagtttgttgatcgagataactagaaacagtgtgatgaaaatgaaggtccttgttttcttcgttgcgacaattttggtaccatggcaatgccatgcgtacgatatgttccctctccgaatgaacactggctatggtgcccgtactccggaggtgaaatgcgcaagttggaggcttgctgtggaagcacacaacatctttggctttgagaccattcctgaagagtgcgttgaagcaacaaaggaatacatccatggcgaacaatataaatcagactccaagacagttaaccaacaagcttacttttatgccagaagaactcgaagtccatcccaaggacac

SEQ ID NO: 237163 - DNA, 396 bp, Glycine max
gatcgaagcaaaaaatgaaaacccaaagtgcttctctcctctgtctttttctctctcttgctatccttttggctagtggcactgctgcaagtgcaactccaagaagcgcagtgccaagccaccatgtttcaacattcaacagaagcctttttccttccacttttctctttggaattggttcttctgcttaccaggcagaaggagcagcaagtgtagatgggagaggaccaagcatatgggacacctacactagacagcatactgaaaagatttgggatcatagcaccggtgacatgggagctgatttttatcatcgatacaagggtgacataaaaatagcgaaagaaattgggctggactctttcagattccctatctcatggtcaagaatattcc

SEQ ID NO: 237164 - DNA, 222 bp, Glycine max
ggcacaagtgagtttgttgatcgagataactagaaacagtgtgatgaaaatgaaggtccttgctttcttcgttgctacaattttggtaccatggcaatgccatgcttacaatatgttccctctcgaattgaacacgggcaatggtgcccttatcccggaggtaaattccccaatttgaaggcttccgttggaacaaaacacaaccttgggctttaaaacaat

SEQ ID NO: 237165 - DNA, 400 bp, Glycine max
ggcgcaagtaagacacagagatagatctgacctcagcggcggcggcagcggcaacagaagaacatccaccaccatacacactgggtcgcgtgagaacaggtaccgtgaagaaatcctcccgccaagtgattgagcgttactactcgcgcatgaccctcgacttccacacaaacaagtagcttctcgaagaagtgggcatcatcccttccaagaggctgccgaacaagatcgcaggtttctccacgcatctcatgaagcgcatccagaaaggtcccgttcgcagcatctcactctagctccaggaggaggatcgcgagcgccgcatggacttcgtcaccgacgtctccgtcatcaacaccgaccacatcgaattccatatagaaagccttgacatgcctca

SEQ ID NO: 237166 - DNA, 321 bp, Glycine max
atgggtttgtggaacacaacgaatgcagtgtcttgccgctttcacaagtttggtgatgaccaaaagaatctggtcttccaaggtgatgccacgtcttcttccaggggcatagaactcacaaagttagacggtggaggaaaaccagtgggtggcagtgtggggagagtgttatactcttctccagtgcacctttgggaaagctctacagtggtcgcaagctttgaaaccgacttcaccttttccatctcatcagactctactactccaggtgatggccttgccttcttcattgcaccatttgacactaaaatccctccaaac

SEQ ID NO: 237167 - DNA, 331 bp, Glycine max
gaccacattccaaaacacaaacacatacattgtagtatcacttttgtctcggaatttgttcttttgagttatggcaagcttaaaggttgcatgtgtggttttgatgtgcatggctgtgatgagtgcaccaatgatggtgcaagccgtgtcatgcaatgatgtttctgtgaacctagcaccgtgcctatcttacctgatgcagggtggagatgttccagaatcgtgctgtagcggagtgaggaacattctgggttctgctagcaccacctttgacaaacaaaccgtgtgcaaatgtcttcagcaagctgctaataactatgggatcaacgac

SEQ ID NO: 237168 - DNA, 329 bp, Glycine max
gaggcacgcgtccaacggctactacgacgggagagaaagggagagcaacagggactcattccactgactacggtttgcggcttcagagattgcgacgcacgcacccacggtcaccacctagaacggtgcacgtatctccgtcgcgtcagctcacggagaaagtggtcgcatccagatgatgttggcaggagaatcgattgcagcagcaacgactgcaacttccatgtcgcatgtaacatcttcgaacgtcgcatcgacgggattgagactaggaaacttgggatcacatgggacaaccttcacttatcacctagggttactgttgcact

SEQ ID NO: 237169 - DNA, 326 bp, Glycine max
gaaggtgcaagagtttgttgtgagctataagctagtttatcgtgaggagaatatgaagttgtttgttttctttgttgctgcagtagttttggtagcatggccatgccatggcgcaggctagcaaaggttccctctccgaatgaaaactggctatggtgagcgttcttcggaggtaaaatgcgcaagttttaggcttgctgtggaagcacacaacatccgagcctttaaaaccattcctgaagagtgcgttgaaccaacaaaggactacattaatggcgaacaatttagattagactctaaaacagttaaccaacaagctttctttt

SEQ ID NO: 237170 - DNA, 303 bp, Glycine max
ggcacaagtgagtttgttgatcgagataactagaaacagtgtgatgaaaatgaaggtccttgttttcttcgttgctacaattttggtagcatggcaatgccatgcgtacgatatgttccctctccgaatgaacactggctatggtgcccgtactccggaggtgaaatgcgcaagttggaggcttgctgttgaaacacacagcatccttggctttgagaacattcctgaagagtgcgttgaagcatcaaagaatacatcaatggggacaatatagatcagactccaaaacagttaaccaacaag

SEQ ID NO: 237171 - DNA, 349 bp, Glycine max
ggcacaagtgagtttgttgatcgagataactagaaacagtgtgatgaaaatgaaggtccttgttttcgtcgttgctacaattttggtagcatggcaatgccatgcgtacgatatgttccctctccgaatgaacactggctatggtgcccgtactccggaggtgaaatgcgcaagttggaggcttgctgtggaagcacacaacatctttggctttgagaccattcctgaagagtgcgttgaagcaacaaaggaatacatccatggcgaacaatatagatcagactccaaaacagttaaccaacaacgctacgtttaggccagagacctcgaagtccatcccaaggacaca

SEQ ID NO: 237172 - DNA, 346 bp, Glycine max
gcacaagtttgttgagatagctagaagcaataagatgaaaatgaaagtgcttgttttgtttgttgctacagttttggtagcatatgaatgccatggctcagactaccagaagttccctctccaaatgaaaactgggtttggtgggcaatacagcaatgaggtggcatgtgccagttggaggcttggcgtggaagcaaacaacgtagtcaagtggcaaactgttcctgcagcttgcggagagtacatagctgactacgttctaggagaccaatatagatcagattccaaaacagttaaccaacaagcttatttctatgctaaatccctcaaactcacgagcaaagat

SEQ ID NO: 237173 - DNA, 350 bp, Glycine max
ggcacaagtgagtttgttgatcgagataactagaaacagtgtgatgaaaatgaaggtccttgttttcttcgttgctacaattttggtagcatggcaatgccatgcgtacgatatgttccctctccgaatgaacactggctatggtgcccgtactccggaggtgaaatgcgcaagttggaggcttgctgtggaagcacacaacatctttggctttgagaccattcctgaagagtgcgttgaagcaacaaaggaatacatccatggcgaacaatatagatcagactccaaaacagttaaccaacaagcttacttttatgccaggagacgtcgaagtccatcccaaggacaca

SEQ ID NO: 237174 - DNA, 352 bp, Glycine max
ggcacaagtgagtttgttgatcgagataactagaaacagtgtgatgaaaatgaaggtccttgttttcttcgttgctacaattttggtagcatggcaatgccatgcgtacgatatgttccctctccgaatgaacactggctatggtgcccgtactccggaggtgaaatgcgcaagttggtggcttgctgtggaagcacacaacatctttggctttgagaccattcctgaagagtgcgtggaagcaacaaaggaatacatccaaggcgaacaatatagattaaactccaagacagttaaccaacaagcttacttttaagccagaaaactcgaagtccatcccaaggacacattt

SEQ ID NO: 237175 - DNA, 454 bp, Glycine max
ccgggtcgacccaagcgtcaaaagacgacagaaggggacagctattcctcttaagcttgctactgagtttccacactgcataccttaggtcttccgaattcgaagttaatttgcaagatggctaaggaaaaggctcagatcaacattgtggtggttggtcatgtggaccctgaggaggcagccaccattaacgagctgaagaagcctgttgtggagaaagaagctccagggcatgccatatgagggcatgcacgtacggcctcggaggggaaccagaaaattatgttaacaaaataatctggaaccctaatgtatcagtgtcatcatcagtgtgtagtttaagctagctttgctatggttacgttctttgagatgagagtcttgatgaacagtaccattctgatgtattgctttccttgaaagttaatgcatgcttcttatcttctgtctagct

SEQ ID NO: 237176 - DNA, 393 bp, Glycine max
ggaagaacaagtcttgcattgggtggagcatacttagaaacagcaactatgtctctcatgcagcttactagctcccctgttggctcactggtccgtttcattgtaatatttgctttatggtacagaaccatggctttggccaagttgccaccaaacgcttcatcagttccagcagttttagcgtttggagattccatcgtggacccaggcaacaacaacaacataaaaacattgatcaagtgcaacttcccaccttatggaaaggattttcagggaggaaacccaacgggtcgattttgcaatggaaaaattccttctgacttaatagttgaacaattgggtattaaggagtatttgcctgcatatttggattcgaatctcaaatctagtgat

SEQ ID NO: 237177 - DNA, 397 bp, Glycine max; identical to SEQ ID NO: 234774

SEQ ID NO: 237178 - DNA, 399 bp, Glycine max; identical to SEQ ID NO: 234834

SEQ ID NO: 237179 - DNA, 287 bp, Glycine max
gctagaataaacaataatgagatcactgttttagtaaatgatgcggaaaagggtagtgacattgatccacaagaagcacagcaaactcttgaaatagcagaagctaatttgaataaggcggaaggcaagagacaaacaattgaggcaaatctagctcttagacgagctaggacacgagtagaggctatcaatgtgatttcataacaagttgatgcgtccgaatatcggaataactaaaaaatgggaaatgaaacagtaagaaaagatagaaaaaaattaaaaggatg

SEQ ID NO: 237180 - DNA, 214 bp, Glycine max
gactcctaacctttttttcttccgttcacctcttcagcagtcgttacagagactccataacccgaaaatgcctttcaagaggtacgttgagattgcgagggttgctcagatcaactatggcaaagagtatgggaggctcgtggttattgtcgatgtcattgaccagaatagggctcttgttgatgctcctgacatggtgaggtcccaagtgaac

SEQ ID NO: 237181 - DNA, 314 bp, Glycine max
ggcacaagtgagtttgttgatcgagataactagaaacagtgtgatgaaaatgaaggtccttgttttcttcgttgctacaattttggtagcatggcaatgccatgcgtacgatatgttccctctccgaatgaacactggctatggtgcccgtactccggaggtgaaatgcgcaagttggaggcttgctgtggaagcacacaacatctttggctttgagaccattcctgaagagtgcgttgaagcaacaaaggaatacatccatggcgaacaatatagattagactccaaaacagttaaacaacaagcttaccttt

SEQ ID NO: 237182 - DNA, 285 bp, Glycine max
aggcacaagtgagtttgttgatcgagataactagaaacagtgtgatgaaaatgaaggtccttgttttcttcgtggcgacgattttggtagcgtgggaatgcgatgcgtacgatgtgttccctctccgaatgaacactggctagggtgcccgtactccggaggtgaaatgcgcaagttgggggcttgcggtggaagcacacagcatctttggctttgagaccagtcctggagagtggcttgaagcaggaaaggaagacatccatggggaacaatatagatcaggct

SEQ ID NO: 237183 - DNA, 353 bp, Glycine max
  unsure (1)..(353): unsure at all n locations
ggcacaagtgagtttgttgatcgagataactagaaacagtgtgatgaaaatgaaggtccttgttttcttcggtgcgacaattttggtancatggcaatgccatgcgtacgatatgttccctctccgaatgaacactggctatggtgcccgtactccggaggtgaaatgcgcaagttggaggcttgctgtggaagcacacaacatctttggctttgagaccattcctgaagagtgcgttgaagcaacaaaggaatacatccatggcgaacaatatagattagactccaaaacagttaaccaacaagcttacttttatggcgagagacctcgaagttcatcccaaggacacattt

SEQ ID NO: 237184 - DNA, 323 bp, Glycine max
gctcgtctcgtggaagtgtaagcaagcaaaaccctagcggcgcctgctttctttgttcgtgttttgcatcaggatggagtctcaggtgaagcacgcacttgttgtcaaagttatgggtcgtactggatccagaggacaagtgacccaggttagagtgaagtttttggatgatcagaaccgtcacatcatgaggaatgtgaaaggacctgtgagagaaggagacattctcaccctactcgagtctgaaagggaagcaagaagattgcgctagatggtctcttttttttggcttgcctccaaattcgaacaaaagcaatattttt

SEQ ID NO: 237185 - DNA, 355 bp, Glycine max
gcacaagtgagtttgttgatcgagataactagaaacagtgtgatgaaaatgaaggtccttgttttcttcgttgctacaattttggtagcatggcaatgccatgcgtacgatatgttccctctccgaatgaacactggctatggtgcccgtactccggaggtgaaatgcgcaagttggaggcttgctgtggaagcacacaacatccttggctttgagaccattcctgaagagtgcgttgaagcaacaaaggaatacatccatggcgaacaatatagatcagactccaaaacagttaaccaacaagcttacttttatgccacagacctcgaagtccatcccaaggacacatttgtgt

SEQ ID NO: 237186 - DNA, 410 bp, Glycine max
gatcaccacttggacgcaaaaatggcacctgcaacactgtctccgtctctcctcctcctgttctcactcagcatcgccgtaaccgttagatcgagcgactacgactacgattgtgtgtacactgcatacgttagaaccggttcggtgttgaagggcggaacggactctaagatcgggctgaagctgtacgacaagtacggctactacatctacattaaaaacctcgaagcatggggcggcttgatgggcaagggctacgactacttcgagcgcggcaacctcgacatcttcagcggaaggggaccctgtcttgacggacccgtctgtgccgttaacgttacttctgacggatcgggttctcaccacgggctggtacttaactacgtccaggtcacctccactgggcccca

SEQ ID NO: 237187 - DNA, 396 bp, Glycine max
  unsure (1)..(396): unsure at all n locations
gatcacatttaaaatcaaaacaacaaattttcagactcaacaagcttcgaaccaaatcttattgagaaaatgtctggtcgtggaaagggtggaaagggtttgggaaagggaggtgccaagaggcacaggaaggttcttcgtgacaacatccagggcatcacgaaacctgcgattcgtaggttagcgagaagaggtggcgtgaagaggatcagtggtttgatctacgaggaaaccagaggagttctgaagatattcttggagaacgtgattcgcgatgctgtgacctacactgagcacgctaggaggaagacggttactgctatggatgttgtttatgctcttaagaagcaaggaanggacctctatggttttggaggctaaaaagttcttagtgtt

SEQ ID NO: 237188 - DNA, 411 bp, Glycine max
ggggaaccctaattctgcgaggtgagtgaaaatggcggtacccttgctctccaagaagatcgtgaagaagcgcgtcaagaagtttatacgcccccagagtgatcgcaagatctccgtcaagccaagctggcgcagacccaagggtattgattctcgtgtcaggagaaagttcaaaggatgcactttgatgcccaacattggttatggctcagacaagaaaacccgccattatctaccaaatggtttcaagaaatttgtcgtgcacaatgtgaaagacctggaacttctcatgatgcataacaggacatattgtgctgagattgctcacaatgtatccacaaggaagaggaaggacatagttgagagagctgctcagcttgatgttgtcttgacgaacaagacggccagact

SEQ ID NO: 237189 - DNA, 396 bp, Glycine max
gcacaagtgagtttgttgatcgagataactagaaacagtgtgatgaaaatgaaggtccttgttttcttcgttgctacaattttggtagcatggcaatgccatgcgtacgatatgttccctctccgaatgaacactggctatggtgcccgtactccggaggtgaaatgcgcaagttggaggcttgctgtggaagcacacaacatctttggctttgagaccattcctgaagagtgcgttgaagcaacaaaggaatacatccatggcgaacaatatagatcagactccaaaacagttaaccaacaagcttacttttatgccagagacctcgaagtccatcccaaggacacatttgtgttcagtatagatggcaccgtactctccaatattccatactac

SEQ ID NO: 237190 - DNA, 239 bp, Glycine max
  unsure (1)..(239): unsure at all n locations
gaaggtgcaagagtttgttgtgagctataagctagtttatcgtgaggagaatatgaagttgtttgttttctttgttgctgcagtagttttggtancatggccatgccatggcgcaggctaccaaaggttccctctccgaatgaaaactggctatggtgagcgttcttcggaggtaaaatgcgcaagttttaggcttgctgtggaagcacacaacatccgagcctttaaaaccattcctg

SEQ ID NO: 237191 - DNA, 216 bp, Glycine max
ggcacaagtgagtttgttgatcgagataactagaaacagtgtgatgaaaatgaaggtccttgttttcttcgttgctacaattttggtagcatggcaatgccatgcgtacgatatgttccctctccgaatgaacactggctatggtgcccgtactccggaggtgaaatgcgcaagttggaggcttgctgtggaagcacacaacatctttggctttga

SEQ ID NO: 237192 - DNA, 339 bp, Glycine max
ggagtgctttctttctgtaactaacttgttccctcgttaaccctaatcatcaactcaagcagtgaatgaatctgtggacggacgagaactcctcggtgatggaggccttcatgtcgtcctccgatctctcctcaatctggccctcgccggcgccgccgcaatccacggcggtcttcaatcaggacaccctccagcatcgcctgcaggccttgatcgaaggcgcccgagagacctggacctacgccatcttctggcagtcctcttatgactattctggctccactctcctcggctggggcgacggttactacaaaggcgacgacgacaaagccaaagcca

SEQ ID NO: 237193 - DNA, 272 bp, Glycine max
gatttatccctctcttagccatcgttgttcataatcattacacatcataggctctctctctagggtttgatcagactcaagggtttaagccatgggaaaaaggaaggcaaaggcaaagcctcctccaaagaagcgaatggataagctcgataccgtcttcagctgccctttctgcaatcatggcagcagcgtcgaatgccgccttgacatgaagaacttgataggggaagctatttgcgggatatgccaagagagctttagcactaacatca

SEQ ID NO: 237194 - DNA, 348 bp, Glycine max
gctttttgtttggggttttctgattaactctttcttctcataactctgccgccgcaacagccccaaatccaatggcttcagagaagaaactttcgaacccaatgagggagataaaggtgcagaagctcgttctcaatatctctgttggcgagagtggagatcgtctcaccagagccgccaaggtgtcggaacaacttagtggccaaaccccagtgttttccaaagcaaggtacactgttcgttcctttgggattagaagaaatgagaagattgcatgctatgtcactgtcagaggtgacaaggcaatgcaacttttggagagtggtttgaaggttaaggaatatgaac

SEQ ID NO: 237195 - DNA, 339 bp, Glycine max
gataatgtggctgattggtaacgtagtgaatcctgtgcatacatccgctcgtagcctcttcctgcgactctcttctcagtgggtctccgtattctccctcaatcctattaaccttttcttctttcatttcccaccccattctataatcaatcagtgtcaatggcttcttcaatcgctaatgcgccttctgcgttcaattctcagtactactttggtctcagaacgccactgaggtccttcaacttttcttctcctcaagctgccaaacttccacgctcgcattgccttttcgtcgtcagagcctccgattcggtcttcgaaaccgccgttgtcgccggt

SEQ ID NO: 237196 - DNA, 408 bp, Glycine max
gaaggtgcaagagtttgttgtgagctataagctagtttatcgtgaggagaatatgaagttgtttgttttctttgttgctgcagtagttttggtagcatggccatgccatggcgcaggctaccaaaggttccctctccgaatgaaaactggctatggtgagcgttcttcggaggtaaaatgcgcaagttttaggcttgctgtggaagcacacaacatccgagcctttaaaaccattcctgaagagtgcgttgaaccaacaaaggactacattaatggcgaacaatttagatcagactctaaaacagttaaccaacaagctttcttttatgctagtgaacgcgaagtccatcacaacgacatatttatattcggcatagataacaccgtactctctaatatcccatacta

SEQ ID NO: 237197 - DNA, 404 bp, Glycine max
ggcacaagtgagtttgttgatcgagataactagaaacagtgtgatgaaaatgaaggtccttgttttcttcgttgctacaattttggtagcatggcaatgccatgcgtacgatatgttccctctccgaatgaacactggctatggtgcccgtactccggaggtgaaatgcgcaagttggaggcttgctgtggaagcacacaacatctttggctttgagaccattcctgaagagtgcgttgaagcaacaaaggaatacatccatggcgaacaatatagatcagactccaaaacagttaaccaacaagcttacttttatgccagagacctcgaagtccatcccaaggacacatttgtgttcagtatagatggcaccgtactctccaatattccataactacaaaaac

SEQ ID NO: 237198 - DNA, 401 bp, Glycine max
gtacttatgattatagcagtgacatctggagtttgggtatggtagtgcttgagtgtgccataggacggtttccttatatacagtctgaagatcagcaaagctggcctagtttttatgagcttctggcagcaattgtggaaagccccccaccttctgctccacccgatcagttctcccctgagttctgtacattcgtgtcatcctgcatccaaaaggatcctcgggatagattaacatcattggagctactggatcatcctttcataaaaaagtttgaagataaagatctagatcttgggattttggtaggtggcttggaacctcctgtaaactttccgagataatttttacaatagagtgtaaaatttgtactagacagccacaactcttggtgatggaac

SEQ ID NO: 237199 - DNA, 375 bp, Glycine max
ggattgattccctcattcttcatccatagacatggccaccgtcacttctgcagccgttgctattccctcattcactggcctcaaggcaagcgcaggcaaagtgagtgccgcagttaaagtctcagctccccaagccacaaggttgggcatcaaggcttcgctgaaagacgttggagtcgctgttgtggccactgccgcgagtgcagtgctggctagcaacgccatggccattgaagtgttgctgggtggtgatgaccggtccctggctttcgttcgcaacaatttccccgtggcctctggggagaagatcgtgttcaagaacaacgcaggtttcccccacaacgttgtgttcgacgaggacgagattcctagcgg

SEQ ID NO: 237200 - DNA, 396 bp, Glycine max; identical to SEQ ID NO: 235023

SEQ ID NO: 237201 - DNA, 325 bp, Glycine max
gtacgcctcaggaattccaggctcgaccgacccgtccgttgcgaaacgacaacacaacggggcggaggtaactttgctgattgagacaactattatcagtgtgagtttgatgaacgtccttgatttcttcgcttgcagcattcaggtatcagggcaaggccatgcgtatcagatcttccactcgtcaagtgaacactgcttcaaggggccagtacaccagaagttaaatgcgcaagttggaagcatgctgtggcagtatacaggaactttgactttcatatcaatcctgactattgcattgatccaaaataggcatacatccatg

SEQ ID NO: 237202 - DNA, 398 bp, Glycine max
gacaacacaacgcaacacaacgcgcactctctcttttctctcttaacacaaaaaccctatcgttcttcgcggtttcgccgattctcgccatgccgaaagccaaatccgacgccaaagccgccgatagccggttgaagcgcaagggcgctggtgctggaaggaagcaatcgaagaaagctgctaaggatcctaacaagccaaagagacctccaagcgctttcttcgttttcatgtccgagttcagagagcagtttaagaaggagcatcctaacaacaaatccgtcgctgttgtcggtaaagctggtggtgacaaatggaaatcgctgtctgatgctgaaaagggccccttcgttgccacggccgaaaagaagaaacaagagtatgagaaaactattttg

SEQ ID NO: 237203 - DNA, 396 bp, Glycine max
ggcagtccaattccaatatattccattctctctgtgtatttccctacctctcccttcaagatgcagatcttcgtcaagaccctcaccggcaagaccatcacccttgaggtggaaagctctgacaccatcgacaacgtcaaggccaagatccaggacaaggaaggaatccccccggaccagcaacgtctcattttcgccggaaagcaacttgaggacggccgtacccttgctgactacaacattcagaaggagagtactcttcacctcgtcctccgtctccgtggtggcatgcagatcttcgttaagacactcaccggcaagaccataaacctagaggttgaaagctccgacaccatcgataacgtcaaggccaagatccacgacaaggagggtatc

SEQ ID NO: 237204 - DNA, 381 bp, Glycine max
ggagcaaaaccctaatccctatttttcttcctcagtagtgtcatttacgcttctcttctctgcagcaactatgcctaaccctaaggtcttcttcgacatgaccatcggcggtcaatctgctggccgcatcgtgatggagctctacgccgacgtcactccccgcaccgccgagaacttccgcgcgctttgcaccggcgagaagggcgtagggcggagcggcaagcccctccactacaagggctcgtccttccaccgcgtgatcccgagtttcatgtgtcagggtggcgacttcaccgccggaaacggaaccggcggcgagtcgatttatggcgccaagttcgccgacgagaacttcgtgaagaaacacaccggtcccggcat

SEQ ID NO: 237205 - DNA, 391 bp, Glycine max
ggcacaagtgagtttgttgatcgagataactagaaacagtgtgatgaaaatgaaggtccttgttttcttcgttgctacaattttggtagcatggcaatgccatgcgtacgatatgttccctctccgaatgaacactggctatggtgcccgtactccggaggtgaaatgcgcaagttggaggcttgctgtggaagcacacaacatcgttggctttgagaccattcctgaagagtgcgttgaagcaacaaaggaatacatccatggcgaacaatatagatcagactccaaaacagtgaaccaacaagcttacatttatgccagaaacctcgaagtctatcccaacgacacatttgtgttcactatagatggcaccgtactcgctaatattcca

SEQ ID NO: 237206 - DNA, 335 bp, Glycine max
gatcttcgcccggaaaagaaaggggggaagaagaaagaaccgttcctttatgatcgaaaaggtgcctttggtcatcatcgcggtgttaatcttggtggtgcaatcctctgcagcgttccacggtataaacagaatcatgaaggtccaccctgttcctcgaaaacgcaacatctcaatccaatttggcggcgacgggggcaacccgatgtcggaggctcatgcgctgttggggatcgccgggaagaagctccggcgactaccgcacgtgttcaactgcgtgctggagctgcccttccgctccgacgccgacgtttgcgtggaggaaaccccgactg

SEQ ID NO: 237207 - DNA, 339 bp, Glycine max
atcatttaagaaggcaacaggacaaaaaccattgagaataatcttttacagggatggggtaagtgagggacagttctaccaggttttgctatatgagcttgatgccattcgcagggcttgtgcatccttggaacctagttaccaacctccagtaacatttgtagttgttcaaaaacggcatcacgctagactcttcgcaaacaatcatgacgacagaaatagcactgataagagtgggaatatcttacctggtactgtggtagattctaagatctgtcatccttccgaattcgacttctacttatgcagtcatgcacgaattcatggtacaagtagacc

SEQ ID NO: 237208 - DNA, 335 bp, Glycine max
gatccatctttttcttcttactctagactcttctttttctctaagtctaaggggtgccctgagatcactttgagcaatggtgaaagctgtggcagttcttggcagcagcgacggtgtcactggaactattttcttcactcacgaaggaaatggtccaaccaccgtaactggatctcttgctggtcttaagcctggtctccatggcttccatgtccatgccttgggggacactatcaatggttgcctgtcaactggagcgcatttcaatcctaataacaacgatcaccgtgcccctgatgacgagaatcgtcatgccggtgatcttgggaatgtta

SEQ ID NO: 237209 - DNA, 309 bp, Glycine max
gacaacatcctaaaattgattttggtccatttgaaattaccaattaccaaagatgtttggaatcatcggaggaaacaagggtcacaagataaaggggaacttggtgattatccaaaaaaatttgttggaaatcacaaacattacaatgtgttaagggtctcaccggaaccggcattaacaccattgggagactcctccacaccgtaagcgctttggtctcacatatctatatacatcacaatagtgacaacagcgcatatacacatgagaaagaaaaagttggaaacgctacaaatttaagaagacaag

SEQ ID NO: 237210 - DNA, 183 bp, Glycine max
ccatcggtggtcaatctgctggctgcatcgtgatggagctctacgccgacgtcactccccgcaccgccgattaacattgtgctcattcctaatgtaagaagggcttagtgcggagcgggaatcccctccactagaacggctcgtcctttcactgcgtgattccgagtttcatgtgtcagggtg

SEQ ID NO: 237211 - DNA, 400 bp, Glycine max
gcctcatctcaagccacttcagagaaaatggcggtacctctgctctcgaagaagatcgtgaagaagagggtgaagaagttcaagaggcctcagagtgacaggaaaatttccgtcaagacaaactggcgtagaccaaagggtatagattcccgtgttaggagaaagttcaagggatgcactttgatgccaaacatcggttatggttctgacaagaagacccgccactatctccctaatggttttaagaaatttgttgttcacaatgtgaaggacttggaactgctcatgatgcacaacaggacttactgtgctgagattgctcacaatatatccacaagaaagagaaaagatatagttgagagagctgcgcaacttgatgttgttgtgacaaacaaaacag

SEQ ID NO: 237212 - DNA, 397 bp, Glycine max
gacaacacaacgcaacacaacgcgcactctctcttttctctcttaacacaaaaaccctatcgttcttcgcggtttcgccgattctcgccatgccgaaagccaaatccgacgccaaagccgccgatagccggttgaagcgcaagggcgctggtgctggaaggaagcaatcgaagaaagctgctaaggatcctaacaagccaaagagacctccaagcgctttcttcgttttcatgtccgagttcagagagcagtttaagaaggagcatcctaacaacaaatccgtcgctgttgtccgtaaagctggtggtgacaaatggaaatcgctgtctgatgctgaaaacgccccttcgttgccacggccgaaaagaagaaacaagagtatgagaaaactattttg

SEQ ID NO: 237213 - DNA, 390 bp, Glycine max
ggttctagtgtatgtgattgttgtgactcgttcttcttcgtcgttatcttcttcttttgttgtttgtgtgtttgttttttctctcacctgaaaatgtcttgctgcggtggtaactgtggttgcggaagcgcctgcaagtgcggcaacggctgcggaggctgcaagatgtacccagacttgagctacaccgagtcaaccaccaccgagaccttggtcatgggagtggcaccagttaaggctcaattcgagagtgctgaaatgggtgttcccgctgagaacgatggctgcaaatgtggagctaactgcacctgcaacccctgcacttgcaagtgacgtgttggagagctaaagcttcaagcagaaatggccttagaaataatgataaaaact

SEQ ID NO: 237214 - DNA, 389 bp, Glycine max
gaatcaaatttctcagatctatccgacgtcgtcgcagatccaccaaccgttatggctgccttcagcggtgatgaaacggctccgtttttcggcttccttggagccgcagctgccctcgtcttctcctgtatgggagctgcctatggcacagcaaagagtggtgtgggcgtggcttccatgggtgtgatgagacctgagctggtgatgaagtctattgtccctgttgtcatggctggagttttgggtatttatggccttattattgctgttattatcagtaccggtattaatccaaaggccaaatcttattacctctttgatggttatgcacatctctcctctggtcttgcctgtggcttggctggcctttctgctggcatggctattgg

SEQ ID NO: 237215 - DNA, 372 bp, Glycine max
gagggcgaggaagccacatagagacacaatacagagtgagttgttgctccttcgccacaactctctgccaacatgggtatctccagagattctatgcacaagaggcgtgccactggtggcaagaagaaggcctggaggaaaaagagaaagtatgagcttggtcgccagcctgctaacactaagctgtcaagcaacaagacagtcaggaggatccgtgttagaggtggaaatgtgaaatggagggcattgagattggatactggaaattactcctggggaagtgaagctgtaactcgcaagactcgtgtactagatgtggttttaaatgcctcaaacaatgaagcttgtgcgtactcaaactcttgtcaaaag

SEQ ID NO: 237216 - DNA, 397 bp, Glycine max
  unsure (1)..(397): unsure at all n locations
gatgttctgttctacttgctctcaagtttcatcttgggctgtaggctgtagcataccatgaccaccaaggatccaaaatccgtgtacgactttgttgtcaaggatgctaagggagatgatgtanatctctccttttacaagggaaaagtccttctgattgtcaatgttgcttctcaatgcggcttgaccaactccaattatacggagctgaatcaattgtatgacaagtataaagaccaaggcctggagattctggcatttccatgtaatcaatttggtaagcaagaaccagaaagcaatgataaaattgtggattttgtctgcagtcccttcaaatccgaaatccccatccttgaaaagattgacatgaatggggacaattctgctcctttgtaca

SEQ ID NO: 237217 - DNA, 385 bp, Glycine max
ggttgtggtgtagactgtcgagcagtgaataccagttgctcctatagccggcgctcaacaacatggcggacaaggcagtcaccatccgaaccagaaagttcatgacgaacaggcttctctccagaaagcaattcatcgttgatgtccttcatccagggagggctaatgtttccaaggctgaactgaaggagaaattgggcagaatgtatgacgtgaaagacactaacactgtatttgtcttcaagtttcgaactcattttggtggtggcaagtccactgggtttggtttgatctatgattcagttgagaatgccaagaagtacgagcccaagttcaagcttatcacgaatggacttgatactaaagtagagaaatcaaggaagca

SEQ ID NO: 237218 - DNA, 380 bp, Glycine max
ggcacaagtgagtttgttgatcgagataactagaaacagtgtgatgaaaatgaaggtccttgttttcttcgttgctacaattttggtagcatggcaatgccatgcgtacgatatgttccctctccgaatgaacactggctatggtgcccgtactccggaggtgaaatgcgcaagttggaggcttgctgtggaagcacacaacatctttggctttgagaccattcctgaagagtgcgttgaagcaacaaaggaatacatccatggcgaacaatatagatcagactccaaaacagttaaccaacaagcttacttttatgccagagacctcgaagtccatcccaaggacacatttgtgttcagtatagaatggcacgtactct

SEQ ID NO: 237219 - DNA, 397 bp, Glycine max
gattctgattctgtccatccaaatcttaaaaatattcagtgaagatcaacctcaatggcatctcttggcgtgcgaccagttcttccccctccattaacttccatctccgacccacctcctcttttcgatggcaccaccaggttgtacatcagttattcttgcccctatgcacaacgtgtgtggatcgctaggaactacaaggggctacaagataagatcaatttggtccctattaaccttcaagacaggccagcttggtataaggagaaagtctaccctgaaaataaggtgccatccttggagcacaatggcaacgtgttgggagaaagtcctgatttgatcaaatatgtagatgcagactttgaagggacacctttgttttccagtgatcctgcca

SEQ ID NO: 237220 - DNA, 356 bp, Glycine max
ggcacaagtgagtttgttgatcgagataactagaaacagtgtgatgaaaatgaaggtccttgttttcttcgttgctacaattttggtagcatggcaatgccatgcgtacgatatgttccctctccgaatgaacactggctatggtgcccgtactccggaggtgaaatgcgcaagttggaggcttgctgtggaagcacacaacatctttggctttgagaccattcctgaagagtgcgttgaagcaacaaaggaatacatccatggcgaacaatatagatcagactccaaaacagttaaccaacaagcttacttttatgccagagacctcgaagtccatcccaaggacacattttgtg

SEQ ID NO: 237221 - DNA, 393 bp, Glycine max
ggagttgagaggatcgtgagaggggcagtagccgagattccgtgagttgcaaaaatgaagacgattctttccaccgagaccatgaacatcccggacggcgtgagcatcaaagttcatgccaaggtcatcgaagttgagggcccccgcggaaaattggtgcgagacttcaagcatttgaatctcgattttcagctcattactgacgaaaacggtaaaagaaagctgaaaatcgacgcgtggtttggttctcggaaaacatccgccgccattcgcaccgccttgagccacgtggagaatcttatcaccggcgtcaccaagggctaccgctacaaaatgaggttcgtttatgcccattttcccatcaacgcaagcatcggcaacagcaacaagtct

SEQ ID NO: 237222 - DNA, 380 bp, Glycine max
gaacatcatcatcaacaacaagcagatcaatctctctctctctctcaaccataatagtcatgggtttgaaggaggattttgagcagtatgctgagaaagcaaagactttgccaccgactcaatcaaacgaagacttgcttatcctttatggattgtacaaacaggccaccgttggacctgtcaacaccagccgtcctggaatgttcaacatgagggacagagctaaatgggatgcatggaaggctgttgaagggaaatccaaggacgaagcaatgggtgattacatcattaaggtgaaacagctgctggaagcagctggcttgcctgcttgataacattgtcatgccttgctttctgattctgtgctagaagttcacaac

SEQ ID NO: 237223 - DNA, 376 bp, Glycine max
ggtgcacaagtgagtttgttgatcgagataactagaaacagtgtgatgaaaatgagtgtccgtgttctcctcggtgctacaattttggtaacatggcaatgccatgcgtacgatatgttccctctccgaatgaacactggctatggtgcccgtactccggatgtgaaatgcgcatgttggacgcttgctgtggaaacacacaatatctttggctttgagaccactcctgaagagtgcgttgacgcaacacgggaatacatccatggagaacaatatatatcagactccaaaacagttaaccaacacgcttacttatatgccagagatctcgatgtccatcccagggacacatttgtgtacagtatagatggcaccg

SEQ ID NO: 237224 - DNA, 391 bp, Glycine max
ggcacaagtttgttgagatagctagaagcaataagatgaaaatgaaagtgcttgttttgtttgttgctacagttttggtagcatatgaatgccatggctcagactaccagaagttccctctccaaatgaaaactgggtttggtgggcaatacagcaatgaggtggcatgtgccagttggaggcttggcgtggaagcaaacaacgtagtcaagtggcaaactgttcctgcagcttgcggagagtacatagctgactacgttctacgagaccaatatagatcagattccaaaacagttaaccaacaagcttatttctatgctaaatccctcaaactcaccaacaaagatgtctttgtcttggacgttgacgacactactctctctaatctcca

SEQ ID NO: 237225 - DNA, 385 bp, Glycine max
gactcatccttcattaccaagcatatctcatttgaatacattccttgtagtttatactgaaagatgggtttgaagatggcgttactgatcctaggcctttccctcatgctccttttggtctcctctgaggtggcatccacgaatacaaaagaggaggcaaatggagtggatgatgccaaatatcccggtggaagctatggagggggttacccaggtcatggcggtggcggttatcctggccatggcggtggcggttatcctggccatggcggtggtggtggctatcctggtcatggtggtggccaccctggtcatggtggcggctaccctggccgtggtggtggatactgtacgcatggctgttgccgtggccggacatacaacg

SEQ ID NO: 237226 - DNA, 394 bp, Glycine max
ggcacaagtgagtttgttgatcgagataactagaaacagtgtgatgaaaatgaaggtccttgttttcttcgttgctacaattttggtagcatggcaatgccatgcgtacgatatgttccctctccgaatgaacactggctatggtgcccgtactccggaggtgaaatgcgcaagttggaggcttgctgtggaagcacacaacatctttggctttgagaccattcctgaagagtgcgttgaagcaacaaaggaatacatccatggcgaacaatatagatcagactccaaaacagttaaccaacaagcttacttttatgccagaggcctcgaagtccatcccaaggacacatttgtgttcagtatagatggcaccgtactctctaatattccatac

SEQ ID NO: 237227 - DNA, 397 bp, Glycine max
ggcacaagtgagtttgttgatcgagataactagaaacagtgtgatgaaaatgaaggtccttgttttcttcgttgctacaattttggtagcatggcaatgccgtgcgtacgatatgttccctctccgaatgaacactggctatggtgcccgtactccggaggtgaaatgcgcaagttggaggcttgctgtggaagcacacaacatctttggctttgagaccattcctgaagagtgcgttgaagcaacaaaggaatacatccatggcgaacaatatagatcagactccaaaacagttaaccaacaagcttacttttatgccagagacctcgaagtccatcccaaggacaaatttgtgttcagtatagatggcaccgtactctctaatattccatactac

SEQ ID NO: 237228 - DNA, 391 bp, Glycine max
ggggaaaatttgtcaaataaattcatctaaccccaaacaaaaccctagcacacttttatcgcttagtggcagcagcagtggcggcaagcaactccatccgcaatgggaatcgatttgaaggcaggaggtaagtccaagaagaccaagcgaaccgcccccaaatccgatgatatctacctcaagcttctcgtcaagctgtaccgttttcttgttcggaggactgggagtaacttcaatgctgttgtcctcaagcgccttttcatgagcaaggtcaacaagcccccgctatccctctctagattgatccgttacacgaagggaaaggaggataagatagctgtggtttgttggtgccgtgaccgatgacattacggtttatgaaatccctgct

SEQ ID NO: 237229 - DNA, 367 bp, Glycine max; identical to SEQ ID NO: 235843

SEQ ID NO: 237230 - DNA, 469 bp, Glycine max
acgcggctaggtacgcgtctaggaattcaggctcgacccacgcgtacggatagatagctccttcaattagggtttttgtgatctgcaagctacgatgggtaagggaacggggagtttcggtaagagaaggaacaagacccacaccctctgtgtgaggtgtggccgccgcagtttccacctccagaagagtcgttgcgccgcgtgcgctttccccgctgcgcgcaccaggaaatataactggagcgtgaaggccattaggagaaagaccaccggaactggaaggatgaggtacttgcgtaacgtgccccgtagatttaagagtggcttcagagacggtaccgaagctgcacccaggaagagaggagctgctgcctctacctaagctttgaataatagcaatttttgctgggtcagtgaattatataagatttaatgtttctaggttgatgccgagctctttgggacacgt

SEQ ID NO: 237231 - DNA, 400 bp, Glycine max
ggcacaagtgagtttgttgatcgagataactagaaacagtgtgatgaaaatgaaggtccttgttttcttcgttgctacaattttggtagcatggcaatgccatgcgtacgatatgttccctctccgaatgaacactggctatggtgcccgtactccggaggtgaaatgcgcaagttggaggcttgctgtggaagcacacaacatcttcggctttgagaccattcctgaagagtgcgttgaagcaacaaaggaatacatccatggcgaacaatatagatcagactccaaaacagttaaccaacaagcttacttttatgccagagacctcgaagtccatcccaacgacacatttgtgttcagtatagatggcaccgtactctctaataatccatactacaaa

SEQ ID NO: 237232 - DNA, 385 bp, Glycine max
ggagaagaaaaaggaagaaaggtaatagagagagagagaaagagaagaggagagagaaacaaagaagagtgttcccacattacatggcctccttgcccttggggcaccaccaccatcaccaaccggcggcggcgactatacacccgtcgcaaccgccgcagtgtcagccgcaacccgaagttcctcgccggagctccgatatggagaccgataaggatatgtcagctactgtcattgaggggaatgatgccgttactggccacataatctccaccacaattggaggcaaaaatggggaacctaaacagaccatcagttacatggcagaacgtgttgttggcactggatcatttggagttgttttccacgcaaagtgcttggagac

SEQ ID NO: 237233 - DNA, 393 bp, Glycine max
ggcacaagtgagtttgttgatcgagataactagaaacagtgtgatgaaaatgaaggtccttgttttcttcgttgctacaattttggtagcatggcaatgccatgcgtacgatatgttccctctccgaatgaacactggctatggtgcccgtactccggaggtgaaatgcgcaagttggaggcttgctgtggaagcacacaacatctttggctttgagaccattcctgaagagtgcgttgaagcaacaaaggaatacatccatggcgaacaatatagatcagactccaaaacagttaaccaacaagcttacttttatgccagagacctcgaagtccatcccaaggacacatttgtgttcagtatagattgcaccgtactctctaatattccata

SEQ ID NO: 237234 - DNA, 393 bp, Glycine max; identical to SEQ ID NO: 235441

SEQ ID NO: 237235 - DNA, 395 bp, Glycine max
ggcacaagtgagtttgttgatcgagataactagaaacagtgtgatgaaaatgaaggtccttgttttcttcgttgctacaattttggtagcatggcaatgccatgcgtacgatatgttccctctccgaatgaacactggctatggtgcccgtactccggaggtgaaatgcgcaagttggaggcttgctgtggaagcacacaacatctttggctttgagaccattcctgaagagtgcgttgaagcaacaaaggaatacatccatggcgaacaatatagatcagactccaaaacagttaaccaacaagcttacttttatgccagagacctcgaagtccaatcccaaagacacattttgtgttcagtatagatggcaccgtactctctaatattccata

SEQ ID NO: 237236 - DNA, 379 bp, Glycine max
gcacaagtttgttgagatagctagaagcaataagatgaaaatgaaagtgcttgttttgtttgttgctacagttttggtagcatatgaatgccatggctcagactaccagaagttccctctccaaatgaaaactgggtttggtgggcaatacagcaatgaggtggcatgtgccagttggaggcttggcgtggaagcaaacaacgtagtcaagtggcaaactgttcctgcagcttgcggagagtacatagctgactacgttctaggagaccaatatagatcagattccaaaacagttaaccaacaagcttatttctatgctaaatcgctcaaactcaccaacaaagatgtctttgtcttggacgttgacgacactactctc

SEQ ID NO: 237237 - DNA, 394 bp, Glycine max
ggcacaagtgagtttgttgatcgagataactagaaacagtgtgatgaaaatgaaggtccttgttttcttcgttgctacaattttggtagcatggcaatgccatgcgtacgatatgttccctctccgaatgaacactggctatggtgcccgtactccggaggtgaaatgcgcaagttggaggcttgctgtggaagcacacaacatctttggctttgagaccattcctgaagagtgcgttgaagcaacaaaggaatacatccatggcgaacaatatagatcagactccaaaacagttaaccaacaagcttacttttatgccagagacctcgaagtccatcccaaagacacaattgtgttcagtatagatggcaccgtactctctaatattccatac

SEQ ID NO: 237238 - DNA, 399 bp, Glycine max
ggcacaagtgagtttgttgatcgagataactagaaacagtgtgatgaaaatgaaggtccttgttttcttcgttgctacaattttggtagcatggcaatgccatgcgtacgatatgttccctctccgaatgaacactggctatggtgcccgtactccggaggtgaaatgcgcaagttggaggcttgctgtggaagcacacaacatctttggctttaagaccattcctgaagagtgcgttgaagcaacaaaggaatacatccatggcgaacaatatagatcagactccaaaacagttaaccaacaagcttacttttatgccagagacctcgaagtccatcccaaggacacatttgtgttcagtatagatggcaccgtactctctaatattccatactacaa

SEQ ID NO: 237239 - DNA, 397 bp, Glycine max
gaaggtgcaagagtttgttgtgagctataagctagtttatcgtgaggagaatatgaagttgtttgttttctttgttgctgcagtagttttggtagcatggccatgccatggcgcaggctaccaaaggttccctctccgaatgaaaactggctatggtgagcgttcttcggaggtaaaatgcgcaagttttaggcttgctgtggaagcacacaacatccgagcctttaaaaccattcctgaagagtgcgttgaaccaacaaaggactacattaatggcgaacaatttagatcagactctaaaacagttaaccaacaagctttcttttatgctagtgaacgcgaagtctatcacaacgacatatttatattcggcatagataacaccgtactctctaat

SEQ ID NO: 237240 - DNA, 395 bp, Glycine max
gaggcccggttgggtcatactgagtcaggcacatcaaaagcaaaagtccaaacgctcccatctcgccaccgtgaacaccccgacacaaacacactccaagcgcacgttagcagtctccgccgtcttcgccaccgtgccatcgccgtcgatggagtctctcttcggctcgatcaacgttcgcgacctcctctcggcgcaggacctctcggaccctaactcccctctctcagcgccggatctccgtctcctgatccagcgcctggagtcgcagtccttccagatccgttctcaggtgcagtcctaccttgtctcgcaccacgaagacttcgcgcgcctcttctctctttgtaacgacaccgtttcgcacacgcgcgacgtctccgatggtgtttccg

SEQ ID NO: 237241 - DNA, 382 bp, Glycine max
ggcacaagtgagtttgttgatcgagataactagaaacagtgtgatgaaaatgaaggtccttgttttcttcgttgctacaattttggtagcatggcaatgccatgcgtacgatatgttccctctccgaatgaacactggctatggtgcccgtactccggaggtgaaatgcgcaagttggaggcttgctgtggaagcacacaacatctttggctttgagaccattcctgaagagtgcgttgaagcaacaaaggaatacatccatggcgaacaatatagatcagactccaaaacagttaaccaacaagcttacttttatgccagagacctcgaagtccatcccaaggacacatttgtgttcagtatagattgcaccgtactctct

SEQ ID NO: 237242 - DNA, 389 bp, Glycine max
ggcacaagtgagtttgttgatcgagataactagaaacagtgtgatgaaaatgaaggtccttgttttcttcgttgctacaattttggtagcatggcaatgccatgcgtacgatatgttccctctccgaatgaacactggctatggtgcccgtactccggaggtgaaatgcgcaagttggaggcttgctgtggaagcacacaacatctttggctttgagaccattcctgaagagtgcgttgaagcaacaaaggaatacatccatggcgaacaatatagatcagactccaaaacagttaaccaacaagcttacttttatgccagagacctcgaagtccatcccaaggacacatttgtgttcagtatagatggcaccgtactctccaatattc

SEQ ID NO: 237243 - DNA, 378 bp, Glycine max
ggcacaagtgagtttgttgatcgagataactagaaacagtgtgatgaaaatgaaggtccttgttttcttcgttgctacaattttggtagcatggcaatgccatgcgtacgatatgttccctctccgaatgaacactggctatggtgcccgtactccggaggtgaaatgcgcaagttggaggcttgctgtggaagcacacaacatctttggctttgagaccattcctgaagagtgcgttgaagcaacaaaggaatacatccatggcgaacaatatagatcagactccaaaacagttaaccaacaagcctacttttatgccaaagagctccaagtccatctcaaggacacatttgtgtccagtatacatggaaccgtact

SEQ ID NO: 237244 - DNA, 269 bp, Glycine max
gagagtggtggagtgtgcaaaagagcgtcgtagtcgcaaccctaatcagaagaagcgcagcttcaagcgagtgacagccaccagccatgggtcgtatgcagagccgcggtaagggtatatcctcttctgctttgccctacaaaaggacacctcctagctggctcaagatctcttcgcaagatgtcgaagaaaatatctgcaagtttgccaacaaaggtttgaccccgtctcagattggtgtcattcccagagattctcacggtattgct

SEQ ID NO: 237245 - DNA, 395 bp, Glycine max
ggcagttcaattccaatatattccattctctctgtgtatttccctacctctcccttcaagatgcagatcttcgtcaagaccctcaccggcaagaccatcacccttgaagtggaaagctctgacaccatcgacaacgtcaaggccaagatccaggacaaggaaggaatccccccggaccagcaacgtctcattttcgccggaaagcaacttgaggacggccgtacccttgctgactacaacattcagaaggagagtactcttcacctcgtcctccgtctccgtggtggcatgcagatcttcgttaagacactcaccggcaagaccataaccctagaagttgaaagctccgacaccatcgataacgtcaaggccaagacccaggacaaggagggtat

SEQ ID NO: 237246 - DNA, 299 bp, Glycine max
ggagtcgaacaagaaagaaaagaaaagaagaggaaaaggagagtggagaggaagaaaaggattgaagttgttgctgtgagaaagagaaagagtgaaatcggagtttgggaaggaattgcaatcaatggatgtgataaagacgcagcaaatctcatctcgaccaatcgagaaggtggtggttcaacctctcgtgcttctcagcatcctcgacaactacaacagagtcgccaaagacactcgcaagcgcgtcgtcggcgtcttgctccgctcctccttcaaaggcaccgtcgatgtcacca

SEQ ID NO: 237247 - DNA, 400 bp, Glycine max
ggcacaagtgagtttgttgatcgagataactagaaacagtgtgatgaaaatgaaggtccttgttttcttcgttgctacaattttggtagcatggcaatgccatgcgtacgatatgttccctctccgaatgaacactggctatggtgcccgtactccggaggtgaaatgcgcaagttggaggcttgctgtggaagcacacaacatctttggctttgagaccattcctgaagagtgcgttgaagcaacaaaggaatacatccatggcgaacaatatagatcagactccaaaacagttaaccaacaagcttacttttatgccagagacctcgaagtccatcccaaaggacacattttgtgttcagtatagatggcaccgtactctctaatattccatactaca

SEQ ID NO: 237248 - DNA, 392 bp, Glycine max
gagggaccaaaacagcagaaaaccctcttttattttcaaaattacccttttcgagcttggagttcccaacaactatcttattccttcactcactcctctctgcgcttggctatggaaaaaacgcacagctccagcgcagaggagcaggatccgacccggcgccacctggatcccccacccgggttaactgctgaagagttcgaggacctcaaaccctccgtgctggagcaccacacctactccgtcacacccacccgccaaagctcctccctcctcgcgcagcgcatccacgcgccaccacacgcggtgtggtccgtcgtgcgctgcttcgacaacccacaggcctacaagcacttcatcaagagctgccacgtcaaggatggcttccagct

SEQ ID NO: 237249 - DNA, 395 bp, Glycine max
gactcgcagattcaaacgtttccgaggtgaggctgaggcatctctctctgctttctagaatgggagctgggcgtggagtctccatctcacttgatggggtgagggacaagaaccttatgcagctcaaaaagctcaatctcgctcttttccccgttcgttacaatgacaaatactatgtcgatgcactcgcttccggtgaatttaccaaactagcttactatagtgatatttgtgttggagcaattgcatgccggctggagaagaaggaacgtggggggcaagttcgggtttacatcatgacgttaggtgttttggcaccttaccgtggacttggtattggaacacagttattgaatcatgttcttgatctttgctccaagcaaaacatttctgag

SEQ ID NO: 237250 - DNA, 374 bp, Glycine max
ggcacaagtgagtttgttgatcgagataactagaaacagtgtgatgaaaatgaaggtccttgttttcttcgttgctacaattttggtagcatggcaatgccatgcgtacgatatgttccctctccgaatgaacactggctatggtgcccgtactccggaggtgaaatgcgcaagttggaggcttgctgtggaagcacacaacatctttggctttgagaccattcctgaagagtgcgttgaaacaacaaaggaatacatccatggcgaacaatatagatcagactccaaaacagttaaccaacaagcttacttttatgccaaagacctcgaagtccatcccaaaggcacatttgtgttcagtatacatggcaccg

SEQ ID NO: 237251 - DNA, 390 bp, Glycine max
ggaacacagatccacttgaaagggttaggtttcgggagaaaaagcaatccactcagagagctagaagaattcaacgatgcctcgctatgatgataaatacggcaatacccgcctctatgtggggcacttatcttcgaggactcgttcccgggatctggagcgtgccttcagcagatatggaagagttcggggtgtggatatgaagaatgatttcgcctttgttgattttagtgatcctcgagatgctgatgatgcaagatataacttggatggtcgggatgttgatggaagtcgtattattgtggaatttgcaaaagggctcctcgtgggtccggggaatatttggggcgaggtcctcctcctggctctggacgctgctttaattgtggc

SEQ ID NO: 237252 - DNA, 386 bp, Glycine max
gaaggtgcaagagtttgttgtgagctataagctagtttatcgtgaggagaatatgaagttgtttgttttccttgttgctgcagtagttttggtagcatggccatgccatggcgcaggctaccaaaggttccctctccgaatgaaaactggctatggtgagcgttcttcggaggtaaaatgcgcaagttttaggcttgctgtggaagcacacaacatccgagcctttaaaaccattcctgaagagtgcgttgaaccaacaaaggactacattaatggcgaacaatttagatcagactctaaaacagttaaccaacaagctttcttttaggctagtgaacgcgaagtccatcacaacgacatatttatattcggcatagataacaccg

SEQ ID NO: 237253 - DNA, 381 bp, Glycine max
gatatatatcaataatctattttatactatacctacattttgataattttctttgtagttgatagccatggctacccgtggaaagcttgaggttgacattgatctcaagtccaacgcagacaagtactggcaaacccttaggaattctactgaaatattccctaaggccttcccacatgattacaaaagcattgaggttcttgagggtgatggcaagtctcctggttctatccgccacataagttatggtgaaggttcaccacttgtgaaatcatcctttgagaagattgaggctgttgatgacgaaaaaaacgtaatgtcctacactatcattgatggggaactcctctagcactacaaaacattcaagggagacatttc

SEQ ID NO: 237254 - DNA, 395 bp, Glycine max
ggcgcattaaacgagaattagggtttgtagtgcagcaggaagaagcaataatggcgccgaagataacacgtaaggttagcagaaaccccgaattgataaggggaatcggaaagtactcgaggtctcaaatgtaccacaagaggggcatttgggctatcaaggccaaaaacggtggcgttttacctcgccacggccctaaacccaaacctgaaactcccgctgaaaaaccacccaaattttaccctgctgacgatgtcaagaaaccccttgtcgacaagcacaaacccaaacccgcgaagctcacggctagcattactcccgggacagtgttgattcttcttgccggtagatttaagggaaagacggtcgtccttttgaagcagcttccttctggg

SEQ ID NO: 237255 - DNA, 387 bp, Glycine max
gatttctttttcttttaccttaatttattgttgcgaatctttgttttgggtcatcgtttgttggttgcagagcagcgaggtgtttagtgtgcaattgttgacaaattaatggcggaaattgtagggcctcgcttgtactgctgttgtaattgtagaaaccaagtctcccttcacgatgatataattgctaaaacctttcagggaagatatggccgaggttttctgttctcccatgcaatgaatattgtggtagggccaaaagaagacaggcacctcatgactggcctccacaccgttgctgatgtttattgtggtgactgccgtgaagtgttgggttggaaataaaaaagagcttatgaagcatcacagaagtacaaggaaggaaaa

SEQ ID NO: 237256 - DNA, 395 bp, Glycine max
  unsure (1)..(395): unsure at all n locations
gccacaaaaaccaagtactacaagggaagaagaacttagctacaagctaaggaaggatcaaagagaatggctcaagcaatggcatcaatgactagcttacgtggttcctctcaggctgtgttggaaggtagccttggctccacacgcttgaatgtggggagtggaagcagggtggcctcagtcacacgtgcagggttcacagttagagcacagcaacaacaagtgaatggtggtgaggtacaaagtagccgtanggcagtgctttcacttgttgctgctggtttgaccactggctcttttgttcaagctgtgcttgctgatgccaaacctatcaaagttggaccacctcgcccaccttccggcggattacctggaacattgaactcagatgaacc

SEQ ID NO: 237257 - DNA, 330 bp, Glycine max
gagtgcacaagtgagtttgttgatcgagataactagaaacagtgtgatgaaaatgaaggtccttgttttcttcgttgctacaattttggtagcatggcaatgccatgcgtacgatatgttccctctccgaatgaacactggctatggtgcccgtactccggaggtgaaatgcgcaagttggaggcttgctgtggaagcacacaacatctttggctttgagaccattcctgaagagtgcgttgaagcaacaaaggaatacatccatggcgaacaatatagatcagactccaaaacagttaaccaacaagcttacttttatgccagagacct

SEQ ID NO: 237258 - DNA, 383 bp, Glycine max
gagagacgcagatatctgtaatttgtgtctgctcactcgctcttctccgccacttctgaatctattgaatcaacaatcatgtcggacgaagagcaccatttcgagtccaaggccgacgccggagcctccaaaacctaccctcagcaagccggtaccatccgcaagaacggctacatcgtcatcaaaggccgcccctgcaaggttgtggaagtttcgacttccaaaactggaaagcacggtcacgctaagtgtcactttgttggaattgatattttcactgccaagaaacttgaggatattgtgccctcttctcacaactgtgatgttcctcatgtgaatcgtactgattaccagctcattgatattgctgaggatggattttt

SEQ ID NO: 237259 - DNA, 271 bp, Glycine max
ggatatattatccctacaacgtaataataaccaaaacagcagagagaagagaaggtgtagacaaacacaatctctaatggcactcaggatgtgggcttcttccactgccaatgcactcaaagtctcttctacctccagacctcatctcttgcatcctttttctttctccagatgcttgtcttccgtcttggatggacttaagtatgcagattcacacgaatgggtcaagcacgaaggctcagtcgccaccattggtatcactgaccatgcc

SEQ ID NO: 237260 - DNA, 397 bp, Glycine max
ggcacaagtgagtttgttgatcgagataactagaaacagtgtgatgaaaatgaaggtccttgttttcttcgttgctacaattttggtagcatggcaatgccatgcgtacgatatgttccctctccgaatgaacactggctatggtgcccgtactccggaggtgaaatgcgcaagttggaggcttgctgtggaagcacacaacatctttggctttgagaccattcctgaagagtgcgttgaagcaacaaaggaatacatccatggcgaacaatatagatcagactccaaaacagttaaccaacaagcttacttttatgccagagaccccgaagtccatcccaaggacacatttgtgttcagtatagatggcaccgtactccctaatattccatactac

SEQ ID NO: 237261 - DNA, 325 bp, Glycine max
ggcattggggcatgcttttaatttcctagatctcccaaacaaattgtagcataagtcccatggccaaagagactagtgttgtttatctatatcccagcaaatcacaagtttggggtgagaattttgatcataaaaaacttgtaataacaacactagctgctaatggaaagaaggaggagagtaatggagcacctaatgacacatatcctgcgtttcccgggtggtatgctgatgtttcctggccaggagaagcacacacatataaaatacaaaagattctattccacgggaaatcagaattccaagagcttcttgtatttgagtc

SEQ ID NO: 237262 - DNA, 390 bp, Glycine max
gacaacaaaatttgccaattgccatttcaatcctcagtttctttcttcaacgtttccatcatacacagatcccaatcctctctcaagccctaatttcccctcatttccatggccacagaagagcccactgtcgcggtggaacccgctcccgaacctgcctccgccgatcctcccccggaggagaaggaggagaccaaacctgaagccaaggctaagaaaaccaatgagcccaaacctaaaaaggtttccagacctcgcaaccctctcactcatccttcctactaagagatggttagagatgcaattacctcgcctgaacgagaagaccggttcgagccaatacgcgattgcgaagttcatcgaggagaagcacaagcatgttccaccgaa

SEQ ID NO: 237263 - DNA, 391 bp, Glycine max
gacgtataatactactagtttgtgacccatttctggacaaagacacatctttgaatttcattggattcaattcatttgggtatcaatcaagattgaattgttgttgtcgtcgtcttggggatgggatcgtgcctgtagatgacgggggcacgggtgtgacgttgctgaagcagggacaggaccttgttattgtgaatgtagatgactccagagctgtattagctgcccaagatcgtagcaatggttctcttattgctgtccagttgagcactgaccacaagccacatcttccaagggaagcagagaggataaggatttgtaaaggaagggtcttcgccattaagaacgaaccagggattgctcgagtatggctccccaacattgattcccc

SEQ ID NO: 237264 - DNA, 391 bp, Glycine max
gacttgtaataattcttataacacaacacaacccatgggcaccacctccgcattcctcctccttcccctcctcctgctgctccacctcgccatcgccgctcacggcatcggcatcaactacggcacgctcggcgacaaccttccaccgcccgcggcggtggcgaacttcctgaagacgaagacgaccatcgaccgcgtgaagatctacgacgtgaacccggacatcctgcggggcttcgtcggcagcggcatctccgtgacggtgaccgcccccaacggcgacatcgccgccttaaccaaaatcgactcggcgaggcattgggtggcgacgcacatcaaaccctttcaccctcagaccaaaattaattacatcctcgtcggcagcgaggtt

SEQ ID NO: 237265 - DNA, 348 bp, Glycine max
acgcgtcaacgagaaaacgacagaaggggactctctgaagtaaccaacgcaacccatcactctttctttcttcctcttccccccacatactattttttcaaatctagggtttcctctgcgtctagggtttcttccttctgcaaccatcaatggcggcaatcacagctccccagcaccgatcctcgaagacggagtcctacgttgacaacaagcgcaaggatgacatccgccacgccaacatcgtggccgcacgctccgtcgccaacgcggttcccaacagtctgggccccaaaggcattgacaagatgatctccacctcctccgacgaggtcatcatcaacaatgacc

SEQ ID NO: 237266 - DNA, 333 bp, Glycine max
gcgtcagcccacacgtccgagaagggggcacaagtttgttgagatagctagaagcaataagatgaaaatgaaagtgcttgttttgtttgttgctacagttttggtagcatatgaatgccatggctcagactaccagaagttccctctccaaatgaaaactgggtttggtgggcaatacagcaatgaggtggcatgtgccagttggaggcttggcgtggaagcaaacaacgtagtcaagtggcaaactgttcctgcagcttgcggagagtacatacctgactacgttctaggaaacaatatagatagcatccaaaacagttaaccatcaagctt

SEQ ID NO: 237267 - DNA, 292 bp, Glycine max
ggcgcattgaacgaaaattagggtttgtagtgtagcaggaagaagcagcaatggcgccgaagataacacgtaaggttagcagaaaccctgaattgataaggggaatcggaaagtactcgaggtcgcagatgtaccacaagaggggcatttgggctatcaaggccaaaaacggtggcgttttacctcgccacgaccctaaacccaagcctgaagctcctgctgaaaaaccacccaaattttaccctgctgatgatatcaagaagccccttgtcaacaagcacaaaccgaaacc

SEQ ID NO: 237268 - DNA, 334 bp, Glycine max
ggaaggcgaggaatccacattcagacacaatacagagtgagttgttgctccttcggcacatgtctccgccaacatgggtatcttccagagattctatgcacacaacgcttgccactggtggcaccaagaatgcctgcaggaaaaagagaacgtatgcccttggtcgccagcctgctaacactaggctgtcaagcaacaagacagtcacgaggatctgtgttacatgctggaatatgaaatggaaggcattgagattggatactggaaattactcctggggtagtgatcctgtaactcacacgactcgtgtactatatgtcgattacaatgcctc

SEQ ID NO: 237269 - DNA, 396 bp, Glycine max
ggagagaagagagatggatccagacgcgttggcaaaggcattcgtggagcactactacagcaccttcgacaccaaccggaacggtttagcgaatctgtatcaggagggttccatgctgaccttcgaagggcagaagatccagggcgcttccagcatcgtcgctaagctcacttccctccctttccagcagtgccaccactccatctccaccgtcgactgccagccctccggtgtcaacgctggcatgcttgtctttgtcagcggcaacctccagctcgctggcgaacagcacactctcaagttcagccagatgttccatttgataccaacgcctcacggaagctattatgtgttgaatgacatattccgtttgaactatgcatgaagatagaccat

SEQ ID NO: 237270 - DNA, 351 bp, Glycine max
ggcacaagtgagtttgttgatcgagataactagaaacagtgtgatgaaaatgaaggtccttgttttcttcgttgctacaattttggtaccatggaaatgccatgcttacaaaatgttccctcttcgaaggaacactggatatggtgcccgtactccgggtgtgaaatgcacaatttggaggcttgctgtggaagcacacaaaatctttggctttgacaccattcctgaagagctgcttgaaccaacaagggaatacctccaggggccaacaatatatattagactccaaaacagttaaccaacagtcttacttttatgccagacacctcaatgtccatcccaaggaaacat

SEQ ID NO: 237271 - DNA, 390 bp, Glycine max
ggcagaagacacaagaagtcacaaaatgtatcacgttcttaaccgcgctttctgcaccgccacagagcccgccaccaccatcgccgcttccatcaggtccatttcggaggatctgtacaaggaagtgaagctgaagaacgtggtggagaagttcaagaaagcctccgacaacgaccgcttccgcaaaaaaaccggcatctacgaggacaccgttcggcgcctcgccggcgcccggcgcttccggtgggtccgcgacatcctcgagcaccagaagcagtactccgacatctccaacgagggcttctccgcgcgcctcaattccctctacggtaaatccggcatgaccaagcacgcgcgcaaggtgttcgacgaaatgccgcagcgaaactg

SEQ ID NO: 237272 - DNA, 345 bp, Glycine max
ggtgagtatcaacaagaatactcataataatatagtggctagcatagagctagtaataatattaatattgttaagctagctctaagccatggctaatgaacgtgatctgttctcggcggagattgtgaaccgtggaattgaatcgtcaggaccaaacgctgggtcgttgacgttttcggtgagggtgagaaggcgcttaccggattttcttcaatcggtgaaccttaagtacgtgaaattgggttaccattatctgataaaccatggcatatacttgttcaccataccggttcttctcgtggtgtttagtgctgaagttggaagcctcagcaaagaagaactatg

SEQ ID NO: 237273 - DNA, 317 bp, Glycine max; identical to SEQ ID NO: 235644

SEQ ID NO: 237274 - DNA, 388 bp, Glycine max
gaacaacagaaataaagcacaatggactacctttttcttcttccactaatcaccatagtgtggataagcattcatgtactcatctctagcttcaaaccactcaaatcttctaaaaatcccccggggcctcacccttttccaatcataggaaacatattggagcttggcaaccagcctcaccaagcacttgccaaactttctcaaatttatggtcctataatgagtcttaagctcggtaacactaccaccatagtcatttcctctccacaagttgccatagaagtactgcaaaaaaatgatcaaatcttagctaatagaatggtcccagactgtgttcgagcacttgaccatcacatactttcggttgcatggatgccacctttaccac

SEQ ID NO: 237275 - DNA, 395 bp, Glycine max
gaaggtgcaagagtttgttgtgagctataagctagtttatcgtgaggagaatatgaagttgtttgttttctttgttgctgcagtagttttggtagcatggccatgccatggcgcaggctaccaaaggttccctctccgaatgaaaactggctatggtgagcgttcttcggaggtaaaatgcgcaagttttaggcttgctgtggaagcacacaacatccgagcctttaaaaccattcctgaagagtgcgttgaaccaacaaaggactacattaatggcgaacaatttagatcagactctaaaacagttaaccaacaagctttcttttatgctagtgaacgccaagtccatcacaacgacatatttatattcggcatagataacaccgtactctcta

SEQ ID NO: 237276 - DNA, 404 bp, Glycine max
ggcacaagtgagtttgttgatcgagataactagaaacagtgtgatggaaatgaaggtccttgttttcttcgttgctacaattttggtagcatggcaatgccatgcgtacgatatgttccctctccgaatgaacactggctatggtgcccgtactccggaggtgaaatgcgcaagttggaggcttgctgtggaagcacacaacatctttggctttgagaccattcctgaagagtgcgttgaagcaacaaaggaatacatccatggcgaacaatatagatcagactccaaaacagttaaccaacaagcttacttttatgccagagaactcgaaatccatcccaaagacacatttgtgttcagtatacatggcaccgtactctctaatattccatactacacaaaac

SEQ ID NO: 237277 - DNA, 401 bp, Glycine max
ggcacaagtttgttgagatagctagaagcaataagatgaaaatgaaagtgcttgttttgtttgttgctacagttttggtagcatatgaatgccatggctcagactaccagaagttccctctccaaatgaaaactgggtttggtgggcaatacagcaatgaggtggcatgtgccagttggaggcttggcgtggaagcaaacaacgtagtcaagtggcaaactgttcctgcagcctgcggagagtacatagctgactacgttctaggagaccaatatagatcagattccaaaacagttaaccaacaagcttatttctatgctaaatccctcaaactcaccaacaaagatgtctttgtcttggacgttgacgacactactctctctaatctccagtattttgct

SEQ ID NO: 237278 - DNA, 363 bp, Glycine max
  unsure (1)..(363): unsure at all n locations
ggaacgcagctgagaagcagttgattttccgatcagaaaatctgaatcatgtcgtggcaagcgtacgtggatgatcacctgctgtgtgaaatcgaaggtaaccacctcactcacgccgctattatcggccacgacggcagcgtttgggctcagagcgccaacttccctcaggtaacgcttctagattcgccgatccctgagagtgttgattatatactgtgcaactatgtttgattttggtgtagttcaaagctgaggaaataactgctatcatgaatgactttaacgagcctggatcacttgctccaactggattgtttctcgctnngcacaaatacatggtcatccaaggccaccctggtg

SEQ ID NO: 237279 - DNA, 260 bp, Glycine max
ggaacctttgcattctattcattcaagattcagcaagtgcgttttggaagcagagaccgaaatacttcgagatggcccgtacaaagcaaactgctcgtaagtcaactggaggaaaagctcccaggaagcagcttgcaaccaaggctgcacgtaagtctgcaccaacaactggtggtgtgaagaagcctcatcgttatcgccctggaactgttgctcttcgtgagattatgaaataccagaagagcactgagctcctaatc

SEQ ID NO: 237280 - DNA, 383 bp, Glycine max
gacctcaccgagtcgcagcgatcgaagtttcacatcagccttatccagtttagggtttcggttccttaccctacctttgacgtatcgaaaccttaaatttgggattaggtctgagcaatctggttggtagaacctttggtcttagagagtcaagttttatgtctggattagacgatcaaattcctactgccttcgatccttttgctgatgcaaatgctgatgactcgggtgctgggtcaaaggagtatgtgcatattcgcgttcagcagcgaaatggtaggaaaagcctgacaaccgttcagggattgaaaaaaagaatcagctataacaagatacttaaagacgttaagaaagagttctgttgcaatggaacagttgttcag

SEQ ID NO: 237281 - DNA, 323 bp, Glycine max
  unsure (1)..(323): unsure at all n locations
aaaaaccacaaaaaggtaccgcttccaaaaaaccacaaaaaggtaccgcttccaaaaaaccacaaaaaggtaccgcttccaaaaaaccacaaaaaggtaccggttccaaaaaaccacaaaaaggttacggttccaaaaaaagaacaaaaaggtaacgggctgccaagaaagacgaacaaaaagggggaatatcgccttaacagtaaagaaggttgagaaaagagaagacaaaatccgcagaaagcaaagaagctgagagcgagagagcaactgcacgcactgtaactcctaacttcccagatcgtcntcttcctcttttctct

SEQ ID NO: 237282 - DNA, 294 bp, Glycine max
ggcacaagtgagtttgttgatcgagataactagaaacagtgtgatgaaaatgaaggtccttgttttcttcgttgctacaattttggtagcatggcaatgccatgcgtacgatatgttccctctccgaatgaacactggctatggtgcccgtactccggaggtgaaatgcgcaagttggaggcttgctgtggaagcacacaacatctttggctttgagaccattcctgaagagtgcgttgaagcaacaaaggaatacatccatggcgaacaatatagatcagactccaaaacagt

SEQ ID NO: 237283 - DNA, 382 bp, Glycine max
  unsure (1)..(382): unsure at all n locations
ggcgtacgcagcttcatccctaacgcgtgcatagcagagtcagagacagagacgcagccatagggcggagacctgcgaggtgttataggcaaattaagaacaagccataccccaagtcacgtttctgccgtggtgttcctgatcccaagatcaggatttatgatgttggtatgaagaagaagggtgttgatgagtttcctttctgtgtccatctggttagttgggagaaggaaaatgtttcaagtgaggccctggaagctgctcgcattgcttgcaacaagtacatggccaaatttgctggaaaggatgctttccacttgagagtcagggtgcanccattccatgttcttaagatcaacangatgctttcgtgtgctggtgc

SEQ ID NO: 237284 - DNA, 377 bp, Glycine max
gaagaagagaacgttcaagaagttcagttttcgaggcgtggatctcgatgcacttctcgacatgtccaccgatgaactcgtcaagatgttcagtgcccgcgctcgtagaaggttccagagaggcctcaccagaaagcccatggccttgatcaagaagctccgtaaagcgaaaagggaagctccaccaggtgagaagccagaaccagtacgcacccacctccgcaacatgattattgtgcctgagatgattggtagcattattggagtgtacaatggcaaaacctttaatcaggttgaaatcaaacctgagatgattgggcattatcttgctgagttttctatttcatacatacccgttaagcacggaagacctggta

SEQ ID NO: 237285 - DNA, 369 bp, Glycine max
gacacaccgtttgttctattcttaactcaacttctgctacccactctcttcttccaagtccaaccacgcttttctctacagtcatgggcaaggtcaagatcggaatcaacggatttggaagaattggccgtttggttgccagagtcgctctgcaaagagacgatgtggagctcgttgccgttaacgaccctttcattaccaccgattacatgacatacatgtttaaatacgacagtgttcacggacactggaagcatcacgatgtcaccgttaaggacgagaagacccttctcttcggtgacaagccagtcactgtttttggacacaggaaccctgacgagattccatgggggtcaactggagctgata

SEQ ID NO: 237286 - DNA, 379 bp, Glycine max
gacagaagagagagagagagagagagagagtcctgaaacttgggtgcgattccttcactcacaacaacaacacatcactatggctcttctgagtcgagcctcttcacgcttccctcagctggtttcccctcaaagggtagtttcactccacacaacgctcccatctctgaacgcatccccatccacagccacgcctacaccatatgccccgccaccgcctccgtccgcttcctctcccgccggcgtttcgaaggcggcggagttcgtgatctcgaaggtggacgatctgatgaactgggcccgccgcggctccatctggcccatgaccttcggcctcgcctgctgcgccgttcaaattgatcacaccggggccgcccgc

SEQ ID NO: 237287 - DNA, 394 bp, Glycine max
ggccgttgtagttgtagctgtagaagggtgagagaagatgtttcctcaggagaatcatagtaacggctatcagcatcagcagggttacagtcacagagagcgagtccgtcggggcacttgcaggtcacgtgcctccacttcctcacactctcactccgttagggtttacgaccaacctcgtcctccttgcactgatttcgacttgcctatttccattcctacgctcaccttggcatccaccaagagatgatcaaggatcgtgtgcgtactgatacttatagggatgcaatcatgcagcatcagagtttcattgcaggcaaagttgtcgttgatgttggatgccggacatgaatccctttctatattttgtgctcaggctggtgcagaacgggtg

SEQ ID NO: 237288 - DNA, 350 bp, Glycine max
ggcacaagtgagtttgttgatcgagataactagaaacagtgtgatgaaaatgaaggtccttgttttcttcgttgctacaattttggtagcatggcaatgccatgcgtacgatatgttccctctccgaatgaacactggctatggtgcccgtactccggaggtgaaatgcgcaagttggaggcttgctgtggaagcacacaacatctttggctttgagaccattcctgaagagtgcgttgaagcaataaaggaatacatccatggcgaacaatatatatcagactccaaaacagttaaccaataagcttaactttaggcaagagacctcgatgtccatcccaaggacacat

SEQ ID NO: 237289 - DNA, 384 bp, Glycine max
ggcacaagtgagtttgttgatcgagataactagaaacagtgtgatgaaaatgaaggtccttgttttcttcgttgctacaattttggtagcatggcaatgccatgcgtacgatatgttccctctccgaatgaacactggctatggtgcccgtactccggaggtgaaatgcgcaagttggaggcttgctgtggaagcacacaacatctttggctttgagaccattcctgaagagtgcgttgaagcaacaaaggaatacatccatggcgaacaatatagatcagactccaaaacagttaaccaacaagcttacttttatgccagagacctcgaagtccatcccaaggacacatttgtgttcagtatagatggcaccgtactctctaa

SEQ ID NO: 237290 - DNA, 364 bp, Glycine max
cggctcgagccacgcgtcagatgattatgggaggtggaaggtgtactagaaggtaaaagcatggtgcatgaagtggatttgaggttttggtttatatatgagtacagaggtgcacccctttggaattaaactggtcaccttcatcaatcttgtcactgtcaaccagtattgaagggggaaccaaatggttggtcaacaagttaaaaggaaagatgcaaaaggcattaacagagttgctaaaggagtatgatctacccatatgaatctttcctcgcgatgcgacaaactacgaatttaacgaagagacaggaaagcttgttgtttacattcctcaagtgtgtgaggttggctacagggattcgtc

SEQ ID NO: 237291 - DNA, 327 bp, Glycine max
agggggacaagttaatttgttgatcgagataactagaaacagtgtgatgaaaatgaaaggccttgttttcttcgttgccaaaattttggtagcatggcaatgccaatgcgtacgatatgttccctctccgaatgaacactggctatggtgcccgtactccggaggtgaaatgcgcaagttggaagcttgctgtggaagcacacaacatctttggctttgagaccattcctgaagagtgcgttgaagcaacaaaggaatacatccatggcgaacaatatagatcagactccaaaacagttaaccaacaagcttacttttatgccagag

SEQ ID NO: 237292 - DNA, 382 bp, Glycine max
gaagcaaaaccctaatccctctttcttcctcttcctcagtagtgcgattttcgattctcttctctgcaactatgcctaaccctaaggtcttcttcgacatgaccatcggcggtcaacctgccggccgcatcgtgatggagctctacgccgacgtgactccgagcaccgccgagaacttccgcgcgctctgcaccggcgagaagggcgccgggcggagcggcaagcccctccactacaaaggctcgtccttccaccgcgtgatcccgaacttcatgtgccaaggcggcgacttcaccgccggaaacggcaccggatgcgagtcgatctacggcgccaagttcgccgacgagaacttcgtgaagaagcacactggtcccggcat

SEQ ID NO: 237293 - DNA, 375 bp, Glycine max
gagagtacttagcgatctccgtgaatacatagtaacacaataaaccacctccgcgcgagccaccttacccagtgaaccctaccgcaccgaaacaaaaccctcgcaaaccctaaccctaatctcataggaacatggacggcgacgacgagacctcgggtccgatgatcgacgaaatctacgccaacggcggtggcgtcggcgacgacggagacaagcggagccgccgcgcaatcatgagcggcgaccagctcgacatcgaggcgtacgcggcgctatactcggggcgcacgaagatcatgaggctcctcttcttcgccgacaagatgaacaacgcggagacgcagctcgaggcgctgcgcatggcctacgacgaga

SEQ ID NO: 237294 - DNA, 375 bp, Glycine max
ggttctagtgtgtgattgtttgttgttgtaactcgttcttcttcttttgttgttctgtgtttgtgtttgttttttctctcacctgaaaatgtcttgctgcggtggtaactgtggttgcggaagctcctgcgagtgcggcaacggctgcagaggctgcaagatgtacccagacttgagctacactgagtcaaccatcaccgagaccttggtcatgggagtggcacctgttaaggctcaatttgagggtgctgaaatgggtgtgcccgctgagaacgatggctgcaaatgtggatcaaactgctcctgcaacccctgcacttgcaagtgaagtgttgggagagcaaccttcaaccagagatagcccttaattaggaa

SEQ ID NO: 237295 - DNA, 462 bp, Glycine max
ttcaacttgcagcgtctaggtaccggttaggaatctccggctcgacccacgcgtacgacggctgcgagaagacgacagaagggctacattacaatacctcgccccttatacaggagcagctctggctgaatattttatgtaccgtgaacgtcacactttaatcatttatgacgatctctccaaacaagcacaggcttatcgccaaatgtctcttctattacgaagaccacctggtcgcgaagcttatccaggggatgttttttatttacattcacgtcttttggaaagagccgctaaattaagttctcagttaggcgaaggaagtatgactgctttaccaatagttgaaactcaatcgggagatgtttcagcttatattcctactaatgtaatttccattacagatggccaaatattcttatctgccgatctaatcaatgctgggatcagacccgctaataa

SEQ ID NO: 237296 - DNA, 363 bp, Glycine max
ggcacaagtgagtttgttgatcgagataactagaaacagtgtgatgaaaatgaaggtccttgttttcttcgttgctacaattttggtagcatggcaatgccatgcgtacgatatgttccctctccgaatgaacactggctatggtgcccgtactccggaggtgaaatgcgcaagttggaggcttgctgtggaagcacacaacatctttggctttgagaccattcctgaagagtgcgttgaagcaacaaaggaatacatccatggcgaacaatatagatcagactccaaaacagttaaccaacaggcttacttttatgccagagacctcgaagtccatcccaaggacacatttgtgttcagtat

SEQ ID NO: 237297 - DNA, 354 bp, Glycine max
ggattaatactaggtttctgtaaaatcgcaaagaaacacacagttagcaccgtcaacctctgcgaccagcgattccaaccatgcttcccctttcccttctcaagactgcccaaggccaccccatgctggtggaactgaaaaatggggagacttataacgggcacttggctaattgtgatacatggatgaacatcgatctccgagaagtcatttgtacctctaaagatggagatagattttggcgtatgcctgagtgctacattcgtggcaataccattaagtaccttcgggttcctgatgaggttattgacaaagtccaggaagaatcagagagccgtactgattgcaaaaccc

SEQ ID NO: 237298 - DNA, 394 bp, Glycine max
gacaccaacaccaaaacaaacccactaagatggcttcccttgtatccttcctagtgctgcttcttgcagcccttatcctcatgcctcaagggcttgctacttactacaaaccaattaagaagccaccagtgtacaagcctccagtgtacaagccaccagtgtacaaaccaccggtttataagccaaaaccaccggtttacaagccgaaaccaccggtttacaagccaccatataagaagccaccatacaagaaaccaccttatggaaagtaccctccagtagaggacaacacccatgcctaaagcaagcaatgaggtctattatctacttaataaataaaaagaactgctttgtgttttccagcattgtgatttacaacttcgtagcaatgcat

SEQ ID NO: 237299 - DNA, 369 bp, Glycine max
  unsure (1)..(369): unsure at all n locations
gacttctcttcacacctttgttcactcttcttctcttgcggctagggttttagcgcagcttcttctagatttaaggaagatgggtaaggaaaaggttcacatcagtattgtggtcattggccatgtcgactctgggaaatccactaccactggtcacctgatttacaagcttggaggcattgacaagcgtgttattgagaggtttgagaaggaagctgctgagatgaacaagaggtctttcaagtatgcctgggtgctggacaaacttaaggctgagcgtgaaagaggaatcaccattgatattgctttgtggaagtttgaaacaacanagttatattgcacagttattgatgcgcctggacataggga

SEQ ID NO: 237300 - DNA, 368 bp, Glycine max
cttccaccgttgtttgcagatacacctaatgcagttcatgaattaacaataccaagggatatatacgagcatgctgttgtccttagtgtgaaaaatgaggatcaagatgcttttgaaagggatttcttccagttgaagccttattatacatatgcctgcaatcgacttccaccatctcctcaggagtacccaattctgggtctcaacctgttgagattacttgtgcagaataggattgctgaattccatactgagttggaattgctttcatctgctgctcttgagaatccttgcattaagcatgctgtggagttggcacaatcttttatggaatgggcttacaatcgtgtcttgagtgcaagacacac

SEQ ID NO: 237301 - DNA, 308 bp, Glycine max
ggcacaattgagtttgttgatctatatatctagaaacaatgtgatcaacataaaggtccttgctatcttacatgtcaaaattttggtatcattgaaatgccatccctatcatacgttcccacaccgaatgaacaatgtctatggtactcgtatcccggaagtaaaatgcccacattagaggcttgctgttggaacataaaacatcattggcattgacaccattcctgaacagtgcgttgacacaacaaaagaatacatccaaggcgaccaatatacatcacactccaacacagttaatcaacaagctt

SEQ ID NO: 237302 - DNA, 422 bp, Glycine max
ggctcgagccacgcgtcaggacagaaggggacttcagagttaagttgagaacataccaatctacaataaacgatgattctcattatctccctcattttttctcttctctctttctcccatgcttctgtcctagatttctgtgttgcagattatgcaggtcctattggacctgcaggatattcctgcaagaagccttcaaaggtcacagcagatgattttgcttacagtggccttggcattgctggtaacacctcaaacattatcaaagctgcagtgacccctgcatttgatgctcagtttgctggtctcaacggtcttggcatttccgcagcacgtttggacttagcagcaggtggagttataccacttcacactcatcctggagcttcagaattacttgttgtaattgaagggagcatcct

SEQ ID NO: 237303 - DNA, 343 bp, Glycine max
aggggaagcacaagtttgtttagaaaaccaaaaacaataagatgaaaatgaaagtgcctgttttgtttgttgctacagttttggtagcatatgaatgccatggctcagactaccagaagttccctctccaaatgaaaactgggtttggtgggcaatacagcaatgaggtggcatgtgccagttggaggcttggcgtggaagcaaacaacgtagtcaagtggcaaactgttcctgcagcttgcggagagtacatagctgactacgttctacgagaccaatatagatcagattccaaaacagttaaccaacaagcttatttctatgctaaatccctcaaactcac

SEQ ID NO: 237304 - DNA, 381 bp, Glycine max
ggcacaagtgagtttgttgatcgagataactagaaacagtgtgatgaaaatgaaggtccttgttttcttcgttgctacaattttggtagcatggcaatgccatgcgtacgacatgttccctctccgaatgaacactggctatggtgcccgtactccggaggtgaaatgcgcaagttggaggcttgctgtggaagcacacaacatctttggctttgagaccattcctgaagagtgcgttgaagcaacaaaggaatacatccatggcgaacaatatagatcagactccaaaacagttaaccaacaagcttacttttatgccagagacctcgaagtccatcccaaggacacatttgtgttcagtatagatggcaccgtactctc

SEQ ID NO: 237305 - DNA, 291 bp, Glycine max
cttctaaaggttaaccagattggtacagtgaccgaatctattcaggctgcacttgactcaaaggctgcaggttggggtgtcatggttagtcatcggagtggcgagactgaggataacttcatcgcggatctctctgttggcttggccagtggacagataaagactggtgctccttgccgaggtgagcgattggcaaagtataatcagcttcttcggattgaagaggaacttggaagcgtgcgatatgctggtgaaactttcagatcaccttaaagtgaactcaattgatcc

SEQ ID NO: 237306 - DNA, 377 bp, Glycine max
gatagtgctaggaaagtgagtgagagaaagagatcacatagcagaatggcttctactcaatgtttcttgcaccaccatgctcttaccacccctgccagatccccatcacaacgcatcatggttagcaccaagcctaaccagcttgtttgcaaggcacagaagcaagaggatattgatgtcagcccaatctctcgccggttagctctaaccgtgctcattggtgctgctgctgttggctccaaagtccaacctgctgatgcagcttatggggaagctgccaatgtgtttggaaagccaaagacagacacagatttcctgccatacaatggagatggattcaaactatcgattccctcaaagtggaacccaagcaaaga

SEQ ID NO: 237307 - DNA, 300 bp, Glycine max
gataatatattggcatggtaagtcctcaatttggtcccgaatcgcacctcaccacaacctctctttctcgtctccgtccgtgcaacctgggaagcaatggcatggagaggaaatcttttgaaaaacataaaagaacttcggtttttgatgtgccagtcatcacctgcaagctcacccacaagggcttttgtggaaaggaattataaggaactaaagacattgaacccaaaattgcccatattaatccgtgagtgcagtggagttgaaccccaattatgggcaagatatgaattggggtgt

SEQ ID NO: 237308 - DNA, 333 bp, Glycine max
gacctctcttattgttgttctcttcttcttttcttgtttccttttccattcttctttttctctctgtactcaaactcacgtccccacttagttatacaatgtcggcttagaaagaccaggatacccgtcttcatggcatcaatactaagattcgtgtcgtcaccaatttccccaaatccggtattatgttccaagacattactactcgattgcttgatcccaaagcatttatggacacaatagatttgttcgttgagcggtacaagggcaaaaacatttctgttgttgcatgaattgaagctccaggttttatttttggtcgtcccattgcgc

SEQ ID NO: 237309 - DNA, 393 bp, Glycine max
gaaggtgcaagagtttgttgtgagctataagctagtttatcgtgaggagaatatgaagttgtttgttttctttgttgctgcagtagttttggtagcatggccatgccatggcgcaggctaccaaaggttccctctccgaatgaaaactggctatggtgagcgttcttcggaggtaaaatgcgcaagttttaggcttgctgtggaagcacacaacatccgagcctttaaaaccattcctgaagagtgcgttgaaccaacaaaggactacattaatggcgaacaatttagatcagactctaaaacagttaaccaacaagctttcttttatgctagtgaacgcgaagtccatcacaacgacatatttatattcggcatagataacaccgtactctc

SEQ ID NO: 237310 - DNA, 354 bp, Glycine max
ggccagaaaggaggcagagaccgagagagcaactgcacgcactgtaactctctcaccgtttcttccgctttgatggaacaggttggtaaaacgcatgcgttttgaagcttccattccatttcagtttcgattttcgattcttttccctctactctgcagtacgagaaggttgagaagataggcgagggaacatacggcgtcgtttacaacggtcgcgaccgctccaccaacgagaccatcgccttgaagaagattcgcttggagcaggacgatgacggggttcccagcaccgccattcgcgagatttctctcttgaaacaaatgcagcacacggacattgttaagtttcaggat

SEQ ID NO: 237311 - DNA, 389 bp, Glycine max
aaacgcggcggtgaggtctaaaatgagcggcggcgagggagttgcggtcaccgggaattctggtcggaaagggacgctgagatacagagaatgtcagaagaaccacgccgtcagcattggaggccaagccgtcgacggctgctgcgagtttttggccgccggggaggaaggtacgctggaggccgtaatttgcgccgcctgcaactgccaccgtaatttccaccgcaaggagatcgacggcgaaaccagcccttaccggcagcgttcgcagccgcagcctcagcctctgcaccctcagtaccaccaccaattctccccttactaccagcgcgccccaacaccttccggctgccgggtacctccaccaccacctggtaactcctccggtg

SEQ ID NO: 237312 - DNA, 391 bp, Glycine max
ggcacaagtgagtttgttgatcgagataactagaaacagtgtgatgaaaatgaaggtccttgttttcttcgttgctacaattttggtagcatggcaatgccatgcgtacgatatgttccctctccgaatgaacactggctatggtgcccgtactccggaggtgaaatgcgcaagttggaggcttgctgtggaagcacacaacatctttggctttgagaccattcctgaagagtgcgttgaagcaacaaaggaatacatccatggcgaacaatatagatcagactccaaaacagttaaccaacaagcttacttttatgccagagacctccaagtccatcccaaggacacatttgtgttcagtatagatggcaccgtactctctaatattcca

SEQ ID NO: 237313 - DNA, 311 bp, Glycine max
ggcacaagtgagtttgttgatcgagataactagaaacagtgtgatgaaaatgaaggtccttgttttcttcgttgctacaattttggtagcatggcaatgccatgcgtacgatatgttccctctccgaatgaacactggctatggtgcccgtactccggaggtgaaatgcgcaagttggaggcttgctgtggaagcacacaacatctttggctttgagaccattcctgaagagtgcgttgaagcaacaaaggaatacatccatggcgaacaatatagatcagactccaaaacagttaaccaacaagcttact

SEQ ID NO: 237314 - DNA, 298 bp, Glycine max
gaaggtgcaagagtttgttgtgagctagaagctagtttatcgtgaggagaatatgaagttgtttgttttctttgttgctgcagtagttttggtagcatggccatgccatggcacaggctaccaaaggttccctctccgagtgaaaactggctatggtgagcgttcttcggaggtaaaatgcgcaagttttaggcttgctgtggaagcacacaacatccgagcctttaaaaccattcctgaagagtgcgttgaaccaacaaaggactacattaatggcgaacaattttagatcagactc

SEQ ID NO: 237315 - DNA, 382 bp, Glycine max
gatgtcatagtattatcattcattctcatctttctctcttctctctccacccaaaccctaactcccgaccctgttcccctctcgtatccgtcatgaaaggaggaaagtccaagaccgaatctaagagagccgatcccaaacttgctgtgaataagaagggagccgccaccaaggctaggaaacccgccggcaaggggaaggcagcgaaagaccctaacaagccaaagaggcctccaagtgctttcttcgttttcatggaggagttcaggaaggtattcaacatagaacatcctgaaaacaaagcagtgtctgctgtgggcaaagctgctggagcaaaatggaagaccatgtctgatgctgaaaaagcaccttatgtggcaaa

SEQ ID NO: 237316 - DNA, 380 bp, Glycine max
ggcacaagtgagtttgttgatcgagataactagaaacagtgtgatgaaaatgaaggtccttgttttcttcgttgctacaattttggtagcatggcaatgccatgcgtacgatatgttccctctccgaatgaacactggctatggtgcccgtactccggaggtgaaatgcgcaagttggaggcttgctgtggaagcacacaacatctttggctttgagaccattcctgaagagtgcgttgaagcaacaaaggaatacatccatggcgaacaatatagatcagactccaaaacagttaaccaacaagcttacttttatggcagagaactcgaggtccaatccaaggacacatctgtgtccagtatagatggcaccgtactct

SEQ ID NO: 237317 - DNA, 425 bp, Glycine max
  unsure (1)..(425): unsure at all n locations
ccggctcgacccacgcgtacgacgcgagaagagacagaagggggcacaagtttgttgagatagctagaagcaataagatgaaaatgaaagtgcttgttttgtttgttgctacagttttggtagcatatgaatgccatggctcagactaccagaagttccctctccaaatgaaaactgggtttggtgggcaatacagcaatgaggtggcatgtgccagttggaggcttggcgtggaagcaaacaacgtagtcaagtggcaaactgttcctgcagcttgcggagagtacatagctgactacgttctaggagaccaatatagatcagattccaaaacagttaaccaacaagcttatttctatgctaaatccctcaaactcaacaacanagatgtctttgtcttggacgttgacgacactactctctct

SEQ ID NO: 237318 - DNA, 366 bp, Glycine max
ggcattttgtgaaaaaaaataaaaaatggggataggggtactatttgttgggtttttcttgctatcttgtgttgtgtgtgtgaagggtgtggagccaaaagcctcacccacttgtacatttccggcagtttacaactttggggactcaaactcagacactggaggcatatcagctccatttgtgccaattcctgcaccttatggcgagggcttctttcacaagccttctggaagggactgtgatggccgtctcattgtagatttcatagctgagaagctaaacttgccatacttaagtgcttatctgaattcccttggaaccaatttaccggcatggggcaaaatttgccactgggggatccacca

SEQ ID NO: 237319 - DNA, 351 bp, Glycine max
gggaacctgatctcttgctggttgccacactacaccgatatttccaccaaacccgtttgcgttgttgtttgcgaataaatggcaactaagaggagcgtgggaacgttgaaggagggtgatttgaaggggaagagggtattcgtgagggtcgatctgaacgtgcctttggatgacaaccttaacatcaccgatgacactagagtccgtgctgctgttcccaccatcaagtacttgactggttatggtgctaaagtgatcctttctagccatttgggacatccaaaaggtgtaacacctaaatacagttgaaaccctcttgtgccaaggctgtctcaacttcttggaattgag

SEQ ID NO: 237320 - DNA, 394 bp, Glycine max
agtgcacaagtgagtttgttgatcgagataactagaaacagtgtgatgaaaatgaaggtccttgttttcttcgttgctacaattttggtagcatggcaatgccatgcgtacgatatgttccctctccgaatgaacactggctatggtgcccgtactccggaggtgaaatgcgcaagttggaggcttgctgtggaagcacacaacatctttggctttgagaccattcctgaagagtgcgttgaagcaacaaaggaatacatccatggcgaacaatatagatcagactccaaaacagttaaccaacaagcttacttttatgccagagacctcgaagtccatcccaaggaaacatttgtgttcagtaaagatggcaccgtactctctaatattccat

SEQ ID NO: 237321 - DNA, 387 bp, Glycine max
ggcacaagtttgttgagatagctagaagcaataagatgaaaatgaaagtgcttgttttgtttgttgctacagttttggtagcatatgaatgccatggctcagactaccagaagttccctctccaaatgaaaactgggtttggtgggcaatacagcaatgaggtggcatgtgccagttggaggcttggcgtggaagcaaacaacgtagtcaagtggcaaactgttcctgcagcttgcggagagtacatagctgactacgttctaggagaccaatatagatcagattccaaaacagttaaccaacaagcttatttctatgctaaatccctcaaactcaccaacaaagatgtccttgtcttggacgttgacgacactactctctctaatc

SEQ ID NO: 237322 - DNA, 295 bp, Glycine max
gacatcacatcacatcgcagagagagagagatccatcgatcaattaatttccaatggccgatcagctcaccgacgaacagatctctgagttcaaggaagcctttagcctcttcgacaaggacggcgatggttgtattaccaccaaggaacttgggactgtgatgcggtcgcttgggcagaacccaactgaggctgagctgcaggacatgataaatgaggttgatgctgatgggaatggtaccattgatttcccagaattcctcaatctcatggcgcgcaagatgaaagacactga

SEQ ID NO: 237323 - DNA, 377 bp, Glycine max
ggcacaagtgagtttgttgatcgagataactagaaacagtgtgatgaaaatgaaggtccttgttttcttcgttgctacaattttggtagcatggcaatgccatgcgtacgatatgttccctctccgaatgaacactggctatggtgcccgtactccggaggtgaaatgcgcaagttggaggcttgctgtggaagcacacaacatctttggctttgagaccattcctgaagagtgcgttgaagcaacaaaggaatacatccatggcgaacaatatagatcagactccaaaacagttaaccaacaagcttacttttatgccagagacctcgaagtcaatcccaaggacacatttgtgttcagtatagatggcaccgtac

SEQ ID NO: 237324 - DNA, 368 bp, Glycine max
acgcgtcaggccgcacagattccgtccggggaacgtagcgctccgcgagattcggaagtaccagaagagcacggaacttctgatccggaagctcccgttccagcgattggtccgtgagatcgcgcaggacttcaagaccgaccttcgatttcagagctccgccgtcttcgccctccaggaagccgccgaggcctacttggttggtctcttcgaagacaccaatctctgcgctattcacgccaagcgtgtcactatcatgcccaaggatattcaactcgctaggcgtattatgggcgagcgcgcttaaatctaattattgattctctgtatagacgatttcaatttcaagcgttcttagttagaacttt

SEQ ID NO: 237325 - DNA, 375 bp, Glycine max
gcacaagtgagtttgttgatcgagataactagaaacagtgtgatgaaaatgaaggtccttgttttcttcgttgctacaattttggtagcatggcaatgccatgcgtacgatatgttccctctccgaatgaacactggctatggtgcccgtactccggaggtgaaatgcgcaagttggaggcttgctgtggaagcacacaacatctttggctttgagaccattcctgaagagtgcgttgaagcaacaaaggaatacatccatggcgaacaatatagatcagactccaaaacagttaaccaacaagcttacttttatgccagagacctcgaagtccatcccaaggacacatttgtgttcagtatagatggcaccgta

SEQ ID NO: 237326 - DNA, 377 bp, Glycine max
gagcgtttttcattgtgcattattcaatggccaccacagcagctctatccggaaccatggtgagcacctccttcatgaggaagcaacctatgacgaccaagagcctaaagacattccccaacgctctttttggtctgaaaggtggacgaggtggtcgtgtaacttgcatggcctcgtacaaggtgaagctcataaccccagaaggagaagtggagtttgaatgcccagatgatgttttcattgttgacaaggctgaggaagaaggcattgaacttccctactcgtgcagggctggttcttgcgtttcatgtgttgggaaaattgtgaaaggtgacgtggaccattcagatggtagcttccttgatgatgaacaaata

SEQ ID NO: 237327 - DNA, 380 bp, Glycine max
ggcacaagtgagtttgttgatcgagataactagaaacagtgtgatgaaaatgaaggtccttgttttcttcgttgctacaattttggtagcatggcaatgccatgcgtacgatatgttccctctccgaatgaacactggctatggtgcccgtactccggaggtgaaatgcgcaagttggaggcttgctgtggaagcacacaacatctttggctttgagaccattcctgaagagtgcgttgaagcaacaaaggaatacatccatggcgaacaatatagatcagactccaaaacagttaaccaacaagcttacttttatgccagagaactcgaagtcaatcccaaggacacatttgtgttcagtatagatggcaccgtactct

SEQ ID NO: 237328 - DNA, 378 bp, Glycine max
gggcacaagtgagtttgttgatcgagataactagaaacagtgtgatgaaaatgaaggtccttgttttcttcgttgctacaattttggtagcatggcaatgccatgcgtacgatatgttccctctccgaatgaacactggctatggtgcccgtactccggaggtgaaatgcgcaagttggaggcttgctgtggaagcacacaacatctttggctttgagaccattcctgaagagtgcgttgaagcaacaaaggaatacatccatggcgaacaatatagatcagactccaaaacagttaaccaacaagcttacttttatgccagagacctcgaagtccatcccaaggacacatttgtgttcagtatagatggcaccgtac

SEQ ID NO: 237329 - DNA, 388 bp, Glycine max
gaaggtgcaagagtttgttgtgagctataagctagtttatcgtgaggagaatatgaagttgtttgttttctttgttgctgcagtagttttggtagcatggccatgccatggcgcaggctaccaaaggttccctctccgaatgaaaactggctatggtgagcgttcttcggaggtaaaatgcgcaagttttaggcttgctgtggaagcacacaacatccgagcctttaaaaccattcctgaagagtgcgttgaaccaacaaaggactacattaatggcgaacaatttagatcagactctaaaacagttaaccaacaagctttcttttatgctagtgaacgcgaagtccatcacaacgacatatttatattcggcatacataacaccgta

SEQ ID NO: 237330 - DNA, 390 bp, Glycine max
gagtgaagaacaagtcttgcattgggtggagcatacttagaaacagcaactatgtctctcatgcagcttactagctcccctgttggctcactggtccgtttcattgtaatatttgctttatggtacagaaccatggctttggccaagttgccaccaaacgcttcatcagttccagcagttttagcgtttggagattccatcgtggacccaggcaacaacaacaacataaaaacattgatcaagtgcaacttcccaccttatggaaaggattttcagggaggaaacccaacgggtcgattttgcaatggaaaaattccttctgacttaatagttgaacaattgggtattaaggagtatttgcctgcatatttggatccgaatctcaaatct

SEQ ID NO: 237331 - DNA, 410 bp, Glycine max
ctcccgggctgacccacgcgtcagggggtgctgtgagtgagacaccgatagatagagagcgcggcataacctaaacctatctttcttctctctctgtgtgtgcgcttcaacggcaaccagaagcagccatggccactgcaaggactgtgaaggatgtttcacctcatgagttcgttaaggcgtactcctctcacctcaagcgatccggcaagatggagctgccagagtggactgatattgtgaaaactgcaagatttaaggagttggctccttatgatcctgactggtactatgtcagagctgcttccatggcaagaaagatctacttgagaggaggacttggtgttggtgcctttcagaggatttatggtgggagcaacaggaatgggaatccgcctcctcatttttgc

SEQ ID NO: 237332 - DNA, 292 bp, Glycine max
gaactcaaacaacaaaaataagacattgtttggtttggttacttgctcgaatttcctcgaatcgcttaatttgtatttgattagttaaaccgcaacgcggaatctcttttctcgaactggctaactctcaggcaagtggttcggacgctgattccagcaacaagcggctggtgctcgcactgtatgacgccctaaactccggcgactccgacgccgtcgtcaagatcgtcgccgccgacctcgagtggtggttccatggtccgccctcacaccagtttttgatgcgcatgct

SEQ ID NO: 237333 - DNA, 381 bp, Glycine max
gctcctcctttgtggtgtcgagctgagaataccagttgctccagtagccggcactaaacaacatggcggacaaggcagtcaccatccgaaccaggaagtttatgacgaacaggcttctctccagaaagcagttcgtcgttgatgtccttcatccaaggagggctaatgtttccaaggctgaactgaaggagaagctgggaagaatgtatgacgtgaaagacaccaacactgtatttgtcttcaagttccgaactcattttggtggtggcaagtccactgggtttggtttgatctatgattcagttgagaatgctaagaaatatgaccctaaatacaggcttatcaggaatggacttgataccaaagtagagaaatcaagga

SEQ ID NO: 237334 - DNA, 336 bp, Glycine max
  unsure (1)..(336): unsure at all n locations
gattccaatttaaatcaaaatcaaaaacaacaaatcctccaaatcaagtttgcaacaagttttcctgaaaaaatgtccgggccttgaaaaggttgaaaaggtttgggaaaaggaagtgccaanaggcacaagaaggttcttcgcgacaacattcaaggcattacgaaacctgcgattcgtaggttagcgagaagaggtggcgtgaagaggatcagtggtttgatctacgaggaaaccagaggggttctgaagatattcttggagaacgtgattcgcgatgctgtgacttataccgagcacgctangaggaagacggttactgccatggatgttgtt

SEQ ID NO: 237335 - DNA, 294 bp, Glycine max
tgggacacacagtctcttcttcttgcaattccttcctcgttatggagtcccgagtgctgtcactcgccgtgaacttgtcctccctggctcaggtccggaaggtgccgcgggaagacgtctcgatcgtctccctcgctctccgtgaatgacgtgggctccgtctcggacggcagaaacatgatttgggggaagcagcttcactcggatctctgatcaccagtgctgaagagtgatgctgtcctcctccggcaatgctactccgcagcctcttcgcctagcacgaaggtagtgatt

SEQ ID NO: 237336 - DNA, 380 bp, Glycine max
ggaacctttgcattctattcattcaagattcagcaagtgcgttttggaagcagagaccgaaatacttcgagatggcccgtacaaagcaaactgctcgtaagtcaactggaggaaaagctcccaggaagcagcttgcaaccaaggctgcacgtaagtctgcaccaacaactggtggtgtgaagaagcctcatcgttatcgccctggaactgttgctcttcgtgagattaggaaataccagaagagcactgagctcctaatcaggaagcttcctttccagaggttggttcgtgaaattgcccaggatttcaagactgatctgcgtttccaagagcaatgctgtgcttgcattgcaagaggctgctgaggcataccttgttgg

SEQ ID NO: 237337 - DNA, 362 bp, Glycine max
ggccctttcgcctacgcactgcggagagagaaattgagtttccgagataaccagttttctctttgattcatcaatggcaactgcgaggaccgtgaaggatgtttcgcctcacgatttcgtgaaggcttatgcttcccacctcaagcgttccggcaagatggagcttcctgagtggaccgatattgtaaaaacagcaaaatttaaggagttggctccatatgatcctgactggtactacattaaggctgcctcaatggcaagaaagatctatttgagaggtggtcttggtgttggtgctttccaaaggatctatggtggaagcaaaagaaatggaagccgtcccccacatttctgcaagagca

SEQ ID NO: 237338 - DNA, 432 bp, Glycine max
aattcccggctcgacccacgcgtacggcgtttcactcggatcgcgcattcacaaataaggttgaagaggtcactgccggaagaagggagcaacaccatctttcattttccggcgatctcttgtttcttccatcatcaccgttttccggcgatccctaatcctcgcaaacagaaatgacgacatcaaggcgccttgcggacaggaaggtggagaagtttgagaagaacatcacaaaaagaggatttgtgccagacactaccactaagaagggaaaagactaccctgttggcccagtgctgctcggtttcttcgtctttgttgtcattggatcatctctcttccagataatcaggacagcaacgagtggaagcaatgccttaaatggaccttggttttggattttgtgtcatcttctctttcttagcctcctcg

SEQ ID NO: 237339 - DNA, 390 bp, Glycine max
ggcacaagtgagtttgttgatcgagataactagaaacagtgtgatgaaaatgaaggtccttgttttcttcgttgctacaattttggtagcatggcaatgccatgcgtacgatatgttccctctccgaatgaacactggctatggtgcccgtactccggaggtgaaatgcgcaagttggaggcttgctgtggaagcacacaacatctttggctttgagaccattcctgaagagtgcgttgaagcaacaaaggaatacatccatggcgaacaatatagatcagactccaaaacagttaaccaacaagcttacttttatgccagagacctcgaagtccatcccaaggacacattttgtgtcagtttagatggcaccgtactctccaatattcc

SEQ ID NO: 237340 - DNA, 346 bp, Glycine max
  unsure (1)..(346): unsure at all n locations
aaatgaaaattgcttgtttttgtttgttgctacagttttggtagcatatgaatgccatggctcagactaccagaagttccctctccaaatgaaaactgggtttggtgggcaatacagcaatgaggtggcatgtgccagttggaggcttggcgtggaagcaaacaacgtagtcaagtggcaaactgttcctgcagcttgcggagagtacatagctgactacgttctaagagaccaatatagatcagattccaaaacagttaaccaacaagcttatttctatgctaaatccctcaaactcacaaacanagatgtctttgtcctggacgttgacgacactactctctct

SEQ ID NO: 237341 - DNA, 407 bp, Glycine max
  unsure (1)..(407): unsure at all n locations
aagacgacagaagggggaacggaaaagcactggcgcagctaccctgaggcttctcttctcttctcttccctgtcgtgagtcaccatggtgagggttagtgtgctgaacgatgctctgaagagcatgtacaatgctgagaaaaggggaaagcgccaagtcatgattaggccatcctccaaagtcattatcaaattccttttggtgatgcaaaagcacggatacatcggagagtttgagtatgttgatgaccacagggctggtaaaatcgtggttgaattgaacggtagactgaacaagtgtggggttattagtccccgttttgatgtgggcgtcaaagagatttaanggttggactgctaggcttctcncctcaagacagtttgggtatattgtattgactacctctg

SEQ ID NO: 237342 - DNA, 378 bp, Glycine max
gaacagccacaacactttccacttgtctccgaattagttatcttgagaaacattattcccattgctatatattatggctagcatgaaggttacatgggtggttgtgatcatgtgcatggccgtggtgggtgcaccgatgatggcgcaagccatgacatgcaatgatgtgacggtgaacatggcacagtgcctatcctacctgatgcagggaggaacaccttcaacactttgctgcagcggagtcaagaacattcttggctctgctgtcaccaccgttgacaaacaaactgtgtgcaactgtctcaaggcggatgctgctaggtacaacatcaatgaccagtatgctcaagcactccctggtttctgcaaggtcaatgt

SEQ ID NO: 237343 - DNA, 379 bp, Glycine max
ggcacaagtgagtttgttgatcgagataactagaaacagtgtgatgaaaatgaaggtccttgttttcttcgttgctacaattttggtagcatggcaatgccatgcgtacgatatgttccctctccgaatgaacactggctatggtgcccgtactccggaggtgaaatgcgcaagttggaggcttgctgtggaagcacacaacatctttggctttgagaccattcctgaagagtgcgttgaagcaacaaaggaatacatccatggcgaacaatatagatcagactccaaaacagttaaccaacaagcttacttttatgccagagaactcgaagtccatcccaaggacacatttgtgttcagtatagatggcaccgtactc

SEQ ID NO: 237344 - DNA, 379 bp, Glycine max
  unsure (1)..(379): unsure at all n locations
ggtgcacaagtgagtttgttgatcgagataactagaaacagtgtgatgaaaatgaaggtccttgttttcttcgttgctacaattttggtagcatggcaatgccatgcgtacgatatgttccctctccgaatgaacactggctatggtgcccgtactccggaggtgaaatgcgcaagttggaggcttgctgtggaagcacacaacatctttggctttgagaccattcctgaagagtgcgttgaagcaacanaggaatacatccatggcgaacaatatagatcagactccaaaacagttaaccaacaagcttacttttaatgcagagacctcgaagtcaatcccagggacacatttgtgttcagtatagatggcaccgtac

SEQ ID NO: 237345 - DNA, 240 bp, Glycine max
gaattctcgtcatacatttgttcaatcttcatcacttgcgtctagggattaaacgcagcttcatctagatttaaggcatatgggtaaagatgacgttcacatcagtattgtagacactcgcaatgtcaactctgggaaatcgatgaccattggtcagctgaattacaagcttgtgtgcattgaccacagtgttattgcaatggttgtgaaggacaccgctgaattgaaaattaggtcttt

SEQ ID NO: 237346 - DNA, 351 bp, Glycine max
ggcacaagtgagtttgttgatcgagataactagaaacagtgtgatgaaaatgaaggtccttgttttcttcgttgctacaattttggtagcatggcaatgccatgcgtacgatatgttccctctccgaatgaacactggctatggtgcccgtactccggaggtgaaatgcgcaagttggaggcttgctgtggaagcacacaacatctttggctttgagaccattcctgaagagtgcgttgaagcaacaaaggaatacatccatggcgaacaatatagatcagactccaaaacagttaaccaacaagcttacttttatgccagagacctcgaagtccatcccaaagacacatt

SEQ ID NO: 237347 - DNA, 394 bp, Glycine max
gaaggtgcaagagtttgttgtgagctataagctagtttatcgtgaggagaatatgaagttgtttgttttctttgttgctgcagtagttttggtagcatggccatgccatggcgcaggctaccaaaggttccctctccgaatgaaaactggctatggtgagcgttcttcggaggtaaaatgcgcaagttttaggcttgctgtggaagcacacaacatccgagcctttaaaaccattcctgaagagtgcgttgaaccaacacaggactacattaatggcgaacaatttagatcagactctaaaacagttaaccaacaagctttcttttatgccagttgaacccaagtccaaccacaacacatatttataattcggcatagataacaccgtactctc

SEQ ID NO: 237348 - DNA, 335 bp, Glycine max
gaaggtgcaagagtttgttgtgagctataagctagtttatcgtgaggagaatatgaagttgtttgttttctttgttgctgcagtagttttggtagcatggccatgccatggcgcaggctaccaaaggttccctctccgaatgaaaactggctatggtgagcgttcttcggaggtaaaatgcgcaagttttaggcttgctgtggaagcacacaacatccgagcctttaaaaccattcctgaagagtgcgttgaaccaacaaaggactacattaatggcgaacaatttagatcagactctaaaacagttaaccaacaagctttcttttatgctagtg

SEQ ID NO: 237349 - DNA, 398 bp, Glycine max
gcacaagtgagtttgttgatcgagataactagaaacagtgtgatgaaaatgaaggtccttgttttcttcgttgctacaattttggtagcatggcaatgccatgcgtacgatatgttccctctccgaatgaacactggctatggtgcccgtactccggaggtgaaatgcgcaagttggaggcttgctgtggaagcacacaacatctttggctttgagaccattcctgaagagtgcgttgaagcaacaaaggaatacatccatggcgaacaatatagatcagactccaaaacagttaaccaacaagcttacttttatgccagagacctcgaagtccatcccaaagacacatttgtgttcagtatagatggcaccgtaccctctaatattccatactacaa

SEQ ID NO: 237350 - DNA, 378 bp, Glycine max
  unsure (1)..(378): unsure at all n locations
ggatacccaactttccgtgccacaccttccatcaagagtactgaaaccatataaaaccttaggccacattcatagttgtagagaagcttgcaatggccaaagactacggagaagttgagttgtttggtgtggggggaagcccttttgccagaagggtgcagattgccctggaactgaagggagtccaatacacttactttgaagaagatcttaggaacaagagtgatcttcttatcaaatacaaccctattcacaagaaggtacctgtgcttgtccacaatggaagaccattggctgagtcccttgtgatccttgaatacattgatgagacatgggagaaccnccaccccatcttgcctcaacaaccttatgatagag

SEQ ID NO: 237351 - DNA, 367 bp, Glycine max
gattgttggcttgtgctctgctcgtgcctctagggttatcatatctccatttccatttcctctctctcagtttccaagaaccttaagctatgggaaagtcttacccaaccgtgagcgctgattaccagaaggccgttgagaaggcgaagaagaagctctgaggcttcatcgctgagaagagatgcgctcctctaatgctccgtttggcatggcactctgctggaacttacgacgtgagctcgaagaccggtggtcccttcggaaccataaagcacccctccgaactcgctcacggcgctaacaacggtcttgacatcgctgttaggcttttggagccactcaaagcggagtttcctattttgagcta

SEQ ID NO: 237352 - DNA, 226 bp, Glycine max
cgggaaagtgcattaatttgttgtgagctatacactattttaacgttaagagaccatgaattcgtctgtgctacatgttgcgtgcacatagttttggtatcattgccatacgatggctcacgctatgaacagttcccactctgaatgtacactggctgtggtatgcgtacgttggaggcatgctgtgcaagtttacagcatccttggctttgacaccatacctgaa

SEQ ID NO: 237353 - DNA, 386 bp, Glycine max
ggtacaatacaaacacaaagtcagaaacacaaatctgggtatagtggagtagtagggtttttgcgtttgagagagaagaagcatgagcaggagtttgggaattccggtgaagctgctccacgaggcttcggggcacgtggtgacggtggagctcaagagcggagaactctacagaggaagcatgatcgagtgcgaggacaactggaactgtcaactcgagagcatcacctacactgccaaggatggcaaaacatcgcaacttgagcatgtgtttattcgaggcagcaaagtcaggtttatggtcatccctgacatgctgaagaatgctcctatgtttaagcgtttggatgcaagaatcaagggtaagggtgcatcacttggtgttg

SEQ ID NO: 237354 - DNA, 302 bp, Glycine max
caaaaagacgggggcacgggaaagtttgttaatttgtagtgcgctatacactatgttaacgttgagagacctatgatttcgtctgtgctcattgttggtgacatagtattgccatgattgccatatgttcgctcacggtatgaacagtggccacggtgcacgtactctggatgtgatatgcgcacgttggaggcatgctgtgcaagtatacagcatccttggctttgagaccatacctgaacagtgcgttgcattcataaaggattacatccatggcgaacagtatacatcagactccaaaa

SEQ ID NO: 237355 - DNA, 463 bp, Glycine max
ttaaacatctaccgtcgccaactggctaaggacttccggctcgacccacgcgtacgacggctgcgagaagacgacagaaggggcccccatgtttgttgttggtgttaacgagcacgagtacaagccagagcttgatattatttccaatgctagctgcgcaaccaactgccttgctccacttgctaaggttattaatgacaggtttggcattgttgagggtttgatgaccactgttcattccatcactgccacccagaagactgttgatgggccatcagccaaagactggagaggtggaagagctgcttcatttaacatcattcctagcagcactggagctgccaaggctgttggaaaagtccttcctgctttgaacggaaaattgactggtatggcattccgtgttcccaccgtggatgtctctgttgttgacctcacagtgaggctggagaaggaagcctcc

SEQ ID NO: 237356 - DNA, 325 bp, Glycine max
gacaagtgagtttgttgatcgagataactagaaacagtgtgatgaaaatgaaggtccttgttttcttcgttgctacaattttggtagcatggcaatgccatgcgtacgatatgttccctctccgaatgaacactggctatggtgcccgtactccggaggtgaaatgcgcaagttggaggcttgctgtggaagcacacaacatctttggctttgagaccattcctgaagagtgcgttgaagcaacaaaggaatacatccatggcgaacaatatagatcagactccaaaacagttaaccaacaagcttacttttatgcaagagacct

SEQ ID NO: 237357 - DNA, 383 bp, Glycine max
gacaacacagaacataaacaaagaaaaaaaaaacccttagccaacacaaccatcatggccacctctgctattcagcaatcagcattcactggtcaaactgctctgaagcagctcaatgagttcgtccgcaagaccggtggcgccggcaaaggtcgcactaacatgcgccgcaccgtcaagagtgctcctcagagcatttggtatggccctgaccgtcccaagtacttgggtccattctcggagcagattccatcatacctgaccggagaattccctggtgactacggatgggacactgctggattatcagctgacccggaaaccttcgccaggaaccgggagctggaggtgattcacagcagatgggcaatgcttggtgccct

SEQ ID NO: 237358 - DNA, 389 bp, Glycine max
ggctctatcgcgcgtggctcaatcgtcgccatcacagtcgaatcttttgaaacccctctcgtcgtacttatccctacgacgccgttcggtgtcgacctcgtcggagcccctcaccgtggagacctcggtgcccttcacctcccacaactgcgatgcgcctccacgcgccgtggagacgtcctcggcggagctcttctcgttcttccgtgacatggcgctgatgcggcggatggagatcgcggcggactcgctctacaaggccaagctcatacgcggcttctgccacctctacgatggccaggaggccgtcgccgtcggcatggacgccgccatcacgcgcaaagattgtatcatcaccgcctaccgcgaccactgcaccttcctcgccc

SEQ ID NO: 237359 - DNA, 384 bp, Glycine max
  unsure (1)..(384): unsure at all n locations
ggcgaaacagagagtgatttcagtgagtgatcggtgttcacttgatctcatcataatcgtcagcgtcaattgaagaagatgccgatcagaaacatcgccgtcggaaggcctgaagaggcgactcaccccgacacgttgaaggcggctttggctgagttcatctcaaccttcatcttcgtgttcgccggctcaggctccggcatcgcctacaacaagctcaccgacaacggcgctgccacccctgccggcctcatctccgcctccatcgcccatgcattcgccctcttcgtcgccgtctccgtcggcgccaacatctccggcggccacgtcaaccccgccgtcaccttcggcgccttcgtcngcggcaacatcaacttccctcgc

SEQ ID NO: 237360 - DNA, 293 bp, Glycine max
tgggtgcacaagtgagtttgttgatcgagataactagaaacagtgtgatgaaaatgaaggtccttgttttcttcgttgctacaattttggtagcatggcaatgccatgcgtacgatatgttccctctccgaatgaacactggctatggtgcccgtactccggaagtgaaatgcgcaagttggaggcttgctgtggaagcacacaacatctttggctttgagaccattcctgaagagtgcgttgaaccaacaaacgaatacatccatggccaacaatatagattagactccaaa

SEQ ID NO: 237361 - DNA, 235 bp, Glycine max
gcttcagtaagactacagaaagggctgccaaggttttggttttggctgggaacgctcaacaagatgagattggggatggagctaatttaaccatttcatttgctggggagctcctgcagggtgcccaggaacctatcaggatcggtttgcatttgagcgagatcatcagtggatacactctccccatcaacaacactgttcacatcttggatgaactagttgaggatcgctctga

SEQ ID NO: 237362 - DNA, 388 bp, Glycine max
aattcctggtcgacccaggcgtcagggggctgtctttcacgaaactgttcagccggctctttgcgaagaaggagatgcgtattcttatggtgggtctcgacgccgccggtaagaccaccattcactacaaactcaagctaggagagatcgtcataaccattcccaccattgggtttaatgttgaaactgtggaagacaacaacatcagcttcactgtctgggatgttggtggccaggacaagatccgtcctctgtggagacactacttccaaaatacccaagggcttatctttgtggttgatacccatgaccgggatcgtgtggttgaaactagggatcagctgcacacgatgttgaattaggatgacttgagaaacgctgtgccctc

SEQ ID NO: 237363 - DNA, 272 bp, Glycine max
ggcacaagtttgttgagatagctagatgcaataagatgaaaatgaaagtgcttgttttgttgtcgctacagttctggtagcatatgcatgccatggctcagagtagcagaatttccctcgccagatgaacactgggtttggtcagcaatgcaccaatgacgtggcatgtgccagttcgacgcgtggcttttacgcagccagcgtcgttgagtggcggaacgttcatgttgcttgcgtagaattgctctctgaccaggtacaatgagactgat

SEQ ID NO: 237364 - DNA, 355 bp, Glycine max
gacagaaaagaaaaaggaaaccctagctggataggtcaaacatcatcatgtcggacgaagagcaccatttcgagtccaaggcagacgccggtgcctccaaaacctaccctcagcaagccggtaccattcgcaagaacggctacatcgtcatcaaaggacgcccctgcaaggttgtggaagtttcgacttccaaaactggaaagcacggtcacgccaagtgccactttgttggaattgatattttcactgccaagaaacttgaggatattgtgccctcttctcacaactgtgatgttcctcatgtgaatcgtactgattaccagctcattgatattgcctatgatggatttttgag

SEQ ID NO: 237365 - DNA, 357 bp, Glycine max
acaacacaacgcaacacaacgcgcactctctcttttctctcttaacacaaaaaccctatcgttcttcgcggtttcgccgattctcgccatgccgaaagccaaatccgacgccaaagccgccgatagccggttgaagcgcaagggcgctggtgctggaaggaagcaatcgaagaaagctgctaaggatcctaacaagccaaagagacctccaagcgctttcttcgttttcatgtccgagttcagagagcagtttaagaaggagcatcctaacaacaaatccgtcgctgttgtcggtaaagctggtggtgacaaatggaaatcgctgtctgatgctgaaaagggcccctttcttgccaa

SEQ ID NO: 237366 - DNA, 312 bp, Glycine max
ggcagttcaattccaatatattccattctctctgtgtatttccctacctctcccttcaagatgcagatcttcgtcaagaccctcaccggcaagaccatcacccttgaggtggaaagctctgacaccatcgacaacgtcaaggccaagatccaggacaaggaaggaatccccccggaccagcaacgtctcattttcgccggaaagcaacttgaggacggccgtacccttgctgactacaacattcagaaggagagtactcttcacctcgtcctccgtctccgtggtggcatgcagatcttcgttaagacactc

SEQ ID NO: 237367 - DNA, 206 bp, Glycine max
ggagcaaatccctaagccctactattcttcctcagtaatgtcaattaagcttctcgtctctgcagcaactattcctaaccctaaggtcttcttcgaaatgaccatctgcggtcaatctgctggccgcatcatgatggagctctacgcccatatcactcaccgcaacgccgagaatttccgcgcgcttttcaacggccagaacggcg

SEQ ID NO: 237368 - DNA, 420 bp, Glycine max
  unsure (1)..(420): unsure at all n locations
ctcgacccatacgtacgccgccgtcgccgctcattgccagtgctccattttctgatcaggaagaatgaggcctacaatgatgcttagggctctaaccaagcagtttcttggaattgtaggcgatgcagcaaacactgttgctaagaagccccccctgcctcctcctctggtgtcacgcaaacctgctttcattgatgcattcttgtacaagatgaagaagaacccaaatcttttgtcgaacaagaccatttggtcacggagatccactatcttgccagaatttgttgataccactgtcaagatttacaatgggaaaaccactattcgttgtaggatcactganggaaaagtgggtcataagtttggagagtttgctctcaccaggaaacgcaagaccagagaacaagccaatgccaaaaa

SEQ ID NO: 237369 - DNA, 227 bp, Glycine max
ggaacttctcacgttcatttctacacatccctagctctgtcgttccgtcgttgacgatggcgtttcgggtgcgaagccctgacctccgctctctctttcttctctctctcttgtccatcgcttccgccaatgtcttcttcgaagagcgtttcgatgacgggtgggaaaatcgatgggttaaatcagattggaaaaaagatgagaacgtggctggggagtggaaccac

SEQ ID NO: 237370 - DNA, 182 bp, Glycine max
agcatttacatgtcccatttgggctgggaacagtggagcttgtggctggtatggaaagtgccaatgcccagatccactgtgaagttaccaacggtctttactatcttcgattctcagtttgagatgccatggctgggtgccatggattaatgatggtcgcagcaagtgccgccagggatagg

SEQ ID NO: 237371 - DNA, 325 bp, Glycine max
gaaggtgcaagagtttgttgtgagctataagctagtttatcgtgaggagaatatgaagttgtttgttttctttgttgctgcagtagttttggtagcatggccatgccatggcgcaggctaccaaaggttccctctccgaatgaaaactggctatggtgagcgttcttcggaggtaaaatgcgcaagttttaggcttgctgtggaagcacacaacatccgagcctttaaaaccattcctgaagagtgcgttgaaccaacacaggactacattaatggcgaacaatttagattagactctaaaacagttaaccaacaagccttcttt

SEQ ID NO: 237372 - DNA, 330 bp, Glycine max
ggcacaagtgagtttgttgatcgagataactagaaacagtgtgatgaaaatgaaggtccttgttttcttcgttgctacaattttggtagcatggcaatgctatgcgtacgatatgttccctctccgaatgaacactggctatggtgcccgtactccggaggtgaaatgcgcaagttggaggcttgctgtggaagcacacaacatctttggctttgagaccattcctgaagagtgcgttgaagcaacaaaggaatacatccatgggcgaacaatatagatcagactccaaaacagttaaccaacaagccttactttatgccagagacctcg

SEQ ID NO: 237373 - DNA, 344 bp, Glycine max
gactcatcactcatcatattcattcacacttcccactttccaatatggaatgctgcataatcgccaggctcaagacccaacctttatggttcgcgctgctcttcgttgtcggattgttaacgattctcaaattggctttcgttgttttcagatgggtctacgtcaatttcctccgaccaccgaagaatctcaaaaagtacggatcttgggcagtggttactggacccactgacggcattggaaagagcttcgctttcgagctcgctcgcaagggcctgaacctcgtccttgtcggaaggaaccccgacaagctcaaagacgtgtcggattcgatcgcggcgaag

SEQ ID NO: 237374 - DNA, 375 bp, Glycine max
ggcacaagtgagtttgttgatcgagataactagaaacagtgtgatgaaaatgaaggtccttgttttcttcgttgctacaattttggtagcatggcaatgccatgcgtacgatatgttccctctccgaatgaacactggctatggtgcccgtactccggaggtgaaatgcgcaagttggaggcttgctgtggaagcacacaacatctttggctttgagaccattcctgaagagtgcgttgaagcaacaaaggaatacatccatggcgaacaatatagatcagactccaaaacagttaaccaacaagcttacttttatgccagagacctcgaagtccatcccaaggacacatttgtgttcagtatagatggcaccgt

SEQ ID NO: 237375 - DNA, 365 bp, Glycine max
gacgttcacattcaggaatcgttttcttcagaaaatttgccatcgttgagggaagcgcgagagccttcgttgttcaagatgagagctaagtggaagaagaagcgcatgaggaggttgaagaggaagcgccgaaagatgagacaaagatctaagtaggtgcttgaacaaggagtggagatgatgtgcttttccatctgctaccggcttcatgacattttatgctgtcatggctcttatgatgatcttgaggtccagtggcgaggggagcttccatcctgactttagtttagctttactggtctaaagattgctgttttagtgtgggttaagtgatgatattgagagttttgtgttatctaattatg

SEQ ID NO: 237376 - DNA, 314 bp, Glycine max
ggcacaagtgagtttgttgattgagaaaactagaaacagttttatgaaaatgaaagtccttgttttcttcgttgccacaattttggtagcatggcaatgccatgcgtacgatatgttccctccccgaatgaacactggctatggtgcccgtactccggaaggtaaattcccaagttggacgcttgctgtggaagcacacaacatccttggctttgagaccattcctgaagagtgcgttgaagcaacacaggaatacatccatggcgaacaatatagatcagactccacaacagttaaccaacaagcttactttt

SEQ ID NO: 237377 - DNA, 233 bp, Glycine max
ggcacaagtgagtttgttgatcgagataactagaaacagtgtgatgaaaatgaaggtccttgttttcttcgttgctacaattttggtagcatggcaatgccatgcgtacgatacgttccctctccgaatgaacactggctatggtgcccgtactccggaggtgaaacgcgcaagttggaggcttgctctggaagcacagaacatctttggccttgagcacattcctgaacagt

SEQ ID NO: 237378 - DNA, 239 bp, Glycine max
gacccaaaggtgcaaaaatattaagatgataaacattggagcacttgttgtactctttgcatttctcttcctcagttgtgccgatgcacaagacacaacaacccttgtgcctgcaatcataacttttggtgactcagccgtggatgtagggaataatgactatcttcccacccttttcaaggctgattaccctccttatgggagggactttgctaaccaccaccctattgggaggtttt

SEQ ID NO: 237379 - DNA, 298 bp, Glycine max
gacttgtaataattcttataacacaacacaacccatggccaccacctccgcattcctcctccttcccctcctcctgctgctccacctcgccatcgccgctcacggcatcggcatcaactacggcacgctcggcgacaaccttccaccgcccgcggcggtggcgaacttcctgaagacgaagacgaccatcgaccgcgtgaagatctacgacgtgaacccggacatcctgcgggccttcgccggcagcggcatctccgtgacggtgaccgcccccaacggcgacatcgccgccttaacc

SEQ ID NO: 237380 - DNA, 368 bp, Glycine max
gaacaaaagaacacacattactagaaagttagaaaacatggcagcggtggccggagcatcctcgtccgtgattaaggtggctgcactttccggatctttaaggaaaggctcttacaacagagccctcattcgttctgctattgagctaagccaaggtagagttgaaggccttcaaatcgagtacgttgatatttcgcctttgccccttctcaacaccgatcttgaggtgaatgggacctaccccccacaagttgaagcctttcgccagaagattctcgcagctgatagtatcctctttgcttcccctgagtacaattactctgtcgcaagtcctttaaagaatgcacttgactgggcatcaaagggca

SEQ ID NO: 237381 - DNA, 364 bp, Glycine max
ggcacaagtgagtttgttgatcgagataactagaaacagtgtgatgaaaatgaaggtccttgttttcttcgttgctacaattttggtagcatggcaatgccatgcgtacgatatgttccctctccgaatgaacactggctatggtgcccgtactccggaggtgaaatgcgcaagttggaggcttgctgtggaagcacacaacatctttggctttgagaccattcctgaagagtgcgttgaagcaacaaaggaatacatccatggcgaacaatatagatcagactccaaaacagttaaccaacaagcttacttttatgccagagacctcgaagtccaccccaaggacacatttgtgttcagtata

SEQ ID NO: 237382 - DNA, 88 bp, Glycine max
ggtgcacaagtgagtttgttgatccagataactagaatcagtgtgatgaaaatgaacgtccttggcttcctcgttgctacaattttgg

SEQ ID NO: 237383 - DNA, 224 bp, Glycine max
gaaggtgcaagagtttgttgtgagctataagctagtttatcgtgaggagaatatgaagttgtttgttttctttgttgctgcagtagttctggtagcatggccatgctatggcgcaggctaccatgcgttccctctccgactgaacattggctatggtgagcgttcttcggacgtagcatgctcacgttctaagcttgctgtggatgcacatgttatccgagccc

SEQ ID NO: 237384 - DNA, 377 bp, Glycine max
aggacgacagaaggggaatccaatagtaagagaactgagaatcacattgagaaagatacagagctgaagcatgggaatttcaaagctggggaagatcatgctgaaaatgtaatggatgggcctggagcggtattggtaaacttgttgacaagtttaaggcatttgccacctgccatgcattcagtcctggttgtaatggctctcacttggttgtcttggtttcccttctttctgtttgatacggattggatggggagagaagtttatcatggtgatccaaaaggggacacttctgaagtagatctttatgatcaaggagttagagaaggtgcatttggtttgctattgaattctgttgtccttggaattagctcttt

SEQ ID NO: 237385 - DNA, 338 bp, Glycine max
ggagagtcagattcgcacgcattgcttcgcctcacaacagcagctgcagcagcaatggctcccaaacgaggtggaaaggctccggctcttgccgctaagaagaagcctgagaaggtcacgaatccgttgttcgagaacgtccgaagcattcgatcgagggcgttgcctcgaaaagactgacagttcgtgaatggcaaaagtcaattcaagaagagagattctgacagagttgaagttccccagctttgaaccagtttaccaaaactcttgacaaaaacctagcaacaagtctgttcaagttgcttctgaagtacaggcccgaggacaaagctgaaaag

SEQ ID NO: 237386 - DNA, 209 bp, Glycine max
tggggccattgttgctgtcatcatccgcagctgctgttattcgcatcgcaaacaaacagtgagccatggccgtcggaaagaacaagcgcatctccaaagggaaaaacggtggcaagaagaaggcagctgatccctttgccaagaacgattggtacgacactaaggccccctcccctttttcaagtgaaaaatgttggcaaaaccctcgt

SEQ ID NO: 237387 - DNA, 224 bp, Glycine max
  unsure (1)..(224): unsure at all n locations
gacactaaacaagttaaaagaagagcatcactgaactaacanagcaaccctatgtcgaaggtggtttgtgtcaccggagccagcggcgccatcggatcatgggtggtcctactcctcctccagcgtggttacaccgtccatgccaccgtccaagatatcaaggatgaaaatgagacgaaacatttggaggaaatggaaggagcaaagagtcatctccatttttt

SEQ ID NO: 237388 - DNA, 311 bp, Glycine max
tttattgatatgaatttgaagttgcagtgtgataaatattatagtccttgatttcttcgttgcaacaattttggtagcatggtaatgccatgcgtactatatgtgccctctccgaatgaatactggctatggtgcccgtactctggaagtgaaatgcgcagctttgaggcttgctgtggaagcacacaacatcgttggctttgagaccattcctgaagagtgcgttgaagcatcaacggaatacatccatggcaaacactatacatcagactcccaaacagttaaccaacaagcttacttttatgccagag

SEQ ID NO: 237389 - DNA, 286 bp, Glycine max
ggcacaagtgagtttgttgatcgagataactagaaacagtgtgatgaaaatgaaggtccttgttttcttcgttgctacaattttggtagcatggcaatgccatgcgtacgatatgttccctctccgaatgaacactggctatggtgcccgtactccggaggtgaaatgcgcaagttggaggcttgctgtggaagcacacaacatctttggctttgagaccattcctgaaaactgcgttgaagcaacagaggaatacatccatggcgaacaatatagatcagactcc

SEQ ID NO: 237390 - DNA, 125 bp, Glycine max
ctttggacagtatccatatggaggtttactcctaaacaggccaaccattagcacgagattcatgcctgagaaaggggctgctgagtatgcagctttggctaagaaccctgagaaggagtttttga

SEQ ID NO: 237391 - DNA, 360 bp, Glycine max
gggcgcagtgagatggaagaagaaggtgttccggtggaaggttcttcaggtacggtgagtcgggcacggaagcttctgtttcggcgaatgctggtggggatcaaagacggaaggttcttcttgggctccttctactgcatcgacaagcaaggcaacatcattctccaggacgccgtcgaatatcgcagcacgcgccaatcttcgccttctcccatggaacagaggtacctcggccttattctcattccttcctcttgccgcacctcttgtcacgtcgattgcgccatccacgaacagttatctctcccttcgctgaatcaaataccaccgcactagccagggttttactgtgccccttca

SEQ ID NO: 237392 - DNA, 373 bp, Glycine max
gacaccttcgaattttcttttccttcactttcccgagaaaaaaaaaacactctttcactttcttgactacggtctcacttcgacatggctcgtactaagcaaactgctcgcaagtccaccggcggcaaggcgccacgtaagcagttggcgaccaaggccgcccggaagtccgctcccgcgaccggaggagtgaagaagccccaccgcttcaggccgggaaccgtggcgctgagggaaatcagaaagtttcagaagaagcacgagcttctcatcaggaagcttccgtttcagagactcgtgagggaaatcgcgcaggacttcaagaccgatttgcgttttcagagtagcgccgtttctgcgcttcaagaagctg

SEQ ID NO: 237393 - DNA, 228 bp, Glycine max
gcacaagtgagtttgttgattgaaaatactagaaacaattttaagaaaatgaaaggtcctgttttcctcggttccaaaattttgggtgcatggcaaatccaatgcgtaacatatgttccctccccgaaataacactggctatggtgcccgttctccggacgttaaattcccaagttggacgcatgctgtggaagcacacaacatctttggcttttaaaccattcctga

SEQ ID NO: 237394 - DNA, 212 bp, Glycine max
gactcacaatcgaacgggaaaatgcgtcttcataaacgctgtccaaaacttctcatagccttttattcattccattcctttctagggttttcttttctttgccgagaaaatcagagagtgcatttcgatttacattggccaggccggtatccaggttggaaactcctgctgggaactctatcgcctctaatacgggattcagcccgattgat

SEQ ID NO: 237395 - DNA, 339 bp, Glycine max
gagaaagggacacttaagaaggaacctgtgtggatgttgatcgatagaactagaaacagtgtgatgaacatgaacgtccttgttttcttcgttgctacaattttggtagcatggcaatgccatgcgtacgatatgttccctctccgaatgaacactggatatggtgcccgtactccggaggtgaaatgcgcaagttggacgcttgctgtggaagcacacaacatctttggctttgagaccactcctgaagagtgcgttgaatcaacaaaggaacacatccatggggaacaatatagattaaactccaaaacagttaacaaacatccttacttttatccc

SEQ ID NO: 237396 - DNA, 330 bp, Glycine max
gaacaaaacaaccatcatcatggccacctctgctattcagcaatcagcattcgcaggtcaaactgctctgaagcagctcaatgagttggtccgcaagaccggtggcgccggcaaaggtcgcaccaacatgcgccgtatcgtcaagagtgctcctcagagcatttggtatggccctgatcgtcccaagtacctgggtccattctcagagcagattccgtcatacctgatcggagaaatccccggggactacggaatgggacactgctggactatcagctgacccggactacttctccaggaaccgggagctggaggtgatcacagcatatt

SEQ ID NO: 237397 - DNA, 314 bp, Glycine max
ggcacaagtgagtttgttgatcgagataactagaaacagtgtgatgaaaatgaaggtccttgttttcttcgttgctacaattttggtagcatggcaatgccatgcgtacgatatgttccctctccgaatgaacactggctatggtgcccgtactccggaggtgaaatgcgcaagttggaggcctgctgtggaagcacacaacatctttggctttgagaccattcctgaagagtgcgttgaagcaacaaacgaatacatccatggcgaacaatatagatcatactccacaacagttaaccaacaagcttactttt

SEQ ID NO: 237398 - DNA, 287 bp, Glycine max
ggcacaagtgagtttgttgatcgagataactagaaacagtgtgatgaaaatgaaggtccttgttttcttcgttgctacaattttggtagcatggcaatgccatgcgtacgatatgttccctctccgaatgaacactggctatggtgcccgtactccggaggtgaaatgcgcaagttggaggcttgctgtggaagcacacaacatctttggctttgagaccatccctgacgagtgcgttgaagcaacacaggactacatccatggcgcaaactacagatcagacccca

SEQ ID NO: 237399 - DNA, 177 bp, Glycine max
cacgcgtcagacgggtgccaaaagaacaacaaaagggggaacaattgatttggttgatcaaaataacaagaacaattttaagaaaattgaaggcccttgtttcctccgttccccaagttttggcaccacggaattccattccttcgaactgttccctctcctaatggacccttgctc

SEQ ID NO: 237400 - DNA, 148 bp, Glycine max
tggggcacaactgagtttcatgttccacatggttatgttcagtgtgctgaacatggttgtccttgttttcctcgttgcgaccagtttggtcgcatggtagctgccattcgtattgtcttttgcctctccgaatcgacactggctacgg

SEQ ID NO: 237401 - DNA, 315 bp, Glycine max
gagtgacaagggtttcttccgggttcacgtttcacaatcactttttgcgcttctctcagtcactcactcttcttcttcctcttcgtgtggttttctttctcgaactcgatcgaagatgcgtgagattcttcacatccagggagggcaatgcgggaaccagatcggagcccagttctgggaggtggtgtgcgcggagcacgggatcgattcaacggggaagtaccaatgggacaactagttgcaactcgagcgagtcaacgtccactacaatgaatcgagttgcggaaggttcgtgcctatggcggtgctcatgga

SEQ ID NO: 237402 - DNA, 352 bp, Glycine max
gatgcacaagtttgttgagatagctagaagcaataagatgaaaatgaaagtgcttgttttgtttgttgctacagttttggtagcatatgaatgccatggctcagactaccagaagttccctctccaaatgaaaactgggtttggtgggcaatacagcaatgaggtggcatgtgccagttggaggcttggcgtggaagcaaacaacgtagtcaagtggcaaactgttcctgcagcttgcggagagtacatagctgactacgttctaggagaccaatatagattagattccaaaacagttaaaccaacaagcttagttctatgctaaatccctcaaactcgccaacaaagatgt

SEQ ID NO: 237403 - DNA, 240 bp, Glycine max
ggcacaagtgagtttgttgatcgagataactagaaccagtgtgatgaaattgaaggtccttgttttcctcgttgctagaatttcggtagcatggcaatgccacgtctaggacatgttccctcgcggactgactactggtcacggtccccgtactccggaggtcaacggcccaagtttgaggcttcttcaggcaccctgcaccaccgtagcctttctgaccctccattatcattccttaaa

SEQ ID NO: 237404 - DNA, 276 bp, Glycine max
ggcacaagtgagtttgttgatcgagataactagaaacagtgtgatgaaaatgaaggtccttgttttcttcgttgctacaattttggtagcatggcaatgccatgcgtgcgatatgttccctctccgaatgaacactggctatggtgcccgtactccggaggtgaaatgcgcaagttggaggcctgctgtggaagcacagaggatctttggccttgagaccactcctgaatagtgccttgacgcacccggggaccacctccatgggcgaatcatctc

SEQ ID NO: 237405 - DNA, 363 bp, Glycine max
  unsure (1)..(363): unsure at all n locations
ggcacaaagtgaagttttgtttaattcaagaataacttagaaaacaagtgttaattaacaaattaaaggtcccttgtnttccttccgtttcctaacaatttggtagcaatgcaattccatgcgtacgaaatgttcctctccgaatgaacactggctattgtcccctacccggaagtaaatgccaagttggacgctttctgtggaagcacacaacatccttggctttgagaccattcctgaagagttccttgaaacaacataggaatacatccatggcgaacaatataaattagactccaaaacagttaaccaacaagcttacttttatgccagagacctcgaagtccatcccaaggacacatt

SEQ ID NO: 237406 - DNA, 329 bp, Glycine max
gatccatctaacagaatcaaaaagaaaagaatagagaagagagtgaggtttggtggtttggttaatttccaaattgccgccaatataagccctttacccctgatgaagtacctgagagtgcccgtggacgctcttccccgcaacactcccttgaccctcgcttccaacttgttgattcgccgcttctccgaaagggttaggggttgttttctcgacaagtccgaggtcacagatcgcgtcatttcctgcgtcaaaaacttccagaaagtcgattcttccaaggttaaccctaatgctcacttccagaatgaccttggaatggatagttt

SEQ ID NO: 237407 - DNA, 341 bp, Glycine max
ggagtttgttgatcgagataactagaaacagtgtgatgaaaatgaaggtccttgttttcttcgttgctacaattttggtagcatggcaatgccatgcgtacgatatgttccctctccgaatgaacactggctatggtgcccgtactccggaggtgaaatgcgcaagttggaggcttgctgtggaagcacacaacatctttggctttgagaccattcctgaagagtgcgttgaagcaacaaaggaatacatccatggcgaacaatatagatcagactccaaaacagttaaccaacaagcttacttttatgccagagacctccaaattcatcccaatgacaca

SEQ ID NO: 237408 - DNA, 211 bp, Glycine max
gaacctttgcattctattcattcaagattcagcaagtgcgttttggaagcagagaccgaaatacttcgagatggcccgtactaagccaactgctcgtaagtcaactggaggaaaagcttccaggaagcagcttgcaaccaaagctgcacgtaagtctgcaccaacaactggtggtgtgaagaagcctcatcctcatcgccctggaactgtt

SEQ ID NO: 237409 - DNA, 128 bp, Glycine max
aagggggcccaattaattttgttaatcaagataactagaaacattttgatgaaaataaaggtccttgttttcttcgttgcaaaaattttggtaccatggcaatgccatgcgtacaaaatgttccctcc

SEQ ID NO: 237410 - DNA, 380 bp, Glycine max
  unsure (1)..(380): unsure at all n locations
ggcacaagtgagtttgttgatcgagataactagaaacagtgtgatgaaaatgaaggtccttgttttcttcgttgctacaattttggtagcatggcaatgccatgcgtacgatatgttccctctccgaatgaacactggctatggtgcccgtactccggaggtgaaatgcgcaagttggaggcttgctgtggaagcacacaacatctttggctttgagaccattcctgaagagtgcgttgaagcaacaaaggaatacatccatggcgaacaatatagatcagactccaaaacagttaaccaacaagcttacttttatgccagagacctcgaagtccatcncaaggacacatttgtgttcagtatagatggcaccgtactct

SEQ ID NO: 237411 - DNA, 380 bp, Glycine max
  unsure (1)..(380): unsure at all n locations
ggcacaagtgagtttgttgatcgagataactagaaacagtgtgatgaaaatgaaggtccttgttttcttcgttgctacaattttggtagcatggcaatgccatgcgtacgatatgttccctctccgaatgaacactggctatggtgcccgtactccggaggtgaaatgcgcaagttggaggcttgctgtggaagcacacaacatctttggctttgagaccattccagaagagtgcgttgaagcaacaaaggaatacatccatggcgaacaatatagatcagactccaaaacagttaaccaacaagcttacttttatgccagagacctcgaagtccatcncaaggacacatttgtgttcagtatagatggcaccgtactct

SEQ ID NO: 237412 - DNA, 380 bp, Glycine max
ggcacttcaattgcaatcaaattagttcattctctttgcgcagttccctacctctcctttcaagatgcagatcttcgtcaagaccctcaccggaaagaccatcacccttgaggtggaaagctctgacaccatcgacaacgtcaaggccaagatccaggacaaggaaggaattcccccggatcagcaacgtctcatcttcgccggaaagcagctcgaggacggccgtaccctcgccgactacaacatccagaaggagtcaacccttcaccttgtccttcgtctccgtggtggcatgcagatcttcgtcaagactctcactggcaaaaccattaacctagaggtcgaaaactctgacaccattgacaacgtcaaggccaaga

SEQ ID NO: 237413 - DNA, 380 bp, Glycine max; identical to SEQ ID NO: 235270

SEQ ID NO: 237414 - DNA, 389 bp, Glycine max
gtcacacacttcctctaactctcactcccaaacccaaactcaataacagtaaccgtttttcgttcttcacttcctcactctctctctcttccaccacactcatggccactgctcacaaggtcctcgttcccatcgccgacggcaccgagcccatggaggccgtcatcatcatcgacgtcctccgccgctccggcgccgatgtcaccgtcgcttcctcctccgccaacctcgccgtccaagctctccacggcgtcaagatcatcgccgacgcctccgtctccgacgtcgccgccaccgcctttgacctcgtcgctctccccggaggtttacagggtgatgagaatctgagagactgtaaagttcttgaagggtttgtgaagaagcatgtt

SEQ ID NO: 237415 - DNA, 370 bp, Glycine max
  unsure (1)..(370): unsure at all n locations
ggaaactcaactcctgaaaggcaagagtgagagagaaatggagaatgcggaggagatgatgcagcaaaacgacgaggttttgtcggttgaacttccagctccctccggttggaatanactgtttttcccctaaaaaactggaaacacaaggaaaaattgagattgtattcattgctccaactggagaggagatcagtaccaaaaaacaattggagcagtacctaaaggcacatcctggcaatcctgtcatttcaaagtttgactggggaactggtgagacccctaggcgatcagcaaggatcagtgagaaggtcaagtcaactccaccagcagatagtgatactcaanagaaacgagctcggaaatcatc

SEQ ID NO: 237416 - DNA, 297 bp, Glycine max
gtgcacaagtgagtttgttgatcgagataactagaaacagtgtgatgaaaatgaaggtccttgttttcttcgttgctacaattttggtagcatggcaatgccatgcgtacgatatgttccctctccgaatgaacactggctatggtgcccgtactccggaggtgaaatgcgcaagttggaggcttgctgtggaagcacacaacatctttggcctttgagaccattccctgaagagtgcgttgaagcaacaaaagaatacatccatggcgaacaatatagattagactccaaaacagt

SEQ ID NO: 237417 - DNA, 356 bp, Glycine max
ggcacaagtgagtttgttgatcgagataactagaaacagtgtgatgaaaatgaaggtccttgttttcttcgttgctacagattttggtagcatggcgatgccatgcgtacgatatgttccctcccccaatgaacactggctatggtgcccgtactccggacgtgaaatgcgcaagttggaggcttgctgtggaagcacacaacatctttggctttgagaccattcctgacgagtgcgttgatgcagcaaacgaatacatccatggcgaacggtatagatcagactccatgacagttaaccaacggacttacttttatgccatagacctcgaatgtcatcccaaggacacatttgtg

SEQ ID NO: 237418 - DNA, 373 bp, Glycine max
gaaaggtagaagatcgaagagagaaagagagtgaagagagaagaagatggcgtcgagcggagcggtgccgttttggagggcagcggggatgacatacatcacatactcaaacatatgcgcgaatctggtcaggaattgcctcaaggaaccctacaaggctgaagccatctctcgtgagaaggtccattttgctctctccaaatgggtcgacgccaagcctgaaaaacctactattcgttcagacaccccagagcagtgatccggaatagttggaagctataaatgcataaatctttgagatctggaagttcattgtcattttgaacctttctgtgatgtttaattcctttgcttctttttttttcattccatg

SEQ ID NO: 237419 - DNA, 260 bp, Glycine max
tggggtcttgcagggcgaagagatggccacagttacagggcacctcgtgtgggagatcgtcaagaaaaacaattccttcctgggcaagcagtttggaacgggcacccagagcgtcgaactcagcagagagagcaacaatctctacaacctcaattcgttcaagtactctggtttggcaaataagaaaactgttactgtccagcctgagggcaaagatcaagtcgtgtggagtgcttactggacccactgacagcattgga

SEQ ID NO: 237420 - DNA, 208 bp, Glycine max
gggcacaagtttgttgagatagctagaagcaataagatgaaaatgaaagtgcttgttttgtttgttgctacagttttggtagcatatgaatgccatgggtccaaactacaaaaatttccctcctccaaatgaaaactgggtttggtgggcaatacaacaattaagggtgaatttgccatttggaggcttggcgtggaagcaaacaacg

SEQ ID NO: 237421 - DNA, 320 bp, Glycine max
gctagaatcccagttcaaaggtaaggtaggttaacactcttcttcatcgtcgtcgcaatgggacgtgtgatccgtgcgcagcgtaagggagcaggctcggtcttcaagtcccacacgcaccaccgcaagggccctgcacgcttccggagcctggacttcggggagcgcaacggctacctcaagggcgtggtcaccgacgtcatccatgaccctggccgcggcgcgccgctcgccaaggtcgccttccgccaccctttcagatacaagaagcagaacgagctcttcattgccgccgagggcctctacaccggtcagttcat

SEQ ID NO: 237422 - DNA, 374 bp, Glycine max
gactcacaaccacaacaaggcagcagtgcgaagagaaagaaagagaagaagcgcttatcgaactcggacggaagcactgagttaactcagagcgagtgaaagtgttgctgcgtgatgtctggtggtatcgcccgtggacgcctcaccgaggagcgcaagtcgtggcggaagaaccatccccatggttttgttgcgaagccggagacgctgcccgatggaaccgtgaacttgatggtgtggcattgcactagtcccgggaagactgggactgattgggagggtggctacttcccgcttacgctgcactttagtgaagactacccaagcaagcctccaaagtgtaaatttccacaaggtttcttcaaccctaatgt

SEQ ID NO: 237423 - DNA, 381 bp, Glycine max
ggccagacgcagtgactaaaccaaacctctcactcgccgtcgtagggtttctcctttcgtttagcaacaacaacaatggttgcagccaagaaaaccaagaagacccatgagagcatcaacaacaggctcgctcttgtcatgaagagtggaaaattcaccctcggttacaagacggttctcaaatcacttaggagctccaaagggaaattgattatcattgctaacaactgcccccctttgaggaaatcagagattgaatactatgctatgttggccaaggttggagttcatcattacaatgggaacaatgtggatttgggcactgcatgtggaaaatattacagagtgtgctgccttagcattattgatcctggtgattct

SEQ ID NO: 237424 - DNA, 378 bp, Glycine max
gcagccaaagaaaagaaaatcctcaattttctgagcagccaaacactctctctctgtctctcgaaaattctcagtttgcagagaaaatctgaatcatgtcgtggcaagcgtatgtcgacgatcaccttctgtgtgacatcgaaggtaaccacctcactcacgctgctatcatcggccaagacggcagcgtttggactcagagtaccgacttccctcagttcaaacctgaggagataactgccatcatgaatgactttaatgagcctggatcacttgctccaactggattgtatctcggtggcaccaaatatatggtcatccagggtgaacccggtgctgtcattcgagggaagaaaggtcctggtggtgttactgtga

SEQ ID NO: 237425 - DNA, 385 bp, Glycine max
gacaacacagaacaaaaacaaagaaaaaaaaaaacccttagccaacacaaccatcatggccacctctgctattcagcaatcagcattcactggtcaaactgctctgaagcagctcaatgagttcgtccgcaagaccggtggcgccggcaaaggtcgcactaacatgcgccgcaccgtcaagagtgctcctcagagcatttggtatggccctgaccgtcccaagtacttgggtccattctcggagcagattccatcatacctgaccggagaattccctggtgactacggatgggacactgctggattatcagctgacccggaaaccttcgccaggaaccgggagctggaggtgattcacagcagatgggcaatgcttggtgccctt

SEQ ID NO: 237426 - DNA, 367 bp, Glycine max
  unsure (1)..(367): unsure at all n locations
ggcacaagtgagtttgttgatcgagataactagaaacagtgtgatgaaaatgaaggtccttgttttcttcgttgctacaattttggtagcatggcaatgccatgcgtacgatatgttccctctccgaatgaacactggctatggtgcccgtactccggaggtgaaatgcgcaagttggaggcttgctgtggaagcacacaacatctttggctttgagaccattcctgaagagtgcgttgaagcaacaaaggaatacatccatggcgaacaatatagatcagactccaaaacagttaaccaacaagcttacttttatgccagagacctcgaagtcnatcncaaggacacatttgtgttcagtatagat

SEQ ID NO: 237427 - DNA, 368 bp, Glycine max
gcacagcacagcactctttgcaacacaacaaaaaaagacaacacagagagaagcgtcttaataaacgctcttctctgaaaaacctgatttcttctcttcttctcttctctttcgtttcgatcttcgatctctgaaaatgagagagtgcatttcaatccacatcggtcaggccggtattcaggtcggaaacgcctgctgggagctctactgcctcgaacacggcattcagcctgatgggcagatgccaagtgataagactgttggtggaggtgatgatgctttcaacaccttcctcagtgaaactggggctggaaagcacgtgcctcgtgcgatttttgtagatctcgagcctactgtgattgatgaag

SEQ ID NO: 237428 - DNA, 322 bp, Glycine max
gcagccaaagaaaagaaaatcctcaattttctgagcagccaaacactctctctctgtctctcgaaaattctcagtttgcagagaaaatctgaatcatgtcgtggcaagcgtatgtcgacgatcaccttctgtgtgacatcgaaggtaaccatctcacgcacgctgctatcatcggccaagacggcagcgtttgggctcagagtaccgacttccctcagttcaaacctgaggagataactgccatcatgaatgactttaatgagcctggattacttgctccaactggattgtatctcggtgggcacaaatatatggtcatcca

SEQ ID NO: 237429 - DNA, 192 bp, Glycine max
gacaagtttgttgagatagctagaagcaataagatgaaaatgaaagtgcttgttttgtttgttgctacagttttggtagcatatgaatgccatggctcagacaacaaaaatttccctctccaaatgaaaactgggtttggtgggcaatacagcattgaggtggcatttgcaatttgaaggcttgccttgaaa

SEQ ID NO: 237430 - DNA, 401 bp, Glycine max
aggaagacgacagaaggggaagggagaattaggtttttagggtttacaccgagcagcgacacctccctcccgcagtagccatggttctcaaaactgaactatgccgattcagtggtgccaagatctaccccggaaagggcatcagatttgttcgtggtgattctcaggttttcctgtttgccaactcaaaatgtaagcggtatttccacaaccgcctgaagccctcaaagctcacctggactgctatgtacagaaagcaacacaaaaaggacattgctcaagaagctgtgaagaagaggagacgcgctgccaaaaagccttactctaggtccattgttggtgccactctggaagttatccagaaaaagagagctgagaagccagaagttcgagatgcagct

SEQ ID NO: 237431 - DNA, 377 bp, Glycine max
ggcacaagtgagtttgttgatcgagataactagaaacagtgtgatgaaaatgaatgtccttgttttcttcgttgctacaattttggtagcatggcaatgccatgcgtacgatatgttccctctccgaatgaacactggctatggtgcccatactccggaggtgaaatgcgcaagttggaggcttgctgtggaagcacacaacatctttggctttgagaccattcctgaagagtgcgttgaagcaacaaaggaatacatccatggcgaacaatatagatcagactccagaacagttaaccaacaagcttacttttatgccagagacctcgaagtccatccaaagacacatttgtgttcagtatagatggcaccgtact

SEQ ID NO: 237432 - DNA, 383 bp, Glycine max
  unsure (1)..(383): unsure at all n locations
gattatatttgagttcaaacaaatcaaagccatggccacctccaacttctctattgttctctccgtctccctagccttctttttggtgctacttaccaaggcacactcgaccgataccgtttctttcaccttcaacaagttcaacccagtccaaccaaacattatgctccaaaaagatgctagtatttcatcctctggggtgttacaactcaccaaagttggcagcaacggcgtgcccacctcgggatctctcggtcgtgccctttacgctgccccaatccagatttgggacagcgaaaccggcaaggtagccagctgggctacatcctttaaattcaacattttcgcacccaacanatcanactcagctgacgggcttgcct

SEQ ID NO: 237433 - DNA, 376 bp, Glycine max
ggcacaagtgagtttgttgatcgagataactagaaacagtgtgatgaaaatgaaggtccttgttttcttcgttgctacaattttggtagcatggcaatgccatgcgtacgatatgttccctctccgaatgaacactggctatggtgcccgtactccggaggtgaaatgcgcaagttggaggcttgctgtggaagcacacaacatctttggctttgagaccattcctgaagagtgcgttgaagcaacaaaggaatacatccatggcgaacaatatagatcagactccaaaacagttaaccaacaagcttacttttatgccagagacctcgaagtccatcccaaggacacatttgtgttcagtatagatggcaccgta

SEQ ID NO: 237434 - DNA, 386 bp, Glycine max
ggcacaagtttgttgagatagctagaagcaataagatgaaaatgaaagtgcttgttttgtttgttgctacagttttggtagcatatgaatgccatggctcagactaccagaagttccctctccaaatgaaaactgggtttggtgggcaatacagcaatgaggtggcatgtgccagttggaggcttggcgtggaagcaaacaacgtagtcaagtggcaaactgttcctgcagcttgcggagagtacatagctgactacgttctaggagaccaatatagatcagattccaaaacagttaaccaacaagcttatttctatgctaaatccctcaaactcaccaacaaagatgtctttgtcctggacgttgacgacactactctctctaat

SEQ ID NO: 237435 - DNA, 380 bp, Glycine max
  unsure (1)..(380): unsure at all n locations
ggcacaagtgagtttgttgatcgagataactagaaacagtgtgatgaaaatgaaggtccttgttttcttcgttgctacaattttggtagcatggcaatgccatgcgtacgatatgttccctctccgaatgaacactggctatggtgcccgtactccggaggtgaaatgcgcaagttggaggcttgctgtggaagcacacaacatctttggctttgagaccattcctgaagagtgcgttgaagcaacaaaggaatacatccatggcgaacaatatagatcagactccaaaacagttaaccaacaagcttacttttatgccagagacctcgaagttcatcncaaggacacatttgtgttcagtatagatggcaccgtactct

SEQ ID NO: 237436 - DNA, 374 bp, Glycine max; identical to SEQ ID NO: 236536

SEQ ID NO: 237437 - DNA, 370 bp, Glycine max
gagcgaaacagagagtggtttcagtgagtgatcggtgttcacttgatccttcataagtcgtcatcatcatcatcatcatcaacgttgattgaagaagatgccgatcagaaacatcgccatcggaaggcctgaagaggctactcaccccgacacgttgaaggcggggttggctgagttcatctccaccttgatcttcgtgttcgccggttcaggttccggcatcgcctacaacaagctcaccgacaacggcgccgccactcccgccggcctcatctccgcttccatcgcccatgctttcgccctcttcgtcgccgtctccgtcggcgccaacatctccggcggccacgtcaaccccgccgtcaccttcggc

SEQ ID NO: 237438 - DNA, 378 bp, Glycine max
gagcgatctccgtgaatacatagtaacacaataaaccacctccgcgcgagccaccttacccagtgaaccctaccgcaccgaaacaaaaccctcgcaaaccctaaccctaatctcataggaacatggacggcgacgacgagacctcgggtccgatgatcgacgaaatctacgccaacggcggtggcgtcggcgacgacggagacaagcggagccgccgcgcaatcatgagcggcgaccagctcgacatcgaggcgtacgcggcgctatactcggggcgcacgaagatcatgaggctcctcttcttcgccgacaagatgaacaacgcggcgacgcagctcgaggcgctgcgcatggcctacgacgagattaagaagggag

SEQ ID NO: 237439 - DNA, 288 bp, Glycine max
ggttctagtgtgtgattgtttgttgttgtaactcgttcttcttcttttgttgttctgtgtttgtgtttgttttttctctcacctgaaaatgtcttgctgcggtggtaactgtggttgcggaagctcctgcaagtgcggcaacggctgcggaggctgcaagatgtacccagacttgagctacactgagtcaaccaccaccgagaccttggtcatgggagtggcacctgttaaggctcaatttgagggtgctgaaatgggtgtgcccgctgagaacgatggctgcaaatg

SEQ ID NO: 237440 - DNA, 381 bp, Glycine max
gacacatgcccatcatcaaagtttcttcctttctctgctctttgtcttctctgacacatttggggccttgttgagtgtgtttttgcaagagggtatggcgaaggacgttgaggttgctgagcgtggctccttctctgggaaggactaccaggaccctccaccagcaccactcattgatgctgaggagctcacaaagtggtccttttacagggctcttattgctgagttcattgccactttgctcttcctctacattactgtgctcacagttatagggtacaagcaccagacggatcatgctgatgcgtgtggtggggttggcattcttggcattgcatgggccttttggtggcatgatcttcatccttgtctactgcactg

SEQ ID NO: 237441 - DNA, 377 bp, Glycine max
gaaggtgcaagagtttgttgtgagctataagctagtttatcgtgaggagaatatgaagttgtttgttttctttgttgctgcagtagttttggtagcatggccatgccatggcgcaggctaccaaaggttccctctccgaatgaaaactggctatggtgagcgttcttcggaggtaaaatgcgcaagttttaggcttgctgtggaagcacacaacatccgagcctttaaaaccattcctgaagagtgcgttgaaccaacaaaggactacattaatggcgaacaatttagatcagactctaaaacagttaaccaacaagctttcttttatgctagtgaacgcgaagtccatcacaacgacatatttatattcggcatag

SEQ ID NO: 237442 - DNA, 383 bp, Glycine max
  unsure (1)..(383): unsure at all n locations
gaattcaaaccaaaatcccaaatcctcaaattcgatttgtaccaaattttcttcacaaaatgtctggtcgtgggaaaggtggcaagggtttgggaaagggaggtgccaagaggcacagaaaagttcttcgtgataacattcaaggtatcacgaaacctgcgattcgtaggttagcgagaagaggtggcgttaagaggatcagtggtttaatctatgaggaaaccagaggagttctgaagattttcttggagaacgtgattcgagatgctgtgacctacaccgagcacgctaggaggaagacggtgactgccatggatgtggtttatgcgctcaagaagcanggaaaggacctctatggtttcggaggctgaatgattgattct

SEQ ID NO: 237443 - DNA, 367 bp, Glycine max
gaccacattccaaaacacaaacacatacattgtagtatcacttttgtctcggaatttgttcttttgagttatggcaagcttaaaggttgcatgtgtggttttgatgtgcatggctgtgatgagtgcaccaatgatggtgcaagccgtgtcatgcaatgatgtttctgtgaacctagcaccgtgcctatcttacctgatgcagggtggagatgttccagaatcgtgctgtaccggagtgaggaacattctgggttctgccagcaccacctttgacaaacaaaccgtgtgcaaatgtcttcagcaagctgctaataactatggcatcaacgacgaatacgctcaggcactccccgcccgctgcaatgtc

SEQ ID NO: 237444 - DNA, 382 bp, Glycine max
gaaggtgcaagagtttgttgtgagctataagctagtttatcgtgaggagaatatgaagttgtttgttttctttgttgctgcagtagttttggtagcatggccatgccatggcgcaggctaccaaaggttccctctccgaatgaaaactggctatggtgagcgttcttcggaggtaaaatgcgcaagttttaggcttgctgtggaagcacacaacatccgagcctttaaaaccattcctgaagagtgcgttgaaccaacaaaggactacattaatggcgaacaatttagatcagactctaaaacagttaaccaacaagctttcttttatgctagtgaacgccaagtccatcacaacgacatatttatattcggcatagataac

SEQ ID NO: 237445 - DNA, 190 bp, Glycine max
gggtgtcgcgtccgctatatattctacccgaatttctgcattttccttcttccatcggcgcggcacacagagacacacacatttcgtcggaatgggaagggtgattcgcgcacagcgtaagggtgcggggtctgtgttcaagtcccacacccatcaccgcaagggtccggctaggttccccagcctcgac

SEQ ID NO: 237446 - DNA, 285 bp, Glycine max
gcataagtgagtttgttgatcgagataactacaaatagtgtgatgacaatgaatgtccatgttttcatcgattgctacaattttggtatcatggcaatactatgcgtacgatatgttccctcaccgaatgacaactggctatggtgcccgtactccggatgtgaaatgctcaagttggatgcatgctgtagaagcacacatcatctttggctctgagaccattcctgacgagtgcctagacgcaacaaatgaatacatctatggcgaacaatatatattatactc

SEQ ID NO: 237447 - DNA, 205 bp, Glycine max
  unsure (1)..(205): unsure at all n locations
gatagcgaaacagagagtggtttcagtgagtgatcggtgttcacttgatccttcataagtcgtcatcatcatcatcatcatcaccgttgattgaagaagatgccgatcagaaacatcgccatcggaaggcctgaagaggctactcaccccgacacgttgaaggcggggttggctgagttcatctccaccttgatcntcgtgttcg

SEQ ID NO: 237448 - DNA, 374 bp, Glycine max
gaccacattccaaaacacaaacacatacattgtagtatcacttttgtctcggaatttgttcttttgagttatggcaagcttaaaggttgcatgtgtggttttgatgtgcatggctgtgatgagtgcaccaatgatggtgcaagccgtgtcatgcaatgatgtttctgtgaacctagcaccgtgcctatcttacctgatgcagggtggagatgttccagaatcgtgctgtagcggagtgaggaacattctgggttctgccagcaccacctttgacaaacaaaccgtgtgcaaatgtcttcagcaagctgctaataactatggcatcaacgacgaatacgctcaagcactcccggccgctgcaatgtcagcgtccc

SEQ ID NO: 237449 - DNA, 380 bp, Glycine max
gatagcaaaatcgtttctccaatttaatcaccattgtacaacccaattcccttcgtcgttttcgattaagagagcaatggcacgtaccaagcaaaccgctcgcaagtccaccggaggaaaggctccgaggaagcaattggcaaccaaagccgctcgcaagtcagccccggcgaccggcggagtgaagaagccccaccgcttcaggccaggaacggtggctctgagggagattcgaaagtaccagaagagcaccgaacttctgatccgaaaactcccattccagaggctcgtcagagaaatcgctcaggatttcaaaaccgatctccgctttcagagcagcgccgtatcggctcttcaggaagccgcggaggcttatctcg

SEQ ID NO: 237450 - DNA, 375 bp, Glycine max
  unsure (1)..(375): unsure at all n locations
gagtgcacaagtgagtttgttgatcgagataactagaaacagtgtgatgaaaatgaaggtccttgttttcttcgttgctacaattttggtagcatggcaatgccatgcgtacgatatgttccctctccgaatgaacactggctatggtgcccgtactccggaggtgaaatgcgcaagttggaggcttgctgtggaagcacacaacatctttggctttgagaccattcctgaagagtgcgttgaagcaacaaaggaatacatccatggcgaacaatatagatcagactccaaaacagttaaccaacaagcttacttttatgccagagacctcgaagtcaatcccaatgacacatttgtgttcagtatanatggcac

SEQ ID NO: 237451 - DNA, 379 bp, Glycine max
gaagtgcaagagtttgttgtgagctataagctagtttatcgtgaggagaatatgaagttgtttgttttctttgttgctgcagtagttttggtagcatggccatgccatggcgcaggctaccaaaggttccctctccgaatgaaaactagctatggtgagcgttcttcggaggtaaaatgcgcaagttttaggcttgctgtggaagcacacaacatccgagcctttaaaaccattcctgaagagtgcgttgaaccaacaaaggactacattaatggcgaacaatttagatcagactctaaaacagttaaccaacaagctttcttttatgctagtgaacgcgaagtccatcacaacgacatatttatattcggcatagata

SEQ ID NO: 237452 - DNA, 367 bp, Glycine max
ggcacaagtgagtttgttgatcgagataactagaaacagtgtgatgaaaatgaaggtccttgttttcttcgttgctacaattttggtagcatggcaatgccatgcgtacgatatgttccctctccgaatgaacactggctatggtgcccgtactccggaggtgaaatgcgcaagttggaggcttgctgtggaagcacacaacatctttggctttgagaccattcctgaagagtgcgttgaagcaacaaaggaatacatccatggcgaacaatatagatcagactccaaaacagttaaccaacaagcttacttttatgccagagacctcgaagtccatcccaaagacacatttgtgttcagtatagat

SEQ ID NO: 237453 - DNA, 409 bp, Glycine max
aggctaatgaacgcgaagtccatcacaacgacatatttatattcggcatatataacaccgtactctctaatatcccatactatgaaaaacatggatatggggtggaggaatttaatgaaaccttatatgatgaatgggttaacaagggcgacgcaccggcattgccagagactcttaaaaattacaacaagctgttgtctcttggcttcaagattgtattcgtgtcaggaagatatcttgacaaaatggccgtaacagaagcaaacctaaacaatgctggcttccacacatgggagcagttaattctcaaggatccacatcatatcactccaaatgcactttcatacaaatcagcaatgcgagagaatctgttgatgcacggatacataattgttggaatcattggaga

SEQ ID NO: 237454 - DNA, 382 bp, Glycine max
ggcacaagtgagtttgttgatcgagataactagaaacagtgtgatgaaaatgaaggtccttgttttcttcgttgctacaattttggtagcatggcaatgccatgcgtacgatatgttccctctccgaatgaacactggctatggtgcccgtactccggaggtgaaatgcgcaagttggaggcttgctgtggaagcacacaacatctttggctttgagaccattcctgaagagtgcgttgaagcaacaaaggaatacatccatggcgaacaatatagatcagactccaaaacagttaaccaacaagcttacttttatgccagagacctcgaagttccatcccaaggacacatttgtgttcagtatagatggcaccgtactctc

SEQ ID NO: 237455 - DNA, 350 bp, Glycine max
ggcacaagtgagtttgttgatcgagataactagaaacagtgtgatgaagatgaaggtccttgttttcttcgttgctacaattttggtagcatggcaatgccatgcgtacgatatgttccctctccgaatgaacactggctatggtgcccgtactccggaggtgaaatgcgcaagttggaggcttgctgtggaagcacacaacatctttggctttgagaccattcctgaagagtgcgttgaagcaacaaaggaatacatccatggcgaacattatagatcagactccaaaacagttaaccaacaagcttacttttatgccagaaacctcgaattcaatcccaaggacacat

SEQ ID NO: 237456 - DNA, 395 bp, Glycine max
  unsure (1)..(395): unsure at all n locations
atacgtacggccacgagtacaggactgcaagaaaacgtacagaaaggggatcataaacctaatccctatttttcttcctcagtagtgtcatttacgcttctcttctctgcagcaactatgcctaaccctaaggtcttcttcgacatgaccatcggcagtcaatctgctggccgcatcgtgatggagctctacgccgacgtcactccccgcaccgccgagaacttccgcgcgctttgcancggcgagaagggcgtanggcggagcggcaagcccctcactacaagggctcgtctttccacgcgttatccgagtttcatgtgtcaaggtgggactttcacgcggaaacggaacggcggcgagtcgatttatggcgccaagttcgccgacgagaactt

SEQ ID NO: 237457 - DNA, 371 bp, Glycine max
  unsure (1)..(371): unsure at all n locations
ggcatcaattcaaaatatatcatcaattataagcatgggtttgtggaacacaacgaatgcagtgtcttgccgctttcacaagtttggtgatgaccaaaagaatctggtcttccaaggtgatgccacgtcttcttccaggggcatagaactcacaaagttagacggtggaggaaaaccagtgggtggcagtgtggggagagtgttatactcttctccagtgcacctttgggaaagctctacagtggtcgcaagctttgaaaccgacttcaccttttccatctcatcagactctactactccaggtgatggccttgccttcttcattgcaccatttgacactaanatccctccaaactctggtgggagcaacc

SEQ ID NO: 237458 - DNA, 321 bp, Glycine max
gagatcacatgaagcacaatttctctctttctttttgtgtccagaatggctcctagttctactcacaatactgggttctatgtgcttatgctagttgggatagtgattaccactatggttgctacctgtgctggtaacttctaccaagactttgatctaacatggggtggtgaccgtgctaagatattcaatggtggccagcttctatctctttcccttgacaaagtctctggctctggcttcaaatcaaagaaagaatacctatttgggatgattgatatgcagctcaagctcgttgctggcaactctgctggcactgtc

SEQ ID NO: 237459 - DNA, 380 bp, Glycine max
ggcacaagtgagtttgttgatcgagataactagaaacagtgtgatgaaaatgaaggtccttgttttcttcgttgctacaattttggtagcatggcaatgccatgcgtacgatatgttccctctccgaatgaacactggctatggtgcccgtactccggaggtgaaatgcgcaagttggaggcttgctgtggaagcacacaacatctttggctttgagaccattcctgaagagtgcgttgaagcaacaaaggaatacatccatggcgaacaatatagatcagactccaaaacagttaaccaacaagcttacttttatgccagagacctcgaagtccatccccaaggacacatttgtgttcagtatagatggcaccgtactc

SEQ ID NO: 237460 - DNA, 373 bp, Glycine max
  unsure (1)..(373): unsure at all n locations
ggagcaaaaccctaatccctatttttcttcctcagtagtgtcatttacgcttctcttctctgcagcaactatgcctaaccctaaggtcttcttcgacatgaccatcggcggtcaatctgctggccgcatcgtgatggagctctacgccgacgtcactccccgcaccgccgagaacttccgcgcgctttgcaccggcgagaagggcgtanggcggagcggcaagcccctccactacaagggctcgtccttccaccgcgtgatcccgagtttcatgtgtcagggtggcgacttcaccgccggaaacggaaccggcggcgagtcgatttatggcgccaagttcgccgacgagaacttcgtgaagaagcacaccggt

SEQ ID NO: 237461 - DNA, 384 bp, Glycine max
ggcttcgcctcattttctggctaaccaaccctgacactccttcttctccgcttcctcttcgatcatcgcttcagaatgccgccgaagttcgacccctcccagatcgtcgacgtcttcgtacgcgtcaccggcggtgaggtcggcgcggcgagttccctcgccccgaagatcggtcccctcggtctctcccccaagaagatcggagaagatatcgccaaggaaaccgccaaggactggaagggcctccgcgtcaccgtcaagctcaccgtgcagaaccgtcaggccaaggtcacggtggtcccatccgccgccgcgctcgtcatcaaggccctcaaaggagcccgagcgtgaccgcaggaaaacgaagaacatcaagcacaacgg

SEQ ID NO: 237462 - DNA, 381 bp, Glycine max
  unsure (1)..(381): unsure at all n locations
gggtcggccattagggcgcttgattttgctatgacgaagtacccgccggcttgtgagcgttttgtggatgttttggggttgaagaccgcgtttgcagctttcatgggtaagattcctttaagtaagaagaacaagaaagaaaggtaccaagaggatttggaggagcgcattgtgtcactgattgcgtcattatttggtggaatcttgaggggttctaggagagaaagattattaagtaaatttgttgaaaatgagtgtgagaagatagacaggctaatggaactatacatcagatattcagatagagtcaaagcagaaactgaacggttgaatcaagttgagcttgatgacttggagatggatgaagatganaaatacaac

SEQ ID NO: 237463 - DNA, 368 bp, Glycine max
ggcacaagtgagtttgttgatcgagataactagaaacagtgtgatgaaaatgaaggtccttgttttcttcgttgctacaattttggtagcatggcaatgccatgcgtacgatatgttccctctccgaatgaacactggctatggtgcccgtactccggaggtgaaatgcgcaagttggaggcttgctgtggaagcacacaacatctttggctttgagaccattcctgaagagtgcgttgaagcaacaaaggaatacatccatggcgaacaatatagatcagactccaaaacagttaaccaacaagcttacttttatgccagagaactcgaagtccatcccaaggacacatttgtgttcagtatagatg

SEQ ID NO: 237464 - DNA, 268 bp, Glycine max
ggcacaagtttgttgagatagctagaagcaataagatgaaaatgaaagtgcttgttttgtttgttgctacagttttggtagcatatgaatgccatggctcagactaccagaagttccctctccaaatgaaaactgggtttggtgggcaatacagcaatgaggtggcatgtgccagttggaggcttggcgtggaagcaaacaacgtagtcaagtggcaaactgttcctgcggcttgcggagagtacatagctgactacgtcctaggaga

SEQ ID NO: 237465 - DNA, 357 bp, Glycine max
  unsure (1)..(357): unsure at all n locations
gataacacaaggcagaaagcaagctcatcctagagttttaaaaatggcagcagcctcctccatggctctctcttccccatccttggctggcaaggccgtgaagctgggcccatcagcccccgaagtcgggagggtcagcatgaggaagaccgtcaccaagcaggcctcctccggaagcccatggtacggcccagaccgcgtcaagtacttgggcccattctctggcgagcccccgtcctacctcactggcgagttcccaggtgactacggctgggacactgctgggctttcggccgacccaganaccttcgccagaaaccgtgagctcgaagtgattcactccangtgggccatgct

SEQ ID NO: 237466 - DNA, 280 bp, Glycine max
gaagcacaacatctctatcgagtaaattaactatgaagcctaccctactattatccctttccttcctgcctctctttgctttcctggctctttcagaagatgttgaacaagttgtggacataagtggcaaccccatttttccaggtggcacatattacattatgccatcaactttgggggcgctgccggtggtggattgaaactaggccggacaggaaactcaaactgcccagttactgttttgcaagattactcaaaaatcctccgtgggaaaacaatt

SEQ ID NO: 237467 - DNA, 367 bp, Glycine max
gcacaagtttgttgagatagctagaagcaataagatgaaaatgaaagtgcttgttttgtttgttgctacagttttggtagcatatgaatgccatggctcagactaccagaagttccctctccaaatgaaaactgggtttggtgggcaatacagcaatgaggtggcatgtgccagttggaggcttggcgtggaagcaaacaacgtagtcaagtggcaaactgttcctgcagcttgcggagagtacatagctgactacgttctaagagaccaatatagatcagattccaaaacggttaaccaacaagcttaattccaatgcaaatccctcaaactcaacaacaaagatgtctttgtcttggacgttgac

SEQ ID NO: 237468 - DNA, 359 bp, Glycine max
ggcaagagtttgttgtgagctataagctagtttatcgtgaggagaatatgaagttgtttgttttctttgttgctgcagtagttttggtagcatggccatgccatggcgcaggctaccaaaggttccctctccgaatgaaaactggctatggtgagcgttcttcggaggtaaaatgcgcaagttttaggcttgctgtggaagcacacaacatccgagcctttaaaaccattcctgaagagtgcgttgaaccaacaaaggactacattaatggcgaacaatttagatcagactctaaaacagttaaccaacaagctttcttttatgctagtgaacgcgaagtccatcacaacgacatattt

SEQ ID NO: 237469 - DNA, 375 bp, Glycine max
ggcacaagtgagtttgttgatcgagataactagaaacagtgtgatgaaaatgaaggtccttgttttcttcgttgctacaattttggtagcatggcaatgccatgcgtacgatatgttccctctccgaatgaacactggctatggtgcccgtactccggaggtgaaatgcgcaagttggaggcttgctgtggaagcacacaacatctttggctttgagaccattcctgaagagtgcgttgaagcaacaaaggaatacatccatggcgaacaatatagatcagactccaaaacagttaaccaacaagcttacttttatgccagagacctcgaagtccacccaaagacacatttgtgttcagtatagatggcaccgta

SEQ ID NO: 237470 - DNA, 382 bp, Glycine max
  unsure (1)..(382): unsure at all n locations
ggcacaagtgagtttgttgatcgagataactagaaacagtgtgatgaaaatgaaggtccttgttttcttcgttgctacaattttggtagcatggcaatgccatgcgtacgatatgttccctctccgaatgaacactggctatggtgcccgtactccggaggtgaaatgcgcaagttggaggcttgctgtggaagcacacaacatctttggctttgagaccattcctgaagagtgcgttgaagcaacaaaggaatacatccatggcgaacaatatagatcagactccaaaacagtcaaccaacaagcttacttttatgccagagacctcgaagtcaatcncaaggacacatttgtgttcagtatagatggcaccgtactctct

SEQ ID NO: 237471 - DNA, 232 bp, Glycine max
ggcacaagtgagtttgttgatcgagataactagaaacagtgtgatgaaaatgaaggtccttgttttcttcgttgctacaattttggtagcatggcaatgccatgcgtacgatatgttccctctccgaatgaacactggctatggtgcccgtactccggaggtgaaatgcgcaagttggaggcttgctgtggaagcacacaacatctttggctttgagaccattcctgaaaag

SEQ ID NO: 237472 - DNA, 380 bp, Glycine max
gacaacacaacgcaacacaacgcgcactctctcttttctctcttaacacaaaaaccctatcgttcttcgcggtttcgccgattctcgccatgccgaaagccaaatccgacgccaaagccgccgatagccggttgaagcgcaagggcgctggtgctggaaggaagcaatcgaagaaagctgctaaggatcctaacaagccaaagagacctccaagcgctttcttcgttttcatgtccgagttcagagagcagtttaagaaggagcatcctaacaataaatccgtcgctgttgtcggtaaagctggtggtgacaaatggaaatcgctgtctgatgctgaaaaaggcccccttcgttgccacggccgaaaagaagaaacaaga

SEQ ID NO: 237473 - DNA, 367 bp, Glycine max; identical to SEQ ID NO: 236680
  unsure (1)..(367): unsure at all n locations

SEQ ID NO: 237474 - DNA, 382 bp, Glycine max
ggcacaagtgagtttgttgatcgagataactagaaacagtgtgatgaaaatgaaggtccttgttttcttcgttgctacaattttggtagcatggcaatgccatgcgtacgatatgttccctctccgaatgaacactggctatggtgcccgtactccggaggtgaaatgcgcaagttggaggcttgctgtggaagcacacaacatctttggctttgagaccattcctgaagagtgcgttgaagcaacaaaggaatacatccatggcgaacaatatagatcagactccaaaacagttaaccaacaagcttacttttatgccagagacctcgaagtcaatcccaaggacacatttgtgttcagtatagatggcaccgtactctct

SEQ ID NO: 237475 - DNA, 372 bp, Glycine max
gacaacacaacgcaacacaacgcgcactctctctttttctctctgttttttgttctctcttcgcttaaaccctatcgttcttctcgttttcgccgattctcgccatgccgaaagctaaatccgacgccaaagccgccgatagcaggttgaagcggaagggcgctggtgctgggaggaagcaatcgaggaaagctgctaaggaccctaacaagccgaagagacctccaagcgctttcttcgttttcatgtccgagttcagagagcagttcaagaaggagcatcctaacaacaaatccgtcgctgttgtcggcaaagctggtggtgaaaaatggaaatcgctatctgatgctgaaaaggccctttcgttgctac

SEQ ID NO: 237476 - DNA, 374 bp, Glycine max
  unsure (1)..(374): unsure at all n locations
ggaagtcgccgtttgttttcttttcgttcgcatcttctctctctctcagaaagatgaaggtggtcgccgcgtatttgctcgccgtcctcggtggcaacaacagcccctccgccgatgtcatcaaggaaatccttggctccgttggagtagaagcagatgaagataggattgaatcgtttttgtctgaagttaagggtaaggatatagttgagcttattgctgccggtacggaaaagttggccacggttccttctggtggtggtggtgccgttgccgtcgccgcagctcctgngggaagtgctgctgctgctgctcctgctgctgaggcaaagaacgaggaaaaggtggangagaaagaggaatctgatgatgat

SEQ ID NO: 237477 - DNA, 374 bp, Glycine max; identical to SEQ ID NO: 236536

SEQ ID NO: 237478 - DNA, 380 bp, Glycine max
gaaggtgcaagagtttgttgtgagctataagctagtttatcgtgaggagaatatgaagttgtttgttttctttgttgctgcagtagttttggtagcatggccatgccatggcgcaggctaccaaaggttccctctccgaatgaaaactggctatggtgagcgttcttcggaggtaaaatgcgcaagttttaggcttgctgtggaagcacacaacatccgagcctttaaaaccattcctgaagagtgcgttgaaccaacaaaggactacattaatggcgaacaatttagatcagactctaaaacagttaaccaacaagctttcttttatgctagtgaacgcgaagtccatcacaacgacatatttatattcggcatagata

SEQ ID NO: 237479 - DNA, 378 bp, Glycine max
gaaggtgcaagagtttgttgtgagctataagctagtttatcgtgaggagaatatgaagttgtttgttttctttgttgctgcagtagttttggtagcatggccatgccatggcgcaggctaccaaaggttccctctccgaatgaaaactggctatggtgagcgttcttcggaggtaaaatgcgcaagttttaggcttgctgtggaagcacacaacatccgagcctttaaaaccattcctgaagagtgcgttgaaccaacaaaggactacattaatggcgaacaatttagatcagactctaaaacagttaaccaacaagctttcttttatgctagtgaacgcgaagtcatcacaacgacatatttatattcggcatagat

SEQ ID NO: 237480 - DNA, 377 bp, Glycine max
  unsure (1)..(377): unsure at all n locations
ggcacttcaattgcaatcaaattagttcattctctttgcgcagttccctacctctcctttcaagatgcagatcttcgtcaagaccctcaccggaaagaccatcacccttgaggtggaaagctctgacaccatcgacaacgtcaaggccaagatccaggacaaggaaggaattcccccggatcagcaacgtctcatcttcgccggaaagcagctcgaggacggccgtaccctcgccgactacaacatccagaaggagtcaacccttcaccttgtccttcgtctccgtggtggcatgcagatcttcgtcaagactctcactggcaaaaccataaccctagaggtcgaaagctctgacnacattgacaacgtcaaggcca

SEQ ID NO: 237481 - DNA, 391 bp, Glycine max
gggcgcacccagagaggaagcttagagagagagagagagagagagagagagaggagagagtattggcgcttcatcaagatgggtatttctagggattccatgcacaagaggcgtgccactggtggcaagaaaaaggcttggagaaagaagagaaagtatgagcttgggcgtcaggcagcaaacaccaagttatcaagcaacaagacaatcaggaggattcgtgttagaggtggcaatgttaaatggtgggcattgaggctggatactggcaattactcatggggtagtgaagcagttactcgcaagactcgtattctagacgttgtttacaatgcctcaaacaacgagcttgtgcgaactcagaccctggtcaagagtgctattgtccagg

SEQ ID NO: 237482 - DNA, 293 bp, Glycine max
ggcacaagtgagtttgttgatcgagataactagaaacagtgtgatgaaaatgaaggtccttgttttcttcgttgctacaattttggtagcatggcaatgccatgcgtacgatatgttccctctccgaatgaacactggctatggtgcccgtactccggaggtgaaatgcgcaagttggaggcttgctgtggaagcacacaacatctttggctttgagaccattcctgaagagtgcgttgaagcaacaaaggaatacatccatggcgaacaatatagatcagactccaaaacag

SEQ ID NO: 237483 - DNA, 381 bp, Glycine max
ggggtttccgatggcgacgtggcctctgtttgcggagcattttttcaacgagaagctggtggtggatgtgttgaagattggggtgccggtgggggcgaaagagtggaggaactggaacgagtttgggagtgaggtggtgaaacgggaggagattggaaacgcgattgcttcgttgatgagtgaggaagaagaagatggaggaatgaggaagagagccaaggagctaagcgttgcggcgaagagtgctataaaggttggtggatcttcgcacaacaacatgaaggaattgattcgggagctcaaggagatcaagctttccaaggaggctcaagagaccgcacccaatccttaagactggttctgcttttcatcttttgaaca

SEQ ID NO: 237484 - DNA, 355 bp, Glycine max; identical to SEQ ID NO: 235684

SEQ ID NO: 237485 - DNA, 379 bp, Glycine max
  unsure (1)..(379): unsure at all n locations
ggaaacgaagaagccctaactacgcacgcattcgtgagaaaactcaatattcgtcgctcatggcactctcttctcgtctcttttccaaatccaaattgatctatggcagtcaaatacttctacaaaaggagcatgctattccagttcgtcactttgctaaagagtctgcccctcctgcccttaagggagacgagatgctgaagaacatttttgtggaggtgaagaacanatttgagaccgccataggaatattaaagaaggagaaaatcaccattgacccagaagattcagctgctgtntctcattatgcanaggtcatgaaaacaattagagagaaggcaagcttattgtcggagtcncaagacatactatccaccaa

SEQ ID NO: 237486 - DNA, 375 bp, Glycine max
gacttgtaataattcttataacacaacacaacccatggccaccacctccgcattcctcctccttcccctcctcctgctgctccacctcgccatcgccgctcacggcatcggcatcaactacggcacgctcggcgacaaccttccaccgcccgcggcggtggcgaacttcctgaagacgaagacgaccatcgaccgcgtgaagatctacgacgtgaacccggacatcctgcgggccttcgccggcagcggcatctccgtgacggtgaccgcccccaacggcgacatcgccgccttaaccaaaatcgactcggcgaggcagtgggtggcgacgcacatcaaaccctttcaccctcagaccaaaattaattacatcct

SEQ ID NO: 237487 - DNA, 155 bp, Glycine max
tgtctgccgcttagcaacattttcggcatcgaagcaatgccacgcgtacgagctgttcgttctccgaatgtgcactgactagatgtgcccgtacaccagttgtgcaatgtgcaagttgaatgcttgctgtcgtatcacagaacatctttggcttt

SEQ ID NO: 237488 - DNA, 333 bp, Glycine max
gacacttgcccatcatcaaagtttcttcctttctctgctctttgccttctctgacacatttggtgccttgtacagcgtgttttggcaggaaggtggtatggcgaaggacgttgaggttgctgagcgtggctccttctctgggaaggactaccaggaccctccaccagcaccactcattgatgctgaggagctcacaaagtggtccttttaaagggctctcattgctgaattcattgccactttgctcttcctctacattactgtgcccacagtcatagggtaaagcaccagactgacctcaaggaaaatggtgaaatctgtggtggggttggc

SEQ ID NO: 237489 - DNA, 180 bp, Glycine max
ggcacaagtgagtttgttgctcgagataactagtcacagtgtgatgacaatgaaggtccttgttttcttcgatgctacaattttggtagcactgcaatgccatgcgtaccatatgttcccctctccgaagaagcccggactatggtgcccgtactccggaggtgaaatgcgcaagttgaa

SEQ ID NO: 237490 - DNA, 275 bp, Glycine max
gaaggtgcaagactttgttgtgagctataagctagtttatcgtgaggagaatatgaagttgtttgttttctttgttgctgcagtagttttggtagcatggccatgccatggcgcaggctatcaaaggttccctctccgaatgaaaactggctatggtgagcgttcttcggaggtaaaatgcgcaagttttaggcttgctgtggaagcacacaacatccgagcctttaaaaccattcctgaagagtgcgttgcaccaataaaggactacattaatg

SEQ ID NO: 237491 - DNA, 315 bp, Glycine max
gatcagtatacattgtctattccatcttccactctttcacactcacctatggctccaatctcaaaactcagtcctttcctattcttaacaacccttttagtttccctccaagttaatgccagagacagccaattcttcagcaaagtcacccctctcaacagcaacatcaaggagactgagactcgcacacatgaaggccaagtaaacaagccagaacaacaaccaacattcattcctgaaactgaaaacagttatggcctatatggtcatgagactggtctgcaccctctcatgactacaacatctaatgctgca

SEQ ID NO: 237492 - DNA, 265 bp, Glycine max
gatcagtagtgagtgtgtagactaagatccagacattcagtgtcatgaatgggacggtccttgttacccacgccgctcctattctggtcacatggtttagcttcgcgtcaaatttatgccctcgacaaataattcttgagcatggtgacccgtctcaggaggtgaactgcgcaagttggaagcttgctgtggaaggacacatcatcattggctttgagccgataccagacaatcttgttgctgcaaccagtgattgcctctatgg

SEQ ID NO: 237493 - DNA, 354 bp, Glycine max
ggagtttgttgtgagctataagctagtttatcgtgaggagaatatgaagttgtttgttttctttgttgctgcagtagttttggtagcatggccatgccatggcgcaggctaccaaaggttccctctccgaatgaaaactggctatggtgagcgttcttcggaggtaaaatgcgcaagttttaggcttgctgtggaagcacacaacatccgagcctttaaaaccattcctgaagagtgcgttgaaccaacaaaggactacattaatggcgaacaatttagatcagactctaaaacagttaaccaacaagctttcttttatgctagtgaacgcgaagtccatcacaacgacatatt

SEQ ID NO: 237494 - DNA, 310 bp, Glycine max
ctggtcacctgatttacaagcttggaggcattgacaagcgtgttattgagaggtttgagaaggaagctgctgagatgaacaagaggtctttcaagtatgcctgggtgctggacaaacttaaggctgagcgtgaaagaggaatcaccattgatattgctttgtggaagtttgaaacaacaaagcattattgcacagttattgatgcgcctggacatagggatttcattaagaatatgattactgggacatcccaagctgactgtgctgttcttatcattgattcgaccactggtggttttgaagctggtat

SEQ ID NO: 237495 - DNA, 303 bp, Glycine max
gagggtttcgagttacagccgcaccttgattcagagcagagcgaccttgaagagctatggctgtcggaaagaataagaggatttccaagggaaagaagggtggcaagaagaaagccgctgatccctttgccaagaaggactggtacgatatcaaggccccttccgtctttcaggtcaagaatgttggcaaaaccctcgtctctcgtacccagggaaccaagattgcttctgaaggactcaaacataaattgtttgaggtctcattggctgatctccaaggagatgaagacaatgccttcaaga

SEQ ID NO: 237496 - DNA, 334 bp, Glycine max
ggtggttcttcatttcggacattcatatcttcttcgtcctctgaatcaagtttcgactttatttgagtagttttgctctttccttccaaaatgagccggccaatggaggaagatactgcaggtaagaatgaggaagaggagttcaacaccggaccactatctgtactcatgatgagtgttaaaaataatactcaggtactgataaattgtcggaacaacaaaaagcttctgggtcgtgtaagggcttttgacaggcactgcaacatggttcttgaaaatgtcagggagatgtggactgaggtgccaaagactggtaaaggaaagaaaaagtccc

SEQ ID NO: 237497 - DNA, 308 bp, Glycine max
gggacaagttaatttggttgttcaaaatacttagaaccattgtaatgaaaatgaaggtccttgtttccttcgttgcaacaattttggtaccatgcattgcaatgcgtacgatatgttccctctcgaatgaacactggctatggtgcccgtactccggaggtgaaatgcgcaagttggaggcttgctgtggaagcacacaacatctttggctttgagaccattcctgaagagtgcgttgaagcaacaaaggaatacatccatggcgaacaatatagatcagactccaaaacagttaaccaacaagctta

SEQ ID NO: 237498 - DNA, 352 bp, Glycine max
ggtgcacaagtgagtttgttgatcgagataactagaaacagtgtgatgaaaatgaaggtccttgttttcttcgttgctacaattttggtagcatggcaatgccatgcgtacgatatgttccctctccgaatgaacactggctatggtgcccgtactccggaggtgaaatgcgcaagttggaggcttgctgtggaagcacacaacatctttggctttgagaccattcctgaagagtgcgttgaagcaacaaaggaatacatccatggcgaacaatatagatcagactccaaaacagttaaccaacaagcttacttttatgccagagacctcgaagtccatcccagggacacat

SEQ ID NO: 237499 - DNA, 322 bp, Glycine max
gaccgccgttctcatctctcttcccagttctcacctcagcgctgcatcttcacgtcgtctctaacgagggaaaatgagtcgaggaggtgcagcagcagcgaagggaaagaagaagggtgctacattcaccattgactgtgcaaagccagtagaagagaagatcatggacattgcttctctcgagaagtttcttcaagagaggatcaaggttggtggcaaagctggtgctcttggtgactctgttaccgttacacgtgagaagacgaagattattctcacctctgactgtaacttttccacacggtatttgaagtacttgacg

SEQ ID NO: 237500 - DNA, 341 bp, Glycine max
gccaagcaaaaccctaatccctctttcttcaccttcctcagtattgcgattttcgattctcttcgctgcaactatgcctaaccctaaggtcttcttcgacatgaccatcggcggtcaacctgccggccgcatcgtgatggagctctacgccgacgtgactccgagcaccgccgagaacttccgcgcgctctgcaccggcgataagggcgccgggcggagcggcaagctcctccactacaaaggctcgtcattccaccgcgtgataccgaacttcatgtgccacggcggcgacttcaccgccggaaacggcaccggatgcgagtcgatctacggcgccaagt

SEQ ID NO: 237501 - DNA, 287 bp, Glycine max
ggcacaagtttgttgagatagctagaagcaataagatgaaaatgaaagtgcttgttttgtttgttgctacagttttggtagcatatgaatgccatggctcagactaccagaagttccctctccaaatgaaaactgggtttggtgggcaatacagcaatgaggtggcatgtgccagttggaggcttggcgtggaagcacacaacgtagtcaagtggcaaactgttcctgcagcttgcggagagtacatagctgactacgttctacgagaccaatatacatcagattcc

SEQ ID NO: 237502 - DNA, 330 bp, Glycine max
ggaacttctcacgttcatttctacacatccctagctctgtcgttccgtcgttgacgatggcgtttcgggtgcgaagccctgacctccgctctctctttcttctctctctcttgtccatcgcttccgccaatgtcttcttcgaagagcgtttcgatgacgggtgggaaaatcgatgggttaaatcagattggaaaaaagatgagaacgtggctggggagtggaaccacacctctggtcaatggaatggagacgctaatgacaaaggtattcaaaccagtgaggattacagattctatgctatttcagctgagtaccctgaattcagcaaca

SEQ ID NO: 237503 - DNA, 313 bp, Glycine max
  unsure (1)..(313): unsure at all n locations
gatatcagaagctcagacctagggatttcggccgtttgctcnccaaaaaggaaagaagcagattctgtcctttgaaatcaacaagaaaagatgtcaggtgaagaggtagctgttgcagttgaggtacctgctacttcaattccaggtgagccaatggacatcatgactgctctacagcttgtgctgagaaaatctctggcctatggtggtcttgcacgaggtcttcatgaaggtgccaaggtgatcgagaagcatgctgcacagctatgtgttctagcagaagattgtgaccaacctgattatgtgaaactgg

SEQ ID NO: 237504 - DNA, 321 bp, Glycine max
gcatcacaacagtaatagaaaatggaagaattatgggtagtttaccaagagtaccggcttcaaatattgctgacaagttatggttagtcttccaaggaattggtgatattgcctttgcctatccatacacagtcatcctccttgagatacaggacactctagagtctcctccaccagaaaacaagaccatgaaaaacgcctccatgattgctatcctcattacaacattcttctacctctgctgtggatgctttggatatgcggcttttggaaatcaaacaccaggaaacctcttgacagggtttggattttacgagcttt

SEQ ID NO: 237505 - DNA, 333 bp, Glycine max
ggcacaattgattttgttgatcgagataactagaaacagtgtgatgaaaatgaaggtccttgttttcttcgttgctacaattttggtagcatggcaatgccatgcgtacgatatgttccctctccgaatgaacactggctatggtgcccgtactccggaggtgaaatgcgcaagttggaggcttgctgtggaagcacacaacatctttggctttgagaccattcctgaagagtgcgttgaagcaacaaaggaatacatccatggcgaacaatatagatcagactccaaaacagttaaccaacaagcttacttttatgccagagacctcgaagt

SEQ ID NO: 237506 - DNA, 303 bp, Glycine max
acctttctcattccccatctcctcaccttattcagccactgctaatttctagggttccgaaatggacgctggcggaaagatcaagaagggcgccggaggaagaaagggcggcggccccaagaagaagccggtttcaaggtccgtcaaggccggtctccaattccccgtcggaagaattggccgttatttgaagaaaggaatgtacgcccagcgtgtcggtaccggtgctcccgtttacttggccgcaattctcgagtacctaactgctgaggtgcttgagttggctgggaatgctgcacgtga

SEQ ID NO: 237507 - DNA, 301 bp, Glycine max
gaaggtgcaagagtttgttgtgagctataagctagtttatcgtgaggagaatatgaagttgtttgttttctttgttgctgcagtagttttggtagcatggccatgccatggcgcaggctaccaaaggttccctctccgaatgaaaactggctatggtgagcgttcttcggaggtaaaatgcgcaagttttaggcttgctgtggaagcacacaacatccgagcctttaaaaccattcctgaagagtgcgttgaaccaacaaaggactacattaatggcgaacaatttatatcagactctaaa

SEQ ID NO: 237508 - DNA, 256 bp, Glycine max
gagcgtacacgagtttgttatgcactagccgctgatttatcatgcggagaatatgatgttgtttgttttctttgttgctgcagtagttttggtcacatggtcatgccatggcgcaggctatcatcagttcgctcaccgattgacaactggctatggtgaacgttcttcgggcgtataatgcacgttgttttatgcgtgctgtggacgcacacaagatccgagcctttagtagcattcctgaagcgtacgttgaacc

SEQ ID NO: 237509 - DNA, 382 bp, Glycine max
aattcccggctcgacccacacgtcagaagacgagagaagggggcgtacacagcctcaacaaccctaacgcgtgcagagcagagagagacgcagccatggggcgaagacccgcgaggtgttataggcaaattaagaacaaaccataccccaagtcacggttttgccgtggtgttcctgatcccaagatcaggatttacgatgttggtatgaagaagaacggtgttgatgagtttcctttctgtgtccatctggttagttgggagaaggaaaacgtttctagtgaggccctggaagctgctcgtattgcttgcaacaagtacatggccaaatttgctggaaaggatgctttccacttgagagtcagggtgcacccattccatgt

SEQ ID NO: 237510 - DNA, 373 bp, Glycine max
gaattccatggccgacccgacgcgtcagcccacgcatccgtcgcgacgcaaggggacggttttgcgcggtagatgcggctcagccgctgtagactccgagctctgctgtgatgaacgtgaccgtcggtaatatccacggagcgggatctgcggtcacacggaagtcccatccctagaagcagttgtgggccgacatgtcatacggcaaatcgtatccgtggtcctgatgtaaaatgcccttttctggtgcatgccgtgccaacggacttgtcctttggcatagaggtcatgccgcaaaactgcgtagatccgccattcgtatatgtgccagggtacaacttatcatcagacggaagaacattgccgcatttgt

SEQ ID NO: 237511 - DNA, 243 bp, Glycine max
gggatgttgatcgagataactagaaacagtgtgatgcaaatgaaggtccgtgttttcctcgtttcgattcgtctggggacatggcaatcccatgcctacgatatgttccctctcctcaggaacactgcctctgctgcccgtcctccaaaggtgacgttgccaccttgggtgcttgctgtggcagcatacaacatctttaactttgacatcattcctgacgactttattcccgcttcaatggaa

SEQ ID NO: 237512 - DNA, 325 bp, Glycine max
ggaatccaataaagcaaaaactaatccgaatccggtcctcggaatccggcaatggaacttccttcaacggaacttcaggcgcacccgttttcggttccgattgcattgaatcaaatctgagaaccattctcattgcccgtctgtaatcatgtcaggaaagtatatcatttctgctattcttggatcatttggagttgcatgggtttgtgattattatgtttcagagaaaaagctatttggaggttctacccctggcactattacgaacaatgagtgggcagaagagactgacaaaaaattgcaggcatggcctcgtactgccggt

SEQ ID NO: 237513 - DNA, 341 bp, Glycine max
caaaaacccaacaaaggggggccttgcaggcaaaaagatggccaccgttccagggcagctcgtgtgggagatcgtcaagaaaaagaattccttcttggtcaagcattttggaaggggcacccagagcgtcgacttcagcagagagagcaagaatctctataacctcaattcgatcaagtactcaggtttggcatacatgaatactgttactgttcagcctgagggcaaagatcaggctgtgttgttggctacaaccaagacacagaagcaaaacaagcccgctgcattgctccacaaatctgtgatgaagaaggagttcaggacgatggcacaaactgttg

SEQ ID NO: 237514 - DNA, 270 bp, Glycine max
ggcagaagtgagtttgttgatcgagataactagaaatagtgtgatgaaaatgaaggtccttgttttcttcgttgctacaattttggtagcatggcaatgccatgcgtacgatatgttccctctccgaatgaatactggctatggtgcccgtactccggaggtgaaatgcgcaccgttggaagcatgctgtggaagcacaaaatatcctttggctttgagaccattcctgacgaatgcgttgaagcagcaaaggaatacatccatggcgaa

SEQ ID NO: 237515 - DNA, 321 bp, Glycine max
ggcacaagtgagtttgttgatcgagataactagaaacagtgtgatgaaaatgaaggtccttgttttcttcgttgctacaattttggtagcatggcaatgccatgcgtacgatatgttccctctccgaatgaacactggctatggtgcccgtactccggaggtgaaatgcgcaagttggaggcttgctgtggaagcacacaacatctttggctttgagaccattcctgaagagtgcgttgaagcaacaaaggaatacatccatggcgaacaatatagatcagactccaaaacagttaaccaacaagcttacttttatgccag

SEQ ID NO: 237516 - DNA, 374 bp, Glycine max
cattcccgggccgacacacgcgtcaggcgaaacagagagtgatttcagtgagtgatcggtgttcacttgatctcatcataatcgtcagcgtcaattgaagaagatgccgatcagaaacatcgccgtcggaaggcctgaagaggcgactcaccccgacacgttgaaggcggctttggctgagttcatctcaaccttcatcttcgtgttcgccggctcaggctccggcatcgcctacaacaagctcaccgacaacggcgctgccacccctgccggcctcatctccgcctccatcgcccatgcattcgccctcttcgtcgccgtctccgtcggcgccaacatctccggcggccacgtcaaccccgccgtcaccttcg

SEQ ID NO: 237517 - DNA, 327 bp, Glycine max
gattatatttgagttcaaacaaatcaaagccatggccacctccaacttctctattgttctctccgtctccctagccttctttttggtgctacttaccaaggcacactcgaccgataccgtttctttcaccttcaacaagttcaacccagtccaaccaaacattatgctccaaaaagatgctagtatttcatcctctggggtgttacaactcaccaaagttggcggcaacggcgtgcccacctcgggatctctcggtcgtgccctttacgctgccccaatccagatttgggacagcgaaaccggcaaggtagccagctgggctacatc

SEQ ID NO: 237518 - DNA, 351 bp, Glycine max; identical to SEQ ID NO: 236393

SEQ ID NO: 237519 - DNA, 324 bp, Glycine max
gatatttgagttcaaacaaatcaaagccatggccacctccaacttctctattgttctctccgtctccctagccttctttttggtgctacttaccaaggcacactcgaccgataccgtttctttcaccttcaacaagttcaacccagtccaaccaaacattatgctccaaaaagatgctagtatttcatcctctggggtgttacaactcaccaaagttggcagcaacggcgtgcccacctcgggatctctcggtcgtgccctttacgctgccccaatccagatttgggacagcgaaaccggcaaggtagccagctgggctacatc

SEQ ID NO: 237520 - DNA, 358 bp, Glycine max
aaaagacgacaagaagggggaaaagttaatttggtgattcaaaatactaagaacaattttgtgaaaattaaaggccctggtttcctccgtggcaaaaattttggaaccatggcattgcaatgcttacaaaagtttccctctccgaatgaacactggctatggtgcccgtactcgggaggtgaaatgcgcaatttggacgcttgctgtggaagcacacaacatctttggctttgagaccattcctgaagagtgcgttgaagcaacagaggaatacatccatggcgaacaatatagatcagactccagaacagttaagcaacaagcttacttttatgccagagacctcgaaatccatccc

SEQ ID NO: 237521 - DNA, 351 bp, Glycine max
ggcccttctacctttttcccattcaaagcagcctcaaattcgtgccactctcttcaaaatggccgttaccttctcaaatctccacacagaatcaggtctcaagtccctcgacgacttcctctctgggaaggtctacgtttctggggatcagttcacaaaggacgacatcaaagtgtatggtgctgttttggagaagccaggtgactcttttcccaatgctgccaagtggtacgaggttgtctcatctcagcttgctgcaagcttccccggcaatgctcaaggggtgagattcagtggcaaagcttctgctccagcggaggctgctcctgcgaaaccggatgcctctgctgc

SEQ ID NO: 237522 - DNA, 339 bp, Glycine max
cagaaggggagcaacttaggcaatggaaaaggaaaaccctaggaaatgagaagaattctaacctggttccgccccttcttcctccttggtgccttaacctcaaatcaaccttcagcaacggcggatgatgatcaggtgtagaacattgacgggaataagcttcaatacggtgtcaattatttcgtgtggccattgataagaggaaatggcggtggattacagttagcaaaagcaggaaacgaaacttgccctctgactgtggtgcaatctggcaacaagctctctgaggggttaccgataaagattgcatcccgataagcaagagtcgctttcatcacc

SEQ ID NO: 237523 - DNA, 343 bp, Glycine max
ggcacaagtttgttgagatagctagaagcaataagatgaaaatgaaagtgcttgttttgtttgttgctacagttttggtagcatatgaatgccatggctcagactaccagaagttccctctccaaatgaaaactgggtttggttggccataccaccatgaagttgccagttcccattggaagcctggccttgaaaccaacaacgtattccagtgtgcaaactgttcctgcaacctgccggagagtacatagctgactacgttctaggagaccaatatagatcagattccagaacagttaaccaacaagcttatttctatgctaaatccctcaaactcaccaac

SEQ ID NO: 237524 - DNA, 349 bp, Glycine max
gacagctattcctcttaagcttgctactgagtttccacactgcataccttaggtcttccgaattcgaagttaatttgcaagatggctaaggaaaaggctcagatcaacattgtggtggttggtcatgtggaccctgaggaggcaaccaccattaacgagctgaagaagcctgttgtggagaaagaagctccagggcatgccatatgagggcatgcacgtacggcctcggaggggaaccagaaaattatgttaacagaataatctggaaccctaatgtatcagtgtcatcatcagtgtgtagtttaagctagctttgctatggttacgttccttgagatgagagtcttga

SEQ ID NO: 237525 - DNA, 337 bp, Glycine max
ggagtagcgatggagaagaagaatggtgagctaaagtcaattttccttcctttcctttccactagtcatataatcgcgctagtggacatggtcagactcatcgccttgcacgacgtcgaggtcactatcatcacgaccgcacataacgccatcgttttccaaaagtccatcgatttagatgcgagtcgcggtcgccccatcagaacgcacgttgtcaacttccccgccgcacaagtgggtctccccgttgggatcgaagccttcaacgtcgatacgcctcgggaaatgaccccagaatctacatgggcctatcccttcgccaacaattctttgaaaa

SEQ ID NO: 237526 - DNA, 357 bp, Glycine max
gatattttcacacgatcaaaaccctcgcgctctctattcgcatctgaattctcagtcgcttctcgaaccctacttcttccgcggtgattgcatttgaattcctgtaatggcgattgataatatttttaaacatgaagccagtgaagaaaaaggagagcgggccagaatggcttcttttgttggagccatggctattgctgacttggtgaagacaaccttggggccaaagggaatggataaaattttgcagtcaacaggtagaggacgtgaagttactgtcactaatgatggtgctacaatcttgaagtccctccatattgataacccagctgctaaagtccttgttgacatatcaaa

SEQ ID NO: 237527 - DNA, 314 bp, Glycine max
  unsure (1)..(314): unsure at all n locations
tgatgtttttcaaaatgccagggcttgcataaggctcanggctgcctgtgagaagatcaagaagatgcttagtgcaaatcctgaggcacctctcaacattgagtgcttgatggatgagaaggatgtccggggcttcatcaagcgagatgaatttgagcaactaagtcttccaattttggaacgtgtgaaagggcctctggagaaggcacttgctgaagcaggtcttaccgtcgaaaatgtgcacacggttgaggtggttggttcaggttctcgtgtgccggccattaacaaaatattgacagagtttttcaaaa

SEQ ID NO: 237528 - DNA, 358 bp, Glycine max; identical to SEQ ID NO: 234733

SEQ ID NO: 237529 - DNA, 282 bp, Glycine max
gacaaacattattcctaaaccttatcctgtttgcttccatggaaatgatttccgcttcgaacttgaatcccaaagctccgatgttcgtgcctctcgcccatcggacagtggaggaattctccgaccaatggtgggaccccctccaaacctccccctggtttccccaaaactgggtcccccaatgtttccaagatccccaggtacaaatacacagaatttttccacttcgactttgacccaagatctccaagataaagattaaaattaacggaaggaagggaa

SEQ ID NO: 237530 - DNA, 370 bp, Glycine max
gataccgaaacagaaagtggtttcagtgagtgatcggtgttcacttgatccttcataagtcgtcatcatcatcatcatcatcaccgttgattgaagaagatgccgatcagaaacatcgccatcggaaggcctgaagaggctactcaccccgacacgttgaatgcggggttggctgagttcatctccaccttgatcttcgtgttcgccggttcaggttccggcatcgcctagaagaagctcaccgacaacggcgccgccactcccgccggcctcatctccgcttccatcgcccatgctttcgccctcttcgtcgccgtctccgtcggcgccaacatctccggcggccacgtcaacccggccgtcaccttcg

SEQ ID NO: 237531 - DNA, 151 bp, Glycine max
gcatctttctcggttcttaaagagggaaagactggtgtgtcactcacggattccaccttgtacggtctttcattttcagaacctatcaaagctaacttcagctcttctgcattgaggtgcaagagggaattcgaacaaaaactctgtgctg

SEQ ID NO: 237532 - DNA, 348 bp, Glycine max
gattatatttgagttcaaccaattcaaagccatggccacctcaaatttctcaattgttctctccgtctccctagccttctttttggtgctacttaccaaggcacactcgaccgataccgtttctttcaccttcaacaagttcaacccagtccaaccaaacattatgctccaaaaagatgctagtatttcatcctctggggtgttacaactcaccaaagttggcagcaacggcgtgcccacctcgggatctctcggtcgtgccctttacgctgccccaatccagatttgggacagcgaaaccggcaaggtagccagctgggctacatcctttaaattcaacattttcgc

SEQ ID NO: 237533 - DNA, 325 bp, Glycine max
  unsure (1)..(325): unsure at all n locations
gaaggtgcaagagtttgttgtgagctataagctagtttatcgtgaggagaatatgaagttgtttgttttctttgttgctgcagtagttttggtagcatggccatgccatggcgcaggctaccaaaggttccctctccgaatgaaaactggctatggtgagcgttcttcggaggtaaaatgcgcaagttttaggcttgcagtggaagcacagaacatccgagcctttaaaaccattcctgaagagtgcgttgaagcaacaaaggactacattaatggcgaacaatttagattagactctaaaacagtttaacaacangctttcttt

SEQ ID NO: 237534 - DNA, 317 bp, Glycine max
gggacaagtgagtttgttgatcgagataactagatacagtgtgatgaaaatgaaggtccttggtttcctcggtgctagaattttggtagcatggcaatgccatgcgtacgatatgttccctctccgaatgaacactggctatggtgcccgtactccggaggtgaactgcgcaagttggcggcttgctgtggcagcacataacatctttggctttgagaccattcctgaagagtgcgttgaagcaacataggaatacatccatggagattaatatagatcagactccatcacagttaaccaacatgcttacttttatg

SEQ ID NO: 237535 - DNA, 333 bp, Glycine max
gctctctgaaccgaaacgaacctcaacaacgctgagcgcagaaaggggaaaaggggattagggtttaggaagcagcgacaacaatggatttcacagtggagaagaaggaatcagagaacaacgccgaaaatgctcacccaacaacgttagattcttcttctcaattggcatcggcacttgattccaacaacaaagaaatcgaagaacgacaagctcgtgaactcaaagccggacttcaccccctaaagcacaagtttgtcttctggtacactcgtcgaacacctggagttcgaaatcaaacatcatatgaggacaacataaagaaaattgttg

SEQ ID NO: 237536 - DNA, 336 bp, Glycine max
ggatagtagattgagcaaacaaaggaacaatgtcgaagaagaacaagctcgccaggagaaagaagcaatacgaattcgatctccaaagagagaaacaagagaagataaagaaagagcagaagctccatgcgaagaaaaacaagatgaaagttgatggtagtggcaagaaaaagaaaggtgggagtggatttcaggtggggaagagaaaagtgaagaccaagttgactgcccttgctaaagctaaggctgcccaggcaatggagcttgacaaatgaggttcgacttgtgtaattttagacaatgtgttgaaaattggtagatgacagtgttgttttg

SEQ ID NO: 237537 - DNA, 361 bp, Glycine max
gcgtcagtacagctgcaaaaagaggggaaaagggggcacttgcagttgcaatcaaattagatcaatcgcgttgcgcagttccgtacctctcctctcaggatgcagatcttcggcaagaccctcaccgcgaaagaccatcacccgtgaggtggcaagctctgacacgatcgacgacgtcagtgccaagatgcaggacaaggaaggaattccgccggatgagcaacgtcacatcatcgccggaacgcagctcaaggacggccgtagcctcgccgactacaacgtccagaacgagtcagcccttcaccttgtccatcgtctccgtggtggcatgcagatcttcgtcaagactctcaatggcaaa

SEQ ID NO: 237538 - DNA, 326 bp, Glycine max
agggggacaagttaatttggtgattgaaattactaaaaacaatgtgatgaaaatgaaaggccctggtttcctccgtgccaaaaatttgggaacaatggaaagccatgcgtaagataagtcccctctccgaatgaacactggctatggtgcccgtactccggaggtgaaatgcgcaagttggaggcttgctgtggaagcacacaacatctttggctttgagaccattcctgaagagtgcgttgaagcaacaaaggaatacatccatggcgaacaatatagatcagactccaaaacagttaaccaacaagcttacttttatgccagag

SEQ ID NO: 237539 - DNA, 310 bp, Glycine max
aggggaccaattgaaccagtatacccaaggccctatacaaccatgccctaaaacacacccatttgattcacttccaagggctagcctcaaggttacatttttggcagcagtgctctgcatggttgtggtgagtgcacccatggcacatgcacctatcacgtgcgggcaggtgaccaatatcctgatcaattgcatcagttacctccataacggaggaacacagccgtcgggatgctgcaactgagtgaacagcctcaatgccgccgccaagaacaccaccgatcgccagacggcgtgcaactgcctcaag

SEQ ID NO: 237540 - DNA, 263 bp, Glycine max
aaaacccgacaaaggggggcaaatttttgttgaaatacctaaacccaataatttgaaagtgaaattgctggtttgtgtttgtcgcaacattcctggaaccaaagggttgccatggtcaaacaaacaagaagttcctcctccaaatgaaacacgggtttggtgggcattacaccattaaggtggaatttgccatttggaggcttggcttggaagcaaccaacgtattcaattggcaaactgttcctgaaccttgcggaaattac

SEQ ID NO: 237541 - DNA, 359 bp, Glycine max
aaaagacgaccagaagggggaaaaatttggttgaaataccaagaaccattaggatgaaattgaaagtgcttgttttgttggttgcaacagttttggtaccatatgaatgccatggttcagactaccagaagttccctctccaaatgaaaactgggtttggtgggcaatacagcaatgaggtggcatgtgccatttggaggcttggcttggaagcaaacaacgtagtcaattggcaaactgttcctgcagcttgcggaaattacatagctgactactttctaggagaccaatatagatcagattccaaaacagttaaccaacaagcttatttctatgctaaatccctcaaactcaacaac

SEQ ID NO: 237542 - DNA, 313 bp, Glycine max
ggcacaagtttgttgcgatatctagaagcactaagatgcacatgacagtgcttgttttgtttgttgctacagttttggtagcatacgaatgccatggctcagactaccagaagttccctctccacatgaaaactgggtttggtgggcaatacagcaatgaggtggcatgtgccagttggaggcttggcgtggaatcaaacaacgtactcaagtggcaaactgttcctgcagcttgcggagagtacatagctgactacgttcgaagagaccaatatagattagattccaaagcagttaactaacaagcttattt

SEQ ID NO: 237543 - DNA, 335 bp, Glycine max
ggcatcaattcaaaatatatcatcaattataagcatgggtttgtggaacacaacgaatgcagtgtcttgccgctttcacaagtttggtgatgaccaaaagaatctggtcttccaaggtgatgccacgtcttcttccaggggcatataactcacaaagttagacggtggaggaaaaccagtgggtggcagtgtggggagagtgttatactcttctctagtgcacctttgggaaagctctacagtggtcgcaagctttgaaaccgacttcaccattttccatctcatcagactctactactccaggtgatggcctagccttcttcattgcaccattt

SEQ ID NO: 237544 - DNA, 363 bp, Glycine max
gatcacaacactaacacagattttgattcgattcgattcgattcagtcgaggttttaagcagcagcaagatgtctgggcgtggaaagggaggaaagggattgggaaaaggaggagcaaaacgacatcgtaaggtgctccgcgacaacattcagggaattacgaagccagcgattcgtcgtttggctcgcaggggtggcgtgaagcgtatcagcggtttgatctacgaggagactcgcggtgttctcaagatcttcttggagaatgtcatccgtgacgccgttacttacacggagcacgctaggaggaagaccgttacggctatggacgttgtttacgcccttaagaggaaggaaaggaccctc

SEQ ID NO: 237545 - DNA, 392 bp, Glycine max
gacaagtgagtttgttgatcgagataactagaaacagtgtgatgaaaatgaaggtccttgttttcttcgttgctacaattttggtagcatggcaatgccatgcgtacgatatgttccctctccgaatgaacactggctatggtgcccgtactccggaggtgaaatgcgcaagttggaggcttgctgtggaagcacacaacatctttggctttgagaccattcctgaagagtgcgttgaagcaacaaaggaatacatccatggcgaacaatatagatcagactccaaaacagttaaccaacaagcttacttttatgccagagacctcgaagtcgatcccaaggacacatttgtgttcagtatagatggcaccgtactctctaatattccatac

SEQ ID NO: 237546 - DNA, 343 bp, Glycine max
ggcacaagtgagtttgttgatcgagataactagaaacagtgtgatgaaaatgaaggtccttgttttcttcgttgctacaattttggtagcatggcaatgccatgcgtacgatatgttccctctccgaatgaacactggctatggtgcccgtactccggaggtgaaatgcgcaagttggaggcttgctgtggaagcacacaacatctttggctttgagaccattcctgaagagtgcgttgaagcaacaaaggaatacatccatggcgaacaatatagatcagactccaaaacagttaaccaacaagcttacttttatgccagagacctccaagtccatcccaaa

SEQ ID NO: 237547 - DNA, 502 bp, Glycine max
gcccccatgttgctctggtggtactgcaacgtaagcggctagtaggctcaggaattccatggccgacccacccgtcagtacggctacgagaagacgacagaagggttcatggacgttgataagatccttccatctagcagcgccttaggatggcatagccttaaagttaagggcgaggttcaaacgaagagaggcttatggtggatacctaggcacccagagacgaagaagggcgtagtaagcgacgaaatgcttcggggagttgaaaataagcgtagatccggggattcccgatataggtcaacctttcgaactgctgctgaatccacgggcatgcaaaaaaattcatgaaaaatgcattaaaaaagcggccgctctagaggatccaagcttacgtacgcttgcatgcgacgtcatagctcttctatagtgtcacctaaattcaattcactggccgtccttttataaagtcttttctggggaaaaccctgtggtttcccaa

SEQ ID NO: 237548 - DNA, 394 bp, Glycine max
ggcacaagtgattttgttgatcgagataactagaaacagtgtgatgaaaatgaaggtccttgttttcttcgttgctacaattttggtagcatggcaatgccatgcgtacgatatgttccctctccgaatgaacactggctatggtgcccgtactccggaggtgaaatgcgcaagttggaggcttgctgtggaagcacacaacatctttggctttgagaccattcctgaagagtgcgttgaagcaacaaaggaatacatccatggcgaacaatatagatcagactccaaaacagttaaccaacaagcttacttttatgccagagaactcgaagtcaatcccaaggacacaattgtgttcagtatagatgggcacgtactctctaatattccatac

SEQ ID NO: 237549 - DNA, 355 bp, Glycine max
agggaatgcacaagtgaatttggtgattgagataactagaaacaatgtgatgaaaatgaaaggccctggtttcctccgtgccaaaaattttggaacctgggaatggcaagccgtacgataggtttcctctccgaatgaacaccggctatggtgcccgtactcccggaggtgaaatgcgcaagttggaggcttgctgtggaagcacacaacatctttggctttgagaccattcctgaagagtgcgttgaagcaacaaaggaatacatccatggcgaacaatatagattagactccaaaacagttaaccaacaagcttacttttatgccagagacctcgaagttcacccaaggacac

SEQ ID NO: 237550 - DNA, 380 bp, Glycine max
gaagacaacagaaggggaaggtgcaaaagtttgttgtgagctataagctagtttatcgtgaggagaatatgaagttgtttgttttctttgttgctgcattatttttggtagcatggccatgccatggcgcaagctatcaaaggttccctctccgaatgaaaactggctatggtgagcgttcttcggaggtaaaatgcgcaagttttaggcttgctgtggaagcacacaacatccgagcctttaaaaccattcctgaagagtgcgttgaaccaacaaaggactacattaatggcgaacaatttagattagactctaaaacagttaaccaacaagctttcctttatgctagtgaacgcgaagttcatcacaacgacatattt

SEQ ID NO: 237551 - DNA, 341 bp, Glycine max
gatcgctctcacacctgtgattattcctcttttaacaatccacacccaaattctagggttccgaaatggacgctggcggaaagatcaagaagggcgccggaggtagaaagggcggcggcccaaagaagaagccggtttcaaggtccgtcaaagccggtctccaattccccgtcggaagaattggccgttatttgaagaaaggaaggtacgctcagcgtgtcggtaccggtgctcccgtatacttggctgcagttctcgaatacctagctgccgaggtgcttgagttggctgggaatgccgcacgtgacaacaagaagaacaggattattccaagacacgtg

SEQ ID NO: 237552 - DNA, 352 bp, Glycine max
ggcacaattgatttggttgatcgaaataactaaaaccagtgtgatgaaaatgaaggtccttgtttccttcgttgcaacaattttggtaccatggcaatgccatgcgtacaatatgttccctctccgaatgaacactggcaatggtgcccgtactccggaggtgaaatgcgcaatttggaggcttgctgtggaagcacacaacatctttggctttgaaaccattcctaaaaattgcgttgaagcaccaaaggaatacatccatggcaaacaatatagatcagactccaaaccagttaaccaacaagcttacttttatgccagagacttcaaattccatcccaagggacacatt

SEQ ID NO: 237553 - DNA, 330 bp, Glycine max
ggcacaagtgagtttgttgatcgagataactagaaacagtgtgatgaaaatgaaggtccttgttttcttcgttgctacaattttggtagcatggcaatgccatgcgtacgatatgttccctctccgaatgaacactggctatggtgcccgtactccggaggtgaaatgcgcaagttggaggcttgctgtggaagcacacaacatctttggctttgagaccattcctgaagagtgcgttgaagcaacaaaggaatacatccatggcgaacaatatagatcagactccaaaacagttaaccaacaagcttacttttatgccagagacctcga

SEQ ID NO: 237554 - DNA, 349 bp, Glycine max
gactacctcaaagacaacactacaatagcataacccttcgaagtcgtcgtttatcgctcctcgttcgcatcgtcatcctttccctgtctctcagaaagatgaaagtggtcgctgcgtatctgcgcgccgtcctcggtggcaacaacaccccctctagcgatgacatcagtgaaatcctcgggtccgttggaatataaggagatgaatataggattgaaacattcttgtctgaagttaaaggtaaggatatagtttagctaattgctgccagtaaagaataactggcctcggtgccttctggtggaggtggttccgttgcagtcatcgctgcacctgatggaagtggaag

SEQ ID NO: 237555 - DNA, 317 bp, Glycine max; identical to SEQ ID NO: 235644

SEQ ID NO: 237556 - DNA, 343 bp, Glycine max
tgacaaaagaacaacaaaaggggaaaaagtaactgtgctaatcgaaacatctgcacatagtgtgctgaaaatgcatgtccctgcattcatcggcgctgtcaatatgggaaccaggcgatttcaaacatatgacagtttggctcccagaatcaatatgggctaagatgaccttaaacccgatgtcataaacgaaactttcatgcctactgattaatcacatacatctttggctattacagtattcacgaacactgcattcatcacaatgtcgaagtaaacgatgacaaaacacttctattagatgacaaagcagtcaatgaatatgcatacatttacgccaaag

SEQ ID NO: 237557 - DNA, 410 bp, Glycine max
gaaggtgcaagagtttgttgtgagctataagctagtttatcgtgaggagaatatgaagttgtttgttttctttgttgctgcagtagttttggtagcatggccatgccatggcgcaggctaccaaaggttccctctccgaatgaaaactggctatggtgagcgttcttcggaggtaaaatgcgcaagttttaggcttgctgtggaagcacacaacatccgagcctttaaaaccattcctgaagagtgcgttgaaccaacaaaggactacattaatggcgaacaatttagatcagactctaaaacagttaaccaacaagctttcttttatgctagtgaacgcgaagtccatcacaacgacatatttatattcggcatagataacaccgtactctctaatatcccatactatg

SEQ ID NO: 237558 - DNA, 405 bp, Glycine max
  unsure (1)..(405): unsure at all n locations
ggaacctttgcattctattcattcaagattcagcaagtgcgttttggaagcagagaccgaaatacttcgagatggcccgtacaaagcaaactgctcgtaagtcaactggaggaaaagctcccaggaagcagcttgcaaccaaggctgcacgtaagtctgcaccaacaactggtggtgtgaagaagcctcatcgttatcgccctggaactgttgctcttcgtgagattaggaaataccagaagagcactgagctcctaatcaggaagcttcctttccagaggttggttcgtgaaattgcccaggatttcaagactgatctgcgtntccagagccatgctgtgcttgcaatggcagaggctgctgaggcatnacttgttgggctctttgaggacactaacttgtgtg

SEQ ID NO: 237559 - DNA, 407 bp, Glycine max
ggcacaagtgagtttgttgatcgagataactagaaacagtgtgatgaaaatgaaggtccttgttttcttcgttgctacaattttggtagcatggcaatgccatgcgtacgatatgttccctctccgaatgaacactggctatggtgcccgtactccggaggtgaaatgcgcaagttggaggcttgctgtggaagcacacaacatctttggctttgagaccattcctgaagagtgcgttgaagcaacaaaggaatacatccatggcgaacaatatagatcagactccaaaacagtttaccaacaagcttacttttatgccagagacctccaagtccatcccaaggacacatttgtgttcagtatagatggcaccgtactctctaatattccatactacaaaaaacatg

SEQ ID NO: 237560 - DNA, 413 bp, Glycine max
  unsure (1)..(413): unsure at all n locations
gaaagaggtgcatacaactacaaaggttgctgtaggagataagatattgaagtagtgctaagtgcctaacacctgcagtgaacaatggcctctgcatcagcatctcttctcaagtcttcacttgttcttgacaagtctgagtggatgaagggacaaacacttcgccaaccttctgctgcatcagttgtgagatgcaaccccaccaccccatcaggcctcaccatcagagctggttcctatgctgatgagctcgttaagaccgcgaaaacagtggcttcaccagggaggggtattttggccatggatgagtccaatgctacctgtgggaagcgtttggcttcaattgggctanaaaacactgaagctaaccgccaggcataccgtaccctccttgtgacagttccaggacttgg

SEQ ID NO: 237561 - DNA, 405 bp, Glycine max
ggcacaagtgagtttgttgatcgagataactagaaacagtgtgatgaaaatgaaggtccttgttttcttcgttgctacaattttggtagcatggcaatgccatgcgtacgatatgttccctctccgaatgaacactggctatggtgcccgtactccggaggtgaaatgcgcaagttggaggcttgctgtggaagcacacaacatctttggctttgagaccattcctgaagagtgcgttgaagcaacaaaggaatacatccatggcgaacaatatagatcagactccaaaacagttaaccaacaagcttacttttatgccagagacctcgaagtcaatcccaaggacacatttgtgttcagtatagatggcaccgtactctctaatattccatactacaaaaaaca

SEQ ID NO: 237562 - DNA, 407 bp, Glycine max
ggcacaagtgagtttgttgatcgagataactagaaacagtgtgatgaaaatgaaggtccttgttttcttcgttgctacaattttggtagcatggcaatgccatgcgtacgatatgttccctctccgaatgaacactggctatggtgcccgtactccggaggtgaaatgcgcaagttggaggcttgctgtggaagcacacaacatctttggctttgagaccattcctgaagagtgcgttgaagcaacaaaggaatacatccatggcgaacaatatagatcagactccaaaacagttaaccaacaagcttacttttatgccagagacctcgaagtccatcccaaggacacatttgtgttcagtttagatgggaccgtactccctaatattccatactacagaaacatgg

SEQ ID NO: 237563 - DNA, 379 bp, Glycine max
gtctcaccacttcaaaacactcataacacaaagcacaaagcaaagctcatccttgagttaaaaaatggcagcagcttcttccatggctctctcatccccatccttggctggcaaggccgtgaagctgggcccatcagccccagaagtgggaagggtgagcatgaggaagaccgtcaccaagcaggtctcctcaggaagcccatggtacggcccagaccgagtcaagtacttgggcccattctctggcgagcccccgtcctacctaaccggtgagttcccaagcgactacggctgggacactgctgggctttccgcagacccaagaacctttcgcaaggaaccgtgaactcgaagtgatccactccaggtgggccatgct

SEQ ID NO: 237564 - DNA, 407 bp, Glycine max
gaaggtgcaagagtttgttgtgagctataagctagtttatcgtgaggagaatatgaagttgtttgttttctttgttgctgcagtagttttggtagcatggccatgccatggcgcaggctaccaaaggttccctctccgaatgaaaactggctatggtgagcgttcttcggaggtaaaatgcgcaagttttaggcttgctgtggaagcacacaacatccgagcctttaaaaccattcctgaagagtgcgttgaaccaacaaaggactacattaatggcgaacaatttagatcagactctaaaacagttaaccaacaagctttcttttatgctagtgaacgcgaagtccatcacaacgacataattaatattcggcatagataacacggtaccctctaatatcccatac

SEQ ID NO: 237565 - DNA, 347 bp, Glycine max
ggttgtgtgagtgaagaagcagggggagtagcggcattaaaaatgcagatcttcgtgaaaactctgacagggaagactataaccctcgaggtcgagagcagcgacaccatcgacaatgtcaaggccaagattcaagacaaggaaggcattcctccggatcagcagcgtttgattttcgccggaaagcagcttgaagatggaaggaccctggccgattacaacatccagaaggaatcaacccttcatctcgtcctcaggcttcgtggtggcatcattgagccttccctcatggctttggctcgcaaatacaaccaggacaagatgatttgccgcaagtgctatgcccg

SEQ ID NO: 237566 - DNA, 403 bp, Glycine max
  unsure (1)..(403): unsure at all n locations
ggaacttctcacgttcatttctacacatccctagctctgtcgttccgtcgttgacgatggcgtttcgggtgcgaagccctgacctccgctctctctttcttctctctctcttgtccatcgcttccgccaatgtcttcttcgaagagcgtttcgatgacgggtgggaaaatcgatgggttaaatcagattggaaaaaagatgagaacgtggctggggagtggaaccacacctctggtcaatggaatggagacgctaatgacaaaggtattcaaaccagtgaggattacagattctatgctatttcagctgagtaccctgaattcagcaacaagggtaagacactagtccttcaaatttccggtaaaccacaancagaaccttgactgtggtggtggctacatga

SEQ ID NO: 237567 - DNA, 411 bp, Glycine max
gaaggtgcaagagtttgttgtgagctataagctagtttatcgtgaggagaatatgaagttgtttgttttctttgttgctgcagtagttttggtagcatggccatgccatggcgcaggctaccaaaggttccctctccgaatgaaaactggctatggtgagcgttcttcggaggtaaaatgcgcaagttttaggcttgctgtggaagcacacaacatccgagcctttaaaaccattcctgaagagtgcgttgaaccaacaaaggactacattaatggcgaacaatttagatcagactctaaaacagttaaccaacaagctttcttttatgctagtgaacgcgaagtccatcacaacgacatatttataatcggcatagataacaccgtactctctaatatcccatactatga

SEQ ID NO: 237568 - DNA, 392 bp, Glycine max
  unsure (1)..(392): unsure at all n locations
gacactcactctttcactcttcttcgtctcaaacctcttcgttccttcgattcattccatttcttccaaaatggccaaagacccagttcgcgttctcgtcactggagccgcagggcaaattggatatgctcttgtccctatgattgctangggagtgatgctgggtcctgaccagcccgtgatcctccacatgcttgacattcctccagcagcagagtcgttgaatggggttaaaatggaattggtggatgctgcattccctcttcttaaaggtgttgttgctacaaccgatgtggttgaggcatgcactggggtcaatattgcagtgatggttggtggattccctagaannagaaggtatggaaaggaaggatgtgatgactaagaacgtc

SEQ ID NO: 237569 - DNA, 397 bp, Glycine max
ggtgcacaagtgagtttgttgatcgagataactagaaacagtgtgatgaaaatgaaggtccttgttttcttcgttgctacaattttggtagcatggcaatgccatgcgtacgatatgttccctctccgaatgaacactggctatggtgcccgtactccggaggtgaaatgcgcaagttggaggcttgctgtggaagcacacaacatctttggctttgagaccattcctgaagagtgcgttgaagcaacaaaggaatacatccatggcgaacaatatagattagactccaaaacggttaaccaacaagcttacttttatgccagagacctcgaagtccatcccaaggacacatttgtgttcagtatagatggcaccgtactctctaatatccatacta

SEQ ID NO: 237570 - DNA, 363 bp, Glycine max
  unsure (1)..(363): unsure at all n locations
ggaacctttgcattctattcattcaagattcagcaagtgcgttttggaagcagagaccgaaatacttcgagatggcccgtacaaagcaaactgctcgtaagtcaactggaggaaaagctcccaggaagcagcttgcaaccaaggctgcacgtaagtctgcaccaacaactggtggtgtgaagaagcctcatcgttatcgccctggaactgttgctcttcgtgagattangaaataccagaagagcactgagctcctaatcaggaagcttcctttccagaggttggttcgtgaaattgcccaggatttcaagactgatctgcgtttccagagccatgctgtgcttgcattgcaagaggctgctg

SEQ ID NO: 237571 - DNA, 398 bp, Glycine max
ggcacaagtgagtttgttgatcgagataactagaaacagtgtgatgaaaatgaaggtccttgttttcttcgttgctacaattttggtagcatggcaatgccatgcgtacgatatgttccctctccgaatgaacactggctatggtgcccgtactccggaggtgaaatgcgcaagttggaggcttgctgtggaagcacacaacatctttggctttgagaccattcctgaagagtgcgttgaagcaacaaaggaatacatccatggcgaacaatatagatcagactccaaaacagttaaccaacaagcttacttttatgccagagacctcgaagtccatccccaaggacacatttgtggtcagtatagatggcaccgtactctctaatattccatactac

SEQ ID NO: 237572 - DNA, 402 bp, Glycine max
ggtccttctttgcgagattgaatcgtaagcagcggctaccctaatcctctcctcttcctctctactaatttcagctatggccgacgaagctgtggttgttccagatcccacccagatcgatgtcaagctctttaaccgctggagcttcgacgatattgagattactgacatttctctggctgattatatcggagtggcgacatccaagcacgccacgtatgtgcctcacaccgccggcaggtactcggtgaagcggttcaggaaggcgcaatgccccattgttgagaggctgaccaactctctcatgatgcacggtagaaacaatggcaagaaactcttggctgtttagatcatcaaacatgctatggagattattcatttgttgactgaccagaaccccat

SEQ ID NO: 237573 - DNA, 409 bp, Glycine max
ggtgcacaagtgagtttgttgatcgagataactagaaacagtgtgatgaaaatgaaggtccttgttttcttcgttgctacaattttggtagcatggcaatgccatgcgtacgatatgttccctctccgaatgaacactggctatggtgcccgtactccggaggtgaaatgcgcaagttggaggcttgctgtggaagcacacaacatctttggctttgagaccattcctgaagagtgcgttgaagcaacaaaggaatacatccatggcgaacaatatagatcagactccaaaacagttaaccaacaagcttacttttatgccagagacctcgaagtccatcccaaggacacatttgtgttaattataaatggcaccgtactctctaatattccatactacaaaaaacatg

SEQ ID NO: 237574 - DNA, 406 bp, Glycine max
ggcacaagtgagtttgttgatcgagataactagaaacagtgtgatgaaaatgaaggtccttgttttcttcgttgctacaattttggtagcatggcaatgccatgcgtacgatatgttccctctccaaatgaacactggctatggtgcccgtactccggaggtgaaatgcgcaagttggaggcttgctgtggaagcacacaacatctttggctttgagaccattcctgaagagtgcgttgaagcaacaaaggaatacatccatggcgaacaatatagatcagactccaaaacagttaaccaacaagcttacttttatgccagagacctcgaagtccatcccaaggacacatttgtgttcagtatagatggcaccgtactctctaatattccatactacaaaaaacat

SEQ ID NO: 237575 - DNA, 408 bp, Glycine max
ggcacaagtgagtttgttgatcgagataactagaaacagtgtgatgaaaatgaaggtccttgttttcttcgttgctacaattttggtagcatggcaatgccatgcgtacgatatgttccctctccgaatgaacactggctatggtgcccgtactccggaggtgaaatgcgcaagttggaggcttgctgtggaagcacacaacatctttggctttgagaccattcctgaagagtgcgttgaagcaacaaaggaatacatccatggcgaacaatatagatcagactccaaaacagttaaccaacaagcttacttttatgccagagacctcgaagtcaatcccaaggacacatttggtgtcagtaatagatggcaccgtactctctaatattccatactacaaaaaacatg

SEQ ID NO: 237576 - DNA, 406 bp, Glycine max
  unsure (1)..(406): unsure at all n locations
ggttgttgttgttgttacccattgattcccaaaaccctaattgaagttctctcctccacactatatattgcttgttttgagtgagtctatcccttaaaggctctctcttgcagtcgcagaggaaaaccctagctagtagtctcagttcgtttgagagagaaaaaatggcagagggtctcgttctccgcggaaccatgcgcgcccacaccgacgtcgtgacggcgattgccactcccatcgacaactccgacatgatcgtgacggcgtcgcgcgacaaatccatcattctctggcacctcaacaaaggaggacaagactacggtgttccccgccgccgcctcaccggacattctcacttcgtccaagacgtcgtcntctcatccgacggtcagttcgccctctccgg

SEQ ID NO: 237577 - DNA, 396 bp, Glycine max
ggcacaagtgagtttgatgatcgagatatctacagacagtgtgatgaaaatgaaggtcgttgtattcttcgttgctacacttttggtagcatggcaatgccacgcgtacgatatgttacctctccgaacgaacaatgactatggtgcccatactctggaagtgaaatgcacacgttggaggcatgctgtggaagcacacagtatctatggctttgagaccattcatgaatagtgcgttgacgcaccaagggaatacatcgatggcgatcagtatacatcagactctaaatcagtgaaacaacaagcttacttttatgacaaagacctcgacatctatcacaacgacacatttgtgttcagtatataccggaacgtaccctctataatccaatacta

SEQ ID NO: 237578 - DNA, 333 bp, Glycine max
acaaaggggaaaacaacaacaaaacaaacccaataaaaagggttcctttggaaccttcctaatggtgcctcctggaacccctaacctcaagcctcaaaggcctgccaattaataaaaaccaatttaaaaaccaacaattttcaaacctccaatgttcaagccaacaatgttcaaaccaacggtttaaaaaccaaaaccaacggtttaaaaaccgaaaccaacggtttaaaaaccaacatattagaagccaacattcaagaaaccaacttaaggaaagtatcctccaattgaagacaacaaccaagcctaaagccagccatgaagtccaataac

SEQ ID NO: 237579 - DNA, 358 bp, Glycine max
gattctcccaaactaacaaacaaatcccagggagccaccaaccatggcttccaagctctgcgactcatgcaaatcagccactgctaccttgtactgccgccccgacgcggccttcctctgcggcgcctgtgactctaaggttcatgccgccaacaagctcgcatcgcgccacccgcgcgtcgtgctctgcgaggtgtgcgagcaggcgcccgcgcatgtgacctgtaaagccgacgccgccgcgctctgccttgcctgcgatcgcgatatccactccgccaaccccctcgccagccgccacgagcgcatccccgtcacgccgttcttcgagtccgtacattcagtcaaggcctcctcg

SEQ ID NO: 237580 - DNA, 363 bp, Glycine max
ggcacaagtgagtttgttgatcgagataactagaaacagtgtgatgaaaatgaaggtccttgttttcttcgttgctacaattttggtagcatggcaatgccatgcgtacgatatgttccctctccgaatgaacactggctatggtgcccgtactccggaggtgaaatgcgcaagttggaggcttgctgtggaagcacacaacatctttggctttgagaccattcctgaagagtgcgttgaagcaacaaaggaatacatccatggcgaacaatatagatcagactccaaaacagttaaccaacaagcttacttttatgccagagacctcgaagtccatcccaaagacacatttttgttcaattt

SEQ ID NO: 237581 - DNA, 323 bp, Glycine max
  unsure (1)..(323): unsure at all n locations
gtctgtgacattcccccaaccggcttgaagatggcttcaacattcattggcaactctacctccattcaggagatgttccgtanagtgagtgagcaattcactgctatgttcaagaagaaggccttcttgcattggtataccggggaaagcatggacgagatggatttcactaaggctgagagcaccatgaacaatcttgtgtcaaattaccatcattaccagaatgccactgctaataaggataattataaggaggataagaagaagaagaattatggccaccataaaagttaattttgaacttggtaatgtattccggtggc

SEQ ID NO: 237582 - DNA, 337 bp, Glycine max
gaagactgcgacgacgatccaagtgatagacactcgtcgcgatggaacgtgtagctgaagccgatcgaactctgtacccatacgtgactggatcctctgtagtcgctatcaaatacaaagatgggattctaatggccgctgacatgggaggttcgtatggatctaccctgcggtacaagagtgttgagcgtatcaagcctattggaaagcattctcttcttggtgctagcggggagataagtgactttcaggagattctgcgttaccttgatgagcttatcctatatgacaacatgtgggatgatgggaattctctatggccgaaggacgtgcataa

SEQ ID NO: 237583 - DNA, 459 bp, Glycine max
aattatcgggctcgagcacgcgtcaggcggaagacgacagaagggggcctttgaggaaaagaaaggaagagatgcaagaagcaggcttgggaatgatgggtgaggtctccggcgatcagcaccgtcagctgaaggcggagatagcgactcatccgctgtacgagcagcttctggcagcacacgtggcatgcctccgtgtggcgactcccatcgatcagcttccactcattgatgctcaattatctcagtctcaccatcttctacgctcttatgtctcacacaacactctttctctctccctcatcaccgccaagaacttgacaacttcctggcacaatatttgatagttttgtgtacatttaaagaacagcttcagcaacacgtcagagtccacgccgttcaggctgtcactggctgccgtgatatccaaaataccttacaagctctcactggagtgag

SEQ ID NO: 237584 - DNA, 404 bp, Glycine max
  unsure (1)..(404): unsure at all n locations
ggcgtctatattcattttggcatcgaggttgaatctcatcggagagagaaaaaccataaccatgtctggaagaggaaagggaggcaagggtctcggaaagggaggagcgaaacgacaccgtaaggttctgagggataacattcagggcataacgaagcccgcaattcgccgtctcgcgagacgtggcggcgtgaagcgtatcagtggtctcatctacgaagaaacccgcggtgttctcaagatcttcctcgagaacgtcattcgcgacgctgtcacctacactgagcacgctcgccgcaagaccgtcactgccatggacgttgtttacgccctcaagaagcanggcangaccctctacggtttcggcggttanagaattaccgatttctgcattgcgtcgtgga

SEQ ID NO: 237585 - DNA, 412 bp, Glycine max
gcacaagtgagtttgttgatcgagataactagaaacagtgtgatgaaaatgaaggtccttgttttcttcgttgctacaattttggtagcatggcaatgccatgcgtacgatatgttccctctccgaatgaacactggctatggtgcccgtactccggaggtgaaatgcgcaagttggaggcttgctgtggaagcacacaacatctttggctttgagaccattcctgaagagtgcgttgaagcaacaaaggaatacatccatggcgaacaatatagatcagactccaaaacagttaaccaacaagcttacttttatgccagagaactcgaagtccatcccaaggacacatttgtgttcagtatagatggcaccgtactctctaatatttcatactacaaaaaaacatggatat

SEQ ID NO: 237586 - DNA, 385 bp, Glycine max
gatagcgaaacagagagtggtttcagtgagtgatcggtgttcacttgatccttcataagtcgtcatcatcatcatcatcatcaccgttgattgaagaagatgccgatcagaaacatcgccatcggaaggcctgaagaggctactcaccccgacacgttgaaggcggggttggctgagttcatctccaccttgatcttcgtgttcgccggttcaggttccggcatcgcctacaacaagctcaccgacaacggcgccgccactcccgccggcctcatctccgcttccatcgcccatgctttcgccctcttcgtcgccgtctccgtcggcgccaacatctccgggcggcacgtcaaccccgccgtcaccttcggcgccttcgtgggcg

SEQ ID NO: 237587 - DNA, 406 bp, Glycine max
ggagagagaggcacttggaatccaaaaatgagagaaatcatcagcattcacataggtcaggccgggatccaggttggcaactcctgctgggaactctactgcctggaacatggcatccagcccgatggcatgatgccaagtgactcctccttcggtgtagcccacgacgccttcaacaccttcttcagcgaaaccggatccggcaagcacgtccctcgcgccgtcttcgtcgatctcgagcccaccgtcatcgacgaagtccgttgtggcacttaccgtcaactcttccaccccgaacaactcatctccggcaaggaagatgccgccaacaaccttgccagaaggcactacaccgttggcacagagatcgtaaatctgtgcttggatcgcgtccgaaagctcgcag

SEQ ID NO: 237588 - DNA, 393 bp, Glycine max
gggcacaagtttgttgagatagctagaagcaataagatgaaaatgaaagtgcttgttttgtttgttgctacagttttggtagcatatgaatgccatggctcagactaccagaagttccctctccaaatgaaaactgggtttggtgggcaatacagcaatgaggtggcatgtgccagttggaggcttggcgtggaagcaaacaacgtagtcaagtggcaaactgttcctgcagcttgcggagagtacatagctgactacgttctaggagaccaatatagatcagattccaaaacagttaaccaacaagcttatttctatgctaaatccctcaaactcaccaacaaagatgtccttggccttggactttgacgacactactctctctaatctcca

SEQ ID NO: 237589 - DNA, 427 bp, Glycine max
agacgacagaagggggtgagttgtaattaagcacactatttccacccacaccacaagctccttatcgtgtttgcattgcagagagagagaatggcgaccacacccggtttgtgtggcagtgtgttgttgagcacctcgttcctgaggaagcaggcaatggcatcagtgaacatgagaatgctgaaggctaatgctggtgtttttggcttaaagggagggcgtggagggcgtgtgagtgcgatggcaagttacaatgtgaagctgataaccccagaaggagaacaagaatttgaatgcccagatgatgttttcattcttgaaaaggctgaggaatttggcattgaccttccctactcatgcaaggctggtgcctgctcttcctgtgccggcaaagttgtttctggcaaagtcgaccaatctgatggta

SEQ ID NO: 237590 - DNA, 398 bp, Glycine max
  unsure (1)..(398): unsure at all n locations
gacaagtgagtttgttgatcgagataactagaaacagtgtgatgaaaatgaaggtccttgttttcttcgttgctacaattttggtagcatggcaatgccatgcgtacgatatgttccctctccgaatgaacactggctatggtgcccgtactccggaggtgaaatgcgcaagttggaggcttgctgtggaagcacacaacatctttggctttgagaccattcctgaagagtgcgttgaagcaacaaaggaatacatccatggcgaacaatatagatcagactccaaaacagttaaccaacaagcttacttttatgccagagacctcgaagtcaatcncaatgacacatttgtgttcagtataaatggcaccgtactctctaatattccatactacaaa

SEQ ID NO: 237591 - DNA, 336 bp, Glycine max
gattccacctcaacaaacacaacgacactctctcttctcgctcttggcttttcgctcttcactcactctcattcattcatttccaccgttcatggatccagtaagcgtgtggggtaacacgcccttggcgacggtggatcccgagatccatgacctcatcgagaaggagaagcgccgtcaatgccgcggaatcgagctcatcgcctccgagaacttcacctccttcgccgtcatcgaggccctcggcagcgctctcacgaacaaatactccgagggcatgccgggcaaccgctactacggcggcaatgaatacatcgaccagatcgaaaacctctg

SEQ ID NO: 237592 - DNA, 332 bp, Glycine max
caagagtgctcctcagagcatttggtatggccctgaccgtcccaagtacttgggtccattctcggagcagattccatcatacctgaccggagaattccctggtgactacggatgggacactgctggattatcagctgacccggaaaccttcgccaggaaccgggagctggaggtgattcacagcagatgggcaatgcttggtgcccttggctgcaccttcccagagatccttgagaagaatggtgtcaaattcggcgaggccgtgtggttcaaggccggtgcacagatcttctcagagggaggccttgactacttgggcaacccaaacctga

SEQ ID NO: 237593 - DNA, 413 bp, Glycine max
ggcacaagtgagtttgttgatcgagataactagaaacagtgtgatgaaaatgaaggtccttgttttcttcgttgctacaattttggtagcatggcaatgccatgcgtacgatatgttccctctccgaatgaacactggctatggtgcccgtactccggaggtgaaatgcgcaagttggaggcttgctgtggaagcacacaacatctttggctttgagaccattcctgaagagtgcgttgaagcaacaaaggaatacatccatggcgaacaatatagatcagactccaaaacagttaaccaacaagcttacttttatgccagagacctcgaagtccatcccaaggacacatttggtgttcagtatagatggcaccgtactctctaatattccatactacaaaaaacatggatat

SEQ ID NO: 237594 - DNA, 409 bp, Glycine max
ggcacaagtgagtttgttgatcgagataactagaaacagtgtgatgaaaatgaaggtccttgttttcttcgttgctacaattttggtagcatggcaatgccatgcgtacgatatgttccctctccgaatgaacactggctatggtgcccgtactccggaggtgaaatgcgcaagttggaggcttgctgtggaagcacacaacatctttggctttgagaccattcctgaagagtgcgttgaagcaacaaaggaatacatccatggcgaacaatatagatcagactccaaaacagttaaccaacaagcttacttttatgccagagacctcgaagtccatcccaaagacacaattgtggtcagttatagatggcaccgtactctctaatattccatactacaaaaaacatgg

SEQ ID NO: 237595 - DNA, 324 bp, Glycine max
ggcagtagaatagtaatagtggtaacaaaaggcaacagagaacagaagagaaaggaaaagagagggtttggtgagttacccaagagaaaggatgaagagagagcgccagcagcttggttccaacgcaggaacctcaagctgcggttattcaagcggaaaatcgaatctttgggaggaagaaggaggcatggacgagcttcttgcagtggtgggttacaaggtgaggtcatcggacatggcggaagtggcgcagaagctggagcgtcttgaggaagccatgggaaatgtccacgatgacctcacggacctttcaaacgaggccgt

SEQ ID NO: 237596 - DNA, 401 bp, Glycine max
  unsure (1)..(401): unsure at all n locations
ggcacaagtgagtttgttgatcgagataactagaaacagtgtgatgaaaatgaaggtccttgttttcttcgttgctacaattttggtagcatggcaatgccatgcgtacgatatgttccctctccgaatgaacactggctatggtgcccgtactccggaggtgaaatgcgcaagttggaggcttgctgtggaagcacacaacatctttggctttgagaccattcctgaagagtgcgttgaagcaacaaagggatacatccatggcgaacaatatagatcagactccaaaacagttaaccaacaagcttacttttatgccagagacctcgaagtccatcccaaggacacatttgtgttcagtaaaanatgcgaccgtactctctaatattccatactacaaa

SEQ ID NO: 237597 - DNA, 406 bp, Glycine max
  unsure (1)..(406): unsure at all n locations
ggagcaagagtgaagagcgaagagaatggctcccaagggtttaatctttttggctgtgttatgcttctcagcactgtcactgagtcgttgtcttgcggaggataatggacttgttatgaacttctacaaggaatcatgccctcaggctgaagacatcatcaaagaacaagtcaagcttctctacaagcgccacaagaacactgctttctcctggctcagaaacatcttccatgactgtgctgttcagagttgtgatgcttcactgttgctggactccacaagaaggagcttgtctgagaaggaaacagatagaagctttgggttgagaaatttcaggtacattgagaacatcaaagaagctttgggaangggaatgcccaaggagttgtttcctgtgctgatatcc

SEQ ID NO: 237598 - DNA, 396 bp, Glycine max
gatccaaattcaagttcgcaccaaattttcctcccaaaatgtcaggccgtggaaaaggtgggaagggtttgggaaagggaggagctaagaggcacagaaaggttcttcgtgacaacattcaaggaatcacgaaacctgcgattcgtaggttagcgagaagaggtggcgtgaagaggatcagtggtttgatttacgaggaaaccagaggagttctgaagatattcttggagaacgtgattcgcgatgctgtaacctacactgagcacgctaggaggaaaactgttactgctatggatgtcgtttatgctctcaagagacagggaaggaccctctatggctttggaggctaaagaattaaatccttaaggtttaatgactgtgttgcaggataaaaca

SEQ ID NO: 237599 - DNA, 316 bp, Glycine max
ggcgtacgcagcttcatccctaacgcgtgcatagcagagtcagagacagagacgcagccatggggcggagacctgcgaggtgttataggcaaattaagaacaagccataccccaagtcacgtttctgccgtggtgttcctgatcccaagatcaggatttatgatgttggtatgaagaagaaaggtgttgatgagtttcctttctgtgtccatctggttagttgggagaaggaaaatgtttcaagtgaggccctggaagctgctcgcattgcttgcaacaagtacatggccaaatttgctggaaaggatgctttcca

SEQ ID NO: 237600 - DNA, 317 bp, Glycine max
ggcacttcaagtgcaatcaaattagttcaatcgctttgcgcagttccgtacctcgcctttcaagatgcaaatcttctggaagaatcgcaccggcaagagtatcacacttgcggtcgcaagctctgacacgagtcgagagtgtcagtgctccgatggagaacagcgcaggttttccgcctgctgaggaacgtcacatcatcgctggaaaccagcacaatgactgacgtatgcgctcagacaacaacagccaacatcgatggcgactacaacttgtcagacgccaccgtagttgcacgcaaatcttagttttaagccac

SEQ ID NO: 237601 - DNA, 408 bp, Glycine max
gaccgcgcaccacactgagaggaagagggagtgagagagagtgttcttcgtttgctaccttctcccagaaatggttacgttcaggtttcaccagtaccaggtggtcgggagggctctcccaacggaagcagatcagcatccgaagatctaccgaatgaagctctgggccaccaacgaggttcgcgccaagtctaagttctggtattttttgaggaagctgaagaaggtgaagaagagcaatggtcaagttcttgctatcaacgagatttttgagaagaacccaaccaagattaagaactacgggatatggttgcggtatcagagtaggactggttaccacaacatgtacaaagagtaccgccgatacactctaaacggttcagttgaggcaatgtacaatgagatggc

SEQ ID NO: 237602 - DNA, 408 bp, Glycine max
ggctctgctcgtgcctctagggttatcatttctccatttccattttctctctcacttttcaagaatcgtaagctatgggaaagtcttacccaactgtgagtgctgattaccagaaggccgttgagaaggcgaagaagaagctcagaggcttcatcgctgagaagagatgcgctcctctaatgctccgtttggcatggcactctgctggaacctttgacaagggcacgaagaccggtggacccttcggaaccatcaagcaccctgccgaactggctcacagcgctaacaacggtcttgacatcgctgttaggcttttggagccactcaaggcggagttccctaatttgaaccaacccgatttctaccagttggctggcgttgttgccgttgaggtcacgggtggacctg

SEQ ID NO: 237603 - DNA, 349 bp, Glycine max
ggaagtttgaaagacacatacaccatggcagatatcctgagtgaagaacagattgttgattttaaagaggcctttggcttgtttgacaaagatggggatggttgcattactgtggaagaacttgccactgttattcggtcgttggatcagaaccccaccgaagaagagctccacgatatgataagcgaagtggatgcagatcgcaacggaaccattgaattcgatgagttcttgagcttgatggccaagacagtgaaagacaccgatgcataggacgagctcaaagacgctttcaaggtttttgacaaagatcataatggccacatatcacctagtgacttgagacccg

SEQ ID NO: 237604 - DNA, 402 bp, Glycine max
ggcatcaattcaaaatatatcatcaattataagcatgggtttgtggaacacaacgaatgcagtgtcttgccgctttcacaagtttggtgatgaccaaaagaatctggtcttccaaggtgatgccacgtcttcttccaggggcatagaactcacaaagttagacggtggaggaaaaccagtgggtggcagtgtggggagagtgttatactcttctccagtgcacctttgggaaagctctacagtggtcgcaagctttgaaaccgacttcaccttttccatctcatcagactctactactccaggtgatggccttgccttcttcattgcaccatttgacactaaaatccctccacactcgggtgggagcaaccttggactcctcccatcagacaatgttgttgc

SEQ ID NO: 237605 - DNA, 405 bp, Glycine max
  unsure (1)..(405): unsure at all n locations
gaaggtgcaagagtttgttgtgagctataagctagtttatcgtgaggagaatatgaagttgtttgttttctttgttgctgcagtagttttggtagcatggccatgccatggcgcaggctaccaaaggttccctctccgaatgaaaactggctatggtgagcgttcttcggaggtaaaatgcgcaagttttaggcttgctgtggaagcacacaacatccgagcctttaaaaccattcctgaagagtgcgttgaaccaacaaaggactacattaatggcgaacaatttagatcagactctaaaacagttaaccaacaagctttcctttatgctagtgaacgcgaagtccatcacancgacatatttatattcggcatagataacaccgtactctctaatatcccata

SEQ ID NO: 237606 - DNA, 403 bp, Glycine max
  unsure (1)..(403): unsure at all n locations
ggcacaagtgagtttgttgatcgagataactagaaacagtgtgatgaaaatgaaggtccttgttttcttcgttgctacaattttggtagcatggcaatgccatgcgtacgatatgttccctctccgaatgaacactggctatggtgcccgtactccggaggtgaaatgcgcaagttggaggcttgctgtggaagcacacaacatctttggctttgagaccattcctgaagagtgcgttgaagcaacaaaggaatacatccatggcgaacaatatagatcagactccanaacagttaaccaacaagcttacttttatgccagagacctcgaagtccatcccaaggacacatttgtgttcagttaaaaatgggaccgtactctctaatattccatactacaaaaa

SEQ ID NO: 237607 - DNA, 340 bp, Glycine max; identical to SEQ ID NO: 237034

SEQ ID NO: 237608 - DNA, 334 bp, Glycine max
ggactgaagccagcgagtgagcgagcgagcgaggtagggttttcgttgttcccccgtctttgaattcagttcgcgacgatggggtccatccccgatccaggcgagttgagcgagttgactcagccgagcttcgacgagttccagcgccaaacttccctcatgaccagctgcaccctcctctggaaggagctctccgaccacttctcctccctcgagcaagacctcaaccacaaatccgaagccctcaaacgcaagattcgcaccctcgacaacactacttccgactccctccgcctcctcgatcgccgcgaaacctccctcgacgccacgctcc

SEQ ID NO: 237609 - DNA, 413 bp, Glycine max
gagggtttttgtcgtcgctactaagagttgctgcttcttcagccactccgcacctcgcagcctctgtgccctcaacaaccatggctgaaatcgaaactaccgttccagatcccacccaaatcgacgtcaaactcttcaatcgctggagcttcgaggatgttgaggttaatgatatgtctctggctgattacattggagtgtccccatcaaagcatgctacatatgttcctcacactgctggtaggtactcagtgaagaggttcaggaaagcgcagtgccccattgttgagaggctcaccaactctctgatgatgcacgggaggaacaatggaaagaagctcatggctgtcaggatttacagccatgccatggagatcatccacttgctcactgacctgaacccaattcaggtc

SEQ ID NO: 237610 - DNA, 410 bp, Glycine max
ggagttgagaggatcgtgagaggggcagtagccgagattccgtgagttgcaaaaatgaagacgattctttccaccgagaccatgaacatcccggacggcgtgagcatcaaagttcatgccaaggtcatcgaagttgagggcccccgcggaaaattggtgcgagacttcaagcatttgaatctcgattttcagctcattactgacgaaaacggtaaaagaaagctgaaaatcgacgcgtggtttggttctcggaaaacatccgccgccattcgcaccgccttgagccacgtggagaatcttatcaccggcgtcaccaagggctaccgctacaaaatgaaggtcgtttaaggccaatttcccaatcaaggcaagcatcggcaacagcaacaagtctattgagatccgaaatt

SEQ ID NO: 237611 - DNA, 404 bp, Glycine max
ggagcaaaaccctaatccctatttttcttcctcagtagtgtcatttacgcttctcttctctgcagcaactatgcctaaccctaaggtcttcttcgacatgaccatcggcggtcaatctgctggccgcatcgtgatggagctctacgccgacgtcactccccgcaccgccgagaacttccgcgcgctttgcaccggcgagaagggcgtacggcggagcggcaagcccctccactacaagggctcgtccttccaccgcgtgattccgagtttcatgtgtcacggtggcgacttcaccgccggaaacggaaccggcggcgagtcgatttatggcgcaaagtttgccgaccaaaaacttcgtgaaaaagcacaccggttccggcatcctctccatggcgaacgccggt

SEQ ID NO: 237612 - DNA, 406 bp, Glycine max
ggcacaagtttgttgagatagctagaagcaataagatgaaaatgaaagtgcttgttttgtttgttgctacagttttggtagcatatgaatgccatggctcagactaccaggagttccctctccaaatgaaaactgggtttggtgggcaatacagcaatgaggtggcatgtgccagttggaggcttggcgtggaagcaaacagcgtagtcaagtggcaaactgttcctgcagcttgcggagagtacatagctgactacgttctaggagaccaatatagatcagattccaaaacagttaaccaacaagcttatttctatgctaaatccctcaaacccaccaacaaagatgtccttgtcctggacgttgacgacactactctctctaatctccagtattttgctaacca

SEQ ID NO: 237613 - DNA, 403 bp, Glycine max
ggggttttcttttcacattacaaagtacaaacaccctgcagcaggagcgtacgcataactccccgccgtccggacatttcttggttcctgattcaccatggcaactatgagaggctgtaatcgatttgaaggatgaaccactggacttgtctataatttttgaaggaggaaagggttgtaacagcagatttttgttccatcatcatattatctgaacttctggtagaaaatggcagctgaagatgataggaatcttgtcgaaatcatggaaaccctgaatccaatagatgttgctaaatacatgaattttgttggtgccccccaagctggtgctatagctacattttcaaggacaaactcgcgacaacctttgaaggaaaaacagtcgtggagttgagatacg

SEQ ID NO: 237614 - DNA, 348 bp, Glycine max
ggcacaagtgagtttgttgatcgagataactagaaacagtgtgatgaaaatgaaggtccttgttttcttcgttgctacaattttggtagcatggcaatgccatgcgtacgatatgttccctctccgaatgaacactggctatggtgcccgtactccggaggtgaaatgcgcaagttggaggcttgctgtggaagcacacaacatctttggctttgaggccattcctgaagagtgcgttgaagcaacaaaggaatacatccatggcgaacaatatagatcagactccaaaacagttaaccaacaagcttacttttatgccagagacctcgaagtccatcccaaagggac

SEQ ID NO: 237615 - DNA, 325 bp, Glycine max
gatagcgaaacagagagtggtttcagtgagtgatcggtgttcacttgatccttcataagtcgtcatcatcatcatcatcatcaccgttgattgaagaagatgccgatcagaaacatcgccatcggaaggcctgaagaggctactcaccccgacacgttgaaggcggggttggctgagttcatctccaccttgatcttcgtgttcgccggttcaggttccggcatcgcctacaacaagctcaccgacaacggcgccgccactcccgccggcctcatctccgcttccatcgcccatgctttcgccctcttcgtcgccgtctccgtcg

SEQ ID NO: 237616 - DNA, 363 bp, Glycine max
gaaggtgcaagagtttgttgtgagctataagctagtttatcgtgaggagaatatgaagttgtttgttttctttgttgctgcagtagttttggtagcatggccatgccatggcgcaggctaccaaaggttccctctccgaatgaaaactggctatggtgagcgttcttcggaggtaaaatgcgcaagttttaggcttgctgtggaagcacacaacatccgagcctttaaaaccattcctgaagagtgcgttgaaccaacaaaggactacattaatggcgaacaatttagatcagactctaaaacagttaaccaacaagctttcttttatgctagtgaacgcgaagtccatcacaacgacatatt

SEQ ID NO: 237617 - DNA, 323 bp, Glycine max
gagagaaagagagagaaagatgtcgaagcgtggtcgtggtggttcggcggggaacaagttccgcatgtcgctgggtcttccagtggcggcgacggtgaactgcgccgacaacacgggggcgaagaacctctacatcatttcggtgaaagggatcaaaggccgtttgaaccgtcttccctcggcctgcgttggcgacatggtgatggccaccgtgaagaagggaaaacccgatctgaggaagaaggtcttgccagctgtcatcgttcgccagcgcaagccatggcgccgaaaggacggcgtctacatgtacttcgaagataatg

SEQ ID NO: 237618 - DNA, 346 bp, Glycine max
gatcatcaaatcaaaaaccctaattcccaaattctctcatttttcaagtttcaaccaagaaaagcagcaacaatgtcgggtcgcggaaagggtgggaagggtttaggaaagggaggagcaaagaggcatcgcaaggtgctccgcgacaatatccagggaatcacgaagcccgcgattcggagactggcgagaagaggtggcgtgaagagaatcagtggtttgatctacgaagagaccaggggcgtgctcaagatctttctcgagaacgtgattcgcgatgccgtgacgtacacggagcacgctaggagaaagacagtgacggccatggatgtcgtttacgctctca

SEQ ID NO: 237619 - DNA, 407 bp, Glycine max
gaaggtgcaagagtttgttgtgagctataagctagtttatcgtgaggagaatatgaagttgtttgttttctttgttgctgcagtagttttggtagcatggccatgccatggcgcaggctaccaaaggttccctctccgaatgaaaactggctatggtgagcgttcttcggaggtaaaatgcgcaagttttaggcttgctgtggaagcacacaacatccgagcctttaaaaccattcctgaagagtgcgttgaaccaacaaaggactacattaatggcgaacaatttagatcagactctaaaacagttaaccaacaagctttcttttatgctaatgaacgcgaagttcaatcaaaacgacatatttatattcggcatagataacaccgtactctccaatatcgcatac

SEQ ID NO: 237620 - DNA, 396 bp, Glycine max
ggcacaagtgagtttgttgatcgagataactagaaacagtgtgatgaaaatgaaggtccttgttttcttcgttgctacaattttggtagcatggcaatgccatgcgtacgatatgttccctctccgaatgaacactggctatggtgcccgtactccggaggtgaaatgcgcaagttggaggcttgctgtggaagcacacaacatctttggctttgagaccattcctgaagagtgcgttgaagcaacaaaggaatacatccatggcgaacaatatagattagactccaaaacagttaaccaacaagcttacttttatgccagaagactcgaagtccatcccaaggacacatttgtgttcaatatagatggaacgtaccctctaatattccatactac

SEQ ID NO: 237621 - DNA, 358 bp, Glycine max; identical to SEQ ID NO: 234733

SEQ ID NO: 237622 - DNA, 344 bp, Glycine max
ggcacaagtttgttgagatagctagaagcaataagatgaaaatgaaagtgcttgttttgtttgttgctacagttttggtagcatatgaatgccatggctcagactaccagaagttccctctccaaatgaaaactgggtttggtgggcaatacagcaatgaggtggcatgtgccagttggaggcttggcgtggaagcaaacaacgtagtcaagtggcaaactgttcctgcagcttgcggagagtacatagctgactacgttctaggagaccaatatagatcagattccaaaacagttaaccaacaagcttatttctatgctaaatccctcaaactcaccaacaaa

SEQ ID NO: 237623 - DNA, 331 bp, Glycine max
gagagaagttattagggcttttgagtgcggcggtccaaacactcttctctgcagcttttgcctacaactcccttcaccatggctgaacaaaccgagaaagcttttctgaagcaaccaaaagtgtttctcagcacaaagaagactgggaagggaaagagacctggaaaaggtgggaaccgcttttggaagtccattgggcttggatttaagactcccagggaagccatcgaaggaacctatattgacaagaagtgccccttcactggcaatgtttccatccgtggccgtatcttggctggaacatgtcacagtgctaagatgaacaggacta

SEQ ID NO: 237624 - DNA, 337 bp, Glycine max
gattgactgaagccagcgagtgagcgagcgagcgaggtagggttttcgttgttcccccgtctttgaattcagttcgcgacgatggggtccatccccgatccaggcgagttgagcgagttgactcagccgagcttcgacgagttccagcgccaaacttccctcatgaccagctgcaccctcctctggaaggagctctccgaccacttctcctccctcgagcaagacctcaaccacaaatccgaagccctcaaacgcaagattcgcaccctcgacaacactacttccgactccctccgcctcctcgatcgccgcgaaacctccctcgaggccacgctcc

SEQ ID NO: 237625 - DNA, 305 bp, Glycine max
caaagagaatgccactcaaaaaagtcaaaaagtgtttgtgcatgtgccatcagagattgctgctcatgaagttgaggaaataggagtggaacacttgcttagagatgtgaaggatacaaccattagcacccttgcaacagaggtaagtgcaaaactcacagctttgaagggtttggatgcaagacttaaagagatcaggagttaccttgaccttgttattgatggaaagcttccattaaaccatgagatcctgtaccatctgcaggatgtgtttaacctgctaccaaatcttaatgttgctgatc

SEQ ID NO: 237626 - DNA, 348 bp, Glycine max
gacccacacgtaagacggctgctatgatatgaaaaaaagtacagaaggggacatatcgtttgttctaagcttatcccaatttccgctatgcatgctgttcctcaacttcgagcaacacttttctctaaagtcaggggcacggtcaagtttggaatcagcggatttgtttcaattgggcttttgggtgcaagattcgctctgcaaagtaacgatgtgtaactccttgccgtttagaatcctttcgatactaccgattacacgacacaaatttttaaatacgagattgtgcacggccagtgaaaccatttcaatgtaatcgttaaggacaagattacccttctcttcagt

SEQ ID NO: 237627 - DNA, 390 bp, Glycine max
gactcaagcacaacatctctatcgagtaaattaactatgaagcctaccctactattatccctttccttcctgcctctctttgctttcctggctctttcagaagatgttgaacaagttgtggacataagtggcaaccccattttcccaggtggcacatattacattatgccatcaacttggggcgctgccggtggtggattgaaactaggccggacaggaaactcaaactgcccagttactgttttgcaagattactcagaaatcttccgtggcacaccagtcaaattcagcatacctgggataagccctggaatcatctttacaggtactccacttgtaaatcaaatttcgcagagaaaccttattgtgctgaatcctccaaatgggtgg

SEQ ID NO: 237628 - DNA, 382 bp, Glycine max
ggaagagtgaagagaatggctcccaagggtttaacctttctggctgtgttaatatgcgtttcagcactgtcactgagtccttctgttgcgggggaagggcaaaataatggccttgttatgaacttctacaaggaatcatgccctcaggctgaagacatcatcacagaacaagtcaagcttctctacaagcgccacaagaacactgctttctcctggctcaggaacatcttccatgactgtgctgttcagagttgtgatgcttcactgttgctggactccacaagaaggagcttgtctgagaaggaaacagatagaagctttgggttgaaaaatttcaaggtaaattgagaccatcaaagaagctttggaaagagaatgccct

SEQ ID NO: 237629 - DNA, 251 bp, Glycine max
ggcacaagtgagtttgttgatcgagatgattaaaaacagtgtgatgaatatgaatgtccttgatcacttcgatcgcaatcattctggtaccatggaaatgcaaagcataggacatgttaccactctcaacgaagactcattatcgcacgcgtaatacgtgatgtcaaatgcacatcttcgacgctacatgtgcaagcacaacacagctttcgccttgagcaggatcatcaaccatgagtgtactgttcaga

SEQ ID NO: 237630 - DNA, 374 bp, Glycine max
ggctcgcactcacgcgtcagacagatgacaacagaaggggagcctcagcagaagcagaacgaggagaagcagaaggagcaaaagcaatggcgccgaagaagccgagaaccacgacaaggaaccctgatttggttagggggattggcaagtattcgaggtcgcagatgtaccacaagaggggcatctgggccatcaaggccaaaaacggtggcgttttgccccgccacgatcccaagcccaagcccgaggccccggcccagaagccgcccaagttctaccccgcggacgatgttaagaagcccctcgtcaacaagcacaagcccaaacccgcgaaactcaaggctagcattactccagggactgtgttgatcctg

SEQ ID NO: 237631 - DNA, 320 bp, Glycine max
gagaaacatcaagagtctattttatggtacccctacattttggaaacattccatggaaccctgatttggttatggggattggcaactagtcgatgtcacagatgtaccacacgacgggcatctgtgccatcaaagccataaacagtcgagttttgccccgccacgatcccaagcccatgcccaaagccccagtccagatcctgcccatgttctaccctgccgtcgatgttaacaagcccctcgtcaacaagcacgttcccaaactcgcgaaactcacggttagcattactccagggactgtgttgatcctgcttgctggg

SEQ ID NO: 237632 - DNA, 317 bp, Glycine max
  unsure (1)..(317): unsure at all n locations
gatagggtttttgtcgttgcgactaagagttgctgcttcttccgccactcagcacttcgctccctctgtgcttcaccaaccatggccgaaatcgaagctaccgttccagatccctctcaaatcgacgtcaaacttttcaaccgctggagcttcgacgacgttgaggttactgatatgtctctggctgattacattggagtgtcnccgtcaaagcatgctacatatgttcctcacactgctggtaggtactcagtgaagaggttcaagaaggcgcagtgccccattgttgagagactcaccaactctctcatgatgca

SEQ ID NO: 237633 - DNA, 395 bp, Glycine max
gatcgcatttcatagcactcaccctcattaccaacacgaaagcatagccaaaaccttttttcgaagtctctgattttcctaatggctccggcaaaggcagagaagaagccggcggagaagaagccagcggcggagaaggcaccggcggagaagaagccgaaggcggagaagaagatctcgaaggaaggagggagcgagaagaagaagaagcgcacgaagaagagcgtggagacctacaagatctacatcttcaaggtcctcaagcaggttcaccccgacattggtatttccagcaaggccatgggcatcatgaacagcttcatcaacgaaattcttcaaaaagctcgcccaggaagcgtcgcgtttggctcgctacaacaagaagcccaccatca

SEQ ID NO: 237634 - DNA, 297 bp, Glycine max
gcacaaatgactttggtggttcaagatatctagaaacattgtgatgaaaatgaaggtccttgttttcttcgttgctacaattttggtaccatggcaatgccgtgcgtacgatatgttccctctccgaatgaacactgggtatggtgcccgtactccggaggtgaaatgcgcaagttggaggcttgctgtggaagcacacaacatctttggctttgagaccattcctgaaaagtgcgttgatgcaacacaggaatacatccatggcgatcaatatagatcagactctataacagttaa

SEQ ID NO: 237635 - DNA, 391 bp, Glycine max
  unsure (1)..(391): unsure at all n locations
gaaggtgcaagagtttgttgtgagctataagctagtttatcgtgaggagaatatgaagttgtttgttttctttgttgctgcattagttttggtaacatggccatgccatggcgcaggctaccaaaggttccctctccgaatgaaaactggctatggtgagcgttcttcggaggtaaaatgcgcaagttttangcttgctgtggaagcacacaacatccgagcctttaaaaccattcctgaagagtgcgttgaaccaacacatgactacattaatggctaacactttagatcagactctaaaacagttaaccaacaagctttcttttatgccaatgaaccccaaggttcaacacacctacatatttatattcggcatagataacaccgtact

SEQ ID NO: 237636 - DNA, 376 bp, Glycine max
ggccagagatgcaagagaaggccctagggttcttatgagccttagggtagatttcgggcccatgggctgagtatgagcccacttatctttgtaaatattagattaagattttattatttttgggtcttgtatttagggctccataatgtaggtagggtaccctagaaatataggatttttcagcccttgtattttagggcacctagactagtttttgtattaggggtagttttgtaatttcacatacactaagtggatatttgatgtgtgtggttggaaataaatttaattgaattggtagaagcccaatccaattaaattttataaggggaaaggtaaccatttgcttactacgccccattgccacatcatatat

SEQ ID NO: 237637 - DNA, 387 bp, Glycine max
ggcacaagtgagtttgttgatcgagataactagaaacagtgtgatgaaaatgaaagtccatgttttcttcgttgctacaattttggtagcatggtaatgccatgcgtacgatatgttccctctccgaatgaacactggctatggtgcccgtactccggatgtgaaatgcgcaagttggaggcttgctgtggaagcacacaacatctttggctttgagaccattcctgaagagtgcgttgaagcaacaaaggaatacatccatggcgaacaatatagatcatactccaaaacagttaaccaacaagcttacttttatgccaaagaactccaatttcaatcccaaggaaacatttgtgttcagtatagatggcaccgtactctctaata

SEQ ID NO: 237638 - DNA, 353 bp, Glycine max
ggtaataattcttataacacaacacaacccatggccaccacctccgcattcctcctccttcccctcctcctgctgctccacctcgccatcgccgctcacggcatcggcatcaactacggcacgctcggcgacaaccttccaccgcccgcggcggtggcgaacttcctgaagacgaagacgaccatcgaccgcgtgaagatctacgacgtgaacccggacatcctgcgggccttcgccggcagcggcatctccgtgacggtgaccgcccccaacggcgacatcgccgccttaaccaaaatcgactcggcgaggcagtgggtggcgacgcacatcaaacccttttcaacctcaga

SEQ ID NO: 237639 - DNA, 382 bp, Glycine max
ggcacaagtttgttgagatagctagaagcaataagatgaaaatgaaagtgcttgttttgtttgttgctacagttttggtagcatatgaatgccatggctcagactaccagaagttccctctccaaatgaaaactgggtttggtgggcaatacagcaatgaggtggcatgtgccagttggaggcttggcgtggaagcatacaacgtagtcaagtggcaaactgttcctgcagcttgcggagagtacatagctgactacgttctaagagaccaatatagatcagattccaaaacagttaaccaacaagcttatttctatgctaaatccctcaaactcaccaacaaagatgtccttgtcttggacgttgacgacactactctctc

SEQ ID NO: 237640 - DNA, 384 bp, Glycine max
gaaagcagtgaccacggagagagagagaggttttgacgcaacacactttcactgagaaaggatctctatctaccaaggagcagaataaaacccttctctctggtaagtgaataagagaatggcttcagatcggaaacttcacactttcgaggaggtggcaaagcacgaccagaccaatgattgctggctcatcatttctggcaaggtgtatgatgtcacccctttcatggaggatcatcccggaagtgatgaggttttgttatctgcaacagggaaagatgcaaccaatgattttgaagatgttggacacagtgattctgctagagatatgatggaaaaatactacattggtgaaattgattcatcaactgtaacaactaaacg

SEQ ID NO: 237641 - DNA, 343 bp, Glycine max
ggcagttgtattgttgaacaagggtttctctgtctgcttcttcactttctctcgtttcaatcgaaaccaaaacaaaaacatgggcagaaaattcttcgtcggtggcaactggaaatgcaatgggaccactgaggaggtaaagaagattgttactactttgaatgaggctaaagtccctggagaagatgtcgtagaagttgttgtgagccctccttttgtgttccttcctgttgtaaaaagtttgctgcgccctgatttccatgtttcggcacaaaactgttgggttcgcaaaggtggtgcttataccggtgaggttagtgctgaaatgcttgttaatttggga

SEQ ID NO: 237642 - DNA, 391 bp, Glycine max
  unsure (1)..(391): unsure at all n locations
ggtgatttgagaggatcgtgagagggacggtagcagagattccgtgagttgcaaaaatgaaaacaattctttctgcagagaccatgaacatcccggacggcgtgagcgtcaaggttaatgccaaggtcatcgaagttgagggcccccgcggaaaattggtgcgagacttcaagcacttgaatctcgattttcagctcatcactgacgaaaacggtaaaaggaagctgaaggtggaggcctggttcggttctcggaaaacatccgccgccattcgcaccgccctgagccacgtggagaatctgatcaccggcgtcaccaanggctaacgctacaaaattaaggtccgttaatgcccattttcccatcaacgcaagcatcggcaacgacaaca

SEQ ID NO: 237643 - DNA, 305 bp, Glycine max
gcaaagttaattggatattgaaaaaactagaaacaattttatgaaaaattaagtccgtgatttcctcgtgctaaatctttgagcatggaaatgcatgccttcgaaatgtttcctctccgaatgaacactggctatggtgcccgtacactggaggtgaaatgcgcaatttggaagcttgctgtggaagcacacaacatctttggctttgagaccattcctgaatagtgcattgaaccaacaaaggaatacatccatggataacagtatagattagactccaaaacagtttaccaacaagcttactt

SEQ ID NO: 237644 - DNA, 394 bp, Glycine max
  unsure (1)..(394): unsure at all n locations
ggggaaccctaattctgcgaggtgagtgaaaatggcggtacccttgctctccaagaagatcgtgaagaagcgcgtcaagaagtttatacgcccccagagtgatcgcaagatctccgtcaagccaagctggcgcagacccaagggtattgattctcgtgtcaggagaaagttcaaaggatgcactttgatgcccaacattggttatggctcagacaagaaaacccgccattatctaccaaatggtttcaagaaatttgtcgtgcacaatgtgaaagacctggaacttctcatgatgcataacaggacatattgtgctgagattgctcacaatgtaaccnacagggaaaaggaaggacatagttgagagagctgctcagcttgatgttgtcttgac

SEQ ID NO: 237645 - DNA, 388 bp, Glycine max
ggcacaagtgagtttgttgatcgagataactagaaacagtgtgatgaaaatgaaggtccttgttttcttcgttgctacaattttggtagcatggcaatgccatgcgtacgatatgttccctctccgaatgaacactggctatggtgcccgtactccggaggtgaaatgcgcaagttggaggcttgctgtggaagcacacaacatctttggctttgagaccattcctgaagagtgcgttgaagcaacaaacgaatacatccatggcgaacaatatagatcagactccaaaacagttaaccaacaagcttacttttatgccagagacctccaagttcatccaaaggacaaatttgggtccagtatagatggcaccgtactctctaatatt

SEQ ID NO: 237646 - DNA, 308 bp, Glycine max
ggtgcacaagtgagtttgttgatcgagataactagaaacagtgtgatgaaaatgaaggtccttgttttcttcgttgctacaattttggtagcatggcaatgccatgcgtacgatatgttccctctccgaatgaacactggctatggtgcccgtactccggaggtgaaatgcgcaagttggaggcttgctgtggaagcacacaacatctttggctttgagaccattcctgaagagtgcgttgaagcaacataggaatacatccatggcgaacaatatagatcagactccaaaacagttaaccaacaagc

SEQ ID NO: 237647 - DNA, 391 bp, Glycine max
ggcacaagtgagtttgttgatcgagataactagaaacagtgtgatgaaaatgaaggtccttgttttcttcgttgctacaattttggtagcatggcaatgccatgcgtacgatatgttccctctccgaatgaacactggctatggtgcccgtactccggaggtgaaatgcgcaagttggaggcttgctgtggaagcacacaacatctttggctttgagaccattcctgaagagtgcgttgaagcaacaaaggaatacatccatggcgaacaatatagatcagactccaaaacagttaaccaacaagcttacttttatgccagagacctcgaagtccatcccaagggacacaatttggggtcattataaatggcaccgtactctctaatattc

SEQ ID NO: 237648 - DNA, 390 bp, Glycine max
  unsure (1)..(390): unsure at all n locations
gactgatacaggaacagctagcagagaaacaaagttacaagtaaagtaaattaagaagatcattaatggcttctcttgcaaccttagctgctgttcaaccagctgcgctcaatggccttgctggaagttccctctctggaactaagctctctttcaagccctctcgccacactgtcaaatccaagaacttcaggagtggtgccgtggtagcaaagtatggtgacaagagtgtgtactttgatttggaggatctgggcaacactacggggcagtgggacttgtatggctcagatgcaccttcaacctacaaccctcttcagagcaagttcttcgagacatttgctgctccattcacanagaggggaattgtactcaagtttctgatattgg

SEQ ID NO: 237649 - DNA, 338 bp, Glycine max
ggcacaagtttgttgagatagctagaagcaataagatgaaaatgaaagtgcttgttttgtttgttgctacagttttggtagcatatgaatgccatggctcagactaccagaagttccctctccaaatgaaaactgggtttggtgggcaatacagcaatgaggtggcatgtgccagttggaggcttggcgtggaagcaaacaacgtagtcaagtggcaaactgttcctgcagcttgcggagagtacatagctgactacgttctaggagaccaatatagatcagattccaaaacagttaaccaacaagcttatttctatgctaaatccctcaaactcacc

SEQ ID NO: 237650 - DNA, 316 bp, Glycine max
ggggttatttatgtcatgacccatgattcaataggacttggagaagatgggccaacccaccaccctattgagcacctagcaagcttccgggcaatgccaaacattttgatgcttcgtcccgccgacggtaacgaaacagccggagcatacaaagtggccgtgctcaacaggaagagaccctccattcttgccctgtccaggcaaaaactgccccagcttcccggaacttccattgaaggagttgaaaagggtggttacaccatttcggacaactccactggcaacaagcctgatgtcattttgatcggaactggtt

SEQ ID NO: 237651 - DNA, 395 bp, Glycine max
gacaacacaacgcaacacaacgcgcactctctcttttctctcttaacacaaaaaccctatcgttcttcgcggtttcgccgattctcgccatgccgaaagccaaatccgacgccaaagccgccgatagccggttgaagcgcaagggcgctggtgctggaaggaagcaatcgaagaaagctgctaaggatcctaacaagccaaagagacctccaagcgctttcttcgttttcatgtccgagttcagagagcagtttaagaaggagcatcctaacaacaaatccgtcgctgttgtcggtaaagctggtggtgacaaatggaaatcgctgtctgatgctgaaaaaggcccccttcgttgcacggccgaaaagaagaaacaagagtatgagaaaactatt

SEQ ID NO: 237652 - DNA, 324 bp, Glycine max
gacacaccatccgttctagtctcaacttctgctcttccaactcctacaacgcttttctctgcactcatgggcaaggtcaagatcggaatcaacggatttggaagaattggccgtttggttgccagagtcgctctgcaaagagacgatgttgaactcgttgccgttaacgaccctttcattaccaccgattacatgacatacatgtttaaatacgacagtgttcacggacactggaagcatcacgatgtcaccgttaaggacgagaagacccttctcttcggtgacaaggcagtcactgtttttggacacagaaaccctgaagag

SEQ ID NO: 237653 - DNA, 392 bp, Glycine max
gcacaagtgagtttgttgatcgagataactagaaacagtgtgatgaaaatgaaggtccttgttttcttcgttgctagaattttggtagcatggcaatgccatgcgtacgatatgttccctctccgaatgaacactggctatggtgcccgtactccggaggtgaaatgcgcaagttggaggcttgctgtggaagcacacaacatctttggctttgagaccattcctgaagagtgcgttgaagcaacaaaggaatacatccatggcgaacaatatagatcagactccaaaacagttaaccaacaagcttacttttatgccagagacctcgaagtccatcccaagggacaacatttgtggtcagtatagatggcaccgtactctctaatattcca

SEQ ID NO: 237654 - DNA, 327 bp, Glycine max; identical to SEQ ID NO: 236414

SEQ ID NO: 237655 - DNA, 391 bp, Glycine max
ggtaaacaaaaaccatcaccaaaaaagaaaatgatgctcggagagcaccatcgcgcgaatccaacggttcacgtgccaccgtggccaacccacgacgatccaacggccgagatgtactccgcgtttttaacaaacgacgtcaatgctggtgagtactctccgtactatcttcaagaagcacgaacggctctgcagcgttttctgccgtctaacgaaacggacgctgactcggacacggaggctcaacccgacgcggcggtggacgcgtactcgtgcgaccatttccgcatgtacgagttcaaggtccgtcgatgcgcacgtggcaagtcaaaagaatgggacggagtgtcggtacgcgcatcccggcgagaaggctcgacgccgggacccg

SEQ ID NO: 237656 - DNA, 357 bp, Glycine max
gactcactcatacaataaaaacagcttttgcttctttgtgaatatggaaataaggaaatcaggtggcttcttcttcttgctcctcttccttgtctttgcttcccaggtggtggtgcataccgaaggaagagtgtgtgagtacaaagccacggttcatggcttgtgtaatagagaccacaactgtgctttggtctgcaggaacgaacgtttctccggtggcatgtgcaaaggcttccgccgccgctgcttttgcaccaggatttgttgagatctcatcaaacactactcttgccatgcaaattaataaatcatagctaggccaaataaattgcatctactctttatccatttgggagc

SEQ ID NO: 237657 - DNA, 358 bp, Glycine max
ggcacaagtgagtttgttgatcgagataactagaaacagtgtgatgaaaatgaaggtccttgttttcttcgttgctacaattttggtagcatggcaatgccatgcgtacgatatgttccctctccgaatgaacactggctatggtgcccgtactccggaggtgaaatgcgcaagttggaagcttgctgtggaagcacacaacatctttggctttgagaccattcctgaagagtgcgttgaagcaacaaaggaatacatccatggcgaacaatatagatcagactccaaaacagttaaccaacaagcttacttttatgccagagacctcgaagtccatcccaacgacacatttgtgttc

SEQ ID NO: 237658 - DNA, 362 bp, Glycine max
gactgctacaaaaacattgaaagaaatagaaaaagcaaaactggtttctcgcatttcctccgaaacaaaccgtttcgctcgtttctcggatctgcaatggaagccccacccaaaggcgctgttggaagaaaaggtgacaggaagaagtccgtttccaaatccatcaaagctggcctccaattccccgtcagccgcgtcgccaggtacttgaagaaaggccgttactctcgccgccttggcaccggcgctcccatttatctcgccgccgttctcgaatatctcgccgcagaagtgttggagctggccgggaatgctgcacgtgacaacacgaataatacgattaaccctatgcacgtgttgct

SEQ ID NO: 237659 - DNA, 317 bp, Glycine max
accgtggttcttactcgcgaaaagaatcttaatgttggctgtttcatacgacgtcgtctcctggaacgcgatgttcaccactggggtccacttgctgaaggcccttgcaatcgcgcttttgaaagtgtcatcaagtcttggctccggggagaaagcgtaggtgagttgtgtggttccagcttgccaccgcggcatgtctttgaagaaggtatagtccgagatcatgccaaacgatgtggttttgtttgtgttgattattatgtcggggacgccacaccggggtgtcatgatttgtttaagagtgttgatgtcgaact

SEQ ID NO: 237660 - DNA, 260 bp, Glycine max
ggcacaagtgagtttgttgatcgagataactagaaacagtgtgatgaaaatgaatgtccttgttgtcatcgttgctataattttggtagcatggcaatgccatgcagtaggatatgtttactctccgaattaacactggcaattgtgcccgtattcctgatgtcaattgcaccttttggaagcattaatgtggaagcacacattatctgctgtctatgaaaacattcctcaacactgcctataaggctcaaccgaataca

SEQ ID NO: 237661 - DNA, 311 bp, Glycine max
  unsure (1)..(311): unsure at all n locations
gaaacaacaaccgttccaatcccaaattccggccctccaactcccaaaaagcctttccccgcaatcaagggcaaggtcaagatcggaatcaacggatttggaagaattggccgtttggttgccanagtcgctctgcaaagagacgatgttgaactcgttgccgttaacgaccctttcattaccaccgattacatgacatacatgtttaaatacgacagtgttcacggacactggaagcatcacgatgtcaccgttaaggacgagaagacccttctcttcggtgacaaggcagtcactgtttttggacacag

SEQ ID NO: 237662 - DNA, 379 bp, Glycine max
gacagcacagcactctttgcaacacaacaaaaaaagacaacacagagagaagcgtcttaataaacgctcttctctgaaaaacctgatttcttctcttcttctcttctctttcgtttcgatcttcgatctctgaaaatgagagagtgcatttcaatccacatcggtcaggccggtattcaggtcggaaacgcctgctgggagctctactgcctcgaacacggcattcagcctgatgggcagatgccaagtgataagactgttggtggaggtgatgatgctttcaacaccttcttcagtgaaactggggctggaaagcacgtgcctcgtgggaattttggtaaatctcgagcctactgtgattgatgaagttaggactggg

SEQ ID NO: 237663 - DNA, 344 bp, Glycine max
aattcccggctcgacccacgacgtcacgtcaagtcagagaacagaattgtgcccgatggtgtgaatgcaaagcttcttgggtgccatggaccattggccaatcgtgaacctggaagagcctttttggatactgctactagttcttagtctgtcttttaatttggaaatactagacttttggataacattagttttgcaagagtgaatttgagttattttgtcagcacattccatttacttaaattttgtttgcgaacctcttcgatttggttattttaatgttatattctggtatgatgcacaacttctccttattactattgatattctattttccgtctctc

SEQ ID NO: 237664 - DNA, 439 bp, Glycine max
  unsure (1)..(439): unsure at all n locations
cggctcgacccacacgtacgacgacagaaggggagcctcagcagaagcagaacgaggagaagcagaaggagcaaaagcaatggcgccgaagaagccgagaaccacgacaaggaaccctgatttggttagggggattggcaagtattcgaggtcgcagatgtaccacaagaggggcatctgggccatcaaggccaaaaacggtggcgttttgccccgccacgatcccaagcccaagcccgaggccccggcccagaagccgcccaagttctaccccgcggacgatgttaagaagcccctcgtcaacaagcacaagcccaaacccgcgaaactcagggctagcattactccagggactgtgttgatcctgcttgctgggaggttcaanggaaaaaagggttgtttccctgaagcagctcccatctggattgcttcttgtaac

SEQ ID NO: 237665 - DNA, 329 bp, Glycine max
agtgcacaagtgagtttgttgatcgagataactagaaacagtgtgatgaaaatgaaggtccttgttttcttcgttgctacaattttggtagcatggcaatgccatgcgtacgatatgttccctctccgaatgaacactggctatggtgcccgtactccggaggtgaaatgcgcaagttggaggcttgctgtggaagcacacaacatctttggctttgagaccattcctgaagagtgcgttgaagcaacaaaggaatacatccatggcgaacaatatagatcagactccaaaacagttaaccaacaagcttacttttatgccagagacct

SEQ ID NO: 237666 - DNA, 397 bp, Glycine max
ggcacaagtgagtttgttgatcgagataactagaaacagtgtgatgaaaatgaaggtccttgttttcttcgttgctacaattttggtagcatggcaatgccatgcgtacgatatgttccctctccgaatgaacactggctatggtgcccgtactccggaggtgaaatgcgcaagttggaggcttgctgtggaagcacacaacatctttggctttgagaccattcctgaagagtgcgttgaagcaacaaaggaatacatccatggcgaacaatatagatcagactccaaaacagttaaccaacaagcttacttttatgccagagaactcgaagtcaatcccaaggacacatttgtgttcagtatagatgggcacgtactctctaatattccatactac

SEQ ID NO: 237667 - DNA, 343 bp, Glycine max
catctttacaggtactccacttgaaatcgagttcgtagagaaaccttattgtgctgaatcctccaaatgggtggcgtttgtggacaatgaaatccaaaaggcatgtgtgggtattggtggtcctgaaggtcatcctggtcaacaaacatttagtggcacatttagcattcagaaatataaatttggatacaaacttgtgttctgtatcactggctcaggcacttgtttagatattggaaggtttgatgccaaaaatggtgagggaggaagacgtttgaatctcactgagcatgaggccttcgacattgttttcatagaagcttctaaggttgatggaattatc

SEQ ID NO: 237668 - DNA, 380 bp, Glycine max
ggaacctttgcattctattcattcaagattcagcaagtgcgttttggaagcagagaccgaaatacttcgagatggcccgtacaaagcaaactgctcgtaagtcaactggaggaaaagctcccaggaagcagcttgcaaccaaggctgcacgtaagtctgcaccaacaactggtggtgtgaagaagcctcatcgttatcgccctggaactgttgctcttcgtgagattaggaaataccagaagagcactgagctcctaatcaggaagcttcctttccagaggttggttcgtgaaattgcccaggatttcaagactgatctgcgtttccagagccatgccgtgcctgcattgcaagaggctgctgaggcataccttgttggg

SEQ ID NO: 237669 - DNA, 272 bp, Glycine max
  unsure (1)..(272): unsure at all n locations
gacccccaaaccctgctgcatangaagaaaccctagcctctcaccctccctgcgacacgatgcagatcttcgtgaaaaccctaacgggtaagacgatcacccttgaggtggagtcttctgacaccatcgacaacgtgaaggccaagatccaggacaaggaaggcatccctccggaccagcagcgcctcatcttcgccggaaagcagctggaggacggccgcaccctcgccgactacaacatccagaaggagtccaccctccacctcgtcctc

SEQ ID NO: 237670 - DNA, 392 bp, Glycine max
ggtcttccagtgaaagaaaggcagcgatggaagaagacttcgacatccccggcggcaaggaaatggttcccggcaaaaacaaggccggcaaggaaaggaaaatcggcccgggcggcctcaaaaaaaacctccccaaggaaggtcaaggctggggaaacccccaaagccggtgacgaagtccaagttcattacacggggactttgctcgacgggactaagttcgattcgagccgcgacagggattctcccttcagcttcacgctcggacaagggcaagtaattaaaggatgggatgaaggtattaaaaccatgaagaaaaggtaaaatgctaatttcaacatccctcccgagctagcttatggtgaatctggttcccctcctactattcctcc

SEQ ID NO: 237671 - DNA, 334 bp, Glycine max
ggagcaataccctaaaccctattgttcttcctcagtagtgtcatctacgcatctcttcactgcaccatctatgccgaaccctaaggtcttcttcgagatgatgatcgggggtcaatctgctggccgcatcgtgaaggagctctacggctacgtcactccccgcaccgcagagaacttccgcacgctttgcaccggcaagatcggcgtaaggcggagcagcaatcccctcgactacaatggctcgtgcatcgaccgcgtgatcccgagtttcatgtgtcaggttggcgacttcaacgtcagtaacgggatcggaggcgagtcgaattaaggcgcc

SEQ ID NO: 237672 - DNA, 391 bp, Glycine max
  unsure (1)..(391): unsure at all n locations
gattcacgcagctgaataaagaaaaaagcctttcatagtgagatagccctagaaatgtttcgtgaatctttgtttgctctctttctactttctgccttctcctcctcactcctacctttaaccactgctcaagattacgttctcgacacggacggtcacgcggttgaaaatcacggtacatactatttgttgccagcgaaatcaggaagcggcggtggtggaatagaggtagccgcaactggcaaagaaagttgcgctctcactgtagtgcaatctctgaacgaggactccatggggctaccattgaagctttcaagcccatccatcactacgtctcacttcancgaatacacttcgttgaacatcgagttcacttcggcgccggcgccgt

SEQ ID NO: 237673 - DNA, 386 bp, Glycine max
ccggctcgacccacacgtcaggacgacagaagggggcacaagtttgttgagatagctagaagcaataagatgaaaatgaaagtgcttgttttgtttgttgctacagttttggtagcatatgaatgccatggctcagactaccagaagttccctctccaaatgaaaactgggtttggtgggcaatacagcaatgaggtggcatgtgccagttggaggcttggcgtggaagcaaacaacgtagtcaagtggcaaactgttcctgcagcttgcggagagtacatagctgactacgttctaggagaccaatatagatcagattccaaaacagttaaccaacaagcttatttctatgctaaatccctcaaactcaccaacaaagatgtcct

SEQ ID NO: 237674 - DNA, 377 bp, Glycine max
ggcacaagtgagtttgttgatcgagataactagaaacagtgtgatgaaaatgaaggtccttgttttcttcgttgctacaattttggtagcatggcaatgccatgcgtacgatatgttccctctccgaatgaacactggctatggtgcccgtactccggaggtgaaatgcgcaagttggaggcttgctgtggaagcacacaacatctttggctttgagaccattcctgaagagtgcgttgaagcaacaaaggaatacatccatggcgaacaatatagatcagactccaaaacagttaaccaacaagcttacttttatgccagaaaactcgaaattcaatcccaaggacacatttgtgttcagtatagatggcaccgta

SEQ ID NO: 237675 - DNA, 408 bp, Glycine max
  unsure (1)..(408): unsure at all n locations
gaacgatcataaggcaaaaatctaaagagctacgatgacgcgagcaagcggcgaagattcctgagaagagtgggatttgcttgagtcattctcttcccttctagctacgtaacgactaacgacgcactctactctttcttagggtttcctctcccgccaattttccctttccccaattcaattccaaccctaacctcactccactctcgccggaaccgcaccttcgattcgacctagggtttcacgaacttcacgatgccgtcgctactctccccgggcaaaatccactgcctcgaggtggagaatttcaagtcctacaagggcttccgagtgatcggtcncttctacgacttcaccgccatcatcggccccaacggcgccggcaagtccaatctcatggacgccatc

SEQ ID NO: 237676 - DNA, 337 bp, Glycine max
ggagagtgagtgagatagagagagacgcttcgcagatctcaatcgaatctcagaaatatgagagaaagcatcagcattcacatatgtcacgccgggatccaggtcggaaactcctgctgggaactctactgcctcgaacatggcatccagcccgacggcatgatgccttctgactccaccttcggtgtagcccacgacgccttcaacaccttcttcagcgaaaccggatctggcaagcacgtcacccgtgctgtcttcgtcgagctcgaatccatcgtcatcgacgatgttcgctgcggcacctaccgtcaactcatccataccgaacaactcatct

SEQ ID NO: 237677 - DNA, 354 bp, Glycine max
  unsure (1)..(354): unsure at all n locations
gaattacgggaaggggccattgaacagctggaaaaagcccaagcccgcttaaggaaagtcgaaacggaagcagatcgttttcgggtgaatggctattctgagatcgaacgagaaaaattgaatttaattaattcaatttatacgactttggaacaattagaaaattacaaaaacgaagccattcattttgaacaacaaagagtgattaatcaagtccgacaacgggttttacaacaagccttacagggagctccaggaactctaaagagttgcttgaacaacgagttacatttacgtactgtcagtgctaatattggcatgtttgggacgatgaaagaaaanataactgattag

SEQ ID NO: 237678 - DNA, 395 bp, Glycine max
  unsure (1)..(395): unsure at all n locations
gtcacaccaaaatttgccaattgccatttcaatccccagtttcttcttcaacgtcctcttacgagcaagtccaattccccctcccagtttcaaaaccctaaatccctcattcccatggcctcagaagagcccactgtcgccgtggaacncgctcccgaacctgccaccgccgagcctcncccggaggagaaggaggagcccaaacctgaagccaaggctaagaaaaccaaggaacccaaacctaaaaaggtttccagaccacgcaaccctcccactcatccttcctacgaggagatgattaaagacgcaattacctcgctgaaggagaaaaacggttccaagcaacaagcaattgcgaggttcatcgaggagaagcacangcagcttccaccgaa

SEQ ID NO: 237679 - DNA, 392 bp, Glycine max
  unsure (1)..(392): unsure at all n locations
ggcgtacacagcctcaacaaccctaacgcgtgcagagcagagagagacgcagccatggggcgaagacccgcgaggtgttataggcaaattaagaacaaaccataccccaagtcacggttttgccgtggtgttcctgatcccaagatcaggatttacgatgttggtatgaagaagaagggtgttgatgagtttcctttctgtgtccatctggttagttgggagaaggaaaacgtttctagtgaggccctggaagctgctcgtattgcttgcaacaagtacatggccaaatttgctggaaaggatgctttccacttgagagtcagggtgcacccattccatgttcctaaggttcaccangatgctttcgtgtgctggagctgataggctccaaa

SEQ ID NO: 237680 - DNA, 392 bp, Glycine max
  unsure (1)..(392): unsure at all n locations
gtccgccatttttcgtagctgctgttcttgcgcgtgaacaagcctcaggtaagccaaaaccatggttaagcataacaatgttatcccaaacggacacttccgtaagcactggcagaactatgtgaagacttggttcaatcagccagcacggaagacaaggagacgattggctcgtcagaagaaagctgtgaagatattccccagacctacggctggacctctcaggcccattgtacatggtcaaactttgaaatacaacatgaaagtgagaggtggaaggggattttctcctgaagaactcaaggcagcaaggattcccaaaaagcttgcancaaaccataggtattgctgttgatcatcgtcgcaagaaccgttctttggaaagtctgcaa

SEQ ID NO: 237681 - DNA, 391 bp, Glycine max
  unsure (1)..(391): unsure at all n locations
ggctttaagtcattctttctctactggctacgtaacgactaacgacgcactctactctctcttagggtttcttctcccgccaatttcccctctcccccattcaattccaaaccctaacctcactccacccttgccggaaccgcaccttcgattcgacctagggtttcacagtttcactccgagcacgcacgcacgaacttcacgatgccgtcgctactctccccgggcaaaatccactgcctcgaggtggagaatttcaagtcctacaagggcttccaagtgatcggtcncttctacgacttcaccgccatccttggccccaacggcgccgggaagttcaaccttaatggacgcaatcagcttcgtcatcggcgtccgcaccggccagctc

SEQ ID NO: 237682 - DNA, 407 bp, Glycine max
  unsure (1)..(407): unsure at all n locations
gacacacttcagatcaacgatgatgaggtggaactatgggtggttagaggattaactgctaagttaattgactgtaagatggaccaaatgaatcaagttgtagttgtcagtcatcctactgagcgtgtgtttggtcagcaccaatggcaagcactgagaacaaagctagtgacatggaggggaaatattgtaaatgttatcagtaccattcaggccaacaaaataacggaggatgggtcccaggcagcccaaggtttggttgttcgttgaggacaattgagtgaagcaattatctgagtatctagattttattcaagtggaattttttgatcttaaacagaggataagagtgtaatttgtnttgttacgatttatttttccatttaatttaattggctggtgactcc

SEQ ID NO: 237683 - DNA, 357 bp, Glycine max
gctctaccgcattagcactcgtctttggttctggtttatagatctctgtgaagtcgctttataacactcaacctaagatgcagaacgaggaacgacagatcaccgagctttacattcctaggaagtgctctgccacaaaccgattgattaccgctaaggaccatgcttcggttcaggttaacattgggcatgtggatgagaatggcgtctacaatggccatttctccacttttgctctctgcggcttcatacgtgctcatggtgatgctgacagtgccctagatcgcttgtggcagaagaagaaagttgaagttaagcaacagtagacacccatgatagtttgttactttgctatgt

SEQ ID NO: 237684 - DNA, 378 bp, Glycine max
ggctgcagcaagggctcaacgcacgcaggaggaggagattgatcgagagaagagaagatgactacacgcttcaagaagaacaggaagaagagaggccacgtgagtgccggccatggccgcatcgggaagcaccggaagcaccctggaggacgcggtaatgccggaggcatgcaccaccaccggatcctctttgacaagtaccaccctgggttcttcggcaaggtcggaatgcgctattttcacaagctccgcaacaaattccactctccgatcctcaacatcgacaagctctggtccctggttccgcaagaagtgaaggacaaggcctccaaggagaacaaggcgccgctgatcgacgtcacgcagttcggggtactt

SEQ ID NO: 237685 - DNA, 354 bp, Glycine max
  unsure (1)..(354): unsure at all n locations
ggcacaagtttgttgagatagctagaagcaataagatgaaaatgaaagtgcttgttttgtttgttgctacagttttggtagcatatgaatgccatggctcagactaccagaagttccctctccaaatgaaaactgggtttggtgggcaatacagcaatgaggtggcatgtgccagttggaggcttggcgtggaagcaaacaacgtagtcaagtggcaaactgttcctgcagcttgcggagagtacatagctgactacgttctangagaccaatatagatcagattccaaaacagttaaccaacaagcttatttctatgctaaatccctcaaactcaccaacaaagatgtctttg

SEQ ID NO: 237686 - DNA, 391 bp, Glycine max
ggtgttgcagaagacacaaaagaagtcacaaaatgtatcgcgttcttcaccgcgctttctgcaccgccaccgagcccgccaccaccgccaccgtcaccgtttccatcaagtccatttcggaggatctgtacaaggaagtgaagctaaagaatgtggtggagaagttcaagaaagcctcggacatcgaccgcttccgcaaaaaaaccggcatctacgaagacaccgtccgccgcctcgccggcgcccgacgcttccggtggatccgcgacatcctcgagcaccagaagcagtactccgacatctccaacgacggcttctccgcgcgcctcaacttcctggtccggaaattccgggatgaccaaccacgctcgcaaggtgttcgacgaaatgc

SEQ ID NO: 237687 - DNA, 391 bp, Glycine max
ggagcaaaaccctaatccctatttttcttcctcagtagtgtcatttacgcttctcttctctgcagcaactatgcctaaccctaaggtcttcttcgacatgaccatcggcggtcaatctgctggccgcatcgtgatggagctctacgccgacgtcactccccgcaccgccgagaacttccgcgcgctttgcaccggcgagaagggcgtagggcggagcggcaagcccctccactacaagggctcgtccttccaccgcgtgatcccgagtttcatgtgtcagggtggcgacttcaccgccggaaacggaaccggcggcgagtcgattttatggcgcaagtttcgccgacaagaaactcgtgaagaagcacaccggtcccggcatcctctccat

SEQ ID NO: 237688 - DNA, 343 bp, Glycine max
atcgagcggccacattcatattttccttcgtttcctttcattttccctcactttctcgctccccaaacgctcctctctctcctccaatggccgatcagctcaccgacgacgagatcgccgagttcaaggaggccttcagcctcttcgacagtgacggcgatggttgcattactaccaaggaacttgggactgttatgaggtcacttggtcaaaactcaactgaggcagaactgcaggatatgataaacgaggttgatgctgatggcaccggaatcatcgatttcccagagttcctcaacctgatggctcgcaagatgaaagacaccgactcagaggatgagct

SEQ ID NO: 237689 - DNA, 400 bp, Glycine max
gatgtcatagtattatcattcattctcatctttctctcttctctctccacccaaaccctaactcccgaccctgttcccctctcgtatccgtcatgaaaggaggaaagtccaagaccgaatctaagagagccgatcccaaacttgctgtgaataagaagggagccgccaccaaggctaggaaacccgccggcaaggggaaggcagcgaaagaccctaacaagccaaagaggcctccaagtgctttcttcgttttcatggaggagttcaggaaggtattcaacaaagaacatcctgaaaacaaagcagtgtctgctgtgggcaaagctgctggagcaaaaatggaagaccatgtctgatgctgaaaaagcaccttatgtggcaaagtctgagaaaaggaaat

SEQ ID NO: 237690 - DNA, 398 bp, Glycine max
gatagcgaaacagagagtggtttcagtgagtgatcggtgttcacttgatctttcataagtcggcatcatcatcatcaccatcaccgttgattgaagaagatgccgatcagaaacatcgccatcggaaggcctgaagaggctacgcaccccgacacgttgaaggcggggttggctgagttcatctccaccttgatcttcgtgttcgccggttcaggttccggcatcgcctacaacaagctcaccgacaacggcgccgccactcccgccggcctcatctccgcttccatcgcccatgctttcgccctcttcgtcgccgtctccgtcggcgccaacatctccggccggcaagtttaaccccgcggtcaccttcggcgccttcgtgggcggcaacatcacct

SEQ ID NO: 237691 - DNA, 386 bp, Glycine max
ggcacaagtgagtttgttgatcgagataactagaaacagtgtgatgaaaatgaaggtccttgttttcttcgttgctacaattttggtagcatggcaatgccatgcgtacgatatgttccctctccgaatgaacactggctatggtgcccgtacttcggaggtgaaatgcgcaagttggaggcttgctgtggaagcacacaacatctttggctttgagaccattcctgaagagtgcgttgaagcaacaaagggatacatccatggcgaacaatatagatcagactccaaaacagttaaccaacaagcttacttttatgccagagaactcgaagtccaacccaaggacacatttgtgtccagtatagatggcaccgtactctctaata

SEQ ID NO: 237692 - DNA, 376 bp, Glycine max
  unsure (1)..(376): unsure at all n locations
ggcgtgcacaggcgaaaaccctaatcctgaggcactgaaagtgtgatatggcaagagtcatttcctcttcctgcgcacgcctcgcaatgcgcctcttctccaccaccaccacagccaccgcgttcgccgtcactttacccaaaccctcatcactctccctctcatcgcgtcgattcctcttccctctctcccatgccatcgtccctccctccacccgcgtcgccggaatccggtgccgcgttaaccgcgccggagactcggcgtactcaccgctgaactcggggtcgtcgtcttcgtcgttcagcgaccgcccccccacggagatggcgccgctcttccccggctgcgactancancactggctcatcgtcatgga

SEQ ID NO: 237693 - DNA, 376 bp, Glycine max
agacaggtgacgacagaaggggagggttttgcgctgttgttgctgctcatcctccgtaacctccgagctctgcaccgaagaacgaagccatggggaagacacatggaatgggatctgctcgcaagctcaagtcccaccgcaggaggcaaaggtgggctgacaagtcatacaagaaatcacatcttggaaatgaatggaagaaaccttttgctggttcatcccatgccaagggaattgtccttgaaaagataggtattgaggctaatcagcccaactctgccattcgtaagtgtgccaaggttcaacttatcaagaatgggaagaagattgccgcttttgtccctaatgacggttgcttgaactacattgaagagaa

SEQ ID NO: 237694 - DNA, 330 bp, Glycine max
ggcacaagtgagtttgttgatcgagataacaagaaacagtgtgatgaaaatgaaggtccttgttttcttcgttgctacaattttggtagcatggcaatgccatgcgtacgatatgttccctctccgaatgaacactggctatggtgcccgtactccggaggtgaaatgcgcaagttggaggcttgctgtggaagcacacaacatctttggctttgagaccattcctgaagagtgcgttgaagcaacaaaggaatacatccatggcgaacaatatagatcagactccaaaacagttaaccaacaagcttacttttatgccagagaactcga

SEQ ID NO: 237695 - DNA, 356 bp, Glycine max; identical to SEQ ID NO: 234809

SEQ ID NO: 237696 - DNA, 333 bp, Glycine max
cccagccttaagacggatgcaagaggacgacgtaagggggtcgaaccgcgatcacgcgccctagaacccgagctcgcgtgcagcttccgtctcctacaccaggatggagtctcaggtgaatcacgcacttcttgtcaaagttatgggtcgtactggatctagaggagaagtacgccaggtgcgagtcaagtctctggatcatcagtaccgtcacatcaccaggactgtgaactgacctgtgcgatgaggagacattctcagccaactcaagtcagtaagggaatcacgaggattgcactcaatcgcatcttttggcttgcctccaagatcgac

SEQ ID NO: 237697 - DNA, 301 bp, Glycine max
ggtacgcaactgaaaaggaaaaccctaagagatgatgagaactcctatcttgttccctctcttctttcttctttgtgccttcacctcatatctaccttcagccaccgctgatgatgatcatgtgtacgacactgaccgcgataagcttcaatacggtgtcaattatttcgtgttgccagtgttaagatgaaatggcggtggaatactagtagcataagcaggatacgaaacttgccctctgactgtggtggaatctggcaacgagctctctgaggggttaccgacttagattgcatctcga

SEQ ID NO: 237698 - DNA, 315 bp, Glycine max
aacattgtggtggttggtcatgtggaccctgaggaggcaaccaccattaacgagctgaagaagcctgttgtggagaaagaagctccagggcatgccatatgagggcatgcacgtacggcctcggaggggaaccagagaattatgttaacaaaataatctggaaccctaatgtatcagtgtcatcatcagtgtgtagtttaagctatctttgctatggttacgttctttgagatgagagtcttgatgaacagtaccattctgatgtattgctttccctgaaagttaatgcatgcgtcttaacttctgtccataaaa

SEQ ID NO: 237699 - DNA, 297 bp, Glycine max
cattcaagaagattaggttgagagctgaagatgtgcaagggaagaatgttctgacaaatttctggggaatggatttcacaacagacaagctgaggtcattggtacgaaaatggcaaactcttattgaagcccatgtggatgtgaagacaactgataattacacattgaggatgttttgcattggatttaccaagagaagagctaaccaggtgaagagaacctgttatgcacaatcaagccagattagacagattcgtaggaagatgagggagatcatgaccaaccaagcaacagcat

SEQ ID NO: 237700 - DNA, 326 bp, Glycine max
gaaagtgcacaagtgagtttgttgatcgagataactagaaacagtgtgatgaaaatgaaggtccttgttttcttcgttgctacaattttggtagcatggcaatgccatgcgtacgatatgttccctctccgaatgaacactggctatggtgcccgtactccggaggtgaaatgcgcaagttggaggcttgctgtggaagcacacaacatctttggctttgagaccattcctgaagagtgcgttgaagcaacaaaggaatacatccatggcgaacaatatagatcagactccaaaacagttaaccaacaagcttacttttatgccag

SEQ ID NO: 237701 - DNA, 305 bp, Glycine max
gaaggtgcaagagtttgttgtgagctataagctagtttatcgtgaggagaatatgaagttgtttgttttctttgttgctgcagtagttttggtagcatggccatgccatggcgcaggctaccaaaggttccctctccgaatgaaaactggctatggtgagcgttcttcggaggtaaaatgcgcaagttttaggcttgctgtggaagcacacaacatccgagcctttaaaaccattcctgaagagtgcgttgaaccaacaaaggactacattaatggcgaacaatttagatcagactctaaaacag

SEQ ID NO: 237702 - DNA, 345 bp, Glycine max
gatagcaaaatcgtttctccaatttaatcaccattgtacaacccaattcccttcgtcgttttcgattaagagagcaatggcacgtaccaagcaaaccgctcgcaagtccaccggaggaaaggctccgaggaagcaattggcaaccaaagccgctcgcaagtcagccccggcgaccggcggagtgaagaagccccaccgcttcaggccaggaacggtggctctgagggagattcgaaagtaccagaagagcaccgaacttctgatccgaaaactcccattccagaggctcgtcagagaaatcgctcaggatttcaaaaccgatctccgctttcagagcagcgccgt

SEQ ID NO: 237703 - DNA, 369 bp, Glycine max
ccggctcgacccaagcgtcagtccagccgtcagtacagcagcgaaagggacaccgcaggtgaaaacctcaatatcctaaatcggatgaagacaaaacctacattttccggccttaccgtacactagattcacacggatgaatgtaggtcgcatcaagttcagactcagtcacgtccaattcaacaggtgctccagctgtggcattagcagttccactgacatagtcatcaaggcgttccaggatgagtacattgttaatcaggctccagtcggagatgtgcaggcaccttgtgtcaatcaacactatactcatcgcaaacgctcagtacatatgcaatcctgtgtttcttgtactaacgacgctcatgt

SEQ ID NO: 237704 - DNA, 361 bp, Glycine max
  unsure (1)..(361): unsure at all n locations
gacagcatatatatcaataatctattttatactatacctacattttgataattttctttgtagttgatagccatggctacccgtggaaagcttgaggttgacattgatctcaagcccaacgcagacaagtactggcaaacccttaggaattctactgaaatattccctaaggccttcccacatgattacaaaagcattgaggttcttgagggtgatggcaagtctcctggttctatccgccacataagttatggtgaaggttcaccacttgtgaaatcatcctttgagaagattgacgctgttgatgaggaaaagaaggtantgtcgtacactatcattgatggggaactcctccagcact

SEQ ID NO: 237705 - DNA, 368 bp, Glycine max
acgcgtcagatagggtgggtttctccaattttgcaaacatgtatcatattgtctgtggaacttgtggcaaaagacacattgttgcgccaatcaacatcaagtgttggacctgaatgaaattcaaattgttgtttccattcttctgccttcacatcccacacaattgcagtttgatcacaacttccagtcagaagataatctcctttcttattccacttcagagagaatattggtcccttgtgtttgcttaatgtactcttcagttcaccattggtggtccaaattcttgcttgcccatcatatgaaccagttgcgagaagtgtcccttccccattccagtcaagtgtagtaacatctttactcctttc

SEQ ID NO: 237706 - DNA, 381 bp, Glycine max
gaaggtgcaagagtttgttgtgagctataagctagtttatcgtgaggagaatatgaagttgtttgttttctttgttgctgcagtagttttggtagcatggccatgccatggcgcaggctaccaaaggttccctctccgaatgaaaactggctatggtgagcgttcttcggaggtaaaatgcgcaagttttaggcttgctgtggaagcacacaacatccgagcctttaaaaccattcctgaagagtgcgttgaaccaacaaaggactacattaatggcgaacaatttagatcagactctaaaacagttaaccaacaagctttcttttatgctagtgaacgcgaagtccatcacaacgacatatttatatcggcatagataac

SEQ ID NO: 237707 - DNA, 306 bp, Glycine max
gattctgattctgtccatccaaatcttaaaaatattcagtgaagatcaacctcaatggcatctcttggcgtgcgaccagttcttccccctccattaacttccatctccgacccacctcctcttttcgatggcaccaccaggttgtacatcagttattcttgcccctatgcacaacgtgtgtggatcgctaggaactacaaggggctacaagataagatcaatttggtccctattaaccttcaagacaggccagcttggtataatgagaaagtctatcctgaaaataaggtgccatccttggagcac

SEQ ID NO: 237708 - DNA, 322 bp, Glycine max
  unsure (1)..(322): unsure at all n locations
tcccggctcgacccaagcgtacgacgctcacctaagtttcaatttcaatcccttttctttttccgttacaaaataattcaaaattccctccctcatttacccttgtttgtgtaaagtagtagcagagtgagactaggtatcatcgatggcagggtacaagggcgatgacgaatacgattacctcttcaagctggttctcatcggcgattccggtgtcggcaagtccaacctgctttcgcgcttcacgaggaacgagttcaatttggagtccaagtccaccatnagggttgagttcgccaccaagagcttggacatcgatgct

SEQ ID NO: 237709 - DNA, 387 bp, Glycine max
gaccacattccaaaacacaaacacatacattgtagtatcacttttgtctcggaatttgttcttttgagttatggcaagcttaaaggttgcatgtgtggttttgatgtgcatggctgtgatgagtgcaccaatgatggtgcaagccgtgtcatgcaatgatgtttctgtgaacctatcaccgtgcctatcttacctgatgcagggtggagatgttccagaatcgtgctgtagcggagtgaggaacattctgggttctgccagcaccacctttgacaaagaaaccgtgtgcaaatgtcttcagcaagctgctaataactatggcatcaacgacgaatacgctcaagcactcgcagcccgctgcaatgtcagcgtcccttacaagatcag

SEQ ID NO: 237710 - DNA, 353 bp, Glycine max
gaccacattccaaaacacaaacacatacattgtagtatcacttttgtctcggaatttgttcttttgagttatggcaagcttaaaggttgcatgtgtggttttgatgtgcatggctgtgatgagtgcaccaatgatggtgcaagccgtgtcatgcaatgatgtttctgtgaacctagcaccgtgcctatcttacctgatgcagggtggagatgttccagaatcgtgctgtagcggagtgaggaacattctgggttctgccagcaccacctttgacaaacaaaccgtgtgcaaatgtcttcagcaagctgctaataactatggcatcaacgacgaatacgctcaggcatcccccg

SEQ ID NO: 237711 - DNA, 392 bp, Glycine max
  unsure (1)..(392): unsure at all n locations
ggaaacagagagtgatttcagtgagtgatcggtgttcacttgatctcatcataatcgtcagcgtcaattgaagaagatgccgatcagaaacatcgccgtcggaaggcctgaagaggcgactcaccccgacacgttgaaggcggctttggctgagttcatctcaaccttcatcttcgtgttcgccggctcaggctccggcatcgcctacaacaagctcaccgacaacggcgctgccacccctgccggcctcatctccgcctccatcgcccatgcattcgccctcttcgtcgccgtctccgtcggcgccaacatctccggcggccacgtcaaccccggcgtcaccnttcggcgccttcgtcggcggcaacatcaccttcctccgcggcatcgtc

SEQ ID NO: 237712 - DNA, 370 bp, Glycine max
gaccacattccaaaacacaaacacatacattgtagtatcacttttgtctcggaatttgttcttttgagttatggcaagcttaaaggttgcatgtgtggttttgatgtgcatggctgtgatgagtgcaccaatgatggtgcaagccgtgtcatgcaatgatgtttctgtgaacctagcaccgtgcctatcttacctgatgcagggtggagatgttccagaatcgtgctgtagcggagtgaggaacattctgggttctgccagcaccacctttgacaaacaaaccgtgtgcaaatgtcttcagcaagctgctaataactatggcatcaacgacgaatacgctcaagcactccccgcccgctgcaatgtcagc

SEQ ID NO: 237713 - DNA, 384 bp, Glycine max
gaaggtgcaagagtttgttgtgagctataagctagtttatcgtgaggagaatatgaagttgtttgttttctttgttgctgcagtagttttggtagcatggccatgccatggcgcatgctaccaaaggttccctctccgaatgaaaactggctatggtgagcgttcttcggaggtaaaatgcgcaagttttaggcttgctgtggaagcacacaacatccgagcctttaagaccattcctgaagagtgcgttgaaccaacaaaggactacattaatggcgaacaatttagatcagactctaacacagttaaccaacaagctttcctttatgctagtgaacgcgaagtcgatcacaacgacatatttatattcggcatacgatacac

SEQ ID NO: 237714 - DNA, 387 bp, Glycine max
  unsure (1)..(387): unsure at all n locations
ggccattgttgctgtcatcatccgcagctgctgttattcgcaccgcaaacaaacagtgagccatggccgtcggaaagaacaagcgcatctccaaagggaaaaagggtggcaagaagaaggcagctgatccctttgccaagaaggattggtatgacattaaggccccttctctttttcaagtgaaaaatgttggcaaaaccctcgtctctcgtacgcagggtaccaagattgcttctgaaggacttaaacatagagtgtttgaggtctccttggctgatcttcaaggggatgangatcatgcattcaagaagattaggttgagagctgaagatgtgcaaggggaagaatgtcctgacaaatttctggggaatggatttcacaactgac

SEQ ID NO: 237715 - DNA, 340 bp, Glycine max
cccacgcgtcaggggaatcgttcccgtgctcgtgcgtctactcgattcctccccatccgaaacgaaagagaaaaccgtcgccgccatctcaaaaatctccaccgtggaaagcgcgaaaagcgttcttctcgctgagggtttactccttctgaaccacttgcttatggttttggattctggaagtggcttcgctattgagaaagcatgcatcgcgcttcgggcgttgagtttgacgaacgagaacgctatggcgattggctcgcgcggcggaatctcgtcgctgctccagatctgccaggctggcacccccggcgcacacgcttcagccgccgctgtgctg

SEQ ID NO: 237716 - DNA, 291 bp, Glycine max
gaggcgcggcgggatcagcacaagattgcaaaatgaagttcaacattgcaaatcccaccactgggtgccagaagaagctggaaatcgatgacgacctgaagcttcgagcattttgggacaagaggatctcccaggaggttcttggtgatgctctgggtgaggagtttaaaggatatgttttcaaaatcaccggtgggtgtgacaaacaaggattccctatgaagcagggagtgctgacccctggtcgtgttcgacttttgctccatagaggaactccttgtttccgtggat

SEQ ID NO: 237717 - DNA, 321 bp, Glycine max
  unsure (1)..(321): unsure at all n locations
ggcacaagtgagtttgttgattcgagataactagaaacattgtgatgaaaatgaaggtccttgttttcttcgttgctacaattttggtagcatggcaatgccatgcgtacgatatgttccctctccgaatgaacactggctatggtgcccgtactccggaggtgaaatgcgcaagttggaggcttgctgtggaagcacacaacatctttggctttgagaccattcctgaagagtgcgttgaaacaacanaggaatacatccatggcgaacaatatagatcagactccanaacagttaaccaacaagcttacttttatgcca

SEQ ID NO: 237718 - DNA, 356 bp, Glycine max
gagctcaaaacccaattttaccctaccaattaaggtctctcatacagtagtattttatttgcactacgtactggctactttatttatttaagcagaagcaggtgagtgagtgagtgagcaagagtgaagagcgaagagaatggctcccaagggtttaatctttttggctgtgttatgcttctcagcactgtcactgagtcgttgtcttgcggaggataatggacttgttatgaacttctacaaggaatcatgccctcaggctgaagacatcatcaaagaacaagtcaagcttctctacaagcgccacaagaacactgcttttctcctgcctcagaaacatcttccatgactgtgct

SEQ ID NO: 237719 - DNA, 328 bp, Glycine max
ggtgctctgctcgtgcctctagggttatcatttctccatttccattttctctctcacttttcaagaatcgtaagctatgggaaagtcttacccaactgtgagtgctgattaccagaaggccgttgagaaggcgaagaagaagctcagaggcttcatcgctgagaagagatgcgctcctctaatgctccgtttggcatggcactctgctggaacctttgacaagggcacgaagaccggtggacccttcggaaccatcaagcaccctgccgaactggctcacagcgctaacaacggtcttgacatcgctgttaggcttttggagccactc

SEQ ID NO: 237720 - DNA, 371 bp, Glycine max
ggcgcattgaacgaaaattagggtttgtagtgtaccaggaagaagcagcaatggcgccgaagataacacgtaaggttagcagaaaccctgaattgataaggggaatcggaaagtactcgaggtcgcagatgtaccacaagaggggcatttgggctatcaaggccaaaaacggtggcgttttacctcgccacgaccctaaacccaagcctgaagctcctgctgaaaaaccacccaaattttaccctgctgatgatatcaagaagccccttgtcaacaagcacaaaccgaaaccagctaagctcatggctagcattactcgcgggacagtgttgattcctcttgccggtagatttaagggaaagagggtattc

SEQ ID NO: 237721 - DNA, 380 bp, Glycine max
  unsure (1)..(380): unsure at all n locations
gatcgcatttcatagcactcaccctcattaccaacacgaaagcatagccaaaaccttttttcgaagtctctgattttcctaatggctccggcaaaggcagagaagaagccggcggagaagaagccagcggcggagaaggcaccggcggagaagaagccgaaggcggagaagaagatctcgaaggaagganggagcgagaagaagaagaagcgcacgaagaagagcgtggagacctacaagatctacatcttcaaggtcctcaagcaggttcaccccgacattggtatttccagcaaggccatgggcatcatgaacagcttcatcaacgacatcttcgagaagctcgcccaggaagcgtcgcgtttggctcgctacaacaa

SEQ ID NO: 237722 - DNA, 361 bp, Glycine max; identical to SEQ ID NO: 236169

SEQ ID NO: 237723 - DNA, 425 bp, Glycine max
ccggctcgacccaagcgtaagaagacgacagaaggggagtacagaagacgcagttctcaccatttccctctcgattgtgagacttgatgttgttaactgaacttttctgagcaagaatgtctgggcgtggaaagggaggcaagggtttgggaaagggaggagcgacacgacaccgtaaggtgctgcgcgataacattcacggaatcaccaagcccgcgattcggcgtttggctcgtatgggtggcgtgaagcgtatcagtggtctcatctacgaagagacacgtggcgtgctcaagatgacagaagggggtgcacaagtgagtttgttgatcgagatatctagaaccagtgtgatgaacatgaacgtccctgttatcttcgttgctacaaatttggtagcatggcaatgacatgcgtacgatatg

SEQ ID NO: 237724 - DNA, 319 bp, Glycine max
gaacactgtcactcttacaatctcagctcatagaattcttcttcttccaacgagaatcattctttgggttccaaatggcccgtacgaagcaaacagcaagaaagtccaccggaggaaaagctccaaggaagcagctcgccaccaaggcagcacgtaagtccgctccggcgacgggcggcttgaagaagccccaccgtttcaggccggggacattggctctgagggagattcggaagtaccagaagagcacggagcttctcataaggaagcttcctttccacaggctcgtaagggaaatcgctcaggacttcaagaccga

SEQ ID NO: 237725 - DNA, 341 bp, Glycine max
ggcacaagtgagtttgttgatcgagataactagaaacagtgtgatgaaaatgaaggtccttgttttcttcgttgctacaattttggtagcatggcaatgccatgcgtacgatatgttccctctccgaatgaacactggctatggtgcccgtactccggaggtgaaatgcgcaagttggaggcttgctgtggaagcacacaacatctttggctttgagaccattcctgaagagtgcgttgaagcaacaaaggaatacatccatggcgaacaatatagatcagactccaaaacagttaaccaacaagcttacttttatgccagagacctcgaagtccatccca

SEQ ID NO: 237726 - DNA, 310 bp, Glycine max
  unsure (1)..(310): unsure at all n locations
gacttctcttcacacctttgttcactcttcttctcttgcggctagggttttaccgcagcttcttctaaatttaaggaaaatgggtaaggaaaaggttcacatcagtattgtggtcattggccatgtcgactctgggaaatccactaccactggtcacctgatttacaagcttggaggcattgacaagcgtgttattgagaggtttgagaaggaagctgctgagatgaacaagaggtctttcaagtatgcctgngtgctggacaaacttaaggctgatcgtgaaagaagaatcaccattgatattgctttg

SEQ ID NO: 237727 - DNA, 382 bp, Glycine max
gaagtcgggttggatttgtaggaggaagtaagaaaacacaacacgaatttcattgcagagtgttactttgagtatcagcatcaatggctccaattgcagtgggaaacgtgattccagacggcattttggcttacttggatgaagaaaacataccccaaactgtctccattcactctctcgccaccggcaagaaagtcatcatctttggggttcccggtgccttcactcctacttgcagcttgaagcacgttcctggcttcattgagagagcagaagagctgaaagggaagggtgtggacgaaataatctgtaacagtgtgaatgatccagttgtgatgaactcaatggcaaaaacattcccagagaacaagcatgttaagtt

SEQ ID NO: 237728 - DNA, 376 bp, Glycine max
ggcacaagtgagtttgttgatcgagataactagaaacagtgtgatgaaaatgaaggtccttgttttcttcgttgctacaattttggtagcatggcaatgccatgcgtacgatatgttccctctccgaatgaacactggctatggtgcccgtactccggaggtgaaatgcgcaagttggaggcttgctgtggaagcacacaacatctttggctttgagaccattcctgaagagtgcgttgaagcaacaaaggaatacatccatggcgaacaatatagatcagactccaaaacagttaaccaacaagcttacttttatgccagagacctcgaagtccatcccaaagacacatttgtgttcagtatagatggcaccgta

SEQ ID NO: 237729 - DNA, 381 bp, Glycine max
  unsure (1)..(381): unsure at all n locations
ggcaagagtttgttgtgagctataagctagtttatcgtgaggagaatatgaagttgtttgttttctttgttgctgcagtagttttggtagcatggccatgccatggcgcaggctaccaaaggttccctctccgaatgaaaactggctatggtgagcgttcttcggaggtaaaatgcgcaagttttatgcttgctgtggaagcacacaacatccgagcctttaaaaccattcctgaatagtgcgttgaaccaacaaaggactacattaatggcgaacattttagattagactctaaaacagttaaccaacaagctttcttttatgctagtgaacgcgaagtccatcacancgacatatttatattcggcatagataacaccg

SEQ ID NO: 237730 - DNA, 383 bp, Glycine max
gctagtttagtgttagtgttcttccacccccgtaccgtctctgcctctctgcaatccacagccgaaaatgcctttcaagaggtacgttgagatcgggagggttgctcaaatcaactacggcaaggaatatggcaggctcgtcgtcatcgtcgacgtcattgaccagaacagagcacttgtcgatgcccctgatatggtgaggtcccaagtcaatttcaaaaggctttcccttaccgacatcaagattgacatcaagagggtccctaagaagaaagatcttgtcaaagccatggaggatgctgatgttaagaacaagtgggagaagagttcatggggtagaaaactcattgttaaaaagagaaaggcatccctcacatgatttg

SEQ ID NO: 237731 - DNA, 343 bp, Glycine max
ggtagcaccttcgtaggacccttatctctctctctctctatctctcccgaattattgttcgttcgacccttttacttagtattccctgtttccggtattcgctcccttttttctgcattctggttttacgtacatctctgtcccgcaccagatctggtgcagggtgagagggttgggttcattaattttgtatcaatcttccttctgagcggtaggcgtggggataccagagtcttttcgggaagcaagagagggttctctccgttttcaatagatctctcactgtcttcttttgagggggaagccggtgcctcggcctcggcggctttcaaagcccccatct

SEQ ID NO: 237732 - DNA, 359 bp, Glycine max
ggcacaagtgagtttgttgatcgagataactagaaacagtgtgatgaaaatgaaggtccttgttttcttcgttgctacaattttggtagcatggcaatgccatgcgtacgatatgttccctctccgaatgaacactggctatggtgcccgtactccggaggtgaaatgcgcaagttggaggcttgctgtggaagcacacaacatctttggctttgagaccattcctgaagagtgcgttgaagcaacaaaggaatacatccatggcgaacaatatagatcagactccaaaacagttaaccaacaagcttacttttatgccagagacctcgaagtccatcccaaggacacatttgtgttca

SEQ ID NO: 237733 - DNA, 378 bp, Glycine max
gggtgggcgaggtagccagagagtgatacaatacagagtgcgttgttgctccttcgccacaactccctgccaacatgggtatctccagagattctatgcacaagaggcgtgccactggtggcaagaagaaggcatggaggaagaagagaaagtatgagcttggtcgccagcctgctaacactaagctgtcaagcaacaagacagtcaggaggatccgggttagaggtggaaatgtgaagtggagggcactgagattggatactggaaattactcctggggaagtgaagctgtaactcgcaagactcgtatactagatgtggtttacaatgcctcaaacaacgagcttgtgcgtactcagactcttgtaaaaagtgcta

SEQ ID NO: 237734 - DNA, 370 bp, Glycine max
aaagagacccggaaagggtgggaaccgcttttggaaatccattgggcttggatttaagactcccagggaagccatcgaaggaacctacattgacaagaagtgccccttcactggcaatgtttccatccgtggccgtatcttggctggaacatgtcacagtgctaagatgaacaggactattattgttaggaggaattatctccattttatcaagaagtaccagaggtacgagaaaaggcactccaacattcctgctcatatatcacctgctttccgtgtgaaggaaggagatcacgttattattggtcaatgcaggccactttctaagactgtgaggttcaatgtgttgaaagtgatcccagctggatct

SEQ ID NO: 237735 - DNA, 349 bp, Glycine max
ggcacaagtgagtttgttgatcgagataactagagacagtgtgatgaaaatgaaggtccttgttttcttcgttgctacaattttggtagcatggcaatgccatgcgtacgatatgttccctctccgaatgaacactggctatggtgcccgtactccggaggtgaaatgcgcaagttggaggcttgctgtggaagcacacaacatctttggctttgagaccattcctgaagagtgcctttaagcaacaaaggaatacatccatggcgaacaatatagatcagactccaaaacagttaaccaacaagcttacttttatgccagagacctcgaagtccatcccaaggacaca

SEQ ID NO: 237736 - DNA, 386 bp, Glycine max
gggcagcagaagaacaagtagttgagaactaagaaggagaagcaaatggcttcctcaatgatctcttccccagctgttaccactgtcaaccgtgccggtgccggcatggttgctccattcactggcctcaagtccatggctggcttccccaccaggaagaccaacaatgacattacctccattgctagcaacggtggaagagtgcaatgcatgcaggtgtggccaccagttggcaagaagaagtttgagactctttcctacctgccagaccttgatgatgcacaattggcaaaggaagtagaataccttcttaagaagggatggattccttgcttggaattccaagttggagcacggtttcgtgtaccgtgagcacaacaggtcac

SEQ ID NO: 237737 - DNA, 416 bp, Glycine max
acgggaggttcattgtatctgagtgtcaggtgtgtgagtgagtgaactcaattcaactcaacattcttcaatcaaatcagccatggcagcagaacccacccgccccgtaaaaatcatcgccgccgccgatgacttcggcactcctctcaaagacgccctcgtcgctcacttgcgcactctcaacatccaagtcgaagatctcggaacctcttcctactactccgccggagccgaggtcggtcgccgagtctcccaatcctcctcctccgacatccgtggcctcgtcgcctgcggcaccggcgccggcgtctccatcttcgccaacaaatatcccggcgtctacgccgccacgtgcctctccccctccgacgccgtcaacgcccgctcaatcaacaactcgaacgtcctcgccgtct

SEQ ID NO: 237738 - DNA, 384 bp, Glycine max
ggcacaagtttgttgagatagctagaagcaataagatgaaaatgaaagtgcttgttttgtttgttgctacagttttggtagcatatgaatgccatggctcagactaccagaagttccctctccaaatgaaaactgggtttggtgggcaatacagcaatgaggtggcatgtgccagttggaggcttggcgtggaagcaaacaacgtagtcaagtggcaaactgttcctgcagcttgcggagagtacatagctgactacgttctaggagaccaatatagatcagattccaaaacagttaaccaacaagcttatttctatgctaaatccctcaaactcagcaacagagatgtctttgtcttggacgttgacgacactactctctcta

SEQ ID NO: 237739 - DNA, 381 bp, Glycine max
ataatattattcaaaatttaaagggaaatatttatgtatgtataaataaatatatagttctcattactcttattagcacaacaatacatgttgaagccaaaagtgagaaaaaataatagtaactaataaggagtgcgtggaatgtgtgggagtaaattgttttgttagaggtttaagattttgacaaaagttatataagtaatattttaatatatcatttatctttcatattaattagattttcttttatttgtatttcttttttattttcttaaaacaaattgagatatatataaaatttcaataaacaataaacggaaaaaaatgcaaaaacaattttttgtgtgtctataatgaaaatatcaatgttagaacttaaga

SEQ ID NO: 237740 - DNA, 296 bp, Glycine max
agggaaagtgcaggaggtagatgagagcaatcatcgaattaaacgtgaggagaatatgaagttgtctgttctcattgttgccgcatcacttatggtaccaaggtcatgtcatcgttcatgctatcattcgcttcctcgctgatcgataatcggctatggtgatcgtacatcggatgtcaaatgagatcgtttaaggcttgatgtaggttcacacaacatgcgagcatttataatgattcctgaacagtacgtagactgatcagcagactacattattggcgaacattttagatcag

SEQ ID NO: 237741 - DNA, 376 bp, Glycine max
  unsure (1)..(376): unsure at all n locations
gattatatttgagttcaaacaaatcaaagccatggccacctccaacttctctattgttctctccgtctccctagccttctttttggtgctacttaccaaggcacactcgaccgataccgtttctttcaccttcaacaagttcaacccagtccaaccaaacattatgctccaaaaagatgctagtatttcatcctctggggtgttacaactcaccaaagttggcagcaacggcgtgcccacctcgggatctctcggtcgtgccctttacgctgccccaatccagatttgggacagcgaaaccggcaatgtagccagctgggctacatcctttaaattcaacatttttcgcaccaacanatcanactcaagctgacgg

SEQ ID NO: 237742 - DNA, 392 bp, Glycine max
  unsure (1)..(392): unsure at all n locations
gacagcatatatatcaataatctattttatactatacctacattttgataattttctttgtagttgatagccatggctacccgtggaaagcttgaggttgacattgatctcaagtccaacgcagacaagtactggcaaacccttaggaattctactgaaatattccctaaggccttcccacatgattacaaaagcattgaggttcttgagggtgatggcaagtctcctggttctatccgccacataagttatggtgaaggttcaccacttgtgaaatcatcctttgagaagattgaggctgttgatgaggaaaagaaggtagtgtcgtacactatcattgatggggaactcctcnagcactacaanacattcaaaggagacatttcagtgac

SEQ ID NO: 237743 - DNA, 387 bp, Glycine max
gctagtggcagtgaccaaactccatttctcactcgccgtcgtctcttccgtctagggtttctcctcttcacaaaaatggttgccgcaaaaaaaactaagaagacccatgagagcatcaacaacaggctcgctctcgtcatgaagagtggcaaattcaccctcggttacaagaccgttctcaaatctcttaggagctccaaagggaaattgattatcattgctaacaactgcccccctttgaggaagtcagagattgaatactatgctatgttggcaaaggttggggttcatcattacaatgggaacaatgtggatttgggcactgcatgtggcacatattacagagtgtgctgccttaacattattgatcctggtgattcggatatc

SEQ ID NO: 237744 - DNA, 341 bp, Glycine max; identical to SEQ ID NO: 237725

SEQ ID NO: 237745 - DNA, 359 bp, Glycine max
  unsure (1)..(359): unsure at all n locations
gggtgcaagagtttgttgtgagctataagctagtttatcgtgaggagaatatgaagttgtttgttttctttgttgctgcagtagttttggtagcatggccatgccatggcgcaggctaccaaaggttccctctccgaatgaaaactggctatggtgagcgttcttcggaggtaaaatgcgcaagttttaggcttgctgtggaagcacacaacatccgagcctttaaaaccattcctgaagagtgcgttgaaccaacanaggactacattaatggcgaacaatttagatcagactctaaaacagttaaccaacaagctttcttttatgctagtgaacgcgaagtccatcacaacgacata

SEQ ID NO: 237746 - DNA, 313 bp, Glycine max
ggggagcaagagtgaagagcgaagagaatggctcccaagggtttaatctttttggctgtgttatgcttctcagcactgtcactgagtcgttgtcttgcggaggataatggacttgttatgaacttctacaaggaatcatgccctcaggctgaagacatcatcaaagaacaagtcaagcttctctacaagcgccacaagaacactgctttctcctggctcagaaacatcttccatgactgtgctgttcagagttgtgatgcttcactgttgctggactccacaagaaggagcttgtctgagaaggaaacagata

SEQ ID NO: 237747 - DNA, 367 bp, Glycine max
ggcagttcaattccaatatattccattctctctgtgtatttccctacctctcccttcaagatgcagatcttcgtcaagaccctcaccggcaagaccatcacccttgaggtggaaagctctgacaccatcgacaacgtcaaggccaagatccaggacaaggaaggaatccccccggaccagcaacgtctcattttcgccggaaagcaacttgaggacggccgtacccttgctgactacaacattcagaaggagagtactcttcacctcgtcctccgtctccgtggtggcatgcagatcttcgttaagacactcaccggcaagaccataaccctagaggttgaaagctccgacaacatcgataacgtca

SEQ ID NO: 237748 - DNA, 388 bp, Glycine max
ggcacaagtgagtttgttgatcgagataactagaaacagtgtgatgaaaatgaaggtccttgttttcttcgttgctacaattttggtagcatggcaatgccatgcgtacgatatgttccctctccgaatgaacactggctatggtgcccgtactccggaggtgaaatgcgcaagttggaggcttgctgtggaagcacacaacatctttggctttgagaccattcctgaagagtgcgttgaagcaacaaaggaatacatccatggcgaacaatatagatcagactccaaaacagttaaccaacaagcttacttttatgccagagacctcgaagtccatcccaagggaaacatttgtgttcagtatagatggcaccgtactctctaatat

SEQ ID NO: 237749 - DNA, 376 bp, Glycine max
  unsure (1)..(376): unsure at all n locations
gagcccaaaatattttcatagcattttcagaggaaaatggcgggtacggtttcgacttgtttcttcttcgtgtttcttctttctctccttcttccttttcagatctccgctgaggaatcctcggagaaagagttcgttctcacaatggatcaaccctaacttcaacaaaacgtcaacaagcaagaatttcacctcctccaatttcaagccccaaggtgttgtcactgttagaagcttgctccggagtattagaaagctgcttctatcttgagtaatcatgattctcctattgttttggctaaagtagatgccaatgaggagaagaacaaagaccctgcatcacaatatgatgttaagggattcccancaattaata

SEQ ID NO: 237750 - DNA, 383 bp, Glycine max
gaaggtgcaagagtttgttgtgagctataagctagtttatcgtgaggagaatatgaagttgtttgttttctttgttgctgcagtagttttggtagcatggccatgccatggcgcaggctaccaaaggttccctctccgaatgaaaactggctatggtgagcgtccttcggaggtaaaatgcgcaagttttaggcttgctgtggaagcacacaacatccgagcctttaaaaccattcctgaagagtgcgttgaaccaacaaaggactacattaatggcgaacaatttagattagactctaaaacagttaaccaacaagctttcttttatgctagtgaacgcgaagtccatcacaacgacatatttatattcggcatagataaca

SEQ ID NO: 237751 - DNA, 403 bp, Glycine max
ggagtttgttgatcgagataactagaaacagtgtgatgaaaatgaaggtccttgttttcttcgttgctacaattttggtagcatggcaatgccatgcgtacgatatgttccctctccgaatgaacactggctatggtgcccgtactccggaggtgaaatgcgcaagttggaggcttgctgtggaagcacacaacatctttggctttgagaccattcctgaagagtgcgttgaagcaacaaaggaatacatccatggcgaacaatatagatcagactccaaaacagttaaccaacaagcttacttttatgccagagacctcgaagtccatcccaaggacacatttgtgttcagtatagatggcaccgtactctctaatatttcatactacaaaaaacatggata

SEQ ID NO: 237752 - DNA, 396 bp, Glycine max; identical to SEQ ID NO: 234896

SEQ ID NO: 237753 - DNA, 419 bp, Glycine max
  unsure (1)..(419): unsure at all n locations
aggtcaaaaaggacaaattgggatcactaatccaacacactactttttgccaaaatctcaaagtgctgcagattacaaggcagcaagtagagctctggacttcttctttggttggtattctgatccggttttctatggtgactatccggagagtatgaaatcttcagtaggttctaggctcccaaaattcacaaaagctgaatctgaaggtctaaaaaattccatagattttcttggtgtgaattactacaccacttattatgcggaacatgctgaacctgtcagtgccaaccgaaccttctacacagacatactagccagtctcagtacggaaaggaatggtctacatgttggaaccccgactgatttgaattggctctttatctttccaaagggaattcatcttcntatggcacaca

SEQ ID NO: 237754 - DNA, 370 bp, Glycine max
gggttgaaaagcatgatgtaatggaggcatttcggcttttggaagttgcaatgcagcagtctgcaacggatcattctactggaactattgacatggatcttattactactggagtttcggcaagtgaaagaatgaggcgagaaagtctgcaacaagcaactcgtaacataatcatggagaaaatgcagattgggggaccatctatgcgcttattggagttattggaagaattgaagaaacaggatactggtagcgaagttcatcttaatgatctaaggaatgcaattgctactctggctacagaaggatttgttaccatgcacggtgacattgtaaaaagatcttgatggcacgagacagtagtgacatc

SEQ ID NO: 237755 - DNA, 215 bp, Glycine max
  unsure (1)..(215): unsure at all n locations
gacagctattcctcttaaccttgctactgattttccacactgcataccttaggtcttccgaattcgaagttaatttgcaagatggctaaggaaaaggctcagatcaacattgtggtggttggtcatgtggaccctgangaggcaaccaccattaacgagctgaagaagcctggtgttgaagaaagaagctccagggcatgccatatgagggcatg

SEQ ID NO: 237756 - DNA, 389 bp, Glycine max
  unsure (1)..(389): unsure at all n locations
ggttcatgttagcataggaggttgagtagttcttcatcatagtcttaaacattaaaccttagcaaaactcaacaatgctagacatcaaaggctacctcgtactcttcttcctatggttcatatcaaccattctgatacgttccatcttcaagaaaccacagcgtctaagactcccaccgggtcctccaatttcaatacccttgctgggacacgcgccatatctccgttcactgctccaccaagcattgtacaagctatcactgcgctatggacccttgatccacgtcatgatcggttcgaagcacgtggtggtggcgtcgtcggcggagacggccangcagattctcaaaaacttnggaggaggcattctgcaaccgtcccttaatgat

SEQ ID NO: 237757 - DNA, 386 bp, Glycine max
gaaggtgcaaaagtttgttgtgagctataacctactttatcgtgaggagaatatgaagttgtttgttttctttgttgctgcagtagttttggtaccatggccatgccatggcgcatgctaccaaaggttccctctccgaatgaaaactggctatggtgagcgttcttcggacgtaaaatgcgcaagttttatgcttgctgtggaagcacacaacatccgagcctttataaccattcctgaagagtgcgttgaaccaacacaggactacattaatggcgatcaatttagattagactctaaaacagttaaccaacaagctttcttttatgctagtgaacgcgatgtccatcacaacgacatatttatattcagcatatataacaccg

SEQ ID NO: 237758 - DNA, 396 bp, Glycine max
gactcaccacttcaaaacactcataacacaaagcacaaagcaaagctcatccttgagttaaaaaatggcagcagcttcttccatggctctctcatccccatccttggctggcaaggccgtgaagctgggcccatcagccccagaagtgggaagggtgagcatgatgaagaccgtcaccaagcaggtctcctcaggaagcccatggtacggtccagaccgagtcaagtacttgggcccattctctggcgagcccccgtcctacctaaccggtgagttcccaggcgactacggctgggacactgctgggctttccgcagacccagaaacctttcgcaaagaaccgtgaactcgaagtgatccactccaggtgggccatgctcggagccttgggctgcg

SEQ ID NO: 237759 - DNA, 390 bp, Glycine max
gagggcgaggaagccacatagagacacaatacagagtgagttgttgctccttcgccacaactctctgccaacatgggtatctccagagattctatgcacaagaggcgtgccactggtggcaagaagaaggcctggaggaaaaagagaaagtatgagcttggtcgccagcctgctaacactaagctgtcaagcaacaagacagtcaggaggatccgtgttagaggtggaaatgtgaaatggagggcattgagattggatactggaaattactcctggggaagtgaagctgtaactcgcaagactcgtgtactagatgtggtttacaatgcctcaaacaatgagcttgtgcgtactcagactcttgtcaaaagtgctatcgttcaggttgat

SEQ ID NO: 237760 - DNA, 388 bp, Glycine max
  unsure (1)..(388): unsure at all n locations
ggcagttcaattccaatatattccattctctctgtgtatttccctacctctcccttcaagatgcagatcttcgtcaagaccctcaccggcaagaccatcacccttgaggtggaaagctctgacaccatcgacaacgtcaaggccaagatccaggacaaggaaggaatccccccggaccagcaacgtctcattttcgccggaaagcaacttgaggacggccgtacccttgctgactacaacattcagaaggagagtactcttcacctcgtcctccgtctccgtggtggcatgcagatcttcgttaagacactcaccggcaagaccatanacctagaggttgaaagctccgacacaatcgataacgtcaaagccaagatccaggacaagg

SEQ ID NO: 237761 - DNA, 384 bp, Glycine max
  unsure (1)..(384): unsure at all n locations
agtcattgacttctccaacatgtcaagcgacgccgtttgggtcctcttccacctcgccttcttctcccaatgccttccctccgcctgggcccactcggcgatcctcctcccgggtcaactcgcccgtgactcaccgcagagctgccccgcccctgaccccaacctctactacaagccagtcatcggaatcgtcagccatcccggcgactgcgcctccggccgcctcagcaacgccaccggcgcctcctacatcgccgcctcctatgtcaaattcgttgaggccgccggcgcccgtgtcgttcccctcatctataccgagcctccggagaagcttctcangaagctcgaattggtaaatggggttctcttcactggtggatgggc

SEQ ID NO: 237762 - DNA, 354 bp, Glycine max
gactcaagcacaacatctctatcgagtaaattaactatgaagcctaccctactattatccctttccttcctgcctctctttgctttcctggctctttcagaagatgttgaacaagttgtggacataagtggcaaccccattttcccaggtggcacatattacattatgccatcaacttggggcgctgccggtggtggattgaaactaggccggacaggaaactcaaactgcccagttactgttttgcaagattactcagaaatcttccgtggcacaccagtcaaattcagcatacctgggataagccctggaatcatctttacaggtactccacttgaaatcgagttcgcagag

SEQ ID NO: 237763 - DNA, 362 bp, Glycine max
ggagtagcgatggagaagaagaagggtgagctaaagtcaattttccttcctttcctttccactagtcacataatcccgctagtggacatggccagactcttcgccttgcacgacgtcgacgtcaccatcatcaccaccgcacataacgccaccgttttccaaaagtccatcgatttagatgcgagtcgcggtcgccccatcagaacgcacgttgtcaacttctccgccgcacaagtgggtctccccgttgggatcgaagccttcaacgtcgatacgcctcgggaaatgacccccagaatctacatgggcctatcccttctccaacaagtcttcgaaaaactcttccatgacttgcaaccgga

SEQ ID NO: 237764 - DNA, 393 bp, Glycine max
  unsure (1)..(393): unsure at all n locations
cttctcatacccttttattcattccattcgtttctagggttttcttttctttgccgagaaaatgagagagtgcatttcgatccacattggccaggccggtatccaggttggaaacgcctgctgggaactctattgccttgaacacggcattcagcccgatggacagatgccgagtgacaagaccgttggcggaggagacgacgccttcaacacatttttcagcgagaccggcgccggaaagcacgtgccccgcgccgtcttcgtggatcttgaacccaccgtgatcgacgaagtccgaaccggtgcgtaccggcagctcttccacccggagcagctgatcagccgcaaggaagacgccgccaacaacttcgcgcgttggcactacnacatcgg

SEQ ID NO: 237765 - DNA, 350 bp, Glycine max
gacacaccgtttgttctattcttaactcaacttctgctacccactctcttcttccaagtccaaccacgcttttctctacagtcatgggcaaggtcaagatcggaatcaacggatttggaagaattggccgtttggttgccagagtcgctctgcaaagagacgatgtggagctcgttgccgttaacgaccctttcattaccaccgattacatgacatacatgtttaaatacgacagtgttcacggacactggaagcatcacgatgtcaccgttaaggacgagaagacccttctcttcggtgacaagccagtcactgtttttggacacaggaaccctgaagagatccatggg

SEQ ID NO: 237766 - DNA, 396 bp, Glycine max
  unsure (1)..(396): unsure at all n locations
gcacaagtttgttgagatagctagaagcaataagatgaaaatgaaagtgcttgttttgtttgttgctacagttttggtagcatatgaatgccatggctcagactaccagaagttccctctccaaatgaaaactgggtttggtgggcaatacagcaatgaggtggcatgtgccagttggaggcttggcgtggaagcaaacaacgtagtcaagtggcaaactgttcctgcagcttgcggagagtacatagctgactacgttctaggagaccaatatagatcagattccaaaacagttaaccaacaagcttatttctatgctaaatccctcaaactctacaacanagatgtctttgtcctggacgttgacgacactactctctctaatctccagtattt

SEQ ID NO: 237767 - DNA, 387 bp, Glycine max
gaaggtgcaagagtttgttgtgagctataagctagtttatcgtgaggagaatatgaagttgtttgttttctttgttgctgcagtagttttggtagcatggccatgccatggcgcaggctaccaaaggttccctctccgaatgaaaactggctatggtgagcgttcttcggaggtaaaatgcgcaagttttaggcttgctgtggaagcacacaacatccgagcctttaaaaccattcctgaagagtgcgttgaaccaacaaaggactacattaatggcgaacaatttagatcagactctaaaacagttaaccaacaagctttcttttatgctagtgaacgcgaagtccatcacaccgacatatttatattcggcatagataacaccgt

SEQ ID NO: 237768 - DNA, 395 bp, Glycine max
ggcacaagtgagtttgttgatcgagataactagaaacagtgtgatgaaaatgaaggtccttgttttcttcgttgctacaattttggtagcatggcaatgccatgcgtacgatatgttccctctccgaatgaacactggctatggtgcccgtactccggaggtgaaatgcgcaagttggaggcttgctgtggaagcacacaacatctttggctttgagaccattcctgaagagtgcgttgaagcaacaaaggaatacatccatggcgaacaatatagatcagactccaaaacagttaaccaacaagcttacttttatgccagagacctcgaagtccatcccaaagacacatttgggttcagtataaatggcaccgtactctctaatattccatact

SEQ ID NO: 237769 - DNA, 385 bp, Glycine max
gatccaaattcaagttcgcaccaaattttcctcccaaaatgtcaggccgtggaaaaggtgggaagggtttgggaaagggaggagctaagaggcacagaaaggttcttcgtgacaacattcaaggaatcacgaaacctgcgattcgtaggttagcgagaagaggtggcgtgaagaggatcagtggtttgatttacgaggaaaccagaggagttctgaagatattcttggagaacgtgattcgcgatgctgtaacctacactgagcacgctaggaggaaaactgttactgctatggatgtcgtttatgctctcaagagacagggaaagaccctctatgggctttggaggctaaagaatagaatctttaggtttaatgactgtgttgc

SEQ ID NO: 237770 - DNA, 351 bp, Glycine max
gatagggtttttgtcgttgcgactaagagttgctgcttcttccgccactcagcacttcgctccctctgtgcttcaccaaccatggccgaaatcgaagctaccgttccagatccctctcaaatcgacgtcaaacttttcaaccgctggagcttcgacgacgttgaggttactgatatgtctctggctgattacattggagtgtccccgtcaaagcatgctacatatgttcctcacactgctggtaggtactcagtgaagaggttcaggaaggcgcagtgccccattgttgagagactcaccaactctctcatgatgcacggaaggaacaatggaaagaagctcatggctgtc

SEQ ID NO: 237771 - DNA, 319 bp, Glycine max
gactcaccacttcaaaacactcataacacaaagcacagagcatagctcatccttgagttaaaaaaatggtagcagcttcttccatggctctctcatccccatccttggctggcaaggccgtgaagctggggccatcagccccagaagtgggaagggtgagcatgaagaagatcgtcaccaagcaggtctcctcaggaagcccatggtacggcccagaccgagtcaagtacttgggcccattctctggcgagcccacgtcctacctaaccggtgagttcccaggcgactacagctgggacactgctgggctttccgcaga

SEQ ID NO: 237772 - DNA, 396 bp, Glycine max
  unsure (1)..(396): unsure at all n locations
ggcacaagtgagtttgttgatcgagataactagaaacagtgtgatgaaaatgaaggtccttgttttcttcgttgctacaattttggtagcatggcaatgccatgcgtacgatatgttccctctccgaatgaacactggctatggtgcccgtactccggaggtgaaatgcgcaagttggaggcttgctgtggaagcacacaacatctttggctttgagaccattcctgaagagtgcgttgaagcaacaaaggaatacatccatgacgaacaatatagatcagactccanaacagttaaccaacaagcttacttttatgccagagacctcgaagtcaatcncaaggacacatttgtgttcagtatagatggcaacgtactctctaataatcatactac

SEQ ID NO: 237773 - DNA, 343 bp, Glycine max
gagggaaggggatcgcatttcatagcactcaccctcattaccaacacgaaagcataggcaaaaccttttttcgaagtctctgattttcctaatggctccggcaaaggcagagaagaagccggcggagaagaagccagcggcggagaaggcaccggcggagaagaagccgaaggcggagaagaagatctcgaaggaaggagggagcgagaagaagaagaagcgcacgaagaagagcgtggagacctacaagatctacatcttcaaggtcctcaagcaggttcatcccgacattggtatttccagcaaggccatgggcatcatgaacagcttcatcaacgacatc

SEQ ID NO: 237774 - DNA, 392 bp, Glycine max
gcacaactgagtttgatgatcgagatatctatgagcagtgtgatgaaaatgaaagtccttggattcttcgtgtgctacaactttggtagcattgcaatgccatgcgtacgatatgttccctctccgaatgaacactggctatggatcccgtactccggacgtgaaatgcgcatgttggacgcatgctgtgggatcacacaacatctttggctttgagatcattcttgaacagttcgttgaagctgcattggaatacatccatggcgaacactatagatcagactccaatacagttcaccaacaggcttacttttatgccacatacctcgaagtcgatcccaaggacacatttgtgttcagtatatatggcaccgtactcgctaatattccat

SEQ ID NO: 237775 - DNA, 402 bp, Glycine max
  unsure (1)..(402): unsure at all n locations
agggggcaaaaaagaaaaatattaaataaaaacggcacaaatttccccaaaattaagggcaatttcaatccccaagccctgaacgttcgcgtggaagggtccggggaaaagtaacttgtcctggcccacggcttcggcacggaacaatccgcgtgggagcgcgtgctcccttacttcaaccgcaactacagcgtcattctctacgacctcgtctgcgccggcagcgtcaaccccgaccacttcgactaccgccgttataccaccctcgacgcctacgtcgacgacctcctcaacatcctcgacgccctccgcgtcncccgctgcgcctacgtcggccactccatctccgccatgatcggcatgctcgcctccatccgccgcccggacctcttctccaaactc

SEQ ID NO: 237776 - DNA, 401 bp, Glycine max
ggcgcacccagagaggaagcttagagagagagagagagagagagagagagaggagagagtattggcgcttcatcaagatgggtatttctagggattccatgcacaagaggcgtgccactggtggcaagaaaaaggcttggagaaagaagagaaagtatgagcttgggcgtcaggcagcaaacaccaagttatcaagcaacaagacaatcaggaggattcgtgttagaggtggcaatgttaaatggagggcattgaagctggatactggcaattactcatggggtagtgaagcagttactcgcaagactcgtattctagatgttgtttacaatgcctcaaacaacgagcttgtgcgaactcagaccctggtcaagagtgctattgtccaggttgatgctgct

SEQ ID NO: 237777 - DNA, 394 bp, Glycine max
ggcacaagtgagtttgttgatcgagataactagaaacagtgtgatgaaaacgaaggtccttgttttcttcgttgctacaattttggtagcatggcaatgccatgcgtacgatatgttccctctccgaatgaacactggctatggtgcccgtactccggaggtgaaatgcgcaagttggaggcttgctgtggaagcacacaacatctttggctttgagaccattcctgaagagtgcgttgaagcaacaaaggaatacatccatggcgaacaatatagatcagactccaaaacagttaaccaacaagcttacttttatgccagagacctcgaagtccatcccaaggacacatttgtgttcagtatagattgcaccgtactctccaatattccatac

SEQ ID NO: 237778 - DNA, 394 bp, Glycine max
gaaggtgcaagagtttgttgtgagctataagctagtttatcgtgaggagaatatgaagttgtttgttttctttgttgctgcagtagttttggtagcatggccatgccatggcgcaggctaccaaaggttccctctccgaatgaaaactggctatggtgagcgttcttcggaggtaaaatgcgcaagttttaggcttgctgtggaagcacacaacatccgagcctttaaaaccattcctgaagagtgcgttgaaccaacaaaggactacattaatggcgaacaatttagatcagactctaaaacagttaaccaacaagctttcttttatgctagtgaacgcgaagtccatcacaacgacatatttatattcggcatagataacaccgtactctct

SEQ ID NO: 237779 - DNA, 400 bp, Glycine max
gagtagcagagaaaagaatagggttttgctatggagaagctagaagcagagaacgttctggtccttccctctgagcaacccaacaacaataggccaaagccaaaaccaaagcgtttcgtgaaaaaccaaatcccagactcaatccttaacaaccctcttctgagcgccgcaatctctgtgctcccttccaactacaacttcgaggtccacaagtgcgtctggcgcgtgctctccacgggagcaaaacgcgtggctctccagttcccggagggtctcctcatgtactctctcccactctccgacatcttcaccaccttcgccggcgtcacccactgcttcgtcctcgccgacgtcacctacggcgcttgctgcgtcgacgaccttgctgcctccgccctcg

SEQ ID NO: 237780 - DNA, 368 bp, Glycine max; identical to SEQ ID NO: 235349

SEQ ID NO: 237781 - DNA, 322 bp, Glycine max
  unsure (1)..(322): unsure at all n locations
ggcacaagtgagtttgttgatcgagataactagaaacagtgtgatgaaaatgaaggtccttgttttcttcgttgctacaattttggtagcatggcaatgccatgcgtacgatatgttccctctccgaatgaacactggctatggtgcccgtactccggaggtgaaatgcgcaagttggaggcttgctgtggaagcacacaacatctttggctttgagaccattcctgaagagtgcgttgaagcaacaaaggaatacatccatggcgaacaatatagatcagactccaatacagttanacaacaagcttacttttatggcaga

SEQ ID NO: 237782 - DNA, 471 bp, Glycine max
  unsure (1)..(471): unsure at all n locations
tttggcagctttanaggcctagnnnnnnnaaggcnnnnnnggcgtccgatcatttgaatacaaatcagctgagagagagaagctggagaaggagggatacagaatcattggaaacgttggagaccaatggagtgacctcctgggaagcaacaaagggactaggacttttaagctgcctaatcccttgtactatgattaagctctcaaatcaagcctctaagttgctccttaatttctatgaaataagatcctgagtattattacttagtcatgtatgggcactgaacaatgttgttttcccttttcgaggctttcatgaattatgagctcttgttccaaaaaaaacaatggaaaaaaatataaataagcggccgctctagaggatccaagcttacgtacgcgtgcatgcgacgtcatagctcttctatagtgtcacctaaattcaattcactggccgtcgttttacaacgg

SEQ ID NO: 237783 - DNA, 368 bp, Glycine max
aaaacgacagaagggaaaaaaacccggaaagggtgggaaccgcttttggaaatcaattgggcttggatttaagactcccagggaagccatcgaaggaacctacattgacaagaagtgcccttcactggcaatgtttccatccgtggccgtatcttggctggaacatgtcacagtgctaagatgaacaagactattattgttaagaggaattatctccattttatcaagaagtaccagaggtacgagaaaaggcactccaacattcctgctcatatatcacctgctttccgtgtgaaggaaggagatcacgttattattggtcaatgcaagccaattttctaagactgtgaaggtcaatgtgttgaaag

SEQ ID NO: 237784 - DNA, 396 bp, Glycine max
  unsure (1)..(396): unsure at all n locations
gaaagggcaagaatttggtgtgagctaaaaaccaatttaacctgaagggaataagaagttggttggtttccttggtgccggaataattttgggaacaagggcaagccaaggggcaaggtaacaaaaggtccctccccgaatgaaaactgggtatggggagccttcttcggaagtaaaatgcccaagtttttaagcttgctgtggaagcacacaacatccgagccctttaaaaccattcctgaagagtgcgttgaaccaacanaggactacattaatggcgaacaatttagatcagactctaaaacagttaaccaacaagctttcttttatgctagtgaacgcgaagtccatcacaacgacatatttatattcggcatagataacaccgtactctct

SEQ ID NO: 237785 - DNA, 410 bp, Glycine max
cgatacaaggggacagtgcaagagtttgttgtgagctataatctagtttatcgtgaggagaatatgaagttgtttgttttctttgttgctgcagtagttttggtatcatggtcatgccatggcgcatgctaccaaaggttccctctccgcatgacaactggctatggtgagcgttcttcggatgtaacatgcgcatgttttacgcgtgctgtggaaccacacaacatccgagcctttagaaccattcctgaaaagtgcgttgaaccaccaacggactaaattcatggtgaacaatttagatcagactctacaacagttaagcaacaagctttcttttatgctagtgaacgcgaagtccatcacaacgacatatttatattctgcatagataacaccgtactctctaatat

SEQ ID NO: 237786 - DNA, 398 bp, Glycine max
  unsure (1)..(398): unsure at all n locations
gaaagtgcaagagtttgttgtgagctataagctagtttatcgtgaggagaatatgaagttgtttggtttctttggtgctgcaataattttggtaacatggccatgccatggcgcaagctaccaaaggttccctctccgaatgaaaactggctatggtgagcgttcttcggagggaaaatgcgcaagttttaagcttgctgtggaagcacacaacatccgagcctttaaaaccattcctgaagagtgcgttgaaccaacanaggactacattaatggcgaacaatttagatcagactctaaaacagttaaccaacaagctttcttttatgctagtgaacgcgaagtccatcacaacgacatatttatattcggcatagataacaccgtactctctaata

SEQ ID NO: 237787 - DNA, 393 bp, Glycine max
  unsure (1)..(393): unsure at all n locations
gaacgtgcaagagtttgttgtgagctataagctagtttatcgtgaggagaatatgaagttgtttgttttctttgttgctgcagtagttttggtagcatggccatgccatggcgcatgctaccaaaggttccctctccgaatgaaaactggctatggtgagcgttcttcggaggtaaaatgcgcaagttttaggcttgctgtggaagcacacaacatccgagcctttaaaaccattcctgaagagtgcgttgaaccaacanaggactacattaatggcgaacaattagatcagactctaaaacagttaaccaacaagctttcttttatgctagtgaacgcgaagtccatcacaacgacatatttatattcggcatagataacaccgtactctct

SEQ ID NO: 237788 - DNA, 353 bp, Glycine max
ggtgcacaagtgagtttgttgatcgagataactagaaacagtgtgatgaaaatgaaggtccttgttttcttcgttgctacaattttggtagcatggcaatgccatgcgtacgatatgttccctctccgaatgaacactggctatggtgcccgtactccggaggtgaaatgcgcaagttggaggcttgctgtggaagcacacaacatctttggctttgagaccattcctgaagagtgcgttgaagcaacaaaggaatacatccatggcgaacaatatagattagactccaaaacagttaaccaacaagcttacttttatgccagagacctcgaagtccatcccaaagacacatt

SEQ ID NO: 237789 - DNA, 414 bp, Glycine max
tcgacccaggcgtcagcgggaagacgacagaagggggtagtggtaactcttgtcaatctttccactttgacattgccgacgcctccagataaacaaccttaactttcccacaacaccacccatcattctttttctctctctagatttcatttagttgttgctgtcttcttctgtttgtgtgtgccaacacagagcgaaaaacatggctctgaaccaatcaaaagccgtgttgttgagggtgagtttggtggtggtggcgctcttcatagcagggtacatagtgggtccccctctctactggcatttcgttgaaggtttggctgcggtcaaccactcttcttctacttgtgccccctgcatctgcgattgctcttcacaacccattctttctattccacaaggactgagcaacac

SEQ ID NO: 237790 - DNA, 367 bp, Glycine max
  unsure (1)..(367): unsure at all n locations
ggaggaagccacatagagacacaatacagagtgagttgttgctccttcgccacaactctctgccaacatgggtatctccagagattctatgcacaagaggcgtgccactggtggcaagaagaaggcctggtggaaaaagagaaagtatgagcttggtcgccagcctgctaacactaagctgtcaagcaacaagacagtcaggaggatccgtgttagaggtggaaatgtgaaatggagggcattgagattggatactggaaattactcctgnggaagtgaagctgtaactcgcaagactcgtgtactagatgtggtttacaatgcctcaaacaatgagcttgtgcgtactcagactcttgtcaaaagt

SEQ ID NO: 237791 - DNA, 368 bp, Glycine max
gacacaccgtttgttctattcttaactcaacttctgctacccactctcttcttccaagtccaaccacgcttttctctacagtcatgggcaaggtcaagatcggaatcaacggatttggaagaattggccgtttggttgccagagtcgctctgcaaagagacgatgtggagctcgttgccgttaacgaccctttcattaccaccgattacatgacatacatgtttaaatacgacagtgttcacggacactggaagcatcacgatgtcaccgttaaggacgagaagacccttctcttcggtgacaagccagtcactgtttttggacacaggaaccctgaagagatcccatgggggtcaactggagctgat

SEQ ID NO: 237792 - DNA, 372 bp, Glycine max
aggggcacaagttagtttggtgatccagataacaaaaaaatgtatgaaataaggcctgtttctcctgcaaaatttggacaagaatgcaagctaagaaagttcctccccaatgacacggctaggggccgtacccggaagtaaaatgccaattggaaggctgctgtggaagcacacaacatctttgggctttgaaacattcctgaagagtgcgttgaagcaacaaaggaatacatccatggcgaacaatatagatcagactccaaaacagttaaccaacaagcttacttttatgccagagacctcgaagtccatcccaaggacacattttgtgtcagtatagatggcaccgtactctctaatattccatactac

SEQ ID NO: 237793 - DNA, 357 bp, Glycine max
ggcacaagtgagtttgttgatcgagataactagaaacagtgtgatgaaaatgaacggccctgttttcttcgttgctacaattttggtagcatgggaatgccatgcgtacgatatgttccctctccgaatgaacactggctatggtgcccgtactccggaggtgaaatgcgcatgttggaggcttgctgtggaagcacacaacatctttggctttgagaccattcctgaagagtgcgttgaagcaacaaaggaatacatccatggcgaacaatatagatcagactcaaaacagttaaccaacaagcttacttttatgccagagacctcgaagttcatcccaaggacacatttgtgttc

SEQ ID NO: 237794 - DNA, 406 bp, Glycine max
aaaagggggacaagttagtttggtgattcagataactagaaacaatgtgatgaaaatgaaaggccttggtttcctcgttgctacaattttggtagcatggcaatgccatgcgtacgatatgttccctctccgaatgaacactggctatggtgcccgtactccggaagtgaaatgcgcaagttggaggcttgctgtggaagcacacaacatctttggctttgagaccattcctgaagagtgcgttgaagcaacaaaggaatacatccatggcgaacaatatagatcagactccaaaacagttaaccaacaagcttacttttatgccagagacctcgaagtccatcccagggacacatttgtgttcagtatagatggcacgtactctctaatattccatactacaaaa

SEQ ID NO: 237795 - DNA, 352 bp, Glycine max
ggcacacgtgagtttgttgatcgagataacgagaaacagtgtgatgaaaatgaaggtccttgttttcgtccttgctggaagtttggtagcatggcaatgcgatgcgtacgatgtgttccctctccgaatgaacactggctatggtgcccgtactccggaggtgaaatgcgcaagttggaggcctgctgtggaagcacacaacatcgttgggtttgaaaccattcctgaaaagtttcttgaaacatccgcatgaatacatccatggggaacaatatggatcacactctaggtcagtttaccaacaagcttacctttaagccagagaccgtcgaaatccatcccaagggcccat

SEQ ID NO: 237796 - DNA, 383 bp, Glycine max
gaataaaacctgctttctatttttctcaacctaaaatcccatccaccaaccttatgatgatgtcttcactctctgtttcgcgccacaaccacctcttctcgggccctctcccggcccggcccaagcccaagcccagcttttcctcttccaggatccgaatgtccctccaagaaaacggcccctccatcgccgtcgtgggcgtcaccggcgccgtcggccaggagttcctctccgtcctctccgaccgcgacttcccctacagctccatcaaaatgctcgcgtccaagcgctccgctgagcgccgcatcacctttgaggacagggactacgtcgtggaggagctgacggcggagagcttcgatggcgtcgacatcgcgctcttc

SEQ ID NO: 237797 - DNA, 382 bp, Glycine max
aaagagacctggaaaaggtgggaaccgcttttggaagtccattgggcttggatttaagactcccagggaagccatcgaaggaacctatattgacaagaagtgccccttcactggcaatgtttccatccgtggccgtatcttggctggaacatgtcacagtgctaagatgaacaggactattattgttagaaggaattatctccattttatcaagaagtaccagaggtacgagaagaggcactcaaatattcctgctcatatatcacctgccttccgtgtgaatgaacgcgatcacgttattaatggtcaatgcaggcctctctctaagacagtgacgctcaatgtcatgaaagtgatcccagctggatcttctagtggtgca

SEQ ID NO: 237798 - DNA, 386 bp, Glycine max
gaaggtgcaagagtttgttgtgagctataagctagtttatcgtgaggagaatatgaagttgtttgttttctttgttgctgcagtagttttggtagcatggccatgccatggcgcaggctaccaaaggttccctctccgaatgaaaactggctatggtgagcgttcttcggaggtaaaatgcgcaagttttaggcttgctgtggaagcacacaacatccgagcctttaaaaccattcctgaagagtgcgttgaaccaacaaaggactacattaatggcgaacaatttagatcagactctaaaacagttaaccaacaagctttctttttatgctagtgaacgcgaagtccatcacaacgacatatttatattcggcatagataacacc

SEQ ID NO: 237799 - DNA, 367 bp, Glycine max; identical to SEQ ID NO: 235843

SEQ ID NO: 237800 - DNA, 358 bp, Glycine max
ggcacaagtgagtttgttgatcgagataactagaaacagtgtgatgaaaatgaaggtccttgttttcttcgttgctacaattttggtagcatggcaatgccatgcgtacgatatgttccctctccgaatgaacactggatatggtgcccgtactccggaggtgaaatgcgcaagttggaggcttgctgtggaagcacacaacatctttggctttgagaccattcctgaagagtgcgttgaagcaacaaaggaatacatccatggcgaacaatatatatcagactccaaaacagttaaccaacaagcttacttttatgccagagacctcgatgtccatcccaacgacacatttgtgttc

SEQ ID NO: 237801 - DNA, 403 bp, Glycine max
aggggcaaaagtgagtttggtgatcgagataactagaaacagtgtgattaaaatgaaagtccttgttttcttcgttgctacaattttggtagcatggcaatgccatgcgtacgatatgttccctctccgaatgaacactggctatggtgcccgtactccggaggtgaaatgcgcaagttggaggcttgctgtggaagcacacaacatctttggctttgagaacattcctgaagagtgcgttgaagcaacaaaggaatacatccatggcgaacaatatagatcagactccaaaacagttaaccaacaagcttacttttatgccagagacctcgaagtcaatcccaaggacacatttgtgttcagtatagatggcaccgtactctctaatattccatactacaaa

SEQ ID NO: 237802 - DNA, 396 bp, Glycine max
gcagtttcaaattttcttttccttcactttcccgagaaaaaaataacacttttcactttcttcactacgttctcacttcgatatggctcgtacgaagcaaaccgctcgcaagtccaccggtggcaaggcgccacgtaagcagctcgccaccaaggccgctcggaagtccgctccggcgaccggaggagtgaagaagccccaccgcttcaggccgggaaccgtggcgctgagggaaatcagaaagtaccagaagagcaccgagcttctcatcaggaagcttccatttcagaggctcgtgagagaaatcgcgcatgatttcaagaccgatttgcgtttccagagcagcgctgtttccgcgcttcaagaggctgctgaggcttacctcgttgggttgtt

SEQ ID NO: 237803 - DNA, 368 bp, Glycine max
  unsure (1)..(368): unsure at all n locations
ggattggtaaagtattgaatcctgtgcatacatcctcacttatcctcttcctgcgactctcttctcattggttctccgtattctccctcaatcctattaaccttttcttctttcatttcccaccccattctataatcaatcaatggcaatggcttcttcaatccctaatgcgccttctgcgttcaattctcagagctacgttggtctcagagcgccactgaggaccttcaacttttcttctcctcaagctgccaaaattcctcgctcncaacgccttttcgtcgtcagagcctccgattcggagttcgaagccgccgttgtcgccggtaaggttccgccggcgcctcccgtgccgcccagaccggcgg

SEQ ID NO: 237804 - DNA, 390 bp, Glycine max
gactcaagcacaacatctctatcgagtaaattaactatgaagcctaccctactagtatccctttccttcctgcctctctttgctttcctggctctttcagaagatgttgaacaagttgtggacataagtggcaaccccattttcccaggtggcacatattacattatgccatcaacttggggcgctgccggtggtggattgaaactaggccggacaggaaactcaaactgcccagttactgttttgcaagattactcacaaatcttccgtggtacaccagtcaaattcagcatacctgggataagccctggaatcatctttacaggtactccacttgaaatcgagttcgcagagaaaccttattgtgctgaatcctccaaatgggtggcg

SEQ ID NO: 237805 - DNA, 388 bp, Glycine max
ggcacaagtttgttgagatagctagaaacaataagatgaaaatgaaagtgcttgttttgtttgttgctacagttttggtagcatatgaatgccatggctcagactaccagaagttccctctccaaatgaaaactgggtttggtgggcaatacagcaatgaggtggcatgtgccagttggaggcttggcgtggaagcaaacaacgtagtcaagtggcaaactgttcctgcagcttgcggacagtacatagctgactacgttctaggagaccaatatagatcagattccaaaacagtttaacaacaagcttatttctatgctaaatcccttaaactcatcaacagagatgtcgttgccctggacgttgacgacaccagtctctctaatct

SEQ ID NO: 237806 - DNA, 372 bp, Glycine max
ggcagttgtattgttgaacaagggtttctctgtctgcttcttcactttctctcgtttcaatcgaaaccaaaacaaaaacatgggcagaaaattcttcgtcggtggcaactggaaatgcaatgggaccactgaggaggtaaagaagattgttactactttgaatgaggctaaagtccctggagaagatgtcgtagaagttgttgtgagccctccttttgtgttccttcctgttgtaaaaagtttgctgcgccctgatttccatgtttcggcacaaaactgttgggttcgcaaaggtggtgcttataccggtgaggttagtgctgaaatgcttgttaattttgggattcccttggggtataatggtcactctga

SEQ ID NO: 237807 - DNA, 366 bp, Glycine max
gatgagtttatagggaagaaagctgcctatgctttgagccaaggtcttggggtgattgcatgcattggagaattgttagaagaaagggaggctggaaaaacttttgatgtttgttttcagcaattgaaggcttatgcagacgcagttgctagttgggacaacattgttattgcatatgaacctgtatgggccattggaacgggcaaagtggccactccccaacaagctcaggaagtacatgtagctgttcgggattggctaaaaaagaatgtctcagatgaagttgcgtctaaaacacgaattatttatggagggtctgtaaatggaggcaacagtgctgaactggcaaagcaagaagatattgat

SEQ ID NO: 237808 - DNA, 350 bp, Glycine max
ggaattcgagttggagcacggtttcgtgtaccgtgagcacaacaggtcacctggatactatgatggacgctactggaccatgtggaagctgcctatgtttggctgcactgatgcttctcaagtgttgaaggagcttcaagaggctaagactgcataccccaatggcttcatccgtatcattggatttgacaacgttcgccaagtgcagtgcattagcttcatcgcctacaagcccccaggcttctaagtcattgaaaaattttgcaagcatctgttgccaacccaacttggttggtggtcttaaactacattcccatttgtttttgctttatgagatttcatcatcctgt

SEQ ID NO: 237809 - DNA, 382 bp, Glycine max
  unsure (1)..(382): unsure at all n locations
ggttcaaaaggatttgtgtgttctgtggcagcagccctgggaacaagagtagctataaggacgctgctattgagcttgggaaagagttggtgtcaagaaatattgatctggtttatggaggaggaagcattggtttgatggggttggtttcccaggctgtttatgaaggaggtcgccatgtaattggagttattcccaagacactgatgccaagagagattactggagagacagtgggggaagtgatggcagtagcagacatgcatcagagaaaagcagagatggctaagcactctgatgcctttattgccttgcccggtggctatgggactcttgaggagcttctanaggtgataacttgggctcagcttgggatccatga

SEQ ID NO: 237810 - DNA, 358 bp, Glycine max
tggggcacaagtgagtttgttgatcgagataactagaaacagtgtgatgaaaatgaaggtccttgttttcttcgttgctacaattttggtagcatggcaatgccatgcgtacgatatgttccctctccgaatgaacactggctatggtgcccgtactccggaggtgaaatgcgcaagttggaggcttgctgtggaagcacacaacatctttggctttgagaacattcctgaaaagtgcgttgaaacaacaaaggaatacatccatggcgaacaatatagatcagactcaaaaaaatttaacaaacaggcttacttttatgccagagaactcaaagtcaatcccaaggacacatttgtg

SEQ ID NO: 237811 - DNA, 398 bp, Glycine max
gacaagtgagtttgttgatcgagataactagaaacagtgtgatgaaaatgaaggtccttgttttcttcgttgctacaattttggtagcatggcaatgccatgcgtacgatatgttccctctccgaatgaacactggctatggtgcccgtactccggaggtgaaatgcgcaagttggaggcttgctgtggaagcacacaacatctttggctttgagaccattcctgaagagtgcgttgaagcaacaaaggaatacatccatggggaacactatagatcatactccacaacagttaacaacaagcttacttttatgccagagacctcgaagtctatcccaaagacacatttgtgttcagtatatatggcaccgtactctctaacattccatactacaaaa

SEQ ID NO: 237812 - DNA, 384 bp, Glycine max
  unsure (1)..(384): unsure at all n locations
gagggtttacaccgaggagacacaccttcagcagcagcagccatggttctcaaaaccgaactatgccgattcagcggtgccaagatctacccagggaaaggcatcagatttgttcgtggtgattctcaggttttcctgtttgctaactcgaaatgtaagaggtatttccacaacaggttgaagccatcaaagctcacctggactgcaatgtacagaaagcaacacaagaaggacattgctcaagaagctgtgaagaaaagaagacgtgctgccaaaaagccttactccaggtccattgtcggtgccactttggaagttatccagaaaaagagagctgagaagccagaagttcgagatgcanatagggaagctgcccttcgtgaa

SEQ ID NO: 237813 - DNA, 255 bp, Glycine max
gagggtttctggatgctgctagtttctgtctgaaagctattctccaccgtagccgcaagcttcgccgtttgaaacagtgcctcaaccatggcagaacaaacagagaaggcttttctgaagcaaccaaaagtgtttctatgctctaagaaaggtgggaagggaaagaggcctgggaaaggtgggaatcgcttttggaagtcaattgggcttggattcaagactcccagagatgccattgaagggacatatattgac

SEQ ID NO: 237814 - DNA, 331 bp, Glycine max
gagatagatctgcttcttgttgttggaaagaaaccctagcaagcggaacaatggcagacgttgaggtcgatgtggcggctgcagcagcagcaaggcagccgaagaagagaacgttcaagaagttcagtttcaggggcgtggatctcgatgcgcttctggacatgtccaccgatgaactcgtgaagatgttcagtgctcgcgcacgtagaaggttccagagaggcctcaacagaaagcccatgggcttgatcaagaaacttcgcacagcgaaaagagaaactcgaccatgtgacgaagcatcacctgtcagcacccaccctccggaacatga

SEQ ID NO: 237815 - DNA, 391 bp, Glycine max
ggaacctttgcattctattcattcaagattcagcaagtgcgttttggaagcagagaccgaaatacttcgagatggcccgtacaaagcaaactgctcgtaagtcaactggaggaaaagctcccaggaagcagcttgcaaccaaggctgcacgtaagtctgcaccaacaactggtggtgtgaagaagcctcatcgttatcgccctggaactgttgctcttcgtgagattaggaaattacagaagagcactgagctcctaatcaggaagcttccttttcagatgttgggtcctgaaattgcccaggatttcaagactgatctgcgtttccagagccatgctgtgcttgcattgcaagaggctgctgaggcataccttgttgggctctttgaaga

SEQ ID NO: 237816 - DNA, 399 bp, Glycine max
gctagtctagggttacgccgtcgtcgctgtttgtgtgtgtatcaggtgcagctaccaacgatggtgaagggtcgtcaaggagagcgcgtcagactctacgtgaggggtacaatccttggatacaaaaggtccaagtccaaccagtacccaaacacatccctgatccaaattgagggagtgaacaccaaagaagaagtatgatggtatgctggcaagaaaatggcctatatctacaaggctaaggtgaaaaaggatggaagccattaccgctgcatatggggcaaggttacgaggcctcacggtaacagtggtgttgtccgtgcaaaattcaagtcagaccttccacccagatcgatgggagctcgagtaagagtattcatgtatcgaagtaatatatga

SEQ ID NO: 237817 - DNA, 393 bp, Glycine max
gatcacaaatctttcgctaacactcattaattgcaagaatggcacttcgttgcttggtgatgtccctttctgttctcttcacccttggtcttgcgagagaaagccatgccagagacgaagatttttggcatgctgtttggccaaacactcccattccaagttcattgcgagatcttctaaagcctggccctgcaagtgttgaaatcgatgatcaccctatgcaaattgaaggaacacagtacccgaaaaccttcttctataaagaagaccttcatccaggcataacaatgaaagtacaattcaacaagcctccctttcaacaccatggggtgttggtacatggttaaaggaaattaaggacactactaaagaaggatatagttttgaagagct

SEQ ID NO: 237818 - DNA, 384 bp, Glycine max
  unsure (1)..(384): unsure at all n locations
ggcacaagtgagtttgttgatcgagataactagaaacagtgtgatgaaaatgaaggtccttgttttcttcgttgctacaattttggtagcatggcaatgccatgcgtacgatatgttccctctccgaatgaacactggctatggtgcccgtactccggaggtgaaatgcgcaagttggaggcttgctgtggaagcacacaacatctttggctttgagaccattcctgaagagtgcgttgaagcaacanaggaatacatccatggcgaacaatatagatcagactccaaaacagttaaccaacaagcttactttttatgcagagacctcgaagtccatcccaaggacacatttgtgttcagtatagatggcaccgtactctctaa

SEQ ID NO: 237819 - DNA, 400 bp, Glycine max
gacttgcgagaaattatggcaagagatcttgaaagtggcggtggaggaaccaagaataacagaactgcagaggaaaactactctgcacctgaatcttcccatgtttatgattctgagacccattggacatcatggctcgtgcctatgtttgtggttgctaatattgctgtctttgttattaccatgtacatcaacaattgtcccaggaacaaccttcgtttccaaggtcgctgcgtggccaggttccttggaaggttctcttttcagcctatgcaggagaatcccttgcttggtccttcttcttcaacattgaccaagatgggagcccttcgatgggataatgttgtgaatagacatcaaggatggagactcttcacttgcatttggttacatgctgggg

SEQ ID NO: 237820 - DNA, 380 bp, Glycine max
gactctgatccacttccacttcaacatcttaagaaagcgaatcgattccgattcctctcaatggctgcggaacccaaggaatcgccttccaacaaccccggtctccatacaactcctgacgaagccaccaagggttacatcatgcaacaaactatgtttagaatcaaagaccccaaagtgagcctcgatttttattctcgagtcttgggcatgtctttgcttaagagattggattttccggagatgaagttcagcctgtacttcatgggctatgagaatacggcagaagctccaagtaatccaattgataaagtggtttggaccttttctcagaaggctacaattgaactgacacataattggggtactgaaagcgattc

SEQ ID NO: 237821 - DNA, 262 bp, Glycine max
ggcacaagtttgttgagatagctagaagcaataagatgaaaatgaaagtgcttgttttgtttgttgctacagttttggtagcatatgaatgccatggctcacactaccagaagttccctctccaaatgaaaactgggtttggtgggcaatacagcaatgaggtggcatgtgccagttggaggcttggcgtggaagcaaacaacgtagtcaagtggcaaactgttcctgcaccttgcggagagtacataactgactacgttct

SEQ ID NO: 237822 - DNA, 454 bp, Glycine max
  unsure (1)..(454): unsure at all n locations
gtacggtctagnataccgggtccaaccaagcctccattcgggtggcaaaagaccacaaaaagggggaaaagtttggttagaaaaccaaaaacaattagaagaaaattaaagtgcctggtttgtttgttgctacagttttgggagcatatgaatggcatggctcagactaccagaagttccctctccaaatgaaaactgggtttggtgggcaatacagcaatgaagtggcatgtgccagttggaggcttggcgtggaagcaaacaacgtaatcaagtggcaaactgttcctgcagcttgccgagagtacatagctgactacgttctaagagaccaatataaatcaaattcaaacagttaacaacaggcttatttctatgctaaatcgctcaaactcaccaacaaagatgtctttggcctggacgttgacgacactactctctctaatctccagta

SEQ ID NO: 237823 - DNA, 349 bp, Glycine max
ggcacaagtgagtttgttgttcaaaatacctagaaccattttgataaaattaaaggccctggtttcctccgtgccaaaaattttggaacaatggaatgccaatccttagataagttcccctcccgaatgaacactggctaaggtgcccgtactcccgaggtgaaatgcccaaattggaggcgtgctgtggaagcacacaacatctttggctttgagaccattcccgaaaagtgcgttgaagcaacaaaggaatacatccatggggaacaatatagattagactccaaaacaatttaccaacaagcttaattttatgccagagacctcgaagtccatcccaaggacacat

SEQ ID NO: 237824 - DNA, 400 bp, Glycine max
gagcatagcgaaacagagagtggtttcagtgagtgatcggtgttcacttgatccttcataagtcgtcatcatcatcatcatcatcaccgttgattgaagaagatgccgatcagaaacatcgccatcggaaggcctgaagaggctactcaccccgacacgttgaaggcggggttggctgagttcatctccaccttgatcttcgtgttcgccggttcaggttccggcatcgcctacaacaagctcaccgacaacggcgccgccactcccgccggcctcatctccgcttccatcgcccatgctttcggcctcttcgtcgccgtctccgtcggcgccaacatctccggcgggcacgtcaaccccggcgtcaccttcggcgccttcgtgggcggcaacatcacct

SEQ ID NO: 237825 - DNA, 317 bp, Glycine max
ggcacaagtgagtttgttgatcgagataactagaaacagtgtgatgaaaatgaaggtccttgttttcttcgttgctacaattttggtagcatggcaatgccatgcgtacgatatgttccctctccgaatgaacactggctatggtgcccgtactccggaggtgaaatgcgcaagttggaggcttgctgtggaagcacacaacatctttggctttgagaccattcctgaagagtgcgttgaagcaacaaaggaatacatccatggggaacaatatagatcagactccaaaacagttaaccaacaagcttacttttatg

SEQ ID NO: 237826 - DNA, 379 bp, Glycine max
ggcacaagtttgttgagatagctagaagcaataagatgaaaatgaaagtgcttgttttgtttgttgctacagttttggtagcatatgaatgccatggctcagactaccagaagttccctctccaaatgaaaactgggtttggtgggcaatacagcaatgacgtggcatgtgccagttggaggcttggcgtggaaacaaacaacgtactcaagtggcaaactgttcctgcagcctgcggagagtacatagctgactacgttctatgagaccaatatagatcagattccaaaacagttaaccaacaagcttatttctatgctaaatccctcaaactcaccaacatagatgtctttgtcctggacgttgacgacactactct

SEQ ID NO: 237827 - DNA, 358 bp, Glycine max
ggcacaagtgagtttgttgatcgagataactagaaacagtgtgatgaaaatgaaggtccttgttttcttcgttgctacaattttggtagcatggcaatgccatgcgtacgatatgttccctctccgaatgaacactggctatggtgcccgtactccggaggtgaaatgcgcaagttggaagcttgctgtggaagcacacaacatctttggctttgagaccattcctgaaaagtgcgttgaagcaacaaaggaatacatccatggcgaacaatatagattagactccaaaacagtttaccaacaagcttacttttatgccagagacctcgaaatccatcccaaagacacatttgtgttc

SEQ ID NO: 237828 - DNA, 393 bp, Glycine max
ggcacaagcgagtttgttgatcgagataactagaaacagtgtgatgaaaatgaaggtccttgttttcttcgttgctacaattttggtagcatggcaatgccatgcgtacgatatgttccctctccgaatgaacactggctatggtgcccgtactccggaggtgaaatgcgcaagttggaggcttgctgtggaagcacacaacatctttggctttgagaccattcctgaagagtgcgttgaagcaacaaaggaatacatccatggcgaacaatatagatcagactccaaaacagttaaccaacaagcttacttttatgccagagacctcgaagtccatcccaaggacacatttgtgttcagtatagatggcaccgtactctctaatattccata

SEQ ID NO: 237829 - DNA, 168 bp, Glycine max
ggcacaagtgagtttgttgatcgagataactagaaacagtgtgatgaaaatgaaggtccttgttttcttcgttgctacaattttggtagcatggcaatgccatgcgtacgatatgttccctctccgaatgaacactggctatggtgcccgtactccggaggtgaaatg

SEQ ID NO: 237830 - DNA, 368 bp, Glycine max
  unsure (1)..(368): unsure at all n locations
ggatcatcttcacaatcacatctccagaacacaaagaagagtgacccttcttcttgttattccacttgcgttaggtattggtgtgattgtttgtaccatccggtggtggagcttgttggaaattggagatgagtcagaggggtttaatatatagctttgttgccaaaggaactgttgttttagcagagcacacgcaatataccgggaatttcaattacaattgccgttcagtgcctgcagaagctgccatcaaatagcagcaaatacacgtattcctgtgatggtcacnacttcaatttcctcctagacaatggatttgttttccttgttgttgctgatgaatcgattggcaagagtgttccttttgt

SEQ ID NO: 237831 - DNA, 361 bp, Glycine max
  unsure (1)..(361): unsure at all n locations
ggagcaaaaccctaatccctatttttcttcctcagtagtgtcatttacgcttctcttctctgcagcaactatgcctaaccctaaggtcttcttcgacatgaccatcggcggtcaatctgctggccgcatcgtgatggagctctacgccgacgtcactccccgcaccgccgagaacttccgcgcgctttgcaccggcgagaagggcgtanggcggagcggcaagcccctccactacaagggctcgtccttccaccgcgtgatcccgagtttcatgtgtcagggtggcgacttcaccgccggaaacggaaccggcggcgagtcgatttatggcgccaagttcgccgacgagaacttcgtgaag

SEQ ID NO: 237832 - DNA, 189 bp, Glycine max
ggcgcacccagagaggaagcttagagagagagagagagagagagagagagaggagagagtattggcgcttcatcaagatgggtatttctagggattccatgcacaagaggcgtgccactggtggcaagaaaaaggcttggagaaagaagagaaagtatgagcttgggcgtcaagcagcaaacaccaagt

SEQ ID NO: 237833 - DNA, 384 bp, Glycine max
gaagcgcagttcgttccacgttgttgtccgctctgtggctctctacatttcatcattcatcggaaaaatggctctcgaggttgctgttaaggctgctgttggtgctccaaatgttctcggagattgtccattttcccaaagggtcctcttaactttagaggagaagaaaatcccttacaaactccacctcatcgatctcagtagtaaacccgaatggtttttgggtgtgaatcccgaagggaaggtgccagtggttctttttgatggcaaatgggtggctgattctgatgtgattgtggggatactcgaggaaaagtacccagaaccctctctcgtcactcctcctgaatttgcctccgtgggattaaagataattgggtcctt

SEQ ID NO: 237834 - DNA, 400 bp, Glycine max
ggcacaagtgagtttgttgatcgagataactagaaacagtgtgatgaaaatgaaggtccttgttttcttcgttgctacaattttggtagcatggcaatgccatgcgtacgatatgttccctctccgaatgaacactggctatggtgcccgtactccggatgtgaaatgcgcaagttggaggcttgctgtggaagcacacaacatctttggctttgagaccattcctgaagagtgcgttgaagcaacacaggaatacatccatggcgaacaatatagatcagactccaaaatagttaaccaacaagcttacttttatgccagagacctcgaaatccatcccaaggacacatttgtgttcagtatagatggcaccgtactctctaatatttcatactacaaa

SEQ ID NO: 237835 - DNA, 240 bp, Glycine max
ggtatagatctcggtagcaaacgcaacagtgggagatataaaggtagatagattgagagagagagaaagattcggaaccatcgctatcgcacgctttccattgatgcttccgacgcttgctttgtctgcatcgtccttctttccttcatgcgttctctgtgtgtcgtaagggtgctctcaaactcttcatcatgtctgaactcgctgatactctcgatcagtgagtcgtcttcctccaag

SEQ ID NO: 237836 - DNA, 401 bp, Glycine max
  unsure (1)..(401): unsure at all n locations
ggtaaacaaaaaccatcaccanaaaagaaaatgatgctcggagagcaccatcgcgcgaatccaacggttcacgtgccaccgtggccaacccacgacgatccaacggccgagatgtactccgcgtttttaacaaacgacgtcaatgctggtgagtactctccgtactatcttcaagaagcactaacggctctgcagcgttttctgccgtctaacgaaacggacgctgactcggacacggaggctcaacccgacgcggcggtggacgcgtactcgtgcgaccatttccgcatgtacgagttcaaggtccgtcgatgcgcacgtggcaggtcacacgactggacggagtgtccgtacgcgcatcccggcgagaaggctcgacgccgggacccgagaaagttcac

SEQ ID NO: 237837 - DNA, 399 bp, Glycine max
gagttgtagccgctgcatctgaacgaaacacagagggagagagagtgagagaagcagtaattcatcacaatgggtaaggttcacggatctctcgcacgtgcggggaaagtgagaggacaaactcccaaagtggcgaagcaagacaagaagaagaagccacgcggacgtgctcacaagagaatgcaatacaaccgccgattcgtcaccgccgtggtgggattcggaaagaagcgtggaccaaactcgtcggagaagtgagggaggcgtttggaagatgatggtttttcttagtttgcgaaatgtatcacctcattttatttgattgatgaactcaaactttgatagttctgattaagcttcaatgaaggagttttttgctagttaatatcacaccacatt

SEQ ID NO: 237838 - DNA, 396 bp, Glycine max
gagcgaaacagagagtgatttcagtgagtgatcggtgttcacttgatctcatcagaatcgtcagcgtcaattgaagaagatgccgatcagaaacatcgccgtcggaaggcctgaagaggcgactcaccccgacacgttgaaggcggctttggctgagttcatctcaaccttcatcttcgtgttcgccggctcaggctccggcatcgcctacaacaagctcaccgacaacggcgctgccacccctgccggcctcatctccgcctccatcgcccatgcattcgccctcttcgtcgccgtctccgtcggcgccaacatctccggcggccacgtcaaccccgccgtcaccttcggcgccttcgtcggcggcaacatcaccttcctccgcggcatcgtcta

SEQ ID NO: 237839 - DNA, 398 bp, Glycine max
ggcacaagtgagtttgttgatcgagataactagaaacagtgtgatgaaaatgaaggtccttgttttcttcgttgctacaattttggtagcatggcaatgccatgcgtacgatatgttccctctccgaatgaacactggctatggtgcccgtactccggaggtgaaatgcgcaagttggaggcttgctgtggaagcacacaacatctttggctttgagaccattcctgaagagtgcgttgaagcaacaaaggaatacatccatggcgaacaatatagatcagactccaaaacagttaaccaacaagcttacttttatgccagagacctcgaagtccatcccaaagacacatttgtgttcagtatagatggcaccgtactctctaatattccatactaca

SEQ ID NO: 237840 - DNA, 397 bp, Glycine max
gaaggtgcaagagtttgttgtgagctataagctagtttatcgtgaggagaatatgaagttgtttgttttctttgttgctgcagtaattttggtagcatggccatgccatggcgcaggctaccaaaggttccctctccgaatgaaaactggctatggtgagcgttcttcggaggtaaaatgcgcaagttttaagcttgctgtggaagcacacaacatccgagcctttaaaaccattcctgaagagtgcgttgaaccaacaaaggactacattaatggcgaacaatttagatcagactctaaaacagttaaccaacaagctttcttttatgctagtgaacgcgaagtccatcacaacgacatatttatattcggcatagataacaccgtactctctaat

SEQ ID NO: 237841 - DNA, 297 bp, Glycine max
  unsure (1)..(297): unsure at all n locations
cagctgagagagagaagctggagaaggagggatacagaatcattggaaacgttggagaccaatggagtgacctcctgggaagcaacaaagggactaggacttttaagctgcctaatcccttgtactatgattaagctctcaaatcaagcctctaagttgctccttaatttctatgaaataagatcctgagtattattacttagtcatgtangggcactgaacaatgttgttttcccctttcgagactttcatgaattatgagctcttgttccattaagaaattgtccgttccaagtt

SEQ ID NO: 237842 - DNA, 374 bp, Glycine max
ggaggttttggagttacagccgcagcttgaaacagagcagagcgaccttgaagagctatggctgtcggacagaataacaggatttccaagggaaagaaaggtggcaacaataaagccgctgatccctttgccaagaaagactggtacgatatcaaagccccttccctcttccaggtcaataatagtggcaaaaccctcgtctctcgtacccatggaaccaagattgcatccgaaggactcaaacatccggtttttgaagtctcaatggctgatctccatagggatgaacaccactccttcaacaagattcgtttgagaactgaagacgttcaagggaacaatgttctgacaaacttctggggaatggatttcac

SEQ ID NO: 237843 - DNA, 376 bp, Glycine max
gagtattaagcggtcagcacgaacaaacaatcacattacacacttctctctcttcaatggccggaatccgcttgctgccggaagactccgacgtctcccaacaatcccgcgcggtgcctctctccgccgccgatctggtctccgacgacgaccgctccgtcgccgctgactcctggtccatcaagagcgagtatggcagcactctcgacgacgaccagcgccacgccgacgccgccgaagctctctccaacgcgaacctccgacctccctccgattacagttctgacaaggatgaacctgattctgaagcagtcacgtccatgctgggatttcagagttattgggatgctgcatatgctgacgagctcacaaattt

SEQ ID NO: 237844 - DNA, 387 bp, Glycine max
  unsure (1)..(387): unsure at all n locations
caaaaagggaatcaaaactttaaccaatcctcaatccaacaattccaattcccaatccaaaacctaatactttaaagaactaatattgatcaattttggaacaagaagaaaagcacgaaaaaaccgttgagaaaaatcacgtggaaaaagtccngcgaaaaagccaggccggaaaaaagcttccaangaggaagacccgccggaaaaagggggaagaggaaaagaggaacaagaagagcgtggagacatacaagatatacatattcaaagttctgaagcaagtcaaccctgacattggtatctcaagcaaaggcatgggaatcatgaacagcttcatcaacgacatcttcgagaagcttgctcaagaatctttcagacttgcccgct

SEQ ID NO: 237845 - DNA, 354 bp, Glycine max
gacgcaactgaataagaaaagccttccactattccatatatagcagccaaaaaagaatgaagaatactgcgttgttcactatctttctacaccttgctttcacctcatacctaccttcagacaccgctgctaatgtgtacgatacggatggtaatattcttcaaaagggtcgcacatattttgtgttggcagctacaataggaaacggcggtggaatagaatttgccgcaactggaaacgacacttgccctctaactgtcgtgcaatctcccagtggcgactctattgggtttccaataaggttttcagatccatttatagaaacgcctgatgatatccttgaaggctttggtt

SEQ ID NO: 237846 - DNA, 298 bp, Glycine max
agggggaaaaattgagttttgttgattcgagataactagacacagtgtgatgaaaaatgaaagtccttgttttcttcgttgctacaattttggtagcatggcaatgccatgcgtacgatatgttccctctccgaatgaacactggctatggtgcccgtactccggaagtgaaatgcccaagttggaagcttgctgtgggagcacacaacatccttggctttgagaccattcctgaagagtgcgttgaagcaacaaaggaatacatccatggcgaacaatatagattagactccaaaac

SEQ ID NO: 237847 - DNA, 278 bp, Glycine max
ttacagaaggatacagctgggagaagagataaattgggaaagtgcaatagtttgttgtaatctataagctattttagcctgtggagactacgaagctgtatgttttctatgatgctgcagtaattctgtgaacatgtgcattctatggctcacgatagcatatgttccctctccgcatgaagtctggttatcatgatcgttgttcgcaggtaaaatgcacaagttctatgcttgctgtacaatcccagaacattggatcctttaaagccattcctgaa

SEQ ID NO: 237848 - DNA, 400 bp, Glycine max
  unsure (1)..(400): unsure at all n locations
ggcacaagtgagtttgttgatcgagataactagaaacagtgtgatgaaaatgaaggtccttgttttcttcgttgctacaattttggtagcatggcaatgccatgcgtacgatatgttccctctccgaatgaacactggctatggtgcccgtactccggaggtgaaatgcgcaagttggaggcttgctgtggaagcacacaacatctttggctttgagaccattcctgaagagtgcgttgaagcaacaaaggaatacatccatggcgaacaatatagatcagactccaaaacagttaaccaacaagcttacttttatgccagagacctcgaagtccatcncaaggacacatttgtgttcagtatagatggcaccgtactctctaatattccatactacaaa

SEQ ID NO: 237849 - DNA, 363 bp, Glycine max
  unsure (1)..(363): unsure at all n locations
gaaggtgcaagagtttgttgtgagctataagctagtttatcgtgaggagaatatgaagttgtttgttttctttgttgctgcagtagttttggtagcatggccatgccatggcgcaggctaccaaaggttccctctccgaatgaaaactggctatggtgagcgttcttcggaggtaaaatgcgcaagttttaagcttgctgtggaagcacacaacatccgagcctttaaaaccattcctgaagagtgcgttgaaccaacanaggactacattaatggcgaacaatttagatcagactctaaaacagttaaccaacaagctttcttttatgctagtgaacgcgaagtccatcacaacgacatatt

SEQ ID NO: 237850 - DNA, 368 bp, Glycine max; identical to SEQ ID NO: 235349

SEQ ID NO: 237851 - DNA, 358 bp, Glycine max; identical to SEQ ID NO: 234733

SEQ ID NO: 237852 - DNA, 290 bp, Glycine max
ggcacaagtgagtttgttgatcgagataactagaaacagtgtgatgaaaatgaaggtccttgttttcttcgttgctacaattttggtagcatggcaatgccatgcgtacgatatgttccctctccgaatgaacactgggtatggtgcccgtactccggaggtgaaatgcgcaagttggaggcttgctgtggaagcacacaacatctttggctttgagaccattcctgaagagtgcgttgaagcaacagaggaatagatccatggcgaacaatatggatcagactccaaaa

SEQ ID NO: 237853 - DNA, 288 bp, Glycine max
ggcacaagtgagtttgttgatcgagataactagaaacagtgtgatgaaaatgaaggtccttgttttcttcgttgctacaattttggtagcatggcaatgccatgcgtacgatatgttccctctccgaatgaacactgagctatggtggcccgctactcggcgaggtgaaatgcggaagttggaggcttgctgtggaagcacacaacatctttgactttgagaccagtcctgaagagtgcgttggagcagcaagcgaatacatccatggcgaacaatggagatcagact

SEQ ID NO: 237854 - DNA, 337 bp, Glycine max
gatcgaagcaaaaaatgaaaacccaaagtgcttctctcctctgtctttttctctctcttgctatccttttggctagtggcactgctgcaagtgcaactccaagaagcgcagtgccaagccaccatgtttcaacattcaacagaagcctttttccttccacttttctctttggaattggttcttctgcttaccaggcagaaggagcagcaagtgtaggtgggagaggaccaagcatatgggacaccgacactagacagcatactgaaaagatttgggatcatagcaccggtgacatgggaactgatttttatcatcgagacaaaggttacattaaaat

SEQ ID NO: 237855 - DNA, 300 bp, Glycine max
ggcacaagtttgttgagatagctagaagcaataagatgaaaatgaaagtgcttgttttgtttgttgctacagttttggtagcatatgaatgccatggctcagactaccacaagttccctctccaaatgaaaactgggtttggtgggcaatacagcaatgaggtggcatgtgccagttggaggcttggcgtggaagcaaacaacgtagtcaagtggcaaactgttcctgcagcttgcggagagtacatagctgactacgtgctaggagaccaatatagatcagattccaacgcagttaacc

SEQ ID NO: 237856 - DNA, 291 bp, Glycine max
gacaacacaacgcaacacaacgcgcactctctctcttctctcgtaacacagaaaccctatcgttcttcgcggtttcgccgattctcgccatgcccaaagccaaatccgacgccaaagccgccgatagccggttgaagcgcaagggcgctggtgctggaaggaagcaatcgaagaaagctgctaaggatcctaacaagccaaagagacctccaagcgctttcttcgttttcatgtcctacttcagagagcagtttaataaggagcatcctaagaacaaatccatcgctgttg

SEQ ID NO: 237857 - DNA, 387 bp, Glycine max; identical to SEQ ID NO: 235921

SEQ ID NO: 237858 - DNA, 370 bp, Glycine max
ggcatcaattcaaaatatatcatcaattataagcatgggtttgtggaacacaacgaatgcagtgtcttgccgctttcacaagtttggtgatgaccaaaagaatctggtcttccaaggtgatgccacgtcttcttccaggggcatagaactcacaaagttagacggtggaggaaaaccagtgggtggcagtgtggggagagtgttatactcttctccagtgcacctttgggaaagctctacagtggtcgcaagctttgaaaccgacttcaccttttccatctcatcagactctactactccaagtgatggccttgccttcttcattgcaccatttgacactaaaatccctccaaactctggtgggagcaac

SEQ ID NO: 237859 - DNA, 367 bp, Glycine max
ggagcaaaaccctaatccctatttttcttcctcagtagtgtcatttacgcttctcttctctgcagcaactatgcctaaccctaaggtcttcttcgacatgaccatcggcggtcaatctgctggccgcatcgtgatggagctctacgccgacgtcactccccgcaccgccgagaacttccgcgcgctttgcaccggcgagaagggcgtagggcggagcggcaagcccctccactacaagggctcgtccttccaccgcgtgatcccgagtttcatgtgtcagggtggcgacttcaccgccggaaacggaaccggcggcgagtcgatttatggcgccaagttcgccgacgagaacttcgtgaagaagcac

SEQ ID NO: 237860 - DNA, 297 bp, Glycine max
gaaggtgcaagagtttgttgtgagctataagctagtttatcgtgaggagaatatgaagttgtttgttttctttgttgctgcagtagttttggtagcatgggcatgccatggcgcaggctaccaaaggttccctctccgaatgaaaactggctatggtgagcgttcttccgaggtaaaatgcgcaagttttaggcttgctgtggaagcacacaacatccgagcctttaaaaccatttcctaaaaatccgttgaaccaacaaaggactacattagatggggaacaatttagatcagact

SEQ ID NO: 237861 - DNA, 315 bp, Glycine max
gactcaccacttcaaaacactcataacacaaagcacaaagcagagctcatccttgagttgaaaaatggcagcagcttcttcgatggctctctcatcgccatccttggctggcaaggccgtgaagctgggcccatcagccccagaagtgggaagggtgagcatgaggaagaccgtcaccaagcaggtctcctcaggaagcccatggtactgcccagaccgagtcaagtacttgggcccattctctggcgagcccccgtcctacctaaccggtgagttcccaggcgactaccgctgggacactgctgggctttccgc

SEQ ID NO: 237862 - DNA, 297 bp, Glycine max
ggcacaagtttgttgagatagctagaagcaataagatgaaaatgaaagtgcttgttttgtttgttgctacagttttggtagcatatgaatgccatggctcagactaccagaagttccctctccaaatgaaaactgggtttggtgggcaatacagcaatgaggtggcatgtgccagttggaggcttggcgtggaagcaaacaacgtaatcaagtggcaaactgttcctgcagcttgcggagagtacatagctgactacgttctaggagaccaatagagatcagattccaaaacagtta

SEQ ID NO: 237863 - DNA, 305 bp, Glycine max
gaaggtgcaagagtttgttgtgagctataagctagtttatcgtgaggagaatatgaagttgtttgttttctttgttgctgcagtagttttggtagcatggccatgccatggcgcaggctaccaaaggttccctctccgaatgaaaactggctatggtgagcgttcttcggaggtaaaatgcgcaagttttaggcttgctgtggaagcacacaacatccgagcctttaaaaccattcctgaagagtgcgttgaaccaacaaaggactacattaatggcgaacaatttagattagactctagaacag

SEQ ID NO: 237864 - DNA, 322 bp, Glycine max
gattgctgaatatggtgaaggagtggttaagctaggaggaaggatgctcaagatgatgtcaataaaccttggtttgaaagaagatttccttctcaatgcatttgggggagagagtgaggttggtgcatgcctaagggtgaatttctatccaaagtgccctcaacctgacctcacttttggactctcccctcactcagatcctggtggcatgaccattcttctccctgatgattttgtgtctggccttcaagtaagaagaggagatgaatggattacagttaagtctgtcccaaatgccttcatcatcaacattggtgaacaa

SEQ ID NO: 237865 - DNA, 270 bp, Glycine max
aggggcacagttgagtttgttgatgtatacaactagaaagagtatggtgaagatgaaggtccttggtttcttctctgctacaattttggtagcatggcaatgccatgcgtacaatgtgttcggtctccgaatgaacactggctatggtgcccgtactccggaggtgatatgcgcaagttggaggcttgctgtggaagcacactacatctttggcattgaaaccattcctgaagagtgcgttgagacgacatgggattacatccataggga

SEQ ID NO: 237866 - DNA, 381 bp, Glycine max; identical to SEQ ID NO: 235459

SEQ ID NO: 237867 - DNA, 291 bp, Glycine max
cggtcaggcattcccgggccgacacacgcgtcaaatgcccaatgaacctgatctggaatttggtattccttctaagtacagctacatgacggtatgtgccccttcatgtcatgactgttccaccttgcgtgcttggtgggaagaagatgaataaaaaagactcaggtttttcaaaattgtaatggattccgataatttgccgcccgattcaatgtgttcaaaaatttgtacatttgttccaagacaacattttgaagccccaacaatgttggcaatcctccctcctcaaga

SEQ ID NO: 237868 - DNA, 371 bp, Glycine max
ggtcgttacaaattactacacactgttccaatgggtgaagaccgatccgaaatagtgttcttcgatgtggagaccagcgttcccacccgaacggggcagggttttgcgcttctggaattcggcgccattttggtttgccccaaaacgctcacggagcttcggaattactctactctcgttcgtcccgccaacctctccgtcatctcccccttgtcggagcgctgcaatggcatcaccgccgccgccgtctccgccgccccttccttcgccgacattgctcacctcgtttacgacctccttcacgggaggatttgggcggggcataatatcatacgattcgactgtgttcggattagagatgcctttgctga

SEQ ID NO: 237869 - DNA, 373 bp, Glycine max
  unsure (1)..(373): unsure at all n locations
ggtacacagcctcaacaaccctaacgcgtgcagagcagagagagacgcagccatggggcgaagacccgcgaggtgttataggcaaattaagaacaaaccataccccaagtcacggttttgccgtggtgttcctgatcccaagatcaggatttacgatgttggtatgaagaagaagggtgttgatgagtttcctttctgtgtccatctggttagttgggagaaggaaaacgtttctagtgaggccctggaagctgctcgtattgcttgcaacaagtacatggccaaatttgctggaaaggatgctttccacttgagagtcanggtgcacccattccatgttcttaagatcaacaagatgctttcgtgtgctgga

SEQ ID NO: 237870 - DNA, 214 bp, Glycine max
  unsure (1)..(214): unsure at all n locations
ggcacaagtgagtttggtgatgnagagagctagaaacagtgtgctgaaaatgaaggtccgtgttttcttcgttgctacaattttggtagcaggggaaggccatgcgtacgatgtgtgccctctccgaatgagcactgggtatggtgcccgtactccgggtgtgaaatgcgcaagttgggggcttgctgtggaagcacacaacatctttggcttt

SEQ ID NO: 237871 - DNA, 286 bp, Glycine max
ggcacaagtgagtttgttgatcgagataactagaaacagtgtgatgaaaatgaaggtccttgttttcttcgttgctgcaattttggtagcatggcaatgccatgcgtacgatatgttccctctccgaatgaacactggctatggtgcccgtactccggaggtgaaatgcgcaagttggaggcttgctgtgggagcacacaacatctttggctttgagaccattcctgaagagtgcgtgtaagcaacaaaggaatacatccatggcgaacaggatagatcagactcc

SEQ ID NO: 237872 - DNA, 310 bp, Glycine max
ggccatgatttgattcctcaacaccccacacacacgtagttaaaatgggttttactaggaaacccatgtttcctgtgttgctggttttgttcatcagaagtcttcttgagccgccccatgttgcagaatctacttcttctgattactccactttggtctacaacggctgctcaaaggagcctttcacagatcccaatggggtgtactctcaggcactttcagcactctttggctcattggtttgacaatccaccaaagccaagttccacagagccacttctggctctggccaggacaccatgactggcct

SEQ ID NO: 237873 - DNA, 333 bp, Glycine max
ggcgtacacagcctcaacaaccctaacgcgtgcagagcagagagagacgcagccatggggcgaagacccgcgaggtgttataggcaaattaagaacaaaccataccccaagtcacggttttgccgtggtgttcctgatcccaagatcaggatttacgatgttggtatgaagaagaagggtgttgatgagtttcctttctgtgtccatctggttagttgggagaaggaaaacgtttcgagtgaggccctggaagctgctcgtattgcgtgcaacaagtacatggccaaatttgcctggaaggatgctttccactttagagtcaagggtgcaccc

SEQ ID NO: 237874 - DNA, 373 bp, Glycine max
gattgtagaactgaacaagggtttctctttctctttctctgtctgcttcttcactttctctcgtttcaatcgaaaaaaatcatgggcagaaaattcttcgtcggtggcaactggaaatgcaatgggaccactgaggaggtgaagaagattgttactactttaaatgaagctaaagtccctggagaagatgttgtagaagttgttgtgagccctccttttgtgttccttccttttgtaaaaagtttgccgcgccctgatttccatgtctcggcccaaaattgttgggttcgcaaaggtggtgcttatactggagaggttagtgctgaaatgcttgttaatttgggaattccttgggttattattggtcactctg

SEQ ID NO: 237875 - DNA, 368 bp, Glycine max
ggcattatatttgagttcaaacaaatcaaagccatggccacctccaacttctctattgttctctccgtctccctagccttctttttggtgctacttaccaaggcacactcgaccgataccgtttctttcaccttcaacaagttcaacccagtccaaccaaacattatgctccaaaaagatgctagtatttcatcctctggggtgttacaactcaccaaagttggcagcaacggcgtgcccacctcgggatctctcggtcgtgccctttacgctgccccaatccagatttgggacagcgaaaccggcaaggtagccagctgggctacatcctttaaattcaacattttcgcacccaacaaatcaaactc

SEQ ID NO: 237876 - DNA, 371 bp, Glycine max
gatcgcatttcatagcactcaccctcattaccaacacgaaagcatagccaaaaccttttttcgaagtctctgattttcctaatggctccggcaaaggcagagaagaagccggcggagaagaagccagcggcggagaaggcaccggcggagaagaagccgaaggcggagaagaagatctcgaaggaaggagggagcgagaagaagaagaagcgcacgaagaagagcgtggagacctacaagatctacatcttcaaggtcctcaagcaggttcaccccgacattggtatttccagcaaggccatgggcatcatgaacagcttcatcaacgacatcttcgagaagctcgcccaggaagcgtcgcgtttggctcg

SEQ ID NO: 237877 - DNA, 297 bp, Glycine max
gacccacactcactctttgactcttcttcgtctcaaatctcttcgttccttcgattcgttccatttcttccaaaatggccaaagacccagttcgcgttctcgtcactggagctgcagggcaaattgggtatgctcttgtccctatgattgctaggggagtgatgttgggtcctgaccagcccgtgatcctccacatgcttgacattcctccggcagcagagtcattgaatggggttaaaatggaattggtggatgctgcattccctcttcttaagggtgttgttgccacaactgatg

SEQ ID NO: 237878 - DNA, 240 bp, Glycine max
ggtaaagggtaaaaagagtacgacctaataatgggacatacaatgcattacaaacgtatgattattacgcttcaaccgggttattctattccacctcttaaaaagaaaaaaacttaaatcagaatacttaatagcatggcgatacatttatacaaaacttctaccccaagcagacgcaatgggaccgtagacagtcaagtaaaatccaatccacgaaatcatttgatctatggacagcat

SEQ ID NO: 237879 - DNA, 315 bp, Glycine max
ggcacaagtgagtttgttgatcgacataactagaaacagtgtgatgaaaatgaaggtccttgttttcttcgttgctacaattttggtagcatggcaatgccatgcgtacgatatgttccctctccgaatgaacactggctatggtgcccgtactccggaggtgaaatgcgcaagttcgaggcttgctgtggaagcacacaacatctttggctttgagaccattccttaagagtgcgttgaagcaacaaaggaatacatccatggcgaacaatatagatcagactccaaaacagttaaccaacaagcgtactttta

SEQ ID NO: 237880 - DNA, 293 bp, Glycine max
gacacaccgtttgttctattcttaactcaacttctgctacccactctcttcttccaagtccaaccacgcttttctctacagtcatgggcaatgtcaagatcggaatcaacggatttggaagaattggccgtttggttgccagagtcgctctgcagagagacgatgtggagctcgttgccgttaacgaccctttcattaccaccgattacatgacatacatgtttaaatacgacactgttcacggacactgcgagcatcacgatgtcaccgttaaggactagaagacccttctc

SEQ ID NO: 237881 - DNA, 212 bp, Glycine max
gacaagtgagtttgctgatcgatataactagaaacagtgtgatgaagatgaaagtccttgttttcttcgttgctacaattttggtaacatggcaatgccatgcgtaggatatgttccctctccgagtgaacactggctatggtgcccgtactgcggaagttaaatgcgcaagttggacgcttgctgtggaagcacacaatatctttggcttt

SEQ ID NO: 237882 - DNA, 395 bp, Glycine max
agaaaggggcacaagtttgttgagatagctagaagcaataagatgaaaatgaaagtgcttgttttgtttgttgctacagttttggtagcatatgaatgccatggctcagactaccagaagttccctctccaaatgaaaactgggtttggtgggcaatacagcaatgaggtggcatgtgccagttggaggcttggcgtggaagcaaacaacgtagtcaagtggcaaactgttcctgcagcttgcggagagtacatagctgactacgttctaggagaccaatatagatcagattccaaaacagttaaccaacaagcttatttctatgctaaatccctcaaactcaccaacaaagatgtctttgtcttggacgttgacgacactactctctctaatct

SEQ ID NO: 237883 - DNA, 374 bp, Glycine max
ggcacaagtgagtttgttgatcgagataactagaaacagtgtgatgaaaatgaaggtccttgttttcttcgttgctacaattttggtagcatggcaatgccatgcgtacgatatgttccctctccgaatgaacactggctatggtgcccgtactccggaggtgaaatgcgcaagttggaggcttgctgtggaagcacacaacatctttggctttgagaccattcctgaagagtgcgttgaagcaacacaggaatacatccatggcgaacaatatagatcagactccaaaacagttaaccaacaagcttacttttatggcagagacctcgaagtccatcccaaggacacatttgtgttcagtatagatggcaccg

SEQ ID NO: 237884 - DNA, 374 bp, Glycine max
gatgagtttatagggaagaaagctgcctatgctttgagccaaggtcttggggtgattgcatgcattggagaattgttagaagaaagggaggctggaaaaacttttgatgtttgttttcagcaattgaaggcttatgcagacgcagttgctagttgggacaacattgttattgcatatgaacctgtatgggccattggaacgggcaaagtggccactccccaacaagctcaggaagtacatgtagctgttcgggattggctaaaaaagaatgtctcagatgaagttgcgtctaaaacacgaattatttatggagggtctgtaaatggaagcaacagtgctgaactggcaaagcaagaagatattgatggatttct

SEQ ID NO: 237885 - DNA, 304 bp, Glycine max
ggccattgttgttgctattatcatccgcagctgcttttattcgcaccgcaaacagtgagccatggccgtcggaaagaacaagcgcatctccaaggggaagaagggtggcaagaagaaggcagctgatccctttgccaagaaggattggtatgacattaacgctccttctgtttttcaagtgaaaaatgttggcaaaaccctcgtctctcgtactcagggtaccaagattgcttctgaaggactcaagcatagagtgtttgaggtctccttggctgatcttcaacgggatgaggatcatgcattc

SEQ ID NO: 237886 - DNA, 310 bp, Glycine max
ggcacaagtgagtttgttgatcgagataactagaaacagtgtgatgaaaatgaaggtccttgttttcttcgttgctacaattttggtagcatggcaatgccatgcgtacgatatgttccctctccgaatgaacactggctatggtgcccgtactccggaggtgaaatgcgcaagttggaggcttgctgtggaagcacacaacatctttggctttgagaccattcctgaagagtgcgttgaagcaacaaaggaatacatccatggcgaacaatatagatcagactccaaaacagttaaccaacaagcttac

SEQ ID NO: 237887 - DNA, 352 bp, Glycine max
ggcacaagtgagtttgttgatcgagataactagaaacagtgtgatgaaaatgaaggtccttgttttcttcgttgctacaattttggtagcatggcaatgccatgcgtacgatatgttccctctccgaatgaacactggctatggtgcccgtactccggaggtgaaatgcgcaagttggaggcttgctgtggaagcacacaacatctttggctttgagaccattcctgaagagtgcgttgaagcaacaaaggaatacatccatggcgaacaatatagatcagactccaaaacagttaaccaacaagcttacttttatgccagacacctcgaagtccatcccaaggacacattt

SEQ ID NO: 237888 - DNA, 360 bp, Glycine max
ggcacaagtgagtttgttgatcgagataactagaaacagtgtgatgaaaatgaaggtccttgttttcttcgttgctacaattttggtagcatggcaatgccatgcgtacgatatgttccctctccgaatgaacactggctatggtgcccgtactccggaggtgaaatgcgcaagttggaggcttgctgtggaagcacacaacatctttggctttgagtccattcctgaagagtgcgttgaagcaacaaaggaatacatccatggcgaacaatatagatcagactccaaaacagttaaccaacaagcttacttttatgccagagacctcgaagtccatcccaaggacacatttgtgttcag

SEQ ID NO: 237889 - DNA, 342 bp, Glycine max
ggcacaagtgagtttgttggttcaaattactagaaacaatgttatgaaaatgaagggccttggtttcctcgttgctacaattttggtagcatggcaatgccatgcgtacgatatgtttcctctccgaatgaacactggctatggtgcccgtactccggaggtgaaatgcgcaaattggaggcttgctgtggaagcacacaacatctttggctttgagaccattcctgaaaaatgcgttgaagcaacaaaggaatacatccatggcgaacaatatagattagactccaaaaacagttaaccaacaagcttacttttatgccagagacctcgaagtccatccca

SEQ ID NO: 237890 - DNA, 378 bp, Glycine max
ggcacaagtgagtttgttgatcgagataactagaaacagtgtgatgaaaatgaaggtccttgttttcttcgttgctacaattttggtagcatggcaatgccatgcgtacgatatgttccctctccgaatgaacactggctatggtgcccatactccggaggtgaaatgcgcaagttggaggcttgctgtggaagcacacaacatctttggctttgagaacattcctgaagagtgcgttgaagcaacaaaggaatacatccatggcgaacaatatagatcagactccaaaacagttaaccaacaagcttacttttatgccagagacctcgaagtccatcccaaggacacatttgtgttcagtatagatggcaccgtact

SEQ ID NO: 237891 - DNA, 364 bp, Glycine max
ggcacaagtgagtttgttgatcgagataactagaaacagtgtgatgaaaacgaaggtccttgttttcttcgttgctacaattttggtagcatggcaatgccatgcgtacgatatgttccctctccgaatgaacactggctatggtgcccgtactccggaggtgaaatgcgcaagttggaggcttgctgtggaagcacacaacatctttggctttgagaccattcctgaagagtgcgttgaagcaacaaaggaatacatccatggcgaacaatatatattagactccaaaacagttaaccaacaagcttacttttatgccagagacctcgaagtccatcccaaggacacatttgtgttcagtata

SEQ ID NO: 237892 - DNA, 269 bp, Glycine max
gatatattccactttcgctagtttagctacctagccatgggaaagattgccctagccaatgtcctcttggtccttctcttgaacttgagcactttgctcaatgttcttgcttgtccctattgcccttacccatctcccaaccctcctccagaaaagcctcccattgtgaaaccaccagttcacaaacaaccaaaaccatgtccaccagccaagtcatctccaaaaccaccccatgtagacccaccctatgtcccaaaagctcctcacta

SEQ ID NO: 237893 - DNA, 339 bp, Glycine max; identical to SEQ ID NO: 236434

SEQ ID NO: 237894 - DNA, 297 bp, Glycine max
ggaacaaggcaaatcgcgaagactacatctgatctgagataatggctcctcggtctagcagcaaggacgcccaagaccttttccgcgctctttggtctgcttatgctgcaacccccactaatctcaagatcattgatctctatgtcatctatgccgtagtcaccgctttcatccaggttgtttacattgctttggttggatcatttccatttaactccttcctatcaggagtactttcctgtgtaagaactgctgttcatgctgtttgtctcaggatccaagtcaataaggagaata

SEQ ID NO: 237895 - DNA, 310 bp, Glycine max
ggagagaagttattagggtttttgagtgcggcggtccaaacactcttctctgcagcttttgcctacaactcccttcaccatggctgaacaaatcgagaaagcttttctgaagcaaccaaaagtgtttctcagcacaaagaagactgggaagggaaagagacctggaaaaggtgggaaccgcttttggaagtccattgggcttggatttaagactcccagggaagccatcgaaggaacctatattgacaagaagtgccccttcactggcaatgtttccatccgtggccgtatcttggctggaacatgtcac

SEQ ID NO: 237896 - DNA, 330 bp, Glycine max
gacaaaacaagtgtttcgaatagattatcctaagtctttgggaatagtgctgcaatggcttcaggtcaggaggaggtgaaccttttgggagctactggaagcccatttgtgtgcagggttcatattgccctcaagttgaagggagttcaatacaaatatgtcgaagaaaatttgaggaacaagagtgaactgcttctcaaatccaacccagttcacaagaaggttccagtgtttattcacaatgagaagcccatagcagagtctcttgtgattgttgaatacattgatgagacatggaagaacaaccccatcttgccttctgatccttac

SEQ ID NO: 237897 - DNA, 309 bp, Glycine max
ggttcactttcttccaacctctaacctacctctttttcttctctctcaacaacttcaacttcttcctcctcgattaagttccaatttaaaggcaaattacaagattaacctaaccgcaaaaccgccttcaattggaatccctgaaaagggtattcttcctgccgataattcaacagggacaattggcaaccttttggccagcatcattgtaaaaacaattgaatccaacaggcaagctcttagggagctgcttttcattgctcctgatgttcttcaatatctcattggtgtcatcctctttaaggaaac

SEQ ID NO: 237898 - DNA, 481 bp, Glycine max
tcaagccgacctctacgcgactaagtaccggtcaggaattcccgggtcgacccacgcgtcagacggctgcgagagacgacagaagggtacggctgcgagaagacgacagaagggggttttaatcctctgttacctctcagcagcttaggctagggttcagaaacgaaaaagggttcggtgttcagttcgcgatgagagccaagtggaagaagaagcgtatgaggaggttgaagaggaagcgccgaaagatgagacagagatccaagtagtgcgttaatccaagtagttgatttccattaaatataattatatttagatactttttacaaaaaatagttacgggaaaaaggatacaaagcggccgctctataggatccaagcttacgtacgcgtgcatgcgacgtcatagctcttctatagtgtcacctaaattcaattcaatggccgtcgttttacaaagttctttacggggaaaaacccg

SEQ ID NO: 237899 - DNA, 331 bp, Glycine max
agacgacagaagggggccattgttgttgctattatcatccgcagctgcttttattcgcaccgcaaacagtgagccatggccgtcggaaagaacaagcgcatctccaaggggaagaagggtgggaagaagaaggcagctgatccctttgccaagaaggattggtatgacattaaggctccttctgtttttcaagtgagaaatgttggcaaaaccctcgtctctcgtactcagggtaccaagattgcttctgaaggactcaagcatagagtgtttgaggtctccttggctgatcttcaaggggatgaggatcatgcattcaagaagattaggt

SEQ ID NO: 237900 - DNA, 307 bp, Glycine max
  unsure (1)..(307): unsure at all n locations
gaccacattccacagcacanacacatacattgtggtagcacttttgtctcggaatttgttcttttgagttatggcaagcttaaaggttgcatgtgtggttttgatgtgcatggctgtgatgagtgcaccaatgatggtacaagccgtgtcatgcaatgatgtgtctgtgaacctagcaccgtgccgatcttacctgatgcagggtggagatgtgccagaatcgtgctgtagcagagtgaggaacattctgggttctgccagcaacacctttgacaaacaaaccgtgtgcaaatgtcttcagcaagct

SEQ ID NO: 237901 - DNA, 312 bp, Glycine max
ggaggagagaggagaagagaagctaaagaaagaaaggagatgggagtggagaagcagttgttgaggtctggcaccggtccgaagccaattcccggtcagaacgtaaccgttcactgcactggtttcgggaagaacggtgacctttctcagaaattctggagcacaaaggatcctggccagaacccattcactttcaaaatcggccaaggttctgttatcaaaggatgggatgaaggtgtgcttggcatgcaaattggtgaagttgctcgtctccggtgctctccggattatgcttatggtgctggtggcttt

SEQ ID NO: 237902 - DNA, 333 bp, Glycine max
gattctcatttcaatttgcatttgcatttcatttggcgttttgtttctttctggaagcttcacttcggcatccatggcgtcgttcgaagaagctcctcccggaaactccaagaacggcgagaagatcttcaagaccaagtgcgctcagtgccacaccgtggacaaaggtgccggtcacaaacaaggacccaatctgaatggtttgtttggaaggcaatctggcacaactcctggatattcctattctactgctaacaaaaacatggctgtgatttggggggaaaagaccttgtatgattacttgctcaaccccaaaaagtttagtccagggac

SEQ ID NO: 237903 - DNA, 306 bp, Glycine max
ggcacaagtgagtttgttgatcgagataactagaaacagtgtgatgaaaatgaaggtccttgttttcttcgttgctacaattttggtagcatggcaatgccatgcgtacgatatgttccctctccgaatgaacactggctatggtgcccgtactccggaggtgaaatgcgcaagttggacgcttgctgtggaagcacacaacatctttggctttgagaccattcctgaagagtgcgttgaagcaacaaaggaatacatccatggcgaacaatatagattagactccaaaacagtttaccaacaagc

SEQ ID NO: 237904 - DNA, 284 bp, Glycine max
gaccgtgcgctagttctgagtattctgatcgctccctgagagagctcgtcgcggcggttgcagaagaagattgcaagatgaagttcaacatcgcgaatcccaccactggatgccagaagaagctcgagatcgacgacgatctgaaactgcgagcattttgggacaagaggatctcacaggaggtcatcggagatgcactcggtgaggaatttaagggctatgtcttcaaaattaccggaggttgtgacaaacagggatttccaatgaagcacggagtgctgact

SEQ ID NO: 237905 - DNA, 378 bp, Glycine max; identical to SEQ ID NO: 235798

SEQ ID NO: 237906 - DNA, 375 bp, Glycine max
gaaggtgcaagagtttgttgtgagctataagctagtttatcgtgaggagaatatgaagttgtttgttttctttgttgctgcagtagttttggtagcatggccatgccatggcgcaggctaccaaaggttccctctccgaatgaaaactggctatggtgagcgttcttcggaggtaaaatgcgcaagttttaggcttgctgtggaagcacacaacatccgagcctttaaaaccattcctgaagagtgcgttgaaccaacaaaggactacatttatggcgaacaatttagatcagactctaaaacagttaaccaacaagctttcttttatgctagtgaacgcgaagtccatcacaacgacatatttatattcggcat

SEQ ID NO: 237907 - DNA, 299 bp, Glycine max
gaaggtgcaagagtttgttgtgagctataagctagtttatcgtgaggagaatatgaagttgtttgttttctttgttgctgcaatagttttggtagcatggccatgccatggcgcaggctaccaaaagttccctctccgaatgaaaactgggtatggtgagcgttcttcggaggtaaaatgcccaagttttaagcttgctgtggaagcacacaacatccgagcctttaaaaccattcctgaagaatgcgttgaaccaagaaaggactacattaatggggaacaatttagattagactcta

SEQ ID NO: 237908 - DNA, 275 bp, Glycine max
gaaggtgcaagagtttgttgtgagctataagctagtttatcgtgaggagaatatgaagttgtttgttttctttgttgctgcagtagttttggtagcatggccatgccatggcgcaggctaccaaaggttccctctccgaatgaaaactggctatggtgagcgttcttcggaggtaaaatgtgcaagttttaggcttgctgtggaagcagacaacatccgagcctttaaaaccattcctgaagagtgcgttgaaccaacaggggactacattaatg

SEQ ID NO: 237909 - DNA, 237 bp, Glycine max
gtcttccccgaactgttgtcccgcaacggggtcaagtttggacaagctgtgtggttcaaggccgggtcccacatcttcagcgacggtgagctggaccacatgggcaacgcaagccttgtccatgcccagagcatcctcgccatctgggccacccaggttatcctaatgagtcctgttgagggttatcgtatggctgggtgggcccctcggtgaggtcactgggccattctaccctgg

SEQ ID NO: 237910 - DNA, 314 bp, Glycine max
ggcacaagtgagtttgttgatcgagataactagaaacagtgtgatgaaaatgaaggtccttgttttcttcgttgctacaattttggtagcatggcaatgccatgcgtacgatatgttccctctccgaatgaacactggctatggtgcccgtactccggaggtgaaatgcgcaagttggaggcttgctgtggaagcacacaacatctttggctttgagaccattcctgaagagtgcgttgaagcaacaaaggaatacatccatggcgaacaatagagatcagactccaaaacagttaagcaacaagcttactttt

SEQ ID NO: 237911 - DNA, 333 bp, Glycine max
gagtgcacaagtgcagtttgttgatcgagataactagaaacagtgtgatgaaaatgaaggtccttgttttcttcgttgctacaattttggtagcatggcaatgccatgcgtacgatatgttccctctccgaatgaacactggctatggtgcccgtactccggacgtgaaatgcgcaagttggaggcttgctgtggaagcacacaacatctttggctttgagagcattcctgaagagtgcgttgaagcaacaaaggaatacatccatggcgaacaatatagatcagactccaaaacagttaaccagcaagcttacctttatgccagagacctcg

SEQ ID NO: 237912 - DNA, 359 bp, Glycine max
  unsure (1)..(359): unsure at all n locations
ggcacaagtgagtttgttgatcgagataactagaaacagtgtgatgaaaatgaaggtccttgttttcttcgttgctacaattttggtagcatggcaatgccatgcgtacgatatgttccctctccgaatgaacactggctatggtgcccgtactccggaggtgaaatgcgcaagttggaggcttgctgtggaagcacacaacatctttggctttgagaccattcctgaagagtgcgttgaagcaacaaaggaatacatccatggcgaacaatatagatcagactccaaaacagttaaccaacaagcttacttttatgccagagacctcgaagtccatcncaaggacacatttgtgttca

SEQ ID NO: 237913 - DNA, 378 bp, Glycine max; identical to SEQ ID NO: 236535

SEQ ID NO: 237914 - DNA, 358 bp, Glycine max; identical to SEQ ID NO: 234733

SEQ ID NO: 237915 - DNA, 366 bp, Glycine max
gatagcaaaatcgtttctccaatttaatcaccattgtacaacccaattcccttcgtcgttttcgattaagagagcaatggcacgtaccaagcaaaccgctcgcaagtccaccggaggaaaggctccgaggaagcaattggcaaccaaagccgctcgcaagtcagccccggcgaccggcggagtgaagaagccccaccgcttcaggccaggaacggtggctctgagggagattcgaaagtaccagaagagcaccgaacttctgatccgaaaactcccattccagaggctcgtcagagaaatcgctcaagatttcaaaaccgatctccgctttcagagcagcgccgtttcggctcttcaggaagccgc

SEQ ID NO: 237916 - DNA, 374 bp, Glycine max
ggaaacagagagtgatttcagtgagtgatcggtgttcacttgatctcatcataatcgtcagcgtcaattgaagaagatgccgatcagaaacatcgccgtcggaaggcctgaagaggcgactcaccccgacacgttgaaggcggctttggctgagttcatctcaaccttcatcttcgtgttcgccggctcaggctccggcatcgcctacaacaagctcaccgacaacggcgctgccacccctgccggcctcatctccgcctccatcgcccatgcattcgccctcttcgtcgccgtctccgtcggcgccaacatctccggcggccacgtcaaccccgccgtcaacctcggcgccttcgtcggcggcaacatcacct

SEQ ID NO: 237917 - DNA, 353 bp, Glycine max
gacaagtgagtttgttgatcgagataactagaaacagtgtgatgaaaatgaaggtccttgttttcttcgttgctacaattttggtagcatggcaatgcaatgcgtacgaaatgttccctctccgaatgaacactggctatggtgcccgtactccggaggtgaaatgcgcaagttggaggcttgctgtggaagcacacaacatctttggctttgagaccattcctgaaaattgcgttgaagcaccaaaggattacatccatggcgaccaatatagtatagactccaaaaaagttaaccaacaagcttacttttatgccagagacctcgaattccatcacagggacacatttgtg

SEQ ID NO: 237918 - DNA, 371 bp, Glycine max
ggctccccaaaaaggaaagaagcagattctgtcctttgaaatcaacaagaaaagatgtcaggtgaagaggtagctgttgcagttgaggtacctgctacttcaattccaggtgagccaatggacatcatgactgctctacagcttgtgctgagaaaatctctggcctatggtggtcttgcacgaggtcttcatgaaggtgccaaggtgatcgagaagcatgctgcacagctctgtgttctagcagaagattgtgaccaacctgattatgtgaaactggtgaaggctctttgtgcagagcacaatgttagtcttttgacagttccaagtgcaaagacccttggagaatgggctggtttgtgtaagattgattc

SEQ ID NO: 237919 - DNA, 262 bp, Glycine max
ggcacaattgattttgttgatcaaaatacctagaaccattgtgatgaaaatgaaggcccttgtttccttcgttgcaacaattttggtagcatggaaatgccatgcgtacaaaaggttccctctccgaatgaacactggcaatggtgcccgtaccccggaggtgaaatgcccaatttggaggcttgctgtggaagcaaacaaaatctttggctttgaaaccattcctgaaaattgctttgaaccaacaaaggaatacatccat

SEQ ID NO: 237920 - DNA, 405 bp, Glycine max
ggcacaagtgagtttgttgatcgagataactagaaacagtgtgatgaaaatgaaggtccttgttttcttcgttgctacaattttggtagcatggcaatgccatgcgtacgatatgttccctctccgaatgaacactggctatggtgcccgtactccggaggtgaaatgcgcaagttggaggcttgctgtggaagcacacaacatctttggctttgagaccattcctgaagagtgcgttggagcaacaaaggaatacatccatggcgaacaatatagatcagactccaaaacagttaaccaacaagcttacttttatgccagagacctcgaagtccatcccaaggacacatttgtgttcagtatagatggcaccgtactctctaatattccatactacaaaaaaca

SEQ ID NO: 237921 - DNA, 395 bp, Glycine max; identical to SEQ ID NO: 234808

SEQ ID NO: 237922 - DNA, 355 bp, Glycine max
ggcgaaacagagagtgatttcagtgagtgatcggtgttcacttgatctcatcataatcgtcagcgtcaattgaagaagatgccgatcagaaacatcgccgtcggaaggcctgaagaggcgactcaccccgacacgttgaaggcggctttggctgagttcatctcaaccttcatcttcgtgttcgccggctcaggctccggcatcgcctacaacaagctcaccgacaacggcgctgccacccctgccggcctcatctccgcctccatcgcccatgcattcgccctcttcgtcgccgtctccgtcggcgccaacatctccggcggccacgtcaaccccgccgtcaccttcggcgcct

SEQ ID NO: 237923 - DNA, 380 bp, Glycine max; identical to SEQ ID NO: 235270

SEQ ID NO: 237924 - DNA, 350 bp, Glycine max
gaattctttgtgtaggtgctaaatccctagtaagccgccatggtgaagtactcaagggagcctgacaatccaaccaagtcttgcaaggctagaggcgccgaccttagggttcattttaagaacactagggaaactgcctttgcaatcaggaagttgcccttggttaaagctaaaaggtacttggaagatgttcttgcgcacaagcaggccattccgttcagacgtttctgtcgtggtgttgggaggacagctcaagcaaagaatagacactctaatggccaaggaaggtggcctgtcaagtcagcaaaattcatccttgatttgctcaaaaatgctgagagcaatgctga

SEQ ID NO: 237925 - DNA, 394 bp, Glycine max
gggcgtgtccggaaattttctgaatccctaaattttctcctcctgccagggcgcgtatcgacgacgatgctctcctccaaacccccgcgccggaaagtggttccggcgaacggcgatgactccgccgacaaactcgaccagctccttctctcctccgccatttgcaacaacgaggacctaggtccgttcatccgcaagaccttcgcctccggcaagccggagaccctccaccaccaccttcgccacttcgcgaggtcgaaagagtcggagatcgaagaggtgtgcaaggctcactaccaggacttcatcctcgccgtcgacgacctccgatctctcctctccgacgtcgattcgctcaagtcctccctctccgactccaactcgcgcctccaac

SEQ ID NO: 237926 - DNA, 364 bp, Glycine max
ggtgcacacgtgagtttgttgatcgagataactagaaatagtgtgatgaaattgaacgtccttgtgttcttcgttgctacaattttggtatcatggcgatgccatgcatacgatatgttccctctccgaatgaagactggctatggtgcccgtactccggaggtgaaatgcgcaagttggaggcttgctgtggaatcagacaacatctttggctttgagaccattcctgaagagtgcgttgaagcagcaaatgaatacatccatggcggaataatatggatcagactcgacaacagttaacctgcatgcttacttttaggccagagacctcgaagtccatcccaacgacacatttgtgttcagt

SEQ ID NO: 237927 - DNA, 383 bp, Glycine max
ggtagttccaccgagtagcaacaatgtcgaagcgaggtcgcggaggatcggcgggaaacaagttccgcatgtcgctgggtctgccggtggcggcgacggtgaactgcgccgacaacaccggcgcgaagaacctctacatcatatcagtgaaggggatcaagggtaggctgaaccggttgccgtcagcttgcgtcggagacatggttatggccaccgtcaagaagggaaagcccgatctccgtaagaaggtgctgcccgccgtcatcgtccgccagcgcaagccttggcgccgaaaggacggtgtttacatgtacttcgaagataatgctggtgttatcgtgaatcccaagggtgaaatgaaaggttctgctatcactggtcca

SEQ ID NO: 237928 - DNA, 398 bp, Glycine max
gaaggtgcaagagtttgttgtgagctataagctagtttatcgtgaggagaatatgaagttgtttgttttctttgttgctgcagtagtcttggtagcatggccatgccatggcgcaggctaccaaaggttccctctccgaatgaaaactggctatggtgagcgttcttcggaggtaaaatgcgcaagttttaggcttgctgtggaagcacacaacatccgagcctttaaaaccattcctgaagagtgcgttgaaccaacaaaggactacattaatggcgaacaatttagattagactctaaaacagttaaccaacaagctttcttttatgctagtgaacgcgaagtccatcacaacgacatatttatattcggcatagataacaccgtactctctaata

SEQ ID NO: 237929 - DNA, 405 bp, Glycine max
gagcaacatcatcatcgtcatctacaactagtaacaaagatccaacaagcagatcaatctctctctctgtctcccaatcaaaacagacatgggtttgaaggaggattttgagcagtatgctgagaaagcaaagactttgccaccgactcaatcaaacgaagacttgcttatcctttatggattgtacaagcaggccaccgttggacctgtcaacaccagccgtccgggaatgttcaacatgagggacagagctaaatgggatgcatggaaggctgttgaagggaaatccaaggacgaagcaatgagtgattacatcactaaggtgaaacagctgctggaagcagccggcatgcctgcttgataacattgtcatgccttgctttcttattctgtgctagaagttcc

SEQ ID NO: 237930 - DNA, 402 bp, Glycine max; identical to SEQ ID NO: 234890

SEQ ID NO: 237931 - DNA, 404 bp, Glycine max
ggttcactttcttccaacctctaacctacctctttttcttctctctcaacaacttcaccttcttcctcctcgatcatgtctcacttcaagggcaagtaccatgatgagcttatcgccaatgctgcgtacattggcactcctggaaagggtattcttgctgctgatgagtcaacagggacaattggcaagcgtttggccagcatcagtgtagagaacattgaatccaacaggcgagctcttagggagctgcttttcactgctcctggtgttcttcaatatctcagtggtgtcatcctctttgaggaaaccctctaccagagcacagctgcaggcaagccctttgtgaatgtcttgaacgaagctggtgtgcttcctggcatcaaggttgacaagggcacagtcga

SEQ ID NO: 237932 - DNA, 328 bp, Glycine max
ggcacaagtgagtttgttgatcgagataactagaaacagtgtgatgaaaatgaaggtccttgttttcttcgttgctacaattttggtagcatggcaatgccatgcgtacgatatgttccctctccgaatgaacactggctatggtgcccgtactccggaggtgaaatgcgcaagttggaagcttgctgtggaagcacacaacatctttggctttgagaccattcctgaagagtgcgttgaagcaacaaaggaatacatccatggcgaacaatatagatcagactccaaaacagttaaccaacaagcttacttttatgccagagacctc

SEQ ID NO: 237933 - DNA, 374 bp, Glycine max
aggggaaatgggaaaggaagaagcattgaatgtgtttggtggaagatgagtgaattggtgtacatgatcactacggcgaaagagtgggaggagttgcagagcaatggatccagtttcggtggggaccttgacaagtcatctgctttcatccatctcagcaagctcgaccatgttcggtcaacactggagaactttttcctgaacagcaacgaggaactctacctgcttcaaattgatgctaaaaagctacgtgatggtttggtgtatgaaattgtggatggtaaaaatagcttccctcatttctatgggccatctcgaagctttgttcctctcactcttgatgcagtgataaaagcagataaactaacactcac

SEQ ID NO: 237934 - DNA, 369 bp, Glycine max
gaaagtgcacaagtgagtttgttgatcgagataactagaaacagtgtgatgaaaatgaaggtccttgttttcttcgttgctacaattttggtagcatggcaatgccatgcgtacgatatgttccctctccgaatgaacactggctatggtgcccgtactccggaggtgaaatgcgcaagttggaggcttgctgtggaagcacacaacatctttggctttgagaccattcctgaagagtgcgttgaagcaacaaaggaatacatccatggcgaacaatatagatcagactccaaaacagttaaccaacaagcttacttttatgccagagacctcgaagtccatcccaaggacacatttgtgttcagtata

SEQ ID NO: 237935 - DNA, 381 bp, Glycine max
gaaggtgcaagagtttgttgtgagctataagctagtttatcgtgaggagaatatgaagttgtttgttttctttgttgctgcagtagttttggtagcatggccatgccatggcgcaggctaccaaaggttccctctccgaatgaaaactggctatggtgagcgttcttcggaggtaaaatgcgcaagttttaggcttgctgtggaagcacacaacatccgagcctttaaaaccattcctgaagagtgcgttgaaccaacaaaggactacattaatggcgaacaatttagatcagactctaaaacagttaaccaacaagctttcttttatgctagtgaacgcgaagtacatcacaacgacatatttatattcggcatagataa

SEQ ID NO: 237936 - DNA, 334 bp, Glycine max
tgatcttcaacgacacagagggaggaacatttgcatacatctgacttacgattcaggaactgcgtattggtgacatgtagggatggacatcgcaatagaccgtacaaatgattcaggtcgtctatcatgtgggtgaacttgatcgaaccatcaacttttacacaaagtggtaaggaattctgcattatgagcggtgagagttcacaaacgacatatatagcaacgcttaactgtggctctgccctagattaatcccatttagttgtagacttaacatataattatggagctacctctcaagacgttggctattgctattgcccattagctcatg

SEQ ID NO: 237937 - DNA, 395 bp, Glycine max
cggcacaagtttgttgagatagctagaagcaataagatgaaaatgaaagtgcttggtttgtttgttgctacagttttggtagcatatgaatgccatggctcagactaccagaagttccctctccaaatgaaaactgggtttggtgggcaatacagcaatgaggtggcatgtgccagttggaggcttggcgtggaagcaaacaacgtagtcaagtggcaaactgttcctgcagcttgcggagagtacatagctgactacgttctaggaaaacaatatagatcagattcgaaaacagttaaccaacaagcctatttctatgccaaatccctcagactcaccaacaaagatgtccttgtcctggacgttgacgacactactctctctaatctccagta

SEQ ID NO: 237938 - DNA, 394 bp, Glycine max; identical to SEQ ID NO: 235067

SEQ ID NO: 237939 - DNA, 409 bp, Glycine max
gggaaaagtgaatttgttgattgaaataactaaaaacaattttattaaaattaaaggccttggtttcctccgtggcaaaaattttggaccaatgaatgcatgcgtacgatatgttccctctccgaatgaacactggctatggtgcccgtactccggaggtgaaatgcgcaagttggaggcttgctgtggaagcacacaacatctttggctttgagaccattcctgaagagtgcgttgaagcaacaaaggaatacatccatggcgaacaatatagatcagactccaaaacagttaaccaacaagcttacttttatgccagagacctcgaagtcaatcccaaggacacatttgtgttcagtatagatggcaccgtactctctaatattccatactacaaaaaacatggata

SEQ ID NO: 237940 - DNA, 349 bp, Glycine max
gaggcgtaaacatccatcgaatccaaataataccaaaaaacaccatgatgcttggggagacccaccgcccaaatccaaccgtacacgtgccaccgtgggcgccggagatcttctcaccatacaccggcaatgccgattactctccgtactccatgcaagaagcacttagtgcacttcagcactacgaatccaccgatgctgagtcagactcggaggttccgtctcgggaaccggaagtcccggtggacgcttactcctgcgaccatttccgcatgttcgagttcaaggttcggagatgcgcacgttgcaggtcgcatgactggaccgactgtccgtacgcccaccccgg

SEQ ID NO: 237941 - DNA, 412 bp, Glycine max
ggcacaagtttgttgagatagctagaagcaataagatgaaaatgaaagtgcttgttttgtttgttgctacagttttggtagcatatgaatgccatggctcagactaccagaagttccctctccaaatgaaaactgggtttggtgggcaatacagcaatgaggtggcatgtgccagttggaggcttggcgtggaagcaaacaacgtagtcaagtggcaaactgttcctgcagcttgcggagagtacatagctgactacgttctaggagaccaatatagatcagattccaaaacagttaaccaacaagcttaattccatgctaaatccctcaaactcaccaacaaagatgtctttgtcttggacgttgacgacactactctctctaatctcaagtattttgctaaccatggatt

SEQ ID NO: 237942 - DNA, 368 bp, Glycine max
gagagccggcttcttcctctgcgcaggaattaggaatattcgacaggtagagtttcttcaatggctcctaaagttgataagaagaatgatccaaaggcccaggccttgaagactgctaaggcagttaagtcaggtgctacctttaagaagaaggtaaagaagatccgaacttctgtcactttccacaggccgaagaccttgaagaaggacaggaaccccaagtaccctcgcattagcgccccgccgaggaacaagcttgatcattatcagatcctgaaataccccctcaccactgagtctgccatgaagaagattgaggacaacaacactttggttttcattgtcgacctgcgtgccgacaagaagaa

SEQ ID NO: 237943 - DNA, 401 bp, Glycine max
ggtagttctaacttctaagcccttgcccagtgctcatcgaggcttaaaccctttcggcggcagcgaaaaaagtctccccgcccccaaacccaaacaatgaggaagaaaaaacaagggttcagaagacccgttgtcataaaaaagccgaagcaaccgcaagagcaacccagcgttgatcctattacgggaaagaaaatccccaaaagtttcgtgttttcgcgaggcaagttgccggctcctctcaaacagcttcagatggacctcagaaagttgatgcttccatacactgctctcagccttagggaaaagaaacggaataatctgagggactttctgaatgttgctggacctatgggtgtcacgcatttcttcatattgtcaaaaactgctacttcatctta

SEQ ID NO: 237944 - DNA, 382 bp, Glycine max
  unsure (1)..(382): unsure at all n locations
ggcacaagtttgttgagatagctagaagcaataagatgaaaatgaaagtgcttgttttgtttgttgctacagttttggtagcatatgaatgccatggctcagactaccagaagttccctctccaaatgaaaactgggtttggtgggcaatacagcaatgaggtggcatgtgccagttggaggcttggcgtggaagcaaacaagtagtcaagtggcaaactgttcctgcagcttgcggagagtacatagctgactacgttctangagaccaatatagatcagattccaaaacagttaaccaacaagcttatttctatgctaaatccctcaaactcaccaacaaagatgtctttgtcttggacgttgacgacactactctctct

SEQ ID NO: 237945 - DNA, 298 bp, Glycine max
gattttactgatatcctgagcttctattgagctcactcaactcgtacaacgaaaccctcttcaacttgtactatcagtgacgagcatcattgtctcaacagcaatgttagtggtggctatgtgtgtgcttccggcgatgggtgtggacagtcgcctagcatggaaccctttttgcgttaatggtcatatctactgtgacacttgccgtgctggttttgagaccacatctaccagctacattgctggtgctgagattattttgcaatgcaagaacagggttagcaactaagttgtgtac

SEQ ID NO: 237946 - DNA, 361 bp, Glycine max
gaaggtgcaagagtttgttgtgagctataagctagtttatcgtgaggagaatatgaagttgtttgttttctttgttgctgcagtagttttggtagcatggccatgccatggcgcaggctaccaaaggttccctctccgaatgaaagctggctatggtgagcgttcttcggaggtaaaatgcgcaagttttaggcttgctgtggaagcacacaacatccgagcctttaaaaccattcctgaagagtgcgttgaaccaacaaaggactacattaatggcgaacaatttagattagactctaaaacagttaaccaacaagctttcttttatgctagtgaacgcgaagtccatcacaacgacata

SEQ ID NO: 237947 - DNA, 358 bp, Glycine max; identical to SEQ ID NO: 234733

SEQ ID NO: 237948 - DNA, 399 bp, Glycine max
  unsure (1)..(399): unsure at all n locations
aaaaaagggtacggtggcaaagacgaaagaaagggaacacatttcagaacaaanacacatacattgtagtatcacttttgtctcggaatttgttcttttgagttatggcaagcttaaaggttgcatgtgtggttttgatgtgcatggctgtgatgagtgcaccaatgatggtgcaagccgtgtcatgcaatgatgtttctgtgaacctagcaccgtgcctatcttacctgatgcaaggtggagatgttccagaatcgtgctgtagcggagtgaggaacattctgggttctgccagcaccacctttgacaaacaaaccgtgtgcaaatgtcntcagcaagctgctaataactatggcatcaacgacgaatacgctcaagcactccccgcccgctgcaatg

SEQ ID NO: 237949 - DNA, 408 bp, Glycine max
ggggtgcacaagtgagtttgttgatcgagataactagaaacagtgtgatgaaaatgaaggtccttgttttcttcgttgctacaattttggtagcatggcaatgccatgcgtacgatatgttccctctccgaatgaacactggctatggtgcccgtactccggaggtgaaatgcgcaagttggaggcttgctgtggaagcacacaacatctttggctttgagaacattcctgaagagtgcgttgaagcaacaaaggaatacatccatggcgaacaatatagattagactccaaaacagttaaccaacaagcttacttttatgccagagacctcgaagtccatcccaaggacacatttgtgttcagtatagatggcaccgtactctctaatattccatactaccaaaaac

SEQ ID NO: 237950 - DNA, 355 bp, Glycine max
atttgttttgtttttctttgttgctgcagtagttttggtagcatggccatgccatggcgcatgctaccaaaggttccctctccgaatgaaaactggctatggtgagcgttcttcggaggtaaaatgcgcaagttttaggcttgctgtggaagcacacaacatccgagcctttaaaaccattcctgaagagtgcgttgaaccaacaaaggactacattaatggcgaacatttagattagactctaaaacagtttaacaacaagctttcttttatgctagtgaacgcgaagtcaatcacaacgacatatttatattcggcatagataacaccgtactctctaatattccatactatg

SEQ ID NO: 237951 - DNA, 397 bp, Glycine max
ggcacaagtgagtttgttgatcgagataactagaaacagtgtgatgaaaatgaaggtccttgttttcttcgttgctacaattttggtagcatggcaatgccatgcgtacgatatgttccctctccgaatgaacactggctatggtgcccgtactccggaggtgaaatgcgcaagttggaggcttgctgtggaagcacacaacatctttggctttgagaccattcctgaagagtgcgttgaagcaacaaaggaatacatccatggcgaacaatatagattagactccaaaacagttaaccaacaagcttacttttatgccagagacctcgaagtccatcccaaggacacatttgtgttcagtatagatggcaccgtactctctaatattccatactac

SEQ ID NO: 237952 - DNA, 408 bp, Glycine max
  unsure (1)..(408): unsure at all n locations
gacacacagctattcctcttaagcttgctactgagtttccacactgcataccttaggtcttccgaattcgaagttaatttgcaagatggctaaggaaaaggctcagatcaacattgtggtggttggtcatgtggaccctgaggaggcaaccaccattaacgagctgaagaagcctgttgtggagaaagaagctccagggcatgccatatgagggcatgcacgtacggcctcggaggggaaccagaaaattatgttaacaaaataatctggaaccctaatgtatcagtgtcatcatcagtgtgtagtttaagctagctttgctatggttacgttctttgagatgagagtcttgatgaacagtaccattctgatgtattgctttccttganagttaatgcatgctcctta

SEQ ID NO: 237953 - DNA, 381 bp, Glycine max
gaacctgatcgatctctttaccagttgccacactacaccgagattccccctaaacccgtttgcgttgttgtttgcgaagaaatggcgactaagaggagcgtgggaacgttgaaggagggtgatttgaaagggaagagggtgttcgtgagggtcgatctgaacgtgcctttggatgacaaccttaacatcaccgatgacactagagtccgtgctgctgttcccaccatcaagtacttaactggtcatggagccaaagtgatcctttctagccacttgggacgtcctaaaggtgtaacacctaaatacagtttgaagcctcttgtgccaaggctgtctcaacttctcggaattgaggttacgatggcaaatgactctattggg

SEQ ID NO: 237954 - DNA, 383 bp, Glycine max
  unsure (1)..(383): unsure at all n locations
gagggcgaggaagccacatagagacacaatacagagtgagttgttgctccttcgccacaactctctgccaacatgggtatctccagagattctatgcacaagaggcgtgccactggtggcaagaagaaggcctggaggaaaaagagaaagtatgagcttggtcgccagcctgctaacactaagctgtcaagcaacaagacagtcaggaggatccgtgttagaggtggaaatgtgaaatggagggcattgagattggatactggaaattactcctgnggaagtgaagctgtaactcgcaagactcgtgtactagatgtggtttacaatgcctcanacaatgagcttgtgcgtactcagactcttgtcaaaagtgctatcgttca

SEQ ID NO: 237955 - DNA, 385 bp, Glycine max
  unsure (1)..(385): unsure at all n locations
gccttcagaggaggattcatattggaaaaaatcatgggtccaatctcaagcgggcatttggagctccgaacccgcgacccgaacgacaacccatcagtgaccttcaactacttccaggaccctcgagacttgcagcgatgcgtgcagggcctgagcaccgtggagaagataatcgagtccaaagctttctctcccttcagataccccaacatgccagtgcccgttctgctcaacctgaccgcaagtgcccccgttaacttgttgcccaagcacaccagttcttcactttctttggaacagtattgcagagacactgtcatgaccatttggcactaccacggtggctgccaagtagggaacgttcttgatanggactacaagcttc

SEQ ID NO: 237956 - DNA, 367 bp, Glycine max; identical to SEQ ID NO: 235109

SEQ ID NO: 237957 - DNA, 358 bp, Glycine max; identical to SEQ ID NO: 235712

SEQ ID NO: 237958 - DNA, 408 bp, Glycine max
aggggcaaaagtgagtttgttgatcgagataactagaaacagtgtgatgaaaatgaaggtccttgttttcttcgttgctacaattttggtagcatggcaatgccatgcgtacgatatgttccctctccgaatgaacactggctatggtgcccgtactccggaggtgaaatgcgcaagttggaggcttgctgtggaagcacacaacatctttggctttgagaccattcctgaagagtgcgttgaagcaacaaaggaatacatccatggcgaacaatatagattagactccaaaacagttaaccaacaagcttacttttatgccagagacctcgaagtccatcccaaggacacatttgtgttcagtatagatggcaccgtactctctaatattccatactacaaaaaaca

SEQ ID NO: 237959 - DNA, 370 bp, Glycine max
ggtggtagtttggcagcgacacgtatcttcatcaataatcgcagaagcagtttccggtgcatctcatcgtcttccaaaatgaacgacgcagatgtctcgaagcaaatccagcagatggtgcgtttcatccgccaggaagctgaggagaaagccaacgagatctctgtatctgccgaagaggaattcaatatcgagaagctgcagttggttgaagccgaaaagaagaagatcaggcaagaatacgaacgcaaagagcgccaagtcgaaattcgcaagaagattgagtactcaatgcagctgaatgcttctcggattaaagttcttcaagctcaagatgacgtgatcagttccatgaaagaagctgcatcca

SEQ ID NO: 237960 - DNA, 277 bp, Glycine max
  unsure (1)..(277): unsure at all n locations
acataaaattcctctgagaatgcattaccaagcagcggcggcggcgtggtgggggagctacgtggcggcccctcggaacgcggcgggcgcggtagtgggggacccgctggagcgcatagagaggctggcgtcngaaagcgcggtggtgatattcagcgtgagcacgtgctgcatgtgccacgccgtcaagaggctcctctgcggcatgggtgtgaacccaaacgtgcacgagctggacgaggatccaagaggcacaggactcgaacgcgccctcatg

SEQ ID NO: 237961 - DNA, 375 bp, Glycine max
gcagtgcagcatcgtagagaaataagggaaaaatggtgtcgctgaaactgcagaagcgcctctccgcaagcgtgctcaagtgcggcagaggaaaggtttggcttgaccccaatgaagtcaacgaaatctccatggccaattctcggcaaaacatcaggaagttggttaaggatgggtttatcatcaggaagccaaccaagattcactcccgctcacgtgctcgtaggatgaaggaggcaaagaggaagggccgccactccggttatggtaaacgtaagggtacaagggaggcaaggcttcccaccaagatactctggatgagaaggatgcgtgtgctcagacggttgcttcgtaagtacaaggaatccaagaaaa

SEQ ID NO: 237962 - DNA, 407 bp, Glycine max
gggggggttgcattgcagtatcatcagaatcagagttgagttgaccccttcattccattaactatcactcttaacaatgcaagcagcaattgcagccatggccgcccacactattctcttttcttccttcccagctcctcaatccattgcccttcccgccactaccaagaaagccgttgcaatcctcaagggcaattcctccgtccatggccttgtcactctaacccaacaacaagacaacggcccaacaactgttactgttcgtgtttctggtcttactcctgggcctcatggttttcatctccatgagtttggtgatataacaaatgggtgcatatcaactgggccacatttcaatcctaataaactcaaacatggtgctccggaggataaaattcgccatgcgg

SEQ ID NO: 237963 - DNA, 399 bp, Glycine max
ggggcattcgccgtaaacagaagagagagagagagagagagagagtcctgaaacttgggtgcgattccttcactcacaacaacaacacatcactatggctcttctgagtcgagcctcttcacgcttccctcagctggtttcccctcaaagggtagtttcactccacacaacgctcccatctctgaacgcatccccatccacagccacgcctacaccatatgccccgccaccgcctcaagtccgcttcctctcccgccggcgtttcgaaggcggcggagttcgtgatctcgaaggtggacgatctgatgaactgggcccgccgcggctccatctggcccatgaccttcggcctcgcctgctgcgccgtcgaaatgatgcacaccggcgccgcccgctacg

SEQ ID NO: 237964 - DNA, 164 bp, Glycine max
gagtcaagtacttgggcccattctctggcgagcccccgtcctacctaaccggtgagttcccaggcgactacggctgggacactgctgggctttccgcagacccagaaaccttcgccaagaaccgtgaactcgaagtgattcactccaggtgggccatgctcgga

SEQ ID NO: 237965 - DNA, 371 bp, Glycine max
  unsure (1)..(371): unsure at all n locations
ggagcaaaaccctaatccctatttttcttcctcagtagtgtcatttacgcttctcttctctgcagcaactatgcctaaccctaaggtcttcttcgacatgaccatcggcggtcaatctgctggccgcatcgtgatggagctctacgccgacgtcactccccgcaccgccgagaacttccgcgcgctttgcaccggcgagaagggcgtanggcggagcggcaagcccctccactacaagggctcgtccttccaccgcgtgatcccgagtttcatgtgtcagggtggcgacttcaccgccggaaacggaaccggcggcgagtcgatttatggcgccaagttcgccgacgagaacttcgtgaagaagcacaccg

SEQ ID NO: 237966 - DNA, 401 bp, Glycine max
gatgcacaagtttgtttagaaaactagaagcaataagattaaaatgaaaatgcttgttttgtttgttgctacagttttggtagcatatgaatgccatggctcagactaccagaagttccctctccaaatgaaaactgggtttggtgggcaatacagcaatgaggtggcatgtgccagttggaggcttggcgtggaagcaaacaacgtagtcaagtggcaaactgttcctgcagctttcggagagtacatagctgactacgttctaggagaccaatatagatcagattccaaaacagttaaccaacaagcttatttctatgctaaatccctcaaactcaccaacaaagatgtctttgtcttggacgttgacgacactactctctctaatctccagtattttg

SEQ ID NO: 237967 - DNA, 397 bp, Glycine max
ggcacaagtgagtttgttgatcgagataactagaaacagtgtgatgaaaatgaaggtccttgttttcttcgttgctacaattttggtagcatggcaatgccatgcgtacgatatgttccctctccgaatgaacactggctacggtgcccgtactccggaggtgaaatgcgcaagttggaggcttgctgtggaagcacacaacatctttggctttgagaccattcctgaagagtgcgttgaagcaacaaaggaatacatccatggcgaacaatatagattagactccaaaacagttaaccaacaagcttacttttatgccagagacctcgaagtccatcccaaggacacatttgtgttcagtatagatggcaccgtactctctaatattccatactac

SEQ ID NO: 237968 - DNA, 440 bp, Glycine max
  unsure (1)..(440): unsure at all n locations
aattccgggatcaccagcgtcagaagacacagaagggtcccctttttccggccaaaaaccaaaaagggtcctttaaaactccaaaggattcttcacttcatcctctcttccttcagctacccttgcaacacaaaagtangaagtacatattgactgcttcctgggttcacatacaatgacatcaagtttaaaacatggttggccctctgttgtgcgtcttcgtctccgagacaaatcagtgacacccttttgcatattctctaaagtgaaatcagctggcaacatacctgggaatacacctgtctatctcaatgtctatgacttgacaacagtaaatggctatatgtattgggcaagcattggtatttccactcaagggttgaagtttatggagtagaatatgcatttggagcccatgactatccaacaagtggtgtctt

SEQ ID NO: 237969 - DNA, 396 bp, Glycine max
ggaaatggaaatggagaggagaaggcgaggttgatgattgtgatggcggaagcagagacaaacaggaatggcagtggcatcctccttcatcatcatcatcgtcgtcatcatcgctctcatcttcttctccctaaaccctcctcctgcaccatcacgtaggtcacttctcctcaccacttcatcgtcttgctccaacgaatccaatggtcttctcaactaccactgcatcttcccccaaacttcctctttctcaatcccctccctctcgctcttcctcctcctcaacttctacatcctcatcaccaccgcgcagcaccacttctccctcgtcaccacaaagctcgcctcgcacctcaacctctcccccagcatggccgccgtcacgctcctctccct

SEQ ID NO: 237970 - DNA, 365 bp, Glycine max
  unsure (1)..(365): unsure at all n locations
gaccacattccaaaacacaaacacatacattgtagtatcacttttgtctcggaatttgttcttttgagttatggcaagcttaaaggttgcatgtgtggttttgatgtgcatggctgtgatgagtgcaccaatgatggtgcaagccgtgtcatgcaatgatgtttctgtgaacctagcaccgtgcctatcttacctgatgcagggtggagatgttccagaatcgtgctgtagcggagtgaggaacattctgggttctgccagcaccacctttgacaaacaaaccgtgtgcaaatgtcttcagcaagctgctaataactatgggatcaacgacgaatacgctcaagcactcncggcccgctgcaatg

SEQ ID NO: 237971 - DNA, 410 bp, Glycine max
gggcgcggcacacacagacacacacatttcgtcggaatgggaagggtgattcgcgcacagcgtaagggtgcggggtcggtgttcaagtcccacacccaccaccgcaagggtccggcgaggttccgcagcctcgacttcggcgagcgcaacggctacctcaaaggggtcgtcaccgatatcatccacgaccctggtcgcggtgctcctctagccaaggtggcgttccgccaccccttccgctacaagaagcagatggagctcttcgtcgccgccgagggcctctacaccggccagttcatctactgcggcaagaaggccaccctcgtcgtcggcaacgtcttgcccctccgatccatccccgaaggtgccgttatctgcaacgtcgagcaccacgttggcgaccgccgcgt

SEQ ID NO: 237972 - DNA, 406 bp, Glycine max
gacctacattttgataattttctttgtagttgatagccatggctacccgtggaaagcttgaggttgacattgatctcaagtccaacgcagacaagtactggcaaacccttaggaattctactgaaatattccctaaggccttcccacatgattacaaaagcattgaggttcttgagggtgatggcaagtctcctggttctaaccggcaaaataagttatggtgaaggttcaccacttgtgaaatcatcctttgagaagattgaggctgttgatgaggaaaagaaggtagtgtcgtacactatcattgatggggaactcctccagcactacaaaacattcaagggagacatttcagtgactccaattggcgatggatgcgaagtgaagtggagtgctgtgtacgaaa

SEQ ID NO: 237973 - DNA, 367 bp, Glycine max; identical to SEQ ID NO: 235843

SEQ ID NO: 237974 - DNA, 381 bp, Glycine max
  unsure (1)..(381): unsure at all n locations
ggcacaagtttgttgagatagctagaagcaataagatgaaaatgaaagtgcttgttttgtttgttgctacagttttggtagcatatgaatgccatggctcagactaccagaagttccctctccaaatgaaaactgggtttggtgggcaatacagcaatgaggtggcatgtgccagttggaggcttggcgtggaagcaaacaacgtagtcaagtggcaaactgttcctgcagcttgcggagagtacatagctgactacgttctangagaccaatatagatcagattccaaaacagttaaccaacaagcttatttctatgctaaatccctcaaactcaccaacaaagatgtctttgtcttggacgttgacgacactactctct

SEQ ID NO: 237975 - DNA, 373 bp, Glycine max
ggggttttatctcattaacgtttcttctcttcactctgcccgctgcatcaatggcttcagagaagaaactttcgaacccaatgagggagataaaagtgcagaagctcgtcctcaatatctctgttggcgagagtggagatcgtctcaccagagcctccaaggtgttggaacaacttagtggccaaaccccagtgttttccaaagcaaggtacactgttcgttcctttgggactagaagaaatgagaagattgcatgctatgtcactgtcagaggtgacaaggcaatgcaacttttggagagtggtttgaaggtgaaggaatatgaacttctcagaaggaacttcagtgatactggttgcttcggctttggtat

SEQ ID NO: 237976 - DNA, 351 bp, Glycine max
ggcattatatttgagttcaaacaactcaaagccatggccacctccaacttctctattgttctctccgtctccctagccttctttttggtgctacttaccaaggcacactcgaccgataccgtttctttcaccttcaacaagttcaacccagtccaaccaaacattatgctccaaaaagatgctagtatttcatcctctggggtgttacaactcaccaaaattggcagcaacggcgtgcccacctcgggatctctcggtcgtgccctttacgctgccccaatccagatttgggacatcgaaaccggcaaggtagccagctgggctacatcctttaaattcaacattttcgca

SEQ ID NO: 237977 - DNA, 392 bp, Glycine max
ggatggcttgcagacagttgtgggcttcaagagctgcttcctacctcaggatctccgtgtttcacagaagcttctctaacgttttgaatgatctgaagtatgctgattctcatgagtgagtgaaggttgatggaaattctgcaactgttggcataactgatcatgcccaagatcatttgggtgaggttgtgtatgttgaattgcctgaagtgggagccaccgtgacacaagggagaaggttttggtggaagctgaaaattttaaaggcaactagtgatattaactctcctgtttcaggaaaagtggtcgaagttaatgaaaaacttaccagttctcctgctttggtcaacacaagcccttacaaagatggatggataattaaagtggagatg

SEQ ID NO: 237978 - DNA, 251 bp, Glycine max
gggggattttttgggtgccattgttgttgctagtatcatccgcagctgcttttattcgcaccgcaaacagtgagccatggacgtcggaaagaagaagcgcatctccaacgggaagaagggtggcaataacaatgcagctgatgcctttgccaagaatgattggtattacattaatgctccttctgtttttcaagtgaaaaatgttggcaaaaccctcgtctctcgtactcagggtaccaggattgcttctg

SEQ ID NO: 237979 - DNA, 424 bp, Glycine max
agaagggggcacaagtttgttgagatagctagaagcaataagatgaaaatgaaagtgcttgttttgtttgttgctacagttttggtagcatatgaatgccatggctcagactaccagaagttccctctccaaatgaaaactgggtttggtgggcaatacagcaatgaggtggcatgtgccagttggaggcttggcgtggaagcaaacaacgtagtcaagtggcaaactgttcctgcagcttgcggagagtacatagctgactacgttctaggagaccaatatagatcagattccaaaacagttaaccaacaagcttatttctatgctaaatccctcaaactcaccaacaaagatgtctttgtcttggacgttgacgacactactctctctaatctccagtattttgctaaccatgggatttggt

SEQ ID NO: 237980 - DNA, 414 bp, Glycine max
  unsure (1)..(414): unsure at all n locations
acagaaggggacagcatatatatcaataatctattttatactatacctacattttgataattttctttgtagttgatagccatggctacccgtggaaagcttgaggttgacattgatctcaagtccaacgcagacaagtactggcaaacccttaggaattctactgaaatattccctaaggccttcccacatgattacaaaagcattgaggttcttgagggtgatggcaagtctcctggttctatccgccacataagttatggtgaaggttcaccacttgtgaaatcatcctttgagaagattgaggctgttgatgangaaaagaaggtantgtcgtacactatcattgatggggaactcctcnagcactacannacattcaagggagacatttcagtgactccaattggcgat

SEQ ID NO: 237981 - DNA, 319 bp, Glycine max
gatatcacaaaaaactattttggcttctgcctttccttttccagtgagctcattgacaatggctgaaacatagtgggtcatgaaggacaattgatggtctctccatggaataatagcccaattaaaaggaggaaccgaaggataagggaaggcaatggtgaagcgttaactgagtttagcgcaactgttcatagatgtgcacgttatcaagatgatattgataaatgtttagaagagtggaaaaatcagggacttaatgtgactggttcaatatgtgatttactatgttctgaccaacgtataagattaatggaaattg

SEQ ID NO: 237982 - DNA, 406 bp, Glycine max
  unsure (1)..(406): unsure at all n locations
ggcacaagtgagtttgttgatcgagataactagaaacagtgtgatgaaaatgaaggtccttgttttcttcgttgctacaattttggtagcatggcaatgccatgcgtacgatatgttccctctccgaatgaacactggctatggtgcccgtactccggaggtgaaatgcgcaagttggaggcttgctgtggaagcacacaacatctttggctttgagaccattcctgaagagtgcgttgaagcaacaaaggaatacatccatggcgaacaatatagatcagactccaaaacagttaaccaacaagcttacttttatgccagagacctcgaagtcaatcncaaggacacatttgtgttcagtatagatggcaccgtactctctaatattccatactacaaaaaacat

SEQ ID NO: 237983 - DNA, 380 bp, Glycine max
ggcacaagtgagtttgttgatcgagataactagaaacagtgtgatgaagatgaaggtccttgttttcttcgttgctacaattttggtagcatggcaatgccatgcgtacgatatgttccctctccgaatgaacactggctatggtgcccgtactccggaggtgaaatgcgcaagttggaggcttgctgtggaagcacacaacatctttggctttgagaccattcctgaagagtgcgttgaagcaacaaaggaatacatccatggcgaacaatatagatcagactccaaaacagttaaccaacaagcttacttttatgccagagacctcgaagtccatcccaaggacacatttgtgttcagtatagatggcaccgtactct

SEQ ID NO: 237984 - DNA, 388 bp, Glycine max
aggggacggcaaacagaaagaataatcgagacacagatcatagtgatcattttttaatttctcagatttatccgacgtcgctgcagatccaccaaccgttatggctgccttcagcggtgatgaaacggcaccgtttttcggcttccttgggggccgcagctgccctcgtcttctcctgtatgggagctgcctatggcacagcgaagagtggcgtgggcgtggcttccatgggtgtaatgagacctgagctggtgatgaagtcgattgttcctgttgtcatggctggagttttgggcatttatggccttattattgctgttattatcagtaccggtattaatccaaaggccaaatcctattacctctttgatggttatgcacatctctc

SEQ ID NO: 237985 - DNA, 404 bp, Glycine max
ggaaaaattaatttggttgttcaaaatactaaaaaaattgtgatgaaaatgaaggtccttgttttcttcgttgctacaattttggtagcatggcaatgccatgcgtacgatatgttccctctccgaatgaacactggctatggtgcccgtactccggaggtgaaatgcgcaagttggaggcttgctgtggaagcacacaacatctttggctttgagaccattcctgaagagtgcgttgaagcaacaaaggaatacatccatggcgaacaatatagatcagactccaaaacagttaaccaacaagcttacttttatgccagagaactcgaagtccatcccaaggacacatttgtgttcagtatagatggcaccgtactctctaatattccatactacaaaaaaca

SEQ ID NO: 237986 - DNA, 368 bp, Glycine max
gaaggtgcaagagtttgttgtgagctataagctagtttatcgtgaggagaatatgaagttgtttgttttctttgttgctgcagtagttttggtagcatggccatgccatggcgcaggctaccaaaggttccctctccgaatgaaaactggctatggtgagcgttcttcggaggtaaaatgcgcaagttttaggcttgctgtggaagcacacaacatccgagcctttaaaaccattcctgaagagtgcgttgaaccaacaaaggactacattaatggcgaacaatttagattagactctaaaacagttaaccaacaagctttcttttatgctagtgaacgcgaagtccatcacaacgacatatttatat

SEQ ID NO: 237987 - DNA, 402 bp, Glycine max
  unsure (1)..(402): unsure at all n locations
ggacaagccaatcctttgtgtaggtgctcaaccctagtaagccgcaatggtgaagtactcaagggagcctgacaatccaactaagtcttgcaaggctagaggcgccgaccttagggctcattttaagaacacaagggaaactgcctttgcaatcaggaagttgcccttggtcaaggctaaaaggtacttggaagatgttcttgcccacaagcaggcaattccattcagacgtttttgtcgaggtgttggaaggacagcccaggctaagaatagacactctaatggccaaggacngtggcctgtcaagtcagcaaaattcaatcctgatttgctcaanaatgctgagagcaatgcttaagtgaaacgtttggatgttgatgcactgtacatttcgcatatcca

SEQ ID NO: 237988 - DNA, 402 bp, Glycine max
  unsure (1)..(402): unsure at all n locations
gggagtgtcattgtgaagttggaaacaatgctagcttcttcgctctccttcctccattcttgcacatccccctcttcctcttccttattgtcaatttcacctccaaaccccaaaccctctcacttcctacctttcgtggtcgaagccaaagacaggacccgcagggaagacaggaccgctcgccacactcgcatcagaaagaaggtcnaagggacgcccgaaaggccgaggctgtccgtgttccggtcgaacaagcatctctctgtgcaggtgattgatgacaccgcaatgcgcacgcttgcttcggtgtcgacaatgcagaagacggttgctgatgatttcaactactccgctggccctacatttgaagtaccanagaggatgggtgagatcattgcaaaa

SEQ ID NO: 237989 - DNA, 353 bp, Glycine max
  unsure (1)..(353): unsure at all n locations
gcttctctttctttgtcacaaacacaacacagcacccttcacacactgcacagtgcctcctttctagtttctactatctgcttcttcttcttcaattagggttttccccttctccgagatcagcgccaacatcatgaacatgaatatcttcaagaagaaaacctcacccaaagaggctctgcggtcaagtaagagggaaatggctgttgcaaccagaggaattgaaagagagatagcatcacttcagatggaggaaaaaaaattggtggcagagattaaaagagaagcaaaaacaggaaatgaggctgccnacagaatcttagctcgtcaacttgttaggttacgtcaacaga

SEQ ID NO: 237990 - DNA, 387 bp, Glycine max
  unsure (1)..(387): unsure at all n locations
ggttgtactttttcttgaatttcgttctgagtggagactatttcaagatcaccatcactcctctcattttgcgggaaagttcaagagaagatggtaactagaattgtggatcttcgttcagacacagttacaaagccaactgaagcaatgagagctgctatggcaagtgctgaagttgatgacgatgttctaggctatgatccaactgcttttcgcttagaaacagagatggcaaagacaatgggcaaagaagctgctctttttgttccatctggcactatggggaaccttgtatctgtacttgttcattgcgatgtcangggaagtgaggttattcttggagacaattgccatatcaacatttttgagaatggaggcattgcaacc

SEQ ID NO: 237991 - DNA, 380 bp, Glycine max
  unsure (1)..(380): unsure at all n locations
gaccacaccaccctactacattcccacctttagtcttgttcttagagatggcttgtgaaaccaagtcatggttggttatgtttcttgttttcttggttgctaattgcatgcaacattgtgtccacggggtgtctcaagtgccttgcctttttatctttggggactctatgtctgatagtggaaacaacaatgaacttccaaccacttcaaaatctaatttcagaccatatgggatcgactttccattacgaccaactgggagatatacaaatggccgaacagaaattgacataatcactcaatttctgggatttgagaaatttatcgcaccctttgcanacactagtggttcagacatacttaaaagtggtaactatgca

SEQ ID NO: 237992 - DNA, 385 bp, Glycine max
gaagagtttgttgtgagctataagctagtttatcgtgaggagaatatgaagttgtttgttttctttgttgctgcagtagttttggtagcatggccatgccatggcgcaggctaccaaaggttccctctccgaatgaaaactggctatggtgagcgttcttcggaggtaaaatgcgcaagttttaggcttgctgtggaagcacacaacatccgagcctttaaaaccattcctgaagagtgcgttgaaccaacaaaggactacattaatggcgaacaatttagatcagactctaaaacagttaaccaacaagctttcttttatgctagtgaacgcgaagtccatcacaacgacatatttatattcggcatagataacaccgtactct

SEQ ID NO: 237993 - DNA, 339 bp, Glycine max
atggcacttgtattgttgaacaaaggtttctccgtctgcttcgtcactttccctcgtttcaatcgaaaccaaaactaatcacatggacactaaattcctcgtcagtggcaactggaaatgcagtgggaccactgaggatgatttgaagattgttactaatttgactgaggctaaagtccctgtacgaatatgtcgtagcaaattgtgttgatgcccacctttcgtgttccttcctgttgtaaacagtttacagcgccctgatttccatgtttcaggacagcactgttcggttcgaaaaagtcgtgcttacaccggtgatgttattgctgatctgcatgt

SEQ ID NO: 237994 - DNA, 392 bp, Glycine max
gagtattcagattacattgcaaaaatggcatcattcaccatgacagcttccatccttggcagcccagccgtcaccaaccggtcggcagtagcaacgcagaggagatcactcgtagtgaatgctgccaaagctgttgaagcagagaaggtcagttatgacaatgacatggatggtagcaatggaaggaggaacttgatgttcgccgcggcggctgctgcagtttgctctgttgctgggatggcagtggcagatgagcctaaaccaggaaccccagaagccaagaagaagtatgctccgatttgtgtcaccatgccaactgctatgatttgtcgcaattgagggactttggtttttattttacttctgatgattggaaatgtacaatggggttg

SEQ ID NO: 237995 - DNA, 386 bp, Glycine max
ggcacaagtgagtttgttgatcgagataactagaaacagtgtgatgaaaatgaaggtccttgttttcttcgttgctacaattttggtagcatggcaatgccatgcgtacgatatgttccctctccgaatgaacactggctatggtgcccgtactccggaggtgaaatgcgcaagttggaggcttgctgtggaagcacacaacatctttggctttgagaccattcctgaagagtgcgttgaagcaacaaaggaatacatccatggcgaacaatatagatcagactccaaaacagttaaccaacaagcttacttttatgccagagacctcgaagtccatcccaaggacacatttgtgttcagtatacatggcgccgtactctctaata

SEQ ID NO: 237996 - DNA, 351 bp, Glycine max
ggcaggcgaagagatggccaccgttccagggcagctcgtgtgggagatcgtcaagaaaaacaattccttcttggtcaagcagtttggaaggggcacccagagcgtcgaattcagcagagagagcaacaatctctacaacctcaattcgtgcaagtactctggtttggcaaacaagaaaactgttactgttcagcctgatggcagagatcaggctgtcttgttggctacaatcaatacaaagaagcaaaacatgcccgctgcattgctccacaaatctgtgactaacaaggacttcaggacgatggcaaaagctgttgaaaaccaggtggccaaaaattaccacaggcctga

SEQ ID NO: 237997 - DNA, 378 bp, Glycine max
  unsure (1)..(378): unsure at all n locations
gaacagccacaacactttccacttgtctccgaattagttatcttgagaaacattattcccattgctatatattatggctagcatgaaggttacatgggtggttgtgatcatgtgcatggccgtggtgggtgcaccgatgatggcgcaagccatgacatgcaatgatgtgacggtgaacatggcacagtgcctatcctacctgatgcagggaggaacaccttcaacactttgctgcagcggagtcaagaacattcttggctctgctgtcaccaccgttgacaaacaaactgtgtgcaactgtctcaaggcggatgctgctaggtacaacatcaatgaccagtatgctcaagcactcnctggtttctgcaaggtcaatgt

SEQ ID NO: 237998 - DNA, 369 bp, Glycine max
ggaacttctcacgttcatttctacacatccctagctctgtcgttccgtcgtgacgatggcgtttcgggtgcgaagccctgacctccgctctctctttcttctctctctcttgtccatcgcttccgccaatgtcttcttcgaagagcgtttcgatgacgggtgggaaaatcgatgggttaaatcagattggaaaaaagatgagaacgtggctggggagtggaaccacacctctggtcaatggaatggagacgctaatgacaaaggtattcaaaccagtgaggattacagattctatgttatttcagctgagtaccctgaattcagcaacaagggtaagacactagtctttcaattttctgttaagcacga

SEQ ID NO: 237999 - DNA, 366 bp, Glycine max
ggcacaagtgagtttgttgatcgagataactagaaacagtgtgatgaaaatgaaggtccttgttttcttcgttgctacaattttggtagcatggcaatgccatgcgtacgatatgttccctctccgaatgaacactggctatggtgcccgtactccggaggtgaaatgcgcaagttggaggcttgctgtggaagcacacaacatctttggctttgagaccattcctgaagagtgcgttgaagcaacaaaggaatacatccatggcgaacaatatagatcagactccaaaacagttaaccaacaagcttacttttatgccagagacctcgaagtccatcccaaagacacatttgtgttcagtataga

SEQ ID NO: 238000 - DNA, 370 bp, Glycine max
gaccacattccaaaacacaaacacatacattgtagtatcacttttgtctcggaatttgttcttttgagttatggcaagcttaaaggttgcatgtgtggttttgatgtgcatggctgtgatgagtgcaccaatgatggtgcaagccgtgtcatgcaatgatgtttctgtgaacctagcaccgtgcctatcttacctgatgcagggtggagatgttccagaatcgtgctgtagcggagtgaggaacattctgggttctgccagcaccacctttgacaaacaaaccgtgtgcaaatgtcttcagcaagctgctaataactatggcatcaacgacgaatacgctcatgcactccccgcccgctgcaatgtcagc

SEQ ID NO: 238001 - DNA, 367 bp, Glycine max
ggagtatcaacaagaatactcataataatatagtggctagcatagagctagtaataatattaatattgttaagctagctctaagccatggctaatgaacgtgatctgttctcggcggagattgtgaaccgtggaattgaatcgtcaggaccaaacgctgggtcgttgacgttttcggtgagggtgagaaggcgcttaccggattttcttcaatcggtgaaccttaagtacgtgaaattgggttaccattatctgataaaccatggcatatacttgttcaccataccggttcttctcgtggtgtttagtgctgaggttggaagcctcagcaaagaggacctatggaagaagctttgggaagacgcgcg

SEQ ID NO: 238002 - DNA, 347 bp, Glycine max
aaatgggttaaaaagggcaatgcaccggaactgcccgagactcgtaataattacaacacgctggtgtctcttggattcaagattatagtcttgtcacgaagaacactggacaaacaggccgtaacagaaccaaccttaacaaaggttgctaacaaacattggaaaaattaaatctcaatgatccacacgatccttccactccaaatgcagtttcatacaagacagcatcgagagagacactgataaagcacggatacaacattcatgggatcactgttgaacaatggagcgatatcctcggaggccacagattgaaatgcatgacctttaaacttcataatcccctg

SEQ ID NO: 238003 - DNA, 390 bp, Glycine max
ggcacaagtgagtttgttgatcgagataactagaaacagtgtgatgaaaatgaaggtccttgttttcttcgttgctacaattttggtagcatggcaatgccatgcgtacgatatgtgccctctccgaatgaacactggctatggtgcccgtactccggaggtgaaatgcacacgttggacgcttgctgtggaagcacacaacatctttggctttgagaccattcctgaagaatgcgttgaatcaacataggaatacatccatggtgaacaatatagatcagactccaatacagttaaccaacaagcttacttttatgccacagacctcgaagtccatcccaaggacacatttgtgttcagtatacatggcaccgtactctctaatattcc

SEQ ID NO: 238004 - DNA, 242 bp, Glycine max
ggcacacgtgagtttgttgatcgtgataactacagacatcgtgaggagactggaagcagtgtgatgcaactgagcgtcagtgtttgctaggatggcacatgcatgcctatgatatgtgccggctccgatatgaagactggatatggtgcccgtactccagacgtgtcatgcacacgttgtacgcttgctgtgggcacagacagcatctttagctttgacacgcactccagaatagtgcgttg

SEQ ID NO: 238005 - DNA, 169 bp, Glycine max
ataattataaccattgtgatgaccgtgtaggtccttgttgtctacgttgcacacaagggtggtaccactccactggcatgcctaccatatgttccctctccgaatgaacactgtctagtggtgcccgtactccggaagtgatatgctcaagttggaggcttgctgtgga

SEQ ID NO: 238006 - DNA, 314 bp, Glycine max
tagaaaaaacatggatatggggtggagaaatttaactcgaccttgtatgatgaatgggttaacaagggcaatgcaccggcactgcccgagactcttaagaattacaacaagctggtgtctcttggcttcaagattatattcatgtcaggaagaacactggacatacaggccgtaacataagcacacttaatgaaagctggctaccacacatgggaaaaaataattctcaaggatccacaagatccttccactccaaatgcagtttcatacaaaacagcagtgagagacaaactgataaggcaaggatacaacat

SEQ ID NO: 238007 - DNA, 381 bp, Glycine max
ggcacacgtgagtttgttgatcgagataactaaaaccagtgtgatgaaaatgtaggtccttgttttcttcgttgctacaattttggtagcatggcaatgccattcgtacgatatgttccctctcctaatgaacactggctagtggttcccgtactccggaggtgaaatgcgcaagttggaggcttgctgtggaagcatacaacatctttggctttgagaccattcctgaagaatgcgtttaaccaccacacgaatacatccatggcgaacaatatagattagactccaaaccatttaaccagcaggcttacttttatgccatagacctctaagtccagcccatggacacatttgtgttcactatacatggcaacgtactct

SEQ ID NO: 238008 - DNA, 374 bp, Glycine max; identical to SEQ ID NO: 236536

SEQ ID NO: 238009 - DNA, 383 bp, Glycine max
  unsure (1)..(383): unsure at all n locations
ggcacaagtttgttgagatagctagaagcaataagatgaaaatgaaagtgcttgttttgtttgttgctacagttttggtagcatatgaatgccatggctcagactaccagaagttccctctccaaatgaaaactgggtttggtgggcaatacagcaatgaggtggcatgtgccagttggaggcttggcgtggaagcaaacaacgtagtcaagtggcaaactgttcctgcagcttgcggagagtacatagctgactacgttctaagagaccaatatagatcagattccanaacagttaaccaacaagcttatttctatgctaaatccctcaaactcaccaacaaagatgtctttgtcttggacgttgacgacactactctctct

SEQ ID NO: 238010 - DNA, 363 bp, Glycine max; identical to SEQ ID NO: 236410

SEQ ID NO: 238011 - DNA, 359 bp, Glycine max
  unsure (1)..(359): unsure at all n locations
ggattggaggattgtggagattctgcataaaaggtttcttaaatttgaaaagaagaattggaggatctcttacaattccctgatcgtgcttgagcacttgttgactcatggaccagagagtgttgcggaggaatttaagagtgacaaagatgtcattagccaaatgaaaggttttcagtatattgatgacactgggtttaattggggcctaactgtgagaaagaaatctgagaggataatgaaactgctggaaaaagggactcttctcaaggaagagagaaaaaatgctagaaggttatctanagggattgaaggtttcggaagtttctctcatcggtcaactccggcacaaggtgttc

SEQ ID NO: 238012 - DNA, 307 bp, Glycine max
ggatccacagatttcgcgaatactgcaaaaatagcacgcgctggtatcacctttcgccaaaccagctattccaatcctcccaatttccacaatcttcaatcttcacactctgcttcacctttcttcatttcacttcagagagagagaacaatacacaatgggcgtcgtggtgatcgacggcagcagcgtgcgcgacttcgtgaaggacgaaaccggcttcaacaacagcgtggacgatcagttctcggcgctggatctcaacaactaccgcgtcctctcgcgctcggagctcccgcacggccttcga

SEQ ID NO: 238013 - DNA, 267 bp, Glycine max
agaagggggcacaagtgagtttgttgatcgagataactagaaacagtgtgatgaaaatgaaggtccttgttttcttcgttgctacaattttggtagcatggcaatgccatgcgtacgatatgttccctctccgaatgaatactggctatggtgcccgtactccggaggtgaaatgcgcaagttggatgcttgctgtggaagcacataacatctttggctttgagaccattcctgaagagtgcgttgatgcaacaaatgaatacatcc

SEQ ID NO: 238014 - DNA, 379 bp, Glycine max
gaaggttttgcactgttgttgctgctcatcctccgtttactccgagctctgcaccgaattacgagtccacggggaagacacatggaatgggatctgctcgcaagctcaagtcccaccgcacgaggcagatgtgcgctgacatgtcatacaggaaatcacatcgtgctactgaatggaagaaaccttttgctgggtcatctcatgccacaggaattgtccttgacatgataagtattgatgctaagcagctcaactctgccattcataagtgtgccagggttcaacttatcatgaatgcgaagacgattgccgcttttgtccccaatgacggttgcttgaactacattgatcagaatgacgaagtcatgattgctggatt

SEQ ID NO: 238015 - DNA, 348 bp, Glycine max
  unsure (1)..(348): unsure at all n locations
ggcacaagtttgttgagatagctagaagcaataagatgaaaatgaaagtgcttgttttgtttgttgctacagttttggtagcatatgaatgccatggctcagactaccagaagttccctctccaaatgaaaactgggtttggtgggcaatacagcaatgacgtggcatgtgccagttggaggcttggcgtggaagcaaacaacgtagtcaagtggcaaactgttcctgcagcttgcggagagtacatagctgactacgttctangagaccaatatagatcagattccanaacagttaaccaacaagctttattctatgctaaatccctcaaactcaacaacanagatg

SEQ ID NO: 238016 - DNA, 388 bp, Glycine max; identical to SEQ ID NO: 235884

SEQ ID NO: 238017 - DNA, 382 bp, Glycine max
ggcacaagtgagtttgttgatcgagataactagaaacagtgtgatgaaaatgaaggtccttgttttcttcgttgctacaattttggtagcatggcaatgccgtgcgtacgatatgttccctctccgaatgaacactggctatggtgcccgtactccggaggtgaaatgcgcaagttggaggcttgctgtggaagcacacaacatccttggctttgagaacattcctgaagagttcgttgaagcaaccaaatgaatacatccatggcgaaccagtataaattagactccacatcagttacccaaccagcttacctctatgccagagacctcgaaatccatcccaaggacacatttgtgttcagtatagatggcaccgtactct

SEQ ID NO: 238018 - DNA, 380 bp, Glycine max
gtcgtgtcatgttaacaatattgccatggataaagaggtgaggaagcatcattaaaggagagggtctattcttagcttgatgcatcatattttgtgtgggggccagacagttagaaaggcatttcttgcgtttggctatccgtggttcatctatatcttcttagtaggttgtttgtagcaagggagtgattgtgatgatctctttttcctccattttctttttgtatttttaaagtttatatttgaaggattttttccccttggaacattgaatcattgatgttaatagtcatatgtatcaagaaatcttatattattgttaaaaaaaaaacctggaacagaaaaaaaaaagcggccgctctagaggattcaagcttacg

SEQ ID NO: 238019 - DNA, 386 bp, Glycine max
ggcacaagtttgttgagatagctagaagcaataagatgaaaatgaaagtgcttgttttgtttgttgctacagttttggtagcatatgaatgccatggctcagactaccagaagttccctctccaaatgaaaactgggtttggtgggcaatacagcaatgaggtggcatgtgccagttggaggcttggcgtggaagcaaacaacgtagtcaagtggcaaactgttcctgcagcttgcggagagtacatagctgactacgttctaggagaccaatatagatcagattccaaaacagttaaccaacaagcttatttctatgctaaatccctcaaactcaccaacaaagatgtctttgtcttggacgttgacgacactactctctctaat

SEQ ID NO: 238020 - DNA, 381 bp, Glycine max
gacaaacaagttcatgacagatcctgtaaggatccttgtaaaacgtgatgaattgacattggagggcatcaagcaatttttcgttgcggtcgaaagggaggaatggaagtttgataccctgtgtgatctttatgataccctcactatcactcaagctgttatattctgtaatactaagcgaaaggtggactggttaactgaaaaaatgcgtaacaacaatttcactgtctcatcaatgcacggtgacatgcctcagaaagaaagagatgctattatgggagaatttcgtgctggaacaacccgtgtgctaataacaactgacgtttgggcccgtggtcttgatgtacagcaggtttctctagttatcaattatgaccttcc

SEQ ID NO: 238021 - DNA, 384 bp, Glycine max; identical to SEQ ID NO: 237289

SEQ ID NO: 238022 - DNA, 377 bp, Glycine max
gatagcaaaatcgtttctccaatttaatcaccattgtacaacccaattcccttcgtcgttttcgattaagagagcaatggcacgtaccaagcaaaccgctcgcaagtccaccggaggaaaggctccgaggaagcaattggcaaccaaagccgctcgcaagtcagccccggcgaccggcggagtgaagaagccccaccgcttcaggccaggaacggtggctctgagggagattcgaaagtaccagaagagcaccgaacttctgatccgaaaactcccattccagaggctcgtcagagaaatcgctcaggatttcaaaaccgatctccgctttcagagcagcgccgtttcggctcttcaggaagccgcggaggcttatc

SEQ ID NO: 238023 - DNA, 361 bp, Glycine max
gcccgttccatttctcaacaacttctgctacttcctactccaaccgcacttctgctccgcaattatcatgggcaaggtcaagatcggaatcaacggatttggaagaattggccgtttggtagccagagtggctctgcagagagacgatgttgaactcgttgccgttaacgaccctttcatcaccaccgattacatgacatacatgtttaaatacgacagtgttcatggacactggaagcatcacgatgtcaccgttaatgacgagaagacccttcccttcggtgacaagccagtcactatttttggacacagaaaccctgaacagatcccatgggggtcaactggagctgacctcattgtt

SEQ ID NO: 238024 - DNA, 375 bp, Glycine max
  unsure (1)..(375): unsure at all n locations
gatcgcagaggcagagcataacaacacaagagtcgcatctcaagcttttgtctttctctacttttcttcttctttctgtgtatcgtatcgtattggtaggttgaaaaacaaagagtgtgtgttgttgttgtgtggtttggttttcacttttgttcatcgtttgcgagacacacaggagagaagagatggcgacgagggtggtggcggaacagaagccgaagacgaagattgtgtgcacgctggggcccgcatcgcgctctgtcccaatgatcgagaagcttctgcgggcgggcatgaacgtggctcgcttcaacttctcacatgggtcncacgagtaccaccaggaaaccctcgacaacctccgcgccgccatgg

SEQ ID NO: 238025 - DNA, 392 bp, Glycine max; identical to SEQ ID NO: 236203

SEQ ID NO: 238026 - DNA, 373 bp, Glycine max
ggcacaagtgagtttgttgatcgagataactagaaacagtgtgatgaatatgaatgtccttgttttcttcgttgctacaattttggtagcatggcaatgccatgcgtacgatatgttccctctccgaatgaacactggctatggtgcccgtactccggaggtgaaatgcgcaagttggacgcttgctgtggaagcacacaatatctttggctttgagaccagtcctgaagagtgcgttgaagcaacaaatgaatacatccatggcgaacaatatatatcagactccaaaacagtttaccaataagcttacttttatgccagagaccccgaagtcatcccaaggacagatttgtgttcagtatatacggcaccg

SEQ ID NO: 238027 - DNA, 383 bp, Glycine max
ggcacaagtgagtttgttgatcgagataactagaaacagtgtgatgaaaatgaaggtccttgttttcttcgttgctacaattttggtagcatggcaatgccatgcgtacgatatgttccctctccgaatgaacactggctatggtgcccgtactccggaggtgaaatgcgcaagttggaggcttgctgtggaagcacacattatctttggctttgagaccattcctgaagagtgcgttgaagcaacaaaggaaaagatccatggccaacgctacatatgagattccagatgaatggcacctaatgttttaccttttgctgcatacgacgagtctacatacgtgtggagcagttggtgcaaaactatacgaataatagggattt

SEQ ID NO: 238028 - DNA, 374 bp, Glycine max
gagggttttatctcattaacgtttcttctcttcactctgcccgccgcatcaatggcttcagagaagaaactttcgaacccaatgagggagataaaagtgcagaagctcgtcctcaatatctctgttggcgagagtggagatcgtctcaccagagcctccaaggtgttggaacaacttagtggccaaaccccagtgttttccaaagcaaggtacactgttcgttcctttgggattagaagaaatgagaagattgcatgctatgtcactgtcagaggtgacaaggcaatgcaacttttggagagtggtttgaaggtgaaggaatatgaacttctcagaaggaacttcagtgatactggttgcttcggctttggtat

SEQ ID NO: 238029 - DNA, 370 bp, Glycine max
gagcgctgagtcgagggcgttcagtgttcaccacagtttacacacgagtacccattttctcttctcaatttctcagagagaaaatcatggtggacgcagcagaacgtaggtacttggaggatgacgattcatcactcatgaaaactattaagggggcaacaactggtttagttgctggcactatctgggggaccgtagttgccacctggtatgatgtccctcgtgtagagagaaatgttgctcttccagggctgattaggactttcaagatgatgggcaactatggtttgacctttgctgccataggaggagtctacataggtgtggagcagttggtgcaaaactataggatgaagagggatttagtcaa

SEQ ID NO: 238030 - DNA, 381 bp, Glycine max
  unsure (1)..(381): unsure at all n locations
ggcacaagtgagtttgttgatcgagatacctagacacagtgtggtaaatgtaagtgcctgtgttcttcgctgcgacaattttgggagcatggcaatgccatgcgtactataagttccccctccgcatgaacactggctatggtgcccgtactccggaggtgaaatgcgcaagttggaggcttgctgtggaagcacacaacatctttggctttgagaccattcctgaagagtgcgttgaagcaacaaaggaatacatccatggcgaacaatatagatcagactccaaaacagttaaccaacaagcttacttttatgccagagacctcgaagtccatcncaaggacacatttgtgttcagtatagatggcaccgtactctcta

SEQ ID NO: 238031 - DNA, 378 bp, Glycine max
ggcgcatcgaaccaaaattagggtttttgtcgtagcaggaagaagcagcaatggcgccgaagataacacgcaaggtcagcagaaaccccgaattgataaggggaatcggaaagtactcgaggtcgcagatgtaccacaagaggggcatttgggctatcaaggccaaaaacggtggcgttttacctcgccacgaccccaaacccaaacctgaaactcccactgaaaaaccacccaaattttaccccgctgatgatgtcaagaaaccccttgtcaacaagcacaaacccaaaccagctaagctcagggctagcattacccccggaacagtgttgattcttcttgctggtagatttaagggaaagaaggtagtgtttttga

SEQ ID NO: 238032 - DNA, 368 bp, Glycine max
ggcgttttgatattgtaaatcacgtccagcacaacagtccgagaagtgaatggctgacatagtgaagcagctgttggcaaagccgatccagctggcggaccaagtggccaaggcagcggaggaggccagttcctccttcaagcaagagtgcttagagctcaaatccaaggccgacaagctcgcggcgctgctgcggctggcggcgcgtgcgagctccgacctctacgagcgccccacgcgccgcatcatcgccgacaccgagctcgtcctcgacaaggccctctccctaaccctaaaatgccgcgccaacggcctcatgaagcgcgtctttagcatcatccccatcgccgccttccgcaagatgtcct

SEQ ID NO: 238033 - DNA, 360 bp, Glycine max
gagtgtacctctttgctttttcccattgcttctaacgtgagatctcagattgcaattgcctcttctcttctcccagaatcggtgtatgttacaggtttaagggttttgttttcatttaggtcactaatccgatatcatgaagctcgatacgactagtctcgaatcgtttcccacactgattgcacctcaaaacgacgtcgccggagaactctccgccgctccgttctttgaccttccgaattccaatgacttcgatgggttcttgaaagacgctattcagatggttaagcccgcgacaggtactacaactcttgcttttacatttaaagacggtgttatggtagccgttgattctccagc

SEQ ID NO: 238034 - DNA, 387 bp, Glycine max; identical to SEQ ID NO: 235921

SEQ ID NO: 238035 - DNA, 388 bp, Glycine max
ggcacaagtgagtttgttgatcgagataactagaaacagtgtgatgaaaatgaaggtccttgttttcttcgttgctacaattttggtagcatggcaatgccatgcgtacgatatgttccctctccgaatgaacactggctatggtgcccgtactccggaggtgaaatgcgcaagttggaggcttgctgtggaagcacacaacatctttggctttgagaccattcctgaagagtgcgttgaagcaacagaggaatacatccatggccaacaatatagattagactccaaaacagttaagcaacaggcttacttttatgccagagacctcgaagtccatcccaaggacacatttgtgttcagtatagatggcaccgtactctctaatatt

SEQ ID NO: 238036 - DNA, 368 bp, Glycine max
ggcccagtagcaccttcgtaggacccttatccctctctctctctatctctcccgaattattgttcgttcgacccttttacttagtattccctgtttccggtattcgctcccttttttctgcattctggttttacttagatctctgtcccgcaccagatctggtgcagggtgagagggttgggttcattaattttgtatcaatcttccttctgagcggtaggcgtggggataccagagtcttttcgggaagcaagagagggttctctccgttttcaatagatctctcactgtcttcttttgagggggaagccggggcctcggcctcggcggctttcaaagcccccaccttcacagccctatcaacaaaa

SEQ ID NO: 238037 - DNA, 356 bp, Glycine max
  unsure (1)..(356): unsure at all n locations
ggccgctctctgagaaaaacagatagtgtgggagagagaagagcggaagagaaaatgacgaccaggttcaagaagaacaggaagaagagaggtcacgtcagcgccggacacggccgtatcggaaagcaccgcaagcatcccggaggtcgcggtaacgccggtggcatgcatcaccaccgtatcctcttcgacaagtaccatcctggtttcttcgggaaggtangcatgcgctacttccacaaacttcgcaacaaattctacaatccgatcatcaacatcgacaagctgtggtccctcctcccccaggaggccaaagacaaggccaccgccgacaaggcacccttgctcgatgtcac

SEQ ID NO: 238038 - DNA, 384 bp, Glycine max
gatcgcatttcatagcactcaccctcattaccaacacgaaagcatagccaaaaccttttttcgaagtctctgattttcctaatggctccggcaaaggcagagaagaagccggcggagaagaagccagcggcggagaaggcaccggcggagaagaagccgaaggcggagaagaagatctcgaaggaaggagggagcgagaagaagaagaagcgcacgaagaagagcgtggagacctacaagatctacatcttcaaggtcctcaagcaggttcaccccgacattggtatttccagcaaggccatgggcatcatgaacagcttcatcaacgacatcttcgagaagctcgcccaggaagcgtcgcgtttggctcgctacaacaagaag

SEQ ID NO: 238039 - DNA, 382 bp, Glycine max; identical to SEQ ID NO: 235220

SEQ ID NO: 238040 - DNA, 361 bp, Glycine max
  unsure (1)..(361): unsure at all n locations
ggcacaagtttgttgagatagctagaagcaataagatgaaaatgaaagtgcttgttttgtttgttgctacagttttggtagcatatgaatgccatggctcagactaccagaagttccctctccaaatgaaaactgggtttggtgggcaatacagcaatgaggtggcatgtgccagttggaggcttggcgtggaagcaaacaacgtagtcaagtggcaaactgttcctgcagcttgcggagagtacatagctgactacgttctaagagaccaatatagatcagattccaaaacagttaaccaacaagcttatttctatgctaaatcnctcaaactcaccaacaaagatgtctttgtcttgga

SEQ ID NO: 238041 - DNA, 374 bp, Glycine max; identical to SEQ ID NO: 236536

SEQ ID NO: 238042 - DNA, 375 bp, Glycine max
ggcacaagtgactttgttgatcgagataactataaacagtgtgatgaaaatgaaggtccttgttttcttcgttgctacaattttggtagcatgacaatgccatgcgtacgatatgtaccctcaccgaatgaacactggctatggtgcccgtactccggaggtgaaatgctcaagttggaagcttgctgtggaagcacacaacatctttggctttgagaccattcctgaagagtgcgttgaggcaacacaggaatacatccatggcgaacactatagatcagactccagaacagttaaccaacatgcttacttttatgccagagacctcgaggtccatcacaaggacacatttgtgtgcagtataaatggcaccgt

SEQ ID NO: 238043 - DNA, 392 bp, Glycine max
  unsure (1)..(392): unsure at all n locations
ggcacaagtgagtttgttgatcgagataactagaaacagtgtgatgaaaatgaaaggccttggtttcctccgtgccacaattttgggagcaaggcaatgccaagcgtacgaaaagttccctccccgaatgaacaacggctaagggggccgtactccggaaggtgaaagcccaaattgggaggcttgctgtggaagcacacaacatctttggctttgagaacattcctgaagagtgcgttgaagcaacanaggaatacatccatggcgaacaatatagatcagactccaaaacagttaaccaacaagcttacttttatgccagagacctcgaagtccatcccaaggacacatttgtgttcagtatagatggcaccgtactctctaatattcca

SEQ ID NO: 238044 - DNA, 387 bp, Glycine max
gactcaagcacaacatctctatcgagtaaattaactatgaagcctaccctactattatccctttccttcctgcctctctttgctttcccggctctttcagaagatgttgaacaagttgtggacataagtggcaaccccattttcccaggtggcacatattacattatgccatcaacttggggcgctgccggtggtggattgaaactaggccggacaggaaactcaaactgcccagttactgttttgcaagattactcagaaatcttccgtggcacaccagtcaaattcagcatacctgggataagccctggaatcatctttacaggtactccacttgaaatcgagttcgcagagaaaccttattgtgctgaatcctccaaatgggtg

SEQ ID NO: 238045 - DNA, 239 bp, Glycine max
ttcacggctccatacaggctgtcagaagacgacaaaagaggcacaaggggatttgatgttatcaataatcaaattcagtgtaatgctacagtatgaccatgttctctgcagtgcaacaacattggtacccgtggaatgccagacgttgaaaatgatcccacgtccaatgaacactgtatatggtgacccttatcaagtcgtcagatgcacatcttagaggcttcccagtagagcacaca

SEQ ID NO: 238046 - DNA, 380 bp, Glycine max
gactcaaacccaaaaaaaaaccctctctttctctctcttccaaaacctaattttcattttttctcttcaaacaaattttcaaaatgcgtgagatccttcacatccagggtggccaatgcggcaaccagatcggcgccaagttctgggaggtggtttgcgcggagcacgggatcgaccccactggaaggtacggtggggactcagagcttcagctcgagaggatcaatgtctactacaacgaagccagctgcggccggttcgtgccgcgcgcggttctcatggacctcgaaccgggcaccatggacagcgtccggtccgggccgtacgggcagatcttcaggcccgacaactttgtgttcgggcagtccggggcaagaaac

SEQ ID NO: 238047 - DNA, 372 bp, Glycine max
gacagcatatatatcaataatctattttatactatacctacattttgataattttctttgtagttgatagccatggctacccgtggaaagcttgaggttgacattgatctcaagtccaacgcagacaagtactggcagacccttaggaattctactgaaatatttcctaaggccttcccacatgattacaacagcattgaggttcttgagggtgatggcaagtctcctggttctatccgccacataagttatggtgaaggttcaccacttgtgaaatcatcctttgagaagattgaggctgttgatgaggacaagaacgtagtgtcgtacactatcattgatggggaactcctccagcactacaaaacattc

SEQ ID NO: 238048 - DNA, 383 bp, Glycine max
ggcacaagtgagtttgttgatcgagataactagaaacagtgtgatgaaaatgaaggtccttgttttcttcgttgctacaattttggtagcatggcaatgccatgcgtacgatatgttccctctccgaatgaacactggctctggtgcccgtactccggaggtgaaatgcgcaagttggaggcttgctgtggaagcacacaacatctttggctttgagaccattcctgaagagtgcgttgaagcaacaaaggaatacatccatggcgaacaatatagatcagactccaaaacagttaaccaacaagcttacttttatgccagagacctcgaagtccatcccaaggacacatttgtgttcagtatagatggcaccgtactctcta

SEQ ID NO: 238049 - DNA, 360 bp, Glycine max
gacgtacgcaactgaaaaggaaaaccctaagaaatgaagagaactcctatcttgttccctctcttctttcttctttgtgccttcacctcatatctaccttcagccaccgctgatgatgatcatgtgtacgacactgacggcgataagcttcaatacggtgtcaattatttcgtgttgccagtgataagaggaaatggcggtggaatacaagtagcaaaagcaggaaacgaaacttgccctctgactgtggtgcaatctggcaacgagctctctgaggggttaccgataaagattgcatctcgattagcaggagtcgctttcatcacccaaggccagcttttcaagagcattcagttcggt

SEQ ID NO: 238050 - DNA, 368 bp, Glycine max
ggcagccactctgtgagagaaagagatagtgtggtagagagagaggagcggaggagagaaaatgacgacgaggttcaagaagaacaggaagaagagaggccacgtcagcgccggtcacggtcgtatcgggaagcaccgcaagcatcccggtggtcggggtaacgccggtggcatgcaccaccaccgcatcctcttcgacaagtaccatcccggtttcttcggaaaggtgggtatgcgctacttccacaaactccgcaacaaattctactgccccatcgtcaacattgataagctatggtccctcctaccccatgaggccaatgacaaggccaccgccgacaaggcgccattgctcgatgtcacccagt

SEQ ID NO: 238051 - DNA, 376 bp, Glycine max
  unsure (1)..(376): unsure at all n locations
ggcgtacgcagcttcatccctaacgcgtgcatagcagagtcagagacagagacgcagccatggggcggagacctgcgaggtgttataggcaaattaagaacaagccataccccaagtcacgtttctgccgtggtgttcctgatcccaagatcaggatttatgatgttggtatgaagaagaagggtgttgatgagtttcctttctgtgtccatctggttagttgggagaaggaaaatgtttcaagtgaggccctggaagctgctcgcattgcttgcaacaagtacatggccaaatttgctggaaaggatgctttccacttgagagtcagggtgcacccattccatgttcntangatcaacaagatgctttcgtgtgc

SEQ ID NO: 238052 - DNA, 242 bp, Glycine max
aatacaggtgtgagacagctgcagaaaggggaacaagtgaggatgttgatctatgttgctataaacagtgtcatgaaaatgaaagtcattgtgctcgtcgtgtgctacagctttggtatcatgagcatgccattcgtacgattcattccctcatccgaatgaccaccggccttggtgctcgtattccggaggtgaaatgcactaattggcagcttgcagttgaagcgcatagcatctttgga

SEQ ID NO: 238053 - DNA, 392 bp, Glycine max
ggcacaagtgagtttgttgatcgagataactagaaacagtgtgatgaaaatgaaggtccttgttttcttcgttgctacaattttggtagcatggcaatgccatgcgtacgatatgttccctctccgaatgaacactggctatggtgcccgtactccggaggtgaaatgcgcaagttggaggcttgctgtggaagcacacaacatctttggctttgagaacattcctgaagagtgcgttgaagcaacaaaggaatacatccatggcgaacaatatagatcagactccaaaacaattaaccaacaagcttacttttatgccagagacctcgaagtccatcccaaggacacatttgtgttcagtatagatggcaccgtactctctaatattccat

SEQ ID NO: 238054 - DNA, 391 bp, Glycine max
gacttcaattgcaatcaaattagttcattctctttgcgcagttccctacctctcctttcaagatgcagatcttcgtcaagaccctcaccggaaagaccatcacccttgaggtggaaagctctgacaccatcgacaacgtcaaggccaagatccaggacaaggaaggaattcccccggatcagcaacgtctcatcttcgccggaaagcagctcgaggacggccgtaccctcgccgactacaacatccagaaggagtcaacccttcaccttgtccttcgtctccgtggtggcatgcagatcttcgtcaagactctcactggcaaaaccataaccctagaggtcgaaagctctgacaccattgacaacgtcaaggccaagatccaggacaagga

SEQ ID NO: 238055 - DNA, 380 bp, Glycine max
  unsure (1)..(380): unsure at all n locations
ggcacaagtgagtttgttgatcgagataactagaaacagtgtgatgaaaatgaaggtccttgttttcttcgttgctacaattttggtagcatggcaatgccatgcgtacgatatgttccctctccgaatgaacactggctatggtgcccgtactccggaggtgaaatgcgcaagttggatgcttgctgtggaagcacacaacatctttggctttgagaccattcctgaagagtgcgttganacaacaaaggaatacatccatggcgaacactatagatcagactccaaaacagttaaccaacaagcttacttttatgccagagacctcgaggtccatcgcaaggacacatttgtgttcagtatagatggcaccgtactct

SEQ ID NO: 238056 - DNA, 363 bp, Glycine max; identical to SEQ ID NO: 236029

SEQ ID NO: 238057 - DNA, 381 bp, Glycine max; identical to SEQ ID NO: 236963

SEQ ID NO: 238058 - DNA, 376 bp, Glycine max
gaaggtgcaagagtttgttgtgagctataagctagtttatcgtgaggagaatatgaagttgtttgttttctttgttgctgcagtagttttggtagcatggccatgccatggcgcaggctaccaaaggttccctctccgaatgaaaactggctatggtgagcgttcttcggaggtaaaatgcgcaagttttaggcttgctgtggaagcacacaacatccgagcctttaaaaccattcctgaagagtgcgttgaaccaacaaaggactacattaatggcgaacaatttagatcagactctaaaacagttaaccaacaagctttcgtttatgctaatgaacgcgaagtccatcacaacgacatatttatattcggcata

SEQ ID NO: 238059 - DNA, 371 bp, Glycine max
ggagatagatctgcttcttgttgttggaaagaaaccctagcaagcggaacaatggcagacgttgaggtcgatgtggcggctgcagcagcagcagggcagccgaagaagagaacgttcaagaagttcagtttcaggggcgtggatctcgatgcgcttctggacatgtccaccgatgaactcgtgaagatgttcagtgctcgcgcacgtagaaggttccagagaggcctcaccagaaagcccatggccttgatcaagaagcttcgcaaagcgaaaagagaagctcaccaggtgagaagccagaacctgtccgcacccacctccgcaacatgattattgtgcctgagatgattggtagcattactggagtgtac

SEQ ID NO: 238060 - DNA, 379 bp, Glycine max
gacaacttcaatccctcttttgctttaccaaattccattttccaattcaaaaccctaactccgttcgaagcaccaaatcgtgatggcaccaaaggcagagaagaagccagcagagaagaagcctgtggaggagaagaaatcgacggtgggagacaaggctccggcggagaagaagccaaagaccggaaagaagcttccgaaggagggaggcgccggcggagaaggtaagaagaagaagagaaacaagaagagcgtggagacatacaagatctacatcttcaaggttctgaagcaggttcaccctgacattggtatctcaagcaaggccatgggaatcatgaacagcttcatcaacgacatcttcgagaagcctgcccag

SEQ ID NO: 238061 - DNA, 372 bp, Glycine max
ggcacaagtgagtttgttgatcgagataactagaaacagtgtgatgaaaatgaaggtccttgttttcttcgttgctacaattttggtagcatggcaatgccatgcgtacgatatgttccctctccgaatgaacactggctatggtgcccgtactccggaggtgaaatgcgcaagttggaggcttgctgtggaagcacacaacatctttggctttgagaccattcctgaagagtgcgttgaagcaacaaaggaatacatccatggcgaacaatatagatcagactccaaaacagttaaccaacaagcttacttttatgccagagacctcgaagtccatcccaaggacacatttgtgttcagtatagatggcac

SEQ ID NO: 238062 - DNA, 380 bp, Glycine max
ggcacaagtttgttgagatagctagaagcaataagatgaaaatgaaagtgcttgttttgtttgttgctacagttttggtagcatatgaatgccatggctcagactaccagaagttccctctccaaatgaaaactgggtttggtgggcaatacagcaatgaggtggcatgtgccagttggaggcttggcgtggaagcaaacaacgtagtcaagtggcaaactgttcctgcagcttgcggagagtacataactgactacgttctaggagaccaatatagattaaattccaaaacagttaaccaacaagcttatttctatgctaaatccctcaaactcaccaacaaagatgtctttgtcttggacgttgacgacactactctc

SEQ ID NO: 238063 - DNA, 393 bp, Glycine max
  unsure (1)..(393): unsure at all n locations
ggcacaagtgagtttgttgatcgagataactagaaacagtgtgatgaaaatgaaggtccttgttttcttcgttgctacaattttggtagcatggcaatgccatgcgtacgatatgttccctctccgaatgaacactggctatggtgcccgtactccggaggtgaaatgcgcaagttggaggcttgctgtggaagcacacaacatctttggctttgagaccattcctgaagagtgcgttgaagcaacaaacgaatacatccatggcgaacaatatagatcagactccanaacagttaaccaacaagcttacttttatgccagagaactcgaagtccatcccaaggacacatttgtgttcagtataaatggcaccgtactctctaatattccata

SEQ ID NO: 238064 - DNA, 391 bp, Glycine max
gaaagaaaaatacttataaaaagaatcaaacagctacaacttgaactgttcataacccacaccaaaagttccaaaccccaacccgaaaaatcacacacaccccctttggaattgggatccatcgccatatctctgattaggttagataagattccctatgggcacttccattctcgacgccctgaacgtccgcgtggaaggttccggcgataagtaccttttcctggcccacggcttcggcacagaccaatccgcgtggcagcgcgtgctcccttacttcacccgcaactacagcgtcattctctacgacctcgtctgcgccggcagcgtcaaccccgaccacttcgactaccgccgctacaccaccctcgacgcctacgtcgacgacctc

SEQ ID NO: 238065 - DNA, 378 bp, Glycine max
acacacagctattcctcttaagcttgctactgagtttccacactgcataccttaggtcttccgaattcgaagttaatttgcaagatggctaaggaaaaggctcagatcaacattgtggtggttggtcatgtggaccctgaggaggcaaccaccattaacgagctgaagaagcctgttgtggagaaagaagctccagggcatgccatatgagggcatgcacgtacggcctcggaggggaaccagaaaattatgttaacaaaataatctggaaccctaatgtatcagtgtcatcatcagtgtgtagtttaagctagctttgctatggttacgttctttgagatgagagtcttgatgaacagtaccattctgatgtattgc

SEQ ID NO: 238066 - DNA, 382 bp, Glycine max
gacacttactagtagtaagcatggagtcctcaaagatctatgcttacctcttcctctgcatgatctttctctcttccgccactcccattctcgggtgtgggtacagttgcaaaccccccaggatgcacaagcctggtaatgacagcagcgacacccattacacacgttgttaagccagtagtcaccatccctcctacaaaggatcctcccgttgttcatccaccaatagtgaagcccccaggtattctccctccaattccaattattaacccaccaaccacaccatagattggacggaacactccatgcccaccaccaaagtctcctgcgcaggctacttgccacaatgatcctctcaaacattgtgcctgtgttgatcttc

SEQ ID NO: 238067 - DNA, 377 bp, Glycine max
gattgttggcttgtgctctgctcgtgcctctagggttatcatatctccatttccatttcctctctctcagtttccaagaatcttaagctatgggaaagtcttacccaaccgtgagcgctgattaccagaaggccgttgagaaggcgaagaagaagctcagaggcttcatcgctgagaagagatgcgctcctctaatgctccgtttggcatggcactctgctggaacttacgacgtgagctcgaagaccggtggtcccttcggaaccataaagcacccctccgaactcgctcacggcgctaacaacggtcttgacatcgctgttaggcttttggagccactcaaagcggagtttcctattttgagctacgccgatttc

SEQ ID NO: 238068 - DNA, 379 bp, Glycine max
gagggaaaggtccattcaacattattgtcattcagagaagagaagaggttttgcatcgcatcgcacagagatgaattcaattacaagaagcggatcgcttagtatcatcctcgttgttttcttctctttgcacttcattcttggtttttccgacgactcatcacctgcttcaaaagatgctacaaagacagaacctcatgccggaagaagcactagtgctatagttatcattgtattaattgtgcttgtgttcttttctttgttctcctttgtactttttaagctgtggcggaagaagaaaagggaggagcaatatgctcgtcttttgaaattatttgaagaggatgatgagttagagcttgagcttggcctaagggac

SEQ ID NO: 238069 - DNA, 368 bp, Glycine max
gaacgctctccaatacaaaataaccactcactgaatattcggtcgaagttgtccgccgccgaagaagctaaagttcccgccgtcgaaaagccggtggaggaggtgaaggcgccgaagcttgccaaggagaagaaacctaaggctccgaaggaaaagaagccgaaacaggccaaaactgcttctcatcctccatatctccagatgattaaggacgctttgattgctctgaacgagaaaggaggatcgagtccatatgcgatagcgaagtacatggaggagaagcacaaggcggtgcttcctgcgaatttcaagaagatactaggtctgcaactgaagaaccaagctgccagaaggaaactcgtcaagat

SEQ ID NO: 238070 - DNA, 375 bp, Glycine max
  unsure (1)..(375): unsure at all n locations
gatgcacaagtttgttgagatagctagaagcaataagatgaaaatgaaagtgcttgttttgtttgttgctacagttttggtagcatatgaatgccatggctcagactaccagaagttccctctccaaatgaaaactgggtttggtgggcaatacagcaatgaggtggcatgtgccagttggaggcttggcgtggaagcaaacaacgtagtcaagtggcaaactgttcctgcagcttgcggagagtacatagctgactacgttctangagaccaatatagatcagattccaaaacagttaaccaacaagcttatttctatgctaaatccctcaaactcaccaacaaagatgtctttgtcttggacgttgacgacac

SEQ ID NO: 238071 - DNA, 366 bp, Glycine max
  unsure (1)..(366): unsure at all n locations
ggatgcacaagtttgttgagatagctagaagcaataagatgaaaatgaaagtgcttgttttgtttgttgctacagttttggtagcatatgaatgccatggctcagactaccagaagttccctctccaaatgaaaactgggtttggtgggcaatacagcaatgaggtggcatgtgccagttggaggcttggcgtggaagcaaacaacgtagtcaagtggcaaactgttcctgcagcttgcggagagtacatagctgactacgttctangagaccaatatagatcagattccaaaacagttaaccaacaagcttatttctatgctaaatccctcaaactcaacaacaaagatgtctttgtcttggacg

SEQ ID NO: 238072 - DNA, 343 bp, Glycine max; identical to SEQ ID NO: 237641

SEQ ID NO: 238073 - DNA, 355 bp, Glycine max
ggcacaagtgagtttgttgatcgagataactagaaacagtgtgatgaaaatgaaggtccttgttttcttcgttgctacaattttggtagcatggcaatgccatgcgtacgatatgttccctctccgaatgaacactggctatggtgcccgtactccggaggtgaaatgcgcaagttggaggcttgctgtggaagcacacaacatctttggctttgagaccattcctgaagagtgcgttgaagcaacaaaggaatacatccatggcgaacaatatagatcagactccaaaacagttaaccaacaagcttacttttatgccagggacctcgaagtctatcccaaggacacatttgtg

SEQ ID NO: 238074 - DNA, 313 bp, Glycine max
  unsure (1)..(313): unsure at all n locations
ggcacaagtgagtttgttgatcgagataactagaaacagtgtgatgaaaatgaaggtccttgttttcttcgttgctacaattttggtagcatggcaatgccatgcgtacgatatgttccctctccgaatgaacactggctatggtgcccgtactccggaggtgaaatgcgcaagttggaagcttgctgtggaagcacacaacatctttggctttgagaccattcctgaagagtgcgttgaagcaacanatgaatacatccatggcgaacaatatagatcagactccaaaacagttaaccaagaagcttacttt

SEQ ID NO: 238075 - DNA, 287 bp, Glycine max
ggcacaagtgagtttgttgatcgagataactagaaacagtgtgatgaaaatgaaggtccttgttttcttcgttgctacaattttggtagcatggcaatgccatgcgtacgatatgttccctctccgaatgaacactggctatggtgcccgtactccggaggtgaaatgcgcaagttggaagcttgctgtggaagcacacaacatctttggctttgagaccattcctgaagagtgcgttgaagcaacaaaggaatacatccatggcgaacaatatagatcagactcca

SEQ ID NO: 238076 - DNA, 280 bp, Glycine max
gagggttacacgccgtcgtcactgtttttgtgtgtcgcttcttcggatgtgcagctgcaatggtgaatggacgccatagagaacgtgtcagactctacgtgaggggtacaatccttggatacaaaatgtccaagtcaaaccagtatccaaatacatccctgatccaaattgagggtgtgaatgccaaagaataagtatcatggtatgctggcaataaaatggcctatatctacaatgctaaagtgaagaagaatggaagccattaccgctgcatatgggg

SEQ ID NO: 238077 - DNA, 293 bp, Glycine max
ggcacaagtgagtttgttgatcgagataactagaaacagtgtgatgaaaatgaaggtccttgttttcttcgttgctacaattttggtagcatggcaatgccatgcgtacgatatgttccctctccgagtgaacactggctatggtgcccgtactccggatgtgaaatgcgcaagttggaggcttgctgtggaagcacacaacatctttggctttgagaccattcctgaagagttcgttgaagcaacaaaggaatacatccatggccaacaatatagattaaacgccaaaacag

SEQ ID NO: 238078 - DNA, 298 bp, Glycine max
ggcgagattgaatcgtaagcagcggctaccctaatcctctcctcttcctctctacgaatttcagctatggccgacgaagctgtgggtgttccagatcccacccagatcgatgtcaagctctttaaccgctggagcttcgacgatattgagattactgacatttctctggctgattatatcggagtggcgacatccaagcacgccacgtatgtgcctcacaacgccggcaggtactcggtgaagcggttcaggaaagcgcaacggcccattgttgaaaagctgacaactctctcaagat

SEQ ID NO: 238079 - DNA, 370 bp, Glycine max
ggactaaacccaggctgtaaaccctttttccatctagagttgttgcggctctcttctctgcacactcagaatgcagtccacactcttcaaccccacccattcccttatccccacttcaccacactctatcagatccaattctggtcatgcttctctctccgttcgcgcctccatcgccgtggaaacccccacggagacggtgaagctgaacaagtacagctcccgcatcaccgagcccaaatcgcagggcgcctcccaggccgtgctctacggcgtcggtctctccgaggacgacatggccaagccccaggtcggcgtctcctcggtctggtacgaaggcaacacctgcaacatggcactcctcaacctc

SEQ ID NO: 238080 - DNA, 360 bp, Glycine max
gcctcttctctcgcgtcgctccgcaccagtttcaccgcacgaatatcttgttgtttggagcgatccgagaaaaactctgtaaacatgttggtttaccaggacctccttacaggtgatgagcttctctctgactccttccgttacaaggaaattgagaatggaatgctgtgggaagttgaggggaagtgggttgttaaaggagcagttgatgtagacattggtgcaaatccttctgctgagggtggaggagaagatgagggagttgatgatgcagctgttaaggttgttgacattgttgacacattcagacttcaggagcaacccgcattcgataagaagcagtttgttaccttcatgaag

SEQ ID NO: 238081 - DNA, 224 bp, Glycine max
gaaggtgcaaaagtttgttgtgagctataagctagtttatcgtgaggagaatatgaagttgtttgttttctttgttgctgcagtagttttggtagcatggccatgccatggcgcaggctaccaaaggttccctctccgaatgaaaactggctaaggtgaacgttcttctgaggtaaaatgcgcaagttttaagcttgctgtggaaccacacaacatctgagcct

SEQ ID NO: 238082 - DNA, 386 bp, Glycine max
gaagacttgagagtgagagagagagtgagagagtgagtgagatagagagagacgcttcgcaaatctcaatcgaatctcagaaaaatgagagaaatcatcagcattcacataggtcaggccgggatccaggtcggaaactcctgctgggaactctactgcctcgaacatggcatccagcccgacggcatgatgccttctgactccaccttcggtgtagcccacgacgccttcaacaccttcttcagcgaaaccggatctggcaagcacgtcccccgtgctgtcttcgtcgacctcgaacccaccgtcatcgacgaggtccgctgcggtacctaccgtcaactcttcgaccccgaacaactcatctccggcaaggaagacgccgccaa

SEQ ID NO: 238083 - DNA, 272 bp, Glycine max
ggcaagagtttgttgtgagctataagctagtttatcgtgaggagaatatgaagttgtttgttttctttgttgctgcagtagttttggtagcatggccatgccatggcgcaggctaccaaaggttccctctccgaatgaaaactggctatggtgagcgttcttcggaggtaaaatgcgcaagttttacgcttgctgtggaagcacacaacatccgagccttttaaaccattcctgaagagtgcgttgaaccaacaaaggactacattaatggc

SEQ ID NO: 238084 - DNA, 355 bp, Glycine max
ggcacaagtgagtttgttgatcgagataactagaaacagtgtgatgaaaatgaaggtccgtgttttcttcgttgctacaattttggtagcatggcaatgccatgcgtacgagatgttccctctccgaatgaacactggctatggtgcccgtactccggaggtgaaatgcgcaagttggaggcttgctgtggaagcacacaacatctttggctttgagaccattcctgaagagtgcgttgaagcaacaaaggaatacatccatggcgaacaatatagatcagactccaaaacagttaaccaacaagcttacttttatgccagagacctcgaagtccatcccaggacacatttgtgt

SEQ ID NO: 238085 - DNA, 296 bp, Glycine max
ggccgaaaaccctaacaacacaggcgcagagcgtgatccattgacgaagatggtgcagcgtctcacctaccgcaagaggcacagctatgccaccaaatccaaccaacacagggtcgtcaaaacccctggtgggaagctcgtttatcagaccaccaagaagagggccagcgggcccaagtgccccgtcactggcaagaggattcaggggattccacacttgaggcctgcagagtacaagagatcaaggttacccagaaaccgtaggactgtcaaccgtgcatatggcggagttttgt

SEQ ID NO: 238086 - DNA, 378 bp, Glycine max
  unsure (1)..(378): unsure at all n locations
ggttctattgtttgattgtttgttgttgtaatccgttcttcttctttggtggttcggtgtttgtgttggttttttctctcacctgaaaaatgtcttgctgcggtggtaactgtggttgcggaagctcctgcaagtgcggcaacggctgcggaggctgcaagatgtacccagacttgagctacactgagtcaaccaccaccgagaccttggtcatgggagtggcacctgttaaggctcaatttgagggtgctgaaatgggtgtgcccgctgagaacgatggctgcaaatgtggaccaaactgctcctgcaacccctgcacttgcaagtgangtgttgggagagcaagcttcaagcagagatagcccttaattangaata

SEQ ID NO: 238087 - DNA, 384 bp, Glycine max
ggccattgttgctgtcatcatccgcagctgctgttattcgcaccgcaaacatgcattgagccatggccgtcggaaagaacaagcgcatctccaaagggaaaaagggtggcaagaagaatgcagctgatccctttgccaagaatgattggtatgacattaaggccccttctctttttcaagtgaaaaatgttggcaaaaccctcgtctcacgtacgcacggtaccaagattgcttctgaaggacttaaacatagagtgtttgacgtctccttggctgatcttcaacgggatgaggatcatgcattcaagaagattaggttgagagctgaagatgtgcaagggaataatgtcctgacaaatttctggggaatggatttcacaactg

SEQ ID NO: 238088 - DNA, 366 bp, Glycine max
  unsure (1)..(366): unsure at all n locations
ggcacaagtgagtttgttgatcgagataactagaaacagtgtgatgaaaatgaaggtccttgttttcttcgttgctacaattttggtagcatggcaatgccatgcgtacgatatgttccctctccgaatgaacactggctatggtgcccgtactccggaggtgaaatgcgcaagttggaggcttgctgtggaagcacacaacatctttggctttgagaccattcctgaagagtgcgttgaagcaacaaaggaatacatccatggcgaacaatatagatcagactccaaaacagttaaccaacaagcttacttttatgccagagacctcgaagtcaatcncaaggacacatttgtgttcagtataga

SEQ ID NO: 238089 - DNA, 310 bp, Glycine max
ggaacttctcacgttcatttctacacatccctagctctgtcgttccgtcgttgacgatggcgtttcgggtgcgaagccctgaactccgctctctctttcttctctctctcttgtccatcgcttccgcgaatgtcttcttcgaagagcgtttcgatgacgggtgggaaaatcgatgggttaaatcagattggcaatgagatgagaacgtggctggggagtggaagcatacctctggtcaatggaatggagacgctaatgacacatgtattcaaaccagtgaggattacagattctatgctatttcaactga

SEQ ID NO: 238090 - DNA, 168 bp, Glycine max
ggcacaagtgagtttgttgatcgagataactagaaacagtgtgatgaaaatgaacgtccttgttttcttcgttgctacaattttggtagcatggcaatgccatgcgtacgatatgttccctctccgaatgaacactggctatggtgccggtactccggaggtgaaatg

SEQ ID NO: 238091 - DNA, 291 bp, Glycine max; identical to SEQ ID NO: 235396

SEQ ID NO: 238092 - DNA, 327 bp, Glycine max
gaaggtgcaagagtttgttgtgagctataagctagtttatcgtgaggagaatatgaagttgtttgttttctttgttgctgcagtagttttggtagcatggccatgccatggcgcaggctaccaaaggttccctctccgaatgaaaactggctatggtgagcgttcttcggaggtaaaatgcgcaagttttaggcttgctgtggaagcacacaacatccgagcctttaaaaccattcctgaagagtgcgttgaaccaacaaaggactacattaatggcgaacaatttagatcagactctaaaacagtttaacaacaagctttccttta

SEQ ID NO: 238093 - DNA, 325 bp, Glycine max
gacaacacaagacataatcaaagaaaaaaaaacccttagccaacacaaccatcatggccacctctgctattcagcaatcagcattcactggtcaaactgctctgaagcagctcaatgagttcgtccgcaagaccggtggcgccggcaaaggtcgcactaacatgcgccgcaccgtcaagagtgctcctcagagcatttggtatggccctgaccgtcccaagtacttgggtccattctcggagcagattccatcataccggaccggagaattccctggtgactacggatgggacactgctggattatcagctgacccggaaacctt

SEQ ID NO: 238094 - DNA, 336 bp, Glycine max
  unsure (1)..(336): unsure at all n locations
gatcgaagcanaaaatgaaaacccaaagtgcttctctcctctgtctttttctctctcttgctatccttttggctagtggcactgctgcaagtgcaactccaagaagcgcagtgccaagccaccatgtttcaacattcaacagaagcctttttccttccacttttctctttggaattggttcttctgcttaccaggcagaaggagcagcaagtgtagatgggagaggaccaagcatatgggacacctacactagacagcatactgaaaagatttgggattatagcaccggtgacatgggagctgatttttatcatcgatacaagggtgacataaaaa

SEQ ID NO: 238095 - DNA, 385 bp, Glycine max
agggggcaaaattaattttgttgatcaaaatagcttcaaacatttgaatgaaaatcacggtcgttgttttcttcgttgctaaaattttggtaccatggcaatgccatgcgtacgatatgttcccccacgtaatgaacaatggcaatggtgcccgtactccggatgtgaaatgcgcaagttggacgcctgctgtggaagcacacaagatcattggctttgagaccattcctgaagagtgcgttgaagcatcaaacgaatacatccatggcgaacaatatagatcagactccagtacagttaaccaataagcttacttatatgccagagacctcgatgtccatcccaaggacacatgtgtgttcagtatacatggcatcgtactcac

SEQ ID NO: 238096 - DNA, 379 bp, Glycine max
gacaagtgagtttgttgatcgagataactagaaacagtgtgatgaaaatgaaggtccttgttttcttcgttgctacaattttggtagcatggcaatgccatgcgtacgatatgttccctctccgaatgaacactggctatggtgcccgtactccggaggtgaaatgcgcaagttggaggcttgctgtggaagcacacaacatctttggctttgagaccattcctgaagagtgcgttgaagcaacaaaggaatacatccatggcgaacaatatagatcagactccaaaacagttaaccaacaagcttacttttatgccagagacctcgaagtccatcccaaggacacattgtgttcagtatagatggcaccgtactctct

SEQ ID NO: 238097 - DNA, 338 bp, Glycine max
gacaagtgagtttgttgatcgagataactagaaacagtgtgatgaaaatgaaggtccttgttttcttcgttgctacaattttggtagcatggcaatgccatgcgtacgatatgttccctctccgaatgaacactggctatggtgcccgtactccggaggtgaaatgcgcaagttggaggcttgctgtggaagcacacaacatctttggctttgagaccattcctgaagagtgcgttgaagcagcaaaggaatacatccatggcgaacaatatagatcagactccaaaacagttaaccaacaagcttacttttatgccagagacctcgaagtccatccc

SEQ ID NO: 238098 - DNA, 350 bp, Glycine max
ggcacaagtgagtttgttgatcgagataactagaaacagtgtgatgaaaatgaaggtccttgttttcttcgttgctacaattttggtagcatggcaatgccatgcgtacgatatgttccctctccgaatgaacactggctatggtgcccgtactccggaggtgaaatgcgcaagttggaggcttgctgtggaagcacacaacatctttggctttgagaccattcctgaagagtgcgttgaagcaacaaaggaatacatccatggcgaacaatatagatcagactccaaaacagttaaccaacaagcttacttttatgccagagacctcgaagtcaatcccaaagacacat

SEQ ID NO: 238099 - DNA, 325 bp, Glycine max
  unsure (1)..(325): unsure at all n locations
ggcagcagcaactttagacgccgaagaaagttcatccaatctccgaagcccttcaccgcattgcaaccatgtcgagaagaaaggttagagagccaaaggaagaaaacgtgactctgggcccaactgttagagatggcgaacatgtctttggcgtcgctcgcatctttgcctccttcaatgataccttcagtcatgtcactgatctgtccgggagggaaacacatgtccgcatcacaggtggaatgaacgttaaggctgacagagatgaatcgtctcnctatgctgctatgcttgctgcacaggacgttgctgccagatgcaagga

SEQ ID NO: 238100 - DNA, 288 bp, Glycine max
ggcaggcgaagagatggccaccgttccagggcagctcgtgtgggagatcgtcaagaaaaacaattccttcttggtcaagcagtttggaaggggcacccagagcgtcgaattcagcagagagagcaacaatctctacaacctcaattcgttcaagtactctggtttggcaaacaagaaaactgttactgttcagcctgagggcaaagatcaggctgtgttgttggctacaaccaagacaaagaagcaaaacaagcccgctgcattgctccacaaatctgtgatgaagaa

SEQ ID NO: 238101 - DNA, 293 bp, Glycine max
ggcacaagtttgttgagatagctagaagcaataagatgaaaatgaaagtgcttgttttgtttgttgctacagttttggtagcatatgaatgccatggctcagactaccagaagttccctctccaaatgaaaactgggtttggtgggcaatacagcaatgaggtggcatgtgccagttggaggcttggcgtggaagcaaacaacgtagtcaagtggcaaactgttcctgcagcttgcggagagtacatagctgactacgttctaggagaccaatatagatcagattccaaaaca

SEQ ID NO: 238102 - DNA, 274 bp, Glycine max
ggtgctctgctcgtgcctctacggttatcatttctccatttccattttctctctcacttttcaagaatcgtaagctatgggaaagtcttacccaactgtgagtgctgattaccataatgccgttgagaaagcgaagaataagctcaaatgcttcatcgctgataagagatgcgctcctctaatgctccgtttgagatggcactctgctggaatctttgacaatggcacgaagatcggtggacccttccgaagcatcaatcaccctgccgaactg

SEQ ID NO: 238103 - DNA, 355 bp, Glycine max
  unsure (1)..(355): unsure at all n locations
ggcacaagtgagtttgttgatcgagataactagaaacagtgtgatgaaaatgaaggtccttgttttcttcgttgctacaattttggtagcatggcaatgccatgcgtacgatatgttccctctccgaatgaacactggctatggtgcccgtactccggaggtgaaatgcgcaagttggaggcttgctgtggaagcacacaacatctttggctttgagaccattcctgaagagtgcgttgaagcaacaaaggaatacatccatggcgaacaatatagatcagactccaaaacagttaaccaacaagcttacttttatgccagagaactcgaagttcatcncaaggacacatttgtg

SEQ ID NO: 238104 - DNA, 292 bp, Glycine max
gaacaacaatacgaacaagtgaaaaagcaattaactaagcatatatagcgtgttagacaatgaaaagaacagtgttgtgtcgagagaaatggctaagtggtgcatcatgggggttcttgcccttgtcgtggttgcaagtgccagaaacatgcccaatgacgcaggtttggaggaccagaagaacttcctcgggtatgggttctctggagttggaaacaatgggcttcccattggacgagtgggttctgggtttgatggtaatatgggtgggccttctgggctcagtggattt

SEQ ID NO: 238105 - DNA, 381 bp, Glycine max
  unsure (1)..(381): unsure at all n locations
ggttcaattgtgtgatggttggttgttgtaactcgttcttcttctttggtggttcggtgttggtgttggttttttctctcacctgaaaatgtcttgctgcggtggtaactgtggttgcggaagctcctgcaagtgcggcaacggctgcggaggctgcaagatgtacccagacttgagctacactgagtcaaccaccaccgagaccttggtcatgggagtggcacctgttaaggctcaatttgagggtgctgaaatgggtgtgcccgctgagaacgatggctgcaaatgtggaccaaactgctcctgcaacccctgcacttgcaagtgaggtgttgggaaggcaagcttcaagcagagatagccctttaatangaataatga

SEQ ID NO: 238106 - DNA, 363 bp, Glycine max
  unsure (1)..(363): unsure at all n locations
ggcacaagtttgttgagatagctagaagcaataagatgaaaatgaaagtgcttgttttgtttgttgctacagttttggtagcatatgaatgccatggctcagactaccagaagttccctctccaaatgaaaactgggtttggtgggcaatacagcaatgaggtggcatgtgccagttggaggcttggcgtggaagcaaacaacgtagtcaagtggcaaactgttcctgcagcttgcggagagtacatagctgactacgttctangagaccaatatagatcagattccaaaacagttaaccaacaagcttatttctatgctaaatcgctcanactcaacaacaaagatgtctttgtcttggacg

SEQ ID NO: 238107 - DNA, 294 bp, Glycine max
atccaactcgctagacaacacattaacctttcgcattcaccatctcttcaccttagtcagccactgctaatttctagggttccgaaatggacgctggcggaaagatcaagaagggcgccggaggaagaaagggcggcggccctaataagaatccggtttcaaggtccgtcaaaggtggtctccaattccgcgtcggaagaattggacgttatttgaagaaaggaaagtacgcctaacgtgtctgtagcagtgctcacgtatacttagtcgcagttctcgagtgcctaactgctg

SEQ ID NO: 238108 - DNA, 317 bp, Glycine max
gagggtttttgtcgtcgctactaagagttgctgcttcttcagccactccgcacctcgcaacctctgtgccctcaacaaggatggctgatatcgacactaccgttccagatcccaggcaactcgacgtcaaacgcttcaatcgctggagcttcgaggatgttgaggttaatgataggtctctggctgattacattggagtgtccccatcaaagcatgctacatatgtgcctcacactgctggtaggtactcagtgcacatgttcatgaaggcgcagtgccccagtgttgatacgctcatcaactcgctgatgatgcac

SEQ ID NO: 238109 - DNA, 298 bp, Glycine max
ccacgcgtcaggacgacagaagggggagctggtattcaaggaggacggacaggaatacgcgcaggttctccgaatgctcggaaacggtcgctgcgaagcgatgtgcatcgacggcaccaagcgcctctgccacatccgcggcaagatgcacaagaaggtctggatcgccgccggcgacatcatcctcgtcggcctccgcggctaccaggacgacaaggctgacgtcatcctcaagtacatgcccgatgaggcccgcctcctcaaggcctacggcgagcttcccgacaccaccaggctc

SEQ ID NO: 238110 - DNA, 313 bp, Glycine max
gcacaagtgagtttgttgatcgagataactagaaacagtgtgatgaaaatgaaggtccttgttttcttcgttgctacaattttggtagcatggcaatgccatgcgtacgatatgttccctctccgaatgaacactggctatggtgcccgtactccggaggtgaaatgcgcaagttggaggcttgctgtggaagcacacaacatctttggctttgagaccattcctgaagagtgcgttgaagcaacaaaggaatacatccatggcgaacaatatagatcagactccaaaacagttaaccaacaagcttactttt

SEQ ID NO: 238111 - DNA, 301 bp, Glycine max
gaggtgcaagagtttgttgtgagctataagctagtttatcgtgaggagaatatgaagttgtttgttttctttgttgctgcagtagttttggtagcatggccatgccatggcgcaggctaccaaaggttccctctccgaatgaaaactggctatggtgagcgttcttcggaagtaaaatgcgcaagttttaggcttgctgtggaagcacacaacatccgagcctttaaaaccattcctgaatagtgcgttgaaccaacaaaggactacattaatggcgaacaatttagatcagactctaaaa

SEQ ID NO: 238112 - DNA, 282 bp, Glycine max
gacaacacagaacatgaacagagaaaaaaaaacccttagccaacacaaccatcatggccacctctgctactcagcaatcagcattcactggtcaaactgctctgaagcagctcaatgagttcgtccgcaagaccggtggcgccggcaaaggtcgcactaacatgcgccgcaccgtcaagagtgctcctcagagcatttggtatggccctgaccgtcccaagtacttgggtccattctcggagcagattccatcataccggaccggagaattccctggtgact

SEQ ID NO: 238113 - DNA, 229 bp, Glycine max
agggaagtctcactaggacgagagtcatcatcaggggatgagaatgccgtgaacttgaaggtcatactgcagattgcaatcatcgtggacgtcaaatcctgagatctgataggctacagtctccttttgactacatagatgttgctaaggtggtgaaaccagggaattagaaactggttagaccatgtccgaagcgtgcttttaatgctagtgaaagtgcagcgacatt

SEQ ID NO: 238114 - DNA, 363 bp, Glycine max
  unsure (1)..(363): unsure at all n locations
gaaggtgcaagagtttgttgtgagctataagctagtttatcgtgaggagaatatgaagttgtttgttttctttgttgctgcagtagttttggtagcatggccatgccatggcgcaggctaccaaaggttccctctccgaatgaaaactggctatggtgagcgttcttcggaggtaaaatgcgcaagttttaggcttgctgtggaagcacacaacatccgagcctttaaaaccattcctgaagagtgcgttgaaccaacaaaggactacattaatggcgaacaatttagatcagactctaaaacagttaaccaacaagctttcttttatgctagtgaacgcgaagtccatcacancgacatatt

SEQ ID NO: 238115 - DNA, 314 bp, Glycine max
ggcacaagtgagtttgttgatcgagataactagagacagtgtgatgaaaatgaaggtccttgttttcttcgttgctacaattttggtagcatggcaatgccatgcgtacgatatgttccctctccgaatgaacactggctatggtgcccgtaatccggaggtgaaatgcgcaagttggaggcctgctgtggaagcacacaacatctttggctttgagaccactcctgaagagtgcgttgaagcaacaaaggaatacatccatggcgaacaatatagatgagactccagaacagttaaccaagaagcttactttt

SEQ ID NO: 238116 - DNA, 158 bp, Glycine max
gacagcgaaacagagagtgatttcagtgagtgatcggtgttcacttgatctcatcataatcgtcagcgtcaattgaagaagatgccgatcagaaacatcgccgtcggaaggcctgaagaggcgactcaccccgacacgttgaaggcggctttggctga

SEQ ID NO: 238117 - DNA, 225 bp, Glycine max
gaggtgcaagagtttgttgtgagctataagctagtttatcgtgaggagaatatgaagttgtttgttttctttgttgctgcagtagttttggtagcatggccatgccatggcgcaggctaccaaaggttccctctccgaatgaaaactggctatggtgagcgttcttcggaggtaaaatgcgcaagttttaggcttgctgtggaagcacacaacatccgagccttt

SEQ ID NO: 238118 - DNA, 302 bp, Glycine max
gacacatcatccgttctagtctcaagttctgctcttccaactcctagagagcttttctctgcactcatgggcaaggtcaagatcagcatcaacggatttggaagaattgggcgtttggttgccacagtcgctctgcaaagagacgatgttgaactcgttgccggttacgaccctttcattatcaccgattacatgacatacatgtttaaatacgacagtgttcacggacactggtagcatcacgatgtcaccgttaacgaccaaaaaacccttctcctccgtgacaaagcaatcactggttt

SEQ ID NO: 238119 - DNA, 303 bp, Glycine max
ggcacaagtgagtttgttgatcgagataactagaaacagtgtgatgaaaatgaaggtccttgttttcttcgttgctacaattttggtagcatggcaatgccatgcgtacgatatgttccctctccgaatgaacactggctatggtgcccgtactccggaggtgaaatgcgcaagttggaggcttgctgtggaagcacacaacatctttggctttgagaccattcctgaagagtgcgttgaagcaacaaaggaatacatccatggcgaacaatatagatcagactccaaaacagttaaacaaca

SEQ ID NO: 238120 - DNA, 302 bp, Glycine max
gacttgtaataattcttataacacaacacaacccatggccaccacctccgcattcctcctccttcccctcctcctgctgctccacctcgccatcgccgctcacggcatcggcatcaactacggcacgctcggcgacaaccttccaccgcccgcggcggtggcgaacttcctgaagacgaagacgaccatcgaccgcgtgaagatctacgacgtgaacccggacatcctgcgggccttcgccggcagcggcatctccgtgacggtgaccgcccccaacggcgacatcgccgccttaaccaaaa

SEQ ID NO: 238121 - DNA, 343 bp, Glycine max
cggggcacaagtttgttgagatagctagaagcaataggatgacaatgaaatgcttgttttgtttgttgctacagttttggtagcatatgaatgccatggctcagactaccagaagttccctctccaaatgaaaactgggtttggtgggcaatacagcaatgacgtggcatgtgccacttggaggcttggcgtggaagcaaacaacgtactcaagtggcaaactgttcctgcagcttgcggagagtacatagctgactacgttctacgagaccaatatagattagattccaaaacagttaaccaacaagcttatttctatgctaaatccctcaaactcaacaac

SEQ ID NO: 238122 - DNA, 325 bp, Glycine max
gaaggtgcaagagtttgttgtgagctataagctagtttatcgtgaggagaatatgaagttgtttgttttctttgttgctgcagtagttttggtagcatggccatgccatggcgcatgctaccaaaggttccctctccgaatgaaaactggctatggtgagcgttcttcggaggtaaaatgcgcaagttttatgcttgctgtggaagcacacaacatccgagcctttaaaaccattcctgaagagtgcgttgaaccaacatacgactacattaatggcgatcaatttagatcagactctaaaacagttatacaacaagctttcttt

SEQ ID NO: 238123 - DNA, 356 bp, Glycine max
  unsure (1)..(356): unsure at all n locations
ggcacaagtgagtttgttgatcgagataactagaaacagtgtgatgaaaatgaaggtccttgttttcttcgttgctacaattttggtagcatggcaatgccatgcgtacgatatgttccctctccgaatgaacactggctatggtgcccgtactccggaggtgaaatgcgcaagttggaggcttgctgtggaagcacacaacatctttggctttgagaccattcctgaagagtgcgttgaagcaacaaaggaatacatccatggcgaacaatatagatcagactccanaacagttaaccaacaagcttacttttatgccagagacctcgaagtcaatccaaggacacatttgtgtt

SEQ ID NO: 238124 - DNA, 288 bp, Glycine max
gacaccttcgaattttcttttccttcactttcccgagaaaaaaaagacactctttcactttcttgactacggtctcacttcgacatggctcgtactaagcaaactgctcgcaagtccaccggcggcaaggcgccacgtaagcagttggcgaccaaggccgcccggaagtccgctcccgcgaccggaggagtgaagaagccccaccgcttcaggccgggaaccgtggcgctgagggaaatcagaaagtatcagaagagcaccgagcttctcatcaggaagcttccgttt

SEQ ID NO: 238125 - DNA, 265 bp, Glycine max
ggagctgacaccgagaagaagaagatggagatgtatcagatctggaacaggagaatagcgttgggagcgttcgcgtttgttctgcttttcctatcggcctcagcagacgacgtcgttgtgctctctgaagataacttcgagaaggaagttggtcaggacagaggagctctcgttgagttctatgctccttggtgtggacactgcaaaaagcttgctccagaatatgaaaagcttggtagcagcttcaagaaagccaaatctgttt

SEQ ID NO: 238126 - DNA, 293 bp, Glycine max
gagtgcacaagtgagtttgttgatcgagataactagaaacagtgtgatgaaaatgaaggtccttgttttcttcgttgctacaattttggtagcatggcaatgccatgcgtacgatatgttccctctccgaatgaacactggctatggtgcccgtactccggaggtgaaatgcgcaagttggaggcttgctgtggaagcacacaacatctttggctttgagaccattcctgaagagtgcgttgaagcaacaaaagaatacatccatggcgaacaatatagattagactccaaaa

SEQ ID NO: 238127 - DNA, 319 bp, Glycine max
ccacgcgtcagcacacgcgtccgacagaaggggaaggtgcacgagtttgttgtgagctataagctattttatcgtgaagagaatatgaagttgtttgttttctttgtgtgctgcagtacttctggtagcatggccatgccatggcgcaggctaccaaatgttccctctccgaatgaaaactggctatggtgaacgttcttcggaagtaaaatgcgcaagttttaagcttgctgtggtaccatacaacatccgagcctttaaaaccattccatgatactgcgttaatgcatacaaggactacattaatggcgaacaattt

SEQ ID NO: 238128 - DNA, 302 bp, Glycine max
ggcacaagtgagtttgttgatcgagataactagaaacagtgtgatgaaaatgaatgtccttgttttcttcgttgctacaattttggtagcatggcaatgccatgcgtacgagatgttccctctccgaatgaacactggctatggtgcccgtactccggacgtgaaatgcgcaagttggaggcttgctgtggaagcacacaacatctttggctttgagaccattcctgaagagtgcgttgaagcaacaaaggaatacatccatggcgaacaatataaatcagactccaaaacagttaaccaac

SEQ ID NO: 238129 - DNA, 293 bp, Glycine max
ggaaatcgagaagaagaagaagaagaagatggagaagtatcagatctggagcaggagaatagcgttggcagcgtttgcgtttgctctgctgttccaatcggcctcagcagacgacgtcgttgtgctctctgaagataacttcgagaaggaagttggtcaggacagaggagctctcgttgagttctatgctccttggtgtggacactgcaaaaagcttgctccagaatatgaaaagcttggtagcagcttcaagaaagccaaatctgttttaattggcaaggttgactgtgatg

SEQ ID NO: 238130 - DNA, 330 bp, Glycine max
ggaacctttgcattctattcattcaagattcagcaagtgcgttttggaagcagagaccgaaatacttcgagttttctgaagttgttgttggttgttgattaagatggcccgtacaaagcaaactgctcgtaagtcaactggaggaaaagctcccaggaagcagcttgcaaccaaggctgcacgtaagtctgcaccaacaactggtggtgtgaagaagcctcatcgttatcgccctggaactgttgctcttcgtgagattaggaaataccagaagagcactgagctcctaatcaggaagcttcctttccagaggttggttcgtgaaattgc

SEQ ID NO: 238131 - DNA, 343 bp, Glycine max
  unsure (1)..(343): unsure at all n locations
agaaggggagagtggtggggtgtgcagaagagcgtcgcagttgtaaccctaatcagaagaagcgcagcttcaagcgagtgacagccaccagccatgggtcgtatgcacagccgcggtaagggtatatcctcttctgctttgccctacaaaaggacacctcctagctggctcaagatctcttcgcaagatgtcgaagaaaatatctgcaagtttgcgaagaaaggtttgaccccgtctcagattggtgtcattctcagagattctcacggtattgctcaggtcaatagcgtcactggcagcanaatccttcgcatcctcaaagctcacggacttgcgcctgaaa

SEQ ID NO: 238132 - DNA, 254 bp, Glycine max
cagaaacatcgccgtcggaaggcctgaagaggcgactcaccccgacacgttgaaggcggctttggctgagttcatctcaaccttcatcttcgtgttcgccggctcaggctccggcatcgcctacaacaagctcaccgacaacggcgctgccacccctgccggcctcatctccgcctccatcgcccatgcattcgccctcttcgtcgccgtctccgtcggcgccaacatctccggcggccacgtcaaccccgccg

SEQ ID NO: 238133 - DNA, 307 bp, Glycine max
ggcacaagtgagtttgttgatcgagataactagaaacagtgtgatgaaaatgaaggtccttgttttcttcgttgctacaattttggtagcatggcaatgccatgcgtacgatatgttccctctccgaatgaacactggctatggtgcccgtactccggaggtgaaatgcgcaagttggaagcttgctgtggaagcacacaacatctttggctttgagaccattcctgaagagtgcgttgaagcaacaaaggaatacatccatggcgaacaatatagattaaactccaaaacagtttatcaacaagct

SEQ ID NO: 238134 - DNA, 277 bp, Glycine max
gacagaagacagagtgagacgcttctcacgatggagggaggagtatcctacgcgcgcatgcctcgggtcaaaatccgcgagctgaaggacgactacgccaagttcgagctccgcgacaccgacgcgagcatcgccaacgcgctgcggcgcgtgatgatcgcggaggtgccgacggtcgccatcgacctcgtggagatcgaggtcaactcctcggtgctcaatgacgagtttatcgctcaaaggctgggcctcatccccctcactagcgagcgcgcca

SEQ ID NO: 238135 - DNA, 281 bp, Glycine max
gagtgctttctatttgttcattttgttgttcgaagccaaaaccctagcagccggcgagaatggcagacgttgaggttgatgcggcggcagcggcaggggcagcgcagccgaagaagagaacgttcaagaaattcagcttcaggggcgtggatctggacgcgcttctggacatgtccaccgacgaactggtgaagatgttcagtgcgcgtgcacgtagaaggttccagagaggtctgacgaggaagcccatggccttgattaagaagctccgcaaagctaaa

SEQ ID NO: 238136 - DNA, 338 bp, Glycine max
ggagagagagagaaggcaagatgtcgaagagaggacgccgtggctcggccgggaacaagttccggatgtcgctgggtctgccggtggcggcgacggtgaactgcgccgacaatacgggggcgaagaacctctacatcatatcggtgaaagggatcaaagggcgtttgaaccgtctcccctcggcttgcgttggcgacatggtgatggccaccgtgaagaaagggaaacccgatctgaggaagaacgttttgccagctgtcattgttcgccagcgcaagccatggcgccgaaaggacggcgtctacatgtatttcgaagataatgccggtgttattgtc

SEQ ID NO: 238137 - DNA, 389 bp, Glycine max
gattatatttgagttcaaacatatcaaagccatggccacctcgaacttctctaatgatctctccgtctccctagccttctttttggtgctacataccaaagcacactcgaccgataccgtttctttcaccttcaacaagttcaacccagtcgatccaaacattatgctccaaaaagatgctagtatttcatcctctggggtgttacaactcaccaaagttggcagcaaccgcttgcccacctcgggatctctcggtcgtaccctttacgctgccccaatccagatttgggacagcgaaaccggcaatgtatccagctgggctacatcctttaaattcaacattttcccaaccaaacaaatcattctcacctgacgggcttgccttcttc

SEQ ID NO: 238138 - DNA, 294 bp, Glycine max
gattatatttgcgttgaaacatgtcaaagccatggccacctccaacttctctaatgatctctccgtctccctagccttcgttttggtgctacatagcaaagcacactcgaccgataccgtttctttcaccttcaacaagttcaatccagtcgatccaaacattatgctccaatatgatgctagtatttcatcctctgaggtgttacaactcactaaagttggcaccaacggcttgcccacctcgggatctctcggtcgtgccctttacgctgccccaatccagatttgggacag

SEQ ID NO: 238139 - DNA, 302 bp, Glycine max
ggcacaagtgagtttgttgatcgagataactagaaacagtgtgatgaaaatgaaagtccttgttttcttcgttgctacaattttggtagcatggcaatgccatgcgtacgatatgttccctctccgaatgaacactggctatggtgcccgtactccggaggtgaaatgcgcaagttggaagcttgctgtggaagcacacaacatctttggctttgagaccattcctgaagagtgcgttgaagcaacataggaatacatccatggcgaacaatatacatcagactccaaaacagttaaccaac

SEQ ID NO: 238140 - DNA, 359 bp, Glycine max
gaaggtgcaagagtttgttgtgagctataagctagtttatcgtgaggagaatatgaagttgtttgttttctttgttgctgcagtagttttggtagcatggccatgccatggcgcaggctaccaaaggttccctctccgaatgaaaactggctatggtgagcgttcttcggaggtaaaatgcgcaagttttaggcttgctgtggaagcacacaacatccgagcctttaaaaccattcctgaagagtgcgttgaaccaacaaaggactacattaatggcgaacaatttagatcagactctaaaacagttaaccaacaagctttcttttatgctagtgaacgccaagttcatcaaaacgaca

SEQ ID NO: 238141 - DNA, 269 bp, Glycine max
ggacacatcactctccttacactcacaacagagttcacacagcgcagctcatcctgtcgtcagaattcggcatcagcttcctccatggctctcgcaaccgcacccatggctggtatggtcgttaatctggtcccatcagccgcagaagtgagaatggtgaacatgatgaagactgtcatcaagcaggtctcctcagggaacccatggtacggcccagaccgattcgcctacgtgggcacattctctggttagctcccgtcctacctaac

SEQ ID NO: 238142 - DNA, 258 bp, Glycine max
ggcacaagtgagtttgttgatcgagataactagaaacagtgtgatgaaaatgaaggtccttgttttcttcgttgctacaattttggtagcatggcaatgccatgcgtacgatatgttccctctccgaatgaacactggctatggtgcccgtactccggaggtgaaatgcgcaagttggaggcttgctgtggaagcacacaacatctttggctttgagaccattcctgaagagtgcgttgaagcaacaaaggaatacat

SEQ ID NO: 238143 - DNA, 178 bp, Glycine max
ggaaacagatagtgatttcagtgagtgatcggtgttcacttgatctcatcataatcgtcagcgtcaactgaagaagatgccgatcagaaacatcgccgtcggaaggcctgaagaggcgactcaccccgacacgttgaaggcggctttggctgagttcatctcaaccttcatcttcgtg

SEQ ID NO: 238144 - DNA, 325 bp, Glycine max
gaaggtgcaagagtttgttgtgagctataagctagtttatcgtgaggagaatatgaagttgtttgttttctttgttgctgcagtagttttggtagcatggccatgccatggcgcaggctaccaaaggttccctctccgaatgaaaactggctatggtgagcgttcttcggaggtaaaatgcgcaagttttaggcttgctgtggaagcacacaacatccgagcctttaaaaccattcctgaagagtgcgttgaaccaacaaaggactacatttatggggaacaatttaaattagactctaaaacagtttaacaacaagctttcctt

SEQ ID NO: 238145 - DNA, 330 bp, Glycine max
ggaacctttgcattctattcattcaagattcagcaagtgcgttttggaagcagagaccgaaatacttcgagatggcccgtacaaagcaaactgctcgtaagtcaactggaggaaaagctcccaggaagcagcttgcaaccaaggctgcacgtaagtctgcaccaacaactggtggtgtgaagaagcctcatcgttatcgccctggaactgttgctcttcgtgagattaggaaataccagaagagcactgagctcctaatcaggaaacttcctttccaaaaggtggttcgtgaaattggccaagaattcaagaatgattcgcggttccaaa

SEQ ID NO: 238146 - DNA, 324 bp, Glycine max
ggggggagaagactagatgttaagaagttgatagtttgaagtgtcatgacggcttgtggcacaatttcgtcgctgctagttggaagagatcttcatgcacagattattagtagtaacatccataccatcatagttgtaagaagcacgttggtatggtactactgcagttgtgaagaatactccgatgccttcgtggtgctccaatagatgcctatcaaggatgttgtatcaaggactgccattaccgctggttgtaccatcctccggcatgatcatgatgctcaggagttgctgcaagaaatgatggaagaaggcgtgttgcct

SEQ ID NO: 238147 - DNA, 352 bp, Glycine max
ggcacaagtgagtttgttgatcgagataactagaaacagtgtgatgaaaatgaaggtccttgttttcttcgttgctacaattttggtagcatggcaatgccatgcgtacgatatgttccctctccgaatgaacactggctatggtgcccgtactccggaggtgaaatgcgcaagttggaggcttgctgtggaagcacacaacatctttggctttgagaccattcctgaagagtgcgttgaagcaacaaaggaatacatccatggcgaacaatatagatcagactccaaaacagttaaccaacaagcttacttttatgccagagacctcgaagtccatcccaaaggacaacat

SEQ ID NO: 238148 - DNA, 391 bp, Glycine max
ggccgttctcatctctcttcccagttctcacctcaccgctgcatcttcacgtcgtctctaacgagggaaaatgagtcgaggaggtgcagcagcagcgaagggaaagaagaagggtgctacattcaccattgactgtgcaaagccagtagaagacaagatcatggacattgcttctctcgagaagtttcttcaagagaggatcaaggttggtggcaaagctggtgctcttggtgactctgttaccgttacacgtgagaagactaagattattctcacctctgactgtaacttttccaaacggtatttgaagtacttgacgaagaagttcttggagaaaccacaagttgcgagaacgggctcagagtgattgcttcaaacaaggatagaagtg

SEQ ID NO: 238149 - DNA, 382 bp, Glycine max
ggtgcaagagtttgttgtgagctataagctagtttatcgtgaggagaatatgaagttgtttgttttctttgttgctgcagtagttttggtagcatggccatgccatggcgcaggctaccaaaggttccctctccgaatgaaaactggctatggtgagcgttcttcggaggtaaaatgcgcaagttttaggcttgctgtggaagcacacaacatccgagcctttaaaaccattcctgaagagtgcgttgaaccaacaaaggactacattaatggcgaacaatttagatcagactctaaaacagttaaccaacaagctttcttttatgctagtggaacccaaagtcaatcacaacgacgtatttaaattcggcatagataacac

SEQ ID NO: 238150 - DNA, 333 bp, Glycine max
gaaacaaaaaccatcaccaaaaaagaaaatgatgctcggagagcaccatcgcgcgaatccaacggttcacgtgccaccgtggccaacccacgacgatccaacggccgagatgtactccgcgtttttaacaaacgacgtcaatgctggtgagtactctccgtactatcttcaagaagcactaacggctctgcagcgttttctgccgtctaacgaaacggacgctgactcggacacggaggctcaacccgacgcggcggtggacgcgtactcgtgcgaccatttccgcatgtacgagttcaaggtccgtcgatgcgcacgtggcaggtcacacga

SEQ ID NO: 238151 - DNA, 263 bp, Glycine max
gacagccgcagcttgaaacagagcagagcgaccttgaagagctatggctgtcggaaagaataagaggatttccaagggaaagaagggtggcaagaagaaagccgctgatccctttgccaagaaagactggtacgatatcaaggccccttccctcttccaggtcaagaatattggcaaaaccctcgtctctcgtacccagggaaccaagattgcatccgaaggactcaaacatcgggtttttgaggtctcattggctgatctcc

SEQ ID NO: 238152 - DNA, 305 bp, Glycine max
ggcagttcaattccaatatattccattctctctgtgtatttccctacctctcccttcaagatgcagatcttcgtcaagaccctcaccggcaagaccatcacccttgaggtggaaagctctgacaccatcgacaacgtcaaggccaagatccaggacaaggaaggaatccccccggaccagcaacgtctcattttcgccggaaagcaacttgaggacggccgtacccttgctgactacaacattcagaaggagagtactcttcacctcgtccttcgtctccgttgtggcatgcaaattttcgtcaa

SEQ ID NO: 238153 - DNA, 233 bp, Glycine max
agggacacaacttaatttgttgatccagattactaaaaacaatgtgatgaaaattaaaggccttgttttcctccatgccaaaaatttgggaacaatggaatgccaatcgtaacaaaagttcactcaccgaatgaacactggcttatgggcccgtattccggaagtgatatgcgcatctttgacgcttgctgtagaagcacacaagatctttggctttgagaccattcctgaag

SEQ ID NO: 238154 - DNA, 331 bp, Glycine max
gaaagtgcaagagtttgttgtgagctataagcaagtttatcgtgaggataataggaagttgtttgcttttctttgatgctgcagtaattatggtaacatggacatgccatggcgcacgctaccaaaagttccctctccgaatgaaaactggctatggtgagcgttcttcgcaggtaaaatgcgcacgttttacgcttgctgtggtatcacacatcatccgagcctttaaaactactcctgaacagtgcgttgatacatcaatggactacattaatggtgaacaatttagatcatactctaaaacacttaaccaacaagctttcatttatgc

SEQ ID NO: 238155 - DNA, 391 bp, Glycine max
  unsure (1)..(391): unsure at all n locations
ggcacaaattaatttggtgattgaaaaaactaaaaacaattttattaaaattaaaggccttggtttccttcgtggcaaaaattttggaagcaaggcaattgcaatgcgtaacatatgttccccctccaattgaacactggctatggtgccgtactcgggagtgaaatggcaagttggaggcttgctgtggaagcacacaacatctttggctttgagaccattcctgaagagtgcgttgaggcaacanatgaatacatccatggcgaacaatatagatcagactccaaaatagttaaccaacaagcttacttttatgccagagacctcgaagtccatcccaaggacacattttggttaagtatagatggcaccgtactctctaatattccat

SEQ ID NO: 238156 - DNA, 338 bp, Glycine max
ggcacaagtttgttgagatagctagaagcaataagatgaaaatgaaagtgcttgttttgtttgttgctacagttttggtagcatatgaatgccatggctcagactaccagaagttccctctccaaatgaaaactgggtttggtgggcaatacagcaatgaggtggcatgtgccagttggaggcttggcgtggaagcaaacaacgtactcaagtggcaaactgttcctgcagcttgcggagagtacataactgactacgttctaagagaccaatatagatcagattccaaaacagttaaccaacaagcttatttctatgctaaatccctcaaactcaac

SEQ ID NO: 238157 - DNA, 332 bp, Glycine max
ggcacaagtgagtttgttgatcgagataactagaaacagtgtgatgaaaatgaaggtccttgttttcttcgttgctacaattttggtagcatggcaatgccatgcgtacgatatgttccctctccgaatgaacactggctatggtgcccgtactccggaggtgaaatgcgcaagttggaggcttgctgtggaagcacacaacatctttggctttgagaccattcctgaagagtgcgttgaagcaacaaaggaatacatccatggcgaacaatatagatcagactccaaaacagttaaccaacaagcttacttttatgccagagacctcgaag

SEQ ID NO: 238158 - DNA, 388 bp, Glycine max
  unsure (1)..(388): unsure at all n locations
ggccgaaagaaagaaacctaacaacgccatagcgtttcctaacccatcgtgcgaggtccctcgacctccgcacaaccccaactccaaggggctgtgcctgtcgccgtcgtcttccacgctcatgtcggaacccgacatccacgcgccgccgttcctgctccagcgcccgccgctcctgcagtcggcctcgccactcttcaagcagcgatcgtggtcgccggacgccttccgcgatgaggcgtggctccggcgcaaggggaactgcaagaaccgccgcagcaagagcgtcaccgatgaggacgtggacgagctcaaagcctgcatcgagttgggcttcggattcgattcctcccccgagaacgagctccatcaacgcntctccgatact

SEQ ID NO: 238159 - DNA, 278 bp, Glycine max
gaccacattccaaaacacaaacacatacattgtagtatcacttttgtctcggaatttgttcttttgagttatggcaagcttaaaggttgcatgtgtggttttgatgtgcatggctgtgatgagtgcaccaatgatggtgcaagccgtgtcatgcaatgatgtttctgtgaacctagcaccgtgcctatcttacctgatgcagggtggagatgttccagaatcgtgctgtagcggagtgaggaacattctgggttctgccagcaccacctttgacaaac

SEQ ID NO: 238160 - DNA, 285 bp, Glycine max
ggcgcgcacccagagaggaagcttagagagagagagagagatagagagagagaggagagagtattggcgcttcatcaagatgggtatttctagggattccatgcacaagatgcgtgccactggtggcaagaaaaaggcttggagaatgacgagaaagtatgagcttgggcgtcaggcaacaatgaccaagttatcaggcaacaggacaatcaggaggattcgtgttatatgtggcaatgttaaatggacggcattgaagctggatactggcaattactcaagggg

SEQ ID NO: 238161 - DNA, 321 bp, Glycine max
gacaacacaacgcaacacaacgcgcactctctcttttctctcttaacacaaaagccctatcgttcttcgcggtttcgccgattctcgccatgccgaaagccaaatccgacgccaaagccgccgatagccggttgaagcgcaagggcgctggtgctggaaggaagcaatcgaagaaagctgctaaggatcctaacaagccaaagagacctccaagcgctttcttcgttttcatgtccgagttcagagagcagtttaagaatgagcatcctaacaacaaatccgtcgctgttgtccgtaaagctggtggtgacaaatggaaat

SEQ ID NO: 238162 - DNA, 332 bp, Glycine max
ggcacaagtgactttgttgatcgagatacctagaaacagtgtgatgaacattaacgtccttgatttcctcgttgctacaattttggtagcatggcaatgccatgcgtacgatatgttcgctctccgaatgaacactggctatggtgcccgtactccggatgtgaaatgcgcaagttggaagcttgctgtggaagcacacaacatctttggctttgagaccattcctgaagagtgcgttgaagcaacaaaggaatacatccatggcgaacaatatagatcagactccaaaacagttaaccaacaagcttacttttatgccagagacctcgaag

SEQ ID NO: 238163 - DNA, 326 bp, Glycine max
aggggcaaaagttaatttgttgattgaaataactaaaaacaatgttatgaaaattaaaggccttggtttcctccgtgccaaaattttggtagcatggcaatgccatgcgtacgatatgttccctctccgaatgaacactggctatggtgcccgtactccggaggtgaaatgcgcaagttggaggcttgctgtggaagcacacaacatctttggctttgagaccattcctgaagagtgcgttgaagcaacaaaggaatacatccatggcgaacaatatagatcagactccaaaacagttaaccaacaagcttacttttatgccagag

SEQ ID NO: 238164 - DNA, 392 bp, Glycine max
ggcacaagtgagtttgttgatcgagataactagaaacagtgtgatgaaaatgaacgtccttgttttcttcgttgctacaattttggtagcatggcaatgccatgcgtacgatatgttccctctccgaatgaacactggctatggtgcccgtactccggaggtgaaatgcgcaagttggaggcttgctgtggaagcacacatcatctttggctttgagaccattcctgaagagtgcgttgaagcaccacaggaatatatccatggcgaataatatagatcagactccaaaacagttaaccaccaagcttacttttatgccagagaactcgaagttcatcgcaaagacacatttgtgttcactatagatggcaccgtactctctaatattccat

SEQ ID NO: 238165 - DNA, 347 bp, Glycine max
ggcatcaattcaaaatatatcatcaattataagcatgggtttgtggaacacaacgaatgcagtgtcttgccgctttcacaagtttggtgatgaccaaaagaatctggtcttccaaggtgatgccacgtcttcttccaggggcatagaactcacaaagttagacggtggaggaaaaccagtgggtggcagtgtggggagagcgttatactcttctccagtgcacctttgggaaagctctacagtggtcgcaagctttgaaaccgacttcaccttttccatctcatcagactctactactccaggtgatggccttgccttcttcattgcaccatttgacactaaaatcc

SEQ ID NO: 238166 - DNA, 308 bp, Glycine max
gattgtagaactgaacaagggtttctctttctctttctctgtctgcttcttcactttctctcgtttcaatcgaaaaaaatcatgggcagaaaattcttcgtcggtggcaactggaaatgcaatgggaccactgaggaggtgaagaagattgttactactttaaatgaagctaaagtccctggagaagatgttgtagaagttgttgtgagccctccttttgtgttccttccttttgtaaaaagtttgctgcgccctgatttccatgtctcggcccaaaattgttgggttcgcaaaggtggtgcttatac

SEQ ID NO: 238167 - DNA, 383 bp, Glycine max
ggcacaagtgagtttgttgatcgagataactagaaacagtgtgatgaaaatgaaggtccttgttttcttcgttgctacaattttggtagcatggcaatgccatgcgtacgatatgttccctctccgaatgaacactggctatggtgcccgtactccggaggtgaaatgcgcaagttggaggcttgctgtggaagcacacaacatctttggctttgagaccattcctgaagagtgcgttgaagcaacaaaggaatacatccatggcgaacaatatagatcagactccaaaacagttaaccaacaagcttacttttatgccagagaactcgaggttcatcccaaggacacatttgtgttcagtatagatggcaccgtactctcta

SEQ ID NO: 238168 - DNA, 315 bp, Glycine max
agaacatatgagtttgatgatcagaatcattagcacaagtatgatgaactatgtctagaccataatggcctcttcagtgctggtatctgtggatctcaatcctgtccctttcactgttgcgaactcctcatttacaggccttaccgcgctcgtaaggaactcgtcttcagtcagagttgtgggcattggttgcaagaagatcacaactgataattcttaaggaattaatggtggtatggctttgcaggaaggagttgctgcaactggcaagaatagaaatgaaactggcgtttactagtttgtcaaccttaactg

SEQ ID NO: 238169 - DNA, 307 bp, Glycine max
ggcacaagtgagtttgttgatcgagataactagaaacagtgcgatgaaaatgaaggtccttgttttcttcgatgctacaattttggtagcatggcaatgccatgcgtacgatatgttccctctccgaatgaacactggctatggtgcccgtactccggaggtgaaatgcgcaagttggaggcttgctgtggaagcacacaacatctttggctttgagaccattcctgaagagtgcgttgaagcaacaaaggaatacatccatggcgaacaatatagattaaactccaaaacagttaaccaacaagct

SEQ ID NO: 238170 - DNA, 325 bp, Glycine max
gactcaagcacaacatctctatcgagtaaattaactatgatgcctaccctactattatccctttccttcctgcctctctttgctttcctggctctttcagaagatgttgaacaagttgtggacataagtggcaaccccattttcccaggtggcacatattagattatgccatcaacttggggcgctgccggtggtggattgacactatgccggacaggaaactcaaactgcccagttactgttttgcaagattactcataaatcttccgtggtacaccagtcaaattcagcatacctgggataagccctggaatcaaccttaaaa

SEQ ID NO: 238171 - DNA, 285 bp, Glycine max
gaggtgcaagagtttgttgtgagctataagctagtttatcgtgaggagaatatgaagttgtttgttttctttgttgctgcagtagttttggtagcatggccatgccatggcgcaggctaccaaaggttccctctccgaatgaaaactggctatggtgagcgttcttcggaggtaaaatgcgcaagttttaggcttgctgtggaagcacacaacatccgagcctttaaaaccattcctgaagagtgcgttgaaccaacaaaggactacattaatggcgaacaattt

SEQ ID NO: 238172 - DNA, 312 bp, Glycine max
ggcacaagtttgttgagatagctagaagcaataagatgaaaatgaaagtgcttgttttgtttgttgctacagttttggtagcatatgaatgccatggctcagactaccagaagttccctctccagatgaaaactgggtttggtgggcaatacagcaatgaggtggcatgtgccagttggaggcttggcgtggaagcaaacaacgtagtcaagtggcaaactgttcctgcagcttgcggagaatacatagctgactacgttctacgagaccaatatagattaaattccaaaacagtttaacaaaaagcctaat

SEQ ID NO: 238173 - DNA, 348 bp, Glycine max
  unsure (1)..(348): unsure at all n locations
gacaacacaacacaacgcgcactctctctttttctctctgtnttttgttctctcttcgcttaaactctatcgttcttctcgttttcgccgattctcgccatgccgaaagctaaatccgacgccaaagccgccgatagcaggttgaagcggaagggcgctggtgctgggaggaagcaatcgaggaaagctgctaaggaccctaacaagccgaagagacctccaagcgctttcttcgttttcatgtccgagttcagagagcagttcaagaaggagcatcctaacaacaaatccgtcgctgttgtcggcaaagctggtggtgaaaaatggaaatcgctatctgatgctgaa

SEQ ID NO: 238174 - DNA, 318 bp, Glycine max
gactcaacacttcaaaacactcataacacaaagcacaaagcaaagctcatccctgagttaaaaaatggcagcagcttcctcatggctctccacccgatccttgctggcaagccgtgaagctgggcccatcatccccacaagtgggaacggtgagcatgaggaagaccgtcaccaagcacgtctcctcaggaagcccatggtactggccataccgagtcaagtacttgggcccattctctggcgaacccccgtcctacctaaccggtgagttcccaggcgactacggctgggacactgctgggctttccgcagacccag

SEQ ID NO: 238175 - DNA, 325 bp, Glycine max
gaatggtccggtgaagtgttcggattgcggcgacgtgagcggttcgctgcccgcgacgttgtgagaagtccactgaaccttatcatttacaggaagacgacgatgacgaggaggaagatgaagaagaaatggaggacgaggaacttgaagctggtattcagtctgttgatagtctgtcaagcactctcactggagtggaaacacctgatgttattgacctccggaagcaacagacgaaggagcctgagaggcctctttatcaagtactcgaagagaaggaagaaaaaattgctcctggaactttgcttggaaccactcacactta

SEQ ID NO: 238176 - DNA, 351 bp, Glycine max
ccacgcgtaaagtaggctgcgagaacgacagaaaggggaatcgatttttttttccgttcagtttcgaagctacatttcggttcaatcacaaaatggctctatcgcgcgtggctcaatcgtcgccatcacagtcgaatcgtttgaaacccctctcgtcgtacttatccctacgacgccgttcggtgtcgacctcgtcagtgcgcctcaccgtggagacctcggtgcacttcacctcccacaactgcgatgcgcctccacgcgccgtggcgacgtcctcagcggaactcgtctcgttcttccgtgacatggcgctgatgcggcggatggagatcgcagaggactcgctctaca

SEQ ID NO: 238177 - DNA, 381 bp, Glycine max
ggcacaagtttgttgagatagctagaagcaataagatgaaaatgaaagtgcttgttttgtttgttgctacagttttggtagcatatgaatgccatggctcagactaccagaagttccctctccaaatgaaaactgggtttggtgggcaatacagcaatgaggtggcatgtgccagttggaggcttggcgtggaagcaaacaacgtagtcaagtggcaaactgttcctgcagcttgcggagagtacatagctgactacgttctaggagaccaatatacgtcagattccaaaacagttaaccaacaagcttaattctatgctaaatccctcaaactcaccaacaaagatgtctttgtcttggacgttgacgacactactctct

SEQ ID NO: 238178 - DNA, 289 bp, Glycine max
ggcacaagtgagtttgttgatcgagataactagaaacagtgtgatgaatatgaaggtccttggtttcttcgttgctagaattttggtagcatggcaatgccatgcgtacgatatgttccctctccgaatgaacactggctatggtgcccgtaatccggaggttaaatgctcaagtttgaggcttgctgtggaagcacacaacagctttggctttgagaccagtcctgaagagtgcgttgaagcaacaaacgaatacatttatagcgaacaatatagatcagacttcaaa

SEQ ID NO: 238179 - DNA, 384 bp, Glycine max
gatgcacaagtttgttgagatagctagaagcaataagatgaaaatgaaagtgcttgttttgtttgttgctacagttttggtagcatatgaatgccatggctcagactaccagaagttccctctccaaatgaaaactgggtttggtgggcaatacagcaatgaggtggcatgtgccagttggaggcttggcgtggaagcaaacaacgtagtcaagtggcaaactgttcctgcagcttgcggagagtacatagctgactacgttctaggagaccaatatagatcagattccaaaacagttaaccaacaagcttaattccatggctaaaatccctcaaactcaccaacaaagatgtctttgtcttggacgttgacgacactactctc

SEQ ID NO: 238180 - DNA, 384 bp, Glycine max
gacactaaacaagttaaaagaagagcatcactgaactaacaaagcaaccctatgtcgaaggtggtttgtgtcaccggagccagcggcgccatcggatcatgggtggtcctactcctcctccagcgtggttacaccgtccatgccaccgtccaagatatcaaggatgaaaatgagacgaaacatttggaggaaatggaaggagcaaagagtcatctccatttttttgaaatggatcttcttgacatcgactccattgccgctgccataaagggttgttccggcgtaatccaccttgcatgtcctaacatcattggtcaagtcgaagattcccgaaaaacaaatattggaaccggcgataaaaggaacggttaatgtgttgaaggc

SEQ ID NO: 238181 - DNA, 317 bp, Glycine max; identical to SEQ ID NO: 235644

SEQ ID NO: 238182 - DNA, 266 bp, Glycine max
ggcaagagtttgttgtgagctataagctagtttatcgtgaggagaatatgaagttgtttgttttctttgctgctgcagtagttttggtagcatggccatgccatggcgcaggctaccaaaggttccctctccgaatgaaaactggctatggtgagcgttcttcggaggtaaaatgcgcaagttttaggcttgctgtggaagcacacaacatccgagcctttaaaaccattcctgaagagtgcgttgaaccaacaaaggactacatt

SEQ ID NO: 238183 - DNA, 383 bp, Glycine max
  unsure (1)..(383): unsure at all n locations
agggaataaaatttgagtcaaacaaattcaagccaagggcaactccaacttccccaatggtccccccggccccccaaccctccttttgggggctacttaacaggcacactcgnacgataccgtttctttcaccttcaacaagttcaacccagtccaaccaaacattatgctccaaaaagatgctagtatttcatcctctggggtgttacaactcaccaaagttggcagcaacggcgtgcccacctcgggatctctcggtcgtgccctttacgctgccccaatccagatttgggacagcgaaaccggcaaggtagccagctgggctacatcctttaaattcaacattttcngcaccaacanatcaaactcacctgacggccttg

SEQ ID NO: 238184 - DNA, 293 bp, Glycine max
gattgtttgccttttccccgccccttcctccaagggtaacaaaaccccaatttcaatttctcctcccccaatttccaagaaatctaaaccaatggaaaagtctaaccaaaccgtgacccctgattaccacgaaggcctttgaaaaagcgaagaaaaagctcagatgcttcatcgctgaaaaaagatgcgctcctctaatgctccgtttggcatggcactctgctggaacttacgacgtgagctcgaagatcggtggtcccttcggaaccataaagcacccctccgaactcgct

SEQ ID NO: 238185 - DNA, 349 bp, Glycine max
ggcacaagtgagtttgttgatcgagataactagaaacagtgtgatgaaaatgaacgtccttgttttcttcgttgctacaattttggtagcatggcaatgccatgcgtacgatatgttccctctccgaatgaacactggctatggtgcccgtactccggaggtgaaatgcgcaagttggaggcttgctgtggaagcacacaacatctttggctttgagaccattcctgaagagtgcgttgaagcaacaaaggaatacatccatggcgaacaatatagatcagactccaaaacagttaaccaacaagcttacttttatgccagagacctcgaagttcatcccaaggacaca

SEQ ID NO: 238186 - DNA, 351 bp, Glycine max
ggcacaagtgagtttgttgatccaaataactagaaacaatgtgatgaaaatgaagggccttggtttcctcgttgccaaaattttggtagcatggcaatgccatgcgtacgaaatgttccctccccgaatgaacactggctatggtgcccgtactccggaggtgaaatgcccaagttggaggcttgctgtggaagcacacaacatctttggctttgagaccattcctgaagagtgcgttgaagcaacaaaggaatacatccatggcgaacaatatagatcagactccaaaacagttaaccaacaagcttacttttatgccaaagacctccaagttccacccaagggacacat

SEQ ID NO: 238187 - DNA, 296 bp, Glycine max
gactatctttgagttcacataactcacagccatggctacctcgatcttctctattgttctctccgtctccctagccttctttttggtgctacttaggaaggcacactcgagtgataccgtttcttgcaccttcaacaagttcaacccagtccaaccaaacagtatgctccaaaaagatgctagtacttcatcctctggggtgttacaactcaccaaagttggcagcaaaggcgtgtccacctcgggatctctcggtcgtgccctttacgctgcctcaatcgagatttgggacagcg

SEQ ID NO: 238188 - DNA, 367 bp, Glycine max
ggctgcaatatgcaaggcaaagaaatggaagggttgtcgtcttcaccggcgatcgcgcagaaaacgtgggaactcgagaacaacatcatcccgatggacactccgggcggcgccgctacctcctccaccgctaccaccacgaccaacgccgacgactcgatcttctactacgacgaggcggggcagaacgagttccagcgcgacaagccctgggccaacgacccccactacttcaagcgcgtgaagatctccgcactcgcgctcctcaagatggtcgtccacgcgcgctccggcggcaccatcgaggtcatgggcctcatgcagggcaagaccgacgccgacgccatcatcgtcatggacgcctttc

SEQ ID NO: 238189 - DNA, 378 bp, Glycine max
ggtgcaagagtttgttgtgagctataagctagtttatcgtgaggagaatatgaagttgtttgttttctttgttgctgcagtagttttggtagcatggccatgccatggcgcaggctaccaaaggttccctctccgaatgaaaactggctatggtgagcgttcttcggaggtaaaatgcgcaagttttaggcttgctgtggaagcacacaacatccgagcctttaaaaccattcctgaagagtgcgttgaaccaacaaaggactacattaatggcgaacaatttagatcagactctaaaacagttaaccaacaagctttcttttatgctagtgaacgcgaagtccatcacaacgacatatttatattcggcatagataa

SEQ ID NO: 238190 - DNA, 318 bp, Glycine max
ggcacaagtgagtttgttgatcgagataactagaaacagtgtgatgaaaatgaaggtccttgttttcttcgttgctacaattttggtagcatggcaatgccatgcgtacgatatgttccctctccgaatgaacactggctatggtgcccgtactccggaggtgaaatgcgcaagttggaggcttgctgtggaagcacacaacatctttggctttgagaccattcctgaagagtgcgttgaagcaacaaaggaatacatccatggcgaacaatatagattagactccaaaacagttaaccaacaagcttacttttaagc

SEQ ID NO: 238191 - DNA, 294 bp, Glycine max
ggaacctttgcattctattcattcaagattcagcaagtgcgttttggaagcagagaccgaaatacttcgagatggcccgtacaaagcaaactgctcgtaagtcaactggaggaaaagctcccaggaagcagcttgcaaccaaggctgcacgtaagtctgcaccaacaactggtggtgtgaagaagcctcatcgttatcgccctggaactgttgctcttcgagagattaagaaataccagaagagcactgagctcctaatcaaggagcttcctttccataagttggctcgtgaaa

SEQ ID NO: 238192 - DNA, 294 bp, Glycine max
ggcacaagtgagtttgttgatcgagataactagaaacagtgtgatgaaaatgaaggtccttgttttcttcgttgctacaattttggtagcatggcaatgccatgcgtacgatatgttccctctccgaatgaacactggctatggtgcccgtactccggaggtgaaatgcgcaagttggaggcttgctgtggaagcacacaacatctttggctttgagaccattcctgaagagtgcgttgaagcaacaaaggaatacatccatggcgaacaatatagattaaactccaaaacaat

SEQ ID NO: 238193 - DNA, 303 bp, Glycine max
gattatatttgagttcaaacaaatcaaagccatggccacctccaacttctctattgttctctccgtctccctagccttctttttggtgctacttaccaaggcacactcgaccgataccgtttctttcaccttcaacaagttcaacccagtccaaccaaacattatgctccaaaaagatgctagtatttcatcctctggggtgttacaactcaccaaagttggcagcaacggcgttcccacctcgggatctctcggtcgtgccctttacgctgccccaaatcaaaattgggacagcgaaaccgg

SEQ ID NO: 238194 - DNA, 340 bp, Glycine max
ggttgtgtgagtgaagaatcacagggagtagcggcattaaaaatgcagatcttcgtgaaaactctgacagggaagactataaccctcgaggtcgagagcagcgacaccatcgacaatgtcaaggccaagattcaagacaaggaaggcattcctccggatcagcagcgtttgattttcgccggaaagcagcttgaagatggaaggaccctggccgattacaacatccagaaggaatcaacccttcatctcgtcctcaggcttcgtggtggcatcattgagccttccctcatggctttggctcgcaaatacaaccaggacaagatgatttgccgcaagtgct

SEQ ID NO: 238195 - DNA, 411 bp, Glycine max
cgcgtaagccagcgcgtccgacagctgcgaaaggagaaaaaatgggaaaggactggaatcctcggaacacaagtatgatagaaatccaaggaacgggtcttaacaaaagcccattcggaaaccccattctttctcatctccttcctttgcttctccatcttcgattttcgtcgctgaacatgagatagtgcatttcaatccacatcgggcagtccgggattcaggttgcgaacgcctgctgagagctttactgcatcgaatacggcattcagcctgatgggcagatgccaagtgacaagactgttggtggaggtgatgatgctttcaacaccttcttcagtgaaactggggcaagaaaagcacgtgccccgtgcgatttttgtagatcttgagcccactgtgattgatgag

SEQ ID NO: 238196 - DNA, 332 bp, Glycine max
  unsure (1)..(332): unsure at all n locations
ggaaggtgtgtggagttanggccttacagtggttcccctccctcctcctcctcctcctcctcctcctcggtggatcccgaatggtccgttcgaaaaaaaggagaaagaaattcaaaatggcgtttgctttccacgagttcggaaggccgtttcaaaacctgaaggagcatgagcagaagagcagactccgaggattggacgctcagaaagccaacatctccgccggcaaagccgtggctcgcatcctccgaacctccctcggccccaaaggcatggacaagatgctccagagccccgacggcgacgtcaccatcacgaacgatggagccacg

SEQ ID NO: 238197 - DNA, 477 bp, Glycine max
agttcctgcatcatcctcagtccgccaggtactagttacgaattcccggctcgacccacgagtccgtacggctgcgagaagacgacagaagggggaggaaggtggggatgacgtcaagtccgcatggcccttatgggctgggccacacacgtgctacaatggcaattacaatgggaagcaaggctgtaaggcggagcgaatccggaaagattgcctcagttcggattgttctctgcaactcgggaacatgaagttggaatcactagtaatcgcggatcagcatgccgcggtgaatatgtacccgggccctgtacacaccgcccgtcacaccctgggaattggtttcgcccgaagcatcggaccaatgatcacccatgacttctgtgtaccactagtgccacaaaggcttttggtggtcttattggcgcataccacggtggggtcttcgactggggtgaagtcctacaaggtacccga

SEQ ID NO: 238198 - DNA, 334 bp, Glycine max
gaagagtttgttgtgagctataagctagtttatcgtgaggagaatatgaagttgtttgttttctttgttgctgcagtagttttggtagcatggccatgccatggcgcaggctaccaaaggttccctctccgaatgaaaactggctatggtgagcgttcttcggaggtaaaatgcgcaagttttaggcttgctgtggaagcacacaacatccgagcctttaaaaccattcctgaagagtgcgttgaaccaacaaaggactacattaatggcgaacaatttacatcagactctaaaacagttaaccaacaagctttcttttatgctagtgaacgcg

SEQ ID NO: 238199 - DNA, 292 bp, Glycine max
gacatcacacacactctcatagctgtagcggcgacactaagatcggagaaagaatggcgaaaacgacgtcgttgctgctctttacactgctcctcttcggaaccctagctctcatccaggcgaagaaatcgaaggaggatttgaaggaggtgacccacaaggtttactttgatgttgagattaatggaaaagaagcaggtcgtattgtaatgggtctttatgggaaggctgttccaaaaactgcagaaaacttccgagcactttgcacatgggaaaagggaactggtaaaag

SEQ ID NO: 238200 - DNA, 295 bp, Glycine max
gggagtagcggcattaaaaatgcagatcttcgtgacaactctgacatggaagactataaccctcgaggtcgatagcagcgacaccatcgacaatgtcaaggccaagattcaagacacggaaagcattcctccggatcagcagcgtttgattttcgccggtaagcagcttgaagatggcatgaccctggccgattacaatatccataaggaatcaacccttcatctcgtcctcaggcttcgtggtggcatcattgagccttccctcatggctttgggtcgcaaatacaaccaggac

SEQ ID NO: 238201 - DNA, 330 bp, Glycine max
gattcttcactgtcctctctcgccgccagatctcagacacacactctcactctctctccctcagcttccataatgcagctcctccggccactgctcgcggcggcgctgctcctcctcgccaccctctccgatgcgcagaacatcaccagcatcctcgcaaagcatcccgagctctcgaccttcaaccactacctcaccctcacccacctcgcccccgatatcaacggcaaaatcaccatcaccgtctgcgccgtcgacaacgccgccatgtcggaacttctctcgaagcatccctccattctaaccgttttagaaattctcttccttcaa

SEQ ID NO: 238202 - DNA, 395 bp, Glycine max
gacccccagaccctgctgcatacgaagaaaccctagcctctcaccctccctgcgacacgatgcagatcttcgtgaaaaccctaacgggtaagacgatcacccttgaggtggagtcttctgacaccatcgacaacgtgaaggccaagatccaggacaaggaaggcatccctccggacgagcagcgcctcatcttcgccggaaagcagctggaggacggccgcaccctcgccgactacaacatccagaaggagtccagcctccacctcgtcctccgtctccgcggtggcgccaagaagcgcaagatgaagacctacaccaagcccaagaagattagacacaagcaacagaaaggtcaagctcggcattctcaagttctacaaggtcgacgattctgg

SEQ ID NO: 238203 - DNA, 363 bp, Glycine max; identical to SEQ ID NO: 237616

SEQ ID NO: 238204 - DNA, 356 bp, Glycine max; identical to SEQ ID NO: 234809

SEQ ID NO: 238205 - DNA, 389 bp, Glycine max
ggcacaagtgagtttgttgatcgagataactagaaacagtgtgatgaaaatgaaggtccttgttttcttcgttgctacaattttggtagcatggcaatgccatgcgtacgatatgttccctctccgaatgaacactggctatggtgcccgtactccggaggtgaaatgcgcaagttggaggcttgctgtggaagcacacaacatctttggctttgagaccattcctgaagagtgcgttgaagcaacaaaggaatacatccatggcgaacaatatagatcagactccaaaacagttaaccaacaagcttacttttatgccagaaacctcaaagtccaccccaaggacacatttgtgttcagtatagatggcaccgtactctctaatattc

SEQ ID NO: 238206 - DNA, 358 bp, Glycine max; identical to SEQ ID NO: 234733

SEQ ID NO: 238207 - DNA, 395 bp, Glycine max
  unsure (1)..(395): unsure at all n locations
cactttgataaatgtgtatcgagcatctaatgatttcttggagaagagatcaatggaaatgaatacggcaaagactgaaaaggtttatagaaaatggtgcaaagaaaattttattaatagccggtctcttagacatgctcgtgacattcacaggcagattcagggacatgttgaacaaatgggtctgaatctttcttcttgtggagatgatatgcttcaattccggagatgccttgcagcttctttcttcctcaatgcagctgtaaagcagccagatgggacatacaggactttggcaagcggtctggtggtgcagattcaccttcntctgtattattccggcaaaaaccagagtgtgtgatatttaacgaattggtccaaactaataacaagta

SEQ ID NO: 238208 - DNA, 293 bp, Glycine max
ggagagtcagattcgcacgcattgcttcgcctcacaacagcagctgcagcagcaatggctcccaaacgaggtggaaaggctccggctcttgccgctaagaagaagcctgagaaggtcacgaatccgttgttcgagaagcgtccgaagcagttcggaatcggaggggcgttgcctccgaagagagacttgactaggttcgtgaagtggccaaagaatgttcaaattcagaggaagaagaggattctgaagcagaggttgaaggttcccccagccttgaaccaatttaccaaaac

SEQ ID NO: 238209 - DNA, 294 bp, Glycine max
accaacaaaggactacattaatggcgaacaatttagatcagactctaaaacagttaaccaacaagctttcttttatgctagtgaacgcgaagcccatcacaacgacatatttatattcggcatagataacaccgtactctctaatatcccatactatgaaaaacatggatatggggtggaggaatttaatgaaaccttatatgatgaatgggttaacaagggcgacgcaccggcattgccagagactcttaaaaattacaacaagctgttgtctcttggcttcaagattgtaat

SEQ ID NO: 238210 - DNA, 357 bp, Glycine max
ggcacaagtttgttgagatagctagaagcaataagatgaaaatgaaagtgcttgttttgtttgttgctacagttttggtagcatatgaatgccatggctcagactaccagaagttccctctccaaatgaaaactgggtttggtgggcaatacagcaatgaggtggcatgtgccagttggaggcttggcgtggaagcaaacaacgtagtcaagtggcaaactgttcctgcagcttgcggagagtacatagctgactacgttctaggagaccaatatagatcagattccaaaacagttaaccaacaagcttaattctatgctaaatccctcaaactcaccaacaaagatgtccttggcc

SEQ ID NO: 238211 - DNA, 302 bp, Glycine max
gaaggtgcaagagtcagtttgttgttcgaagccaaaaccctagcagccggcgagaatggcagacgttgaggttgatgcggcggcagcggcaggggcagcgcagccgaagaagagaacgttcaagaaattcagcttcaggggcgtggatctggacgcgcttctggacatgtccaccaaatgcgcgagttttaggcttgctgtggaagcacacaacatccgagcctttaaaaccattcctgaagagtgcgttgaaccaacaaaggactacattaatggcgaacaatttaaattaaactccaaaa

SEQ ID NO: 238212 - DNA, 401 bp, Glycine max
gagggtttggctattagggttttcgctcaccggtgtgcagtcgagcccccgaagaaaaagcgaaaatgccgtcgcacaagacattcagaatcaagaagaagttggcgaagaagatgaggcagaacaggcctatcccctactggatccgcatgaggaccgacaacacgatcaggtacaacgcgaagcgccgtcactggcgtcgcaccaagcttggattctgaggtgcttgctttgcctcggttctgtttatccaattaattagtgttttattttcttgagccaaaaacaatgctttggagattttaataatttgcattttgttccaagactatattgggtgaagggaacttatggtatttcggactaatggtggtgttggtcaccttttttaaaagtatttg

SEQ ID NO: 238213 - DNA, 316 bp, Glycine max
gaaggtgcaagagtttgttgtgagctataagctagtttatcgtgaggagaatatgaagttgtttgttttctttgttgctgcagtagttttggtagcatggccatgccatggcgcaggctaccaaaggttccctctccgaatgaaaactggctatggtgagcgttcttcggaggtaaaatgcgcaagttttaggcttgctgtggaagcacacaacatccgagcctttaaaaccattcctgaagagtgcgttgaaccaacaaaggactacattaatggcgaacaatttagatcagactctaaaacagttaaccaacaa

SEQ ID NO: 238214 - DNA, 298 bp, Glycine max
taatttgggaattattgctcccatcgccattggtttcattgtcggcgctaacattttgttgggtggggccttctctggagcggccatgaaccccgctgtgacatttgggcctgctgtcgtgagctggacctggaccaaccactggatctactgggccgggcctctcatcggtggtggaatcgctggccttgtttacgaggttgtctttatcagccacacccacgagcagcttcccaccactgactactagagggggggaaatgaaaataaaaaaaaaaaaaattgtgtattattgaat

SEQ ID NO: 238215 - DNA, 398 bp, Glycine max
  unsure (1)..(398): unsure at all n locations
ggcacaagtgagtttgttgatcgagataactagaaacagcgtgatgaaaatgaaggtccttgttttcttcgttgctacaattttggtagcatggcaatgccatgcgtacgatatgttccctctccgaatgaacactggctatggtgcccgtactccggaggtgaaatgcgcaagttggaggcttgctgtggaagcacacaacatctttggctttgagaccattcctgaagagtgcgttgaagcaacaaaggaatacatccatggcgaacaatatagatcagactccaaaacagttaaccaacaagcttacctttaatccaangaaacttcgaattcaatcccaaggacacatttgtgctcagtatagatggcaccgtactctctaatattccatacta

SEQ ID NO: 238216 - DNA, 385 bp, Glycine max
aattccgggccgacccacgcgtcaggagaggaccacaaaaaggggagcgtgctctgagcaatcaataatcaagttacccacagaccaaccaagggtatagaaactgacccacttgcattttttctaccacgacatcttaaagggcaagaacatcacggtggtgaaaatcatcgagccatcagcgatcgacgttcgtgaagcaactgggtttggaaccactttcatgatggacaatgttctgaccgagggtccaaatctgatctcgaagcacgttgggagggctcacgggctgtttggcttggcctctttggaggaccgtggcatggtgatgctcactaacttggctttcagtgagggtgagtatgctggcatcactctcagcatg

SEQ ID NO: 238217 - DNA, 383 bp, Glycine max
gatcgcatttcatagcactcaccctcattaccaacacgaaagcatagccaaaaccttttttcgaagtctctgattttcctaatggctccggcaaaggcagagaagaagccggcggagaagaagccagcggcggagaaggcaccggcggagaagaagccgaaggcggagaagaagatctcgaaggaaggagggagcgagaagaagaagaagcgcacgaagaagagcgtggagacctacaagatctacatcttcaaggtcctcaagcaggttcaccccgacattggtatttccggcaaggccatgggcatcatgaacagcttcatcaacgacatcttcgagaagctcgcccaggaagcgtcgcgtttggctcgctacaacaagaa

SEQ ID NO: 238218 - DNA, 415 bp, Glycine max
cgacacatgcgtcagcggacgcgtgggttcagtgattctgatggttgcatgcagttgatcagagaggtcactgctgagttgcctatttagttggctaactctctcaacagtttgatgttggaagggcagaatgactactgctattgagattctgcagcagtttgattggcaggttcctgattgggtcattgtgcctggaggcaaccttggcaacatttatgccttttacaaagggtttaagatgtgtcaagaacttgggcttgtggataagattccaaggcttgtttgtactcaggctgggatagcagatattttgtacttgtacattaaatccgggtggaaggattttaagcctgtgaactcaagcactacatttgcctctgccattcacattggtgatcctgtttcaattgac

SEQ ID NO: 238219 - DNA, 306 bp, Glycine max
ggcacaagtgagtttggtgatcgagataactagaaacagtgtgatgaaaatgaaggtccttggtttcctcgttgctacaattttggtagcatggcaatgccatgcgtacgatatgttccctctccgaatgaacactggctatggtgcccgtactccggaggtgaaatgcgcaagttggaagcttgctgtggaagcacacaacatccttggctttgagaccaatcctgaagaatgcgttgaagcaacaaagggatacatccatggcgaacaatatagattagactccaaaacagttaaccaacaagc

SEQ ID NO: 238220 - DNA, 405 bp, Glycine max
gaaggtgcaagagtttgttgtgagctataagctagtttatcgtgaggagaatatgaagttgtttgttttctttgttgctgcagtagttttggtagcatggccatgccatggcgcaggctaccaaaggttccctctccgaatgaaaactggctatggtgagcgttcttcggaggtaaaatgcgcaagttttaggcttgctgtggaagcacacaacatccgagcctttaaaaccattcctgaagagtgcgttgaaccaacaaaggactacattaatggcgaacaatttagatcagactctaaaacagttaaccaacaagctttcctttaagccaattgaacgcaaattccatcacaacgacatatttatattcggcatagataacaccgtactctctaatatcccaa

SEQ ID NO: 238221 - DNA, 402 bp, Glycine max
  unsure (1)..(402): unsure at all n locations
ggcgtacgcagcttcatcnctaacgcgtgcatagcagagtcagagacagagacgcagccatggggcggagacctgcgacgtgttatangcaaattaagaacaagccataccccaagtcacgtttctgccgtggtgttcctgatcccaagatcaggatttatgatgttggtatgaagaagaacggtgttgatgagtttcctttctgtgtccatctggttagttgggagaaggaaaatgtttcaagtgaggccctggaagctgctcgcattgcttgcaacaagtacatggccaaatttgctggaaaggatgctttccacttgagnaatcacggggtacacccattcaatgttcttaggatcaacaagatgctttcgtgtgctggtgctgataggctccaaactg

SEQ ID NO: 238222 - DNA, 293 bp, Glycine max
gacctcacccagttgcagaaagaaaagaccatcaaagtttcacttcagccttatccggtttagggtttcggtttttgacccaacctttgacgtatcgaaaccttaagtttcggatcaggtctgagcaatctggttggtagaacctttggtcttagagagtcaagttttatgtctgaattagacgatcaaattcctactgccttcgatccttttgctgatgcaaatgctgatgactcgggtgctgggtcaaaggagtatgtgcatattcgcgtacagcagcgaaatggttggaa

SEQ ID NO: 238223 - DNA, 324 bp, Glycine max
acccacgcgtcaggctgggatcactttcaacacattgaggcacataatcttataaagtggactgcattgaccaataataacgtgatctccttccttcacacggggaagcaggtgatatatgagcaggaatgttggcgtgccttttctcgtacctctggtacttcatgataaaatggagataattcctccgaacaataatagtcctgttcatcttagcactgtgacatgttccacccaatatatggtcaccgtttgcaacattgtcagcgaaggggcagttcgtgtcaccgtaggtgccttcgaaggcttccctaggatcgataa

SEQ ID NO: 238224 - DNA, 395 bp, Glycine max
gagaagagagagagagagagagagagagagtcctgaaacttgggtgcgattccttcactcgcaacaacaacacatcactatggctcttctgagtcgagcctcttcacgcttccctcagctggtttcccctcaaagggtagtttcactccacacaacgctcccatctctgaacgcatccccatccacagccacgcctacaccatatgccccgccaccgcctccgtccgcttcctctcccgccggcgtttcgaaggcggcggagttcgtgatctcgaaggtggacgatctgatgaactgggcccgccgcggctccaaactggccaagaaccttcggcctcgcctgctgcgccgtcgaaatgatgcacaccggcgccgcccgctacgatctcgaccgc

SEQ ID NO: 238225 - DNA, 384 bp, Glycine max
ggcacaagtgagtttgttgatcgagataactagaaacagtgtgatgaaaatgaaggtccttgttttcttcgttgctacaattttggtagcatggcaatgccatgcgtacgatatgttccctctccgaatgaacactggctatggtgcccgtactccggaggtgaaatgcgcaagttggaggcttgctgtggaagcacacaacatctttggctttgagaccattcctgaagagtgcgttgaagcaacaaaggaatacatccatggcgaacaatatagatcagactccaaaacagttaaccaacaagcttacttttatgccagagacctcgaaatccatcccaaggacacatttgtgttcagtatagatggcaccgtactctctaa

SEQ ID NO: 238226 - DNA, 379 bp, Glycine max
ggcacaagtgagtttgttgatcgagataactagaaacagtgtgatgaaaatgaaggtccttgttttcttcgttgctacaattttggtagcatggcaatgccatgcgtacgacatgttccctctccgaatgaacactggctatggtgcccgtactccggaggtgaaatgcgcaagttggaggcttgctgtggaagcacacaacatctttggctttgagaccattcctgaagagtgcgttgaagcaacaaaggaatacatccatggcgaacaatatagatcagactccaaaacagttaaccaacaagcttacttttatgccagagacctcgaagtctatcccaaggacacatttgtgttcagtatagatggcaccgtactc

SEQ ID NO: 238227 - DNA, 385 bp, Glycine max
ggtacaatcacaaaaaaaaatcgtctccttttctctctgcatttgagcaaagccaaaccacgtctgagtgagtgagttccgttggatggcgacgagcaccaccagcagcggtggcggcggcaccggcacccaaacattcaagccgtaccgtcacctgaaaaccctaaaagaccacgagaacgcggtatcgtgcgtgaagttctcgaacgacggaaccctcctagcctcggcctccctggacaaaaccctaatcatatggtcctccgccaccctcaccctctgccaccgcctcgtgggccactccgagggcatctccgacctggcctgggccctccgactcccactacatctgctccgcctccgacgaccacaccctccgcatctg

SEQ ID NO: 238228 - DNA, 307 bp, Glycine max
aattctaggctcgaccgacgcgtcagtagcgaaaagacgacagaaggggggaatagttttttatctcacatccgtgctgtagatggcattttccatgttttacgtgcatttgaggatccggacattattcacgttgatgatactgttgacccagtcagggatttagaggtcattactgaagaattgcggctgaaggatattgaattcatggaaagaaagatagaagatattgagaaaagcatgaagaggagcaatgacaaacagttaaaaatcgagcttgaatgttgtcaaagggtgaaggcattgc

SEQ ID NO: 238229 - DNA, 401 bp, Glycine max
gattttcaggcagtcttttggggtttaaccgtgtacctctcacttcttctacgaccatcatcttccttccttccttcaatcgttctaactcttagcagccatggcgagcaccaaagttcagagggttatgactcagcccattaacttgattttcaggtttcttcagagcaaagcacgcattcagatttggctatttgagcaaaaggatttgaggattgaaggccgaatcattggttttgatgaatacatgaatttggttcttgatgatgctgaagaagtgaacatcaagaagaagagcagaaaaacattaaggaagatttcttcctaaggggagataacataactttaaggatgaacacggggaaatgatgaacactccttgacagttgtaaactatgttc

SEQ ID NO: 238230 - DNA, 401 bp, Glycine max
gacaacacagaacaaaaacaaagaaaaaaaaaacccttagccaacacaaccatcatggccacctctgctattcagcaatcagcattcactggtcaaactgctctgaagcagctcaatgagttcgtccgcaagaccggtggcgccggcaaaggtcgcactaacatgcgccgcaccgtcaagagtgctcctcagagcatttggtatggccctgaccgtcccaagtacttgggtccattctcggagcagattccatcatacctgaccggagaattccctggtgactacggatgggacactgctggattatcagctgacccggaaaccttccgcaagaaaccggaacctggaggtgattcacagcagatgggcaatgcttggtgcccttggctgcaccttcccag

SEQ ID NO: 238231 - DNA, 394 bp, Glycine max
gactgagaaacgcaatgagttcgtcgaacctcagagatcttcaacgcgaattggagaacaaagccaatgatctcagcaagcttcaaaaggaaattgcgaagaatcaccaaatgagaaagaaatacacggtccagcttggcgagaacgagctcgtccttaaggaactggatttattgaaagacgacgcaaatgtttataagttgattgggccagtacttgttaagcaagatttggccgaggccaatgcaaatgtccgcaagagaatcgaatacatctcagctgaattgaatcgtctggatgccactgttcaagaatttggaaagagaaccaaattaccaggaaagatacgatactaaaattgcaacaaaggattcaatcatttcaggctgggaaa

SEQ ID NO: 238232 - DNA, 401 bp, Glycine max
ggcacaagtgagtttgttgatcgagataactagaaacagtgtgatgaaaatgaaggtccttgttttcttcgttgctacaattttggtagcatggcaatgccatgcgtacgatatgttccctctccgaatgaacactggctatggtgcccgtactccggaggtgaaatgcgcaagttggaggcttgctgtggaagcacacaacatctttggctttgagaccattcctgaagagtgcgttgaagcaacaaaggaatacatccatggcgaacaatatagatcagactccaaaacagttaaccaacaagcttacttttaggccaaaggaccccgaattccatcccaaggacacatttgtgttcagtatagatggcaccgtactctctaatattccatactacaaa

SEQ ID NO: 238233 - DNA, 317 bp, Glycine max
ggcacaagtgagtttgttgatcgagataactagaaacagtgtgatgaaaatgaaggtccttgttttcttcgttgctacaattttggtagcatggcaatgccatgcgtacgatatgttccctctccgaatgaacactggctatggtgcccgtaccccggaggtgaaatgcacaagttggacgcttgctgtggaagcacacaacatctttggctttgagaccattcctgaagagtgcgttgaagcaacaaaggaatacatccatggcgaacaatatagatcagactccaaaacagttaaccaacaagcttacttttatg

SEQ ID NO: 238234 - DNA, 380 bp, Glycine max
tggggcacaagtgagtttgttgatcgagataactagaaacagtgtgatgaaaatgaaggtccttgttttcttcgttgctacaattttggtagcatggcaatgccatgcgtacgatatgttccctctccgaatgaacactggctatggtgcccgtactccggaggtgaaatgcgcaagttggaggcttgctgtggaagcacacaacatctttggctttgagaccattcctgaagagtgcgttgaagcaacaaaagaatacatccatggcgaacaatatagatcagactccaaaacagttaaccaacaagcttacctttaagccaaaaaacctccaggtccatcccagggacacatttgtgttcagtacagatggcaccgta

SEQ ID NO: 238235 - DNA, 322 bp, Glycine max
ggcacaagtgagtttgttgatcgagataactagaaacagtgtgatgaaaatgaaggtccttgttttcttcgttgctacaattttggtagcatggcaatgccatgcgtacgatatgttctctctccgaatgaacactggctatggtgcccgtactccggaggtgaaatgcgcaagttggaggcttgctgtggaagcacacaacatctttggctttgagaccattcctgaagagtgcgttgaagcaacaaaggaatacatccatggcgaacaatatagatcagactccaaaacagttaaccaacaagcttacttttatgccaga

SEQ ID NO: 238236 - DNA, 381 bp, Glycine max
ggaacctttgcattctattcattcaagattcagcaagtgcgttttggaagcagagaccgaaatacttcgagatggcccgtacaaagcaaactgctcgtaagtcaactggaggaaaagctcccaggaagcagcttgcaaccaaggctgcacgtaagtctgcaccaacaactggtggtgtgaagaagcctcatcgttatcgccctggaactgttgctcttcgtgagattaggaaataccagaagagcactgagctcctaatcaggaagcttcctttccagaggttggttcgtgaaattgcccaggatttcaagactgatctgcgtttccagagccatgctgtgcttgcattgcaagaggctgctgaggcataccttgttgggc

SEQ ID NO: 238237 - DNA, 330 bp, Glycine max
caaaaagacaacagaaggggacaattgattttgttgttcaaaataactagaaccattgtgatgaaaatgaaggtccttgttttcttcgttgctacaattttggtaccatggaaatgcaatgcttacaatatgttccctctccgaatgaaaactggctatggtgcccgtactccggaggtgaaatgcgcaagttggaggcttgctgtggaagcacacaacatctttggctttgagaccattcctgaagagtgcgttgaagcaacaaaggaatacatccatggcgaacaatatagatcagactccaaaacagtttaacaacaggcttacttt

SEQ ID NO: 238238 - DNA, 382 bp, Glycine max
gcaagttaagtgtaagggttcttcaacccccgtaccgtctcggcctctctgcaatcaacagccgaaaatgcctttcaagaggtacgttgaaatcgggagggttgctcaaatcaactacggcaaggaatatggcaagctcgtcgtcatcgtcgacgtcattgaccagaacagagcacttgtcgatgcccctgatatggtgaggtcccaagtcaatttcaaaaggctttcccttaccgacatcaagattgacatcaagagggtccctaagaagaaagatcttgtcaaagccatggaggatgctgatgttaagaacaagtgggagaagagttcatggggtagaaaactcattgttagaaagagaagggcatccctcaatgatttt

SEQ ID NO: 238239 - DNA, 399 bp, Glycine max
ggcacaagtgagtttgttgatcgagataactagaaacagtgtgatgaaaatgaaggtccttgttttcttcgttgctacaattttggtagcatggcaatgccatgcgtacgatatgttccctctccgaatgaacactggctatggtgcccgtactccggaggtgaaatgcgcaagttggaggcttgctgtggaagcacacaacatctttggctttgagaccattcctgaagagtgcgttgaagcaacaaaggaatacatccatggcgaacaatatagatcagactccaaaacagttaaccaacaagcttacctttaagccaaagaacctccaattccatcccaaggacacatttgtgttcagtatagatggcaccgtactctctaatattccatactaca

SEQ ID NO: 238240 - DNA, 397 bp, Glycine max
gaaaacgattatttcgagtcccaaagagctaacaagagattcaagaccggcatgggtaatgaagaggaacagagaaaccacctcttcggcatcaaagatctcggtcacaagactctccttcagagtgatgcactctagcagtatatacttgaaaccagtgtctatccaagagagcacgagtgcttgaaagagatacgcaagatgactgcagaacacccactgaacatcatggcaacaccagcagacgaaggagaacttctgagcatgcttgttaagctcacgaattcaaagaacgccttggaaattggtgtattcaatgggtaatccccggacctcaatggccctggctcttccccctgatggaaagatcttggctttggatgtgaatcgcgaatac

SEQ ID NO: 238241 - DNA, 353 bp, Glycine max
gcacgcgtcagtacgatggcaaaaaaacgacaaaagggggcacaattaattttgttgttcaagataactaaaaacattgtgatgaaattgaaggtccttgttttctccgttgctacaattttggtagcatggaaatgcaatgcgtacgatatgttctctctccgaatgaacactggctatggtgcccgtactccggacgtgaaatgcgcaagttggatgcttgctgtggaagcacacaacatctttggctttgagaccattcctgaagagtgcgttgaagcaacaaaggaatacatccatggcgaacaatatagatcagactccaaaacagttaaccaacaagcttactttta

SEQ ID NO: 238242 - DNA, 308 bp, Glycine max
  unsure (1)..(308): unsure at all n locations
gcaaaattaatttggttgttcaaaattacaaaaaacattttaataaaattaaaggcccttgtttcctccgttcaaaaattttggaacaatggaaatgcaaggccttcgataggttccccccccaaatgaacactggctatggtgcccgtactccggaggtgaaatgcgcaagttggaggcttgctgtggaagcacacaacatctttggctttgagaacattcctgaagagtgcgttgaagcaacaaaggaatacatccatggcgaacaatatagatcagactccanaacagttaaccaacaagcttac

SEQ ID NO: 238243 - DNA, 321 bp, Glycine max
gaaggtgcaagagtttgttgtgagctataagctagtttatcgtgaggagaatatgaagttgtttgttttctttgttgctgcagtacttctggtaccatggccatgccatggcgcacgctaccaaaggttccctctccgaatgaaaactggctatggtgagcgttcttcggaggtaaaatgcgcaagttttaagcttgctgtggaagcacacaacatccgagcctttaaaaccattcctgaagagtgcgttgaaccaacaaaggactacattaatggcgaccaatttagatcagactctgaaacagttaaccaacaagcttt

SEQ ID NO: 238244 - DNA, 397 bp, Glycine max
gagggttacacgccgtcgtctctgtttttgtgtgtcgcttcttcgtaagtgcagctgcaatggtgaagggacgccaaggagaacgtgtcagactctacgtgaggggtacaatccttggatacaaaaggtccaagtcaaaccagtatccaaatacatccctgatccaaattgagggtgtgaatgccaaagaagaagtagcatggtatgctggcaagaaaatggcctatatctacaaggctaaggtgaagaagaatggaagccattaccgctgcatatggggcaaggttacaaggcctcatggtaacagtggtattgtccgtgtaaaaatccaattccaaccttccacctaaattaatgtgaccccgaataggagtattcatgtatccaagcaacatat

SEQ ID NO: 238245 - DNA, 378 bp, Glycine max
gcacaagtgagtttgttgatcgagataactagaaacagtgtgatgaaaatgaaggtccttgttttcttcgttgctacaattttggtagcatggcaatgccatgcgtacgatatgttccctctccgaatgaacactggctatggtgcccgtactccggaggtgaaatgcgcaagttggaggcttgctgtggaagcacacaacatctttggctttgagaccattcctgaagagtgcgttgaagcaacaaaggaatacatccatggcgaacaatatagatcagactccaaaacagttaaccaacaagcttacttttatgccagagacctcgaattccatcccaaggacacatttgtgttcagtatagatggcaccgtactc

SEQ ID NO: 238246 - DNA, 381 bp, Glycine max
ggcacaagtttgttgagatagctagaagcaataagatgaaaatgaaagtgcttgttttgtttgttgctacagttttggtagcatatgaatgccatggctcagactaccagaagttccctctccaaatgaaaactgggtttggtgggcaatacagcaatgaggtggcatgtgccagttggaggcttggcgtggaagcaaacaacgtagtcaagtggcaaactgttcctgcagcttgcggagagtacatagctgactacgttctaggagaccaatatagatcagattccaaaacagttaaccaacaagcttatttctatgctaaatccctcagactcaccaacaaagatgtctttgtcttggacgttgacgacactactctct

SEQ ID NO: 238247 - DNA, 376 bp, Glycine max
  unsure (1)..(376): unsure at all n locations
ggaagtcgccgtttgttttcttttcgttcgcatcttctctctctctcagaaagatgaaggtggtcgccgcgtatttgctcgccgtcctcggtggcaacaacagcccctccgccgatgtcatcaaggaaatccttggctccgttggagtagaagcagatgaagataggattgaatcgtttttgtctgaagttaagggtaaggatatagttgagcttattgctgccggtagggaaaagttggccacggttccttctggtggtggtggtgccgttgccgtcgccgcagctcctgngggaggtgctgctgctgctgctcctgctgctgaggcaaaaaaagaagaaaaagtggaggagaaagaggaatctgatgatgatat

SEQ ID NO: 238248 - DNA, 381 bp, Glycine max
ggaaaccctaaaccccgttttcggtgagatcgagatcgatcgaacatggatgaggagtacgatgtgatcgtgttgggcacgggtctcaaggagtgcattctcagcggtcttctctccgtcgatggcctcaaggttctgcatatggataggaacgactattacggaggagaatccacttcgctcaatcttattcagctttggaagagattcaggggagatgacaagcctcctccacatttgggcgctagcagggactacaacatcgatatgaaccccaagtttattatggctaatggcaatttggtgcgggttctcatacataccgatgttacaaagtatctctatttcaaagctgtggatgggagctatgtgtttaataaa

SEQ ID NO: 238249 - DNA, 401 bp, Glycine max
gaccacattccaaaacacaaacacatacattgtagtatcacttttgtctcggaatttgttcttttgagttatggcaagcttaaaggttgcatgtgtggttttgatgtgcatggctgtgatgagtgcaccaatgatggtgcaagccgtgtcatgcaatgatgtttctgtgaacctagcaccgtgcctatcttacctgatgcagggtggagatgttccagaatcgtgctgtagcggagtgaggaacattctgggttctgccagcaccacctttgacaaacaaaccgtgtgcaaatgtcttcagcaagctgctaataactatgggatcaacgaacaataaccctcaggaattccccgcccgctgcaatgtcagcgtcccttacaagatcagccgatccaccaac

SEQ ID NO: 238250 - DNA, 401 bp, Glycine max
ggaaaccgagaagaagaagatggagatgtatcagatctggagcaggagaatagcgttgggagcgttcgcgtttgttctgcttttccgatcggcctcagcagacgacgtcgttgtgctctctgaagataacttcgagaaggaagttggtcaggacagaggagctctcgttgagttctatgctccttggtgtggacactgcaaaaagcttgctccagaatatgaaaagcttggtagcagcttcaagaaagccaaatctgttttaatcggcaaggttgactgtgatgagcacaagagtttgtgcagcaaatatggagtctctggggatccacaaaattacattgggttcccaaagggatctcttgaacccaaaaagtatgaacggccacgcactgctgattcac

SEQ ID NO: 238251 - DNA, 398 bp, Glycine max
gacactcactctttcactcttcttcgtctcaaacctcttcgttccttcgattcattccatttcttccaaaatggccaaagacccagttcgcgttctcgtcactggagccgcagggcaaattggatatgctcttgtccctatgattgctaggggagtgatgctgggtcctgaccagcccgtgatcctccacatgcttgacattcctccagcagcagagtcgttgaatggggttaaaatggaattggtggatgctgcattccctcttcttaaaggtgttgttgctacaaccgatgtggttgaggcatgcactggggtcaatattgcaatgatgggtggtggggtctccataaaaaaaagggtatggaaaggaaggatgtgatgactaagaacgtctccat

SEQ ID NO: 238252 - DNA, 395 bp, Glycine max
gacagcatatcaataatctattttatactatacccacattttgataattatttttctagttgataagccatggctactcgaggaaagcttgaggttgacgttgatctcaagtctaacgcagacaagtactggcaaacccttaggaactccactgaaatattccccaaggccttccccaatgattacaaaagcattgaggttcttgagggtgatggcaaatcacctggttctatccgccacataagttatggtgaaggttcaccacttgtgaagtcatcctttgagaagattgaggctgttgatgaagaaaagaaggtagtgtcgtacactatcaatgatggagaactccttcaagcactacaaaccattcaagggagacatttctgtgactccag

SEQ ID NO: 238253 - DNA, 383 bp, Glycine max
gagtgcacaagtgagtttgttgatcgagataactagaaacagtgtgatgaaaatgaaggtccttgttttcttcgttgctacaattttggtagcatggcaatgccatgcgtacgatatgttccctctccgaatgaacactggctatggtgcccgtactccggaggtgaaatgcgcaagttggaggcttgctgtggaagcacacaacatctttggctttgagaccattcctgaagagtgcattgaagcaacaaaggaatacatccatggcgaacaatatagatcagactccaaaacagttaaccaacaagcttacttttaagccagagacctccaaatttcaatcccagggacacatttgggttcagtatatatggcaccgtact

SEQ ID NO: 238254 - DNA, 394 bp, Glycine max
ccctaatagggtatgcttacacccttggtggctgcttggtgagttggaaggcaacacttcaaccttctgttgctctctcaactattgaggctaaatatatggctcttattgaagctgcaaaggaaggaatttggctgagaggtctgataaatgatctcgaaattaatcaagaatatgctaacatctactgtgacagccttagtgctatatgcttggccaaggattaggttcatcatgatagaaccaagcatatagatgttagatatcacttcattcggtcagaaagaagaatcaaagttcataagattatcactctgcacaatcctgccaatatgtttaaaagccagtttccaaagagcaagtttgatcactgcttaagcttgctcaatgtaca

SEQ ID NO: 238255 - DNA, 381 bp, Glycine max
  unsure (1)..(381): unsure at all n locations
ggactgagggaaggagcaagcctcgtggaagtggtcaagcaagtgaagcctgacgttctcctaggattatcggctgttggaggattattctcaaaagaggtactagaggccctcaagggttcaacatcaaccagaccagccatatttgctatgtcaaatccaacaaagaatgctgaatgcaccgctgaagaagcattctccattttgggtgacaacattatttttgcaagtggaagtccattcagtaatgtggatcttggaaatggtcatattggccattgcaaccagggaaacaacatgtacctctttccaggcattggtctcggaactcttctttcaagcgctangatcgtctctgatggcatgctgcaggctgcagct

SEQ ID NO: 238256 - DNA, 379 bp, Glycine max
gaccgtcgcatatttctgtgccaacaaaagaagatggcctcacaggtttgcaaagctgcttccagagccgcgaggtcccttctctccgcttccagagcctcccatggacgtgcggttggggctgctacggctgtttcattgagctgcaaagtgcctcttttctacggaaagaacggttctggaagtggttccgcttcatcatcatcatcatcatggatttcaggagcacttgctcttcctgccgcagcttacatgttccaagatcaggaggtgcgcgcagctgagctggagcgcactttcattgccattaagcctgatggagtgcagagaaggctgatttctgagattatatctcgttttgagcggaaagggtacaagc

SEQ ID NO: 238257 - DNA, 402 bp, Glycine max
ggaagtaagggatcgagcctcggaggagggaatcgcagcgaagtccactatgccgaagcaaattcacgagattaaggacttcctcctcactgctaggaggaaggatgcacgctctgtgaaaatcaagcggagcaaggatgtggtgaagttcaaggtccgttgctccaagtacctttacaccctctgtgtgtttgattctgagaaggctgataagttgaagcaatcacttcctccaggtttaagcgtgcaggatgtgtgattcttactgctgtatgaagatcaggtttttctctggattttggggattcatagttagtaaaatgggtcacagaaattttccatattggttgtcacattcgggatcatgttagtattttgtttaagacggatccaacttgcttg

SEQ ID NO: 238258 - DNA, 401 bp, Glycine max
  unsure (1)..(401): unsure at all n locations
ggcacaagtgagtttgttgatcgagataactagaaacagtgtgatgaaaatgaaggtccttgttttcttcgttgctacaattttggtagcatggcaatgccatgcgtacgatatgttccctctccgaatgaacactggctatggtgcccgtactccggaggtgaaatgcgcaagttggaggcttgctgtggaagcacacaacatctttggctttgagaccattcctgaagagtgcgttgaagcaacaaaggaatacatccatggcgaacaatatagatcagactccaaaacagttaaccaacaagcttacttttatgccagagaccttcaagtccaatcccagggacaaatttgtgttcagtatanatggcaccgtactctctaatattccatactacaaa

SEQ ID NO: 238259 - DNA, 326 bp, Glycine max
  unsure (1)..(326): unsure at all n locations
aagggttaccccttctccccggtttgtttttgtaccaggtgcacctacaaacaatggtaaagggtcttcaaggaaaccccttcaaactcaacttaaggggtaaaatccttggatacanaaggtccaagtccaaccagtaacccaaacacatccctgatccanatttganggagtgaacaccannaaaagaagtangatggtatgcctggcaaaaaatggcctatatctacaaggctaanngtgaaaaagatggaagccatttacgctgcatatggggcaaggttacgaagcctcacngcaacagtggtgttgtccgtgcaaaattc

SEQ ID NO: 238260 - DNA, 271 bp, Glycine max
gaatgacgaagtcttgattgctggatttggacgaaaaggtcatgctgtgggagatattcctggtgtcaggtttaaggtcgtgaaggtctctggtgtctctcttttggctctcttcaaggagaagaaggagaagccaaggtcttaaatttgtggagtacttgtgtttgttttcaatagtttctctcaagtattatgaattttgtttttaggtgaacgggttttatgaacaattttctatcttttctagttattttactgaacttcatttaac

SEQ ID NO: 238261 - DNA, 283 bp, Glycine max
gaaggtgcaagagtttgttgtgagctataagctagtttatcgtgaggagaatatgaagttgtttgttttctttgttgctgcagtagttttggtagcatggccatgccatggcgcaggctaccaaaagtttcctccccgaattgaaactggctaaggttaaccttcctccgaaggtaaattccccagttttaaggcttgcgttggaaccaaacacaatccgaccctttaaaaccattcctgaaaattgcgttgaaccaacaaaggactacattaatgcgaacaa

SEQ ID NO: 238262 - DNA, 375 bp, Glycine max
ggcacaagtgagtttgttgatcgagataactagaaacagtgtgatgaaaatgaaggtccttgttttcttcgttgctacaattttggtagcatggcaatgccatgcgtacgatatgttccctctccgaatgaacactggctatggtgcccgtactccggaggtgaaatgcgcaagttggaggcttgctgtggaagcacacaacatctttggctttgagaccattcctgaagagtgcgttgaagcaacaaaggaatacatccatggcgaacaatatagatcagactccaaaacagttaaccaacaagcttacttttatgccagagacctcgaagtcaattccaagacacatttgtgttcagtatagatggcaccgta

SEQ ID NO: 238263 - DNA, 384 bp, Glycine max
ggtgtggagttaggggtttacagtgtttctcttccttcttcttcttcttcttcttcttcttcgttgaatcgcgattgttctgtgcgagagaaagaagagagagatcgaaaatggcgttggctttcgacgagttcggaaggccgttcataatcctgaaggagcaggagcagaagagcagactccgaggattggacgctcagaaagccaacatctccgccggcaaagccgtggctcgcatcctccgaacctccctcggccccaaaggcatggacaagatgctccagcgccccgacggcgacgtcaccatcacgaacgatggagccacgatccttgaccagatggacgtggacaaccaaatcgcgaagctgatggtggagctctcgc

SEQ ID NO: 238264 - DNA, 402 bp, Glycine max
ggcacaagtgagtttgttgatcgagataactagaaacagtgtgatgaaaatgaaggtccttgttttcttcgttgctacaattttggtagcatggcaatgccatgcgtacgatatgttccctctccgaatgaacactggctatggtgcccgtactccggaggtgaaatgcgcaagttggaggcttgctgtggaagcacacaacatctttggctttgagaccattcctgaagagtgcgttgaagcaacaaaggaatacatccatggcgaacaatatagatcagactccaaaacagttaaccaacaagcttacttttatgccaaaaacctccaaattcaatcccagggacacatttgtgttcagtatagatggcaccgtactctctaatattccatactacaaaa

SEQ ID NO: 238265 - DNA, 402 bp, Glycine max
gacacacactctgtcacgcacccaccattctactacactcctctctctcactctcactctctgctccgtgatagctgtaccacgtttttctctccatctcgaaacaccatctctgcctcagtcccaacccatcaccattctcatggctgctctagctctagcacttcttcttctggctttcaccggcacttcaagtgctacatggtgcgtttgcaaggatggaagcgacgcgatcctgcagaagacgttagactatgcttgtggagctggtgctgactgtaaccctcttcacctaaacgggccttgttttcagcccaacaccgttaagggccactgttacctacgccgtgaacagctacttctaaaagaagggtcaagctcaagggtcatgcgagtttgcgg

SEQ ID NO: 238266 - DNA, 436 bp, Glycine max
cgcgtcaatacaactgcgagaaagacaaaaaaagggggcacaattaattttgttgttcacaataacaagaaacagtgtgatgaaaatgaacgtccttgttttcttcgttgctacaattttggtagcatggcaatgccatgcgtacgatatgttccctctccgaatgaacactggctatggtgcccgtactccggaggtgaaatgcgcaagttggaagcttgctgtggaagcacacaacatctttggctttgagaccattcctgaagagtgcgttgaagcaacaaaggaatacatccatggcgaacaatatagatcagactccaaaacagttaaccaacaagcttacttttatgccagagacctcgaaattcaatcacagggacaaatttgtgttcagtatagatggcaccgtactctctaatattccatactacaa

SEQ ID NO: 238267 - DNA, 423 bp, Glycine max
acgacgacagaaggggggcattcgccgtaaacagaagagagagagagagagagagagagtcctgaaacttgggtgcgattccttcactcacaacaacaacacatcactatggctcttctgagtcgagcctcttcacgcttccctcagctggtttcccctcaaagggtagtttcactccacacaacgctcccatctctgaacgcatccccatccacagccacgcctacaccatatgccccgccaccgcctccgtccgcttcctctcccgccggcgtttcgaaggcggcggagttcgtgatctcgaaggtggacgatctgatgaactgggcccgccgcggctccatctggcccatgaccttcgggctcccctgctgcgccgtcgaattgatgcacaccggcgccgcccgctacgatctcgaccgc

SEQ ID NO: 238268 - DNA, 396 bp, Glycine max
ggttctttgcgagatagaagagaaagccgtcgctatcctagtctcttcttcccctctacccatttcagtttcaggatggaatctcaggtgaagcacgcccttgttgtcaaagttatgggtcgtactgggtctagggggcaggtgactcaggttagagtgaagtttttggatgatcaaaaccgacacatcatgaggaacgtgaagggacccgtgagagaaggagacattctcaccctacttgagtctgaaagagaagcaagaaggttgcgctagaggatctcttcatggtttggctcaggacttaaacaaaacatcgttggttttggtggaatttaaaggatgtcaaatgttaattgtcatggacctgaattatgcacctactatgtttggcattat

SEQ ID NO: 238269 - DNA, 396 bp, Glycine max
ggcacaagtgactttgttgatcgagataactacaaacagtgtgatgaaaatgaaggtccttgttttcttcgctgcaacaagtttggtagcatggcaatgccatgcgtacgatatgttccctctccgaatgaacactggctatggtgcccgtactccggaggtgaaatgcgcaagttggaggcttgctgtggaagcacacaacatctttggctttgagaccattcctgaagagtgcgttgaagcaacaaaggaatacatccatggcgaacaatatagatcagactccaaaacagttaaccaacaagcttacttttatgccaaagacctcgaagtccaacccaatggaccaatttgtgtccagtatacatggcaccgtactctctaatattccatact

SEQ ID NO: 238270 - DNA, 353 bp, Glycine max
gaaggtgcaagagtttgttgtgagctataagctagtttatcgtgaggagaatatgaagttgtttgttttctttgttgctgcagtagttttggtagcatggccatgccatggcgcaggctaccaaaggttccctctccgaatgaaaactggctatggtgagcgttcttcggaggtaaaatgcgcaagttttaggcttgctgtggaagcacacaacatccgagcctttaaaaccattcctgaagagtgcgttgaaccaacaaaggactacattaatggcgaacaatttagatcagactctaaaaaagttaaacaacaagctttcttttatgctactgaacgcgaagtccatcaca

SEQ ID NO: 238271 - DNA, 387 bp, Glycine max
gatagtattatcattcattctcatctttctctcttctctctccacccaaaccctaactcccgaccctgttcccctctcgtatccgtcatgaaaggaggaaagtccaagaccgaatctaagagagccgatcccaaacttgctgtgaataagaagggagccgccaccaaggctaggaaacccgccggcaaggggaaggcagcgaaagaccctaacaagccaaagaggcctccaagtgctttcttcgttttcatggaggagttcaggaaggtattcaacaaagaacatcctgaaaacaaagcagtgtctgctgtgggcaaagctgctggagcaaaaatgggagaccatgtctgatgctgaaaaagcaccttatgtggcaaagtctgagaa

SEQ ID NO: 238272 - DNA, 389 bp, Glycine max
tagccgtcaggaattcacggctcgacgcacgcgtcaggtttaattcaaagaatagattggatccaaccaaactgcactttttagttataactaagaaaatgtgcataatcccgcgaattacttctgaaaattacttctgaattaatgaaattttttcaataatttaagaaaaaatatttaagaactatagcatttcgcgatttattggtaatccactttgattctctattaaccaataattttggactattaccatggttaaagtgaatagtttgaagtctagacgcagtgtagtactctttctaccactatgttaatacagaaatgaaatggtttcgataaaattattagatttttttttcgatatagaacactcatgtcgataaaat

SEQ ID NO: 238273 - DNA, 386 bp, Glycine max
ggagcgaagaagatattagggtttttgagtgcggtgcggcgatcctagcactctcttctgcagctttcgccgacagcttcattcaccatggctgagcaaaccgagaaggcttttttgaaacaaccaaaagtgtttctcagctcgaagaaaactgggaagggaaagagacccggaaagggtgggaaccgcttttggaaatccattgggcttggatttaagactcccagggaagccatcgaaggaacctacattgacaagaagtgccccttcactggcaatgtttccatccgtggccgtatcttggctggaacatgtcacagtgctaagatgaacaggactattattgttaggaggaattatctccattttatcaagaagtaccagag

SEQ ID NO: 238274 - DNA, 401 bp, Glycine max
ggcacaagtgagtttgttgatcgagataactagaaacagtgtgatgaaaatgaaggtccttgttttcttcgttgctacaattttggtagcatggcaatgccatgcgtacgatatgttccctctccgaatgaacactggctatggtgcccgtactccggaggtgaaatgcgcaagttggaggcttgctgtggaagcacacaacatctttggctttgagaccattcctgaagagtgcgttgaagcaacaaaggaatacatccatggcgaacaatatagatcagactccaaaacagttaaccaacaagcttacttttatgccagagaactccaaattccatcccagggacacatttgtgttcagtatagatggcaccgtactctctaatattccatactacaaa

SEQ ID NO: 238275 - DNA, 398 bp, Glycine max
aaagagacccggaaagggtgggaaccgcttttggaaatccattgggcttggatttaagactcccagggaagccatcgaaggaacctacattgacaagaagtgccccttcactggcaatgtttccatccgtggccgtatcttggctggaacatgtcacagtgctaagatgaacaggactattattgttaggaggaattatctccattttatcaagaagtaccagaggtacgagaaaaggcactccaacattcctgctcatatatcacctgctttccgtgtgaaggaaggagatcacgttattattggtcaatgcaggccactttctaagactgtgaggttcattgtgttgaaagtgatcccagctggatcttctagcggtgcaaagaaggcttttactg

SEQ ID NO: 238276 - DNA, 330 bp, Glycine max
aggggcctccgtcacttttctcagctgctgttcctgcgcgtgaacaaacctcacgtaagccaaagccatggataggcataacaatgtgatccccaacggacacttcctcaagcactggtagaactatgtcaagacctggttcaatcatccatcacggaagacacgatgacggttggctcatcagaagaaagctgtgaagattttccccagacctatagctggacctcttagacgcattgtacatggtcacactttgtcatacaacatgaaaatgagagctgcaatgtgattttcccttgtagaactcatagcagcaaggattcccaaaat

SEQ ID NO: 238277 - DNA, 402 bp, Glycine max
ggcacaagtgagtttgttgatcgagataactagaaacagtgtgatgaaaatgaaggtccttgttttcttcgttgctacaattttggtagcatggcaatgccatgcgtacgatatgttccctctccgaatgaacactggctatggtgcccgtactccggaggtgaaatgcgcaagttggaggcttgctgtggaagcacacaacatctttggctttgagaccattcctgaagagtgcgttgaagcaacaaaggaatacatccatggcgaacaatatagatcagactccaaaacagttaaccaacaagcttacttttatgccagagacctcgaaatccatcccaaagacacatttgtgttcagtatagatggcaccgtactctctaatattccatactacaaaaa

SEQ ID NO: 238278 - DNA, 422 bp, Glycine max
agggttctagtgtgtgattgtttgttgttgtaactcgttcttcttcttttgttgttctgtgtttgtgtttgttttttctctcacctgaaaatgtcttgctgcggtggtaactgtggttgcggaagctcctgcaagtgcggcaacggctgcggaggctgcaagatgtacccagacttgagctacactgagtcaaccaccaccgagaccttggtcatgggagtggcacctgttaaggctcaatttgagggtgctgaaatgggtgtgcccgctgagaacgatggctgcaaatgtggaccaaactgctcctgcaacccctgcacttgcaagtgaggtgttgggagagcaagcttttagcacagatatagcccttaattaggaataatgataaactattaatgtgtagctaaaaacttatgtattat

SEQ ID NO: 238279 - DNA, 371 bp, Glycine max
gacaacactcatagtagagtaaccaaaaggagagtgcaataactcgttgtacattcctagtgtgtgggagagacatggctaagatgtgtgttttggtgttggttcttgctctggctgtggccacaagtgccagaaacgttcccaaccccaaggatgctggtcttaaggaccagaagaacttcatcagctatggtggagttggtggttattccgggattgggaacaatggactgccttttggaggagctggtgccggaataggtggtggttttggcggaggtggtggacttggtggtggcctccggggtgtcaacggttgggatcggagggtttggcggtaccggtagcggtgtcggtggcggtattggtgg

SEQ ID NO: 238280 - DNA, 390 bp, Glycine max
  unsure (1)..(390): unsure at all n locations
gaccacattccaaaacacaaacacatacattgtagtatcacttttgtctcggaatttgttcttttgagttatggcaagcttaaaggttgcatgtgtggttttgatgtgcatggctgtgatgagtgcaccaatgatggtgcaagccgtgtcatgcaatgatgtttctgtgaacctagcaccgtgcctatcttacctgatgcagggtggagatgttccagaatcgtgctgtagcggagtgaggaacattctgggttctgccagcaccacctttgacaaacaaaccgtgtgcaaatgtcttcagcaagctgctaataactatggcatcaacgacgaatacgctcaagcactcnccgcccgctgcaatgtcagcgtcccttacaagatcagccg

SEQ ID NO: 238281 - DNA, 373 bp, Glycine max
gacaacacaacacaacgcgcactctctctttttctctctgttttttgttctcccttcgcttaaaccctatcgttcttctcgttttcgccgattctcgccatgccgaaagctaaatccgacgccaaagccgccgatagcaggttgaagcggaagggcgctggtgctgggaggaagcaatcgaggaaagctgctaaggaccctaacaagccgaagagacctccaagcgctttcttcgttttcatgtccgagttcagagagcagttcaagaaggagcatcctaacaacaaatccgtcgctgttgtcggcaaagctggtggtgaaaaatggaaatcgctatctgatgctgaaaaagcccctttcgttgctactgctg

SEQ ID NO: 238282 - DNA, 421 bp, Glycine max
cgacacacgcgtcagaaaaataagacagaaaggggcacaagtgagtttgttgatcgagataactagaaacagtgtgatgaaaatgaaggtccttgttttcttcgttgctacaattttggtagcatggcaatgccatgcgtacgatatgttccctctccgaatgaacactggctatggtgcccgtactccggaggtgaaatgcgcaagttggaggcttgctgtggaagcacacaacatctttggctttgagaccattcctgaagagtgcgttgaagcaacaaaggaatacatccatggcgaacaatatagatcagactccaaaacagttaaccaacaagcttacttttatgccagagacctccaaggtccatcccaaggacacatttgtgttcagtatagatggcaccgtactctctaatat

SEQ ID NO: 238283 - DNA, 336 bp, Glycine max
ggcacacgtttgttgagatagctagaagcaataagatgaaaatgaaagtgcttgttttgcctggtgctacacttttggtagcatatgaatgccatggctcagactaccataagttcgctctctaaatgaaaactgagtttggtgggcaatacagcactgaagtggcatgtgccagttggaggcttggcgtggaagcaaacaacgtactcaagtggcaaactgttcctgcagcttgcggagagtacatagctgactacgttctatgagaccaatatagattagattccaaaacagttaaccaacaagcttatttctatgctaaatccctcaaactca

SEQ ID NO: 238284 - DNA, 388 bp, Glycine max
ggcacaagtttgttgagatagctacaagcaatacgatgaaaatgaaagtgcctgttttgtttgctgctacagttttggtagcatatgaatgccatggctcagactaccagaagttccctctccaaatgaaaactgggtttggtgggcaatacagcaatgaagtggcatgtgccagttggacgcatggcgtggaagcaaacaacgtaatcaagtggcaaactgttcctgcagcttgcggagagtacatagctgactacgttctaggagaccaatatagatcagattccataacagttaaccaacaagcttatttctatgctaaatccctcaaactcaccaacaaagatgtccttgactttggctttgacgacactactctctctaatct

SEQ ID NO: 238285 - DNA, 325 bp, Glycine max
ggcacaagtgagtttgttgatcgagataactagaaacagtgtgatgaaaatgaaggtccttgttttcttcgttgctacaattttggtagcatggcaatgccatgcgtacgatatgttccctctccgaatgaacactggctatggtgcccgtactccggaagtgaaatgcgcaagttggaggcttgctgtggaagcacacaacatctttggctttgaaaacattcctgaagagtgcgttgaagcaacaaaggaatacatccatggcgaacaatatagatcagactccaaaacatttaaacaacaagcttacttttatgccagagac

SEQ ID NO: 238286 - DNA, 329 bp, Glycine max
  unsure (1)..(329): unsure at all n locations
ggcacaagtttgttgagatagctagaagcaataagatgaaaatgaaagtgcttgttttgtttgttgctacagttttggtagcatatgaatgccatggctcagactaccagaagttccctctccaaatgaaaactgggtttggtgggcaatacagcaatgaagtggcatgtgccagttggaggcttggcgtggaagcaaacaacgtagtcaagtggcaaactgttcctgcagcttgcggagagtacatagctgactacgttctangagaccantatagatcagatttcanaacagttaaacaacaagcttatttctatgctaaatccctc

SEQ ID NO: 238287 - DNA, 359 bp, Glycine max
gagtgcacaagtgagtttgttgatcgagataactagaaacagtgtgatgaaaatgaaggtccttgttttcttcgttgctacaattttggtagcatggcaatgccatgcgtacgatatgttccctctccgaatgaacactggctatggtgcccgtactccggaggtgaaatgcgcaagttggacgcttgctgtggaagcacacaacatcttttggctttgagaccattcctgaagagtgcgtttaaacaacaaaggaatacatccatggcgaacaatatagatcagactcgaaaacagttaaccaacaagcttacttttatgccagagacctcgaagtccatcccaaggacacatttgtg

SEQ ID NO: 238288 - DNA, 367 bp, Glycine max
gaaggtgcaagagtctgatgtgagctataagctaatttatcgtgaggagaatatgaacttgtttgttttctttgttgctgcaatagttttggtaccatggacatgccatggcgcaggctacgaaaggttccctctccgaatgaaaactggctatggtgagcgttcttcggaagtaaaatgcgcaagttttaggcttgctgtgtaagcacacagcatccgagcctttaaaaccattcctgaagagtgcgtatgaaccatcacaggactacattaatggcgaacaatttagatcagactctaaaacagttcaacaacgaactttcttttatgctaatgaacgccaattccatcacaacgacatatttat

SEQ ID NO: 238289 - DNA, 296 bp, Glycine max
gattatatttgagttcaaacaaatcaaagccatggccacctccaacttctctattgttctctccgtctccctagccttctttttggtgctacttaccaaggcacactcgaccgataccgtttctttcaccttcaacaagttcaacccagtccaaccaaacattatgctccaaaaagatgctagtatttcatcctctggggtgttacaactcaccaaagttggcagcaacggcgtgcccacctcgggatctctcggtcgtgccctttacgctgccccaatccagatttgggacagcg

SEQ ID NO: 238290 - DNA, 380 bp, Glycine max
cgaatgaacactggctatggtgcccgtactccggaggtgaaatgcgcaagttggaggcttgctgtggaagcacacaacatctttggctttgagaccattcctgaagagtgcgttgaagcaacaaaggaatacatccatggcgaacaatatagatcagactccaaaacagttaaccaacaagcttacttttatgccagagacctcgaagtccatcccaaggacacatttgtgttcagtatagatggcaccgtactctctaatattccatactacaaaaaacatggatatggggtggagaaatttaactcgaccttgtatgatgaatgggttaacaagggcaatgcaccggcactgcccgagactcttaagaattacaacaa

SEQ ID NO: 238291 - DNA, 349 bp, Glycine max
agacgacagaaggggagagtggtggagtgtgcaaaagagcgtcgtagtcgcaaccctaatcagaagaagcgcagcttcaagcgagtgacagccaccagccatgggtcgtatgcacagccgcggtaagggtatatcctcttctgctttgccctacaaaaggacacctcctagctggctcaagatctcttcgcaagatgtcgaagaaaatatctgcaagtttgcgaagaaaggtttgaccccgtctcagattggtgtcattctcagagattctcacggtattgctcaggtcaatagcgtcactggcagcaaaatccttcgcatcctcaaagctcacggacttgcgcctgaa

SEQ ID NO: 238292 - DNA, 389 bp, Glycine max
gggcacaagtttgttgagatagctagaagcaataagatgaaaatgaaagtgcttgttttgtttgtcgctacagttttggtagcatatgaatgccatggctcagactaccagaagttccctctccaaatgaaaactgggtttggtgggcaatacagcaatgaggtggcatgtgccagttggaggcttggcgtggaagcaaacaacgtagtcaagtggcaaactgttcctgcagcttgcggagagtacatagctgactacgttctaggagaccaatatagatcagattccaaaacagttaaccaacaagcttatttctatgctaaatccctcaaactcaccaacaaagatgtctttgtcttggacgttgacgacactactctctctaatct

SEQ ID NO: 238293 - DNA, 364 bp, Glycine max
  unsure (1)..(364): unsure at all n locations
aaacgcggcggtgaggtctaaaatgagcggcggcgaaggagttgcggtcaccgggaattctggtcggaaagggacgctgagatacagagaatgtcagaagaaccacgccgtcagcattggaggccaagccgtcgacggctgctgcgagtttttggccgccggggaggaaggtacgctggaggccgtaatttgcgccgcctgcaactgccaccgtaatttccaccgcaaggagatcgacngcgaaaccagcccttaccggcagcgttcgcagccgcagcctcagcctctgcaccctcagttacanncacaattctccccttaactacaacggggcccaacaaccttcggctgccgggtacctcca

SEQ ID NO: 238294 - DNA, 397 bp, Glycine max; identical to SEQ ID NO: 234774

SEQ ID NO: 238295 - DNA, 406 bp, Glycine max
  unsure (1)..(406): unsure at all n locations
ggcacaagtgagtttgttgatcgagataactagaaacagtgtgatgaaaatgaaggtccttgttttcttcgttgctacaattttggtagcatggcaatgccatgcgtacgatatgttccctctccgaatgaacactggctatggtgcccgtactccggaggtgaaatgcgcaagttggaggcttgctgtggaagcacacaacatctttggctttgagaccattcctgaagagtgcgttgaagcaacaaaggaatacatccatggcgaacaatatagatcagactccaaaacagttaaccaacaagcttacttttatgccagagacctcgaagtccatcccaaggacacatttgtgttcagtatagatggcaccgtactctctaatattccatactacanaaaacat

SEQ ID NO: 238296 - DNA, 283 bp, Glycine max
ggagcgaagaagatattagggtttttgagtgcggtgcggcgatcctagcactctcttctgcagctttcgccgacagcttcattcaccatggctgagcaaaccgagaaggcttttttgaaacaaccaaaagtgtttctcagctcgaagaaaactgggaagggaaagagacccggaaagggtgggaaccgcttttggaaatccattgggcttggatttaagactcccaaggaagccatcgaaggaacctacattgacaagaagtgccccttcactggcaatgttt

SEQ ID NO: 238297 - DNA, 375 bp, Glycine max
  unsure (1)..(375): unsure at all n locations
ggcacaagtttgttgagatagctagaagcaataagatgaaaatgaaagtgcttgttttgtttgttgctacagttttggtagcatatgaatgccatggctcagactaccagaagttccctctccaaatgaaaactgggtttggtgggcaatacagcaatgaggtggcatgtgccagttggaggcttggcgtggaagcaaacaacgtagtcaagtggcaaactgttcctgcagcttgcggagagtacatagctgactacgttctangagaccaatatagatcagattccaaaacagtttaacaacaagcttatttctatgctaaatccctcaaactcaccaacanagatgtctttgtcttggacgttgacgacacta

SEQ ID NO: 238298 - DNA, 329 bp, Glycine max
agagaaagagagagaaagatgtcgaagcgtggtcgtggtggttcggcggggaacaagttccgcatgtcgctgggtcttccagtggcggcgacggtgaactgcgccgacaacacgggggcgaagaacctctacatcatttcggtgaaagggatcaaaggccgtttgaaccgtcttccctcggcctgcgttggcgacatggtgatggccaccgtgaagaagggaaaacccgatctgaggaagaaggtcttgccagctgtcatcgttcgccagcgcaagccatggcgccgaaaggacggcgtctacatgtacttcgaagataatgctggtgt

SEQ ID NO: 238299 - DNA, 341 bp, Glycine max
gaaggtgcaagagtggtggagtgtgcagaagagcgtcgcagtcgcaaccctaatcagaagaagcgcagcttcaagcgagtgacagccaccagccatgggtcgtatgcacagccgcggtaagggtatatcctcttctgctttgccctacaaaaggacacctcctagctggctcaagatctcttcgcaagatgtcgaagaaaatatctgcaagtttgcgaagaaaggtttgaccccgtctcagattggtgtcattctcagagattctcacggtattgctcaggtcaatagcgtcactggcagcaaaatccttcgcatcctcaaagctcacggacttgcgcctg

SEQ ID NO: 238300 - DNA, 360 bp, Glycine max
ggtgcacaagtgagtttgttgatcgagataactagaaacagtgtgatgaaaatgaaggtccttgttttcttcgttgctacaattttggtagcatggcaatgccatgcgtacgatatgttccctctccgaatgaacactggctatggtgcccgtactccggaggtgaaatgcgcaagttggaggcttgctgtggaagcacacaacatctttggctttgagaccattcctgaagagtgcgttgaagcaacaaaggaatacatccatggcgaacaatatagatcagactccaaaacagttaaccaacaagcttacttttatgccagagacctcgaagttcatcccaaagacacaattgtgttc

SEQ ID NO: 238301 - DNA, 363 bp, Glycine max; identical to SEQ ID NO: 236410

SEQ ID NO: 238302 - DNA, 367 bp, Glycine max
  unsure (1)..(367): unsure at all n locations
gaaggtgcaagagtttgttgtgagctataagctagtttatcgtgaggagaatatgaagttgtttgttttctttgttgctgcagtagttttggtagcatggccatgccatggcgcaggctaccaaaggttccctctccgaatgaaaactggctatggtgagcgttcttcggaggtaaaatgcgcaagttttaggcttgctgtggaagcacacaacatccgagcctttaaaaccattcctgaagagtgcgttgaaccaacaaaggactacattaatggcgaacaatttagatcagactctaaaacagttaaccaacaagctttcttttatgctagtgaacgcgaagtccatcacancgacatatttata

SEQ ID NO: 238303 - DNA, 399 bp, Glycine max
ggtgcacaagtgagtttgttgatcgagataactagaaacagtgtgatgaaaatgaaggtccttgttttcttcgttgctacaattttggtagcatggcaatgccatgcgtacgatatgttccctctccgaatgaacactggctatggtgcccgtactccggaggtgaaatgcgcaagttggaggcttgctgtggaagcacacaacatctttggctttgagaccattcctgaagagtgcgttgaagcaacaaaggagtacatccatggcgaacaatatagatcagactccaaaacagttaaccaacaagcttacttttatgccagagacctcgaagtccatcccaaggacacatttgtgttcagtatagatggcaccgtactctctaatattccatactac

SEQ ID NO: 238304 - DNA, 378 bp, Glycine max
  unsure (1)..(378): unsure at all n locations
ggcacaagtgagtttgttgatcgagataactagaaacagtgtgatgaaaatgaaggtccttgttttcttcgttgctacaattttggtagcatggcaatgccatgcgtacgatatgttccctctccgaatgaacactggctatggtgcccgtactccggaggtgaaatgcgcaagttggaggcttgctgtggaagcacacaacatctttggctttgagaccattcctgaagagtgcgttgaagcaacaaaggaatacatccatggcgaacaatatagatcagactccanaacagttaaacaacaagctttactttatgccagagacctcgaagtccaatcccaagacacatttgtgttcagtatagatggcaccgtact

SEQ ID NO: 238305 - DNA, 383 bp, Glycine max
gacctcacccagttgcagaaagaaaagaccatcaaagtttcacttcagccttatccggtttagggtttcggtttttgacccaacctttgacgtatcgaaaccttaagtttcggatcaggtctgagcaatctggttggtagaacctttggtcttagagagtcaagttttatgtctgaattagacgatcaaattcctactgccttcgatccttttgctgatgcaaatgctgatgactcgggtgctgggtcaaaggagtatgtgcatattcgcgtacagcagcgaaatggaaggaaaagcctgacaaccgttcagggattgaaaaaagaattcagctataacaagatacttaaagatgttaagaaagagttctgttgcaatggaac

SEQ ID NO: 238306 - DNA, 395 bp, Glycine max
tgaaactactcaactaattgaaatgttttgccaccaaactgaccgagagtatcgcataatgatggggactgatgttcgaatccaaagggatcctttagcaatgcgaatgagggaggatcagataaagcaaatatggggtggagatccagtttacccaactgtgaactatattcaagatccaaatgaagtgattgactacagggggccagattttcatgaaccaacaccaaatatggtgtcttatctgaaggagaaaggaaaacttatttcaagggaggaatttgacaagattatggccaaggaaaagactgaacaaattgagtcgacggagatggatgaagctatggccaaagctgttgacattggagaaaatgatgatgaagaggatagtgatg

SEQ ID NO: 238307 - DNA, 325 bp, Glycine max
gaccaccactactaccaagtgaaaaagcaactaagcatagtgtgtaagaaagggagaaaaacaagtgctgtgtagagagaaaaatggctaggcggtgcatgatcttggtggttcttgctcttgccgtggttgcaagtgccagaaacatgcccaatgacgctggtttggaggaccagaagaacttccttgggtatgggttttcgggagttggcaacaatggccttccctttggtggagtgggttctgggtttgatggtaatatgggtgggccttctgggctcggaggacttggaggattcggtgggcctggtgggcttggcggact

SEQ ID NO: 238308 - DNA, 373 bp, Glycine max
gggtgcaagagtttgttgtgagctataagctagtttatcgtgaggagaatatgaagttgtttgttttctttgttgctgcagtagttttggtagcatggccatgccatggcgcaggctaccaaaggttccctctccgaatgaaaactggctatggtgagcgttcttcggaggtaaaatgcgcaagttttaggcttgctgtggaagcacacaacatccgagcctttaaaaccattcctgaagagtgcgttgaaccaacaaaggactacattaatggcgaacaatttagatcagactctaaaacagttaaccaacaagctttcttttatgctagtgaacgcgaagtccatcacaacgacatatttatattcggcat

SEQ ID NO: 238309 - DNA, 347 bp, Glycine max
ggaagaacaagtcttgcattgggtggagcatacttagaaacagcaactatgtctctcatgcagcttactagctcccctgttggctcactggtccgtttcattgtaatatttgctttatggtacagaaccatggctttggccaagttgccaccaaacgcttcatcagttccagcagttttagcgtttggagattccatcgtggacccatgcaacaacaacaacataaaaacattgatcaagtgcaacttcccaccttatggaaaggattttcagggaggaaacccaacgggtcgattttgcaatggaaaaattccttctgacttaatacttgaacaattgggtattaa

SEQ ID NO: 238310 - DNA, 345 bp, Glycine max
gattgttggcttgtgctctgctcgtgcctctagggttatcatatctccatttccatttcctctctctcagtttccaagaatcttaagctatgggaaagtcttacccaaccgtgagcgctgattaccagaaggccgttgagaaggcgaagaagaagctcagaggcttcatcgctgagaagagatgcgctcctctaatgctccgtttggcatggcactctgctggaacttacgacgtgagctcgaagaccggtggtcccttcggaaccataaagcacccctccgaactcgctcacggcgctaacaacggtcttgacatcgctgttaggcttttggagccactcaaag

SEQ ID NO: 238311 - DNA, 341 bp, Glycine max
ggttctagtgtgtgattgtttgttgttgtaactcgttcttcttcttttgttgttctgtgtttgtgtttgttttttctctcacctgaaaatgtcttgctgcggtggtaactgtggttgcggaagctcctgcaagtgcggcaacggctgcggaggctgcaagatgtacccagacttgagctacactgagtcaaccaccaccgagaccttggtcatgggagtggcacctgttaaggctcaatttgagggtgctgaaatgggtgtgcccgctgagaacgatggctgcaaatgtggaccaaactgctcctgcaacccctgcacttgcaagtgaagtgttgggagag

SEQ ID NO: 238312 - DNA, 397 bp, Glycine max; identical to SEQ ID NO: 234774

SEQ ID NO: 238313 - DNA, 381 bp, Glycine max
gcactgtctactcaacacaatctctgagcacaaattgctccatctcaaccccatcaaagacgcaactcagttttttccaccaaaagcaggtagttttctggaggaacagcaagaagggcagctgcagcagcagaagaagctatgtgataacatgtgcagcaggtgactcacagacagtggtgattggcctggctgcagactcagggtgtgggaagagcaccttcatgaggaggctgaccagtgtgtttggaggagcagcagagccaccaaagggtggcaaccctgactccaacactctcatcagtgacaccaccactgtcatatgcttggatgattaccactctttggacagaactggaagaaaggagaaaggtgtcactg

SEQ ID NO: 238314 - DNA, 394 bp, Glycine max
  unsure (1)..(394): unsure at all n locations
gagcgaaacagagagtggtttcagtgagtgatcggtgttcacttgatccttcataagtcgtcatcatcatcatcatcatcaccgttgattgaagaagatgccgatcagaaacatcgccatcggaaggcctgaagaggctactcaccccgacacgttgaaggcggggttggctgagttcatctccaccttgatcttcgtgttcgccggttcaggttccggcatcgcctacaacaagctcaccgacaacggcgccgccactcccgccggcctcatctccgcttccatcgcccatgctttcgccctcttcgtcgccgtctccgtcggcgccaacatctccggcggccacgtcaaccccgccgtcancttcggcgccttcgtgggcggcaacatcacc

SEQ ID NO: 238315 - DNA, 372 bp, Glycine max
gccacgcgtcaacggcagcgagacgacagaagggggtattccttacgctctctcactcacaaacacacactgaactaaaaaacatcaaaagagacatggctgagcaaaccttcatcatgatcaagcctgatggcgtccaaagaggccttattggcgagatcattagcagatttgagaagaaaggtttctacttgaaaggtttgaaacttgttactgtggaccgtccttttgctgagaagcactatgctgatttgtctgccaagcctttctttagtggtttggtggattacattatctctgggcctgttgttgccatgatctgggacggcaaaaatgttgttaaaactgggccgagagattatccggggccac

SEQ ID NO: 238316 - DNA, 318 bp, Glycine max
gatgccacaatggttgtccctcttaggcactttcttgttttctctctcaccctcatatccatcatcttccacacccatggagcgttctctgagcaatcaataatcaagttacccacagaccaaccaagggtagaaaaactgacccacttgcattttttctaccacgacatcttacagggcaagaacatcacggtggtgaaaatcatccagccatcagcgagcgacgttcgtgaagcaactgggtttggaaccactttcatgatggacaatgttttgaccgagggttcagagctgagctcgaagcacgtttgggaaggc

SEQ ID NO: 238317 - DNA, 276 bp, Glycine max
ggtgcacaagtgagtttgttgatcgagataactagaaacagtgtgatgaaaatgaaggtccttgttttcttcgttgctacaattttggtagcatggcaatgccatgcgtacgatatgttccctctccgaatgaacactggctatggtgcccgtactccggaggtgaaatgcgcaaattggaggcttgctgtggaagcacacaacatctttggctttgagaccaatcctgaaaagtgcgttgaaacaacaaaggaatacatccatggcgaacaatat

SEQ ID NO: 238318 - DNA, 358 bp, Glycine max
gagatcagcctctttctttctttctctctctctctctctctctgcacctttctttcacaactcaatcaaaaaaagcatatccaaggtgtggtggttaagctgtccatctatcaatcaatccaatcaatcaagagaccaatcatcaaccgaatataagagaacgaaaaaagggggctacccacaacgtcatcctctttcaccacattatcactggaccacctccctccttccgaacagctatgttatgttcactgcaacatttgtgacaccgtcctcgctgtaagtgttccttgcacaagcttgttcaagaccgtcacagtccgattccgccattgcaataacctccttccagtgaaca

SEQ ID NO: 238319 - DNA, 351 bp, Glycine max
  unsure (1)..(351): unsure at all n locations
gaccaatcaatcattcattcactccaaggagggatctctctctctcactccttcttctctctcctctggcacccctaaagcttcttctgttctgtgcaggcagtttttctttggtttggttgcatcctttgatctgatcagcaaatttgagaattcagtttgggaagggccattcctctttagtgcaaaacagatcgcaggtgcctttgtgctgatggccactaatgaaaatcttccaccaaatgtaattaagcaacttgccaaggagttgaaaaatcttgacgaatctcctcncgagggcattaaagttgtggtaaatgatgatgatttttcgacaatatttgctgacat

SEQ ID NO: 238320 - DNA, 352 bp, Glycine max
gtgagctcgaagaccggtggtcccttcggaaccataaagcacccctccgaactcgctcacggcgctaacaacggtcttgacatcgctgttaggcttttggagccactcaaagcggagtttcctattttgagctacgccgatttctaccagttggctggcgttgttgccgttgaggtcaccggtggacctgaagttcccttccatcctggaagagaggacaaacctgagccaccaccagagggtcgcttgcccgatgccactaagggttctgaccatttgagagatgtgtttggcaaagctatggggcttagtgaccgagatatcgttgctctgtctgggggtcacactattg

SEQ ID NO: 238321 - DNA, 406 bp, Glycine max
  unsure (1)..(406): unsure at all n locations
ggcacaagtgagtttgttgatcgagataactagaaacagtgtgatgaaaatgaaggtccttgttttcttcgttgctacaattttggtagcatggcaatgccatgcgtacgatatgttccctctccgaatgaacactggctatggtgcccgtactccggaggtgaaatgcgcaagttggaggcttgctgtggaagcacacaacatctttggctttgagaccattcctgaagagtgcgttgaagcaacaaaggaatacatccatggcgaacaatatagatcagactccaaaacagttaaccaacaagcttacttttatgccagagacctcgaagtccatcccaaggacacnattgtgttcagtatagatggcaccgtactctctaatattccatactacaaaaaacat

SEQ ID NO: 238322 - DNA, 403 bp, Glycine max
ggtgcaagagtttgttgtgagctataagctagtttatcgtgaggagaatatgaagttgtttgttttctttgttgctgcagtagttttggtagcatggccatgccatggcgcaggctaccaaaggttccctctccgaatgaaaactggctatggtgagcgttcttcggaggtaaaatgcgcaagttttaggcttgctgtggaagcacacaacatccgagcctttaaaaccattcctgaagagtgcgttgaaccaacaaaggactacattaatggcgaacaatttaaatcagactctaaaacagttaaccaacaagctttcttttatgctagtgaacgcgaagtccatcacaacgacatatttatattcggcatagataacaccgtactctctaatatccatact

SEQ ID NO: 238323 - DNA, 375 bp, Glycine max
  unsure (1)..(375): unsure at all n locations
ggcattatatttgagttcaaacaaatcaaagccatggccacctccaacttctctattgttctctccgtctccctagccttctttttggtgctacttaccaaggcacactcgaccgataccgtttctttcaccttcaacaagttcaacccagtccaaccaaacattatgctccaaaaagatgctagtatttcatcctctggggtgttacaactcaccaaagttggcagcaacggcgtgcccacctcgggatctctcggtcgtgccctttacgctgccccaatccagatttgggacagcganaccggcaaggtagccagctgggctacatcctttaaattcaacattttcgcnaccaacaaatcaaactcagctgac

SEQ ID NO: 238324 - DNA, 371 bp, Glycine max
gacttgtaataattcttataacacaacacaacccatggccaccacctccgcattcctcctccttcccctcctcctgctgctccacctcgccatcgccgctcacggcatcggcatcaactacggcacgctcggcgacaaccttccaccgcccgcggcggtggcgaacttcctgaagacgaagacgaccatcgaccgcgtgaagatctacgacgtgaaacccggacatcctgcgggccttcgccggcagcggcatctccgtgacggtgaccgcccccaacggcgacatcgccgccttaaccaaaatcgactcggcgaggcattgggtggcgacgcacatcaaaccctttcaccctcagaccaaaattaattac

SEQ ID NO: 238325 - DNA, 357 bp, Glycine max
  unsure (1)..(357): unsure at all n locations
gggagtgagatcatagaacaacacaaccaactccaagttataaagagaactatagctggcacatattgatgcatacatagctaaaaggatcaaaaggcacatctatgtttcagtcctttgccagcaagtaagtagtaactcatccaaatatagcaaatggatccacaaagcatgcattttgtgctgtccactgattccaaaccaaggctgaaatggactcctgagcttcaccgacggttcattgaggctaccaatcagcttggaggtgcagataaagcaactccaaagagtcttatganggtgatgggaattccgggacttactttgtaccacctgaagagccatttacagaaatat

SEQ ID NO: 238326 - DNA, 172 bp, Glycine max
ggcacaagtgagtttgttgatcgagataactagaaacagtgtgatgaaaatgaacgtccttgttttcttcgctgctacaattttggtagcatggcaatgccatgcgtacgatatgttccctctccgaatgaacactggctatggtgcccgtactccggaagtgaaatgcgca

SEQ ID NO: 238327 - DNA, 367 bp, Glycine max
gattcccaaaatttctcattctccctttcctctccgaaccctcgatcactctcacgcgctcctatattcgctcctccaccgtcgctctctcgaacaaccacaacaccatcttcatcacatggcaaacgcagcatctggtatggcagtccatgatgactgcaagttgaggtttttggagctgaaggcaaaaaggacacaccgtttcatagtttttaagattgaggagcagcagaagcaggtcattgtggagaagcttggtgagcctgcccagggctatgaagatttcactgccagccttcctgctgacgagtgccgttatgctgtttatgattttgagtatctgactgaagggaatgtccctaaaagc

SEQ ID NO: 238328 - DNA, 356 bp, Glycine max
gaagtgagtttgttgatcgagataactagaaacagtgtgatgaaaatgaaggtccttgttttcttcgttgctacaattttggtagcatggcaatgccatgcgtacgatatgttccctctccgaatgaacactggctatggtgcccgtactccggaggtgaaatgcgcaagttggaggcttgctgtggaagcacacaacatctttggctttgagaccattcctgaagagtgcgttgaagcaacaaaggaatacatccatggcgaacaatatagatcagactccaaaacagttaaccaacaagcttacttttatgccagagacctcgaagtccatcccaaggacacatttgtgttcag

SEQ ID NO: 238329 - DNA, 380 bp, Glycine max
ggcacaagtgagtttgttgatcgagataactagaaacagtgtgatgaaaatgaaggtccttgttttcttcgttgctacaattttggtagcatggcagtgccatgcgtacgatatgttccctctccgaatgaacactggctatggtgcccgtactccggaggtgaaatgcgcaagttggaggcttgctgtggaagcacacaacatctttggctttgagaccattcctgaagagtgcgttgaagcaacaaaggaatacatccatggcgaacaatatagatcagactccagaacagttaaccaacaagcttacttttatgccagagacctcgaagtccatcccaaggacacatttgtgttcagtatagatggcaccgtactct

SEQ ID NO: 238330 - DNA, 329 bp, Glycine max
gacagcaaaacaattttcaaactcaattaccattccataacctaaatctcctctttgtttccgagtcagagagcaatggcacgtaccaagcaaaccgctcgcaagtccaccggcggaaaggcgccgaggaagcaattggcgactaaagccgctcgcaagtcagctccggccaccggcggagtgaagaagccccaccgcttcaggcccggaacggtggctctgagggagatcagaaagtaccagaagagcactgaacttctgatccgaaaactcccattccagaggctcgtcagagaaatcgctcaggatttcaaaacagatcttcgttt

SEQ ID NO: 238331 - DNA, 405 bp, Glycine max
gaaggtgcaagagtttgttgtgagctataagctagtttatcgtgaggagaatatgaagttgtttgttttctttgttgctgcagtagttttggtagcatggccatgccatggcgcaggctaccaaaggttccctctccgaatgaaaactggctatggtgagcgttcttcggaggtaaaatgcgcaagttttaggcttgctgtggaagcacacaacatccgagcctttaaaaccattcctgaagagtgcgttgaaccaacacaggactacattaatggcgaacaatttagatcagactctaaaacagttaaccaacaagctttcttttatgctagtgaacgcgaagtccatcacaacgacatatttatattcggcatagataacaccgtactctctaatatcccata

SEQ ID NO: 238332 - DNA, 371 bp, Glycine max
gacaacacaacgcaacacaacgcgcactctctcttttctctcttaacacaaaaaccctatcgttcttcgcggtttcgccgattctcgccatgccgaaagccaaatccgacgccaaagccgccgatagccggttgaagcgcaagggcgctggtgctggaaggaagcaatcgaagaaagctgctaaggatcctaacaagccaaagagacctccaagcgctttcttcgttttcatgtccgagttcagagagcagtttaagaaggagcatcctaacaacatatccgtcgctgttgtcggtaaagctggtggtgacaaatggaaatcgctgtctgatgctgataaggcccccttcgttgccacggccgaaaagaag

SEQ ID NO: 238333 - DNA, 391 bp, Glycine max
gcttccatcggcgcggcacacacagacacacacatttcgtcggaatgggaagggtgattcgcgcacagcgtaagggtgcggggtcggtgttcaagtcccacacccaccaccgcaagggtccggcgaggttccgcagcctcgacttcggcgagcgcaacggctacctcaaaggggtcgtcaccgatatcatccacgaccctggtcgcggtgctcctctagccaaggtggcgttccgccaccccttccgctacaagaagcagatggagctcttcgtcgccgccgaaggcctctacaccggccagttcatctactgcggcaagaacgccaccctcgtcgtcggcaacgtcttgcccctccgatccatccccgaaggtgccgttatctgcaacgt

SEQ ID NO: 238334 - DNA, 382 bp, Glycine max
gacaacaatctaagagtgagttttgtttatttgaaattaacaagtagcaaagatgtttggaatcatcggaggaaacaagggtcacaagataaaggggaacttggtgattatgcgaaagaatgtgttggatatcaacagcattaccagtgttaagggtgtcatcggaaccggcattaacatcattggaggagtcgtcgacaccgttactgctttggcgtcccacatctccatccagctcattagtgccaccaaggctgatggacatgggaaaggaaaagttggaaaggctacaaatttaagaagacaagtgtcgtttacaaacttgggagctggcgaagatgcatacgatgttcattttgaatgggacagtgacttcggaatt

SEQ ID NO: 238335 - DNA, 383 bp, Glycine max
ggcacaagtgagtttgttgatcgagataactagaaacagtgtgatgaaaatgaaggtccttgttttcttcgctgctacaattttggtagcatggcaatgccatgcgtacgatatgttccctctccgaatgaacactggctatggtgcccgtactccggaggtgaaatgcgcaagttggaggcttgctgtggaagcacacaacatctttggctttgagaccattcctgaagagtgcgttgaagcaacaaaaggatacatccatggcgaacactatagatcagactccaaaacaatttaacaacaaaccttactttttaggccagagacctcgaaagtccaattcgaagggacacatttgtgttcagtataaatggcaccgtact

SEQ ID NO: 238336 - DNA, 379 bp, Glycine max
gactcaccacttcaaaacactcataacacaaagcacaaagcaaagctcatccttgagttaaaaaatggcagcagcttcttccatggctctctcatccccatccttggctggcaaggccgtgaagctgggcccatcagccccagaagtgggaagggtgagcatgaggaagaccgtcaccaagcaggtctcctcaggaagcccatggtacggcccagaccgagtcaagtacttgggcccattctctggcgagcccccgtcctacctaaccggtgagttcccaggcgactacggctgggacactgctgggctttccgcagacccagaaaccttcgccaagaaccgtgaactcgaagtgatccactccaggtgggccatgctc

SEQ ID NO: 238337 - DNA, 374 bp, Glycine max
  unsure (1)..(374): unsure at all n locations
gagccacgtacgcaactgaaaaggaaaaccctaagagatgaagagaactcctatcttgttccctctcttctttcttctttgtgccttcacctcatatctaccttcagccaccgctgatgatgatcatgtgtacgacactgacggcgataagcttcaatacggtgtcaattatttcgtgttgccagtgataagaggaaatggcggtggaatacaagtagcaaaagcaggaaacgaaacttgccctctgactgtggtgcaatctggcaacgagctctctgaggggttaccgataaagattgcatctcgatcagcangagtcgctttcatcacccaaggccagcttttcaagagcattcagttccgtgtgtttccat

SEQ ID NO: 238338 - DNA, 374 bp, Glycine max
ggcacaagtgagtttgttgatcgagataactagaaacagtgtgatgaaaatgaaggtccttgttttcttcgttgctacaattttggtagcatggcaatgccatgcgtacgatatgttccctctccgaatgaacactggctatggtgcccgtactccggaggtgaaatgcgcaagttggaggcttgctgtggaagcacacaacatctttggctttgagaccattcctgaagagtgcgttgaagcaacaaaggaatacatccatggcgaacaatatagatcagactccagaacagttaaccaacaagcttacttttatgccagagacctcgaagttgatcccaaggacacatttgtgttcagtatagatggcaccg

SEQ ID NO: 238339 - DNA, 378 bp, Glycine max
ggcacaagtgagtttgttgatcgagataactagaaacagtgtgatgaaaatgaaggtccttgttttcttcgttgctacaattttggtagcatggcaatgccatgcgtacgatatgttccctctccgaatgaacactggctatggtgcccgtactccggaggtgaaatgcgcaagttggaggcttgctgtggaagcacacaacatctttggctttgagaccattcctgaagagtgcgttgaagcaacaaaggaatacatccatggcgaacaatatagatcagactccaaaacagttaaccaacaagcttacttttatgccagagacctcgaagtccatcgcaaggacacatttgtgttcagtatagatgggaccgtact

SEQ ID NO: 238340 - DNA, 372 bp, Glycine max
ggttgtgcgtcggagctgtctgtgcaaatttgcgttgttcttcgcggcacacctcactcactgaacggtaagtatggcggacaaggctgttacaatccgaacccgaaagttcatgaccaacaggcttctttccaggaagcagtttgtcgttgatgtccttcatccagggagggcaaatgtttccaaggctgaacttaaggagaagctggctaggatgtatgaagtgaaagaccctaatactgtatttgtcttcaaattccgaacacattttggaggtggcaaatccactggatttggtttgatttatgatacagtggagaatgccaagaagtatgagcccaaatacaggcttatcaggaacgggcctgacac

SEQ ID NO: 238341 - DNA, 397 bp, Glycine max
ggcacaagtgagtttgttgatcgagataactagaaacagtgtgatgagaatgaaggtccttgttttcttcgttgctacaattttggtagcatggcaatgccatgcgtacgatatgttccctctccgaatgaacactggctatggtgcccgtactccggaggtgaaatgcgcaagttggaggcttgctgcggaagcacacaacatctttggctttgagaccattcctgaagagtgcgttgaagcaacaaaggaatacatccatggcgaacaatatagatcagactccaaaacagttaaccaacaagcttacttttatgccagagacctcgaagtccatcccaaggacacatttgtgttcagtatagatggcaccgtactctctaatattccatactac

SEQ ID NO: 238342 - DNA, 405 bp, Glycine max
ggcacaagtgagtttgttgatcgggataactagaaacagtgtgatgaaaatgaaggtccttgttttcttcgttgctacaattttggtagcatggcaatgccatgcgtacgatatgttccctctccgaatgaacactggctatggtgcccgtactccggaggtgaaatgcgcaagttggaggcttgctgtggaagcacacaacatctttggctttgagaccattcctgaagagtgcgttgaagcaacaaaggaatacatccatggcgaacaatatagatcagactccaaaacagttaaccaacaagcttacttttatgccagagacctcgaagtccatcccaaagacacatttgtgttcagtatagattggaccgtactctctaatattccatactagcaaaaaca

SEQ ID NO: 238343 - DNA, 379 bp, Glycine max
ggaagagagaaagagagtgaagagagaagaagatggcgtcgagcggagcggtgccgttttggagggcagcggggatgacatacatcacatactcaaacatatgcgcgaatctggtcaggaattgcctcaaggaaccctacaaggctgaagccatctctcgtgagaaggtccattttgctctctccaaatgggtcgacgccaagcctgaaaaacctactattcgttcagacaccccagagcagtgatccggaatagttggaagctataaatgcataaatctttgagatctggaagttcattgtcattttgaacctttctgtgatgtttaattcctttgcttctttttttcattccatgaaatggaacatacactggattt

SEQ ID NO: 238344 - DNA, 370 bp, Glycine max
  unsure (1)..(370): unsure at all n locations
gactctcacaatgcgaatcctcgtcctgctctctctcgccacccttctcctcttctcctccttctctcccaccttctgcgaccacctcgccgacgacgaggacctcagcttcctcgacgagccctccgccgcgccggagcacgaccaccactacggcgccgatgactccaatttcggcgactttgaggacttcgaggaggacgacgcggaggcgtacaagcagcccgaggtggacgagaaggacgtcgtcgttttgaaggagaagaacttcaccgacgccgtcaagaacaaccgcttcgtcatggtcgagttctacgcgccctggtgcggccactgccangccctcgcgccggagtacgccgccggcgcg

SEQ ID NO: 238345 - DNA, 366 bp, Glycine max
  unsure (1)..(366): unsure at all n locations
gacttttctcagctgctgttcctgcgcgtgaacaagcctcaggtaagccaaagccatggttaagcataacaatgttatccccaacggacacttccgtaagcactggcagaactatgtgaagacctggttcaatcagccagcacggaagacaagaagacggttggctcgtcagaagaaagctgtgaagattttccccagacctacagctggacctcttagacccattgtacatggtcaaactttgaaatacaacatgaaagtgagagctggaaggggattttcncttgaagaactcaaggcagcagggattcccanaaagcttgcaccaacaattggtattgctgttgatcatcgccgcaagaaccg

SEQ ID NO: 238346 - DNA, 366 bp, Glycine max
ggcacaagtgagtttgttgatcgagataactagaaacagtgtgatgaaaatgaaggtccttgttttcttcgttgctacaattttggtagcatggcaatgccatgcgtacgatatgttccctctccgaatgaacactggctatggtgcccgtactccggaggtgaaatgcgcaagttggaggcttgctgtggaagcacacaacatctttggctttgagaccattcctgaagagtgcgttgaagcaacaaaggaatacatccatggcgaacaatatagatcagactccataacagttaaacaccaagcatacttttaagccatataacgcgaatttacgcgaagtccatcacatcgacatatttatat

SEQ ID NO: 238347 - DNA, 367 bp, Glycine max
ggagcaaaaccctaatccctatttttcttcctcagtagtgtcatttacgcttctcttctctgcagcaactatgcctaaccctaaggtcttcttcgacatgaccatcggcggtcaatctgctggccgcatcgtgatggagctctacgccgacgtcactccccgcaccgccgagaacttccgcgcgctttgcaccggcgagaagggcgtagggcggagcggcaagcccctccaccacaagggctcgtccttccaccgcgtgatcccgagtttcatgtgtcagggtggcgacttcaccgccggaaacggaaccggcggcgagtcgatttatggcgccaagttcgccgacgagaacttcgtgaagaagcac

SEQ ID NO: 238348 - DNA, 380 bp, Glycine max
ggcaagagtttgttgtgagctataagctagtttatcgtgaggagaatatgaagttgtttgttttctttgttgctgcagtagttttggtagcatggccatgccatggcgcaggctaccaaaggttccctctccgaatgaaaactggctatggtgagcgttcttcggaggtaaaatgcgcaagttttaggcttgctgtggaagcacacaacatccgagcctttaaaaccattcctgaagagtgcgttgaaccaacaaaggactacattaatggcgaacaatttagatcagactctaaaacagttaaccaacaagctttcttttatgctagtgaacgcgaagtccatcacaacgacatatttatattcggcatagataacacc

SEQ ID NO: 238349 - DNA, 361 bp, Glycine max
ggacctgaaagtgttggaaacaacaaaaccaccgcacagggatcgtgttgagtttgagaatggagaagacagcagttaaagttcgatgccagaggattgggtgcgacgccatgttctccgaggacgacaaccccgacggttgctgtcgataccatgattcgggacctatatttcatgacgggacaaaagaatggagttgttgcaagaaaagaagtcatgattttagcttgtttttggaaattccaggatgcaagacaggaaaacatacaacagttaagcaagtaattacaccagtgaagaagaacaccatgccttctccaaccgctgtttgttcaaccaatgcatcatcaaaggactcctg

SEQ ID NO: 238350 - DNA, 379 bp, Glycine max
ggcacaagtttgttgagatagctagaagcaataagatgaaaatgaaagtgcttgttttgtttgttgctacagttttggtagcatatgaatgccatggctcagactaccagaagttccctctccaaatgaaaactgggtttggtgggcaatacagcaatgaggtggcatgtgccagttggaggcttggcgtggaagcaaacaacgtagtcaagtggcaaactgttcctgcagcttgcggagagtacatagctgactacgttctaggagaccaatatagatcagattccaaaacagttaaccaacaagcttatttctatgctaaatccctcaaactcaccaacaaagatgtctttgtcttggacgttgacgacactactct

SEQ ID NO: 238351 - DNA, 397 bp, Glycine max
gaagtttgttgagatagctagaagcaataagatgaaaatgaaagtgcttgttttgtttgttgctacagttttggtagcatatgaatgccatggctcagactaccagaagttccctctccaaatgaaaactgggtttggtgggcaatacagcaatgaggtggcatgtgccagttggaggcttggcgtggaagcaaacaacgtagtcaagtggcaaactgttcctgcagcttgcggagagtacatagctgactacgttctaggagaccaatatagatcagattccaaaacagttaaccaacaagcttatttctatgctaaatccctcaaactcaccaacaaagatgtctttgtcttggacgttgacgacactactctctctaatctccagtattttgct

SEQ ID NO: 238352 - DNA, 405 bp, Glycine max
  unsure (1)..(405): unsure at all n locations
ggttttaggttttcttagtcagacttaccccttgctaccaacactgagcttaaccgagcttcgcaaagatgaatcgggaaaagttaatgaagatggccggttcggttagaactggaggaaagggtactgtgagaagaaagaagaatgctgtccacaagacaacaaccacagatgacaaaaggcttcagagcaccctgaagagaataagggtgaatgccatccctgctattgaagaggtcaatatctttaaggatgacgtanttatccagtttctaaatcccaaagttcaagcaatcaattgctgctaatactttgggtgtcagtggttcaccgcaaacaanagaagttgcaggatatactccctagcattattcaccaattatgaccagataacttggaaaaacc

SEQ ID NO: 238353 - DNA, 405 bp, Glycine max
ggacacaccgtttgttctattcttaactcaacttctgctacccactctcttcttccaagtccaaccacgcttttctctacagtcatgggcaaggtcaagatcggaatcaacggatttggaagaattggccgtttggttgccagagtcgctctgcaaagagacgatgtggagctcgttgccgttaacgaccctttcattaccaccgattacatgacatacatgtttaaatacgacagtgttcacggacactggaagcatcacgatgtcaccgttaaggacgagaagacccttcccttcggtgacaagcaattcacggtttttggacacaggaaccctgaagaaattccatgggggtcaactggagctgatatcattgttgagtccaccggagtttccaccgataag

SEQ ID NO: 238354 - DNA, 368 bp, Glycine max
  unsure (1)..(368): unsure at all n locations
ggtctaaggggtgccctgagatcacattgaacaatggtgaaggctgtggccgttcttggcagcagtgagggtgtcactggaactattcacttcgttcaagagggaagtggtccaaccaccgtaactggatctcttgctggtcttaagcctggtctccatggtttccatgtccatgccttgggggacactaccaatggttgcctctcaactggatcacatttcaatcctaataacaaggagcatggtgcccctgaagatgagaatcgtcatgctggtgatcttgggaatgttaatgtcggtgatgatggtactgtcagcttcactattactgacagccagattcctctcactgggacanacaacatcat

SEQ ID NO: 238355 - DNA, 363 bp, Glycine max
ggaagaaggcaaatcgcgaagactagatctgatctgagagaatggctcctcggtctagcagcaaggacgcccaagaccttttccgcgctctttggtctgcttatgctgcaacccccactaatctcaagatcattgatctctatgtcatctatgccgtattcaccgctttcatccaggttgtttacatggctttggttggatcatttccatttaactccttcctatcaggagtactttcttgtgtaggaactgctgttcttgctgtttgtctcaggattcaagtgaataaagagaataaggaattcaaggatcttgcacctgagcgcgcttttgcggattttgttccctgtaatttggtgcttc

SEQ ID NO: 238356 - DNA, 358 bp, Glycine max
ggcacaagtgagtttgttgatcgagataactagaaacagtgtgatgaaaatgaaggtccttgttttcttcgttgctacaattttggtagcatggcaatgccatgcgtacgatatgttccctctccgaatgaacactggctatggtgcccgtactccggaggtgaaatgcgcaagttggaggcttgctgtggaagcacacaacatctttggctttgagaccattcctgaagagtgcgttgaagcaacaaaggaatacatccatggcgaacaatatagatcagactccaaaacagttaaccaacaagcttacttttatgccagagacctcgaggtccatccaaagacacatttgtgttca

SEQ ID NO: 238357 - DNA, 348 bp, Glycine max
ggcacaagtttgttgagatagctagaagcaataagatgaaaatgaaagtgcttgttgtgtttgttgctacagttttggtagcatatgaatgccatggctcagactaccagaagttccctctccaaatgaaaactgggtttggtgggcaatacagcaatgaggtggcatgtgccagttggaggcttggcgtggaagcaaacaacgtagtcaagtggcaaactgttcctgcagcttgcggagagtacatagctgactacgttctaggagaccaatatagatcagattccaaaacagttaaccaacaagcttatttctatgctaaatccctcaaacttcacaacaaagatg

SEQ ID NO: 238358 - DNA, 381 bp, Glycine max
  unsure (1)..(381): unsure at all n locations
ggagaacacaaacagcagcgtcttggtttgtgagagagacagaggcacagagagaaaatggtttcggggtcaggaatctgcgcgaagagggtagttgtggacgcgcggcaccacatgctggggaggctggcatcgatcgtggcgaaggaacttctgaatgggcagaaggtggtggtggtgcgctgcgaggagatttgcatctccggtgggctcgtcaggcagaagatgaagtacttgcgtttcctccgcaagcgcatgaacaccaagccctctcacggccccatccatttccgtgcacccggcaagatcttctggcgcaccgttcgtgggatgatnacacacaagacaaagcgcggggaagctgctcttgcacgactgaag

SEQ ID NO: 238359 - DNA, 337 bp, Glycine max
gagtttggtataactttagccgaggtcaggaggagcactagctaagttcacaatttcaaaatggctacgggactaaagaagcatttgaaaaggctcaatgctcctaagcattggatgcttgacaaactgggtggtgcatttgcgcctaaaccctcatctggaccacacaaatcgagggagtgcctccccctcattcttattctgcgaaaccggctgaagtatgctctgacataccgtgaagtcattgctattctgatgcagcgccatgttcttgttgatggcaaagtcaggactgacaagactttacctgctggtttcatggatgttgtttcaatcc

SEQ ID NO: 238360 - DNA, 403 bp, Glycine max
ggcaagagtttgttgtgagctataagctagtttatcgtgaggagaatatgaagttgtttgttttctttgttgctgcagtagttttggtagcatggccatgccatggcgcaggctaccaaaggttccctctccgaatgaaaactggctatggtgagcgttcttcggaggtaaaatgcgcaagttttaggcttgctgtggaagcacacaacatccgagcctttaaaaccattcctgaagagtgcgttgaaccaacaaaggactacattaatggcgaacaatttagatcagactctaaaacagttaaccaacaagcttttcttttatgctagtgaacgcgaagtccatcacaacgacatatttatattcggcatagataacaccgtactccctaatatcccatact

SEQ ID NO: 238361 - DNA, 320 bp, Glycine max
  unsure (1)..(320): unsure at all n locations
gcacaagtgagtttgttgatcgagataactagaaacagtgtgatgaaaatgaaggtccttgttttcttcgttgctacaattttggtagcatggcaatgccatgcgtacgatatgttccctctccgaatgaacactggctatggtgcccgtactccggaagtgaaatgctcaaattggcagcttgctgtggcagcacacaacatctttggctttgagaccattcctgaagagtgcgttgaagcatcaaaggaatacatccatggcgaacaatatagatcagactccanaacagtttaacaacaagcttacttttatgccag

SEQ ID NO: 238362 - DNA, 389 bp, Glycine max
ggtgctctgctcgtgcctctagggttatcatttctccatttccattttctctctcacttttcaagaatcgtaagctatgggaaagtcttacccaactgtgagtgctgattaccagaaggccgttgagaaggcgaagaagaagctcagaggcttcatcgctgagaagagatgcgctcctctaatgctccgtttggcatggcactctgctggaacctttgacaagggcacgaagaccggtggacccttcggaaccatcaagcacccctgccgaactggctcccaacgctaacaacggtcctgaaaacgctgttaaggtttttggagcactcaaagcggagttccctattttgagctacgccgatttctaccagttggctggcgttgttgcc

SEQ ID NO: 238363 - DNA, 346 bp, Glycine max
  unsure (1)..(346): unsure at all n locations
aagacctcaacttcaacaactgatcaagataagggtggtgacaacaagagtaagaagaagtggaagctatggagggcttcttcagaagggtccatgaagaaagttggtggtggtggtggtggtgctgctgctgcatctgattcttcccttacttatgcggtggccgtgatggttcccaaagatttcaagctcatcaagcaggaatgggctgccattcgcattcaggctgtgtttcgagccttcttggctagacgagctttgagggctttgagggcagtggtaaggctacaagctatttttagaggccggctagtcangaagcaagcagctgttactctaagatgca

SEQ ID NO: 238364 - DNA, 266 bp, Glycine max
ggtgtgtagtataggattctcgtctgtattccttttgtaatttcattcattcttaatcattgtgaaaaataatgctcatcgagaattttaaggttgagtgtcctaatgtgaagtacaccgagactgagattcagtccgtgtacaactacgaaaccaccgaacttgttcacgataacaggaatggcacctatgagtggattgtcaaacccaaatctgttaaataagaatttagcaccaacatgcgatgttcgtaaattagaggtaat

SEQ ID NO: 238365 - DNA, 385 bp, Glycine max
ggtccgaagccacttgagagaaaatggcggtgcctctgctctcaaagaagatcgtgaagaagagggtaaagaagttcaagaggcctcagagtgacaggaaaatttccgtcaagactaactggcgcacaccagagggtatcgattctcgtgttaggagaaagttcaagggatgcactttgatgccaaacattggttatggttcacacaagaatacccgccactatctcgctaatggtttcaagaaatttgttgttcacaatgtgaaggatttggaactgctcatgatgcacaacacgacttactgtgctgagattgcccacaatatatccacaagacagagaagagatatagtcgagagagccgcgcagcttgatgtagttgtgac

SEQ ID NO: 238366 - DNA, 178 bp, Glycine max
aaggcatagccataaattctttgaataagaaaatggtatattatattatgatatatattggcttagctataatcactagaattattatatactaagtataaatatatagaaattccagtgattatagactatctttatataatagtataaataaattaaattcactgaccgtcaaaaa

SEQ ID NO: 238367 - DNA, 365 bp, Glycine max
  unsure (1)..(365): unsure at all n locations
aaagtggtaatgagcatggaggcaggcattggagtgatgggcaccaagttgggtatgatgagctatttcgaatccgacggagaggttgttcctgtcactgtcgtgggtttcaaagaaggcaacatcgtcacccagatcaaaactgaggccaccgatggatacgacgccgtccaggttggttaccgaagggtcagagatcgcaaattgaccaaacccgaaatcggtcatctccagaaggtcggcgccattcccatgcgccatcttcaggagttccgtcttcgagccatcgatggcttcgaccttaaccagcgccttgtttttgatgaaattttcaagganggtgatcatgttgatgtctctggcac

SEQ ID NO: 238368 - DNA, 388 bp, Glycine max
gacttcacaactcaaactgcttcattgcataattgcagataagatcaacccttctaccttcagattcgcgggaagatggcatcacttcatgctaatgtgacatcagttgtttacaacagtggcaaccgtgtttctcaatcgaaatttgcaagctcttccttcttgtctgggttcgatgttgttggtcgtgcttcaagtgcttggaagaaggaacttgtcccatcttccatttccttggtgcctagagccaccctaacatttgatcccccaactaccaattcagacataaccaagcaaaagaagcacactcttgaccctgcttctccagattttcgtcctcatccttcatttgaacagtgctttccaaagagcagcaaagaacacaggg

SEQ ID NO: 238369 - DNA, 516 bp, Glycine max
  unsure (1)..(516): unsure at all n locations
ctcaactgtcagcctgcgagtacggtccgtaacttcccgggtcgacccacgcgtccgtacagctgcgagaagacgacagaagggactctcggcaacggatatctcggctcttgcatcgatgaagaacgtaacgaaatgcgatacttggtgtgaattgcagaatcccgtgaaccatcgagtctttgaacgcaagttgcgcccgaagccattatgccgagggcacgcctgcctgggtgtcacacatcgtaaaaaacatgtcagggtacaaaaaaaaaaagcggccgctctagaggatccaagcttacgtacgcgtgcatgcgacgtcatagctcttctatagtgtcacctaaattcaattcactggccgtcgttttacaacgtcgtgactgggaaaaccctggcgttacccaacttaatcgccttgcagcacatccccctttcgccagctggcgtaatagcgaagaggcccgcaccgattgcccttcccaacagttgcgcagcctgaatggcgaatgn

SEQ ID NO: 238370 - DNA, 435 bp, Glycine max
  unsure (1)..(435): unsure at all n locations
gatgtggttgcgcctctgcctgtaagagtgaaaaaaccttctcttttccttctctcaagtctcaagagatttcatcatggctccaaagaaggacaaggctccaccaccttcctccaagcccgccaaatctggcggtggcaagcagaagaagaagaagtggagcaagggaaagcaaaaggagaaggtgaataacatggtgctgtttgatcagggcacctatgataagctcctttctgaagctcccaaattcaagctcatcactccttccattctttctgatcgtttgaggattaatggatcacttgcaaggaaggctataagagaattgatggctaagggttcaatcangatggtgtctgcccatgcaagccagcaaatttacaccagggcaacanacacctaagtgtggaactgatcttagcttacggagtattg

SEQ ID NO: 238371 - DNA, 335 bp, Glycine max
cgggatagtgtgttaagcctcgccgactcggttgctatcagcgagtgagagtgagtgagtggttctcttgcagcaacacagtttagtgacaccaaacagacgggaaatgggtcgtggggtcagtgctggtggtggacagagttccttggattatctctttggcagtggggtacctgccagcagtgcaaatggtgctcgcactcaaaatgcaagtgctccatcaccaccggttgataagcaaagtccagcaccagcaccagcaccagcacctgcacctgcagcagcagcaccagcacctgcaccagcaccagcaccagcatcagctgataagcaaa

SEQ ID NO: 238372 - DNA, 441 bp, Glycine max
ggatcctttgtattcgattcttcaagattcaggtactgcgtttcggaagcagacacagatggctcgtacgaagcaaaccgctcgtaagtccacaggaggaaaggctcctaggaagcagcttgcaaccaaggctgcacgtaagtctgcaccaactactggtcgtgtgaagaagccccaccgttatcgtcctggtaccgttgctcttcgtgagattaggaaataccagaagagtaccgagcttttgattcggaagctccccttccagaggctggttcgtgaaattgctcaggacttcaagactgatctgcgtttttcagagcacgccgtgcttgcattgcaagaagctgctgaaggataccttgttgggctctttgaggacactaacctgtgtgccattcaggccaagcgtgtaaccattatgcccaaggatattcagctggc

SEQ ID NO: 238373 - DNA, 329 bp, Glycine max
gatctggcagcagacaaacaagtagttgagaactaagaagaaggaaatggcttcctcaatgatctcctccccagctgttaccaccgtcaaccgtgccggtgccggcatggttgctccattcaccggcctcaaatccatggctggcttccccacgaggaagaccaacaatgacattacctccattgctagcaacggtggaagagtacaatgcatgcaggtgtggccaccacttggcaagaagaagttcgagactctttcctacttgccagacctcgatgatgcccaattgggaaatgaagtcgaataccttctaagggaaggatggattc

SEQ ID NO: 238374 - DNA, 400 bp, Glycine max
gatagtctgaggaaagtgagtgagagaaagagatcgcagacacagagcagaatggcttctacccaatgtttcttgcaccaccatgctcttaccacccctgccagtgccagatccccatcactacgcatcttggttagcaccaagcctaaccagcttgtttgcaaggcacagaaacaacaaacaccacaagaggatattgatgtcagcccaatctctcgccgtttagctctaactgtgctcattggtgctgctgctgttggctccaaagtccaacctgctgatgcagcctatggtgaagctgccaatgtgtttggaaagccaaagacagacacagatttcctgccatacaatggagatggattcaaactatctattccctcaaagtggaacccaagcaaag

SEQ ID NO: 238375 - DNA, 390 bp, Glycine max
gatagtctgaggaaagtgagtgagagatagagatcgcagacacagagcagaatggcttctacccaatgtttcttgcaccaccatgctcttaccagccctgccagtgccagatccccatcactacgcatcttggttagcaccaagcctaaccagcttgtttgcaatgcacagaaacaacacacaccacacgaggatattgatgtcagcccaatctctcgccgtttagctctaactgtgctcattggtgctgctgctgttggctccaaagtccaacctgctgatgcagcctatggtgaagctccaaatgtgtttggaaagccagagacagacacagatttcctgccatacaatggagatggattcaaactatctattcgctcaaagtggaac

SEQ ID NO: 238376 - DNA, 367 bp, Glycine max
ggtaagaaaacacaaacaacacaaaattcattgcacagtgttattttcagtatcagcatcatggctccaattgcagtgggagatgtcattccagacggcattttggcttacttggatgaagaaaacaaaccccaaactgtctctattcactctctcgccgccggcaagaaagtcatcatctttggggttcccggtgccttcactcctacatgcagcttgaagcacgtgcctggcttcattgagagagcagaagagctgaaaggaaagggtgtggacgaaataatctgtatcagcgtgaatgatccctttgtgatgaactcatgggccaaaacgttcccagagaacaagcatgttaagttccttgctg

SEQ ID NO: 238377 - DNA, 442 bp, Glycine max
  unsure (1)..(442): unsure at all n locations
gactcactcatacaatagagaccagcttttgcttctttgtgaacatggagatgaggaaatcatgtggcttcttcttcttgctcctcctccttgtctttgcttcccaggtggtggtgcagacggagggaagagtgtgtgagtcacaaagccacgggttccatggtttgtgtaatagagaccacaactgtgctttggtctgcaggaacgaaggtttctccggtggcaggtgcaaaggcttccgccgccgctgcttttgcaccaggatttgttgagatctcatcaaacactactcttgccatgcaaattaataaatcatagctaggccaaataaattgcatctactctttatccatttgggagctagctaccacaaccaactcatacttggtcattggattgcttcnctttggcttctgcctttgcttatctctctacctctacg

SEQ ID NO: 238378 - DNA, 357 bp, Glycine max
gaagactgcgacgacgatccatgtgatagactctcgtcgcgatggaacgtgtcgctgaatgcgagcgaattctgtacccagacttgactggatcctctgtagtcgctatcacgttcaacgatgggattctaatggccgctgacatgggatgttcgtagggatctaccctgcggtataagagtgttgagcgtatcatgcctattggaaagcattctcttcgtggtgctagcggggagatcagtgactttcaggagattctgcgtgaccttgacgagcttatcggatatgaccacatgtgggatgatgggaattcctcacggccgaaggatgtgcccaattatttaacccgtgtgaggt

SEQ ID NO: 238379 - DNA, 343 bp, Glycine max
acgcgtccgccaacgcgtccggacgacagaagggggagttgagaggatcgtgagatgggcagtagccgagagtccgtgagttgcaaaaatgaagatcaggctttccaccgagaccatgaagatcacggacagcgtgagcatcaaagtccacgccaaggtcatccaagtttaaggccctcgcggaaggttggtgcgagacctcacgcatatgactcgcgattttcagcccatgactgacgagaaccgtactggaaagctgaacatccacgcgtggtttggttctcggaaagcattcaccgccattcgcagcgccttgagccatgtggatattcataccaccggc

SEQ ID NO: 238380 - DNA, 371 bp, Glycine max
  unsure (1)..(371): unsure at all n locations
gaccctagaatcccagttcaaaggtaaggtaggttaacactcttcttcatcgtcgtcgcaatgggacgtgtgatccgtgcgcagcgtaagggagcangctcggtcttcaagtcncacacgcaccaccgcaagggccctgcacgcttccggagcctggacttcggggagcgcaacggctacctcaagggcgtggtcaccgacgtcatccatgaccctggccgcggcgcgccgctcgccaaggtcgccttccgccaccctttcagatacaagaagcagaacgagctcttcattgccgccgagggcctctacaccggtcagttcatctactgcggcaagaaggccaccttgttgtcgggaacgttcctaccctg

SEQ ID NO: 238381 - DNA, 423 bp, Glycine max
ggggcgaggtagccagagagtgatacaatacagagtgcgttgttgctccttcgccacaactccctgccaacatgggtatctccagagattctatgcacaagaggcgtgccactggtggcaagaagaaggcatggaggaagaagagaaagtatgagcttggtcgccagcctgctaacactaagctgtcaagcaacaagacagtcaggaggatccgggttagaggtggaaatgtgaagtggagggcactgagattggatactggaaattactcctggggaagtgaagctgtaactcgcaagactcgtatactagatgtggtttacaatgcctcaaacaacgagcttgtgcgtactcagactcttgtaaaaagtgctattgttcaggttgatgctgctccattcaaacagtggtaccttcagcact

SEQ ID NO: 238382 - DNA, 439 bp, Glycine max
ggaagattgaagaacagtcgtcggctccacgctcgcccttcgctgctgcgccatcaccgtgcccttctcaaagcgattttaacctaaccgcgttctttttttcttcagaaatcgagcataaggatttgaggattgaagtattgaacaccacatcctttatacttgttgggcaagaatggagggaaaaaggagaaacacaaaaatgtttttccacatagtgctggagcgaaatatgcagctgcatccacgctactttggtcgcaaccttcgtgatgatctcgtttccaagctaatgaaagatgtggaaggcacttgcagcggccgacatggatttgtggtggcagtgacagggatagaaaacatagggaaagggctaattcgtgatggatcacggtttgtgacatttccggtgaagtaccaatgtgttgtcttcagacca

SEQ ID NO: 238383 - DNA, 303 bp, Glycine max
gggaagattgaagaacaatcgtcggggcaacgctcgcccttcgccgctgcaccatcatcgtgcccttctcaaagcgattttaacctaaccgcgttctttatttcttcaaagatcgagcataatgatttgaggattgaagtattgaacaccacatcctttatacttgttgggcaagaatggagggacaaaggagacacacacaaatgtttttccacatagtgctggaacgaaatatgcatctgcatccacgctactttggtcgcaaacttcctgatgatctcgtatccaagctaatgagagatg

SEQ ID NO: 238384 - DNA, 300 bp, Glycine max
ggatctatgggagatagagtagagagccgtcgctatcctagtctcttcatcccctctagacatttcagtttcaggatggaatctcaggtgaagcacgcccttgttgtcaaagttatgggtcgtactgggtctagggggcaggtgactcaggttagagtgaagtttttggatgatcagaatcgacacatcgggacgaacgtgaaaggacccgtgagagaaggaaacagtcgcactgtagttgagtctgagagagaagcaagaaggttgcgctagaggatctcttcagcgtttggctcagga

SEQ ID NO: 238385 - DNA, 430 bp, Glycine max
gactccttctggtcactcttgggagaagaggtcgagtttcacagcagcaatggtgtacgtcaaggctcagaaatcaaaagcctacttcaagagatatcaagtcaagttcaagagaagaagagagggaaaaaccgattaccgtgccaggattcggttgattaatcaggacaagaacaaatataacactccgaaataccgatttgttgttcgctttagcaacaaggacattgttgcacaaataatatctgcgagcattgctggcgatattgttcttgctgcagcatatgcacatgagctgccacgatatggtcttgaagtacggcgtacaaattatgctgcagcttattgcactggtctcctgttggcccgaagagtcctcaaaacacttgacatggatgaggagtatgaacgacatgttgaggctactgga

SEQ ID NO: 238386 - DNA, 382 bp, Glycine max
ggatcctagattaagccctagctagaggagagggtttaaagctctgaagcttctttcttcttctccaattaagatcgcagagagagatggggagtgacagcgaggcagagaaggagaagaagaagatgcttgcgctcgctcccattgctaaaccccttgccggaaagaagctttgcaagcgaaccctaaaacttgttcgtagagctgccgaacacaaatgcctgaaaagaggagtgaaggaggttgttaaaagcataaggagaggtcataaaggattgtgtgtgattgctgggaacatatcgccgattgatgtcatcactcatcttcctattctctgtgaagactctgacattccttatatttatgtcccatcgaaagaaga

SEQ ID NO: 238387 - DNA, 280 bp, Glycine max
gagatctgagatagaaacgaaacgttaactaagaatcaatacctcaatggccacccttgtcgttcataaccaaaattcttctgctcaagatgctaaggctctccaacaggctttcaaaggatggggggctgatcacacggccattatagcaatactgggtcacaaaaatgttcatcagaggcacgaattcagaatagcctaagaggagatttaccaagatgatctcatcaaacactttgagtcgtagatctctggtgactgtgagatagctatgtaccgg

SEQ ID NO: 238388 - DNA, 364 bp, Glycine max
tcgacagctgcaaagacacaaaaggggactttcaaatttcttttccttcactttcccgagaaaaaaaaaacactctttcactttcttgactacggtctcacttcgacatggctcgtactaagcaaactgctcgcaagtccaccggcggcaaggcgccacgtaagcagttggcgaccaaggccgcccggaagtccgctcccgcgaccggaggagtgaagaagccccaccgcttcaggccgggaaccgtggcgctgagggaaatcagaaagtatcagaagagcaccgagcttctcatcaggaagcttccgtttcagagactcgtgagggaaatcgcgcaggacttcaagaaccgatttgcgttttc

SEQ ID NO: 238389 - DNA, 426 bp, Glycine max
gattgttggcttgtgctctgctcgtgcctctagggttatcatatctccatttccatttcctctctctcagtttccaagaatcttaagctatgggaaagtcttagccaaccgtgagcgctgattaccagaaggccgttgagaaggcgaagaagaagctcagaggcttcatcgctgagaagagatgcgctcctctaatgctccgtttggcatggcactctgctggaacttacgacgtgagctcgaagaccggtggtcccttcggaaccataaagcacccctccgaactcgctcacggcgctaacaacggtcttgacatcggtgttaggcttttggagccactcaaagcggagtttcctattttgagctacgccgatttctaccagttggctggcgttgttgccgttgaggtcaccgggtgacctgaag

SEQ ID NO: 238390 - DNA, 426 bp, Glycine max
gacacaaactttattacagttgttgtattgtaattaagcaagaatattaggcaatggagtcttctagaacttcaactactcttgctctttttttaaccatcaatttgcttttctttgtcatggcaagtggctgctacacttgcacacagcctaagccaaaccctatcccattcccttaccctaaccctagtcctgccgcgaagagctgccccagggacgcacttaagctcggagtgtgcgcagacgtgcttaatggaccaattggtgctattgtagggtcaccaccggaccacccatgttgctcagtgctagaagggcttcttgatcttgaagttgcggtttgcctctgcactgccatcaaagccaacattcttggcattaaccttaacatccccatttcgcttagcttgatacttaacgcctgcg

SEQ ID NO: 238391 - DNA, 310 bp, Glycine max
gtcgccgaaaaccctaacaacacaggcgcacagcgtgatccattgacgaagatggtgcagcgtctcagctatcgcaagaggcagagctagtgccaccaagttcaaccaacacagggtcgtcaggacgcctggtgggaagctcgtttatcataccaccaagaagagggccagcgggcccaagtgccccgtcactggccagaggattcaggggattccacacttgaggcgtgcagagtacgggagatcaaggttgcccagagaccgtaggactgtcacccgtgcagatggcggagtattgtcaggacgtgct

SEQ ID NO: 238392 - DNA, 250 bp, Glycine max
ggttgtcctacagattcttcaggaactgcgattttggatcggaacctcatctgcggcgtagcaatgggacactccaatgtttggaattctcattcaaagaactaccgtcctggttcgcgcaattgccgaatgtgtgggaatccaaatagattgatcaggaagtacggccttaggtgtctgcatgagtgcttccgtagcaatgacagcgaaagatggcctcatcaagtaccgcgaacagagcggttgtcac

SEQ ID NO: 238393 - DNA, 374 bp, Glycine max
gagttttggtgagttgtgtaattttgtttgttcatcttgtgttgttcactgttctttcccagacccacctcaaagttgaaagcagccatgggttttttcttgaaatgggtcaacttgtttgtcttttttcatttccttgctgcaacacccatcttctcagattcctcctccagctcaaatgcaatcgccaccaccaagttccttgatttagccaaggatcctcgggttttttgattggatggttggtatcaggaggaagattcatgagaatccagaactgggttatgaggaatttgagaccagtaagctgattagagctgaattggataaactgggcatctcatataaacacccagttgcagtcacgggtgttg

SEQ ID NO: 238394 - DNA, 363 bp, Glycine max
gaagaaattggtctgtttatggtggagatcatgcatatgcgacacaaatttgatgttgacacacgcttggttgagggtattgtccttgatcatggttctaggcaccctgacatgaagcgacgtgcagaaaactgctatatcttgacatgtaatgtatctttggagtatgagaagagtgaagtaaactcaggctttttctactcaagtgcggaacagagagaagctatggttgcagctgaaagacgacaggttgatgaaaaagttaaaaaaatcattgaactgaagaataaggtttgttctggtaatgatagcaattttgttgtcctcaatcaaaaaggaattgattccccatctctggacctg

SEQ ID NO: 238395 - DNA, 411 bp, Glycine max
gagcgaaacagagagtgatttcagtgagtgatcggtgttcacttgatctcatcataatcgtcagcgtcaattgaagaagatgccgatcagaaacatcgccgtcggaaggcctgaagaggcgactcaccccgacacgttgaaggcggctttggctgagttcatctcaaccttcatcttcgtgttcgccggctcaggctccggcatcgcctacaacaagctcaccgacaacggcgctgccacccctgccggcctcatctccgcctccatcgcccatgcattcgccctcttcgtcgccgtctccgtcggcgccaacatctccggcggccacgtcaaccccgccgtcaccttcggcgccttcgtcggcggcaacatcaccttcctccgcggcatcgtctacgtcatcgcccagct

SEQ ID NO: 238396 - DNA, 371 bp, Glycine max
gcctcaatcggcccgcaccaacagcatcggcggcgacagtcactctccgacaacaacacttccgcggcgaaaaatgtctctggtggcgaacgaggatttccagcacattctgcgtgtgctgaacaccaacgtggatgggaagcagaagataatgttcgctatggcctccatcaagggtattggaaggagattcgccaacatcgcttgcaagaaggccgatgttgacatgaacaaaagggctggtgagttgagtgctgcagagttggatagtgtgatgactgtggtggcgaaccctaggcaattcaagattccggattggtttttgaacaggaagaaggattacaaggatggaaagtactctcaggttgtgt

SEQ ID NO: 238397 - DNA, 146 bp, Glycine max
gaattgcaatcaaattagttcatgctctttgcgcagttccctagctctccgtgcaagatgcagatcgtcgtcaagaccctcaccggaccgacgatcacgcttgaggtggacagctctgacaccatcgacaacgtcgcggccaagat

SEQ ID NO: 238398 - DNA, 442 bp, Glycine max
  unsure (1)..(442): unsure at all n locations
gacacaactaactaagaaagtcttccatagccccccaaaaatgaagagcaccatcttctttgctctctttctcttttgtgccttcancacctcatacctaccttcagccatcgctgatttcgtgctcgataatgaaggtaaccctcttgaaaatggtggcacatattatatcttgtcagacataacagcatttggtggaataagagcagccccaacgggaaatgaaagatgccctctcactgtggtgcaatctcgcaatgagctcgacaaagggattggaacaatcatctcgtccccatatcgaatccgttttatcgccgaaggccatcctttgagccttaagttcgattcatttgcagttataatgctgtgtgttgaattcctaccgagtggtctgttgtggaggatctnaacagaggacctgctgtcnaaattggtgaga

SEQ ID NO: 238399 - DNA, 317 bp, Glycine max
gacacttactagtagtaagcatggagtcctcaaagatctatgctcatctcttaaccttcaagtttttaaagtattaagatggcagagacattcctatttacctcagagtcagtgaacgagggacaccctgacaagctctgcgaccaaatctccgatgctgtcctcgacgcttgccttgaacaggacccagacagcaaggttgcctgcgaaacatgcaccaagaccaacttggtcatggtcttcggagagatcaccaacagggccaacgttgactacgagaagatcgtgcgtgacacctgcaggaacatcggcttcgt

SEQ ID NO: 238400 - DNA, 442 bp, Glycine max
gacacttactagtagtaagcatggagtcctcaaagatctatgcttacctcttcctctgcatgatctttctctcttccgccactcccattctcggttgtggctactgtggcaaaccccccaaaaagcacaagcctggtaaaacaccaaagacacccaaaacacccgttgttaagccaccagtcaccatccctcccattaatgttcctcccgttgttcttccaccaatagtgaagcccccaggtattctccctccaattccaattattaacccaccaaccacaccagggaagggagggaacactccatgcccaccaccaaagtctcctgcgcaggctacgtgccccattgacacgctcaaacttggtgcctgtgtggatcttcttggagggttggttcacattggtttgggtgaccctgttgcgaaacagtgctgccccgtgct

SEQ ID NO: 238401 - DNA, 424 bp, Glycine max
  unsure (1)..(424): unsure at all n locations
gaagtaagttcatttgactctcacaaaccttgcatccatccacacatggctggcatgaactctagcgtattggcctgtagctatgccatatctggtgcagcatgctccgagctcaatgggaaggtcacttccgtggcctctgttgcatcctctggctacaagttgccattgatcaaatgtgaggccagagttcccaaagccaaagaatctgaaggaaggagaggtgcccttgttctcttggcagctacccttttcatctctgcagcctccaattcttttgccaatgctgggatcattgatgattaccttgagaggagcaaggctaacaaggaattgaatgacaagaagaggttagctactactggagcanactttgcaagagcatacaccgtggaattcggtagttgcaagttccctgagaaac

SEQ ID NO: 238402 - DNA, 276 bp, Glycine max
gattcagagttgcatcgactgaaacccctagaaaagacgccactttctctctttcactagctccgttcaagttctaactaagcacttcgtcgctgcttttgcttctgtaggagatgtctctgcgagtgctgaaccctaacgccgaagtgctgaacaaatcggcggcacttcacatgaacatcaatgccgccaagggtctgcaagatgtcctgcaaaacaacctcggtcccaaaggaaccatcaaaatgctcgttggtggtgccggtgatatcaagc

SEQ ID NO: 238403 - DNA, 406 bp, Glycine max
  unsure (1)..(406): unsure at all n locations
aacaacatatattaaaaaaataacaacatatattaaaaaagtcagaataaaaaaacaaatcctttatagtatttcttgtaataaatgtgatttttggaatagggataaataaaccatggaaaaatctaagcgactctttatgaaatccaagcgatcttttcgtaggcgtttgcccccgatccaatcgggggaccgaattgattataaaaacatgggtttaattagtcgatttattagtgaacaaggaaaaatattatccagacgcgtaaatagattgaccttaaaacaacaacgattaataacaattgctataaaacaagctcgtattttatctttgttaccttttcttaataatgaaaaacaaattgaaaaaagcgagtcaaccgctagaactactacntttaag

SEQ ID NO: 238404 - DNA, 408 bp, Glycine max
ggttgttcgctttgcaattttttcttctagaacaccgcctcagccacactacaaagacgcgacgacgcacagaaggcgaagaagctaaacgacgacgcagcgttatggaagacgaaatgtacggcgtgtcgtccacgacggagtactcggacggggcgctgatgacgccggagaacatattcccggcggagtaccacagcttcctaatgtcctccgccgcccggattccgatgttcggatccgacgagcttctctccgccgtcaccgccggcaacgaaaccgaaccctaccctggcgccaccatcgcaccggaaattcagcgccaaaacgacgcctcctctctcatcaaagccaaaatcgcctctcaccctcactaccctcgccttctccaagcctacatcgattgcc

SEQ ID NO: 238405 - DNA, 427 bp, Glycine max
ggcagcagaagaacaagtagttgagaactaagaaggagaagcaaatggcttcctcaatgatctcttccccagctgttaccactgtcaaccgtgccggtgccggcatggttgctccattcactggcctcaagtccatggctggcttccccaccagaaagaccaacaatgacattacctccattgctagcaacggtggaagagtgcaatgcatgcaggtgtggccaccagttggcaagaagaagtttgagactctttcctacctgccagaccttgatgatgcacaattggcaaaggaagtagaataccttcttaagaagggatggattccttgcttggaaatcgagttggagcacggtttcgtgtaccgtgagcacaacaggtcaccaggatactacgatggacgctactggaccatgtggaagctgcc

SEQ ID NO: 238406 - DNA, 400 bp, Glycine max
aacaacatagattaacgcaatagcaacatatcttccaaaagtccggcttcagcaacactaccttgacgcgactacgcgcagaaggcgaggaatctaaacgacgacgcaacgaaaccatggaaaaatctaagcgactctttatgaaatccaagcgatcttttcgtaggcgtttgcccccgatccaatcgggggaccgaattgattataaaaacatgggtttaattagtcgatttattagtgaacaaggaaaaatattatccagacgcgtaaatagattgaccttaaaacaacaacgattaataacaattgctataaaacaagctcgtattttatctttgttaccttttcttaataatgaaaaacaatttgaaaaaagcgagtcaaccgctagaactaatac

SEQ ID NO: 238407 - DNA, 243 bp, Glycine max
cgggggttcaaaccttcatcagctatgcgattgtctccttgtgcgaacaccacttcaatgagttccggatcgggttcacttttgtggttccggaacggtcttcggatccatgacaaccccgctctcgaagtcgcttcgcgtggagcctctcatctctaccctgtctttgtcatcgacccgcatttcatggaacccgacccgaattcttccgcacccggatcctctcgcgcgggtctgaaccgc

SEQ ID NO: 238408 - DNA, 245 bp, Glycine max
gcaacataggtcatcgaaaggatctcgaagacccaccaacgcacgaaagccgggatctttcagaaaatggattcctattcgaagggtgcataaccgcatggataagctcacactaacccgtcaatttgggatccaattcggttccttaggacgtatcgggaaggaattttggaatgtacatatatcgattcatacagataccgaaaacaaggttctctattgattcaaacgctctacctaccaga

SEQ ID NO: 238409 - DNA, 372 bp, Glycine max
ggaccaaaccattttagtttagttttgaatcactggtgagggccttccatggcttccgcttgtgcttcctctgcaattacagctgttgccatctctacgccgagttccgggcagaagaatcgatcaggaagttgttttcttaatggaaggaaattgagggtgaaaaacgaaatagcagcacttgtaggacgatcgatgggcactacagtttgcacagttgctgagcctgacagacctctatggttcctacgcagcagacctcctcgatggcttgatggcactctacctggagacttcggctttagaccacttggtcatggatctgacccagacagtctgagatggacatgtcatgcagagctagtgtactgc

SEQ ID NO: 238410 - DNA, 254 bp, Glycine max
ggaactcataatattcatcactagaagtgttggatgcatttctatttctaactaattattgtgcttattattattgttgagaaagaaaagaatggcaaagttaataaaattctttgagttgaacacaggggccaagattccttctgttgggttaggcacttggcaagctgagcctggtgttgtagccaaagctgtcaccacagccattctggttggatacaggcatattgattgtgctcaagcgtataacaatc

SEQ ID NO: 238411 - DNA, 355 bp, Glycine max
atagcaaaatcgtttctccaatttaatcaccattgtacaacccaattcccttcgtcgttttcgattaagagagcaatggcacgtaccaagcaaaccgctcgcaagtccaccggaggaaaggctccgaggaagcaattggcaaccaaagccgctcgcaagtcagccccggcgaccggcggagtgaagaagccccaccgcttcaggccaggaacggtggctctgagggagattcgaaagtaccagaagagcaccgaacttctgatccgaaaactcccattccagaggctcgtcagagaaatcgctcaggatttcaaaaccgatctccgctttcagagcagcgccgtttcggctcttc

SEQ ID NO: 238412 - DNA, 384 bp, Glycine max
gatccaactctctaaacaacacattaacctttctcattccccatctcctcaccttattcagccactgctaatttctagggttccgaaatggacgctggcggaaagatcaagaagggcgccggaggaagaaagggcggcggccctaagaagaagccggtttcaaggtccgtcaaggccggtctccaattccccgtcggaagaattggccgttatttgaagaaaggaaggtacgcccagcgtgtcggtaccggtgctcccgtttacttggccgcagttctcgagtacctagctgctgaggtgcttgagttggctgggaatgctgcacgtgacaacaagaagaacaggattattccgagacatgtgctattggctgtgatgaacgat

SEQ ID NO: 238413 - DNA, 416 bp, Glycine max
atatcaataagcggaggtgatcaccatttatatagtctgtattctccttgcctgttggacatgtttagattcttttgtagaagtttatgtgagaaagaaattcgaacagaaattgcgtatcaagactttattacagattactctttatgcaaaaaaaaaaaaaaaaaaaaaaaaaaaaaaaaaaaaaaaaaaaaaaaaaaaaaaaaaaaaaaaaaaaaaaaaaaaaaaaaaaaaaaaaaaaaaaaaaaaaaaaaaaaaaaaaaaaaaaaaaaaaaaaaaaaaaaaatttaaaaaaaaaaataaaaaaaaaaaaaaaagggggcgccccaaaaagtttacagttttttttacggggtgtgagggtttaaaactcctttaaggggggcccaaattttatatagggggcgggtttttta

SEQ ID NO: 238414 - DNA, 393 bp, Glycine max
gacacttactagtagtaagcatggagtcctcaaagatctatgcttacctcttcctctgcatgatctttctctcttccgccactcccattctcggttgtggctactgtggcaaaccccccaaaaagcacaagcctggtaaaacaccaaagacacccaaaacacccgttgttaagccaccagtcaccatccctcccattaatgttcctcccgttgttcttccaccaatagtgaagcccccaggtattctcgctccaattccaattattaacccaccaaccacaccagggaagggagggaacactccatgcccaccaccaaagtctcctgcgcaggctacgtgccccattgacacgctcaaacttggtgcctgtgtggatcttcttggagggttgg

SEQ ID NO: 238415 - DNA, 388 bp, Glycine max
  unsure (1)..(388): unsure at all n locations
ggtgccttacatcaaacattattgagtagtattaagagcattgcaatgatgatagctatctctgcaacttttatgattttcttcttgtgttcgccatcagtggctatactaatcatcaggttgccgctaccctcaccagtgacaggccctgagtccgtagcattcgaccggaacggtggagggccatatgtcggtgtttctgatggaagaattctcaaatatgctggtccaaccgatggcttcaaggaatatgctttcacttcaccaaacagaaacaagacaatctgtgatgggcttgctgatttctcagaactccaggcagcatgtgggatgccattangattgcgttttcaacatcanacantcgaactatacgtagctgatgctt

SEQ ID NO: 238416 - DNA, 378 bp, Glycine max
ggttgagtgtagaacgctgctgccgaagcccttccggaaccctaaggtaagtgagtaatcagtggttgagaatggtggagaaggcgaagggtagaaaggaggaggtggttacacgtgagtacaccattaacctccacaagcgcctccatggctgcacatttaagaagaaagctcctaaagctattaaggagataaggaaatttgcccaaaaggccatggggaccaatgatgtgagggtggatgtgaagttgaacaagtttgtctggagccagggaatcaggagtgttccaaggaggattagagtaagaattgctcgcaagagaaatgatgatgaagatgccaaggaagagctgtactctcttgttaccgttgttgaga

SEQ ID NO: 238417 - DNA, 388 bp, Glycine max
caggggtgatttgagaggatcgcgagagggacggtagcagagattccgtgagttgcacaaatgaaaacaaatctttctgcagagaccatgaacatcccggacggcgtgagcgtcaaggttaatgccaaggtcatcgaaattgagggcccccgcggaaaattggtgcgaaacttcaagcacttgaatctcgattttcagctcatcactgacgagaacggtaaaaggaagctgaaagtggaggcctggttcggttctcggaaaacatccaccgccaatcgcagcgcactgagccacgtggagaatctgatcaccggcgtcaccaaaggctaccgctacaaaatgaggttcgtttatgcccactttcgcatcatcgcaagcatcggtaacg

SEQ ID NO: 238418 - DNA, 395 bp, Glycine max
gaaaggtctcgtctttgacaagaaggtcagccacgccgccgggggacccacccgcatggagaacgccaagatcgccgtcattcaattccagatttcgccgcccaaaaccgacatcgaacagagcattgtggtgagtgattactctcagatggatacgattctaaaagaagagcgtagttatattctcagcatgattaagaagatcaaggccactggttgtaatgtgttgttgattcagaagagtattttgagggatgcagttactgatttgtccttgcattaccttgcaaaagctaagattttggtcattaaggatgtggagagggatgagattgagttcattaccaagacactgaattgtttgcccattgctaacattgagcattttcgcactg

SEQ ID NO: 238419 - DNA, 362 bp, Glycine max
gagattcgtcttcagtttcagcctttctctcccactcactcactcacaggtaagcaatggcgggaaaaggagggaaggggcttcttgcagcgaaaaccaccgcggcgaataaggacaaagacaaggacaagaagagacctatttctcgctcttcccgtgctggaatccagtttcctgtgggacgtatccatatgcagctgaaacaaagggtccaagccaatggacgtgttggggcaacagctgcagtgtacttagcctcaattctagagtatctgactgctgaagttcttgaacttgctgggaatgcaagcaaggatctgaacgtgaagaagatcacaccaaggcatttgcagctggctatc

SEQ ID NO: 238420 - DNA, 365 bp, Glycine max
accttcggcacctcatgttatcagcattggacaacttatggaatcggcattagaggtagctggtcaagtggcaggaacagctatctccacttcgccccttccgtacaacaccatggctagccagtgtgaatcactcggtacatgtgcaaggaaaaagctttcaaattggctggcctttgagaatcattacagccaagcacttgatgataaatcgtttttggcaattgctgatattaggaactcagcacctgagaaggtttgatgtgcccttatttgtcattattaccaggatacagactctcttctttccttcactcaatgcccactgtactaccactatcgatcaatcgtcgttatttttagat

SEQ ID NO: 238421 - DNA, 402 bp, Glycine max
  unsure (1)..(402): unsure at all n locations
gacaccaagtcctgctcttcttccagagcaacaacaaacaaaccctttctttctggcttcagtttttgcagtgaaaatggcggtgactttaacatcaaccctctttatggctttgctatttgctgcttcagcttttgctgctcttcagcctagagtacctgaagcttaccttcaaaatggaaactttgaggagcagccaaaccccaaaaacctccagaaaacaaagctcatggggaaatattctttgcccaaatgggaagtcaatggtctggttgagtatgtctctgggggcccccaacctggaggcatgttcttcccagtgactcatggaatccatgctgtgaggcttggtaatgaggcctcaatctcncaaaatatcaaggtcaaacccggtcaactgta

SEQ ID NO: 238422 - DNA, 419 bp, Glycine max
ccatcaagccccaaactgacagatgggtcttccctgagaccaacaccggtatcattgtcttggctgagggtcgattgatgaacttgggatgcgccactggacaccccagttttgtgatgtcctgctccttcaccaaccaggtcattgctcagcttgagttgtggaaggagaagagtaccggcaagtacgacaagaaggtttacgttttgcccaagcaccttgatgagaaggtggctgcacttcatctgggcaaacttggatctaagctgacccagcttagcaagtcccaggctgattacatcagtgtgcctgttgagggtccatacaagcctgctcactacacgtactaagtgattgagatgatcaactgaaaagtgagtgatggaaagacaaaaatcggttttatcaatcggatttga

SEQ ID NO: 238423 - DNA, 418 bp, Glycine max
  unsure (1)..(418): unsure at all n locations
gggagggttactttggggtttctctcgctaaccaagaaggaactaaggttttacagaatacaagctctctctctctctcgtcggttttcgtcaatcaaatccaatccaatatcaaatatgagtcgtcatcccgaggttaagtgggctcagaggcttgacaaggtctatatcacggtgcaattggctgattcaaaaaatgcaaaagtggatcttacgccagatggtatttttaccttctccggtagtgctggtgctgaagaccatcagtatgagctaaaactggagctctttgataaggttaacgttgaggagagcaaaattaatgtangagagcgaagcatattcattgtagtgcagaaggcagaggatggatggtggaaaaggttactgcgtggagaangcaagactccacattatg

SEQ ID NO: 238424 - DNA, 399 bp, Glycine max
gctccacaacacagaacaaaatcaaagacaaaaaaaaacccttagccaacacaaccatcatggccacctctgctattcagcaatcagcattcactggtcaaactgctctgaagcagctcaatgagttcgtccgcaagaccggtggcgccggcaaaagtcgcactaacatgcgccgcaccgtcaagagtgctcctcacatcatttggtataggcctgaccgtcccaagtacttgggtccattctcggagcagattccatcatacctgaccgtagaaatccctggtgactaccgatgggacactgctggattatcaactgaaccggaaaccttcgccaggaaccgggatctggaggtgattcacagcagatgggcaatgcttggtgcccttggatgcacct

SEQ ID NO: 238425 - DNA, 363 bp, Glycine max
gatagcaaaacttcagcaacccttttgcatctgatctaagaatcccaacctcaaatacccattttttgtcatttcatgatctaggttatagttcgtgaaaatgacgaggatgacccgtgattttggggatactatgcaaaaagatgcagtgccggcggtgtcggctgatataatatttgcttctcttcggtttcctaattacaaaatcggagttaacaatcagatcatggagacaaaggatagtccaaaagtgctatctatgaaggaggttgttgcgcgagagactgcacagctgttggaccagcagaaacgtctgtcggttcgcgatcttgccagtaaatttgagaagggtttggcagctgc

SEQ ID NO: 238426 - DNA, 300 bp, Glycine max
gatagcaaaacttcagcaacccttttgcatctgatctaagaatcccaacctcaaatacccattttttgtcatttcatgatctacgttatagttcgtgaaaatgacaaggatgacccgtgattttgaggatactatgcaagaagatgcagtgccggcggtgtcggctgatataatagttgcttctcttcggtttcctaattacacaatcggagttaacaatcagatcatggagacagaggatagtccaaaagtgcgatctatgaaggaggttgtttcgctagagactgcacagctgttgga

SEQ ID NO: 238427 - DNA, 417 bp, Glycine max
cacgcgtccgcacaggcgtcagaccgacactagaagacgacatacggagagatgctacatgaataaataacgtgatatcggtgaatcaagtatccttttgcatctgatctaagaatcaaaacgcaaagaccagattttgtcattacatgatcaacgttatagttcgtggaaatgacgatgatgacgcgtgattttggggatactatgcagaaagatgcaatgacggccgtgtcggctgataaaatatatgattctcttcggtttcctaattacaacatcagagttaacaatcagatcatggagacaaaggatagtccataagtgctatctatgaaggatgttgttgcgcgagagactgcacagctgttggaccagcagaaacgtctgtcagttcgcgattcttccagtaaaattgag

SEQ ID NO: 238428 - DNA, 420 bp, Glycine max
gacagctcttggctttagcaaattccaattcccaattcccaattcgaaacccttattcctttcaaagaaccaaattgagtgatcgtgatggcaccaaaggcagagaagaagccagcggagaagaagcccgcggaggagaagaagtcgacggtgggagacaaggctccggcggagaagaagccaaaggccggaaagaagcttccgaaggagggaggcgccggcggagaagggaagaagaagaagagaaacaagaagagcgtggagacatacaagatctacatcttcaaggttctgaagcaggtccaccctgacattggtatctcaagcaaggccatgggaatcatgaacagcttcatcaacgacatcttcgagaagcttgcccaggaatcttctagacttgcccgttacaacaagaagccc

SEQ ID NO: 238429 - DNA, 403 bp, Glycine max
gacacactcaaaccatcccttttattgaaatcctcaagcttcaatttgctttgtgctcactcatctatctattataaccaaacactcttcttcatattcttcttcttcttcttgttcttgttctatctgtgacgagcatcatggcctcgagagcagtgctattgttggctatgtgtgtgcttccggccatggttgtggccattcgcccagcaaagaaccctttttgcgtgaagggtcgcgtctactgtgacccttgccgtgctggttttgagacctcagcaaccacctacattgccggtgctgagattatgttgcaatgcaagagcagggttagcaacgaggttgtgtacaccaagaaggggtacactgactcaactggagcatacacaatgtacgtggacga

SEQ ID NO: 238430 - DNA, 428 bp, Glycine max
gggaacgaaagagaatggagaacagggtaatattacaggaatggtttgaccgcgttgactcggagaaaagtggaagcataacagcggtacagctgaagactgctcttgctgtgggcaacctggaatttccgctctcagttgttcagcaaatgatcaggatgtacgatttcgacaggaatggtactatgagctttcaagaatttgttgcactcaacaacttccttcttaaggttcaacatgcattttctgatctagagaggggtcgtggttttcttgtacctgatgatgtatttgaggctttgggaaaaattggtttcatgctggattctcctgctttttactctgtctgcgagagctttgatcaaagtaaaaatgggaagtttcggctggatgacttaatatcaatctgtatattcctacaatcagca

SEQ ID NO: 238431 - DNA, 187 bp, Glycine max
gggcatagcaaaatcgtgtctccaatttaatcaccattgtacaacccaattcccttcgtcgttttcgattaagagagcaatggcacgtaccaagcaaaacgctcgcaagtccaccggaggaaatgctccgaggaagcaattggcaaccaaagccgctcgcatgtcagccccggtcagcggcggagtg

SEQ ID NO: 238432 - DNA, 419 bp, Glycine max
  unsure (1)..(419): unsure at all n locations
ggtccacccgttcgttagatctaacaaccacttatcccctttctccttctaacgagtgaggaaaaatggcgcgtaagaagatcagagagtatgactcaaagaggttgttgaaggagcactttaagagactctctggcaaggagttgccgatcaagtctgcacaaattaccgcatcaactgatttcactgagctacaagagaaggaaccctggctttcatcttctaaattggttgttaaacctgacatgttatttggaaagcgtggcaaaagtggtttggttgccttgaatttggattttgcacaagttgtttcatttgtgaaggagcgtcttggaaaagaggttgagatgagtggatgcaaaggacccataacaactttcattgttgaacctttcatcncacacaatgaagagttttac

SEQ ID NO: 238433 - DNA, 409 bp, Glycine max
gactccactcacaactgaaaccaaaactgaaaaaaaaaacaaacaataccataacatggcttcttccaccatcacctcctccttcctaacatcacccccttcatctctcttcaacaaatcatcatccccttccttccatgccacccctactctccgccccctcgcgccacgcgcctccatgcccgcctcagcgccgccctacgacttcggatcgttccggttcgatccgattagagagtcgattgtgtcgcgcgagatgacccgcaggtacatgatcgacatggtcacccacgccgacaccgacgtcgtcatcgttggcgcgggctccgcgggtctctcgtgcgcctacgagctctccaaaaacccctccatcaacatcgccattgttgagcagtccgtcagccccggc

SEQ ID NO: 238434 - DNA, 354 bp, Glycine max
ggccgaagaccctaagatcacaggcgcagagcgtgatccattgacgaagatggtgcagcgtctcacctagcgcaagatgcacagctatgccaccaagtccaagcaacacaaggtcgtcaaaacccctggtgggaagctcgtttatcagaccaccaagaagagggccagcgggcccaagtgccccgtcactggcaagaggattcaggggattccacacttgaagcctgcaaattacaagagatcaaggttacccagaaaccgtaagactgtcaaccgtgcatatggcggaattttgtctggaagtgctgtcagggagaggattatccgagctttcttagttgaacagcaaaagat

SEQ ID NO: 238435 - DNA, 520 bp, Glycine max
aacggtagcctggcgtagccgtccgggattcaagggtcgacccacgcgtccgcccacgcgtccgtacggctgcgagaagacgacagaagggtctcatggagagttcgatcctggctcaggatgaacgctggcggcatgccttacacatgcaagtcggacgggaagtggtgtttccagtggcggacgggtgagtaacgcgtaagaacctacccttgggaggggaacaacagctggaaacggctgctaataccccgtaggctgaggaacaaaaaaaagataaaaggaaaaaaaaaaaaagcggccgctctagaggatccaagcttacgtacgcgtgcatgcgacgtcatagctcttctatagtgtcacctaaattcaattcactggccgtcgttttacaacgtcgtgactgggaaaaccctggcgttacccaacttaatcgccttgcagcacatccccctttcgccagctggcgtaatagcgaagaggcccgcaccgatcgcccttcccaacagttgcgcag

SEQ ID NO: 238436 - DNA, 428 bp, Glycine max
gatgccgaaaagtagtaccaagatggcttcagttgtgtatctcctctttggcttccatctcattgttatcttgtcaagttccttacccgcaactagtgaagtgtttgcaaaacagtatccatccacagaacccgtggaagaaaaactcacccaactccacttctatttccataacaacataacgggggaacacccaactgctatgaaaactgttttgcctcctaaggggtccattcatggttttggggctacttacatgatggatgaccctctaactgaaggaccaagtccaacttcaaagcttgtgggaagatctcagggaatatacgctttggcttcacaacatgagcctgggttgctcatggtgacaaattttctcttcactttgggcatttacaatggcagcaccctcagcattcttggcagaa

SEQ ID NO: 238437 - DNA, 421 bp, Glycine max
  unsure (1)..(421): unsure at all n locations
ggaagtaagggatcgagcctcggaggagggaatcgcagcgaagtccactatgccgaagcaaattcacgagattaaggacttcctcctcactgctaggaggaaggatgcacgctctgtgaaaatcaagcggagcaaggatgtggtgaagttcaaggtccgttgctccaagtacctttacaccctctgtgtgtttgattctgagaaggctgataagttgaagcaatcacttcctccaggtttaagcgtgcaggatgtgtgattcttactgctgtatgaagatcaggtttttctctggattttggggattcatagttagtaaaatggttcagagaattttcgtatttgttgttacattcgggatcatgtnagtattttgtttaagacggattcaacttgcttggggaatatgtggctagttgat

SEQ ID NO: 238438 - DNA, 408 bp, Glycine max
  unsure (1)..(408): unsure at all n locations
ggtagttccaccgagtagcaacaatgtcgaagcgaggtcgcggaggatcggcgggaaacaagttccgcatgtcgctgggtctgccggtggcggcgacggtgaactgcgccgacaacaccggcgcgaagaacctctacatcatatcagtgaaggggatctagggtaggctgaaccggttgccgtcagcttgcgtcggagacatggttatggccaccgtcaagaagggaaagcccgatctccgtaagaaggtgctgcccgccgtcatcgtccgccagcgcaagccttggcgccgaaaggacggtgtttacatgtacttcgaagataatgctggtgttatcgtgaatcccaagggtgaaatgaaaggttctgctatcactggtccaattgggaaggantgtgctgatctgt

SEQ ID NO: 238439 - DNA, 395 bp, Glycine max
  unsure (1)..(395): unsure at all n locations
gggaaaggcaagagtgagagagaaatggagaatgcggaggagatgatgcagcaaaacgacgaggttttgtcggttgaacttccagctccttccggttggaataaactgtttttccctaagaaactgggaacaccaagaaaaagtgagattgtattcattgctccaactggagaggagatcagtaccaaaaaacaattggagcagtacctaaaggcacatcctggcaatcctgtcatttcagagtttgactggggaactggtgagacccctaggcgatcagcaaggatcagtgagaatgtcaagtcaactccaccagcagatagtgatactccaaagaaacgagctcggaaatcatcaggattaaagaaggataacanagaaactgaatctgcatc

SEQ ID NO: 238440 - DNA, 367 bp, Glycine max
ggagagatgctaatgttgaacattggatcaatgtcgacgggggctagagtagttgctgtgaagaatgacttggcgaagttgcaacttacttcccctgtgtgcactagcaagggtgagaagattgcacttagtcgacgtgttgagaagcattggcgtcttatcgggtggggacaaatccaagctggaatcactcttgatgtcccccccgccccccatctgagttgaacactgatcacaagaaacaccagcagctataaaaaactgagatgaatttagatatgtgggaagggaggcaattgttgggaaacatttttgtgaagtggagaagaaaacgtttttttgattgttgtcttctattttgttttca

SEQ ID NO: 238441 - DNA, 409 bp, Glycine max
gagatctgctgcttctcattgttgaaaagaaaccctagcaagtggagcaatggcagacgttgaagtcgatgtggcggcagcagcagcagcagggctgccgaagaagagaacgttcaagaagttcagttttcgaggcgtggatctcgatgcacttctcgacatgtccaccgatgaactcgtcaagatgttcagtgcccgcgctcgtagaaggttccagagaggcctcaccagaaagcccatggccttgatcaagaagctccgtaaagcgaaaagggaagctccaccaggtgagaagccagaaccagtacgcacccacctccgcaacatgattattgtgcctgagatgattggtagcattattggagtgtacaatggcaaaacctttaatcaggttgaaatcaaacctgag

SEQ ID NO: 238442 - DNA, 388 bp, Glycine max
gaaccaagtttgcttgcgtgtatattcattttagcatcaaggttgaatctcagagaaaaagaaacatcgacaagcatgtctggaagaggaaagggaggcaagggtctcggaaagggaggagccaaacgacaccgtaaggttctgagggataacattcatggaatcaccaagcctgcgattcgccgtctggccagacgtagtggcgtcaagcgtatcagtggtcttatctatgaagaaactcgcggtgttctcaagatcgttctagagaacgtcattcgcgacgctgtcacctacactgaacacgctcgccgcaagaccgtcactgccatggacgttgtttacgcgctcaagaggcacgggaggaccctctactgatttggcggttaga

SEQ ID NO: 238443 - DNA, 386 bp, Glycine max
gaacgaagtttgcttgcgtgtatattcattttatcatcaaagttgaatctcagagaatgagaaacatcgacaagcatgtctggaagaggacagggaggcaagggtctcggaaagggaggagccaaacgacaccgtaaggttctgaaggataacattcatggaatcaccaagcctgcgattcgccgtctggccagacgtggtggcgtcaagcgtatcagtggtcttatctatgaagaaactcgctgtgttctcaagatcgttctagagaacgtcattcgcgacgctgtcacctacactgaacacgctcgccgcaagaccgtcactgccatggacgttgtttacgcgctcaagatgcacgggaggaccctctactgatttggcggtta

SEQ ID NO: 238444 - DNA, 383 bp, Glycine max
gatgccgaaaagtagtaccaagatggcttcagttgtgtatctcctctttggcttccatctcattgttatcatgtcaagttccttacccgcaactagtgaagtgtttgcaaaacagtatccatccacagaacccgtggaagaaaaactcacccaactccacttctatttccataacaacataacgggggaacacccaactgctatgaaaactgttttgcctcctaaggggtccattcatggttttggggctacttacatgatggatgaccctctaactgaaggaccaagtccaacttcaaagcttgtgggaagatctcagggaatatacgctttggcttcacaacatgagcctgggttgctcatggtgacaaattttctcttca

SEQ ID NO: 238445 - DNA, 412 bp, Glycine max
  unsure (1)..(412): unsure at all n locations
ggaagtaagggatcgagcctcggaggagggaatcgcagcgaagtccactatgccgaagcaaattcacgagattaaggacttcctcctcactgctaggaggaaggatgcacgctctgtgaaaatcaagcggagcaaggatgtggtgaagttcaaggtccgttgctccaagtacctttacaccctctgtgtgtttgattctgagaaggctgataagttgaagcaatcacttcctccaggtttaagcgtgcaggatgtgtgattcttactgctgtatgaagatcaggtttttctctggattttggggattcatagttagtanaatggttcagagaattttcgtatttgttgttacattcgggattatgttagtattttgtttaagacggatccaacttgcttggggattatgtgg

SEQ ID NO: 238446 - DNA, 424 bp, Glycine max
  unsure (1)..(424): unsure at all n locations
ggcacttcaattgcaatcaaattagttcattctctttgcgcagttccctacctctcctttcaagatgcagatcttcgtcaagaccctcaccggaaagaccatcacccttgaggtggaaagctctgacaccatcgacaacgtcaaggccaagatccaggacaaggaaggaattcccccggatcagcaacgtctcatcttcgccggaaagcagctcgaggacggccgtaccctcgccgactacaacatccagaaggagtcaacccttcaccttgtccttcgtctccgtggtggcatgcagatcttcgtcaagactctcactggcaaaaccataaccctagaggtcgaaagctctgacaccattgacaacgtcaaggccaagattcaggacaagganggaatccccccagaccagcaacgtctcatc

SEQ ID NO: 238447 - DNA, 370 bp, Glycine max
  unsure (1)..(370): unsure at all n locations
gacaacacaacgcaacacaacgcgcactctctcttttctctcttaacacaaaaaccctatcgttcttcgcggtttcgccgattctcgccatgccgaaagccaaatccgacgccaaagccgccgatagccggttgaagcgcaagggcgctggtgctggaaggaagcaatcgaagaaagctgctaaggatcctaacaagccaaagagacctccaagcgctttcttcgttttcatgtccgagttcagagaacagtttaagaaggagcatcctaacaacaaatccgtcgctgttgtcngtaaagctggtggtgacaaatggaaatcgctgtctgatgctgaaaaggcccccttcgttgcacggccgaaaagaag

SEQ ID NO: 238448 - DNA, 435 bp, Glycine max
agacgacagaaggggacaaaaaccaagtactacaagggaagaagaacttagctacaagctaaggaaggatcaaagagaatggctcaagcaatggcatcaatgactagcttacgtggttcctctcaggctgtgttggaaggtagccttggctccacacgcttgaatgtggggagtggaagcagggtggcctcagtcacacgtgcagggttcacagttagagcacagcaacaacaagtgaatggtggtgaggtacaaagtagccgtaaggcagtgctttcacttgttgctgctggtttgaccactggctcttttgttcaagctgtgcttgctgatgccaaacctatcaaagttggaccacctcccccaccttctggcggattacctggaacattgaactcagatgaaccaagagaccttaagctgccattgaaagat

SEQ ID NO: 238449 - DNA, 401 bp, Glycine max
  unsure (1)..(401): unsure at all n locations
gacacacagtgaatgaaggaagagagtatcatccatggcggccaccagagcagtaaccattgccagcaactccacatgctctctgcttgcaaagaaaacctttgtgggtggcactgctctttccctcaacaacctcaaattttgtcgtactaggaggtcttacacctgcagagccatctacaatcccctggttgtcgtcaaggaagaaggccaacccgaaacctttgattatagagttttctttgttgacaaatctggcaagaaggtttctccctggcatgatattcccttgcggttaggtgatgatatctttaacttcattgtcgagattcctaaagaatccagtgcaaagatggaggttgccactgatgagtctttcactcncataaaacaagatacaa

SEQ ID NO: 238450 - DNA, 294 bp, Glycine max
aggggcagttcaagtgcaatcaaattagttcattcactttgcgcagttccctacctctcctttcaagatgcagatcttcgtcaagaccctcaccggaaagaccatcacccttgaggtggaaagctctgacaccatcgagaacgtcaaggccaagatccaggacaaggaaggaattcccccggatcagcaacgtctcatcttcgccggaaagcagctcgaggacggccgtaccctcggccgactacaacatccagaaggagtcaacccttcagcttgtccttcgtctccgtggtg

SEQ ID NO: 238451 - DNA, 390 bp, Glycine max
gattccattctctaaaccctaaacgactctatctctcttcgttttgttcttccttgcgctcctcctcgttcgttcgttctccctcgcgtagatcggcaatggcggagaccgagacgtttgctttccaggctgagatcaaccagctcctcagtctcatcatcaacaccttctactccaacaaggaaatcttccttcgtgaactcatcagcaacgcctctgatgctttggacaagattagatttgagagtttgacggacaagagcaagctcgatgctcagccagagttgttcattcatattattcccgacaagactaacaattcgctgaccattgttgacagtggcattggcatgaccaaagctgatttggtaaacaacttgggtacaattg

SEQ ID NO: 238452 - DNA, 417 bp, Glycine max
ggaacccttgcattctattcattcaagattcagcaagtgcgttttggaagcagagaccgaaatacttcgagatggcccgtacaaagcaaactgctcgtaagtcaactggaggaaaagctcccaggaagcagcttgcaaccaaggctgcacgtaagtctgcaccaacaactggtggtgtgaagaagcctcatcgttatcgccctggaactgttgctcttcgtgagattaggaaataccagaagagcactgagctcctaatcaggaagcttcctttccagaggttggttcgtgaaattgcccaggatttcaagactgatctgcgtttccagagccatgctgtgcttgcattgcaagaggctgctgaggcataccttgttgggctctttgaggacactaacttgtgtgccattcacgcca

SEQ ID NO: 238453 - DNA, 408 bp, Glycine max
  unsure (1)..(408): unsure at all n locations
ggtgtgtattaaaggattcccttctttattccttttgtaatttcattcattcttaatctttgtgaaaaataatgctcatcgagaattttaaggttgagtgtcctaatgtgaagtacaccgagactgagattcagtccgtgtacaactacgaaaccaccgaacttgttcacgagaacaggaatggcacctatcagtggattgtcaaacccaaatctgtcaaatacgaatttanaaccaacatccatgttcctaaattangggtaatgcttgtgggttggggtggaaacaacggctcaaccctcaccggtggtgttattgctaaccgagagggcatttcatgggctacaaaggacaagattcaacaagccaattactttggctccctcagccaagcctcagctatccgag

SEQ ID NO: 238454 - DNA, 384 bp, Glycine max
gcactcactcagagaatagagaccagcttttgcttctttgtgaacatggagatgaggaaatcatgtggcttcttcttcttgctcctcctccttgtctttgcttcccaggtggtggtgcagactgagggaagagtgtgtgagtcacaaagccacgggttccatggtttgtgtaatagagaccacaactgtgctttggtctgcatgaacgaaggtttctccggtggcaggtgcaaaggcttccgccgccgctgcttttgcaccaggatttgttgagatctcatcaaacactactcttgccatgcaaattaataaatcaaagctaggccaaataaattgcatctaatctttagccatttgggagctagctacaaaaccaactcatac

SEQ ID NO: 238455 - DNA, 284 bp, Glycine max
cagcaacattgatggcagcaacaagttctggcactcttaaagcaactcctttcctaggccaaggcaagggtgccaatgccaatgctcttacggatgttgtttccatgggaactgggaagtacaccatgggcaatgatttgtggtatggaccagacagagtgaaatacttgggacccttttcagctcagaccccttcatacttgaaaggagaattcccaggggattatggatgggacactgctggcttatctgctgacccggaagcatttgccaagaacaaggct

SEQ ID NO: 238456 - DNA, 440 bp, Glycine max
  unsure (1)..(440): unsure at all n locations
gatcaacatttgtctctcatctttcaatttcaatcaacggttatacccttttctatttgagcatcatcatgtccaccgcagcgcagcccaaggccaagaaaacggcgtcgtccaagaagcccctctcccatcctaccttcgccgcgatgatagcggaggcgatagcgagtctgaaggagagaaccggttcgagccaatacgcgataaccaaattcatcgaaggcaagcacaaggagttgcctccaacctacaagaagcttgttctcgttcatctcaagaagtctgttgctgctggcaagctcgttaaggtcaaaaactctttcaagctcgcaccgactaagtctgctcctgttaaagccgctgctgctcccaagaagcccaccanagctgcggctaagcccgccgccaagcccgcttccaagcccnaaagctgctgcact

SEQ ID NO: 238457 - DNA, 326 bp, Glycine max
ggaaaagggttttacattttaatcgttctcccgtgtaacagagacacagagagagagtgtgaaaaaacgagaccatagagggaggagtctcccaaacgcgcatacctcgtgtcataatccgcgagctgatgagaggactactccacgttctagctcctcgacaacgacgcgactattaccaacacgctgctgcgcctcatgatcaccgaggtgccgacagtcgccatcgacctcgtcgagatatatgtacgcacctccgtgcgcacccaccagttcatcgctcacacacacgggctcattcacctcactaacgagcgagccatgtc

SEQ ID NO: 238458 - DNA, 413 bp, Glycine max
aggggttgacaaaggaaacgtgtagtacgagggccaatttccaaaaaccttttgtctcgcaacctcacctcttcctccttcaatctctttcggaatttcccaaaatccttagtgggaggaagagatggttctgactcagaagattcacgaagctttcaaaggcaccgtcgagaggatcactggcccccgaaccgtttccgccttcaaagaaaaaggagttctcagtgtctccgagttcgtcaccgccggcgataatctcgttgccaaatgccccacctggtcctgggaatcgggtgatccaggcaagaggaagccatacttgccacctgagaaacagttcttgattactagaaatgtgccttgtcttcggagagctgcatctgttgaagaagaatatgaagctgctggaaggg

SEQ ID NO: 238459 - DNA, 405 bp, Glycine max
  unsure (1)..(405): unsure at all n locations
gtactctcatatcttaaccttttgtctttctccactctcatattttcttctcttctcttcaacatgaccggtgttgctgatgaagcccccgttaccctcgacacgctgaagcaattaatggctcagttcgccaaagagagagactgggaccgttttcacagcccaagaaaccttcttttggctctggtgggtgaagtacgagaattgtctgagatatttcagtggaaaggtgaggttccaaagggtcttccagattggaaagaagaggaaaaggttcatcttggggaagagctttctgatgtgttgctttaccttgtcaggctctctgacatttgtggcgttgatcttggtaaagctgctttacganaggttcaactcaatgccatcaaatatcctgcaaaagtt

SEQ ID NO: 238460 - DNA, 373 bp, Glycine max
gacacttactagtagtaagcatggagtcctcaaagatctatgcttacctcttcctctgcatgatctttctctcttccgccactcccattctcggttgtggctactgtggcaaaccccccaaaaagcacaagcctggtaaaacaccaaagacacccaaaacacccgttgttatgccaccagtcaccatccctcccattaatgttcctcccgttgttcttccaccaatagtgaagcccccaggtattctccctccaattccaattattaacccaccaaccacaccagggaagggagggaacactccatgcccaccaccaaagtctcctgcgcaggctacgtgccccattgacacgctcaaacttggtgcctgtgt

SEQ ID NO: 238461 - DNA, 268 bp, Glycine max
tgtctacgatctgctttctctgaactgtgacaatgtcgctcggagaaactgcttgttcatacgcagctctcatccgtcatgaagatggaattagtgtaactgctgacaagatcagcaccttgttgaaaactgcaaatgttccagtagactcttattggccaaccttgtttgctaaacttgctgagaagaaaaatcttggcgatttgatagcaaatgcggcacgcggtagtgcaccagttgctgttgcagctgcacctgttgctgcctc

SEQ ID NO: 238462 - DNA, 416 bp, Glycine max
gatgccgaaaagtagtaccaagatggcttcagttgtgtatctcctctttggcttccatctcattgttatcatgtcaagttccttacccgcaactagtgaagtgtttgcaaaacagtatccatccacagaacccgtggaagaaaaactcacccaactccacttctatttccataacaacataacgggggaacacccaactgctatgaaaactgttttgcctcctaaggggtccattcatggttttggggctacttacatgatggatgaccctctaactgaaggaccaagtccaacttcaaagcttgtgggaagatctcagggaatatacgccttggcttcacaacatgagcctgggttgctcatggtgacaaattttctcttcactttgggcatttacaatggcagcaccctcagca

SEQ ID NO: 238463 - DNA, 337 bp, Glycine max
ggttatagtagcaagagccattggaattttttttttatacattggaagaatccatttttgttattaatagactagtaagaagaaaagaataactgagaaatcaaatagttattcatcaaagtctcaattattcaatgaccagaattaaacgaggatatatagctcggaaacgaaggacaaaaattcgtttatttacatcaagttttcgaggagctcattcaagacgtactcgaacgattactcaacagaaaataaaagctttggtttcggctcatcgggatagagatagcaaattcgatgggaggtgcagaaaaaagaaggcggccgctctagagga

SEQ ID NO: 238464 - DNA, 360 bp, Glycine max
gcactcccgcaactgctggctcaatccctcaatcccccaagaatttataatcctgaacgaagtcaaatttccaagctcccttgcgccctaagaggaagaaggtttgggtggactattttgttcagtttcgatggatccttgttatttttgtggtccttcccatctccttcaccatttatttccttacataccttggggatgtaagatccgagtggaagtcctataagacgcgtcagaaggaacatgatgagaatgtgaagaaggttatcaaacgtctcaaacagaggaatccatcaaaagatggtcttgtctgtactgctcgtaagccctggattgctgttgggatgcgaaatgttgact

SEQ ID NO: 238465 - DNA, 399 bp, Glycine max
  unsure (1)..(399): unsure at all n locations
ggccctttcgcctacgcagagagaaattgagtttctgagataaccacttttctctttgattcatcaatggcaaccgcgaggaccgtgaaggatgtttcgcctcacgatttcgtgaaggcttacgcctcccatctcaagcgttccggcaagatggagcttcctgagtggactgatattgtaaaaacagcaaaatttaaggaattggctccatatgatcctgactggtattatgttaaggctgcctcaatggcaagaaagatttatttgagaggcggtcttggtgttggggctttccagaggatctatggtggaagcaagagaaatggaagccgttccccacatttctgcaagagcagtggggctattgcaagacacattctgcaacaattgcanaacatg

SEQ ID NO: 238466 - DNA, 520 bp, Glycine max
  unsure (1)..(520): unsure at all n locations
ttaacgttgcgcctgtcggtacaggtccggaattcncgggtcgacccacgcgtccgcccacgcgtccgtacggctgcgcgaagacgacagaaggggctctttggacttttaaaacttagcgaactgaaacatcttagtagctaaaggaagggaaatcaaccgagaccccgttagtagcggcgagcgagagcggattggggtttgaagaaaaacaaacacgaagcttcgtttctctttcgagtatgataaattcctcagcagcaaagtgttcacttctttttcgccaggtttcattcgatttgttgtggattggatgatggaaaaaccagcaagcccctttcattgaaagggcgcagtgaactgtaattgtgaaaaggttggaagatctggccaaagaaggtgatagccctgtagattcgttcccatggttcgatccttcccagtaaaacgcggcgtgttcgaattctgatcgcttttacgcgaagaaaggggaaccacctctaagcctaagtaatcctca

SEQ ID NO: 238467 - DNA, 147 bp, Glycine max
tgcgaaaacacgacaggggggaatacagaacatcgttgagatctagaagatctacatcatcagggtcttgaagcagctgcacgccgacatcgtgatctccagcgcggcggtgaggatcatgagacattttcatagacggcatcgtcg

SEQ ID NO: 238468 - DNA, 435 bp, Glycine max
gattaccttcatctcgtcatcgtttcgttcaactttcaacgccagttcacactctctgcttcgcgtgtaccaacaagtgcaagttcgaatcaatggccagcgctcagctcacagcaatagcgtcatcgatctctacggcgtcgtttgaagggcttcgaccttccgctgttcagtttgcttccacgggcagaattagaattggcaatctctcccaaaggtccttccggggcttggttgtcaaagccgccaccgttgttgcccccaaatacactgcgataaagcctctgggagatagagtgctaataaaaattaaggaagcagaggagaaaactgagggtgggattttgcttccatcaactgctcaaacgaagcctcaaggaggtgacgtggttgctgttggggaaggaaagacagttgggaagaacaatgtagaga

SEQ ID NO: 238469 - DNA, 353 bp, Glycine max
ggtactccttcgacgatcgtcttcgccaatcgcctgcgtctctctctgaattgactagcttaaatggctggtcctaggattgcccatgctaccttgaaaggtccgagtgtggttaaggagatcataattggaataacacttggcttagctgctggtggtgtgtggaagatgcaccactggaatgaacagaggaaaaccaggaccttctacgatttactggaaaagggtgagattactgttgttgcagaggaacagtgaaaatgttcttgttttgttgcctatgctctccatttataggcttttttttcccgtgttatattcaattggctcttcaaatgtaaatgagccaacat

SEQ ID NO: 238470 - DNA, 517 bp, Glycine max
  unsure (1)..(517): unsure at all n locations
attaactggtccgcctgtcagtaccaggtccggaaattcncgggtcgacccacgcgtccgacgagctgcgagaagacgacagaagggggtccctgcggatgttgacgcaatgtgatttctgcccagtgctctgaatgtcaaagtgaagaaattcaaccaagcgcgggtaaacggcgggagtaactatgactctcttaaggtagccaaatgcctcgtcatctaattagtgacgcgcatgaatggattaacgagattcccactgtccctgtctactatccagcgaaaccacagccaagggaacgggcttggcggaatcagcggggaaagaagaccctgttgagcttgactctagtccgactttgtgaaatgacttgagaggtgtangataagtgngagctggaaacagcgaaagttgaatacacttactttaacgtttatttacttaatcccgtgaatcggaagcgggcactggccctcttttgggaccaggtccgcttcngcggtcgatcggggggaa

SEQ ID NO: 238471 - DNA, 420 bp, Glycine max
tattaagctgtaattaactgagattaaccacaacaaagttgattgagtgacaaaaaaaaaaaaaaaaaaaaaaaaaaaaaaaaaaaaaaaaaaaaaaaaaaaaaaaaaaaaaaaaaaaaaaaaaaaaaaaaaaaaaaaaaaaataaaaaaaaaaaaaaaaaaaaaaaaaaaaaaggggccgcccaaaaggatcaaacctaactaacccttgaaggcaacttaaaacccctccaaaagggccaccaaaatcaaatcaaggggccgccgtttaaaaactccgaaacgggaaaaacccgggcttaaccaaattaaacccccttgaaaaaaaccccccttccccaagcgggctaaaaaccaaaaaggccccaaccaatccccttcccaaaaatttgccaacccaaaaggccaaagggaaccccc

SEQ ID NO: 238472 - DNA, 404 bp, Glycine max
ggtccctcttactaacactagggtttacagagaagcgaagaggcgcagccgtagcagtaactcgtggaattgctagcaatggcgaggatcaaggtttacgagctgaggcagaagacgaaggctgatctgttgaatcagctgaaggacctcaaggccgagcttgccttgcttcgtgttgctaaggtcaccggcggtgcacctaacaagctctctaagatcaaggtggtgaggttgaacattgcccaagttttgacggtgatttctcagaagcagaaggccgcgttgagggatgcctacaagaacaagaagtacttgcctctcgatctccgccctaagaagaccaggccattcgcaggaggcttactaagcaccaagcatcattgaagacagagagggagaagaag

SEQ ID NO: 238473 - DNA, 239 bp, Glycine max
tctgaccaagactacgctctagatccatcccacttcgagctcccgtcacagtcactcgtaaatgtgctccccatggcgaggatcaatgtttacaagctgcagcaaatcaccaaggctgatctgttcaatcagctgatagacctcaaggccgaacttgccctacttcatattgccaccgtcaacggctgtgcacctaacaagctctctcacatcaatgtcgtgacgttgaacattgccca

SEQ ID NO: 238474 - DNA, 382 bp, Glycine max
ggttctagtgtgtgattgtttgttgttgtaactcgttcttcttcttttgttgttctgtgtttgtgtttgttttttctctcacctgaaaatgtcttgctgcggtggtaactgtggttgcggaagctcctgcaagtgcggcaacggctgcggaggctgcaagatgtacccagacttgagctatactgagtcaaccaccaccgagaccttggtcatgggagtggcacctgttaaggctcaatttgagggtgctgaaatgggtgtgcccgctgagaacgatggctgcaaatgtggaccaaactgctcctgcaacccctgcacttgtaagttaggtgttgggagaacaagcttcaagcagagattacccttaattaggaataatgat

SEQ ID NO: 238475 - DNA, 356 bp, Glycine max
gttctagtgtatgtgattgttgtgactcgttcttcttcgtcatgatcttcttcatttgttgtttgtgtgtatgtctttactctcaactgatgaatgtcatgctgcagtggtaactgtggttgctgaagcgcctgcaagtgcagcaacggctgctgaggcagcaagatgtacttagacttgagctacactgagtcaaccaccatcgagaccatggtcatgggagtggtaccagttaaggctcaattcgagagtgctgaaatgagtgttaccgctgataacgatggctgcaaatgtggatctaactgcacctgcaacacatgcacttgcaagtgaggtgtaggagagctaaagcttca

SEQ ID NO: 238476 - DNA, 428 bp, Glycine max
gatacctaaaaattgtaccgatatggcttcacttgtgtgtctccttttttccttgcatttcatggttatcatgtcaggttccttaccagcaaatagtgaagtgtttacaaaagagtctcctatgtctctatccacaaaacccgtggaaagactcacccaactccacttttatttccataacaacaaaatgggggaacacccgactgctatgaaaattgttgagcctcctaaggcgtccatttctggttttgggactatttacatgatggatgaccctctaaccgaaggaccaagtccaacttcaaagcttgttggaagatgtcagggaatatatgctgaggcttcgcaacatgaacctgcgatactcatggtgacgaatttgttcttcactgaaggcatttacaatggcagcaccctcagcattcttg

SEQ ID NO: 238477 - DNA, 429 bp, Glycine max
ggttctttgcgagatagaagagaaagccgtcgctatcctagtctcttcttcccctctacccatttcagtttcaggatggaatctcaggtgaagcacgcccttgttgtcaaagttatgggtcgtactgggtctagggggcaggtgactcaggttagagtgaagtttttggatgatcaaaaccgacacatcatgaggaacgtgaagggacccgtgagagaaggagacattctcaccctacttgagtctgaaagagaagcaagaaggttgcgctagaggatctcttcatggtttggctcaggacttaaacaaaacatcgttgtttttgttgtagttaaaggatgtcaaatgttaattgtcatggacctgaattatgcacctactatgtttgacattatgccattatgtgtgtggctgagttatgactaaatt

SEQ ID NO: 238478 - DNA, 404 bp, Glycine max
ggtgtgtagtataggattctcttctttattccttttgtaatttcattcattcttaatctttgtgaaaaataatgttcaccgagaattttaaggttgagtgtcctaatgtgaagtacaccgagactgagattcagtccgtgtacaactacgaaaccactgaacttgttcacgagaacaggaatggcacctatcagtggattgtcaaacccaaatctgtcaaatacgaatttaaaaccaacatccatgttcctaaattaggggtaatgcttgtgggttggggtggaaacaacggctcaaccctcaccggtggtgttattgctaaccgagagggcatttcatgggctacaaaggacaagattcaacatgccaattactttggctcactcacccaagcctcagctatc

SEQ ID NO: 238479 - DNA, 420 bp, Glycine max
tgggagggttttgcgctgttgttgctgctcatcctccgtaacctccgagctctgcaccgaagaacgaagccatggggaagacacatggaatgggatctgctcgcaagctcaagtcccaccgcacgatgcatatgtgggctgacaagtcatacaagaaatcacatcttggaaatgaatggaagaaaccttttgctggttcatcccatgccaagggaattgtccttgaaaagatacgtattgacgctaagcagcccaactctgccattcgtaagttgtgccaggttcaacttatcaagaatgggaagaagattccgctttttgtcgctaatgacggttgcttgaactacattgacgagaatgacgaagtccttgatgctggatttggacgaaaaggtcatgctgtgggagaatatcctggtg

SEQ ID NO: 238480 - DNA, 296 bp, Glycine max
gaggtttcagatccttaatcggccaggaccaaacagcatccgcggcagcgacggtaaccctccaacaacaacacttccgctgcgaaaaatgtctctggtggcgaacgaggatttccagcacattctgcgtgtgctgaacaccaacgtggatgggaagcagaagataatgttcgcaatgacctccatcaagggtattggaaggagattcgccaacatcgcttgcaagaaggctgatgttgacatgaacaaaagggctggtgagttgactgctgctgagttggatagtgtgatgactg

SEQ ID NO: 238481 - DNA, 417 bp, Glycine max
  unsure (1)..(417): unsure at all n locations
gacacacgttctctgtgactgcctctgttccgccaagcgcagcattttcccaccgttcaggccaccggctgagttaggtttccggcgaggatgggtgctgctctgctgtcggagcttgcgacggagatagtcgtgccagtgtgcgccgtcatcgggatcgtgttctcgctggtgcagtggttcctcgtgtcgcgcgtcaagctcactcccgaccgcaacggaacgacgtcgtcgccgcgcaacaacaaaaacggctacggcgacttcctcattgaagaggaagaaggcatcaacgaccacagcgtcgttgtgaaatgcgctgagatacagaacgctatctccgaaggtgcaacatcctttcttttcactgaatatcaatatgtgnggattttcatggttgcttttgcaatactgatc

SEQ ID NO: 238482 - DNA, 425 bp, Glycine max
gacagcaaaacaattttcaaactcaattaccattccataacctaaatctcctctttgtttccgagtcagagagcaatggcacgtaccaagcaaaccgctcgcaagtccaccggcggaaaggcgccgaggaagcaattggcgactaaagccgctcgcaagtcagctccggccaccggcggagtgaagaagccccaccgcttcaggcccggaacggtggctctgagggagatcagaaagtaccagaagagcactgaacttctgatccgaaaactcccattccagaggctcgtcagagaaatcgctcaggatttcaaaacagatcttcgtttccagagcagcgctgtttctgcgcttcaggaagccgcagaggcttatctcgttggactcttcgaggacaccaacctctgcgctattcacgccaagag

SEQ ID NO: 238483 - DNA, 393 bp, Glycine max
gatagcgaaacagagagtggtttcagtgagtgatcggtgttcacttgatccttcataagtcgtcatcatcatcatcatcatcaccgttgattgaagaagatgccgatcagaaacatcgccatcggaaggcctgaagaggctactcaccccgacacgttgaaggcggggttggctgagttcatctccaccttgatcttcgtgttcgccggttcaggttccggcatcgcctacgacaagctcaccgacaacggcgccgccactcccgccggcctcatctccgcttccatcgcccatgctttcgccctcttcgtcgccgtctccgtcggcgccaacatctccggcggccacgtcaaccccgccgtcaccttcggcgccttcgtgggcggcaacatc

SEQ ID NO: 238484 - DNA, 221 bp, Glycine max
ggcctcattcgggactttcactacccgcagcagcctcaggaggagaataaggatgtctcacaggaatttcgagcacccaaggcacgggtcactgggatttctccccaggaagcgtgctgctcgtcacaggggaaaagtgaaggcattccccaaggatgacccatccaaggcacccaagctcactgcattcttgggttacaaggctggtatgactcacattg

SEQ ID NO: 238485 - DNA, 420 bp, Glycine max
  unsure (1)..(420): unsure at all n locations
gctagcaattcggcgcaatcgtcttctgcttcaaggaaggagagcttgttattctctatcaacaaggaaaatgtcaggtgaagaggttgttgttgcagctgagccagctgctgccatcccaggcgagcctatggatatcatgactgccttgcaacttgtgctcagaaaatctctggcttatggtggtcttgcacgaggccttcacgaaggggcaaaagtgattgagaagcatgctgcacaactctgtgttctagcagaagactgtgaccagcctgactatgttaaactggttaaggccctttgtgcagagcacaatgttagcctgctgacagttccgagtgcaaagacccttggagaatgggctggtttgtgcaagattgattccgaaggaaaagctangaaagttactggttgctcctg

SEQ ID NO: 238486 - DNA, 436 bp, Glycine max
gacacacactctgtcacgcacccaccattctactacactcctctctctcactctcactctctgctccgtgatagctgtaccacgtttttctctccatctcgaaacaccatctctgcctcagtcccaacccatcaccattctcatggctgctctagctctagcacttcttcttctggctttcaccggcacttcaagtgctacatggtgcgtttgcaaggatggaagcgacgcgatcctgcagaagacgttagactatgcttgtggagctggtgctgactgtaaccctcttcacctaaacgggccttgttttcagcccaacaccgtcagggcccactgtaactacgccgtgaacagctacttccaaaagaagggtcaagctcaagggtcatgcgagtttgcgggaacagccactgttactgcatctgaccccagctct

SEQ ID NO: 238487 - DNA, 529 bp, Glycine max
  unsure (1)..(529): unsure at all n locations
gctcgtgtcgcactgtgtcactggtcgtacgtctccngactcccgagtgacccaagcctcgttcaggcgtaagacacgaaacaagggggggatatgccaaaattggtaaacccaacggacttaattggattgattcttggaatgaaaacttaccaagtgagaacttgcaaatccagagaaatccctgaaattcacaaagggcaatcctgatccaaatcctgttttccgaaaaccacaaatcagttaaaaggctatcaaaccggccgctctagaggatcaaacctcacgtacgcgtgcatgcgacgtcatagctcttctaaagtgtcacctacattcaattcactggccatcgttttacaacgtccttgaccgtggacaaccctggcgtaaccccaacttaatcgccttacacgacatcgtcctttcccacacctcgcgtacaagccaataagtccccaccgatttcccttccaaacagttggcccgccctaaatcgcgaacatggacgctctcctttagccgcgcactg

SEQ ID NO: 238488 - DNA, 358 bp, Glycine max
cttgcactaacaaccttgaaacccgggtcaaccgaaacccctcaaccaaccaagtccaagaaaaaaggttaaaaacccaaaggaggaaatgttaacccgggttcaaccggtaaaaaatgggaacaacttttttgcctttcccccaaccttggcccccttcaacaaaaccttcaccaaggtcactaattttccggcaaggaaaacccttgtccgaatcactggtggtatgaaagttaaacctgacaaaaatgaatcatctccttatgctgctatccttgcagctcaggatgttgctgccagatgcaaggaactgggcataactgctcttcatatcaagctccgtgctactggtggaaac

SEQ ID NO: 238489 - DNA, 416 bp, Glycine max
gattcctctgcattcattcagcgttcatctcaatctagatttgtgtgcggtgcgtctccggtgaagagaagaagatggcgaccgtaccaggacagctcatatgggaggtcgtaaagaagaacaactctttcgtggtgaaagagttcggaaggggcactcagagcgtgcagttcagcagagagcccaacaatctctacaacctcaacactttcaagtactccggtttggcgaacaagaaaactgtcactgttcaacctgcgggtaaagaccagtctgtgttgctggcaacaaccaagaacaagaagcaaaacaagcctgctgctttgcttcacaaatctgtcatgaaaaaggagttccggatgatggcaaaggcagtgcaaaatcaggtagcagataactactacaggcctgatctc

SEQ ID NO: 238490 - DNA, 435 bp, Glycine max
gaagcttctttcttcttcgccaattcagatcgcagacagacacagagagtgagagagggagatggggagcgacagcgaggcagagaagtcggtgcagaaagagaaggagaagaagaagatgttggccctggctcccattgctaaacctcttgctgggaagaagctttgcaagcgaaccctaaaacttgttcgtagagctgccgaacacaaatgcttgaaaagaggagtgaaggaggtcgttaaaagtataaggagaggtcataaaggattgtgtgtgattgctgggaacatatcaccgattgatgtcatcactcatgttcctattctttgtgaagagtctgacattccttatatttatgtcccatctaaagaagatcttgcaggcgcaggagcaacaaagaggcctacttgctgtgttctggtacagacaaagcc

SEQ ID NO: 238491 - DNA, 194 bp, Glycine max
  unsure (1)..(194): unsure at all n locations
ggccgctctctgagaaaaacagatagtgtgggagagagaagagcggaagagaaaatgacgaccaggttcaagaagaacaggaagaagagaggtcacgtcagcgccggacacggccgtatcggaaagcaccgcaagcatcccggaggtcgcggtaacgccggtggcatgcatcnacaacgtatcctcctcgacaa

SEQ ID NO: 238492 - DNA, 422 bp, Glycine max
  unsure (1)..(422): unsure at all n locations
aggggcagtttcanattttcttttccttcactttcccgaganaaaaataacacttttcactttcttcactacgttctcacttcgatatggctcgtacgaagcaaaccgctcgcaagtccaccggtggcaaggggccacgtaagcagctcgccaccaaggccgctcggaagtccgctccggcgaccggaggagtgaagaagccccaccgcttcagggcgggaaccgtggcgctgagggaaatcagaaagtaccagaagagcaccgagcttctcatcaggaagcttccatttcagaggctcgtgagagaaatcgcgcaagatttcaagaccgatttgcgtttccagagcagcgctgttttcgcgcttcaggaggctgctganggntacctcgttgggttgttcgaggacactaacctctgcgcg

SEQ ID NO: 238493 - DNA, 325 bp, Glycine max
  unsure (1)..(325): unsure at all n locations
gagtcaccacagagagagaggttttgatgcaacgctgtcactgagaaaggatctctatctacgaaggagcggaataaaacccttctctctgtgattaagagaatggcttcagatcggaaacttcacacttttgaggaggtggcaaagcacaaccagaccaaggattgctggctcatcatttctggcaaggtgtatgatgtcacccctttcatggaggatcatcccggaggtgatgaggttttgttatctgcaacaagggaagatgcanccaatgactttgaagatgtggggggcactgaatctgctagagatatgatggaaaaat

SEQ ID NO: 238494 - DNA, 385 bp, Glycine max
gacttcaacatctcttaataaagattagaaatcgacatatggggggagcaaagagttactcttgttttgcagtaatagctgtggccttggttttgctacttctgaatgtggctgtggtttgcaatggaggcaagacaagcacattcattaggaaggttgagaaaactgaggacatgccccttcatagtgatgtatttgttgccccttctggctataatgctcctcagcaggttcatataacacaaggtgaccaagtgggaagggccatgatcgtgtcatgggtgactgtggacgaaccaggaaagagtctagtgcattactggagtgacgccagccagcacaagagagtggccaagggaaatcatgtcacatatagatacttcaa

SEQ ID NO: 238495 - DNA, 312 bp, Glycine max
gatcgcatttcatagcactcaccctcattaccaacacgaaagcataaccaaaaccttttttcgaagtctctgattttcctaatggctccggcaaaggcagagaagaagccggcggagaagaagccagcggcggagaaggcaccggcggagaagaagccgaaggcggagaagaagatctcgaaggaaggagggagcgagaagaagaagaagcgcacgaagaagagcgtggagacctacaagatctacatcttcaaagtcctcaagcaggttcacaccgacattgggatattcagcacggccatgggcatcatg

SEQ ID NO: 238496 - DNA, 356 bp, Glycine max
tgagttccgatggatggaccagtttgctttgtcattggatccgatgacagccacgtccttccatgacgaaaccctaccggcagatggtgcgaaagtggcccatttctgctcaatgtgtggccctaaattctgctctatgaagattacagaggatgtgaggaagtatgctgcggatcatggctatggaactgatgaagctttgcggcgtgggatggatgctatgagtgctgaatttcaagctgccaagatgaccatcagtggggaagaacatggtgaagctggtggagagatttacttgccagaagcttacgttagaaccacgacgactacttaatggagcacatcagttggaagaa

SEQ ID NO: 238497 - DNA, 311 bp, Glycine max
gagagtgatccttctacactaactaaagccgagcagcgagagagagaaaccctagcaaaaatgccggctggtcacggtttgagatcccgcaccagagattccttctctcgtcccttcaggaagaagggtgccatcgccctcaccacatacctcagaacctaccacgtcggcgattatgtcgacgtcaaggttaacggcgccgtccacaagggaatgcctcacaagttctaccatggccgcaccggtcgcgtctggaatgtcaccaaacgtgctgttggggtcgaagtcaacaagcaggtcggcaacagaat

SEQ ID NO: 238498 - DNA, 400 bp, Glycine max
gaaagattagaagtcgacatatggggggagcaaagagttactcctgttttgcagtaatagctgtggccttggttttgctacttctgaatgtggctgtggtttgcaatggacgcaagacaagcacattcattaggaacgttgagaaaactgaggacatgccccttcatagtgatgtatttgttgccccttctggctataatgctcctcagcaagttcatataacacaatgtgaccaagtgggaagggccatgatcgtgtcatgggtgactgtggacgaaccaggaaagagtctagtgcattactggagtgacgccagccagcacaagagagtggccaacggaaatcatgtcacatatagatacttcaattaatcttctggttttatacatcactgcaccct

SEQ ID NO: 238499 - DNA, 389 bp, Glycine max
gagggagaattaggtttttagggtttacaccgagcagccacacctcgcgcagcagccatggttctcaaagctgaactatgccgattcagtggtgccaagatctacccaggaaagggcatcagatttgttcgtggtgattctcaggttttcctgtttgcaaactcaaaatgtaagaggtatttccacaatcgcctgaagccttcaaagctcacctggactgcaatgtacagaaagcaacacacataggacattgctcaagaagctgtgaggaagaggagacgtgctgccacaaagccttactctgggtccattgttggtgcgaccttggaagtaatccagaaaatgagagctgagaaaccagaagttcgaaatgcaactaagggaagctg

SEQ ID NO: 238500 - DNA, 294 bp, Glycine max
gacagacacatgcgcctatctgcgatagctacctaaattattcactccctccctaacaagccacaccgtttcgtgctccaatggcagctttggatctcactataagcatgttggcactcataattgttgttgtttcacttggcgtgtgcggtggtgttcaaggtgcgccacaagttccatgctacttcacttttggtgattctttggttgacaatgggaacaacaaccagctccaatctttggctaaggctgattacttgccttaagggattgacattcctggtggaccttctg

SEQ ID NO: 238501 - DNA, 345 bp, Glycine max
gattctgaagttgaacggcggagaagaagatgttgtgcgcttgttcttccggggagcagttcaaattcgaagagccgccacactcgccggagtccctcgccaccagggatttctccgccagcggactctcttccaggaccggagaatgggaacctaaattcgatgatacgcaagttgaagaagctgaatctactcttaaagatgctctttccttaaactacgaggaggctacggctttgttggggaggcttgaataccagagagggaactttgatgctgcacttcaagtgtttcaaggtatggatatcacgggtttgaccccaagaatgatcaaggctattgctg

SEQ ID NO: 238502 - DNA, 340 bp, Glycine max
gcttcttcatcatagtcgtggccgtgtcgcagcaaaaccaaaccacatattaacttgtttgctctaagtcatggctctgatcttgcacgcaaccaaagcaaacaagaatgctttcaagactctgattgcggcagagtacagtggcgtccaagtggaattggcccctaatttcgagatgggtgtctctaatagaactcctgaattccttaaaatgaatcccatatgaaaggttcctgtcttggaaacgcccgatggtccagtctttgagagcaatgccattgctcgttacgttgctcgagtcaagggtgacaacgctttgttctcatcttcggccattgat

SEQ ID NO: 238503 - DNA, 393 bp, Glycine max
gggaggtcagaacagttgttgattcccaaattttggaatcctacatgagtgtgacaattgaagccatggcaaaagcctttggagtgagagtacagttcattgatgtggagctatcatgtaatagtgcaccagggacgctacagtggtcgattgataaagttgcaagtgttcttgaaactaaccgacctgatgcgaacaaggctcgttaccacgcaactatcaagcaaggggacttcctgctgaagcggatccagaaactgtcacctgtgataaatcgtcaggtcacctctcgcatgttagagtaaaagttactggagaggcatagatagtgacaacatcaaagttgatcgacatccttatgaagacattactgtaatccatatgaggtccaga

SEQ ID NO: 238504 - DNA, 124 bp, Glycine max
gattcacacaactaactaagaaagtctttcatagccccccaaaaatgaagagcaccatcttctttgctctctttctcttttgtgccttcaccagctcatacctaccttcagccatccccgattt

SEQ ID NO: 238505 - DNA, 353 bp, Glycine max
  unsure (1)..(353): unsure at all n locations
agtctcagtgtcatacaaaattggagggaaatttgaatttctattcaaatttcacttcaatttgaatttgaatttgtagagccaaatttagagccaaaatttcactaattatgattagtgaatttcagctatggttcagcccactaatccaagatcaaattcaagattctccactaagtgtactttggtgtcatgaggcatgtaaagcatgaagggtatacacaaagtgtgactatatgatgtggcaatggaatgtagcaagcanatgctcacctcccccttaagttggtcnanaatttaaattggatacgcttctccaaatcaaataaattctctcccacacacacatcaat

SEQ ID NO: 238506 - DNA, 401 bp, Glycine max
  unsure (1)..(401): unsure at all n locations
ggccattgttgctgtcatcatccgcagctgctgttattcgcaccgcaaacaaacagtgagccatggccgtcggaaagaacaagcgcatctccaaagggaaaaagggtggcaagaagaaggcagctgatccctttgccaagaaggattggtatgacattaaggccccttctctttttcaagtgaaaaatgttggcaaaaccctcgtctctcgtacgcanggtaccaagattgcttctgaaggacttaaacatagagtgtttgaggtctccttggctgatcttcaaggggatgaggatcatgcattcangaagattacgttgagagctgaagatgtgcaagggaagaatgtcctgacaaatttctggggaatggattcacaactgacaagctgaggtcattgg

SEQ ID NO: 238507 - DNA, 348 bp, Glycine max
ggtgtctcactcacatcacacacactctcatagctgtagcggcgacactaagatcggagaaagaatggcgaaaacgacgtcgttgctgctctttacactgctcctcttcggaaccctagctctcatccaggcgaagaaatcgaaggaggatttgaaggaggtgacccacaaggtttactttgatgttgagattaatggaaaagaagcaggtcgtattgtaatgggtctttatgggaaggctgttccaaaaactgcagaaaacttccgagcactttgcacatgggaaaagggaactggtaagagtggaaagcctctccattacaaaggtagctcattccatagaattat

SEQ ID NO: 238508 - DNA, 366 bp, Glycine max
  unsure (1)..(366): unsure at all n locations
gtcatcaaggatttcatgattcaaggaggagactttgacaaaggaaatggaactggaggcaaaagtatatatggtcgtactttcaaagatgagaattttaatttgtctcacactgggccgggtgttgttagcatggcaaatgcaggacccaacacaaatgggagtcagtttttcatatgcactgtcaagacaccttggctggatcagagacatgtagtatttgggcaagttttggaaggcatggatattgttaggttgatcgaatcacaggagacagatangggtgaccgtcctacaaagaaggtgagcatcagtgactgtggtgagcttccaaatgcttgaggtggttcctgtgtaattttgttg

SEQ ID NO: 238509 - DNA, 401 bp, Glycine max
gatgtggttgcgcctctgcctgtaagagtgaaaaaaccttctcttttccttctctcaagtctcaagagatttcatcatggctccaaagaaggacaaggctccaccaccttcctccaagcccgccaaatctggcggtggcaagcagaagaagaagaagtggagcaagggaaagcaaaaggagaaggtgaataacatggtgctgtttgatcagggcacctatgataagctcctttctgaagctcccaaattcaagctcatcactccttccattctttctgatcgtttgaggattaatggatcacttgcaaggaaggctataagagaattgatggctaggggttcaatcaggatggtgtctgcccatgcaagccagcaaatttacaccaaggcaacaaacacct

SEQ ID NO: 238510 - DNA, 417 bp, Glycine max
ggcacttagccagttcggtccctcacttaagccactgtgtggaactaacaacaacacaaggccatcatcatggcagctgcttctcctatggcaagccaactcaagtccaccttcactaaaactcttgtagctcccaagggcctctctgcctcttcaccactccacctcctgccttctaagaggcaatttagcttcactgttagggccatccaatcagaaaagccaacctatcaagtgattcaaccaatcaacggtgatcccttcattggaagccttgaaaccccagttacatccagccccttgattgcatggtacttatcgaacctccccgcatacaggaccgcagtgagcccactactaagagggatcgaggtgggcctggcccatggctaccttctggtgggcccattcgtgaag

SEQ ID NO: 238511 - DNA, 341 bp, Glycine max
gacacaattaatcttgtgcataacaatttcacaagtgctattttcagtacattttcttagttgtgataatatgagagtgagcgcagagtttgagcgtgttctcaagtatttcgatgaagatggggatggtaagatttccccatctgagcttaggaaccggctatgcatgatgggtggtgagttattgttcaaagacgctgaaaagttgattgaggaattggattctgacggtgatgggtttttgagtttggaagattttgtgaagataatggacgcagcaggggaagatgagaagttgaaggatttggccgaagcttttgagatgttcatgacactgaaat

SEQ ID NO: 238512 - DNA, 354 bp, Glycine max
ggaagagtgaagagaatggctcccaagggtttaacctttctggctgtgttaatatgcgtttcagcactgtcactgagtccttctgttgcgggggaagggcaaaataatggccttgttatgaacttctacaaggaatcatgccctcaggctgaagacatcatcacagaacaagtcaagcttctctacaagcgccacaagaacactgctttctcctggctcaggaacatcttccatgactgtgctgttcagagttgtgatgcttcactgttgctggactccacaagaaggagcttgtctgagaaggaaacagatagaggctttgggttgagaaatttcaagtacattgagacaatc

SEQ ID NO: 238513 - DNA, 288 bp, Glycine max
ggtcttgcaggcgaagagatggccaccgttccagggcagctcgtgtgggagatcgtcaagaaaaacaattccttcatggtcaagcagtttggaacgggcacccagagcgtcgaattcagcagagagagcaacaatctctacaacctcaattcgttcaagtactctggtttggtaaacaagaaaactgttactgttcagcctgagggcaaagatcaggctgtgttgttggctacaaccaagacaaagaagcagaacaagcccgctgcattgctccacacatctgtgatg

SEQ ID NO: 238514 - DNA, 352 bp, Glycine max
  unsure (1)..(352): unsure at all n locations
ggcctcacaacagcagctgcagcagtaatggctcccaaacgaggtggaaaggctccggctcttgccgctaagaagaagcctgagaaggtcacgaatccgttgttcgagaagcgtccgaagcagttcggaatcggaggggcgttgcctccgaagagagacttgactaggttcgtgaagtggccaaagaatgttcaaattcagaggaagaagaggattctgaagcagaggttgaaggttcccccagctttgaaccagtttaccaaaactcttgacaaaaacctagcaacaagtctgttcaagttgcttctgaagtacaggcccgangacaaagctgaaaagaaagagaagctct

SEQ ID NO: 238515 - DNA, 415 bp, Glycine max
gacacaccgtttgttctattcttaactcaacttctgctacccactctcttcttccaagtccaaccacgcttttctctacagtcatgggcaaggtcaagatcggaatcaacggatttggaagaattggccgtttggttgccagagtcgctctgcaaagagacgatgtggagctcgttgccgttaacgaccctttcattaccaccgattacatgacatacatgtttaaatacgacagtgttcacggacactggaagcatcacgatgtcaccgttaaggacgagaagacccttctcttcggtgacaagccagtcactgtttttggacacaggaaccctgaagagatccatgggggtcaactggagctgatatcattgttgagtcaccggagtttcaccgataaggacaaggccgccgc

SEQ ID NO: 238516 - DNA, 342 bp, Glycine max
  unsure (1)..(342): unsure at all n locations
gagggtttttgtcgtcgctactaagagttgctgcttcttcagccactccgcacctcgcagcctctgtgccctcaacaaccatggctgaaatcgaaactaccgttccagatcccacccaaatcgacgtcaaactcttcaatcgctggagcttcgaggatgttgaggttaatgatatgtctctggctgattacattggagtgtccccatcaaagcatgctacatatgttcctcacactgctggtaggtactcagtgaagaggttcaggaaagcgcagtgccccattgttgagaggctcgacaactctctgatgatgcacgggaggaacantggaaagaagctca

SEQ ID NO: 238517 - DNA, 379 bp, Glycine max
  unsure (1)..(379): unsure at all n locations
gggtcaaaactcaaaagctcacaaagcaagaacactgttccaatacggaatctaaggcanagcanaccanacatcttgaatcatgggttcaacacgtgagactcagattaccccaacccacgtatctgatgaagaagcaaaccttttcgccatgcaactagccagtgcttctgtccttccaatgatcctcaaatcagcacttgagcttgatctgttggaaatcatagccaaggctggccctggtgttcatctttcncccactgacatttcttctcagctcccaacacagaaccctgatgcacccgtgatgttggagcgtatattgcgcctattggcttgctacaatatcctctcttttttctctccgcaactctccctg

SEQ ID NO: 238518 - DNA, 336 bp, Glycine max
aaagagacccggaaagggtgggaaccgcttttggaaatccattgggcttggatttaagactcccagggaagccatcgaaggaacctacattgacaagaagtgccccttcactggcaatgtttccatccgtggccgtatcttggctggaacatgtcacagtgctaagatgaacaggactattattgttaggaggaattatctccattttatcaagaagtaccagaggtacgagaaaaggcactccaacattcctgctcatatatcacctgctttccgtgtgaaggaaggagatcacgttattattggtcaatgcaggccactttctaagactgtgag

SEQ ID NO: 238519 - DNA, 410 bp, Glycine max
ggttcaaagcacgccgtgtttcgctgtcactcccatcctttcgcattctcaatacccttttgatttgtgaaaggaaagcaaacatggttgatcaggtccaacaccctacaatcatggacaaagttgctggtcagctccatctccgttctggtctttcatctggtattagaagttatgatggagcctaccgccagccagctatgtaccaaagaccctcttttgggaattactcgaatgctgcaattgaattttcctgtgatgcccacatgcaaagctaccatggatgtgtctgcaactgcaacatctgcctcacccgtctttgatgctgctccatcagaaaaacgccattttcatttagactttctcatgggacgtgtttcaacaactgtctccagaactgctgctgctcc

SEQ ID NO: 238520 - DNA, 283 bp, Glycine max
acgaatcgaaaatgccgtcgcacaagacattcagaatcaagaagaagttggcgaagaagatgaggcagaacaggcccattccctactggatccgcatgaggaccgataacaccatcaggtacaacgcgaagcgccgtcactggcgtcgcaccaagcttggattctgaggtgtatgctctgcctaggttcaatttatccaattaattagtgttttattttcttgaggcaaaaacaatgttttgagtttttaatattttccatttgttcgaagactatattgtgt

SEQ ID NO: 238521 - DNA, 280 bp, Glycine max
tgacagtagagtaccctgacattctagctcgatatgtccaacaccatcctgtctgacgatgagtagcatttcgattcgattgccagaatccggcgcctcgaattgttatgctcatctagcctgtatgagtcgctagaacggttacatcggcatggaaggacgctcatgctttgttgttgtacatctctactttttaatctggaattcacggtcacgcctttgtgccattttgttggtctctcgaaaccttcactttttcagaatgcgtatgtatttagtg

SEQ ID NO: 238522 - DNA, 390 bp, Glycine max
gtgaaaggcattcaatttttgcacacagggatagtgcctggactatattcaaataatctgaagataacagatattcttttggataacaatcacaatgttaaaataagcagttataatctaccactctctgctgaaaataaaagaatgatcagcaagggaacctcccctggattaaaaggaaaagtccaagcaaggatccaggatgcagacaagaatgatgtctatgatattggagtagtcttgctagaaaccattctgggaagaccaataatgttccacaatgaagttggaacactaaaagatcttttacaggtaagcatcaaaaccgatgacatagctagaaggagcattgttgacccagcagttcataaggaatgttcagatgagtca

SEQ ID NO: 238523 - DNA, 372 bp, Glycine max
  unsure (1)..(372): unsure at all n locations
agtcgagaatgatgggagattctagttacaagaacacccttgattgttttatcaaaacattgaagaatgatggacccttagccttttataaagggttcctcccaaattttggacggctgggatcttggaatgtgatcatgtttctaaccttagaacagactaaaaagttcgtcaaaagtttagagtcgtcctgaggcgagttcccgttgagaattttctaaggggactggttgcaactgcaaatgtagtggaaattgtagaaaataaaggtcnctttctcttcattctgctaaccaggatgtggtcaaacatttttttacggaagaaaaatttgatagtaaaatgagaatgctattcatatatactagcttt

SEQ ID NO: 238524 - DNA, 417 bp, Glycine max
gatacctaaaaattgtaccgatatggcttcacttgtgtgtctccttttttccttgcatttcatggttatcatgtcaggttccttaccagcaaatagtgaagtgtttacaaaagagtctcctatgtctctatccacaaaacccgtggaaagactcacccaactccacttttatttccataacaacaaaatgggggaacacccgactgctatgaaaattgttgagcctcctaaggcgtccatttctggttttgggactatttacatgatggatgaccctctaaccgaaggaccaagtccaacttcaaagcttgttggaagatgtcagggaatatatgctgaggcttcgcaacatgaacctgcgatactcatggtaacgaatttgttcttcactgagggcatttacaatggcagcaccct

SEQ ID NO: 238525 - DNA, 300 bp, Glycine max
gatcacatttaaaatcaaaacaacaaattttcagactcaacaagcttcgaaccaaatcttattgagaaaatgtctggtcgtggaaagggtggaaagggtttgggaaagggaagtgccaagaggcacaggaaggttcttcgtgacaacatccagggcatcacgaaacctgcgattcgtaggttagcgagaagaggtggcgtgaagaggatcagtggtttgatctacgaggaaaccagaggagttctgaagatattcttggagaacgtgattcgcgatgctgtgacctacactgagcacgct

SEQ ID NO: 238526 - DNA, 351 bp, Glycine max
ggtttcagagtggtggggtgtgcagaagagcgtcgcagttgtaaccctaatcagaagaagcgcagcttcaagcgagtgacagccaccagccatgggtcgtatgcacagccgcggtaagggtatatcctcttctgctttgccctacaaaaggacacctcctagctggctcaagatctcttcgcaagatgtcgaagaaaatatctgcaagtttgcgaagaaaggtttgaccccgtctcagattggtgtcattctcagagattctcacggtattgctcaggtcaatagcgtcactggcagcaaaatccttcgcatcctcgaagctcacggacttgcgcctgaaattccagagga

SEQ ID NO: 238527 - DNA, 292 bp, Glycine max
  unsure (1)..(292): unsure at all n locations
ggatccgtgctctgtgattccagaccttaatttttctctcattcgcttcaaatttcnggaaatcaattatggctcaaccctcaacaagaataggccttgctggactggctgttatgggccaaaatctagcactcaatattgctgagaaaggctttcccatttctgtttataaccgaaccacttccaaggttgatgagactgtagaacgagcaaaacaagaaggaaatcttccagtttatggctaccatgaccccgaagcttttgttcattccattcaaaaacctaaggtgat

SEQ ID NO: 238528 - DNA, 289 bp, Glycine max
gattcattcataaatcttagttactttatcagtatcattcattatcactacgattgttctaaaagcaattattactcttgagaagaattaaaagatcatcatcacaataacaagatgagttcaggaattagagcatggagtgtggcagctagtgttggagttgtggaggccttgaaagaccaaggcatatgcaggtggaatcatgctttaagatcagctcaacaccatctcaaaaaccatgttggctcattctctcaggctaacaagctttcttcttctgctatgatct

SEQ ID NO: 238529 - DNA, 360 bp, Glycine max
gatatcagaagcgcagacctaggatttcggccgtttgctccccacggaaagaagcagagtgtttcttttgaaatcagctagaaaagatgtcaggtgaagaggtagctgttgcagctgatgcacctgctgcttcaattccaggtgagccaatggacatcatgactgctcgacagcttgtgctgagaaaatctctggcctatggtggtcttgcacgaggtcatcatgaacgtgctaaggtgatcgagaagcatgctgcagagctctgcgttccatcagcagattgtgaccaaactgattatggtgaactggttgaagctcattgtgcagagtcacaatgttagtcttatgacagttccaagt

SEQ ID NO: 238530 - DNA, 358 bp, Glycine max
gagcgaaacagagagtgatttcagtgagtgatcggtgttcacttgatctcatcataatcgtcagcgtcaattgaagaagatgccgatcagaaacatcgccgtcggaaggcctgaagaggcgactcaccccgacacgttgaaggcggctttggctgagttcatctcaaccttcatcttcgtgttcgccggctcaggctccggcatcgcctacaacaagctcaccgacaacggcgctgccacccctgccggcctcatctccgcctccatcgcccatgcattcgccctcttcgtcgccgtctccgtcggcgccaacatctccggcggccacgtcaaccccgccgtcaccttcggcgccttc

SEQ ID NO: 238531 - DNA, 417 bp, Glycine max
ggttttcattgggtgctgatcggaacaaacagggaatagaagagaggagaagatgggtttcataatggaatttgcggagaacttggtattaaagttgatggaagatccgaaggaaagggatcggaggttcagggagcacgtttatagagtgaaggacaggtgcgagaagacgaaggagatgtggagctaccctatgcgaccctatgggttttggacattcgaacgccacaattctcagcttgcttgggatgcacagattagccaagtggccgggaggagggacccttatgatgatctcctccaacatttctctaccccacctaagtgagtgttgctgaacttgccacaagcattatcggtgaaaaggatgaatttgtcgtaatttccccttgtaatatcctgtcctgttgcatgttg

SEQ ID NO: 238532 - DNA, 312 bp, Glycine max
gaagttaatttgcgtctagagtcaatttggaatctaggatgaatctcaacggacagagaagagccataaccatgtctggaatatgaaagggacgcaggggtctcggatcgggaggagcgaagcgagaccgtacggttctgagggataacagtcaaggtacaacgaagcccgcaattcgccgtctcgcgagacgtgacagcttgaagcgtatcactggtcacagctaccatcaaacacgaagtgttctcaatatcttccatgataatgtcattcgctgagctgtcagctagactgaacacgctcgacgctcga

SEQ ID NO: 238533 - DNA, 408 bp, Glycine max
  unsure (1)..(408): unsure at all n locations
gagcctcagcagaagcagaacgaggagaagcagaaggagcaaaagcaatggcgccgaagaagccgagaaccacgacaaggaaccctgatttggttagggggattggcaagtattcgaggtcgcagatgtaccacaagaggggcatctgggccatcaaggccaaaaacggtggcgttttgccccgccacgatcccaagcccaagcccgaggccccggcccagaagccgcccaagttctaccccgcggacgatgttaagaagcccctcgtcaacaagcacaagcccaaacccgcgaaactcagggctagcattactccagggactgtgttgatcctgcttgctgggaagttcaagggaaaganggttgttttcctgaagcagctcccatctggattgcttcttgtaactg

SEQ ID NO: 238534 - DNA, 402 bp, Glycine max
ggtcctaaatcctcattccagccacacgcttcagaagacatggcctcattgggtgggttacaaaatgtgagcggcatcaattttcttatcaaagagggtccaaaagtcaatgcaaagttcgagctgaagccgccaccatatccactgaatggtttggagccggtgatgagccagcagacacttgagtttcactgggggaagcaccacaagacttatgtggaaaatctgaaaaaacaagttgttgggacagagcttgatgggaagtcactagaatagattattgtcacatcatacaataagggtgacattcttccagctttcaacaatgcagcacacgttatggaacatgacttcttctgggagtgcatgaaaccaggtggaggtggaaagcatccggggagc

SEQ ID NO: 238535 - DNA, 176 bp, Glycine max
ggcacttcaattgcaatcaaattagttcattcgctttgcgcagttccctacctctcctttcaagatgcagatcttcgtcaagaccctcaccggaaagaccatcacccttgaggtggaaagctctgacaccatcgacaacgtcaaggccgagatccatgacaatgaaggaagtcccc

SEQ ID NO: 238536 - DNA, 331 bp, Glycine max
ggcctttgaggaaaagaaaggcagatatgcaagaatcatgcttgggaatgattggtgaggtctccggcgatcagcaccgtcagctgatagcggagatagcgactcatccgctgttcgagcatcttctggcagcacacgtggcatgcctccgtgtggcgactcccatccatcagcttccactcattgatgctcaattatctcagtctcaccatcttctacgctcttacgtctcacacaacactctttctctctctcctcatcaccgccaagaacttgacagcttcctggcacaatatttgataattttgtgtacatttaaagaacagcttca

SEQ ID NO: 238537 - DNA, 366 bp, Glycine max
  unsure (1)..(366): unsure at all n locations
ggagagtcagattcgcacgcattgcttcgcctcacaacagcagctgcagcagcaatggctcccaaacgaggtggaaaggctccggctcttgccgctaagaagaagcctgagaaggtcacgaatccgttgttcgagaagcgtccgaagcagttcggaatcggaggggcgttgcctccgaagagagacttgactaggttcgtgaagtggccaaagaatgttcaaattcagaggaagaagaggattctgaagcagaggttgaaggttcccccagctttgaaccagtttaccaaaactcttgacaaaaacctagcaacaagtctgttcaagttgcttctgaagtacaggcccgangacaaagctgaaaag

SEQ ID NO: 238538 - DNA, 387 bp, Glycine max
gaacatgccgaaaagtagtaccaagatggcttcagttgtgtatctcctctttggcttccatctcattgttatcatgtcaagttccttacccgcaactagtgaagtgtttgcaaaacagtatccatccacagaacccgtggaagaaaaactcacccaactccacttctatttccataacaacataacgggggaacacccaactgctatgaaaactgttttgcctcctaaggggtccattcatggttttggggctacttacatgatggatgaccctctaactgaaggaccaagtccaacttcaaagcttgtgggaagatctcatggaatatacgctttggcttcacaacatgagcctgagttgctcatggtgacaaattttctcttcac

SEQ ID NO: 238539 - DNA, 357 bp, Glycine max
  unsure (1)..(357): unsure at all n locations
gatcgcatttcatagcactcaccctcattaccaacacgaaagcatagccaaaaccttttttcgaagtctctgattttcctaatggctccggcaaaggcagagaagaagccggcggagaagaagccagcggcggagaaggcaccggcggagaagaagccgaaggcggagaagaagatctcgaaggaaggatggagcgagaagaagaagaagcgcacgaagaagagcgtggagacctacaagatctacatcttcaaggtcctcaagcaggttcaccccgacattggtatttccagcaaggccatgggcatcatgaacagcttcatcaacgacatcttcgagaagctcgnccaggaagcg

SEQ ID NO: 238540 - DNA, 263 bp, Glycine max
ggagctttagattcttttcccctagattcagccacagttggaaaaaaaaaaaaagttgttcgagatggcacgtacgaagcaaactgctcgtaagtccacaggaggaaaggcacctaggaagcagctcgcaaccaaggctgcacgtaagtctgcaccaactactggtggtgtgaagaagccacatcgttatcgtcctggtaccgttgctcttcgtgagattaggaaataccagaagagtaccgagcttttgatcaggaagctcc

SEQ ID NO: 238541 - DNA, 396 bp, Glycine max
  unsure (1)..(396): unsure at all n locations
gactcaccacttcaaagcactcataacacatagcacaaagcaaagctcatccttgagttatggaatggcagcagcttcttccatggatctcgcatccccatccttggctggcaaggacgtgtagctgggcccagcagccccagaagtgggaaaggtgagcatgaggaagaccgtcaccaagcaggtctcctcatgaagctcatggtacggcccagaccgagtcaagtacttgggctcattctctggcgagcctgcgtcctatctaaccggtgagttcgcacgcgactacagctgggatactgctgggctttccgcagatccagagaccatcgccaagaatcgtgaactctatgtgatcactctangtgggccatgctcggaaccttgggctgcgtc

SEQ ID NO: 238542 - DNA, 355 bp, Glycine max
gacttcacaactcaaactgcttcattgcataattgcagataagatcaacccttctaccttcagattcgcgggaagatggcatcacttcatgctaatgtgacatcagttgtttacaacagtggcaaccgtgtttctcaatcgaaatttgcaagctcttccttcttgtctgggttcgatgttgttggtcgtgcttcaagtgcttggaagaatgaacttgtcccatcttccatttccttggtgcctagagccaccctaacatttgatcccccaactaccaattcagacataaccaagcaaaagaagcacactcttgaccctgcttctccagattttcttcctcttccttcatttgaac

SEQ ID NO: 238543 - DNA, 296 bp, Glycine max
ggatatacattctcttgtcacagttttctgtgtcaccggaactcgtttctttcaaaacacttcaaacatctcgaacgctctctttccggcaactaggttaaagttcatcaatggcaggtcgcggcaaaaccctaggatctagcgccgccaagaaggctacctcaaggagcagcaaagccggcctccaattccccgtcggccgtatcgcccgtttcctcaaggccggaaaatacgctgagcgtgtcggcgccggcgcccctgtctacctcgccgccgtactccaatatctcgcggct

SEQ ID NO: 238544 - DNA, 270 bp, Glycine max
gacattcatacgtgccatgcgtgtcccttccaattgcccacattttcacgctcgcgaatcactcctctctctccaccaatggccgagcagctcacggatgacgagatcgccgagttcaaggcggacatcagcctcatcgaaaatgactgcgatggctgctatattactattgcacctgggactgtgatggggtcaccacggcaaaatccagctgatcgcagagatgcatgatattattaatgacgttgatgctgatggcaatggaagcat

SEQ ID NO: 238545 - DNA, 392 bp, Glycine max
ggcgtttttcacttctttttttttttcattttgttttgctaccctaatagacacgaggactatttaaaaacccggaccgtcgtatcgttccaccggcgccgtcaacctccaaggctcgaaccaccatccttccactcaaccgcgcacttgcactcgtcggctcaagctaccaccgcagcacgcctcagccgccgccagttaacaagcatttgctcataaagaatgaaggaagatggtgtttgggcaagtactggttggtcctcctggctctggaaaaacaacttactgcaatggcatgtctcagtttcgcagtcttattggaaggaaggttgctgttatcaatttggatcccgctaatgattcgttaccctaggaatgttctgtgaacatca

SEQ ID NO: 238546 - DNA, 215 bp, Glycine max
ggtgctctgctcgtgcctctagggttatcatttctccatttccattttctctctcacttttcaagaatcgtaagctatgggaaagtcttacccaactgtgagtgctgattacaagaaggccgttgaaaaggcgaagaagaacctcaaaggcttcatcgctgaaaaaaaatgcgctcctcaaaggctccgtttggaatggaattcggctggaacct

SEQ ID NO: 238547 - DNA, 348 bp, Glycine max
aggggcagctgcgaaaacctagtggcacgtaagggttgttaaacaagcagagaagaaccatggtgcacgtttccttctaacgaaactatgggaaaacgttcaagaagcctcgtcgtccctacgagaaggaacgtttggacgccgagttgaagctggtccgtgagtacaggcttcgctgcaagagggagttatggagggtccagtacgccctgagccgcatccgtaacaacgccagaaacctattgacccttgatgagaagaaacctcgccgtatcttcgagggtgaagcccttctccgaagaatgttccgttacggactcctcgacgagacacagaacaagctggaat

SEQ ID NO: 238548 - DNA, 429 bp, Glycine max
gacgcctcagttccattttcaattttaaattcctcccaaaacctaaccccaaacctaaacctccccgttaccaaagaaaaacccccttggccgattaacgtcgtcaagatgttggaactccgtctcgtgcaaggctccctcctgaagaaggttttggaatccgtcaaggagctcgtgaacgacgcgaacttcgactgctcctccaccgggttctccctccaggccatggactccagccacgtcgccctcgtcgctctcctcctccgatccgagggcttcgagcactaccgctgcgaccgcaacatctccatgggcatgaacctcaacaacatggccaagatgcttaagtgtgctggtaatgacgacatcatcaccaatcaagccgacgactgcagcgacactgtcactttcatgtccgaaagccctaca

SEQ ID NO: 238549 - DNA, 417 bp, Glycine max
gatgccgaaaggtattaccaagatggcttcagttgtgtatctcctctttggcttccatctcattgttatcatgtcaagttccttatccgcagctagtgaagtgtttgcaaaacagtaatcatccacagaacccgtggaagaaaaactcaccgaactccacttctatttccataacagcatatcgggggaacacccaactgctatgaaaactgttttgcctcctaaggggtccattcatggttttggggctacttacatgatggatgaccctctaactgaaggaccaagtccaacttcaaagcttgtgggaagatctcatggaatatacgctttggcttcacaacatgagcctgggttgctcatggtgacaaattttctcctcactttgggcatttacaatggcagcaccctcagcat

SEQ ID NO: 238550 - DNA, 351 bp, Glycine max
tatgtgatgatgttttgtaaaaaaaaaaaaaaacaaaaaaatcaaaaaaaaaaacagaaataaaaaaaaaaaaaaaacaaaaaaaaaaaaaaaaaaaaaaaaaaacaaaaaaaaaaaaactttaaaaaaaaaaaaaaaaaaaaaaaaaaaaaagggggccccccaaggggtccaacctttctttcccggggatgcgacttcaaaacccctccaaaggggcccccaatttcaattcccggggcgtccttttaaaacctcttgacggggaaaacccgggggtttccccatttaaccccctttgaaaaaaacccccttttcccaagggggggttatacccaaggggcccccccc

SEQ ID NO: 238551 - DNA, 404 bp, Glycine max
gagggtttttgtcgtcgctactaagagttgctgcttcttcagccactccgcacctcgcagcctctgtgccctcaacaaccatggctgaaatcgaaactaccgttccagatcccacccaaatcgacgtcaaactcttcaatcgctggagcttcgaggatgttgaggttaatgatatgtctctggctgattacattggagtgtccccatcaaagcatgctacatatgttcctcacactgctggtaggtactcagtgaagaggttcaagaaagcgcagtgccccattgttgagaggctcaccaactctctgatgatgcacgggaggaacaatggaaagaagctcatggctgtcaggattatcaagcatgccatggagatcatccacttgctcactgacctgaaccca

SEQ ID NO: 238552 - DNA, 215 bp, Glycine max
  unsure (1)..(215): unsure at all n locations
gaggggaatttggcnaatcattggaagaaaatggcgggtggtggaaaggtttcgtccaaagtcacactaacctccgatccaaaattacccttcaaagtggttagcgttcaaaaggctgcgccttttactgccgttctcaaattcgccaccgaagaattcaaagtcccgccccaaacaagcgctatcatcaccaatgatggtgttggcataaatcc

SEQ ID NO: 238553 - DNA, 255 bp, Glycine max
ggtctacgaatatattctaattatcaacgaatccctcgaattttagggggcatggggattgtaattctttcaacttctagaggtataatgacagatcgagaggctcgattagaaagaattggcggagaagttttatgttatatatggtaatctttctaacacccgaattatatgagaaacttcgatccatttttggtaaaaaaaaaaagaacgagaaaacgcaagtttctaaaagaacttccccctttatgtaaa

SEQ ID NO: 238554 - DNA, 412 bp, Glycine max
  unsure (1)..(412): unsure at all n locations
ggccgaatgtgtctctccgcagcagccacacttcttcgccgtttcagctgaagagccatccgcaggtaagcaatggttaagcataataatgttatccccaatgggcacttccggaaacactggcaaaactatgtgaagacttggtttaatcaaccagcccgaaagaccagaagacggttggctcggcagaagaaggctgtcaagattttccccaggcctactgctggatctctcaggcctattgttcatggccagactctgaaatacaacatgaaagtcagagccgggagaggattttcactggaagaattgaaggctgcaggaattcncaagaaacttgctccaactattgggatttctgttgatcaccgcagaaagaatcgttctttggagagtctgcaggccaatgtgc

SEQ ID NO: 238555 - DNA, 386 bp, Glycine max
gggcactgtggataatgatcgttggtgcaggaaccctagatcgtgagttccctgcctacacatctctcaggtaacagaataaagattctccggtgtttctctctatagtggaaaaggaatggggaacgaagcggttggtttggtttatgacaaatgcttgaaccagtcaggtagcatttgcatgcccggttcgcttgaaccgggtctggttcgtgggaacgtggttgtttgcgaccgtggaatcaacacgcgggtggagaaaggtaaggtggtgcgtgatgccggtggtgttgggatgattctcgcgaacatagcaccgagtggggaagagttagttgcggatagtcaactgctaccggctgtggcagtgggaagaatcgtggggg

SEQ ID NO: 238556 - DNA, 391 bp, Glycine max
gatacacaacacacatacaattactattaaactctctataatatttgctgaatccggtataattttctaataatggcgacagacgttcagcacgtcatagtttacagttaacattccacgaacgacaattataaccctccgctggcaccgttgatggagccatatgatctcagtaagtggtccatgtacagaaccgccatatctcactttatagcattactcccttctctttatatcaccgatgttgaccattagtggggataagagacattatgacactaaggtcttgtgtaatacagaatatgacggcgttggaatttagtgcatcatcttggaccttcagtcatatgatcgtcatccttgtttactggactgcctgaatcacgggatg

SEQ ID NO: 238557 - DNA, 328 bp, Glycine max
cgggaaccaagtttgcttgcgtgtatattcattttaccatcaccgttgaatctcacaaataaaggcgcatcgacatgcatgtctcgaagaggaaagggaggcaacggtctcggacagggacgagccacaggacaccgtatggttctgacggataacattcagggaatcatcactcccgcgattcgccatctggccagacatagtggcatccagcgtatcagtggtcatagctatgacgaaactctcggtattctcaagatcattctacagaacgtcagtctcgacgctgtcatctagacttaagactctcgccgcaagatcgtcactg

SEQ ID NO: 238558 - DNA, 356 bp, Glycine max
aaataaagtgaacccaatgagggagataaaagtgcagaagctcgtcctcaatatctctgttggcgagagtggagatcgtctcaccagagccgccaacgtgttggaacaacttagtggccaaaccccagtgttttccaaagcaaggtacactgttcgttcctttgggattacaagaaatgagaagattgcatgctatgtcactgtcagaggtgacaaggcaatgcaacttttggagagtggtttgaaggtgaacgaatatgaacttctcagaaggaacttcagtgatactggttgctttggctttggtattcaagaacatatcgatttgggaatcaagtatgatccttcaactggta

SEQ ID NO: 238559 - DNA, 365 bp, Glycine max
gatccatttctcgcaacaacgcttaacctctctcattccccatttcctcacctccttcaaccgctgctaaattctagggttccgaaatggacgctggcggaaagatcaagaagggcgccggaggtagaaagggcggcggcccaaagaagaagccggtttcaaggtccgtcaaagccggtctccaattccccgtcggaagaattggccgttatttgaagaaaggaaggtacgctcagcgtgtcggtaccggtgctcccgtatacttggctgcagttctcgaatacctagctgccgaggtgcttgagttggctgggaatgccgcacgtgacaacaagaagaacaggattattccaagacacgtgctt

SEQ ID NO: 238560 - DNA, 355 bp, Glycine max
gaactacaacacaagagactgtaccttctttttgaagtctctgtgggttggggttttggagtgggagcaccaatggctttcgtgatggcaattgtagtagtaggtgttgtcttggtgctctgtttttgctctgctctcttgaggtggaatgaagtaaggtacaggaagaaaggtttgcctcctggcacaatgggttggccactttttggggagacaactgagtttcttaagcagggtccaaacttcatgaaaacccagagagcaaggtatggcagttttttcaaatcccacatactgggttgtcctaccattgtttccatggatccagagcttaacagatacatcctaatgaatg

SEQ ID NO: 238561 - DNA, 416 bp, Glycine max
  unsure (1)..(416): unsure at all n locations
gaacatgccgaaaagtagtaccaagatggcttcagttgtgtatctcctctttggcttccatctcattgttatcatgtcaagttccttacccgcaactagtgaagtgtttgcaaaacagtatccatccacagaacccgtggaagaaaaactcacccaactccacttctatttccataacaacataacgggggaacacccaactgctatgaaaactgttttgcctcctaaggggtccattcatggttttggggctacttacatgatggatgaccctctaactgaaggaccaagtccaacttcaaagcttgtgggaagatctcagggaatatacgctttggcttcacaacatgagcctgngttgctcatggtgacaaattttctcttcactttgggcatttacaatggcagcaccctca

SEQ ID NO: 238562 - DNA, 395 bp, Glycine max
ggcagacgccgtgactagacactcatcgcactcgcgccatcttacggtttctccttttgtttcgcaacatggatgccgctaagaaaactaagaagacccatgatagcatcaacaacatgctcgctcttgtcatgaatagtggcaaattcaacctcggttacaagaccgttctcaaatctcttaggaactccaaaggaaaattgattatcattgctaacaactgcccccctttgagaaagtcagagattgaatactatgctatgttggcaaacgttggagttcatcattacaatgggaacaatgtggatttgggcactgcatgtggaaaatattacagagtgtgctgccttagcattattgatcctggtgattctgatatcatcaagacactgcct

SEQ ID NO: 238563 - DNA, 394 bp, Glycine max
gcccgccgagcttagtagaacagaaaaggaggagcaggaggcatcaccgttaccaaacatggtgaaagggcgccaaggagagcgtgttagactttacgtcaggggttcaatacttggatacaagaggtccaagtcaaatcaatacccaaacacctcattaatccagattgagaatgtacacactaaggaagaagttgcgtggtactgtgggaagcgtatggcttacatttacaaagccaaggtaaagaaggacggaagccactatcgctgcatttggggtaaggtcaccaagcctcatggtaacagtggtatagttcgtgctaagttcaagtccaatctgccgcccagatcaatgggagcaacggttagagtcctcatgtatccaagcaatata

SEQ ID NO: 238564 - DNA, 312 bp, Glycine max
gaagagtgatccttctacactaactaaagccgagcagcgagagagagaaaccctagcaaaaatgccggctggtcacggtttgagatcccgcaccagagattccttctctcgtcccttcaggaagaagggtaccatcgccctcaccacatacctcagaacctaccacgtcggcgattatgtcgacgtcaaggttaacggcaccgtccacaagggaatgcctcacaagttctaccatggccgcaccggtcgcgtctggaatgtcaccaaacgtgctgttggggtcgaagtcaacaagcaggtcggcaacagaat

SEQ ID NO: 238565 - DNA, 393 bp, Glycine max
  unsure (1)..(393): unsure at all n locations
ggaagacgaaaagagagtggagagagagagaagtgagagtgtgagagggagcacagtgaagaagagaacgaaggaacgaggatggagaaccctcctccggcaacaaggcttgtgaaggagcacggaaccagggggccgaaaccccaggcggaanacctaaacaccaaaggctttaacggaaggaagaataccacagcaccaccaacttgttcacaagcaataccagcaacaccaatatcacccttcggtggaagagaaatacacgcagtggaagtcccttgttcctgtcctctacgactggctcgccaaccacaacctcgtctggccctctctctcttgccggtggggccctcagcttgaacaagccacttacaagaatcgtcaaagactcta

SEQ ID NO: 238566 - DNA, 335 bp, Glycine max
  unsure (1)..(335): unsure at all n locations
gacctaaaaattgtaccgatatggcttcacttgtgtgtctccttttttccttgcatttcatggttatcatgtcaggttccgtaccagcaaatagtgaagtgtttacaaaagagtctcctatgtctctatccacaaaacccgtggaaagactcacccaactccacttttatttccataacaacaaaatgggggaacacccgactgctatgaaaattgttgagcctcctaaggcgtccatttctggttttgggactatttacatgatggatgaccctctaaccgaanggacaagtccaacttcaaagcttgttggaagatgtcanggaatatatgct

SEQ ID NO: 238567 - DNA, 348 bp, Glycine max
gactcaccacttcaaaacactcataacacaaagcacaaagcaaagctcatccttgagttaaaaaatggcagcagcttcttccatggctctctcatccccatccttggctggcaaggccgtgaagctgggcccatcagccccagaagtgggaagggtgagcatgaggaagaccgtcaccaagcaggtctcctcaggaagcccatggtacggcccagaccgagtcaagtacttgggcccattctctggcgagcccccgtcctacctaaccggtgagttcccaggcgactacggctgggacactgctgggctttccgcagacccagaaaccttcgccaagaaccgtgaact

SEQ ID NO: 238568 - DNA, 426 bp, Glycine max
  unsure (1)..(426): unsure at all n locations
ggagttgaaatcgaaagggaagcggtggtttaggttaggatttggtgagtgagtggggatggcgaagttcaatgtggtgcagaagcgaaggagagctctaatagcagagaagaagagacagcttcacggagaccctttaaccggcaagctcaagatcaaggaccaacccctttccctatccggaaaacgcaaacgcaagctcttcaaaaaatggcgccgggaccaaaaggacgccttacagaatggtttggtaaccatggaagatgttcaaatggcagttgctgaaggggataccaaagatacccctagaccttcaccaaaaattcacttaaagaagaaggccttgaaacttaaacagctcaggcgcaaagggaagancangaganaatctgatgtgcctgctgatgtttcggctgatgcaatggt

SEQ ID NO: 238569 - DNA, 411 bp, Glycine max
gacccaccattttgtgcttctttctgtgtgcaagaaaggtaaaagctttcacacaccaagaaaagtagccatggctgcttgctcaagaacttctcttttgctccttttctttctctttggattctccgcagctaaggaactattggttggaggcaaaatagatgcttggaagattccatcttctgaatcagattcccccaatcaatgggctgaaaggtctcgtttcagagtcggcgatcatcttgtgtggaaatatgagaatgggaaggactcagtgttggaagtaacaagggaagattatgccaattgcagcacatccaagcccatcaaagagtacaatgatggaaacacaaaggtgaagctagagcatgctggtccattctacttcataagtggagcaaaggggcactg

SEQ ID NO: 238570 - DNA, 303 bp, Glycine max
gggtcacacgcagttgtattgtagaactgaacaagggtttctctttctctttctctgtctgcttcttcactttctctcgtttcaatcgaaaaaaatcatgggcagaaaattcttcgtcggtggcaactggaaatgcaatgggaccactgaggaggtgaagaagattgttactactttaaatgaagctaaagtccctggagaagatgttgtagaagttgttgtgagccctccttttgtgttccttccttttgtaaaaagtttgctgcgccctgatttccatgtctccggccaaaattgttgggt

SEQ ID NO: 238571 - DNA, 374 bp, Glycine max
gtatgatgacatcgtgacagaagtctcttcttacttgacgaaggttggttacaacccagacaacattcgctttggtctcatctctggatttgaaggtgacaacatgattgagaggtccaccaatcttgactggtacaagggaacaactctccttgaggctcttgatcaaatcaatgaacccaagaggacctccgactagcctctaatgcttccattgcacgatgtctacaatattgatggtattggtactgtgccaatgggacgtgtagagactgaggttgttaagcctgttaaggcgatgacttttggtcacactgggctgacaactgaagttaagtctgttgagatgcaccatgacgctctcacacacgctc

SEQ ID NO: 238572 - DNA, 276 bp, Glycine max
gatagcaaaatcgtttctccaatttaatcaccattgtacaacccaattcccttcgtcgttttcgattaagagagcaatggcacgtaccaagcaaaccgctcgcaagtccaccggaggaaaggctccgaggaagcaattggcaaccaaagccgctcgcaagtcagccccggcgaccggcggagtgaagaagccccaccgcttcacgccaggaacggtggctctgaaggagattcgaaagtaccagaagagcaccgaacttctgatccgaaaactccc

SEQ ID NO: 238573 - DNA, 393 bp, Glycine max
caacagagaacccaaattgttcaaggcaacatccaattggcggtgaggaacgacgaaaagttgagcaagcttctaggagatgttaccattgctaacggcggtgttatgcctaacattcacaaccttcttcttcccaagaaggctgggggctcatccaagggtgctgctgctgacgatgactcttaaatagggattcactgttcacaaagttcttgaatttagattctatgtttgctctctttttttttcctttttatttgtagttatgataattgtgccctttgtagtagtagttaggttttcagtcagatgtgtttaaagaatgctcttacgcatcaagaaaagttgttcaaaatttaaattaatttaatgtcacctttgagtcttgatcta

SEQ ID NO: 238574 - DNA, 377 bp, Glycine max
gatctcgcgttggtgcaaagcatccttcgcttcaatctctctctctctctttgcgctttctgcagaccgaacatttcatctccaaagggatcaacaggtcgaaggagaaatggggctgacattcacgaagcttttcagccggcttttcgcgaagaaggaaatgcgaattctgatggttggtcttgatgctgctggtaagaccactatcctctacaagctcaagctcggagagatcgttactacaattcctaccattgggttcaatgttgagactgtggaatacaagaacattagcttcactgtttgggatgttggtggccacgacaagattcgtcccttgtggaggcactacttccagaacacccagggtcttaatt

SEQ ID NO: 238575 - DNA, 367 bp, Glycine max
ggatcctttgtattctattcttcaaaattcatgtactgcgtttcggaagcatacatacatagctcgtaggaatcaaaccgctcgtaagtccacaagatgaaaggctcctatgaagcagcttgcaaccaatgctgcacgtaagtctgcaccaaccactggtgatgtgaataagccccaccgttatcgtcctgataccgttgctcttcgtgagattaggacataccagaatagtaccgagcttttgatccggaagctcctcttccagaagctggttcgtgaaattgctcaagacttcaagactgatctgcgtttccagagccacgccctgcttgcaatgcaagaaactgcttaagcataacttgttagg

SEQ ID NO: 238576 - DNA, 353 bp, Glycine max
gacggcattcaccccaccttgttgttctttccatttttctgacttgctccttttttctctcaaacacttcatttcttgagtttttttcactaagtttgttagggagatttacacaatggccaaacactttcttctgcttctttttgcagtatgcgttgctgctattgatgaagaaccatttataggggtgaatattggaagagacctctcagatatgcctcaccccactcaagtagtagcactacttaaagcacagcaaattcgacatgttaggttgtatgatgctgaccaagctatgctcattgcccttgcaaacacaagaattcaagttgctgtatctgtccctaatcaag

SEQ ID NO: 238577 - DNA, 416 bp, Glycine max
agggacatcacattttctcaaagtaatttattacttactaaataaatggcggcggcagcagcagtgacggtgctactctcatctatgattccgaccgccaccaacgttacacgctgctctgctttgccttctctgcctcctcgcggcatcaacactaaaaccactttgctcttatcttccctcaaccacttctcagtgtcccgaaaatcttctctgcttcagaccagagcttcttcagaggaatcatcctcagtagatgccaatgaggtgttcacagatttgaaggaaaagtgggatgctcttgaaaacaagtccacagtacttttttatggtggtggggctttaattgctgtttggctatcgtcgattcgtgtgagcgccatcaactctgttcccttgcttccaaagattatgga

SEQ ID NO: 238578 - DNA, 443 bp, Glycine max
  unsure (1)..(443): unsure at all n locations
acccttcggacggtgcaagaggacaacagaaggggacagcatggaattcttcgcaccacaccaaaaaaggacaacccaaaaagcgcgtcttaataaaggctcttctctgaaaacccccatttcttttcttctttcttcttctctttcgcttcttcgatcttcgatcttcgtcgctgaaaatgagagagtgcatttcaatcaacatcggccaggccgggattcaggttggaaacgcctgctgggagctttactgcctcgaacacggcattcagcctgatgggcagatgccaagtgacaagaccgttggtggaggtgatgatgctttcaacaccttcttcagtgaaactggggcaggaaagcacgtgccccgtgcgatttntgtagatcttgagcccactgtgattgatgaggttaggactgggacattacgccaactattccat

SEQ ID NO: 238579 - DNA, 436 bp, Glycine max
ggcctcagcagaagcagaacgaggagaagcagaaggagcaaaagcaatggcgccgaagaagccgagaaccacgacaaggaaccctgatttggttagggggattggcaagtattcgaggtcgcagatgtaccacaagaggggcatctgggccatcaaggccaaaaacggtggcgttttgccccgccacgatcccaagcccaagcccgaggccccggcccagaagccgcccaagttctaccccgcggacgatgttaagaagcccctcgtcaacaagcacaagcccaaacccgcgaaactcacggctagcattactccagggactgtgttgaccctgcttgctgggaggttcaagggaaagagggttgttttcctgaagcagctcccatctggattgcttcttgtaactggtccctttaagatcaatggggttcctccc

SEQ ID NO: 238580 - DNA, 393 bp, Glycine max
gacacatgcccatcatcaaagtttcttcctttctctgctctttgtcttctctgacacatttggggccctgttgagtgtgtttttgcaagacggtatggcgaatgacgttgacgttgctgatcgtggctccttctctgggaaggactaccagtaccctccaccagcaacactcattgatgctgatgagctcacaaagtggtccttttacacggctcttattgctgagttcattgccactttgcgcttcctctacattactgtgctcacagttataagggtaaagcaccatacggatcattctgatgcgtctggtggggttggcattcttggcattgcatgggccgttggtggcatgatcttcatccttgtctacttcactgctgggatttcagg

SEQ ID NO: 238581 - DNA, 418 bp, Glycine max
cggggcctttgaggaaaagaaaggaagagatgcaagaagcaggcttgggaatgatgggtgaggtctccggcgatcagcaccgtcagctgaaggcggagatagcgactcatccgctgtacgagcagcttctggcagcacacgtggcatgcctccgtgtggcgactcccatcgatcagcttccactcattgatgctcaattatctcagtctcaccatcttctacgctcttatgtctcacacaacactctttctctctcccctcatcaccgccaagaacttgacaacttcctggcacaatatttgatagttttgtgtacatttaaagaacagcttcagcaacatgtcagagtccacgccgtcgaggctgtcatggcctgccgtgatatcgaaaataccttacaagctctcactggagtgag

SEQ ID NO: 238582 - DNA, 376 bp, Glycine max
gacaacacaacgcaacacaacgcgcactctctcttttctctcttaacacaaaaaccctatcgttcttcgcggtttcgccgattctcgccatgccgaaagccaaatccgacgccaaagccgccgatagccggttgaagcgcaagggcgctggtgctggaaggaagcaatcgaagaaagctgctaaggatcctaacaagccaaagagacctccaagcgctttcttcgttttcatgttcgagttcagagagcagtttaagaaggagcatcctaacaacaaatccgtccctgttgtcggtaaagctggtggtgacaaatggaaatcgctgtctgatgctgaaaaggcccccttcgttgccacggccgaaaagaagaaaca

SEQ ID NO: 238583 - DNA, 385 bp, Glycine max
gggctgatatttcctgataagtggacatacgcttaaacagagaaactaacacagatttgcatgcatggggaaaataacgcacattgtagtaattcccagtgcagggtatagccacttcgttcccgttatccacttctcaaagagacttgttgagcttcacccagaaattcacgtcacatgcatcattcccattctggggtctctcacaagtgctgcataacccattctccaaacccttccacaaaacatcaacacggttttccttccaccggtgaaccctaatgacctaccacaaggtgttcccgtagttgtccaaattcagctagcaatggatcactccatgcgctccatctaccacaccctcaagtccataacttcaaagact

SEQ ID NO: 238584 - DNA, 409 bp, Glycine max
gatccttcgtccagctagcaccacattcacctgaggcttccaaagcaatggcatcccttgcagcatccactgctgctgcttcccttggcatgtcagaaatgcttggaaaccccatcaacttcagtggtgccacaaggccagctccatctgcttctagtcctgcctccttcaagactgtggctcttttctccaaaaagaatgctacaccaatacctccaaaaaaagctgctgctgctgctcctgccaatgatgagcttgccaagtggtatggtcctgacagaaggatcttcttgcctgagggtctcttggaccgatccgaaatcccagagtacttgaccggagaagtccctggagactatggttatgacccatttggtcttagcaagaagccagacgactttgccaaata

SEQ ID NO: 238585 - DNA, 235 bp, Glycine max
agatgacgatgatgacgaagatgatgaggaagaaagcaagactaataagaagtcatcagcacctaagaagagtggaagagcacagcttggtgatggccatcagggtgagcgacctccagagtgcaagcagcagtagatgcagaaggtcatttatgtacttgttgagttttgttggtgttcgagaatgtttgatgtgaaagtgggtttcatgttttaatgcttcgtaagttgattt

SEQ ID NO: 238586 - DNA, 421 bp, Glycine max
ggacttcaattgcaatcagattagttcattctctttgcgcagttccctacctctcctttcaagatgcagatcttcgtcaagaccctcaccggaaagaccatcacccttgaggtggaaagctctgacaccatcgacaacgtcaaggccaagatccaggacaaggaacgaattctcccggatcagcaacgtctcatcttcgccggaaagcagctcgaggacggccgtaccctcgccgactacaacatccagaaggagtcaacccttcaccttgtccttcgtctccgtggtggcatgcagatcttcgtcaagactctcactggcaaaaccataaccctagaggtcgaaagctctgacaccattgacaacgtcaaggccaagatccaggacaaggagggaatccccccagaccagcaacgtctca

SEQ ID NO: 238587 - DNA, 363 bp, Glycine max
aatcaatcaatcaatttaatggcaatttttcctaatcccctcctccccccccaatccgaaacacaaaggaaaattattagaaattaaggctggttattcaaaagcttcaactccttggattccttttcctctccttggcttctctgtaactaaggaaattttggttggaggtaagactgatgcatggaaggtttcagcctctgaatcagattcactcaaccaatgggcagaaaagtctcgtttccaagttggagactatcttgtttggaaatatgatggtggaaaagactcactgttgcaagtgagcaaagagaactatgtgaattgcagcatctcaaaccccataaaggagttcaatgatga

SEQ ID NO: 238588 - DNA, 361 bp, Glycine max
gattcactcactcacgtcactgtcattttttcttatgctcttcctctcacactactctgagagacacacgaaaattataataaattatggctggttattcaaaagcttcagctctttggatacattttcttctctttggcttctctgtagctaatgaaattttggttggatgtaacactgatgcatggaatgtttcagcctctgaatcagattcactcaatcaatgggcagaaaagtctcgtttccaagttggagactatcttgtttgaaaatattatggtggaaaagactcagtgttgcaagtgagcagagagaactatgtgaattgcagcatctcaaaccccataaaggactacaatga

SEQ ID NO: 238589 - DNA, 459 bp, Glycine max
  unsure (1)..(459): unsure at all n locations
ttcaagggtcaaccaacccttcgttaaggttgcaaaagaagaacagaaggatacggttgcaaaaaaacaacagaagggaatcaatccatacattaaaaacaacctttggcttctttgtaaacatggaaataaggaaatcaggtggcttcttcttcttgctcctcctcccttgtctttgcttcccaggtggtggtgcagacggagggaagagtgtgtgagtcacaaagccacgggttccatggtttgtgtaatagagaacacaactgtgctttggtctgcaagaacgaaagtttctccngtggcaagtgcaaaggcttccgccgccgctgcttttgcaccaggatttgttgagatctcatcanacactactcttgccatgcaaattaataaatcatagctaggccacataaattgcatctactctttatccatttgggagctagcctacacaaacaactc

SEQ ID NO: 238590 - DNA, 392 bp, Glycine max
gacagcagtgcactcttcgcaacacggcacagctggacaacccagagagcgcgtcataataaacgctcttctctgaaaacccccatttcttttcatctttcttcttctctttcgcttcttcgatcttcgatcttcgtcgctgacactgagagattgcatttcaattcacatcggataggccgggattcacgttggaaacgcctgctgggagctttactgcctcgatcactgtattcagtctgatgggcaaatgccatgtgataagaccgttggtggacgtgatgatgctttcaacattctcttcagtgaaactggggcaagaaagcacgtgccatgtgcgatttttgtagatcctgagcctactgtgattgatgacgttacgactgggagat

SEQ ID NO: 238591 - DNA, 391 bp, Glycine max
gcaattggcaagtgataataatagcaaactaattatacgtttcttttcttccccgtctcaactcaattccattctcttctctgagtctcaacctaattccccattcatccatctttacgtgtttgttggattccatggccaaaagctccttcaagcttgaacatcccttggaaagaagacaggctgagtctgctcgcattagagacaagtatcctgatagaatacctgtgattgttgagaaagcggaaagaagtgacatcccagacatcgataagaagaagtaccttgtcccagcggatttgactgttggtcagtttgtttatgttgtccgtaaaaggattaaggtcagtgcggagaacgctatttttgtttttatctacaacactctacc

SEQ ID NO: 238592 - DNA, 396 bp, Glycine max
gatccaactctctaaacaacacattaacctttctcattccccatctcctcaccttattcagccactgctaatttctagggttccgaaatggacgctggcggaaagatcaagaagggcgccggaggaagaaagggcggcggccctaagaagaagccggtttcaaggtccgtcaaggccggtctccaattccccgtcggaagaattggccgttatttgaagaaaggaaggtacgcccagcgtgtcggtaccggtgctcccgtttacttggccgcagttctcgagtacctagctgctgaggtgcttgagttggctgggaatgctgcacgtgacaacaagaagaacaggattattccgagacatgtgctattggctgtgaggaacgatgacgaattgggg

SEQ ID NO: 238593 - DNA, 263 bp, Glycine max
gaagactgtctctaaggaggaagcgtctgccatcaaggctgctgggaaagcatggtatcacactatggtgtcagattctgattatacggaattcgacaacttttctaagtggttgggtgtttcacagtaaacttcatgatttattttttcgtattagaattttgttttttatgctcatcagaactaaatatccttatctttggtttttttgttttgcgggttaaggttgtcatcataattatgcagacaatgtggaaattttg

SEQ ID NO: 238594 - DNA, 355 bp, Glycine max
ggctcgctctctagggtttttctttttctcttctcactgcatcgcttcaggttcttctgaaaagatgtctcgcgtgtatgttggtaacttggattcacgagtcactgagagagatctcgaagacgaattccgcgttttcggagttattcggagtgtttgggttgcacgtagaccacctggttatgcttttattgactttgatgaccgcagagacgcacaggatgctatccgtgaattggatggcaagaatggttggagggttgaactttcccacaactctagaagtggaagttgtggtcgtggtggtcgctctggtggttctgaattgaaatgttacgaatgtggtgaacctggt

SEQ ID NO: 238595 - DNA, 407 bp, Glycine max
gagggtttacaccgaggagacacaccttcagcagcagcagccatggttctcaaaaccgaactatgccgattcagcggtgccaagatctacccagggaaaggcatcagatttgttcgtggtgattctcaggttttcctgtttgctaactcgaaatgtaagaggtatttccacaacaggttgaagccatcaaagctcacctggactgcaatgtacagaaagcaacacaagaaggacattgctcaagaagctgtgaagaaaagaagacgtgctgccgaaaagccttactccaggtccattgtcggtgccactttggaagttatccagaaaaagagagctgagaagccagaagttcgagatgcaaatagggaagcagcccttcgtgaaattaaggagaggaacaagaaaac

SEQ ID NO: 238596 - DNA, 375 bp, Glycine max
ggttgttggcttgtgctctgctcgtgcctctagggttatcatatctccattgcgattctcctcgctctcagtttccatgaatctgaagctaagggaaagtctcatccaaccgtgagcgctgattaccataaggccgtgtagaatgcgaagaagaagctcagaagcttcatggcggagaagagatgcgctcctctaatgcacagtttggcatcgcactctgctggaacttacgacatgagcgcaaagatcggtggtcccatcagaaccataaagtaactctccaaagtcactcacggtgctaacaaccgtcttgacatccctgtgaggcgtttggacccactctaagcggagtatctgacattgagctacgccgat

SEQ ID NO: 238597 - DNA, 383 bp, Glycine max
ggtagttccaccgagtagcaacaatgtcgaagcgaggtcgcggaggatcggcagggaacaagttccgcatgtcactgggtctgccggtggcggcgacggtgaactgcgccgacaacaccggcgcgaagaatctctacatcatatcagtgaaggggatcaagggaaggctgaaccggttgccgtcagcttgcgtgggtgacatggttatggccaccgtcaagaagggaaagcctgatctccgtaaaaaggtgctccccgccgtcatcgtccgtcagcgcaagccgtggcgccgaaaggacggtgtttacatgtacttcgaagataatgctggggtcatagtgaatcccaagggtgaaatgaaaggttctgctatcactggtcct

SEQ ID NO: 238598 - DNA, 418 bp, Glycine max
  unsure (1)..(418): unsure at all n locations
gactcactcatacaatagagaccagcttttgcttctttgtgaacatggagatgaggaaatcatgtggcttcttcttcttgctcctcctccttgtctttgcttcccaggtggtggtgcagacggagggaagagtgtgtgagtcacaaagccacgggttccatggtttgtgtaatagagaccacaactgtgctttggtctgcangaacgaaggtttctccggtggcaggtgcaaaggcttccgccgccgctgcttttgcaccagaatttgttgaaatctcatcaaaaactattcttgcaatgcaaattattaaatcatagctaggccaaataaattgcatctactctttatccatttggaagctagctaccacaaccaactcatacttggtcattggattgcttccctttggcttctgcc

SEQ ID NO: 238599 - DNA, 215 bp, Glycine max
gtttcaactgagtgttaatttccctgtctctttgttgaaaaagaactggcaaaatgtcaggtgcctgtatctgaagagtacaatggggaaatcttaccgtgtcttttgaggaattttttttaatccggtgaatttgtgatcgcgcttgatacattgattatcctaatagctagatacagactatcatcttgttacaattttgttggctggatttt

SEQ ID NO: 238600 - DNA, 391 bp, Glycine max
ggtccacccgttcgttagatctaacaacgacgtatcccctttctccttctaacgagtgaggaaaaatggcgcgtaagaagatcagagagtatgacacatagaggttgttgaaggagcactttaagagactctctggcaaggagttgccgatcaagtctgcacaaattagcgcatcaactgatttcactgagctacacgagaaggaagtctgactttcatcttctaaattggttgttaaacctgacatgtgatttggaaaacgtggcaaaaatggtttggttgccctgaatttggcatttgcacaagttgatacatctgtgaaggagcgtcttggaacagacgttgagatgagtggatgcaaaggatccatactaactgtcactgttgaacc

SEQ ID NO: 238601 - DNA, 297 bp, Glycine max
ggcgctaacagcaactaacgtgcaagttccatggcggagagaacaataatggccaccaacgacgagagggatatggagaacagcaagagtgaggaagaactgaagcatcacgggtttgtgaagattgccgcaatcaaagccttactgtgtgtgtcgaatctcaacggtttccaaaagcaaaccccggaacttttgaattcggcggttggaaccttgaacaatactgtacccaccgtcctgggtcccttctaccacaaattcaacgcggtccccaaccacatcctcctttttgtcaac

SEQ ID NO: 238602 - DNA, 390 bp, Glycine max
gacaaattcacacattttttgttgcattatcacaaacacctcgtccctcacaatgcagctagcaatggcggccaacgctgtcgtttcaccgtcgccgttccgacctcagccctttctccggtcatccttctccggcgtctccgtcaagctcactccctaatccataacgctttcacactccaggcatctcaccgtcgtcgccgccaccaagaaggccgtcgccgtcctcaacgggacctccgccgtcgaaggcgtcgccactctcatccaagaagacgatggcccgacgacagtttctgttcgcatcactggccttactccggggcttcatggttttcacctacatgagtatggtgatacgacaaatgggtgtatgtctacgggagcaca

SEQ ID NO: 238603 - DNA, 260 bp, Glycine max
gaaacttatttactttatctcttaattagtatcatgtttttacttcttcttcttcgtcttcttgttttaatttcgaacatttacgtgagtgttccttgcactagcttgttcacgactgtcactgtgagatgtggtcattgcacctatcttctctcagtcaatatgcctggactgcttctccttagtgccaatcagcttcaccttggccacatcttcttcactcctcaaaatcttctggaggagattcgtaatgcactttc

SEQ ID NO: 238604 - DNA, 406 bp, Glycine max
ggcgaaacactcccctttgccgctgttgttgttgctgcaccaccgaacaacttccccggtaaacccgtttccgttggtccaaggtttaaaagattgctgatgctgaagacattcaacctcctgttgttgataatggaactggaatggtcaacgctggttttgcaggtgatgatgctcctaaggccgtgttccccagcattattgggagaccacgccatactggtgtaatggttgggatgggtcagaaggatgcttacgtgggtgatgaagcccaatcaaaaaggggtatactcaccttgaagtatcctatagagcatggcatactcagcaactgggacgatatggagaagatttggcatcacacattttacaatgagctacgtgttgcccctgaagaacacccgta

SEQ ID NO: 238605 - DNA, 306 bp, Glycine max
aggggtttaaagataaaaaaaaaaaaaaaaacacaaaaaaaaaaaaccggcggcccaaaaggttcaaacctaacttagccttgaaggcaacttaaaacccctccaaaagggccaccaaaatcaaattaacgggcggtcgtttaaaaaggtcttaacgggaaaaaccctgccgtaaccaaactaaaccgccttgaagaaaatcccccttccgcaaccggccgtaaaaccaaaaaggcccgaacgattagcccttccaaaaatttgcgcaccttgaatggcaattgagacccgccctgtaacggggca

SEQ ID NO: 238606 - DNA, 319 bp, Glycine max
gataacacagactcacacaaagagttacaagagaaatcatcatgggatcatcaccaactatgtatgcgtagttacctattgttgcaacttccaacatctactcaagggtggtcatgtttaacatcaataacaatacttctaggtttgttgtacaggcatcagattagcctgcagcagctgcatccgcctgcgccacatccccatttgaagctgaagcttaatcacaaccacgacctattggcatcaccataggtgctaatgtgaagattcatatgaaagaatcatactggtacaaacgcaccggttcagtggttgctgt

SEQ ID NO: 238607 - DNA, 431 bp, Glycine max
gaaccaaaaacaatggccacttgttcactcatttccacactcttcccttctccttcttcttcttctttttcactctctcgttcttcctcaaacaccaccaaaccaaccaccattcacctctccaaatccctccatctccaaactcccatcctcttcctccttcgccccccaaacccaaaaccgacacttccaataatacccctcttccccaaactcaccattcccaactcccttctccttctctgcacctccctcgctctctccttcactctcctcctctcccccgccgactccgccgccgcctttgttgtcacctccccaaggaagctccagtccgatgaactcgccaccgtccgcctcttccaagagaacactccctccgttgtccacataaacaaccttgctgtcaagcaagatgcgtttacattgga

SEQ ID NO: 238608 - DNA, 407 bp, Glycine max
gattacacgggatttacatcaccgtccgcactttccttcccccctacacaaaacatggctttgcccaatcagcacaccgtcgattaccccaacttcaagcttgtcatcctcggcgacggtggcacaggaaagacaagcttcgtgaacaggcatctcactggtgacatcgagaagaactatgaaccgaccattggtgtggatgttcatccgttggattttttcacgaactgtggaaagagtcgcttcgattgttgcgatactgctgagcaagacaagtttggtggcctcagagatcgctattatagccatgggcactgtgcgattagcatgtttgatgtgactgcccgtctaacatatacaactgtcactacctgtcaccgtgatcattgccgggtctgtgaaaacat

SEQ ID NO: 238609 - DNA, 373 bp, Glycine max
  unsure (1)..(373): unsure at all n locations
gacacaccgtttgttctattcttaactcaacttctgctacccactctcttcttccaagtccaaccacgcttttctctacagtcatgggcaaggtcaagatcggaatcaacggatttggaagaattggccgtttggttgccagagtcgctctgcaaagagacgatgtggagctcgttgccgttaacgaccctttcattaccaccgattacatgacatacatgtttaaatacgacagtgttcacggacactggaagcatcacgatgtcaccgttaaggacgagaagaccttctcttcggtgacaagccagtcactngtttttggacacaggaaaccttaaagagattccatgggggtcaactggagctgatatca

SEQ ID NO: 238610 - DNA, 409 bp, Glycine max
agaggggcacatgaagcacgctgaaagtgaagaagaaacaaaaagattattgcatttgcaggaacaggaaccaccccacaagcttttactggaatcagtttctgagggagaaggatccaaagtctcttctgttgtcgggggttgtaaacaggaagatatcagttcagccaggagtgatattttggattcagatagtccacattacaccgatggagttaactccgcactgctagagcatggtgattcttcttatgtgtttgagcatgatcaatcggatatgtcacaagatgaagaagataacctcagcaaaagtctctacccttcgtacctctttcccaaacttgaggaagatgtggattactccgacccgcctgaaagttcttgtaaatttggattttctgaggaagat

SEQ ID NO: 238611 - DNA, 326 bp, Glycine max
gagggttttgcgctgttgttgctgctcatcctccgtaacctccgagctctgcaccgaagaacgatgccatggggaagacacactggaatgggatctgctcgcaagctcaagtctcagcgcaggacgtaaaggtgggctgacaagtcatacacgagatcacatcttggacatgaatggaagaaaccttttgctggttcatcccatgccaacggaattgtccttgaacagataggtattgaggctaaacagcccaactctgccattcgtaagtgtgccacggttcaacttatccggaatgggaagaagattgccgcctttgtccctaa

SEQ ID NO: 238612 - DNA, 350 bp, Glycine max
gtcatcacaatctcattcgttaacacatcaatttctatctctcttatactctcactactctctttgctctttcttttctccactatggctgcacaagaaaacaacttccaagactacttgcctgtgatggccaacaagcttggtggggatggcctaattgatgaactgtgcaatgggttcgatcttttgaaggattctgataaaagggtcatcacttttgagagcctcaagaggaattcttacttgcttggtcttcaaggtctcagtgatgaggatcatcgctccatggttttggaaggtgactttgatggtgacggtgcactcaaccagatggagttatgtgtcctgat

SEQ ID NO: 238613 - DNA, 316 bp, Glycine max
gatacaactactctattctaccacatctgagtctctgtccgaagccacttgagagaaaatggcggtgcctctgctctcaaagaagatcgtgaagaagagggtaaagaagttcaagaggcctcagagtgacaggaaaatttccgtcaagactaactggcgcagaccaaagggtatcgattctcgtgttaggagaaagttcaagggatgcactttgatgccaaacattggttatggttcagacaagaagacccgccactatctccctaatggtttcaagaaatttgttgttcacaatgtgaaggatttggaactgctc

SEQ ID NO: 238614 - DNA, 407 bp, Glycine max
ggctgtgagtgagacaccgatagatagagagcgcggcataacctaaacctatctttcttctctctctgtgtgtgcgcttcaacggcaaccagaagcagccatggccactgcaaggactgtgaaggatgtttcacctcatgagttcgttaaggcgtactcctctcacctcaagcgatccggcaagatggagctgccagagtggactgatattgtgaaaactgcaagatttaaggagttggctccttatgatcctgactggtactatgtcagagctgcttccatggcaagaaagatctacttgagaggaggacttggtgttggtgcctttcagaggatttatggtgggagcaagaggaattgtagtccccctcctcatttttgcaagagcagtgggtgcattgctcgtc

SEQ ID NO: 238615 - DNA, 386 bp, Glycine max
acgcgaccgacagctgctagagactacagaaagggattccacacactataagactcctcaatcatccatagacatggacaccgtcacttctgcagcagtttctattccctcattcactggcctcaaggcaagcgcaagcaaagtgagtgccgccgcagttaaagtctcagctccccaagccacaatgttctgcggcatcaaggcttccctcaaagacgttggagtcgctgttgtggccactgctgcgagcgcagttctagctagcaacgccatggccattgaagtgttactgggcactgatgacgggtctctggttttctctcccaactctttctccatggcccctggggaaaagatcgtgttcaagaacaacgcaggtttcccca

SEQ ID NO: 238616 - DNA, 300 bp, Glycine max
gactcaccacttcaaaacactcataacacaaagcacaaagcaaagctcatccttgagttaaaaaatggcagcagcttcttccatggctctctcatccccatccttggctggcaaggccgtgaagctgggcccatcagccccagaagtgggaagggtgagcatgaggaagaccgtcaccaagcaagtctcctcaggaagcccatggtacggcccagagcgaatcaagtacttgggcccattctctggcgagccaccgtcgtacctaaccggtgagttcccaggcgactacggctgggacac

SEQ ID NO: 238617 - DNA, 332 bp, Glycine max
gtctcttcctacttgaagaaagtaggatacaaccctgacaagattccttttgttcctatctctggttttgagggagacaacatgattgagaggtccacaaaccttgactggtacaagggtccaactctgcttgatgcacttgaccagattagtgagcccaagaggccctctgacaagcccctcaggcttccccttcaggatgtgtacaagattggaggtattggaactgtgccagtgggacgtgttgagaccggtgtcttgaagcctggaatggtggtgacttttgcaccaactggactgacaactgaactcaagtctgtggagatgcacca

SEQ ID NO: 238618 - DNA, 411 bp, Glycine max
  unsure (1)..(411): unsure at all n locations
gatccaaattcaagttcgcaccaaattttcctcccaaaatgtcaggccgtggaaaaggtgggaagggtttgggaaagggaggagctaagaggcacagaaaggttcttcgtgacaacattcaaggaatcacgaaacctgcgattcgtaggttagcgagaagaggtggcgtgaagaggatcagtggtttgatttacgaggaaaccagaggagttctgaagatattcttggagaacgtgattcgcgatgctgtaacctacactgagcacgctaggaggaaaactgttactgctatggatgtcgtttatgctctcaagagacanggaagggacctctatggctttggaggctaaagaatagaatctttaggtttaatgactgtgttgcangataaaacattgggtcttttgaatt

SEQ ID NO: 238619 - DNA, 412 bp, Glycine max
ggccgaaaagtagtaccaagatggcttcagttgtgtatctcctcgttggcttccatctcattgtgatcatgtcaagttccttacccgcaactagtgaagtgtttgcaaaacagtatccatccacagaacccgtggaagaaaaactcagccaactccacttcgatttccataacagcataacgggggaacacccaactgctatgaaaactgttttgcctcctaaggggtccattcatggttttggggctacttacatgatggatgaccctctaactgaaggaccaagtccaacttcaaagcttgtgggaagatctcagggaatatacgctttggcttcacaacatgagcctgggttgctcatggtgacaaaatttctcttcactttgggcatttacaatggcagcaacctcag

SEQ ID NO: 238620 - DNA, 335 bp, Glycine max
gaaggtttacaccgaggagacacaccttcagcagcagcagccatggttctcaaaaccgaactatgccgattcagcggtgccaagatctacccatggaaaggcatcagatttgttcgtggtgattctcacgttttcctgtttgctaactcgaactatttgacgtatttccacaacaggttgaagccatcaaagctcacctggactgcaatgtacagaaagcagcacaagaaggacattgctcaagaagctgtgaagaaaagaagacgtgctgccaaaaagccttactccaggtccattgtccgtgccactttggaaattatccagaaaaagacagc

SEQ ID NO: 238621 - DNA, 203 bp, Glycine max
ggcgaaacagagagtgatttcagtgagtgatcggtgttcacttgatctcatcataatcgtcagcgtcaattgaagaagatgccgatcagaaacatcgccgtcggaaggcctgaagaggcgactcaccccgacacgttgaaggcggctttggctgagttcatctcaaccttcatcttcgtgttcgccggctcaggctccggcat

SEQ ID NO: 238622 - DNA, 536 bp, Glycine max
agtggtgcggtgtgcgcactggtcatcctttcgtagcctccgttcttccaggtgacccaggcgtccgtaaagctgcagaagacgacagaaggggtcggcgagtcgggttgtttgggaatgcagccccaatcgggcggtaaattccgtccaaggctaaatactggcgagagaccgatagcgaacaagtaccgcgagggaaaaaattcaattcaaaaggacgtcaaaaagcggccgctctacaggatccaagcttacgtacgcgtgcatgcgacgtcatagctcttctatagtgtcacctaaattcaattcactggccgtcgttttacaacgtcgtgactgggaaaaccctggcgttacccaacttaatcgccttgcagcacatccccctttcgccagctggcgtaatatcgaagaggcccgcaccgatcgcccttcccaacagttgcgcagcctgaatggccaatgggacgcgccctgtatcggcgcattaagctctgccggtgtggtcgtttaccccaccgtaaccgcgaaccttg

SEQ ID NO: 238623 - DNA, 540 bp, Glycine max
  unsure (1)..(540): unsure at all n locations
ggtgaggtgtgaggaatgtcttccgtgcgtagcctccccattccaggtgacccaggcgtccgtncacngctgcacnagacgacataaagcgtcagcgagtcnggttgtttgggaatgcacccccaatcgggcggtaaattccgtccaaggctaaatactggcgagagaccgatagcgaacaagtaccgcgagggaaaaaaattaaattcaaatggaaatcaaaaagcggccgctctagaggatccaagcttacgtacgcgtgcatgcaacgtcatacctcttctatagtgtcacctaaattcaattcactggccgtcgttttacaacgtcgtgactgggaaaaccctggcgttacccaacttaatcgccttgcagcatatccccctttcgccagctggcgtaatagcgaaaatgcccgcaaccatcgcccttcccaacacttgcgcagcctgaaatgcgaattggactccccctttacggcccattaagccccggcggttttctcgttaaccccaaacgtgaacgcttcaccttccaacg

SEQ ID NO: 238624 - DNA, 417 bp, Glycine max
ggcggcactcgttttcgttctcgtgctggtttatagatctttgcgaaggaggtttacagcgctcaaccaaagatgcagaacgaggaaggacagatcactgagctttacattcctaggaagtgctccgccacaaacagattgattaccgctaaggaccatgcttcggttcagatcaacattgggcatgtggatgagaatggcgtctacaatggccatttctccacttttgccctctgcggattcatccgtgctcagggtgatgctgacagtgctctagaccgcttgtggcagaagaagaaagttgaagttaagcaacagtagacacccatgatagtttgttacttcgttatgtattaatttctactcgtgctagagatatttgaataccatgattgtcattttgagcacaaatgctca

SEQ ID NO: 238625 - DNA, 432 bp, Glycine max
ggagaatagagagctcctccaattagggtttttgtgatctgcagctacgatgggtaagggaacggggagtttcggtaagaggaggaacaagacccacaccctctgtgtgaggtgtggccgccgcagcttccacctccagaagagtcgttgctctgcgtgcgcttaccccgctgcgcgcaccaggaaatataactggagcgtgaaggccattaggagaaagaccaccggaactggaaggatgaggtacttgcgtaacgtgcctcgcagattcaagagcggcttcagagagggtaccgaagctgcacccaggaagagaggagctgctgcctctgcctaagctttgaatgaatgacagcaatttttgctgggtcagtgaattataggagttaatgtttctgtgtttgtgccaaactccttggaacacattttcct

SEQ ID NO: 238626 - DNA, 384 bp, Glycine max
  unsure (1)..(384): unsure at all n locations
gagttgctcttttctccctctccgcatacactctgctcgtanggtttctccacctagagggaaatggctcccaaaccgcctagtacgggtctgtttgttggactgaacaagggtcacgtcgtcaccaagaaggaattgcctccacgcccctcagatcgtaaggggaaaacaagcaagagggtgcactttgtgaggaacctcataagagaggtagccggttttgcaccctatgaaaagcgtataactgagttgctgaaggttgggaaggataaganggcactgaaggttgcaaagagaaagctcggaacacacaaacgcgcanagaagaaacgtgaggaaatgtccagtgttctcaggaagatgagggctggtggtgctggagac

SEQ ID NO: 238627 - DNA, 337 bp, Glycine max
ggtgagttgaaaggatcgtgaaaggggcagtacccgagattccgtgagttgcaaaaatgaagacgattctttccaccgagaccatgaacatcccggacggcgtgagcatcaaagttcatgccaaggtcatcgaagttgagggcccccgcggaaaattggtgcgagacttcaagcatttgaatctcgattttcagctcattactgacgaaaacggtaaaaagaaagctgaaaatcgacgcgtggtttggttctcggaaaacatccgccgcaattcgcaccgccttgagccacgtggagaatcttatcaccggcgtcaccaagggctaccgctacaaaa

SEQ ID NO: 238628 - DNA, 269 bp, Glycine max
cggcgtgatcatcagtgttcatgccagggtcaccgacgttaacggcctccgcggacagctgtgtgcgagacttcctgcacttgaatctcgattttcagctcacttctgacgaattcggtgaaagaccgctgaaaatcgacgcgatgtttggttccctgaaatcatccgccactattcgcaccgccttgagccaggtggcgaatctgatcacaggcgtcacgagaggctagcgctcacaaaatgacgttcgtttatgccaattttcccat

SEQ ID NO: 238629 - DNA, 358 bp, Glycine max
gatccattcctcgcaacaacgcttaacctctctcattccccatttcctcacctccttcaaccgctgctaaattctagggttccgaaatggacgctggcggaaagatcaagaagggcgccggaggtagaaagggcggcggcccaaagaagaagccggtttcaaggtccgtcaaagccggtctccaattccccgtcggaagaattggccgttatttgaagaaaggaaggtacgctcagcgtgtcggtaccggtgctcccgtatacttggctgcagttctcgaatacctagctgccgaggtgcttgagttggctgggaatgccgcacgtgacaacaagaagaacaggattattccaagaca

SEQ ID NO: 238630 - DNA, 370 bp, Glycine max
ggtcaagcctgccgagaaaaccctagttcgcttgcagtcacacaagaggccaatcctattcatagctcgagatgggtgaagaagtgaaggtagttgttccagaatcagtgttgaagaagcgcaagagggaggaggaatgggcgttggccaagaagcaagaactcgatgctgccaagaagaagagagccgagagccgcaaactcatctacaacagagctaagcagtacgctaaggagtacgatcaccaggagaaggaattgattcggttgaaacgcgaggccaagctgaaaggtggtttctatgtggatccagaggctaagctgttgtttattattcgcattcgtggtattaatgccatggaccccaaatc

SEQ ID NO: 238631 - DNA, 271 bp, Glycine max
attcacgggctgacgcacgcgtcaatacggatgcaaaaaaacaacaaaaggggagtctcatatctgactcacatcgtcatccattttgctcctttcaatcaataccaacaccttctttgctctcatgctcatctataccttcaacgtttcatgtctaactttaaccttcactgatttcgtgctccattctgtatgtaaccctcatgacaatggtcgtatacattagaacatgtctgacataaaaccatttattgtaaaaccgaacatccct

SEQ ID NO: 238632 - DNA, 341 bp, Glycine max
gaagccaatcctttgtgtaagtgctcaaccctagtaagccgcaatggtgaagtactcaagggagcctgacaatccaactaagtcttgcaaggctagaggcgccgaccttagggttcattttaagaacacaagggaaactgcctttgcaatcaggaagttgcccttggtcaaggctaaaacgtacttggaagatgttcttgcccacaagcaggcaattccattcagacgtttttgtcgaggtgttggaaggacagcccaggctaagaatagacactctaatggccaaggacggtggcctgtcaagtcagcaaaattcagtcttgatttgctcaaaaatgctg

SEQ ID NO: 238633 - DNA, 247 bp, Glycine max
tcactatcttgattcttttgaatcatgtaaaaaaaaaaaaaaaaaaaaaaaaaaaaaaaaaaaaaaaaaaaaaaaaaaaaaaaaaaaaaaaaaaaaaaaaaaaaaaaaaaaaaaaaaaaaaaaaaaaaaaaaaaaaaaaaaaaaaaaaaaaaaaaaaaaaaaaaaaaaaaaaaaaaaaaaaaaaaaaaaaaaagaggggcaaaaaaaaaaaaaaaagttaaatacgaggtaaagaaaattaaaaact

SEQ ID NO: 238634 - DNA, 434 bp, Glycine max
tgggactctgctgcctcgctctgtttctgtctctgtgtttgcggctgatgattccgaacgatcgaccttcttcgtttctcgcaaagtttaactcatcattggtaacgaaaagactcatatcaacattttcgtcattggacatgtcgactctgggaagtcatctaccactggtcatttgatctacaagcttggaggtattgacaaacgtgtgattgagaggttcgagaaagacgctgctgatatgaacaagaggtcattcaagtatgcctgggtgcttgacaagctcaaggctgatcgcgaaataggaattaccattgatattgctttgtggaagtgtgaaaccaccaagtactactgcacagtcatcgatgcccccggacatcctgaccttatcacgaacatgattactggtacctcccatgctgattgtgctg

SEQ ID NO: 238635 - DNA, 157 bp, Glycine max
gtgattaagctttcgataagagacatagagagaactcaaaggaaaaacatcaaagccttttactattttttcttttgcatcatttgaatcttgattggaagagcttcgaattggggtgttttagccatcaattcaatgttgatgccgtgccttctac

SEQ ID NO: 238636 - DNA, 311 bp, Glycine max
gacatacaacagctgcagagtgaaacgatgccgtgcctcaacctctccaccaacgttaacctagacggcgtcgacacctcctccattctctccgaagccacctcaaccgtcgccagcatcatcggcaaacccgaggcctatgtgatgattgtattgaaaggatcagtgcctatatctcatggtgggagtgagcagccagcagcttatggtgaattggtgtccattggtggtcttagccctgacgtgaacaagaaacttagtgctggcattgcttcaattctcgaaaacaagttgtctgtgccagagtcgcg

SEQ ID NO: 238637 - DNA, 432 bp, Glycine max
gagattatcataaaacacttgaacaaggaacaagatgctgatcaaagcaacttccgtgattcagccacctctgcagagttggaagttcaggagaagatgcccttgcttgagtggtttgccaatgagtacaaaaaatttggatgctccttggaatttgtgaccaacaaatctcaagaggggtcacaattctgcagagggtttggtggcattggtggaattcttcgttaccagcttgacatcagatcatttgatgagttatctgatgatgaagtgtatgaggattctgattaagtgcctggtactgcagaacccttactttgttttggatgattgcgtcctccaagcatgatttggatactattgattatggttctaagacttaaactttgccctttggttttttgatcataagatgtgtagcattcacttttt

SEQ ID NO: 238638 - DNA, 394 bp, Glycine max
ggcagttcaattccaatatattccattctctctgtgtatttccctacctctcccttcaagatgcagatcttcgtcaagaccctcaccggcaagaccatcacccttgaggtggaaagctctgacaccatcgacaacgtcaaggccaagatccaggacaaggaaggaatccccccggaccagcaacgtctcattttcgccggaaagcaacttgaggacggccgtacccttgctgactacaacattcagaaggagagtactcttcacctcgtcctccgtctccgtggtggcatgcagatcttcgttaagacactcaccggcaagaccataaccctagaggttgaaagctccgacaccatcgattacgtcaaggccaagatcaagacaaggagggtat

SEQ ID NO: 238639 - DNA, 299 bp, Glycine max
gtataggcattatttttttcttctaaaaaaataaaattaagaaattttcatggtaaccattcgtgcagatgaaattagtaaaattatccgtgaacgcattgagcaatataatacggaagtaaaaattgtaaatacgggtaccgtacttcaagtaggcgacggtattgctcgtatttatgggcttgatgaagtaatggcgggtgaattagtggaatttgaagagggtactataggcattgctttgaatttggaatccaaaaatgttggtgttgtattaatgggtgatggtttgatgatac

SEQ ID NO: 238640 - DNA, 388 bp, Glycine max
ggaacggaaaagcactggcgcagctaccctgaggcttctcttctcttctcttctctgtcgtgagtcaccatggtgagggttagtgtgttgaacgatgctctgaagagcatgtacaatgctgagaaaaggggaaagcgccaagtcatgattaggccatcctccaaagtcattatcaaattccttttggtgatgcaaaagcacggatacatcggagaatttgagtatgttgatgaccacagggctggtaaaatcgtggttgaattgaacggtagactgaacaagtgtggggttattagtccccgttttgatgtgggcgtcaaagagattgaaggttggactgctaggcttctcccctcaagacagtttgggtatattgtattgactacct

SEQ ID NO: 238641 - DNA, 378 bp, Glycine max
gtctgatagtagattgagcaaacaaaggaacaatgtcgaagaagaacaacctcgccaagagaaagaagcaatacgaattcgatctccaaagagagaaacaagagaagataaagaaagagcagaagctccatgcgaagaagaacaagatgaaagttgatggtagtggcaagaaaaagaaaggtgggagtggatttcaggtggggaagagaaaagtgaagaccaagttgactgcccttgctaaagctaaggctgcccaggcaatggagcttgacaaatgaggttcgacttgtgtaattttagacaatgtgttgaaaattggtagatgacagtgttgttttgaggctcaatatccttgttctgttctgctatatgactatg

SEQ ID NO: 238642 - DNA, 380 bp, Glycine max
ggctgccggtctctgataaatacagatagtgtgggagagagaagagtggaaggtaaagtgacgaccaggttctaagaataacaggaatgaagagaggtcacgtcagcgccggacacggccgtatcggaaagcaccgcaagcatcccggaggtcgctgtaacgccggtggcatgcatcaccaccgtatcctcttcgacaagtaccatcctggtttcttcgggaaggtatgcatgcgctacttccacaaagttcgcaacaaattctacaatccgatcatcaacatcgacaagctgtggtctctcctcacccaggatgccatagacaaggccaccgccgataaagcatccttgctcgatgtcacccagttccgttactttaag

SEQ ID NO: 238643 - DNA, 346 bp, Glycine max
ggcttgctgatcctcatcatgggaaccatttttcctcctcactctctctctccactcctcaacatcaaaccttcaccctcaagaattctcttggctccctctccccaacccaagtcaaattctctcttttgctccaaacccattgtttcaagtctcagaaagaaccaaacttcatctcccataccttcatcgggcacaagctggttggctcatgctcaacagggcctagcagctttggctatctccttggcactcaactttagcccagttttgtttaatggcaatgcattggcatctgagtttgatgtgcttaatgagggtccacccacagattcctatgtgtttg

SEQ ID NO: 238644 - DNA, 306 bp, Glycine max
gacacaaaacatttctagagcgagaaagtgagaggagagagaaagtagctgatcctccatggcctccaccaaggaacgcgaaaactttgtctacaccgccaagctcgccgaacaagccgaacgctatgatgaaatggtggaagcaatgacgaatgtggcgaagctgaacgtggaattgacggtcgaggagcggaaccttctgtcggtagggtacaagaacgtggtgggtgctcgtacggcttcgtggaggattctatcgtcgattgaacagaaagaagaagctaaagggaacgaagtgagtgtgaa

SEQ ID NO: 238645 - DNA, 404 bp, Glycine max
gatcgctctcacacctgtgattattcctcttttaacaatccacacccaaattctagggttccgaaatggacgctggcggaaagatcaagaagggcgccggaggtagaaagggcggcggcccaaagaagaagccggtttcaaggtccgtcaaagccggtctccaattccccgtcggaagaattggccgttatttgaagaaaggaaggtacgctcagcgtgtcggtaccggtgctcccgtatacttggctgcagttctcgaatacctagctgccgaggtgcttgagttggctgggaatgccgcacgtgacaacaagaagaacaggattattccaagacacgtgcttttggcagtgaggaacgatgaagagttggggaaattgcttgctggagtgacaattgcacat

SEQ ID NO: 238646 - DNA, 424 bp, Glycine max
aaggcccccttcattccggatgcaaaaggacaacaaaagggaaaaggctctcccttgcattcccaaaggaaaaccctacctagtattccatttcgtttgagagagaaaaaatggcagacggtctcgttctccgcggaaccatgcgcgcccacaccgacgtcgtgacggcgattgccactcccatcgacaactccgacatgatcgtgacggcgtcgcgcgacaaatccatcattctctggcacctcaccaaggaggacaagacctacggtgtcccccgccgccgcctcaccggacattctcacttcgcccaggacgtcgtcctctcatccgacggtcagttcgccctctccggctcctgggacggcgagctccgcctctgggaactcgcggctggcacctcttcccgccgcttcgttggccacac

SEQ ID NO: 238647 - DNA, 388 bp, Glycine max
aggggaaacacaatcctgaacaactccaaaaaaaggattccccgcggcaccctccgaagacggagatacacccactcactcaccaccactttcccagaaaataaccaccgcctacaatttctcggaatttattttgcgttttggtgcctttgttgttcggattttcaggtgagggagctcgtgtcgtgtgtcgtttagggttaaaaatggggtttaagtgggtgcactgatgtcattgttgtggcttgtgattcgtcaacttgcagaaatcgaggcaatggctgcatctaagaaactgataacaagagaagagtgggagaagaagcttactgatgtgaagattagaaaagaagacatgaataagttggtaatgaatttcctcgtcact

SEQ ID NO: 238648 - DNA, 370 bp, Glycine max
ttcttgagttaattcgttcagtaagtcgactcttgagtaaattcttttttttagtagacttttggtaaactttataaattctaagtaaattcggtagaatttggagtttacaattgagtcaataagttaaaaaaataagacaaaaatataaattattttgggttattttttgtttgtttagtgttaaacataactttatttggtgtgttatttttaaatacaaaaattttcacttttaataacattaaactcttgttctctaataacatcaaatcctccatgagaatcatctatcattattataacatttaaaagttattatccagtgatgcattaatagacttgattatttaagtattgtaaaatttat

SEQ ID NO: 238649 - DNA, 343 bp, Glycine max
ggcaacaacaaagatcaccaacactttgctggtgccattctttctgacctctcttccaaaaacacttcctccacccaccttaaaaaaacagaggacagccatgagtcgcagaaacgaaagtggtccaaagcttgacttgaagctgaacctgtccccaccgagggctgatcggagactggattcgccgacacgatcggcgacggcgtctccgacgtcaccgccgagctcgtgcgtgtcttcggagctgaaccaagaggacaagagttactctaacagccctgaagccacttccatggttcttgtgggttgccctcgctgcctcatgtatgtgacgctctcctga

SEQ ID NO: 238650 - DNA, 326 bp, Glycine max
attgttggcttgtgctctgctcgtgcctctagggttatcatatctccatttccatttcctctctctcagtttccaagaatcttaagctatgggaaagtcttacccaaccgtgagcgctgattaccagaaggccgttgagaaggcgaagaagaagctcagaggcttcatcgctgagaagagatgcgctcctctaatgctccgtttggcatggcactctgctggaacttacgacgtgagctcgaagaccggtggtcccttcggaaccataaagcacccctccgaactcgctcacggcgctagcaacggtcttgacatcgctgttaggc

SEQ ID NO: 238651 - DNA, 399 bp, Glycine max
gatctgcgtatggtttcgggggagtttcttcttggatcttaccctcttgtttgctaatattctcattcttctgtctctgcttcttctccttctgaactaagagatggggttgtctttcaccaagctttttagccggctctttgctaagaaagagatgcgtattctcatggtaggtcttgatgctgctggtaagactaccatcctgtacaagctcaagctgggagaaattgtcacaaccattcccacaattggattcaatgtggagactgtggaatataagaatattagctttactgtatgggatgtgggtggccaagataagatccgtcctttatggagacactacttccaaaacactcaggggcttatctttgttgtggatagcaatgatcgtgaccg

SEQ ID NO: 238652 - DNA, 375 bp, Glycine max
gagggtttacaccgaggagacacaccttcagcagcagcagccatggttctcaaaaccgaactatgccgattcagcggtgccaagatctacccagggaaaggcatcagatttgttcgtggtgattctcaggttttcctgtttgctaactcgaaatgtaagaggtatttccacaacaggttgaagccatcaaagctcacctggactgcaatgtacagaaagcaacacaagaaggacattgctcaagaagctgtgaagaaaagaagacgtgctgccaaaaagccttactccaggtccattgtcggtgccactttggaagttatccagaaaaagagagctgagaagccagaagttcgagatgcacatagggaaactgcc

SEQ ID NO: 238653 - DNA, 364 bp, Glycine max
gcagctgcgaaaacctagtgcaccgtaagggttgtgaagcaggcagagaagagccatggtgcacgtttctttctaccgaaactatgggaaaacgttcaagaagcctcgtcgtccctacgagaaggagcgtttggacgccgagttgaagctggtcggtgagtacgggcttcgctgcaagagggagttatggagggtccagtacgccctgagccgcatccgtaacaacgccagaaacctattgacccttgatgagaagaaccctcgccgtatcttcgaaggtgaagcccttctccgaagaatgttccgttacggactcctcgacgagacacataaccagctgggattatgtggtgggcctcaccgt

SEQ ID NO: 238654 - DNA, 264 bp, Glycine max
ggtcctaaatcctcattccagccacacgcttcagaagacatggcctcattgggtgggttacaaaatgtgagcggcatcaattttcttatcaaagagggtccaaaagtcaatgcaaagttcgagctgaagccgccaccatatccactgaatggtttggagccggtgatgagccagcagacacttgagtttcactgggggaagcaccacaagacttatgtggaaaatctgaaaaaacaagttgtttggacaaaaccttaatggaaa

SEQ ID NO: 238655 - DNA, 355 bp, Glycine max
gcccccgaaaaacccttaaaccccgaccttcatatttgcagtgctagtctgtttatttcgtcagctatgtttttgtcacgaacacttggacgaacactatttgctgcagctgccagatcaaaacaatatgccactacagcagctgctgctactggcacagaaggacacaacccccttcaggagttctttgaggcagacaggagccctgatgatgacaaacctgttgtttatggtcggagttggaatgcgtctgaactgcgtctgaagtcttgggacgaccttcataagttgtggtatgtgttgttaaaggaaaagaacatgttgatgactcaacgtcaaatgcttaatgcacaga

SEQ ID NO: 238656 - DNA, 402 bp, Glycine max
gaagcaggcggcatggcattctcagcggtctggcgactagcgaatcttgggcgacacttggatttgagtgaatcagtgaacaaggctgcgccagttgggtcaatcaagttgaaggtagcttcagaggtttctgaagcattatcactgggtcgtgctgttgttgctcttgaatctaccattatttcgcatgggatgccatatccccaaaatttggaaactgcaaaagaggtggaacgtattgtaagagagaacggtgcagttcctgcaaccattgcaattttagatggcacgccttgtgtaggcctaagtgtagaagaacttgaaaggctagctattttgggaaccagagctcagaagacagctcgaagggacatcgcacatgttgtagcttgcggtggaaat

SEQ ID NO: 238657 - DNA, 364 bp, Glycine max
gatcccatttgaaatcaatatcaacaacaccaaatcctctaattcaagtttgcaccatgttttcctgagaaaatgtctggtcgtcgacacggtggaaatggtttgggaaaaggatgtgccaagaggcacatgaaggttcttcacgacaacattcatggcattacgaaacctgcgattcgtaggtcaccgagaatacgtggcctgaaaaggatcagtgctttgatctacgaggaaaccagaggggttctgaagatattcttggataacgtgattcgcgatgcagtgacctagacctatcacgctaggaggatgacggttactgccatggaatttgtttatgcacccacgacacagggaaggaccc

SEQ ID NO: 238658 - DNA, 379 bp, Glycine max
cattctcaaattatcttggtgacaataaatctgagtgggaggattacgatgccactcgtttagtaacaaagtttcccaatgtttcgtccaccattttgattgatcagggagaagatgacaaatttttgcctgataaactgttgcctcacaagtttgaagaggcttgtaaaaaggccaacgttcccctactgttacgtttccaacctggttatgaccacctttactactttataaccacattcatagatgatcacatccgacatcatgctcaagctcttagacttaattaagttatgtgcactctgattatctataactattttgtcaactcttctaactttactaagctgttcatttgctcgtggtaccatgggttgta

SEQ ID NO: 238659 - DNA, 407 bp, Glycine max
cggtcacgaattaccgggctgacccacgcgtcaggcgagaacacgacagccaggaagagtgtgcttggtgctcccagatcgtcctggaggatcctgtcatccattcaacaccacgcatatactaacgggaactacttgagtgccaaccagcatattgagtacatacggacagttgaattggatctagccatcatctgctgtgatgttatgatagtgattgatgagcaccttatgccttctgctgcaactggtgaatccaccgtcttttactatcacatcatacgacattattatcgttatcttgctaaatttcagtcaagccctgacaccaacgaagctgctgatcagtctactatagcatctgagtctgctaccgctgcattcacaagctgatttacctcccacac

SEQ ID NO: 238660 - DNA, 223 bp, Glycine max
ggtgtgtttctcagagaatcgctcttcttccatcctttcctctcctctctccgcatttcccaagagcagatattagaagatggcagacgctgaggatattcaaccccttgtttgcgacaatggaacaggaatggttaaggcaggatttgcaggagatgatgccccacgtgctgtgtttcctaccattgttggtcgtcctcgtcacactggtgtgatggttggt

SEQ ID NO: 238661 - DNA, 370 bp, Glycine max
gactcaccacttcaaaacactcataacacagagcacaaagcaaagctcatccttgagttaaaaaatggcagcagcttcttccatggctctctcatccccatccttggctggcaaggccgtgaagctgggcccatcagccccagaagtgggaagggtgagcatgaggaagaccgtcaccaagcaggtctcctcaggaagcccatggtacggcccagaccgagtcaagtacttgggcccattctctggcgagcccccgtcctacctaaccggtgagttcccaggcgactacggctgggacactgctgggctttccgcagacccagaaaccttcgccaagaaccgtgaactcgaagtgatccactccaggtgg

SEQ ID NO: 238662 - DNA, 348 bp, Glycine max
ggcgcattgaacgaaaattagggtttgtagtgtagcaggaagaagcagcaatggcgccgaagataacacgtaaggttagcagaaaccctgaattgataaggggaatcggaaagtactcgaggtcgcagatgtaccacaagaggggcatttgggctatcaaggccaaaaacggtggcgttttacctcgccacgaccctaaacccaagcctgaagctcctgctgaaaaaccacccaaattttaccctgctgatgatatcaagaagccccttgtcaacaagcacaaacccaaacccgctaagctcagggctagcattactccgggaacagtgttgattcctcttgctggta

SEQ ID NO: 238663 - DNA, 203 bp, Glycine max
ggcatctcagctagaatgtcaacaggagtgagccaccataggaaggactacgtcaactctcgtctagcccccctcatcgacttggccgagattcagctctggtccttcgtcagagccctcatcctcgagtttaactccacactcctcttcctctacatcatcgttgccaccgtcattggccacaaaaaacagaccggaccatg

SEQ ID NO: 238664 - DNA, 343 bp, Glycine max
gactcactcatacaatagagaccagcttttgcttctttgtgaacatggagatgaggaaatcatgtggcttcttcttcttgctcctcctccttgtctttgcttcccaggtggtggtgcaggcggagggaagagtgtgtgagtcgcaaagccacgggttccatggtttgtgtaatagagaccacaactgtgctttggtctgcaggaacgaaggtttctccggtggcaggtgcaaaggcttccgccgccgctgcttttgcaccaggatttgttgagatctcatcaaacactactcttgccatgcaaattaataaatcatagctaagccaaataaattgcatctact

SEQ ID NO: 238665 - DNA, 395 bp, Glycine max
gatgccgaaaagtagtaccaagatggcttcagttgtgtatctcctctttggcttccatctcattgttatcatgtcaagttccttacccgcaactagtgaagtgtttgcaaaacagtatccatccacagaacccgtggaagaaaaactcacccaactccacttctatttccataacaacataacgggggaacacccaactgctatgaaaactgttttgcctcctaaggggtccattcatggttttggggctacttacatgatggatgaccctctaactgaaggaccaagtccaacttcaaagcttgtgggaagatctcacggaatatacgctttggcttcacaacatgagcctgggttgctcatggtgacaaattttctcttcactttgggcattt

SEQ ID NO: 238666 - DNA, 335 bp, Glycine max
cgggacctaaaaattgtaccgatatggcttcacttgtgtgtctccttttttccttgcatttcatggttatcatgtcaggttccttaccagcaaatagtgaagtgtttacaaaagagtctcctatgtctctatccacaaaacccgtggaaagactcacccaactccacttttatttccataacaacaaaatgggggaacacccgactgctatgaaaattgttgagcctcctaaggcgtccatttctggttttgggactatttacatgatggatgaacctctaaccgaaggaacaagtccaacttcaaagcttgttggaagatgtcagggaatgtat

SEQ ID NO: 238667 - DNA, 261 bp, Glycine max
aatgaaaataaaatcagtgcggagactctgaaccgtattgaagatcactttactgttctaaatttaaggtgtattgaacgtctatatggtgatcatggtctggacgttatagacatcttgcgtaaaaacccaacccatgccctgcctgtaatattgactcgactgaagcagaagcaagaggagtggactaagtgtcgttcagatttcaataaagtatgggctgagatttatgctaaaaatcactacaaatcacttgatcat

SEQ ID NO: 238668 - DNA, 372 bp, Glycine max
gggaatcggaagaagataatgtcggaggcggaggagctaccccggtctattgtgcgccgcgtagtgaaggataagctgtcgcgttgctccgaagacagagaaatttccgtcagcaaagacgctcttctcgcagtctccgaaagcggtacgatcttcatccactacctttccgcaacggataatgatatatgtaaggagtctagtatgcagattatcaatgttgaggatgttgtcaaagctcttgaggaaactgagttccctgagtttcttcgtcctctgaaagcttcccttgaagactttaggaagaagaatgctggaaagaaagctgcagtgttcaaaggaaaggatgatgagccgagaatgaaaaggaaa

SEQ ID NO: 238669 - DNA, 355 bp, Glycine max
gacctcacccagttgcagaaagaaaagaccatcaaagtttcacttcagccttatccggtttagggtttcggtttttgacccaacctttgacgtatcgaaaccttaagtttcggatcaggtctgagcaatctggttggtagaacctttggtcttagagagtcaagttttatgtctgaattagacgatcaaattcctactgccttcgatccttttgctgatgcaaatgctgatgactcgggtgctgggtcaaaggagtatgtgcatattcgcgtacagcagcgaaatggaaggaaaagcctgacaaccgttcagggattgaaaaaagaattcagctattacaagatacttaaagatg

SEQ ID NO: 238670 - DNA, 395 bp, Glycine max
gattcccaaagtttctcattctccctttcctctccgaaccctcgatcactctcacgcgctcctatattcgctcctccaccgtcgctctctcgaacaaccacaacaccatcttcatcacatggcaaacgcagcatctggtatggcagtccatgatgactgcaagttgaggtttttggagctgaaggcaaaaaggacacaccgtttcatagtttttaagattgaggagcagcagaagcaggtcattgtggagaagcttggtgagcctgcccagggctatgaagatttcactgccagccttcctgctgacgagtgccgttatgctgtttatgattttgagtatctgactgaagggaatgtccctaaaagcagaatttttttcattgcgtggtcccctg

SEQ ID NO: 238671 - DNA, 306 bp, Glycine max
gagcaaaaccctaatccctatttttcttcctcagtagtgtcatttacgcttctcttctctgcagcagctatgcctaaccctaaggtcttcttcgacatgaccatcggcggtcaatctgctggccgcatcgtgatggagctctacgccgacgtcactccccgcatcgccgagaacttccgcgcgctttgcaccggcgagaagggcgtagggcggagcgggaagcccttcgactacaagggctcgtcctttcagcgcgtgatcccgagtttcatgtgtcagggtggcgacttcaccgccgggaacgga

SEQ ID NO: 238672 - DNA, 402 bp, Glycine max
ggcatttcaacattgtatcaatttgagcctcaaccatttaaagttgtatcaaaacaagttgtttactacaagggtcatcaagtgcacaatctcaatgaattggaatacataaatggtgaagtttgggccaatgttttgccgactgactgcattgtaagaatctctccccatgatggaagggttcttggatggattctcctccaaaatttgaggaaagaacttgtggaagctggggagattagtgatcgtgatattttgaatgggatagcatgggatggtgagcagaatcgtatttttgtgactggaaaacaatggccaaagctgtatgaaatcaaggtttcacctataaagaaaccaattgaagaagggatcatcgagcaactttgcttgtatgagcctttg

SEQ ID NO: 238673 - DNA, 353 bp, Glycine max
gagacataccactatgcattcatttagattcatcacaagcttagaagaacaattaaacatgagtgcagccagcagagcttggattgtggcatcaagcattggggcagtggaggcattgaaggatcaattgggggtgtgcacgtgggaccatgcagtgaggtcactgcagcagcatgccaagagcaacatgagatcctacactcaggccataaccttgtcatctgctacatccgctggagtctccagttcggtcaagaggaccagggaggactccataaggaaagtcatggccttgagctgttggggtcccaatacgtcaaggtttgagtgtgtggaccattccaattgcattc

SEQ ID NO: 238674 - DNA, 401 bp, Glycine max
  unsure (1)..(401): unsure at all n locations
gcgtcagcccacacgtccgacaggctgcgaagaggacgacnagacgagggtattcatatcatgtccattgtcattctataacataataacaacaaacaaaacaccattcaaacaataagaacttggaccgtcgtggataacatcggagcttcacaagcattgacggatcgaatgaaggtgtcccagtcgcaacatgcattgaggtcactgcagcagcatgccaggcgcactataagatccaaccctcaggacacgtgcatgccatctgctacctctgctacagtctcacctacagtcaataagaggaccgtggagtacaacatgatgatcgggaaaatcctctgtttacgtaacataatctcacttgcatcacagtgccctttcgccaacttgcgtacaac

SEQ ID NO: 238675 - DNA, 342 bp, Glycine max
ggtgtgtagtataagattctcttctttattccttttgtaatttcattcattcttaatctttgtgaaaaataatgttcatcgagaattttaaggttgagtgtcctaatgtgaagtacaccgagactgatattcattccgtgtacaactacgaaaccaccgaacttgttcacgagaacaggaatggcacctagcagtggattgtcagacccaaatctgtcaaatacgaatttagaagcaatatccatgttcgtaaattaggggtaatgcttgtgggttggggtggaaacaacggctcaacgctcaccggtggtgttattgcgaaccgagagggcatttcatggg

SEQ ID NO: 238676 - DNA, 388 bp, Glycine max
gacgcactcatacaatagagaccagcttttgcttctttgtgaacatggagatgaggaaatcatgtggcttcttcttcttgctcctcctccttgtctttgcttcccaggtggtggtgcagacggagggaagagtgtgtgagtcacaaagccacgggttccatggtttgtgtaatagagaccacaactgtgctttggtctgcaggaacgaaggtttctccggtggcaggtgcaaaggcttccgccgccgctgcttttgcaccaggatttgttgagatctcatcaaacactactcttgccatgcaaattaataaatcatagctaggccaaataaattgcatctactctttatccatttgggagctagctaccacaaccaactcatacttgg

SEQ ID NO: 238677 - DNA, 371 bp, Glycine max
ggaagcaagaggttgtattttggcatccccgtggcttcaagaagagaatctcaatggaggcccaggagctgaagcgcgtgttccacatgttcgaccgcaacggcgacgggagaataacgaagaaggagctgaacgactcgctggagaacctgggcatcttcatctctgacaaggacctgagccaaatgatccaaatgatcgacgtcaacggcgacggttgcctggacatggacgagtttggggagctgtatcagaccataatggacgagcgcgacaatgacgaggacatgagggacgccttcaacgtcttcgaccagaacgccgaccgcttcatcaccgtcgacgagttgaggaccgtcttgtcctccctc

SEQ ID NO: 238678 - DNA, 365 bp, Glycine max
gaaacgcatatctctgtcatttgtgtctgctcagtcgctcttctccgctacttctgagatcttttagtcaagtttcatgtctgaccaagagcaccatttcgagtccaaggctcactccggagcctcgaaaaccgactctcaccaagccggtaccatccgcacgaatgggtacctcgtcatcaaaggccgcccctgcaaggttgtggaagtttcgacttccaaaactggaaagcacggtcacgcgtagtgtcactttgttggaattgatattttcactgccaagaaactttaggatattgtgccctcttctcacaactgtgatgttcctcatgtgaatcgtactgattaccagctcattgatattg

SEQ ID NO: 238679 - DNA, 327 bp, Glycine max
ggtgattgtttgttgttgtaactcgttcttcttcttttgttgttctgtgtttgtgtttgttttttctctcacctgaaaatgtcttgctgcggtggtaactgtggttgcggaagctcctgcaagtgcggcaacggctgcggaggctgcaagatgtacccagacttgagctacactgagtcaaccagcaccgagaccttggtcatgggagtggcacctgttaaggctcaatttgagggtgctgaaatgggtgtgcccgctgagaacgatggctgcaaatgtggaccaaactgctcctgcaacccctgcacttgcaagtgaggtgttggg

SEQ ID NO: 238680 - DNA, 398 bp, Glycine max
ggccacggcattctccggccccattgtcaccgtgaaggtgtttgaagacaacgtgttggtgagggagcttgttgagacgaaaggcgaaggaagagtattggttgttgatggaggaggaagcttgaggtgtgcattgatgggagggaatttggtacagattgcatataacatggggtgggctgggattgtggtgaatggttgcgttagagatgtggatgatatcaatgcgtgtaatattggcgtcaaagccttggcttctcatccactcagatccaacaaaaagcgcactggtgaaaagaatgtccctgtttatgttggtggaacatttattcgtgaaggagaatggttgtatgcagataatgatggcatcctcgtatcagaatttgagttgtcaaact

SEQ ID NO: 238681 - DNA, 361 bp, Glycine max
gagcgaaacagagagtggtttcagtgagtgatcggtgttcacgtgatccttcataagtcgtcatcatcatcatcatcatcaccgttgattgaagaagatgccgatcagaaacatcgccatcggaaggcctgaagaggctactcaccccgacacgttgaaggcggggttggctgagttcatctccaccttgatcttcgtgttcgccggttcaggttccggcatcgcctacaacaagctcaccgacaacggcgccgccactctcgccggcctcatctccgcttccatcgcccatgctttcgccctcttcgtcgccgtctccgtcggcgccaacatctccggcggccacgtcaaccccgccgtc

SEQ ID NO: 238682 - DNA, 364 bp, Glycine max
gactgccttcttaaaaccctatctctcaccaacttccgctacttcctactccaaccactttcttttttcccgcagtcatgggcaaggtcaagatcggaatcaacggatttggaagaattggccgtttggtggccagggtggctctgcagagagacgatgttgaactcgttgccgttaacgatcctttcattaccaccgattacatgacatacatgtttaaatacgacagtgttcacgggcactggaagcatcacgatgtcaccgttaaggatgagaagacccttctcttcggtgacaagccagtcactgtttttggacacaggaaccctgaagagatccatggaagtcgactggagctgacatc

SEQ ID NO: 238683 - DNA, 400 bp, Glycine max
ggtgagttgagaggatcgtgagaggggcagtagccgagattccgtgagttgcaaaaatgaagacgattctttccaccgagaccatgaacatcccggacggcgtgagcatcaaagttcatgccaaggtcatcgaagttgagggcccccgcggaaaattggtgcgagacttcaagcatttgaatctcgattttcagctcattactgacgaaaacggtaaaagaaagctgaaaatcgacgcgtggtttggttctcggaaaacatccgccgccattcgcaccgccttgagccacgtggagaatcttatcaccggcgtcaccaagggctaccgctacaaaatgaggttcgtttatgcccattttcgcatcaacgcaagcatcggcaacagcaacaagtctattga

SEQ ID NO: 238684 - DNA, 336 bp, Glycine max
ggaacaacaatgactctctatatgcaactggaaggcccaacctaaaagaaagagcatttaactaaccctaattcgccattgaagcctagacattgtgctttcaccttggctccgctctttggtttgctcaaccgatctccgcagcaatggtgaacgttccgaagacaaagaagacctactgcaagagcaaggagtgcaggaagcacacgctccacaaggtcacccaatacaagaagggcaaggacagcatcgccgctcagggaaaacgccgttatgaccgcaaacagtccggttacggtggccagaccaagcccgttttccacaaaaaggggaaaa

SEQ ID NO: 238685 - DNA, 428 bp, Glycine max
acgcgtctaacataaatcatcttcttgaaaagcttcgcaggtcttcctgggatgctgcagtgcaagatattgaagaccttaaggaattctccaaaagtcagggagcattggaagctggtgatttgactcattgggacattacctattggagtgagaggctacgtgagtcaaaatatgatattaatgaggaagaactgcgtccctttttctctctgccaaaggttatggatggactctttaaccttgcaaaatcactttttggcattgaaattgagccagctgatggtctagctccggtctggaataatgatgtcaggttcttctgtgttaaggattcttctggtagtccaattgcgtatttttattttgatccttatagtcgtcctgctgaaaaaaggcaaggtgcatggatgaatgaagtctttgct

SEQ ID NO: 238686 - DNA, 357 bp, Glycine max
gaccccacgaatttgcaaatctcaaacgaagcccttttctctctctcttcaatttcacccttttagcatttgtacattcctttcccttccttgaatcgttcttaattgcgagaggggatatcggagaagttgattggcctcccattaattgcaggtctgaatgatctgatggagtctaaagttgggaagaagaagtcgtctagtagtaagtcccttttgtacgaagctcctctcgattacaccattgaagacgttcgaccacacggtggaattaagaagttcagatctgctgcttactccaactgcattcgcaagccatcctgagattccctaggttgtgtgacaacatagcccccg

SEQ ID NO: 238687 - DNA, 383 bp, Glycine max
agaacaaggataggctagacaagtctgacctaagattgtccaaggcagtaattcattctaacatggatttgataaagcagctagatagtaaggcagccaagcaaggaaagaaaggtgatacattctcactggttcacccctcacaaccaccttctttgctacagctgaaagatgttgtcttgtcctctgctcttgatctgagacgaacagttccaagacctgtggttgcaccatcaggagtaagttccagatctgtctcccctttctctagaagaccaagcccccctcgttcagctacgcctattccaacaacttcaggacttgccttctcaaaaagtatttctgatagtttgaacaaaacaaatgaacttttaaatcaagaa

SEQ ID NO: 238688 - DNA, 324 bp, Glycine max
ggttctagtgtatgtgattgttgtgactcgttcttcttcgtcgttatcttcttcttttgttgtttgtgtgtttgttttttctctcacctgaaaatgtcttgctgcggtggtaactgtggttgcggaagcgcctgcaagtgcggcaacggctgcggaggctgcaagatgtacccagacttgagctacaccgagtcaaccaccaccgagaccttggtcatgggagtggcaccagttaaggctcaattcgagagtgctgaaatgggtgttcccgctgagaacgatggctgcaaaatgtggagctaactgcacctgcaaaccccgcac

SEQ ID NO: 238689 - DNA, 338 bp, Glycine max
cgggtggcaaaagaacaacgaaggggaatgtctgagagtcgggtctatacgtgtcgggctgtgcggatcttcacttacactctccaaatcacacaccaaaccacgcagcgagagaaacctaaatgccgttctaagtgacactcaaatcgatcgactatggatgcggtgtattacgtgaatatattgggcatcggctctgtcgactgccttcaaattgtcttccctccgtcgatagtcactcgctcttgcaaagcacacgaagcactttggctgtggagactaaatcgctggcaaacttactcagattgggaacagattcaggggagatgaccagcctg

SEQ ID NO: 238690 - DNA, 337 bp, Glycine max
gattgcttttgctcagaagcaaactgttgctgcttaaatttccttgtcagcaggtggtttcttgggttatggatttatttgagcataaatactacttagaggacttacgttgcagatttgttgtatcatctttactgcttccagaacttatgattcagactttctatgtatcaattctacttccagttttgttagtacaacgggaggacgcttccatttctgttctctaaaccgagcttaagttttggtcagaaatcttcaaagatgtaagcattataatgtagaattgagaaaaaatgtaaacgttgctttttgaaaaaaagtcaaaaaagaaaaa

SEQ ID NO: 238691 - DNA, 255 bp, Glycine max
gacacaactaactaagaaagtcttccatagccccccaaaaatgaagagcaccatcttctttgctctctttctcttttgtgccttcaccacctcatacctaccttcagccatcgctgatttcgtgctcgataatgaaggtaaccctcttgaaaatggtggcacatattatatcttgtcagacataacagcatttggtggaataagagcagccccaaccggaaatgaaagactccctctcactgtggtgcaatctcg

SEQ ID NO: 238692 - DNA, 194 bp, Glycine max
  unsure (1)..(194): unsure at all n locations
gacctcaaaaaacaaaaatcaataccttagagaaaacaaaagcacagaatcgaaagaagagttcttttttgagagagattgggatggcttcgacgaagaagatcacactgaagagttcggacggcgaggccttcgaggtggaggaagcngtggcggtggagtcccagacgatcaagcacatgatcgaggacaac

SEQ ID NO: 238693 - DNA, 292 bp, Glycine max
ggccttttcctcaagtgttgccgtgaggttgcagagaaatatcctgagataacttatgaggaagttgtcattgacaattgctgcatgatgcttgtgaagaatcctgcacttttcgatgtactagtgatgcctaacctttatggtgatattatcagtgacctttgtgctggcttgattggaggattgggcttaacaccaagctgcaacattggtgagggcggtattgcacttgctgaagctgtacatggttcagcacctgatattgctggaaagaatttggctaatccaactg

SEQ ID NO: 238694 - DNA, 321 bp, Glycine max
  unsure (1)..(321): unsure at all n locations
gactcaccacttcaaaacactcataacacaaagcacaaagcaaagctcatccttgagttaaaaaatggcagcagcttcttccatggctctctcatccccatccttggctggcaaggccgtgaagctgggcccatcagccccagaagtgggaagggtgagcatgaggaagaccgtcaccaagcaggtctcctcaggaagcccatggtacggcccagaccgagtcaagtacttgggcccattctctggcgagcccccgtcctacctaaccggtgagttcncaggcgactacggctgggacactgctgggctttccgcagaccc

SEQ ID NO: 238695 - DNA, 310 bp, Glycine max
gacgttcacattcaggaatcgttttcttcagaaatttgccatcgttgagagaagcgtgagagccttagtcgttcaagatgagagctaagtggaagaagaagcgcatgaggaggttgaagaggaagcgccgaaagatgagacaaagatctaagtaggtgcttgagcaggagttgagatgagctttccatctgctaccagcctcatgacattttaggctgttatggctcttatgatcttgaggtctagtcgctaagggagcttcactcttgacttagtttgctttactggtcctggtcctgggccaaagact

SEQ ID NO: 238696 - DNA, 355 bp, Glycine max
gacaacacacaactcgtcacatcacatcacatcacatctattttcattacttcatcattttcactgcaattttcacaccacacacacaccacagtcatggcagttgatagtacgtttctgaacactggcctcctccttgtggccacaatccttgtggtcaagctcatctcagccttcatagtgcccaaatccagaaagagggtacccccagttgtgaaggggtggcccttaattggaggactcatccgtttcctcaaaggtccaatctttatgctccgtgacgagtaccctaagcttggaagtgtcttcactctcaaactcttccacaatagcatcaccttcctcattgggcctg

SEQ ID NO: 238697 - DNA, 340 bp, Glycine max
gattctctctctttcacagcacactcctcccagggtttctccaccaagagggaaatggctcccaaaccgcctagtacgggtctgtttgttggactgaacaagggacatgtcgtcaccaagaaggaattgcccccacgcccctcggatcgtaaggggaaaacaagcaagagggtgcactttgtgaggaacctcataagagaggttgctggttttgcaccctatgaaaagcgtataactgagttgctgaaggttgggaaggataagagggcacttaaggttgcaaagagaaagcttggaacccacaaacgtgcaaagaagaagcgtgaggaaatgtccaatg

SEQ ID NO: 238698 - DNA, 329 bp, Glycine max
ggagttcaacgagatggagcaaataaagcacagaacagttgaagtgaatggcataaaaatgcatgttgcagagaaaggagagggtccagtggtgttgttcctccacggcttccctgagctctggtactcatggcgccatcagattctctctctcagctccctcggctaccgcgccgtcgctcccgatctccgtggctacggtgacaccgaagcaccaccttcaatcagcagctacaactgcttccacatagtgggtgatctcgttgcgcttattgactctctgggtgtccaacaagtgttcccttgtggctcatgactggggagccatc

SEQ ID NO: 238699 - DNA, 275 bp, Glycine max
gactttcgattctcttcaaacctaacgcagcatcgctattctcttcattccatggctttgcccaaccagcaaaccgtggattaccctagtttcaaactcggtatcgtcggcgatggtggcacaggaaagacaacctttgtgaaaaggcatctcaccggagaattccagaagaaatatgagccaaccatcggtgtggaggttcacccattggattttttcacaaactgtggaaagattccattttactgctgggatactgctggacaggagaaatt

SEQ ID NO: 238700 - DNA, 283 bp, Glycine max
ggcagccaagaaaagaaaatcctcacccattttcttcgtagccaaacactctgaaattctcagttatgtcgtggcaagcgtatgtggatgatcacctactgtgtgaaatcgaaggtaaccacctcactcacgccgctatcatcggccaagacggaagcgtttgggctcagagcaccaacttccctcagttcaaacctgaggaaataactgccatcaataatgactttaatgagccgggattacttgctccaactgtgattgtacatcggtggcaccacataca

SEQ ID NO: 238701 - DNA, 361 bp, Glycine max
ggttctagtgtgtgattgtttgttgttgtaactcgttcttcttcttttgttgttctgtgtttgtgtttgttttttctctcacctgaaaatgtcttgctgcggtggtaactgtggttgcggaagctcctgcaagtgcggcaacggctgcggaggctgcaagatgtacccagacttgagctacactgagtcaaccaccaccgagaccttggtcatgggagtggcacctgttaaggctcaatttgagggtgctgaaatgggtgtgcccgctgagaacgatggctgcaaatgtggaccaaactgctcctgcaacccctgcacttgcaagtgaggtgttgggagagcaagcttcaagcagagatag

SEQ ID NO: 238702 - DNA, 366 bp, Glycine max
ggagcgaagaagatattagggtttttgagtgcggtgcggcgatcctagcactctcttctgcagctttcgccgacagcttcattcaccatggctgagcaaaccgagaaggcttttttgaaacaaccaaaagtgtttctcagctcgaagaaaactgggaagggaaagagacccggaaagggtgggaaccgcttttggaaatccattgggcttggatttaagactcccagggaagccatcgaaggaacctacattgacaagaagtgccccttcactggcaatgtttccatccgtggccgtatcttggctggaacatgtcacagtgctaagatgaacaggactattattgttaggaggaattatctccat

SEQ ID NO: 238703 - DNA, 360 bp, Glycine max
ggtgctctgctcgtgcctctagggttatcatttctccatttccattttctctctcacttttcaagaatcgtaagctatgggaaagtcttacccaactgtgagtgctgattaccagaaggccgttgagaaggcgaagaagaagctcagaggcttcatcgctgagaagagatgcgctcctctaatgctccgtttggcatggcactctgctggaacctttgacaagggcacgaagaccggtggacccttcggaaccatcaagcaccctgccgaactggctcacagcgctaacaacggtcttgacatcgctgttaggcttttggagccactcaaggcggagttccctattttgagctacgccga

SEQ ID NO: 238704 - DNA, 407 bp, Glycine max
  unsure (1)..(407): unsure at all n locations
gagattcgtcttcagtttcagcctttctctcncactcactcactcacaggtaagcaatggcgggaaaagganggaaggggcttcttgcagcgaaaaccaccgcggcgaataaggacaaagacaaggacaagaagagacctatttctcgctcttcccgtgctggaatccagtttcctgtgggacgtatccataggcagctgaaacaaagggtccaagccaatggacgtgttggggcaacagctgcagtgtacttagcctcaattctagagtatctgactgctgaagttcttgaacttgctgggaatgcaagcaaggatctgaaggtgaagaggatcacaccaaggcatttgcagctggctatcangngagattaagagctggacactcttatcaaagggaccattgct

SEQ ID NO: 238705 - DNA, 160 bp, Glycine max
gattcacacaactaactaagaaagtcttccatagccccccaaaaatgaagagcaccatcttctttggtctccttcccctttggggcttcaacaactcatacctaacttcagccatcgctgatttcgtgcccgataatgaaggtaaccctcctgaaaatgg

SEQ ID NO: 238706 - DNA, 339 bp, Glycine max
gatacctaaaaattgtaccgatatggcttcacttgtgtgtctcctttttttccttgcatttcatggttatcatgtcaggttccttaccagcaaatagtgaagtgtttacaaaagagtctcctatgtctctatccacaaaacccgtggaaagactcacccaactccacttttatttccataacaacaaaatgggggaacacccgactgctatgaaaattgttgagcctcctaaggcgtccatttctggttttgggactatttacatgatggatgaccctctaaccgaaagaccaagtccaacttcaaagcttgttgggagatgtcacggaatatatgctg

SEQ ID NO: 238707 - DNA, 423 bp, Glycine max
  unsure (1)..(423): unsure at all n locations
gagaagccttaaagctcttctctgctttgaaaatggctgattggggcccggtggtgatcgcagtggtgctgttcgtgctgttaagcccggggcttctgtttcagatgccagccaggggaagggtagcagagtttgggaacatgcaaaccagtggggcctccattttggttcacgccatcatctactttggcctcatcactatcttcctcattgccattggcgttcacatctacactggctaactcctggatctggttcagtttcacccatctatgtttatctctgccttttaattagtctttttagctttacaataatttccttgtttgatctctatgtatcttatgtgggggttggtcatgggtgccagannaaaacantaaatcagataaggataatcctccgtgggggtttttttttttt

SEQ ID NO: 238708 - DNA, 400 bp, Glycine max
ggcagttcaaagcgaagaaagattcgaaacgaagaaagaaagcgttgtgaagaatggcggaagagggacaagtgatcggtgtccacagcgtagaggagtggaaggaacatctcaagaagggagaagggtccaagaaattgattgtggtggattttactgcttcttggtgcggtccatgccgtttcattgccccaattcttgcagagtttgctaaaaagttgccgaatgtcaccttcctcaaggtggatgtggatgaattggagactgtttccaaggagtggggaattgaggctatgccaaccttcctgttcttgaaagaaggcaagctggtggacaaggttgtgggtgccaagaaagaggagctgcaattgacaatagccaaacatgccgcaattgctgc

SEQ ID NO: 238709 - DNA, 384 bp, Glycine max
  unsure (1)..(384): unsure at all n locations
ggttctagtgtgtgattgtttgttgttgtaactcgttcttcttcttttgttgttctgtgtttgtgtttgttttttctctcacctgaaaatgtcttgctgcggtggtaactgtggttgcggaagctcctgcaagtgcggcaacggctgcggaggctgcaagatgtacccagacttgagctacactgagtcaaccaccaccgagaccttggtcatgggagtggcacctgttaaggctcaatttgagggtgctgaaatgggtgtgcccgctgagaacgatggctgcaaatgtggaccaaactgctcctgcaacccctgcacttgcaagtgangtgttgggagagcaagcttcaagcagagatagcccttagttangaataatgataa

SEQ ID NO: 238710 - DNA, 322 bp, Glycine max
gagtcacacagctaactaagaaagtcttccatagccccccaaaaatgaagagcaccatcttctttgctctctttctcttttgtgccttcaccacctcatacctaccttcagccatcgctgatttcgtgctcgataatgaaggtaaccctcttgaaaatggtggcacatattatatcttgtcagacataacagcatttggtggaataagagcagccccaacgggaaatgaaagatgccctctcactgtggtgcaatctcgcaatgagctcgacaaagggattgggacaatcatctcgtccccatatcgaatccgttttatcgc

SEQ ID NO: 238711 - DNA, 367 bp, Glycine max
ggatttggatttgggggaacatttggttgattagggtttcttcgggtgctaatgctcttgttttctcacagtcacacagcaatggaagcaatcacagagggagtgaacaacatcaacatctccgattcttacaagaagaatcgcattcaggtctccaacaccaaaaagcccctcttcttctacgtcaatctcgccaagaggtatatgcaacagcataatgaagttgagctctcagcactaggaatggctattgctacggtggttactgttgctgaaatcttgaaaaacaatgagcttgctgttgaaaagaaaatcacaacatcaacagttgacatcaaagatgattctagaggcagacctgtccaaa

SEQ ID NO: 238712 - DNA, 191 bp, Glycine max
gtcgaatcgggatcaactaggacagaaatcaagcattgggtcgaactcttctttgatgtcaaagtaatagctatgaatagtcatcgactcccggtaaagggtagaagagtacgacctattatgggacatacaatgcattacagacgtatgattattacgcttcaaccgggttattctattccacctcttag

SEQ ID NO: 238713 - DNA, 318 bp, Glycine max
gatagaagaagcagaaagagaagcattagcaaaagcaagaagaactagtctaagcagaaatggcctcttcagtgatggcatctgtggccctcaaacctgcccctttcactgttgagaagtcctcagttagaggccttccctccctctcaaggaactcctcttcattcagagttgtggccagtggtggcaagaagatcaagactgacaagccttatggaattaatggtggcatggctttgagggaaggagttgatgcatctggcaggaaaggaaagggaaagggcgtttaccagtttgtagacaaataccgtgctaatg

SEQ ID NO: 238714 - DNA, 368 bp, Glycine max
gacttcacaactcaaactgcttcattgcattattgcagataagatcaaccctactcccttcagattcgggccaagatggcatcacttcatgctaatgtgacatcagttgtttgcaagagtggcaaccatgcttctcaatcgaaattcacaagctcttcattcttgcctgggtttgatgttgttggtcgtgcttcaaatgcttggaagaaagaacttgtcccatcttccatttccttggtgcctagagccacactaacatttgatcccccaactaccaactcagacaaaaccaaacaaaggaagcacactgttgaccctgcttctccagattttcttgcccttccttcatttgaacagtgctttccaaa

SEQ ID NO: 238715 - DNA, 401 bp, Glycine max
agaagggcacaaaaacaagatttgtaacataaactgtcctttttattatgcttttacccccaaacaaaaaacacaaaatcacccttaaaaaaaaaaaaacaaaaaaaaaaaaaaaaaaaaaaaaaaaaaaaaaaaaaaaaaaaaaaaaaaaaaaaaaaaaaaaaaaaaaaaaaaaaaaaaaaaacaaaaaaaaaaaaaaaaaaaaaaaaaaaaaaaaaaaaaaaaaaaaaaaaaaaaaaaacggccccacaaaaaaataaccaaacttcaacaacatccctagaacgacaaaacccctcttagggacccaccaaataaacatccgcgggccctttttaaaaaacacccgtcaggaaaaaccccatgaacccccacacataacccccttacaaaaagccccc

SEQ ID NO: 238716 - DNA, 361 bp, Glycine max
ggccgagcgtgtctctccgcagcagccttcttcgccgtttcagctcaagagccaccagcaggtaagatatggttaagcataacaacgttatccccaatgggcacttcaggaaacactggcaaaactatgtgaagacttggtttaatcaaccagcacggaagaccagaaggcgtttagctcggcagaagaaggctgtcaagattttcccaaggcctactgctggacctctcaggccaattgttcatggccagactctgaaatacaacatgaaagtcagatctgggagaggattttctctcgaagagttgaaggctgtgggaattcccaagaaacttggtccaactattgggatttctgttga

SEQ ID NO: 238717 - DNA, 275 bp, Glycine max
gacattgctcgctctctctcactctctctctctctcgctctctctcatcacgttcgatcattcgcatctgaatctccaacgatggtgctcgacgagactataatttgtgatgacaagtcagaatggattcgtaacggggattactcaccatcacgatttcaaacccaagcattacgccgtcaatcttaattgcggtgctaaaacccaatcgaatccagaagatactgtgagagttctcacgaaggccgagaatggcgttcgtgttatggtgatcc

SEQ ID NO: 238718 - DNA, 298 bp, Glycine max
ggttctagtgtgtgattgtttgttgttgtaactcgttcttcttcttttgttgttctgtgtttgtgtttgttttttctctcacctgaaaatgtcttgctgcggtggtaactgtggttgcggaagctcctgcaagtgcggcaacggctgcggaggctgcaagatgtacccagacttgagctacactgagtcaaccaccgccgagaccttggtcatgggagtggcacctgttaaggctcaatttgagggtgctgaaatgggtgtgcccgctgagaacgatggctgcaaatgtggaccaaac

SEQ ID NO: 238719 - DNA, 360 bp, Glycine max
gacagcaaagcaattttcaaactcaattacaattcaataaccaaacctccccttggtttccaattcaaaaagaagtggcacttccaagccaaaccgcccacaattcaaccgggggaagggccccggggacgcaattggagactaaagccgctcacatgtcagctcgggacaccggcggtgtgaaaaagccccagcgtttcaggcccgaaactgtggctctgagggatatcagattgtaccagaagagcactgatcttctgatgcgaaaactcccattccagaggctcgtcagaaaaatcgctcaggatttcaaaacatatcttcgtttccagagcagcgctgtttctgctcttcaggaag

SEQ ID NO: 238720 - DNA, 360 bp, Glycine max
gagggtttacactgaggaggcacaccttcaggagcagtcatggttctcaaaaccgagctgtgccgattcagcggtgccaagatctacccagggaaaggcatcagatttgttcgtggtgattctcaggttttcctgtttgctaactcaaaatgtaagaggtatttccacaacaggttgaagccgtcaaagctcacgtggactgcaatgtaccgaaagcagcataagaaggatattgctcaagaagctgtgaagaagagaagacgtgctaccaaaaaaccttactctaggtctattgttggtgctactttagaagttatccagaaaaagagaaccgagaagccagaagttcgagatgcagct

SEQ ID NO: 238721 - DNA, 346 bp, Glycine max
ggagcgaagaagatattagggtttttgagtgcggtgcggcgatcctagcactctcttctgcagctttcgccgacagcttcattcaccatggctgagcaaaccgagaaggcttttttgaaacaaccaaaagtgtttctcagctcgaagaaaactgggaagggaaagagacccggaaagggtgggaaccgcttttggaaatccattgggcttggatttaagactcccagggaagccatcgaaggaacctacattgacaagaagtgccccttcactggcaatgtttccatccgtggccgtatcttggctggaacatgtcacagtgctaagatgaacaagactattattg

SEQ ID NO: 238722 - DNA, 285 bp, Glycine max
gatgtggttgcgcctctgcctgtaagagtgaaaaaaccttctcttttccttctctcaagtctcaagagatttcatcatggctccaaagaaggacaaggctccaccaccttcctccaagcccgccaaatctggcggtagcaagcagaagaagaagaagtggagcaagggaaagcaaaaggagaaggtgaataacatggtgctgtttgattagggcacctatgataagctcctttctgaagctcccaaattcaagctcatcactccttccattctttctgatcgttt

SEQ ID NO: 238723 - DNA, 192 bp, Glycine max
gagctttcagttggcgcgggtgaggtagaacccttccactgtggtgactctgcgatgggtgcctacaagtatgtttcagagctatggcgcaagaagcagtctgatgtcatgcgcttcttgcagcgggtgaggtgctgggagtataggcagcaaccttccattgttcgtttgacaaagtctacccgccctgac

SEQ ID NO: 238724 - DNA, 375 bp, Glycine max
gacatagcagaatggcttctactcaatgtttcttgcaccaccatgctcttaccacccctgccagatccccatcacaacgcatcatggttagcaccaagcctaaccagcttgtttgcaaggcacagaagcaagaggatattgatgtcagcccaatctctcgccggttagctctaaccgtgctcattggtgctgctgctgttggctccaaagtccaacctgctgatgcagcttatggggaagctgccaatgtgtttggaaagccaaagacagacacagatttcctgccatacaatggagatggattcaaactatcgattccctcaaagtggaacccaagcaaagaagttgagtacacaggtcaggttgttagatatg

SEQ ID NO: 238725 - DNA, 99 bp, Glycine max
gatatatattggcttagctataatcactagaattattatatactaagtataaatatatagaaattctagtgattatagactatctttatataataatat

SEQ ID NO: 238726 - DNA, 365 bp, Glycine max
ggtttctgcagcagttgagaggaggcactgtggcagaagtcctaggagtgtaaaacagagacgcaaaatgaagacgatcttgtcgtctgagaccatgaatattcccgacggcgtgagcatcaaggttcacgctaaggttatcgaggttgagggccctcgtggaaaactcgtgcgagacttccaccatctgaacttggacttccaacttattaccgacgatggcggtaaaaggaagctcaagattgattcttggtttggttctcgtaaaacctccgccgccatccgcaccgccctcagccacgttgagaatttgatcaccggcgtcaacaggggataccgatacaaaatgagattcgtgtacgctc

SEQ ID NO: 238727 - DNA, 386 bp, Glycine max
ggagcaaaaccctaatccctatttttcttcctcagtagtgtcatttacgcttctcttctctgcagcaactatgcctaaccctaaggtcttcttcgacatgaccatcggcggtcaatctgctggccgcatcgtgatggagctctacgccgacgtcactccccgcaccgccgagaacttccgcgcgctttgcaccggcgagaagggcgtagggcggagcggcaagcccctccactacaagggctcgtccttccaccgcgtgatcccgagtttcatgtgtcagggtggcgacttcaccgccggaaacggaaccggcggcgagtcgatttatggcgccaagttcgccgacgagaacttcgtgaagaagcacaccggtcccggcatcctct

SEQ ID NO: 238728 - DNA, 410 bp, Glycine max
  unsure (1)..(410): unsure at all n locations
gtctttttgctgtgggaagaggaaccctagctagggtttggcagaagctgatccgagaagatggtgcagcgtctcacctaccgcaaacgccacagctatgctaccaaatccaaccagcacagagtcgtcaagactcccggtggcaagcttgtttatcagaccacgaagaagagggccagcggacccaagtgccctgtcactggaaagaggattcaagggattccacatttaaggccagcagagtataatagatcaaggttacacagaaaccgaaggactgtgaaccgtgcatatggtggtgtgttgtctggcagtgctgttagagaaagaatcattcgagctttcttggttgaagagcaaaagattgtgaaaaaggtcttgaagattcaaaagacanaggaaaaacaagc

SEQ ID NO: 238729 - DNA, 273 bp, Glycine max
gccttcctctcagtgcagcatcgtagagaaataagggaaaaatggtgtcgctgaaactgcataagcgcctctccgcaagcgtgctcaagtgcggcagacgaaaggtttggcttgaccccaatgaagtcaacgaaatctccatggccaattctcggcaaaacatcatgaagttggttaatgatgggtttatcatcaggaagccaaccaagattcactcccgctcacgtgctcgtaagatgaatgaggcaaagaggaaaggccgccactccggtt

SEQ ID NO: 238730 - DNA, 347 bp, Glycine max
gggtggagtgtgcaaaagagcgtcgtagtcgcaaccctaatcagaagaagcgcagcttcaagcgagtgacagccaccagccatgggtcgtatgcacagccgcggtaagggtatatcctcttctgctttgccctacaaaaggacacctcctagctggctcaagatctcttcgcaagatgtcgaagaaaatatctgcaagtttgcgaagaaaggtttgaccccgtctcagattggtgtcattctcagagattctcacggtattgctcaggtcaatagcgtcactggcagcaaaatccttcgcatcctcaaagctcacggacttgcgcctgaaattccagaggacctgta

SEQ ID NO: 238731 - DNA, 353 bp, Glycine max
ggccctagtttttcttcctccttcagccgttgccctgcttcaaccttgcggaagaagaagacgccgcagccatggtgaagtactccagagaacccgacaatcccaccaagtcctgcaaggccagaggcgctgaccttagagtgcatttcaagaacactagggagactgcctttgccatcaggaagttgcccctggttaaagctaaaagatacctggaggatgttttggcccacaaacaggccatccctttccgacgcttctgtggtggtgttgggaggacagcccaagctaagagcagacactccaatggtcaaagacgctggcccgtcaaatcagctaagttcatcctagat

SEQ ID NO: 238732 - DNA, 281 bp, Glycine max
  unsure (1)..(281): unsure at all n locations
gacgttcacattcaggaatcgttttcttcagaaaatttgccatcgttgagggaagcgcgagagccttcgttgttcaagatgagagctaagtggaagaagaagcgcatgaggaggttgaagaggaagcgccgaaagatgagacaaagatctaagtaggtgcttgaacaaggagtggagatgatgtgcttttccatctgctaccagcttcatgacattttatgctgtcatggctcttatgatgatcttgaggtctantggcgangggagctttcatcttgact

SEQ ID NO: 238733 - DNA, 433 bp, Glycine max
gaatcctcagaatcagcttcagcctttctctctaactccctcactcacactcacagttaagcaatggcggggaaaggaggaaaggggcttcttgcagcgaaaaccaccgcggctaacaaggacaaagacaaggacaagaagagacctatttctcgttcatctcgtgccggaatccagtttcctgtgggacgtatccataggcagctgaaacaaagggtccaagctaatggacgtgttggtgccactgctgccgtatacttagcctcaattcttgagtatcttactgctgaagttcttgaacttgctgggaatgcaagcaaggatctgaaggtgaaaaggataacaccaaggcatttgcagcttgctatcagaggagatgaggagttggacaaccttattaaagggaacattgctggtggtggtgtcattcctc

SEQ ID NO: 238734 - DNA, 363 bp, Glycine max
gatccaactctctaaacaacacattaacctttcgcaatccccatctcctcaccttagtcatccactgctaatttctatggctccgaaatggacgctggcggaaagatcaagaagggcgccggaggaagaaagggcggcggccctaagagaaaaccggtttcaaagtccgtcaaggacggtctccaattctccgtcggaagaattggccgtaatttgaagaaaggaaggtacgcccagcgtgtcggtaacggtgctcccgtttacttggccacagttctcgagtacctagctgctgacgtgcttgagttggctgggaatgctgcacgtgacaacaagaataacaggattattccgagacatgtg

SEQ ID NO: 238735 - DNA, 333 bp, Glycine max
gattataacactgtcactcttacattctcagtccaaatcattcttcttcttccatcgacaatcagtctttgtgtttcaagatggctcgtacgaagcatacagcaagaatgtccaccggaggaaaagctccaaggaagcagctcgccaccaaggcagcacgtacatcggctctcgcgaccggtcgcctgatcaagctccaccgtttcaggcctgagatagtggctctgagggagattcagcattaccataacagcactgaacttttcattaggaacacttcctttctagatgctcgtaaaggaaatctctcatgacttcaaaaccgatctatgc

SEQ ID NO: 238736 - DNA, 366 bp, Glycine max
  unsure (1)..(366): unsure at all n locations
cacgcgtcaacccaagcgtccgacggcagaaaacgacataaggggactctcactctcactctcactctctcagctcaggagtgtataaccctgacaagtcaatctgaggtcccttgccctaaaggaaaagttggttgactattcgtcagttcgatggatcntgttattttgtggtccttcccatctccttcaacatttatttccttacataccttggggatgtaagatctgagtggaagtcctataagacgcgtcagaaggaacatgatgagaatgtgaaaaaaggtaacaaacgtctcaaacaaaggaatccatcaaaagatggtcttgtctgtaccgctcgtaagccctggattgctgttggga

SEQ ID NO: 238737 - DNA, 340 bp, Glycine max
ggatatgaacggtgaaccggatcccccttcgaagtgaattatattgcagtgaatcacacacactctgaacaacgcccaccatgcaggccagtgataggtttaacatcaattcccagcttgagcatctccaagccaaatatgttggaactggccatgccgatttgaacagatttgagtgggcagtgaacattcaacgagatagctatgcatcatatattggacactaccctttactgggattctttgctaatgctgaaaatgaatctaatgggagagaacgctacagctttatgcagaaaatgctcctgccttgtggtttgcctcccgaaagagaagaaga

SEQ ID NO: 238738 - DNA, 355 bp, Glycine max
ggagagtaagggcggtgcagtgcttcaaacccctttttctcttctcatttcctttcatcactcttgcatcatttcttcttctcgcaattttccattttcacacttttagcaacatcttttaatggcgtcccaaatccgtgagtggtctggaatcaatacattcgcacctgctacccagactaagttgcttgaactcttgggaaatcttaaacatgagaatgtgaactccttgactatacttgtgatgggaaaaggaggtgttggaaaatcttcaactgtgaactccatcattggggaaagagtggtttcgattagtcctttccagtcggaagggccaagacctgtgatggtgtca

SEQ ID NO: 238739 - DNA, 407 bp, Glycine max
  unsure (1)..(407): unsure at all n locations
gcaggctcgtttatataaaagggagtccttatcttctcgcattgttttaggttttcttagatagagttgttaccatttgctcccagtacagagcttaaccgagcttcacaaagatgaatcgggaaaagttgatgaagatggccggttcggttagaactgggggaaagggtaccatgagaagaaagaagaaggctgtccacaagacaacaaccacagatgacaaaaggcttcagagcaccctgaagagaatangggtgaatgccatcccggctattgaggaggtcaatatctttaaggatgacgtagttatccagtttctaaatcccanagttcaagcatccattgctgctaatacttgggttgtcagtggttctccacaaacaaagaagttgcaagatatactccct

SEQ ID NO: 238740 - DNA, 340 bp, Glycine max
gaccgtgcgctagttctgagtattctgatcgctccctgagagagctcgtcgcggcggttgcataagaagattgcaagatgaagttcaacatcgcgaatcccaccactggatgccagaagaagctcgagatcgacgacgatctgaaactgcgagcattttgggacaagaggatctcacacgaggtcatcggagatgcactcggtgaggaatttaagggctatgtcttcaaaattaccggaggttgtgacaaacaaggatttccaatgaagcaaggagtgctgactcctggtcgtgttagacttctgcttcacaggggaactccttgcttccgtggatatgg

SEQ ID NO: 238741 - DNA, 336 bp, Glycine max
agaaggggagcgaaacagagagtgatttcagtgagtgatcggtgttcacttgatctcatcataatcgtcagcgtcaattgaagaagatgccgatcagaaacatcgccgtcggaaggcctgaagaggcgactcaccccgacacgttgaaggcggctttggctgagttcatctcaaccttcatcttcgtgttcgccggctcaggctccggcatcgcctacaacaagctcaccgacaacggcgctgccacccctgccggcctcatctccgcctccatcgcccatgcattcgccctcttcgtcgccgtctccgtcggcgccaacatctccggcggccacg

SEQ ID NO: 238742 - DNA, 275 bp, Glycine max
gagggatcgcatttgtaatcacaataacagattttcaaactcatcaagcttcaaagcgaatcttattgagaaaatgtctggtcctggtaaaggtggcgacggtttaggaaatggaggtgtcaataagcataagaaggttcttcctgacattcatctagtgcatcacaaaacctgtcattcgtaggttagcgacaagatgttgcatgaaaaagatcagtggtttggtctacgaagcaaccagcagaattctgaccatactcctggggaacgtgaat

SEQ ID NO: 238743 - DNA, 316 bp, Glycine max
gacttcaattgcgatcaaattagttcattcactttgcgcaattccctacctctcctttcaagatgcagatcttcgacaagactctcaccggaaacaccatcagccttgaggtggtaagctctgacaccatcgacatcgtcaaggccaagatccaggacaaggaaggaattcccccggatcagcaccgtctcatcttcgccggaaagcagctcgaggacagccgtacgctcgccgacgagaacatccagaaggagtcaacccttcatcttgtccttcgtcgccgtgggggcatgcagatcttcgtcaagactctcac

SEQ ID NO: 238744 - DNA, 384 bp, Glycine max
agggattatcatagtagatattcattccccttatctttctctcttctctctccccgcccaaaccctaactccctaccctattccgctttctctcatccatcatgaaaggaggaaagtccaagaccgaatctaaaagagccgatgccaaacttgctgtgaataagaagggcgccgccaccaagactaggaaacccgccggaaaggggaaggcagcgaaagatcctaacaagccaaagaggcctccaagtgctttcttcgttttcatggaggaattcaggaaggtgttcaacaaggaacatcccgacaacaaagcagtgtctgctgtgggcaaagctgctggagcaaaatggaagacgatgtctgatgctgaaaaagcaacttatg

SEQ ID NO: 238745 - DNA, 395 bp, Glycine max
gacacaccgtttgttctattcttaactcaacttctgctacccactctcttcttccaagtccaaccacgcttttctctacagtcatgggcaaggtcaagatcggaatcaacggatttggaagaattggccgtttggttgccagagtcgctctgcaaagagacgatgtggagctcgttgccgttaacgaccctttcattaccaccgattacatgacatacatgtttaaatacgacagtgttcacggacactggaagcatcacgatgtcaccgttaaggacgagaagacccttctcttcggtgacaagccagtcactgtttttggacacaggaaccctgaagagatcccatgggggtcaactggagctgatatcattgttgaatccaaccgagttttc

SEQ ID NO: 238746 - DNA, 337 bp, Glycine max
  unsure (1)..(337): unsure at all n locations
gatcgttattgtgttgcttaatcttttttccacaaccttgaatgtttaccgccccgccgggataaggagaaagagaaagaggatctgcgtcgcaggcactgttcatcgccatgtctcgggttgataacagaaattcctcagccaccaagcgtgctaggactgatggtagtcgtanggaagatgattggacatgccccagctgtggcaatgtcaatttctctttcaggacaacttgtaacatgcgtaattgcactcaaccaaggccggctgatcataattcgaaatctgctgccaagcctctacaagctccgcagggttattcatcctcagctcctta

SEQ ID NO: 238747 - DNA, 469 bp, Glycine max
tcgaacgtctacgcgtcatgagcaggtcacgggtcgacgcacgcgtcagtacggatgcgagaagacgacagaaggaagaaccagctgaagaatctgatgatgacatgggtttcagtctgtttgactaatttatgtaatgcttttgttgagtttatttggttagaattgaagttgtgtttgcctttcatttcaggtgttattttagtgtattcatgttacattgcaactacttttaatttccatagttaattaaagcttcaacgtttctgtctaaaaagaaaaaaaagaagaagagaagagaaaaagacgaaaaaaggggaaaaaaaaaaagggccgctctaaaggatccaagcttacttacgcgtgcatgcgacgtcatagctcttctatagtgtcacctaaattcaattcactggccgttctgttaaaacgttcttaaggggaagaacctgggcttaacccaacttaa

SEQ ID NO: 238748 - DNA, 340 bp, Glycine max
gattgcacagtgttattttcagtatcagcatcatggctccaattgcagtgggagatgtcattccagacggcattttggcttacttggatgaagaaaacaaaccccaaactgtctctattcactctctcgccgccggcaagaaagtcatcatctttggggttcccggtgccttcactcctacatgcagcttgaagcacgtgcctggcttcattgagagagcagaagagctgaaaggaaagggtgtggacgaaataatctgtatcagcgtgaatgatccctttgtgatgaactcatgggccaaaacgttcccagagaacaagcatgttaagttccttgctga

SEQ ID NO: 238749 - DNA, 309 bp, Glycine max
gacactaaacaagttaaaagaagagcatcactgaactaacaaagcaaccctatgtcgaaggtggtttgtgtcaccggagccagcggcgccatcggatcatgggtggtcctactcctcctccagcgtggttacaccgtccatgccaccgtccaagatatcaaggatgaaaatgacacgaaacatttggaggaaatggaaggagcaaagagtcatcgccatttttttgaaatggatcttcttgacatcgactccattgccgctgccagaaagggttgttccggcgtaatccaccttgcatgtcctaacatc

SEQ ID NO: 238750 - DNA, 308 bp, Glycine max
ggtgtcccacgagtccataaagctgcaaaatgagaaattcgtcgtcactttcacactttctctcgcattcactcatgcacacgtatcattgcataaaggtgacggaaggcgcttcgtgcatcgaaaatcaccgcggcgaattctgacaaagctacggacagtaacaaacctaattctcgctcttcccgtgctgaaatccagtttcctgtcggacgtatccataggcagctgagacagatggtccaatccaactagacatgttgaggcaacagctgcactgtacttagcctcaactctagagtatctga

SEQ ID NO: 238751 - DNA, 359 bp, Glycine max
cccacgcgtccggcgagaagtacgagagaacggggcactttcattctctaggaaaatctaattcgctttggtcttcatcctctgttctgatccaagtatggcttctaaactcatcttgaaggagctcaaggatttgcagaaggatcctcctacctcatgcactgcatgccctgtggctgacgacatgtttcactggtaagccacaatcatgagacctgctgataccccatatgcaggtggtgttttcctagtttcaattcattttcctcctgactaacccttcaagccatcaaaggttgcttttcggactaaggtgttccactcaaagatcaacagcaatggcactatatgtcttgaca

SEQ ID NO: 238752 - DNA, 274 bp, Glycine max
ggtctagcccgccgagaaaaccctaattcgctcgcagtcacccaagaggcgaatccttaccattgctcgagatgggtgaagaagtgaaggccgtggttccagagtctgttttgaagaagcagaagagagaggaggaatgggcgttggccaagaagcaagacctcgacgctgcgaagaagaagagagccgagagccgcaaactcatctacaacagagctaagcagtacgctaaggagtacgatcaccaggagaaggaattgattcggttgaaacg

SEQ ID NO: 238753 - DNA, 328 bp, Glycine max
gactttccattctcttcaaacctaacgcagcatcgctattctcttcattccatggctttgcccaaccagcaaaccgtggattaccctagtttcaaactcgttagcgtcggcgatggtggcacaggaaagacaacctttgtgaaaaggcatctcaccggagaattcgagaagaaatatgagccagccatcggtgtggaggttcacccagtgggattttttcaggaactgtgggaagattcgattttactgctgggatactgctggacaggagaaatttggtgggctcagggatggatactatatccatggacaatgtgctattatcatg

SEQ ID NO: 238754 - DNA, 102 bp, Glycine max
ctacacttaaaattacaattttagcgtgggaaacgtcgctgttttatttatgttcaatgcagtttgacaactgcagaaaatgacatatgcagatattgcgga

SEQ ID NO: 238755 - DNA, 286 bp, Glycine max
tacaacagcagagaaagggaaagttaatgggagcctctcatcttctgtcgaccagcttttgcttcgttgtgaacatggacatgaggacaacaggttgcatcctcatctagccctgcatccgagttcatgcgtcttagatggtgtcacaaactgcaggacaagtgtgttagtcattacagcgtcgggttcgaggaggatgtttaagagacacaacatctgcgccttggactgcaggaacgattggtgctctggtgtcatgtccaaaaggttcggacggatcggcctt

SEQ ID NO: 238756 - DNA, 362 bp, Glycine max
agacttctgccaaaaagccttactccaggtccattgtcggtgccactttggaagttatccagaaaaagagagctgagaagccagaagttcgagatgcaaatatggaagctgcccttcgtgaaattaaggagacgaacaagaaaacaaaggatgagaagaaggctaagaaagcagagtttgccaagtcccaaaaatcacaagggaagggaaatgtttcgaagggtgccatgcccaaaggtcccaggcttggtggtggaggcgggaaacgctgagcctttactttggttcccatttttggctacatttaaaagagtgttgtgttgaatctgtactattttactgttttagtaaaccgttggttg

SEQ ID NO: 238757 - DNA, 482 bp, Glycine max
cctgcaactgtcacgccgccaggtaccggtcaggaattcccgggtcgacccacgcgtcagcccacgcgtccgcccacgcgtccgcccacgcgtccgcccacgcgtccgcccacgcgtccgacggctgcgagaagacgacagaagggatttttagaagagtattgatgtaaattcctttgctagaaattttaacaagtgttcttcttttgcaaaaaaaaaaaaaaaaaaaaaaaaaaaaaaaagaaaaaaaaaaaaagaaaggaagggaaagaaggagagaggagaaagaaaaggggccgctctagaggatccaagcttacttacgcgtgcatgcgacgtcatagctcttcaatagtgtcacctaaattcaattcagtgggcgtcgttttacaacgtcgtgactgggaaaaccctggggttacccaagttaaggcgcgttgcagggaaaccccctttggcggagggggcttaggagcaaaggg

SEQ ID NO: 238758 - DNA, 253 bp, Glycine max
catccatgatctggatgtgaatgagtcaaattacttatccctcggtcttttaatgaggtagctctccaggaattgtgcattaatgttctatgaaacgtattcatgttactgcttcgacgcatattccctacaatttacatgcggttctaatacatcctaataactgagatacatgtattgttatacaactgattcttatttcagaacatcgaccttactttatcagtctttcaaacaataagggatttcactt

SEQ ID NO: 238759 - DNA, 300 bp, Glycine max
ggcgtgtgttcctcaactcagcacactcctttataaatgcagcgtcgacaaaaaccctaactcctaacctttttttcctccatgcagctcttcagcagtcgttacagagactccataacccgaacatgcctttcaagaagtacgttgagattggaagggttgctcagatcaactatgggagagagtatgggaggctcgtagttagtgtccatgtcattagccagaatatggctcttgttgacgctcctgacatggtgaggtcccaattgaacttcaagatgctagcactcactgacatca

SEQ ID NO: 238760 - DNA, 251 bp, Glycine max
gccctaaaaccctcgctgccgtcgtggtggccgcccaagaaaagagaatagagagcgcaaacgagtcttcatcttcgactcaccatgaagctcgtcaggtttttaatgaagttgaacaatgaaaccgtgtcaattgagctcaagaatggcactattgttcatggcaccattacaggtgttgatatcagtatgaacacacatttgaaaacagttaaactaactctgaaagggaaaaatccagtgactctgga

SEQ ID NO: 238761 - DNA, 330 bp, Glycine max
gagcgaaacagagagtgatttcagtgagtgatcggtgttcacttgatctcatcataatcgtcagcgtcaattgaagaagatgccgatcagaaacatcgccgtcggaaggcctgaagaggcgactcaccccgacacgttgaaggcggctttggctgagttcatctcaaccttcatcttcgtgttcgccggctcaggctccggcatcgcctacaagaagctcaccgacaacggcgctgccagccctgccggcctcatctccgcctccatcgcccatgcattcgggctcttcggcgccgtctccgtcggcgccaacatctccggcggcgaggt

SEQ ID NO: 238762 - DNA, 443 bp, Glycine max
  unsure (1)..(443): unsure at all n locations
ggaaagtgcctgaagctaactccaacactctaataatcattcggattcaggggaaaaaggacatgcatccgaggacgaggaaggtgttgtacagcttggggttgaggagaagattcagtgctgtgtttgtgaagccaagtgagggaataatggccaagcagcagagggtggaaccatatgtcacctatggatatcctaatcttaaaagcataaaggagctaatttacaaaaaaaggacatgcaaggatggaacagcgaaaagttcccttgactgataataacattattgagcaggaattaggaaagttcggtattgtatgcatagaagacatggttcatcagatttataatgctggtccacactttaaggaagttgttagatttatgtggccctttgagctcaacatgccagctgaaggattganaagatcaaaaacctcatt

SEQ ID NO: 238763 - DNA, 135 bp, Glycine max
gtttcattttgattgacttttgttttgtgcatacatgtcatttgaactgttacgttagtatttacttcgttgttgtcaatactgtttgttgaagttccgaaatcgcgtagaatttttcatttaggaacgtcgtcc

SEQ ID NO: 238764 - DNA, 280 bp, Glycine max
gagttccaaggcggagaaaacactaatggccaccaacgatgagacggatatggagaacaagaagagtgaggaagaactgaagcatctcgggtttgtgaagattgcggcaatgaaagccttagtgtgtgtgtcgaatctctacggcttcgcaaagcaaaactcgggacttttgagatctgctgttggaaccgtggaagacactgtaaccaccgttctgggtcccgtctaccacaaattcaacgctgttcccaaccacatcctcctttttgtcgacaacaag

SEQ ID NO: 238765 - DNA, 264 bp, Glycine max
  unsure (1)..(264): unsure at all n locations
agggacggtttttgtcgtcgctactaagagttgctgcttcttcagccactccgcacctcgcagcctctgtgccctcaacaaccatggctgaaatcgaaactaccgttccagatcccacccaaatcgacgtcaaactcttcaatcgctggagcttcnacgatgttgaggttaatgatatgtctctggctgattacattggagtgtccccatcaaagcatgctacataggttcctcacactgctggtangtactcagtgaacaggt

SEQ ID NO: 238766 - DNA, 333 bp, Glycine max
gagtacagaaaacgcagttctcaccatttccctctcgattgtgagacttgttgttgttaactgaacttttctgagcaagaatgtctgggcgtggaaagggaggcaagggtttgggaaagggaggagcgaaacgacaccgtaaggtgctgcgcgataacattcagggaatcaccaagcccgcgattcggcgtttggctcgtacgggtggcgtgaagcgtatcagtggtctcatctacgaagagacacgtggcgtgctcaagatctttttggagaacgtcattcgtgacgccgttacctacactgagcatgctaggagaaagaccgttacggcaa

SEQ ID NO: 238767 - DNA, 375 bp, Glycine max
  unsure (1)..(375): unsure at all n locations
gatagctgagagagaaaggaaaggttaactaagaagcaatacttcaatggccacccttgttgttcataaccaaacttcttctgctcaagatgctgaggctctccaacaggctttcaaaggatggggggctgatgacaaggccattatagcaatactgggtcacagaaatgttcatcagaggcacgaaatcacaaaagcttatgaggagatttaccaagaggatctcatcaaacgccttgagtccgagatctctggtgactttgagagagctatgtaccggtggatgttgcancctgcggatcgtgatgctgttttggtgaatgtggcaatcaagaatggcaccatagactacatgtgattgcagacattgcttgt

SEQ ID NO: 238768 - DNA, 402 bp, Glycine max
gaggttttcttagatagagttgttaccatttgctcccagtacagagcttaaccgagcttcacaaagatgaatcgggaaaagttgatgaagatggccggttcggttagaactgggggaaagggtaccatgagaagaaagaagaaggctgtccacaagacaacaaccacagatgacaaaaggcttcagagcaccctgaagagaataggggtgaatgccatcccggctattgaggaggtcaatatctttaaggatgacgtagttatccagtttctaaatcccaaagttcaagcatccattgctgctaatacttgggttgtcagtggttctccacaaacagagaagttgcaagatatactcgctagcattatccagcaattaggaccagataacatagaaaacctg

SEQ ID NO: 238769 - DNA, 323 bp, Glycine max
gattgttggcttgtgctctgctcgtgcctctagggttatcatatctccatttccatttcctctctctcagtttccaagaatcttaagctatgggaaagtcttacccaaccgtgagcgctgattaccagaaggccgttgagaaggcgaagaagaagctcagaggcttcatcgctgagaagagatgcgctcctctaatgctccgtttggcatggcactctgctggaacttacgacgtgagctcgaagaccggtggtcccttcggaaccataaagcacccctccgaagtcgctcacggcgctaacaacggtcttgacatcgctgtt

SEQ ID NO: 238770 - DNA, 323 bp, Glycine max
  unsure (1)..(323): unsure at all n locations
ggcgcctctgcttgcaagagtgaaaaccttctcttacccttctctcaagtttcaagagatttcatcatggctccaaagaaggacaaggctccaccaccttcctccaagcccgccaaatctggcggtggcaagcagaagaagaagaagtggagcaagggaaagcaaaaggagaacgtgaacaatatggtgctgtttgatcacggcacctatgacaagctcctttctgaagctcccaaatacaagctcatcactccttccattctctctgatcgtttgangattaatggatcacttgcaaggaaggctataacagaattgatggc

SEQ ID NO: 238771 - DNA, 329 bp, Glycine max
ggttgggatgggtcagaatgatgcttacgtgggtgatgaagcccaatcaaaaaggggtatactcaccttgaagtatcctatagagcatggcatagtcagcaactgggacgatatggagaagatttggcatcacacattttacaatgagctacgtgttgcccctgaagaacaccccgtacttcttaccgaggcaccactcaatcccaacgccaacagagagaagatgacccaaattatgtttgagactttcaatgtgcctgccatgtatgttgcaattcaggctgtcgtgtctctgtatgccagtggacgtactacaggtattgtgcttg

SEQ ID NO: 238772 - DNA, 323 bp, Glycine max
gatagcaaaatcgtttctccaatttaatcaccattgtacaacccaattcccttcggcgttttcgattaagagagcaatggcacgtaccaagcaaaccgctcgcaagtccaccggaggaaaggctccgaggaagcaattggcaaccaaagccgctcgcaagtcagccccggcgaccgggggagtgaagaagccccaccgcttcaggccaggaacggtggctctgagggagattcgaaagtagcagaagagcaccgaacttctgatccgaaaactcccattcgagaggcgcgtcagagaaatcgctcacgatttcaaaaccgatc

SEQ ID NO: 238773 - DNA, 322 bp, Glycine max
gtcatagtgaaagtggttgttgtgtgtgtgacattggcttggagctcttgggctgcatatcctttcatgagttctgcagtcaaccccaggagaaaagctcttgcactcgagccagtttttctcatgtatgtatctgttggttttctcatcattgccattgactaaatgcatcaatgcttctgatttctttattacgataacgacctggaatctgcgtctaaataggaatttttgtttgatgatcaaccatttttttttaattcttttctgggcctccgtttgtctgttgagaatttggttagatatatttgaagacaaacag

SEQ ID NO: 238774 - DNA, 374 bp, Glycine max
gatcggatgtcagagcactcaacctcagtaccgctacgaaagcataaccaaaagcttttgacgaagtctcagattttcctaggggctccggcaaaggcagagaagaagccggcggagaagaagccagcggaggagaaggcaccggcggagaataagccgaatgcggacacgaagatctcgaacgaaagagggagcgacaagaataagaatcgcacgatgaagagcgtggagacctagatgatctacatcttcaaggtcctcaagcatgttcaccccgacattggtatttccagcagggccatgggcatcatgaatagcttcatcaacgacatcttcgagaagctcgcccaggatgcgtcgcgttgggctcgcta

SEQ ID NO: 238775 - DNA, 445 bp, Glycine max
gtttccctttcgactgtgattttttgttaactgaacttttcgagcaaaatgtctggacgtggaaaggggggcaagggtttgggaaagggaggagcgaaacgacaccgtaaggtgttgcgcgataacattcagggaatcaccaagcctgcgattcggcgtttggctcgcaggggtggtgtgaagcgtatcagtggtctcatctacgaggagacacgtggcgtgctcaagatctttctggagaacgtgattcgtgacgccgttacctacactgagcacgctacgagaaagaccgttacggcaatggatgtggtttatgctctcaagagacaacgaagaaccctctacggatttggaggctagtttgtttttttattatttttctaatttttattgttacgtttcgtttgttttggaagtttatgtgggatgtaagagacccttgcta

SEQ ID NO: 238776 - DNA, 334 bp, Glycine max
  unsure (1)..(334): unsure at all n locations
gagagtggtggagtgtgcaaaagagcgtcgtagtcgcaaccctaatcagaagaagcgcagcttcaagcgagtgacagccaccagccatgggtcgtatgcacagccgcggtaagggtatatcctcttctgctttgccctacaaaaggacacctcctagctggctcaaggtctcttcgcaagatgtcgaagaaaatatctgcaagtttgcgaagaaaggtttgaccccgtctcagattggtgtcattctcagagattctcacggtattgctcaggtcaatancgtcactggcagcaaaatccttcgcatcctcaaagctcacggacttgcgcctga

SEQ ID NO: 238777 - DNA, 234 bp, Glycine max
gaacggcgtttccaccagcggtgactctctgagatctattcctacgccgtttctcaccaaaaccttccaactcgtccacgatcacaccatcgaccatgtgatttcgttgaacgactctggattctccttcatcgtctggaacaccaccgcttttcgccaaaggatttgcttcctaaatatttcaatcacaacaacttctccaacttcattccccaactcaacacttacggattc

SEQ ID NO: 238778 - DNA, 413 bp, Glycine max
ggcagccatcatttcccttctcttagtaatcctctttgtccttcttcttcacctctacgccaagtggttcctcgctcaagcacaggctcaggccaacgcccgccgccggaggcggcgccgtcgcacgacggtgaccgtctccgacgtcctaggcccggcaaggttccaccacttccacagcttcaccatagaagacagttcacccctctcaacaaaagggttagattcttcaaccattagaacaattccactgttcatctatgaacacaacaacaacaacaacaaaaaggtcgaagaagaagaagaagaacttgaatgtgtgatttgtttgagtgcatttaagaatggtgaagtgggaaggtgtttgccaaagtgtggccatggcttccatgtggagtgcattgacatgtggt

SEQ ID NO: 238779 - DNA, 345 bp, Glycine max
  unsure (1)..(345): unsure at all n locations
ggtgacagtgaacagatggaaggcatagtacacaggacagttgaagtgaatggcataaaatgcatgttgctganaaaggtgaaggtcccgtggtcttgttcctccacggcttcncggagctctggtactcctggcgccaccagattctggctctcagcaacctcggctaccgcgccgtggctccagatctccgcggctacagagacaccgaggcaccagcttcaatcagcagctacaccatcctccacttagtttctgacatcgtcgcgctcattcactcacttgctgtggattaagtcttcctcgtagcccatgattggggggctgtcataggttggtacctcg

SEQ ID NO: 238780 - DNA, 263 bp, Glycine max
gggccgtacgggcaaatcgtcaagttcgacaactttgtgtttgggcagtcctgcgcatggaacaactgggccaacgggcattacaccgagggtgtggaattgaatgactccgttctcgatattgtgcacaacgacgctgataactgcgaatgcatgcaaagttttcacgtgtgccaatccctggggggaggaactggatcaggaatgtgaaccatgctgagttctacgatcaaggaatactacccagatagaatgatgcttaa

SEQ ID NO: 238781 - DNA, 328 bp, Glycine max
gaagaaggtaaagaagatccgaacttctgtcactttccacaggccgaagaccttgaagaacgacaggaaccccaagtaccctcgcattagcgccccgccgaggaacaagcttgatcattatcagatcctgaaataccccctcaccactgagtctgccatgaagaagattgaggacaacaacactttggttttcattgtcgacctgcgtgccgacaagaagaagatcaaggatgcggtgaagaaaatgtatgacatccaggccaaaaaagtgaacaccttgatcaggcctgatggcaccaagaaggcatatgtcaggttgacacctgat

SEQ ID NO: 238782 - DNA, 405 bp, Glycine max
  unsure (1)..(405): unsure at all n locations
gacaccaagtcctgctcttcttccagagcaacaacaaacaaaccctttctttctggcttcagtttttgcagtgaaaatggcggtgactttaacatcaaccctctttatggctttgctatttgctgcttcagcttttgctgctcttcagcctagagtacctgaagcttaccttcaaaatggaaactttgaggagcagccaaaccccaaaaacctccagaaaacaaagctcatggggaaatattctttgcccaaatgggaagtcaatggtctggttgagtatgtctctgggggtcnccaacctggaggcatgttcttcccagtgactcatggaatccatgctgtgaggcttggcaatgaggcctcaatctcccaaaatatcaaggtcaaacccggtcaactgtatgc

SEQ ID NO: 238783 - DNA, 230 bp, Glycine max
gactttctattggccttaaaccaaacgcagcatcgctattctcttcattccagggcttagcccatgcagcaaaacgtggattaacctaatttcaaactcgctatcgtccgctatggtgtgacaggtcagacatcgcttgtcaacaggcatctcaccggagaactcgacatcaaatatgagccaatcatcggtgtggaggttcacccattggcttttttcacaaactgtgg

SEQ ID NO: 238784 - DNA, 336 bp, Glycine max
  unsure (1)..(336): unsure at all n locations
gaccaccgcaaagcaatgggcgctatactttctgccttaactggcggtgccgcaacggcggcgacgtcttcgccggagagttctgcttctanggtccagtctttccactcttcggcgcgctggcagctccacttcaacgagctcaaagaaaccaataagctcgttgtgatagatttctcggcgtcgtggtgcggcccttgcaaattcatagagccagcgattcacgccatgtccgaaaagttcaccgacgttgacttcgtcaagatcgacgtcgacgaattgcgggatgtggcgaaggagtttaatgtggatgcgatgccgacgttcgtgttgtgt

SEQ ID NO: 238785 - DNA, 398 bp, Glycine max
gacagaacaaaaacaaagaaaaaaaaaaacccttagccaacacaaccatcatggccacctctgctattcagcaatcagcattcactggtcaaactgctctgaagcagctcaatgagttcgtccgcaagaccggtggcgccggcaaaggtcgcactagcatgcgccgcaccgtcaagagtgctcctcagagcatttggtatggccctgaccgtcccaagtacttgggtccattctcggagcagattccatcatacctgaccggagaattccctggtgactacggatgggacactgctggattatcagctgacccggaaaccttcgccaggaaccgggagctggaggtgattcacagcagatgggcaatgcttggtgcccttggctgcaccttcccagag

SEQ ID NO: 238786 - DNA, 388 bp, Glycine max
cggggtccctcttactaacactagggtttacagagaagcgaagaggcgcagccgtagcagtaactcgtggaattgctagcaatggcgaggatcaaggtttacgagctgaggcagaagacgaaggctgatctgttgaatcagcggaaggatctcaaggtcgagcttgccttgcttcgtgttgctaaggtcaccggcggtgcatctagcaagctctcgaagatcaaagggggtaatgttgaacattgcccaggttttgacggtgatttctcagacgcagaaggccgcgttgagggatgcctactcgaacaataagtacatgcctctcgatctccgccctaagaagaccatggccattcgcatgaggcttactaagcaccaggcatcattg

SEQ ID NO: 238787 - DNA, 328 bp, Glycine max
gatgccgaaaagtagtaccaagatggcttcagttgtgtatctcctctttggcttccatctcattgttatcatgtcaagttccttacccgcaactagtgaagtgtttgcaaaacagtatccatccacagaacccgtggaagaaaaactcacccaactccacttctatttccataacaacataacgggggaacacccaactgctatgaaaactgttttgcctcctaaggggtccattcatggttttggggctacttacatgatggatgaccctctaactgaaggaccaagtccaacttcaaagcttgtgggaagatctcaaggaatatac

SEQ ID NO: 238788 - DNA, 389 bp, Glycine max
ggtgtctgctcactcgctcttctccgccacttctgaatctattgaatcaacaatcatgtcggacgaagagcaccatttcgagtccaaggccgacgccggagcctccaaaacctacccgcagcaagccggtaccatccgcaagaacggctacatcgtcatcaaaggccgcccctgcaaggttgtggaagtttcgacttccaaaactggaaagcacggtcacgctaagtgtcactttgttggaatggatattttcactgccaagaaacttgaggatattgtgccctcttctcacaactgtgaagttccccaagtgaatcgtactgattaccagctcattgatattgctgaagatggatttttgagtctgcctactgaaaatggtaacacta

SEQ ID NO: 238789 - DNA, 335 bp, Glycine max
gcacaatcgaacgggaaaaggcgtcttcataaacgccgcccaaaacttctcatacccttttattcattccattcgtttctagggttttcttttctttgccgagaaaatgagagagtgcatttcgatccacattggccaggccggtatccaggttggaaacgcctgctgggaactctattgccttgaacacggcattcagcccgatggacagatgccgagtgacaagaccgttggcggaggagacgacgccttcaacacatttttcagcgagaccggcgccggaaaacacgtgccccgcgccgtcttcgtggatcttgaaaccaccgtgatcgacg

SEQ ID NO: 238790 - DNA, 407 bp, Glycine max
gactcagctttatccataaagcacaatttttttgcttcaacgggccttaccttacctgaagatggcttcggtgtcctttgccgtgggattattaccttgctcttcttcttcttgctatacccgcgtctcttatggttcagttcgatttcccgtattgaacaacgccaactcactgaaactcagctcctcagctaacatctccagtccaattcttcaccaaaagctttgcactgttccttctccccttgctctaaggcctcgccctctcaccattgtatccgctaagggctacaaaatgaaaacccacaaggcatctgcaaagcggtttaaggtgacggggcgaggcaagatagtgcgtaggagagctggcaagcagcatttgctcgttaagaagaataccaagcgca

SEQ ID NO: 238791 - DNA, 433 bp, Glycine max
gaaaccacaagtaaaagaaagaagctttcttgagttgagttaacagcatggagagggaggaagatgttaaggttggagcacagaaattctcagagaggcaagcattggggacaggagctcagggtgacaaggactacaaggaggcaccaccagcacccttgtttgagccaggggagttaaagtcatggtctttttacagagctgggattgcagagtttgtggccacattcttgttcctctacatcactgtcttgactgtcatgggtgtcaacagggcacccaacaagtgctcctctgttggcattcaaggaattgcatgggctttcggtggcatgatctttgccctcgtcgactgcactgctggaatatcaggtgggcacataaatccggcagtgacgttcggtttgtttctggctaagaagctgtccctgac

SEQ ID NO: 238792 - DNA, 341 bp, Glycine max
cggggaagttattacggtttttgagtgcggcggtccaaacactcttctctgcagcttttgcctacaactcccttcaccatggctgaacaaaccgagaaagcttttctgaagcaaccaaaagtgtttctcagcacaaagaagactgggaagggaaagagacctggaaaaggtgggaaccgcttttggaagtccattgggcttggatttaagactcccagggaagccatcgaaggaacctatattgacaagaagtgccccttcactgacaatgtttccatccgtggccgtatcatggcttggacatgtcacagtgctaagatgaacaggactattattgttac

SEQ ID NO: 238793 - DNA, 399 bp, Glycine max
gagtctcggaatccatcgatccaaaaccctaattgaagttgtcttgtctgcgttctcaaacgttgttgcttgctgctgctgcatagttgatcgaaagcatgacaacatcattgtccagcatccttttcaagggaattgcagctcgttctttcaccgcccctctaactaggtcctgttatcatggaatgagatactttgctactgtatcaaatgatcctgacacacatgatgacttcaagccagctaataaacttgagaattccaacatttctttggctgatgttattgagcaagatgtcaaggataatcctgttatgatttgcatgaaaggtgtgcctgattttccacagtgtggatttagttctcttgcagttagagtgttacaacaatatgatgttc

SEQ ID NO: 238794 - DNA, 426 bp, Glycine max
gagttgggaaaccctaattctgcgtggtgagtgaaaatggcggtacccttgctctccaagaggatcgtgaagaagcgcgtcaagaagtttatacgcccccagagtgatcgcaagatctccgtcaagccaagctggcgcagacccaagggtattgattctcgtgtcaggagaaagttcaaaggatgcactttgatgcccaacattggttatggctcagacaagaaaacccgccattatctaccaaatggtttcaagaaatttgtcgtgcacaatgtgaaagacctggaacttctcatgatgcataacaggacatactgtgctgagattgctcacaatgtatccacaaggaagaggaaagacatagttgagagagctgctcagcttgatgttgtcttgacgaacaagacggccagactacgtagccag

SEQ ID NO: 238795 - DNA, 417 bp, Glycine max
ttccagtagtaattctaggtactattgcctgtaacgtaggcttagcggttctagaaccatccatgattggggaacccgcggatccatttgcaactcctttggaaatattacccgaatggtatttctttcccgtatttcaaatacttcgtacagtgcccaataagttattgggcgttcttttaatggtttcggtacctacaggattattaacagtaccctttttggagaatgttaataaattccaaaacccatttcgccgtccagtagcaaccaccatctttttgattggtactgtagttgccctttggttaggtattggagcaacattacctattgagaaatccctaactttaggtcttttttaaacttataaaattgattccattttgaaataaaaaaaaataaaatgccatgtgt

SEQ ID NO: 238796 - DNA, 358 bp, Glycine max
gagggttttgtgctgttgtcgctgctcatcctccataacctccgagctctacaccgaagaacgaagccatggggaagacacatggaatgggagctgctcgcaagctcaagtctcaccgcaggaggcaaaggtgggctgataagtcatacaagaaatcccatcttgggaatgaatggaagaaaccttttgccggttcatcccatgccaagggaattgtccttgaaaagataggtattgaagctaagcagcccaactctgctattcgtaagtgtgccagagttcaacttatcaagaatgggaagaaaattgcagcttttgtccctaatgatggttgcttgaactacattgaagagaatga

SEQ ID NO: 238797 - DNA, 417 bp, Glycine max
  unsure (1)..(417): unsure at all n locations
ggttcttcctttgccttctccttcttcttcaaccctttttctttctctttctttcgcactttcattctctaaaaaaatctaagtccctttggtcttcatcttctgttctgatccaggtatggcttctaaacgcatcttgaaggagctcaaggatttgcagaaggatcctcctacctcatgcagtgcaggccctgtggctgaggacatgtttcactggcaagccacaatcatgggacctgctgatagcccatatgcaggtggtgttttcctagtttcaattcattttcctcctgactatcccttcaagccaccanaggttgcttttcggactaaggtgttccacccaaacatcaacagcaatggaagtaaaggtcttgacattctcaaggagcaatggacccaagccctaacaatttc

SEQ ID NO: 238798 - DNA, 363 bp, Glycine max
gacagcaaaacaattttcaaactcaattaccattccataacctaaatctcctctttgtttccgagtcagagagcaatggcacgtaccaagcaaaccgctcgcaagtccaccggcggaaaggcgccgaggaagcaattggcgactaaagccgctcgcaagtcagctccggccaccggcggagtgaagaagccccaccgcttcaggcccggaacggtggctctgagggagatcagaaagtaccagaagagcactgaacttctgatccgaaaactcccattccagaggctcgtcagagaaatcgctcaagatttcaaaaacagatctccgttccaaaagcagcgctgtttctgcgcttcaggaagc

SEQ ID NO: 238799 - DNA, 416 bp, Glycine max
  unsure (1)..(416): unsure at all n locations
gatgccgaaaagtagtaccaagatggcttcagttgtgtatctcctctttggcttccatctcattgttatcatgtcaagttccttacccgcaactagtgaagtgtttgcaaaacagtatccatccacagaacccgtggaagaaaaactcacccaactccacttctatttccataacaacatgacgggggaacacccaactgctatgaaaactgttttgcctcctaaggggtccattcatggttttggggctacttacatgatggatgaccctctaactgaaggaccaagtccaacttcaaagcttgtgggaagatctcagggaatatacgctttggcttcacaacatgagcctgngttgctcatggtgacaaattttctcttcactttgggcatttacaatggcagcaccctcagca

SEQ ID NO: 238800 - DNA, 361 bp, Glycine max
gacatcagagaaagtaaagagtctgagtatgggaggctcatggtcatggcagctcacatgtgccctcttgctactcttctccgccgtagtcaccgccactgaccacattgttggtgcgaatcgtggctggtaccctggctttaactacactctttgggctcaacaacatactttctatgttggcgatcttatctcattcaggtaccaaatgaaccaatacaatgtgtttgcagtgaaccaaactgggtatgacaactgcactacataaagggcagtggggaattggagcagtgggaaagatttcataccccttaacaaagccaatagatattacttcatttgtggcaatggccaatgcttc

SEQ ID NO: 238801 - DNA, 422 bp, Glycine max
gacgttcacattcaggaatcgttttcttcagaaatttgccatcgttgagagaagcgtgagagccttagtcgttcaagatgagagctaagtggaagaagaagcgcatgaggaggttgaagaggaagcgccgaaagatgggacaaagatctaagtaggtgcttgagcaggagttgagatgagctttccatctgctaccagcctcatgacattttaggctgttatggctcttatgatcttgaggtctagtcgctaggggagcttcactcttgacttagtttgctttactggtcctggtcctggtccaagactattgagtgtgggttaagttgtgatgtttagtgttttgtggtatctaattatgtactggtttttatactttttggttgaatagctatatattagtatcgagacttccaggcgag

SEQ ID NO: 238802 - DNA, 351 bp, Glycine max
gactttccattctcttcaaacctaacgcagcatcgctattctcttcattccatggctttgcccaaccagcaaaccgtggattaccctagtttcaaactcgttatcgtcggcgatggtggcacaggaaagacaacctttgtgaaaaggcatctcaccggagaattcgagaagaaatatgagccaaccatcggtgtggaggttcacccattggattttttcacaaactgtggaaagattcgattttactgctgggatactgctggacaggagaaatttggtggcctcagagatggatactatatccatggacaatgtgctattatcatgtttgatgttactgcccggctaaca

SEQ ID NO: 238803 - DNA, 423 bp, Glycine max
gaaaaacatcatatcatttaagcaaaggctaaccctaaattgcgctgtctctcgtcactatcgggagaagtaatcgagcttcagcaatggtgtacgtcaaggctcagaaatcaaaagcctacttcaagagatatcaagtcaagttcaagagaagaagagagggaaaaaccgattaccgtgccaggattcggttgattaatcaggacaagaacaaatataacactccgaaataccgatttgtggttcgctttagcaacaaggacattgttgcacaaataatatctgctagcattgccggcgatttagttcttgctacagcatattcacatgagctgccacgatatggtcttgaagtaggacttacgaattatgcagcagcttattgcactggtctcctgttggcccgaagagtcctcaaaacac

SEQ ID NO: 238804 - DNA, 363 bp, Glycine max
gattcaaaacttcaatccctcttttgcttaccaaattccattttccaattcagaaccctaactccgttcgaagcaccaaatcgtgatggcaccaaaggcagagaagaagccagcagagaagaagcctgtggaggagaagaaatcgacggtgggagacaaggctccggcggagaagaagccaaaggccggaaagaagcttccgaaggagggaggcgccggcggagaaggtaagaagaagaagagaaacaagaagagcgtggagacatacaagatctacatcgtcaaagttctgaagcaggttcaccctgacattggtatctcaagcaagggcatgggaatcatgaacagcttcatcaacgacat

SEQ ID NO: 238805 - DNA, 348 bp, Glycine max
gaaaccggaaaaaaaatggattcattgagtgatcggtgttcacttggatctcatcataatcgtcagcgtcaattgaagaagatgccgatcagaaacatcgccgtcggaaggcctgaagaggcgactcaccccgacacgttgaaggcggctttggctgagttcatctcaaccttcatcttcgtgttcgccggctcaggctccggcatcgcctacaacaagctcaccgacaacggcgctgccacccctgccggcctcatctccgcctccatcgcccatgcagtcgccctcttcgtcgccgtctccgtcggcgccaacatctccggcggccacgtcaaccccgccgtcacc

SEQ ID NO: 238806 - DNA, 425 bp, Glycine max
gctcctttgtttgattagggttttttcgcttcttctattcactctgttacggtgcaacctagcagcctccaaatccaatggcttcagagaagagactttcgaacccaatgagggagataaaagtgcagaagctcgtcctcaatatctctgttggtgagagtggagatcgtctcaccagagccgccaaggtgttggaacaacttagtggccaaaccccagtgttttccaaagcaaggtacactgttcgttcctttgggattagaagaaatgagaagattgcatgctatgtcactgtcagaggtgacaaggcaatgcaacttttggagagtggtttgaaggtgaaggaatatgaacttctcagaaggaacttcagtgatactggttgctttggctttggtattcaagagcatatcgatttgggaatc

SEQ ID NO: 238807 - DNA, 302 bp, Glycine max
gaaacactcttttgctaactcccaagagctcaccacaacagcatgatgcacaccaattctcatgctgaatattgggccatacttgtctgccaaggatcctaacgttatgtaaggtggctgagtggaaccacctaagaggtgaagatgaccgatcaaaggccagccaccgcctgctgccggtggcttgcgggcagaacctgctgtagcccttttgatgaagtaagaaactaagattatgccaataattgcggcaactgatgcctccaggtactgaatcctgagacccatgacagtttgagaaa

SEQ ID NO: 238808 - DNA, 517 bp, Glycine max
  unsure (1)..(517): unsure at all n locations
ggnnntttggaacggtcacgtcagcctgcggtaaggtccgaaatcccggggccatccgcccacgcgtccgacggctgcgagaagaggacacacagagaatgcattggatggatgcccgggcagtgagaacgaacgacgctttcatacgcgacacgccatggggagataccgtctgtgatccacggatctccgatcgggaaaccgtatccaagctccgctgctagtctgcactctttgggcttttaaaacttaacgaactgaaacatcttagccaccaactgaatggaaatcaaccgataccccgttagtagcggctagcgatagcggattggagtttgaaggaatgcaaacacgaagcttcgaatcactttcgagtatgataaattcctcagcagcaaactgttcacatcatattcaccacgtttcaatcgaattgttgtggaatggatgatggaaaaatcaacaagcccctttcaatgaaagggtccantgaacggaattgttataaagttgggaa

SEQ ID NO: 238809 - DNA, 351 bp, Glycine max
ggaagagaggatactgcagcagcaggaggaatttgacactcctgaaaaggagactggaaaaaattgagttgcacctgtgttcaaagcaagggtgtaaagaggaaaatgagtcaaaagatgtggagtcaagtgggtttatgaggaggctattgcgtgtttacaaaagtgaggatgatcctggaatggtgaagtcaatggatttggacatggatgatcaagaaccccttggccgcaaggtaaacatcgttggtggagttatgtgcaggagtgattacaatgttaaacaagactcttcaaatcaacctggtccgaatgctttgactggtgtaaaagaagatgctcaagtttttt

SEQ ID NO: 238810 - DNA, 413 bp, Glycine max
ggcgttccttctccttctgtccgctgcgactctctttccttccctctttttccgaatctgaatcgaaatggcttcggagactgagacgtttgcttttcaggccgagatcaaccagctcctcagtctaatcatcaacaccttctacagcaacaaggagatctttcttcgtgagctcatcagcaatgcctctgatgctttggacaagattcgatttgagagtcttacagacaagagcaagcttgatgctcagccagagttgttcattcacattattcctgacaagaccaacaacacattgtctatcattgacagtggtattggcatgactaaggccgatttggtgaataacctcggtactattgcaaggtctgggaccaaggaattcatggaagccctggctgctggtgctgatg

SEQ ID NO: 238811 - DNA, 290 bp, Glycine max
ggttcccaattcatcgtggcctccgcctcctttaacccccccctccaatcccaaatcgaaaaaaattcgttttaagttcccccaaaggaaccttaggttgcacaaccaaaggatttggaaccaatccccggtggaaaaattgcaaaacccaaatttcccccggccgttaaaaattatgaaaattaccatgtttgctatggaggtcaagaggaagagagaaaagctaattataccgatatggttaataaatactaagattctgttaccagcttttatgaatttggctgggg

SEQ ID NO: 238812 - DNA, 375 bp, Glycine max
  unsure (1)..(375): unsure at all n locations
gctccttttcttctctccagacaatttctctcgcctctctctctctacaaatccttcattctttcttctcttcgctgctcactgtagccatggctttcagagtatgatgagcgggagggggaaatgtctcttctggcatgggtgttgctgagcataatgtaaacaccttcctggaattgcagaggaagaaagttcatcgctatgtgatttttaaaaatgatgagaaaaagaaaaggttatcgtttgaaaaactgganggcctgctgagagctatgatgatttcactgcatccttgcctgaacatgattgccgatacgctgtctttgactttgattttgtgacatctgagaactggcaaaagagccaaatcttttt

SEQ ID NO: 238813 - DNA, 363 bp, Glycine max
gacaacacagaacataaacaaagaaaaaaaaaacccttagccaacacaaccatcatggccacctctgctattcagcaatcagcattcactggtcaaactgctctgaagcagctcaatgagttcgtccgcaagaccggtggcgccggcaaaggtcgcactaacatgcgccgcaccgtcaagagtgctcctcagagcatttggtatggccctgaccgtcccaagtacttgggtccattctcggagcagattccatcatacctgaccggagaattccctggtgactacggatgggacactgctggattatcagctgacccggaaaccttcgccaggaaccgggagctggaggtgattcacagcaga

SEQ ID NO: 238814 - DNA, 397 bp, Glycine max
gactcaccacttcaaaacactcataacacaaagcacaaagcaaagctcatccttgagttaaaaaaatggcagcagcttcttccatggctctctcatccccatccttggctggcaaggccgtgaagctgggcccatcagccccagaagtgggaagggtgagcatgaggaagaccgtcaccaagcaggtctcctcaggaagcccatggtacggcccagaccgagtcaagtacttgggcccattctctggcgagcccccgtcctacctaaccggtgagttcccaggcgactacggctgggacactgctgggctttccgcagacccagaaaccttcgccaagaaacgtgaactcgaagtgatccactccaggtgggccatgctcggagccttgggctgcgt

SEQ ID NO: 238815 - DNA, 353 bp, Glycine max
gacagcaaaacaattttcaaactcaattaccattccataacctaaatctcctctttgtttccgagtcagagagcaatggcacgtaccaagcaaaccgctcgcaagtccaccggcggaaaggcgccgaggaagcaattggcgactaaagccgctcgcaagtcagctccggccaccggcggagtgaagaagccccaccgcttcaggcccggaacggtggctctgagggagatcagaaagtaccagaagagcactgaacttctgatccgaaaactcccattccagaggctcgtcagagaaatcgctcaggatttcaaaacagattttcgtttccagagcagcgctgtttctgcgct

SEQ ID NO: 238816 - DNA, 395 bp, Glycine max
gggggaacacccaactgctatgaaaactgttttgcctcctaaggggtccattcatggttttggggctacttacatgatggatgaccctctaactgaaggaccaagtccaacttcaaagcttgtgggaagatctcagggaatatacgctttggcttcacaacatgagcctgggttgctcatggtgacaaattttctcttcactttgggcatttacaatggcagcaccctcagcattcttggcagaaaccctacatttataaaagttagagaaatgccaattgttgggggtactgggatcttcaaatatgcaaggggttctgctgtgcttacgacatatgtgtatgacatcaccggtggtgttgcaattgttgaatacaacgtgactgccatgcatg

SEQ ID NO: 238817 - DNA, 395 bp, Glycine max
gaaagaaaaatgaaaatagtagaaaagaaggcattaggttaagagtgaaggcagtgagcgaaagagagcatagtaatacttactgagtgcttacagttgctgcgtcgcaaggtaccggcggcgacggagaactatcttctcaattttcgatcactgcattggttctgttgacaagggttttgttcttcctgacttgcatacttgatggcttcaaagttgcagaagttgcaggccacagcctctcaagcgtctcaatttgtatccagtcgtggaactaactactacaagcaattgctggaacagaacaagcaacacattcaggagcctcctacagtagagaaatgcaacctgttggcaaagcaattgttttacactcgccttgctagtattccgag

SEQ ID NO: 238818 - DNA, 364 bp, Glycine max
ggtagagactctattcaaacccacatctcagtctctatctcaagctacttcacagaaaatggcggtgcctctgctctcaaagaagatcgtgaagaagagggtaaagaagttcaagaggcctcagagtgacaggaaaatttccgtcaagactaactggcgcagaccaaagggtatcgattctcgtgttaggagaaagttcaagggatgcactttgatgccaaacattggttatggttcagacaagaagacccgccactatctccctaatggtttcaagaaatttgttgttcacaatgtgaaggatttggaactgctcatgatgcacaacaggacttactgtgctgaaattgccacaatatatcca

SEQ ID NO: 238819 - DNA, 371 bp, Glycine max
gggatccgaggttcttaagtaacagaacacacaaaaccctagttagtgttagtgttcctcaagccaccgtaccgtgttgcctctctgcaatctacagccaaaatgcctttcaagaggtacgttgagatcgggagggttgcccaaatcaactacggcaaggaatatggcaggctcgtcgtcattgtcgacgtcattgatcagaacagagctcttgtcgatgcccctgatatggtgaggtcccaagtcaatttcaaaaggctttccctaaccgatattaagattgacattaagagggtccctaagaagaaagatcttgtcaaagccatggaggatgctgatgttaagaccaagtgggagaagagttcatgggg

SEQ ID NO: 238820 - DNA, 335 bp, Glycine max
cgcgtcacgacgggctgccgagaaaaacgacaaaaaggggatcaacattcaagttcgcaccaaattttcctctcaaaatgtcacgccgtggaaaaggtgggaaaggtttgggaaagggaggagctaagaggcacagaaaggttcttcgtgacaacattcaaggaatcacgaaacctgcgattcgtacgttagcgagaagaggtggcgtgaagaggatcagtggtttgatttacgaggagaccagaggagttctgaagatattcttggagaacgtgattcgcgatgctgtaacctacactgagcacgctatgaggaaaactgttactgctatggat

SEQ ID NO: 238821 - DNA, 332 bp, Glycine max
gaagcctaaaaataaaatatcttgtcattcaattccactcacattcgccatatcgtcttctcccatggccgccaccgatgaatccctccgcaaatccctcgccgagaagcacgccgcagtggaagcccaaggcaacgccgtccgcgccctcaaggccgccaaagccgccaaacccgaaatcgacgccgcaatcgaagccctaaacgcgctgaagctcgaaaaaagctccatcgagcactccctcctcggcggctccgacagccgcgaggccttccgtcagtccgtggtgaacacccttgaacggcgcctcttctacatcccctccttcaaga

SEQ ID NO: 238822 - DNA, 254 bp, Glycine max
atgctcctgttttctcacagtcccacaacagcaatggtagcaatcacacacggagttaataacatcaacatctctgattcttataataagaatcgcattcaggtctccaacaccaaaaagcctctcttcttctacgtcaatctcgccaagaggtatatgcaacagcataatgaggttgagctctcagcactaggaatggctattgctacagtggttaatgttgctgaaatcctgaaaaacatttagcttgccat

SEQ ID NO: 238823 - DNA, 225 bp, Glycine max
ccgattgcttcatagaaatgtgtaaaaaatagaatcgctcttaaaagccgagtactctaccattgagttagcaaccccaatacaatttagaaaataacgtgggtgtatatatccaatcgcaataaaaacaataaaatgaaaagattgaattgtctaataaaatatcagacattcaaaaaaatagaaaaactcaaaatgttgaagtcgaattgattctcaacatac

SEQ ID NO: 238824 - DNA, 372 bp, Glycine max
gactcaccacttcaaaacactcataacacaaagcacaaagcaaagctcatccttgagttaaaaaatggcagcagcttcttccatggctctctcatccccatccttggctggcaaggccgtgaagctgggcccatcagccccagaagtgggaagggtgagcatgaggaagaccgtcaccaagcaggtctcctcaggaagcccatggtacggcccagaccgagtcaagtacttgggcccattctctggcgagcccccgtcctacctaaccggtgagttcccaggcgactacggctgggacactgctgggctttccgcagacccagaaaccttcgccaagaaccgtgaactcgaagtgatccactccaggtgggc

SEQ ID NO: 238825 - DNA, 376 bp, Glycine max
gatccaactctctaaacaacacattaacctttctcattccccatctcctcaccttattcagccactgctaatttctagggttccgaaatggacgctggcggaaagatcaagaagggcgccggaggaagaaagggcggcggccctaagaagaagccggtttcaaggtccgtcaaggccggtctccaattccccgtcggaagaattggccgttatttgaagaaaggaacgtacgcccagcgtgtcggtaccggtgctcccgtttacttggccgcagttctcgagtacctagctgctgaggtgcttgagttggctgggaatgctgcacgtgacaacaagaagaacaagattattccgagacatgtgccattggctgtga

SEQ ID NO: 238826 - DNA, 405 bp, Glycine max
gaagctcagtgatcacaacctacgccgagtgaaaccccaatcccaatacactcccaactcacaaagccatgtctccaggtcctgttgtcgacgcttcccctgaggttgaagcagagcaacaacttccctccgtcgatgacgcaacccagttgaagaaatcccaaccgcaggaggatgatgctcccgttgtcgaggacgtgagggatgatgacaaggacgacgacgatgaggacgacgacgacgatgatgaagatgacaaggaagacgatgctctaggtggtgctgagggttcaaagcagagcagaagtgagaagaagagtcgaaaagcaatgttgaagctgggactaaaacctgtcaccggtgttagtagggtcacaatcaagagaacaaaaaatattcttttct

SEQ ID NO: 238827 - DNA, 392 bp, Glycine max
gggacttgtgcgttgaagttatagagagagacgagtttggagagaagagtgaagaaggcaaatcgcgaagactagatctgatctgagagaatggctcctcggtctagcagcaaggacgcccaagaccttttccgcgctctttggtctgcttatgctgcaacccccactaatctcaagatcattgatctctatgtcatctatgccgtattcaccgctttcatccaggttgtttacatggctttggttggatcatttccatttaactccttcctatcaggagtactttcttgtgtaggaactgctgttcttgctgtttgtctcaagatccaagtgaataaagagaataaggaattcaaggatcttgcacctgagcgcgcttttgcggattttgt

SEQ ID NO: 238828 - DNA, 225 bp, Glycine max
ggagacagggatttccatagctcgcaatacatcacacatgtctgagcacatccctgcgttaaaaaatgggagcaggttcttccatgggatctctcatcgacatccgtgggtgggaatgccgtgaagctgggcccatcagccccacaagtgggaaaggtgagcatgaggaaaaccgtcaccaaacaggtctcctcaggaaacccatggtatggcccataccgactc

SEQ ID NO: 238829 - DNA, 367 bp, Glycine max
gacagcaaaacaattttcaaactcaattaccattccataacctaaatctcctctttgtttccgagtcagagagcaatggcacgtaccaagcaaaccgctcgcaagtccaccggcggaaaggcgccgaggaagcaattggcgactaaagccgctcgcaagtcagctccggccaccggcggagtgaagaagccccaccgcttcaggcccggaacggtggctctgagggagatcagaaagtaccagaagagcactgaacttctgatccgaaaactcccattccagaggctcgtcagagaaatcgctcaggatttcaaaacagatcttcgtttccagagcagcgctgtttctgcgcttcaggaagccgcag

SEQ ID NO: 238830 - DNA, 375 bp, Glycine max
gacaaccctagctagcagtccctcagcattgtgtgcccacaaagcagctccttttcctgttccgttgagagaagatgggattttgggggacgcgggtgatggagattgtgaagaagcatgattctggagggctggtttggaagagaatcaagctcaccaccacccgaaaagccaatgctaagaagcgtcttcttcgggtttggcagaatgaagctgtcctcaaagcctgttctgctactcccaacgaacctcaacctacaccagtggctacaccagtggctagttaagttcaagcccagccatctcaatttcattacttttcttttcccttcccttcacaaatattgtcactacttttacggcttcagttacata

SEQ ID NO: 238831 - DNA, 400 bp, Glycine max
gaacatttgtctctcatctttcaatttcaatcaacggttatacccttttctatttgagcatcatcatgtccaccgcagcgcagcccaaggccaagaaaacggcgtcgtccaagaagcccctctcccatcctaccttcgccgcgatgatagcggaggcgatagcgagtctgaaggagagaaccggttcgagccaatacgcgataaccaaattcatcgaaggcaagcacaaggagttgcctccaacctacaagaagcttgttctcgttcatctcaagaagtctgttgctgctggcaagctcgttaaggtcaaaaactctttcaagctcgcaccgactaagtctgctcctgttaaagccgctgctgctcccaagaagcccaccaaagctgcggctaagcccgc

SEQ ID NO: 238832 - DNA, 350 bp, Glycine max
gagttcacattaagggatcgtcttctgcagaaatttgcgccatcgtcgagagaagcgtgagagacttctcgtttatgatgagagctaagatagtttagttgtcaagtcataaatcagtatcatcactttaaatttcattagaagctgtcaaaatgtcacggaagggtttgatggagcaagacctgagtaagttggatgtaacaaagttgcatccactttctccagaagtcatatctcggcaggctactattaatatcggcactataggtcacgtggcccatggcaagtcaacagttgtgaaagcaatatcaggtgtccagactgtgcgtttcaaaaatgagttggagcgt

SEQ ID NO: 238833 - DNA, 400 bp, Glycine max
gacacttactagtagtaagcatggagtcctcaaagatctatgcttacctcttcctctgcatgatctttctctcttccgccactcccattctcggttgtggctactgtggcaaaccccccaaaaagcacaagcctggtaaaacaccaaagacacccaaaacacccgttgttaagccaccagtcaccatccctcccattaatgttcctcccgttgttcttccaccaatagtgaagcccccaggtattctccctccaattccaattattaacccaccaaccacaccagggaagggagggaacactccatgcccaccaccaaagtctcctgcgcaggctacgtgccccattgacacgctcaaacttggtgcctgtgtggatcttcttggagggttggttcacat

SEQ ID NO: 238834 - DNA, 386 bp, Glycine max
gagcgaaacagagagtgatttcagtgagtgatcggtgttcacttgatctcatcataatcgtcagcgtcaattgaagaagatgccgatcagaaacatcgccgtcggaaggcctgaagaggcgactcaccccgacacgttgaaggcggctttggctgagttcatctcaaccttcatcttcgtgttcgccggctcaggctccggcatcgcctacaacaagctcaccgacaacggcgctgccacccctgccggcctcatctccgcctccatcgcccatgcattcgccctcttcgtcgccgtctccgtcggcgccaacatccccggcggccacgtcaaccccgccgtcaccttcggcgccttcgtcggcggcaacatcaccttcctccgcg

SEQ ID NO: 238835 - DNA, 270 bp, Glycine max
gtcgctctgaccgggaaaagaaaaaccagctttcttcaagcacctagatttcctctctctctaaatggcgttctcttcttttctcggcagagtcctcttcgcctctgttttcatcctctcaggttaccaagaatttaattcttatggagttgttgggggagtcgcagtaaaagcactcagaccgaagtttggtgccattgcacatcaggtacattcgaaggttgactttcaacttcgagatattgcgatgcaatttttaggtggggtggg

SEQ ID NO: 238836 - DNA, 319 bp, Glycine max
gacttcacaactcaaactgcttcattgcattattgcagataagatcaaccctactcccttcagattcgggccaagatggcatcacttcatgctaatgtgacatcagttgtttgcaagagtggcaaccatgcttctcaatcgaaattcacaagctcttcattcttgcctgggtttgatgttgttggtcgtgcttcaaatgcttggaagaaagaacttgtcccatcttccatttccttggtgcctagagccacactaacatttgatcccccaactaccaactcagacaaaaccaaacaaaggaagcacactgttgaccctg

SEQ ID NO: 238837 - DNA, 319 bp, Glycine max
ggggaaaccctaattctgcgtggtgagtgaaaatggcggtacccttgctctccaagaggatcgtgaagaagcgcgtcaagaagtttatacgcccccagagtgatcgcaagatctccgtcaagccaagctggcgcagacccaagggtattgattctcgtgtcaggagaaagttcaaaggatgcactttgatgcccaacattggttatggctcagacaagaaaacccgccattatctaccaaatggtttcaagaaatttgtcgtgcacaatgtgaaagacctggaacttctcatgatgcataacaggacatactgtgctga

SEQ ID NO: 238838 - DNA, 389 bp, Glycine max
ggattcggatagcgaaagcaatcccccacccctaattttgatttgtgtcgaggaaaggacaggtcttggaaccctaaccgcacctctctctttcttcccgtgtgcgtcaaagcgaagcaacgcgacacgatggtgttctacttcaaagcgcgccccgaagccggcgatttcaccatcttcatgggccttgacaagtacgagaacgaggaactcatcaaatacggttttcccgaagacatctggttccatgtcgataaaatgtcttcagcccatgtctatgtcaggttgcacaaaggccagaccatcgatgacatgagtgaaggtttactggaagactgtgctcagcttgtcaaagcaaattcaattcaaagaaataaagtgaacaatgt

SEQ ID NO: 238839 - DNA, 356 bp, Glycine max
gacacagacgaatattcattgcatttagatgcagcatcagcttataacaacaattaaacatgagtgcagccagcatagcttggtttgtggcatcaagcagtggagcagtggatgcattgaacgatcgattgggggtgtgcaagtggaaccatgcattgaggtcactgcagcatcaagccaggagcgtcattatctgctacaggcaagccaatcccttgtcatctgctacttcagctgcggtcgccaataaggtcaataggaccaaggacgagtccatgaggaaagtcatggacttgagctgttgaggtcacaatacatcaacgtttcactgtgtggactattcgaattgcattcat

SEQ ID NO: 238840 - DNA, 360 bp, Glycine max
taatttgggaattattgctcccatcgccattggtttcattgtcggcgctaacattttgttgggtggggccttctctggagcggccatgaaccccgctgtgacatttgggcctgctgtcgtgagctggacctggaccaaccactggatctactgggccgggcctctcatcggtggtggaatcgctggccttgtttacgaggttgtctttatcagccacacccacgagcagcttcccaccactgactactacagggggggaaatgaaaataacaaaaaaaaaattgtgtattattgaatttctctggaatcttcttctgtgtatggttttccttccttgtgttttcttcctaattcactttc

SEQ ID NO: 238841 - DNA, 395 bp, Glycine max
gacacaccgtttgttctattcttaactcaacttctgctacccactctcttcttccaagtccaaccacgcttttctctacagtcatgggcaaggtcaagatcggaatcaacggatttggaagaattggccgtttggttgccagagtcgctctgcaaagagacgatgtggagctcgttgccgttaacgaccctttcattaccaccgattacatgacatacatgtttaaatacgacagtgttcacggacactggaagcatcacgatgtcaccgttaaggacgagaagacccttctcttcggtgacaagccagtcactgtttttggacacaggaaccctgaagagatccatgggggtcaactggagctgatatcattgttgagtccaccggagttttca

SEQ ID NO: 238842 - DNA, 356 bp, Glycine max
gaggaacaagaagcgaaaatataacaaataatttgtactttcatcaaaacaaaatcccgttgtatttttctcagatggctcgaacgaagcaaacggcccgcaagtccaccggcggcaaggcgccgcggaagcagctggcgactaaggcggctcgcaagtcggctccggcgaccggcggcgtgaagaagccgcacagattcaggccgggaaccgtggcgctgcgcgagatccggaagtatcagaagagcacggagctactcatccggaagcttccgttccagcgcttggtccgcgagatcgcgcaggacttcaagaccgacctccggttccagagctccgccgtctccgcgctccag

SEQ ID NO: 238843 - DNA, 296 bp, Glycine max
  unsure (1)..(296): unsure at all n locations
gattcaccacaaccctctctctatattccattgccacccagttttgaatatatttttattccttctttgtttcttcactttcttccatacacataaccatgtcttctcagactgttgtcctcaaagttggtatgtcatgtcaagggtgtgctggagcagtgaacagggttttgggaaaaatggaaggtgttgagtcatttgacattgatctgaangagcagaaggtgacagtgaaaggaaatgtggagccagatgaagttctgcaagccgttttcaaatctgggaagaagactgca

SEQ ID NO: 238844 - DNA, 346 bp, Glycine max
gacggttttgtgctgttgtcgctgcgcatcctccatagtctccttcctctacatctcaacatgaagccatggggaatacacatggaatgggagctgctcgcaagctcacagtctcaccgcacgaggcaaaagtgggctgatatgtcatacggtatatcccatcttgggaatccatggcagaaatcttttgccggttcagcccatgccaatggaactgtccttgaaagcataggtattgtatctggacatcccaactctgctattcgtaactgtgccatagttcaacttatcaataatgggtaataaattgcagcttttgtctctaatgatggatgcatgaactaca

SEQ ID NO: 238845 - DNA, 272 bp, Glycine max
ggaactgccaatatagtttgcaggcagaatacttctgtggacaagcctgaagaagctactgtcattgagatgaatgaacctgtgtccttgacatttgctttgcgatatatgaactcttttacaaaggcaacgccattgtccaacacagttaccattagtctgtcaaatgagctgccagttgtagtcgagtataagattgctgagatgggttatgtgcggttctatttggctcccaagatagaagaggatgaagaagatacgaaacctcaagt

SEQ ID NO: 238846 - DNA, 481 bp, Glycine max
  unsure (1)..(481): unsure at all n locations
cactgtgtagcggcangtaccggtcaggaattcacgggtcgacccacgcgtccgcccacgcgtccggacgaaagaaaggggggaaacttaccaggtccagacatagtaaggattgacagactgagagctctttcttgattctatgggtggtggtgcatggccgttcttagttggtggaccgatttgccgggttaaatccgttaccaaagaaaactcaacctgctaaataaccatgttgagggaacccttcaagggcaacttcttagagggactatggcccctaaggcaaggaaattttagggaataaaaggtcgtttaacccctaaaaatttttgggcccaaacgcgctaaactgatgtattctaaaagtctataacccttggcgacaagtcccgggaaaccttgaaatttatcccgatggggaaaaatcattggcaatgtttgtcctcaaacaaggatttccaataaacgcgaattataa

SEQ ID NO: 238847 - DNA, 369 bp, Glycine max
ggttctagtgtgtgattgtttgttgttgtaactcgttcttcttcttttgttgttctgtggttgtgtttgttttttctctcacctgaaaatgtcttgctgcggtggtaactgtggttgcggaagctcctgcaagtgcggcaacggctgcggaggctgcaagatgtacccagacttgagctacactgagtcaaccaccaccgagaccttggtcatgggagtggcacctgttaaggctcaatttgagggtgctgaaatgggtgtgcccgctgagaacgatggctgcaaatgtggaccaaactgctcctgcaacccctgcacttgcaagtgaggtgttgggagagcatgcttcaagcagagatagcccttaat

SEQ ID NO: 238848 - DNA, 326 bp, Glycine max
gagggtttttgtcgtcgctactaagagttgctgcttcttcagccactccgcacctcgcagcctctgtgccctcaacaaccatggctgaaatcgaaactaccgttccagatcccacccaaatcgacgtcaaactcttcaatcgctggagcttcggggatgttgaggttaatgatatgtctctggctgattacattggagtgtccccatcaaagcatgctacatatgttcctcacactgctggtaggtactcagtgaagaggttcaggaaagcgcagtgccccattgttgagaggctcaccaactctctgatgatgcacgggaggaac

SEQ ID NO: 238849 - DNA, 248 bp, Glycine max
taatttgggaattattgctcccatcgccattggtttcattgtcggcgctaacattttgttgggtggggccttctctggagcggccatgaaccccgctgtgacatttgggcctgctgtcgtgagctggacctggaccaaccactggatctactgggccgggcctctcatcggtggtggaatcgctggccttgtttacgaggttgtctttatcagccacacccacgagcagcttcccaccactgactact

SEQ ID NO: 238850 - DNA, 354 bp, Glycine max
gtcgaatatattcacaagcatgtttggagctgtgccgtgagatgaacatcatggcaattgatctgtggtctgcactccagaaaagggttgactggagagaagtttgcttcacggatggaattcatcttacttctgacgggagcaatatagtggcaaaagaggtattgaaggtcatcaaagaagcaaactgggaaccttgcctgcactggaggtcaatgccaactgaatatggagaagattcaccttatgatcctgttggccctgatggtaagacaagtttaaatatctccaactggatcttccttgaaaccaaggaatgggactagagttatgtgtatttgaaaactatagaca

SEQ ID NO: 238851 - DNA, 397 bp, Glycine max
  unsure (1)..(397): unsure at all n locations
ggatgcagatgcagcctatcatggcagcctactaccccaacaacgtcaccactgatcacattcaacagtacctggatgagaacaagtccttgatcctgaagattgttgaaagccagaattctggcaagctgagcgagtgtgcagagaaccaatcaaggctgcagagaaatctcatgtacctagctgcaatagctgattctcaaccccaaccatctccaatgcctggtcagtatccttctagtggacttatgcagcagggagcacactacatgcaggctcagcaggctcagcagatgtcacaacaacagctaatggcttcgcgctcctcactcttgtactcccaacagcctttctcagtgcttcaacagcagcnaagcatgcacagcaacttggcatg

SEQ ID NO: 238852 - DNA, 316 bp, Glycine max
  unsure (1)..(316): unsure at all n locations
ggcaaatgcttcattccaagatagttaggactctgtaagctgataaagacaacactcataccgttggaaagaaagatgctgctggccatgttgcttaatttaattcctgcttcctttggcctcttgaattttaacaaaaaccggaattcaaggattactagctccttcaatccgtcaaaatgggccggagttgacatcccccttgatcatgaagcatttgcagttccaaagggttataatgcacctcaacaagtgcacatcacgcaaggtgactatgatggaaaagcagtaatcatctcatgggtgnacacagaag

SEQ ID NO: 238853 - DNA, 327 bp, Glycine max
gagcatactttattctcgcttggttgcagcttcagcagcagcggcaagcaactccatccgcaatgggaatcgatttgaaggcaggaggtaagtccaagaagaccaaacgtacagcccccaaatccaatgatatttacctcaagctcctcgtcaagctgtaccgttttcttgttcggaggactggtagtaacttcaatgccgtcatcctcaaacgccttttcatgagcaaggtcaacaagcccccgctatccctctctagattgattcgttacaccaagggaaaggaggataagatagctgtggtagtcggggccgtgaccgatgaca

SEQ ID NO: 238854 - DNA, 240 bp, Glycine max
gacagacagacacacactcggttctgccttcacaaaaaaattatcgagatcccctttttctcctaagaaaagccatggctaagggtcccggtctctactctgacatcggcaagaaagccagggatctgctgttcaaggactaccacagtgaccagaagttcaccatcaccacctactcacccactggagttgctataacagcatcaggaaccaggaaaagtgaactgtttgtggctgatg

SEQ ID NO: 238855 - DNA, 340 bp, Glycine max
gatccatttctcgcaacaacgcttaacctctctcattccccatttcctcacctccttcaaccgctgctaaattctagggttccgaaatggacgctggcggaaagatcaagaagggcgccggaggtagaaagggcggcggcccaaagaagaagccggtttcaaggtccgtcaaagccggtctccaattccccgtcggaagaattggccgttatttgaagaaaggaaggtacgctcagcgtgtcggtaccggtgctcccgtatacttggctgcagttctcgaatacctagttgccgaggtgcttgagttggctgggaatgccgcacgtgacaacaagaagaa

SEQ ID NO: 238856 - DNA, 337 bp, Glycine max
gattcggagctgggtttgttttcggcctttgatcttcgattctctctctttttctctcgcgaaaaccgtatcagcaatgtctggagaatcagccagcgctattcacaagggtcaagtcgatctcttagacttcattgactggtctggggttgaatgcctcaatcaaagctccacccactctctccccaatgctatcaaacagggttatagagaagacgatggtttgcatctggagagtgatgcagacgagcagcttttgctctatattcctttcactcaagtcgttaaactttattcctttgttatcaaaggtcctgaagaagaagggcccaagaca

SEQ ID NO: 238857 - DNA, 160 bp, Glycine max
gaagaaagtagaaaggatttggattcgaggcttgctaggtgaagtcaacaaagaaagaaaaaaagctttctccgagaaagcttctgttcacgtcagggtccggggtaggcttcttcattgagattgggttggtgttcagtgtgaatgcatttccagtgac

SEQ ID NO: 238858 - DNA, 381 bp, Glycine max
  unsure (1)..(381): unsure at all n locations
gagtacagaaaacgcagttctcaccatttccctctcgattgtgagacttgttgttgttaactgaacttttctgagcaagaatgtctgggcgtggaaagggaggcaagggtttgggaaagggaggagcgaaacgacaccgtaaggtgctgcgcgataacattcagggaatcaccaagcccgcgattcggcgtttggctcgtangggtggcgtgaagcgtatcagtggtctcatctacgaagagacacgtggcgtgctcaagatctttttggagaacgtgattcgtgacgccgttacctacactgagcatgctangagaaagaccgttacggcaatggacgtggtttatgctctcaagagacagggaaggaccctctacggat

SEQ ID NO: 238859 - DNA, 379 bp, Glycine max
cccacgcgtccgagcggctaccctaacctcgtcttcctctctactaatttcagctatggccgacgaagctgtggttgttccagatcccacccagatcgatgtcaagctctttaaccgctggagcttcgaggatattgaggttactgacatttcactggctgattacattggagttgcggcatccaagcacgccacatatgttcctcacaccgccggaaggtactccgtgaagcggttcaggaaggcgcagtgccccattgttgagaggctcaccaactctctcatgatgcacggtagaaacaatggcaagaaactcttggctgttaggatcatcaagcatgctatggagattattcaattgttgactgaccaagaaccc

SEQ ID NO: 238860 - DNA, 302 bp, Glycine max
caattagagggtttaaattgattctttctggagaattagatggtcttcctgaacaagccttttatttggtaggtaatatcgatgaagctactgcgaaagctacgaacttagaaatggagagcaatttgaagaaatgactttaaatctttgtgtactgacccccaatcgaattgtttgggattcggaagtgaaggaaatcattttatctactaatagcggacaaattggagtattaccaaatcatgcgcctattgccacagccgtagatataggtattttgagaatacgtcttcttaaagacc

SEQ ID NO: 238861 - DNA, 335 bp, Glycine max
ggaagagagagagagagagagagagagtcctgaaacttgggtgcgattccttcactcacaacaacaacacatcactatggctcttctgagtcgagcctcttcacgcttccctcagctggtttcccctcaaagggtagtttcactccacacaacgctcccatctctgaacgcatccccatccacagccacgcctacaccatatgccccgccaccgcctccgtccgcttcctctcccgccggcgtttcgaaggcggcggagttcgtgatctcgaaggtggacgatctgatgaactgggcccgccgcggctccatctggcccatgaccttcggcctcg

SEQ ID NO: 238862 - DNA, 343 bp, Glycine max
gggagtgaacaacatcaacatctctgattcttacaagaagaatcgcattcaggtctccaacaccaaaaagcctctcttcttctacgtcaatctcgccaagaggtatatgcaacagcataatgaggttgagctctcagcactaggaatggctattgctacagtggttactgttgctgaaatcttgaaaaacaatgagcttgctattgaaaagaaaatcacgacatcaacagttgacatcaaagatgattctagaggcagacctgtccaaaaggccaagattgaaatattacttgggaagactgaaaaatttgatgagttgatggccgctgctgctgctgctgct

SEQ ID NO: 238863 - DNA, 309 bp, Glycine max
tcagacagctacaaaagggtaaggctgcggcaatacgacatacggggagatctgctgcttctcattgttgaaaaggaagcccaacaggttgcacactggcatacgtttacatccaagttgcggcagcatcaacagcatggcctgccgttcaaatagaacgttcatcaagttcagttttcgaggcgtggatcacgatgcacttctcgacatgtccaccgatgaactcgtcaagatgttcactgcccgcgctcgtagaaagttcgacagaagccttagcacatcgcacatggtcttgatcaagaatctcca

SEQ ID NO: 238864 - DNA, 414 bp, Glycine max
  unsure (1)..(414): unsure at all n locations
gagatagatctgcttcttgttgttggaaagaaaccctagcaagcggaacaatggcagacgttgaggtcgatgtggcggctgcagcagcagcagggcagccgaagaagagaacgttcaagaagttcagtttcaggggcgtggatctcgatgcgcttctggacatgtccaccgatgaactcgtgaagatgttcagtgctcgcgcacgtagaaggttccagagaggcctcaccagaaagcccatggccttgatcaagaagcttcgcaaagcgaaaagagaagctccaccaggtgagaagccagaacctgtccgcacccacctccgcaacatgattattgtgcctgagatgattggtagcattattggagtgtacaatggcaagacctttaatcanggtganatcaaacctgagatga

SEQ ID NO: 238865 - DNA, 355 bp, Glycine max
  unsure (1)..(355): unsure at all n locations
gaactacaacacaagagactgtaccttctttttgaagtctctgtgggttggggttttggagtgggagcaccaatggctttcttgatggcaattgtagtagtaggtgttgtcttggtgctctgtttttgctctgctctcttgaggtggaatgaagtaaggtacaggaagaaaggtttgcctcctggcacaatgggttggccactttttggggagacaactgagtttcttaagcaaggtccaaacttcatgaaaacncagagagcaaggtatggcagttttttcaaatcccacatactgggttgtcctancattgtttccatggattcagagcttaacagatacatcctaatgaatg

SEQ ID NO: 238866 - DNA, 394 bp, Glycine max
  unsure (1)..(394): unsure at all n locations
gatttctcttcactccttcgttcactcttcttctcttgcggctagggttttagcgcagcttcttctacatttaaggaagatgggtaaggaaaaggttcacatcagtattgtggttattggccatgttgactctgggaagtccactaccactggccacctgatctacaaacttggaggcattgacaagcgtgttattgagagatttgagaaggaagctgctgagatgaacaagaggtctttcaagtatgcctgggtgcttgataagcttaaggctgagcgtgaaagaggaatcacaattgatattgccttgtggaagtttgaaaccaccaagtactattgcacagtcattgatgcccctggacacagggatttcatcangaacatgatcactggg

SEQ ID NO: 238867 - DNA, 275 bp, Glycine max
gacagacaagggtttcttccgggttcacgtttcacaatcactttttgcgcttctctcactcactcactcttcttcttcctcttcgtgtggttttctttctcgaactcgaacgaagatgcgtgagattcttcacatccagggagggcaatgcgggaaccagatcggagccaagttctgggaggtggtgtgcgcggagcacgggatcgattcaacggggaggtaccaaggggacaacgagttgcaactcgagcgagtcaacgtctactacaatgaag

SEQ ID NO: 238868 - DNA, 363 bp, Glycine max
gagttgtctgcaacagagtaagagggcaaaaccctagctttagtgtcttcccgcccatctcttgcaatctcatagattttagcagccatggcgagtaccaaagttcagagggttatgacccaacctattaacttgattttcaggtttcttcagagcaaagcgcgcatccagatttggctctttgagcaaaaggatttgaggattgaaggccgaatcattggttttgatgaatacatgaatttggttcttgatgatgctgaagaagtgaacgtcaagaagaaaagcagaaagacattagggaggatccttcttaaaggagacaacataaccttgatgatgaacacggggaaaatgatgaacaac

SEQ ID NO: 238869 - DNA, 340 bp, Glycine max
acttacaaatattttgaggtcattctggtggatgttgcccacactgctgtaagaaatgatccaagaatcaactggctctgcaatccagtccataaacacagggaactgcgtggcctcacttctgctgggaaaagcaataggggtttacgtggcagaggacatctctaccacaaaaatcgtccatcacgcagggcaacctggaagagaaacaataccctctcccttcgtcgctaccgttgattttgttgcagttatcgtatgttgcttcattttctgagtatttggaggaaaatcgtcagttttggatccctgaatcatgccttttttccccgataatgtc

SEQ ID NO: 238870 - DNA, 335 bp, Glycine max
gaattcagttgaaggaattgttgtaactttttgattcctaaattctctaaaattcgaaattctaatttcgttaggggaaagagattgtttgtgtgtgagtgagtatggctggaaaaggcgagggtcctgctatcggaatcgatttgggaacgacgtactcttgcgtcggcgtgtggcaacacgatcgtgttgaaatcatagccaacgatcagggtaacagaactaccccatcctacgtggctttcaccgacacagaacggttgatcggcgatgcggcgaagaaccaggtcgctatgaacccaaccaacaccgtttttgatgctaagcgtttgatt

SEQ ID NO: 238871 - DNA, 377 bp, Glycine max
gacatataaaaccttctttggcgcctgacatagagaagaagaagagagagtgatggagtgcgtattcggattggtgggtaatgggtttgcgatcgtggtggctgattcatcggcggtgcacagcatcctcgtccacaagtccaacgaggacaagatcatgctcctcgattcccacaaactcattgccgctagcggcgagcccggagacagggttcagttcacagagtacattcagaagaacgtcgccttgtatcagttccgtaacggcatccctcttaccaccgccgccgccgccaatttcacgcgtggcgaactcgccactgctctccgcaagacccatactctgtgaacatccttcctgctggttatgacaaaga

SEQ ID NO: 238872 - DNA, 318 bp, Glycine max
gagcgaaacagagagtgatttcagtgagtgatcggtgttcacttgatctcatcataatcgtcagcgtcaattgaagaagatgccgatcagaaacatcgccgtcggaaggcctgaagaggcgactcaccccgacacgttgaaggcggctttggctgagttcatctcaaccttcatcttcgtgttcgccggctcaggctccggcatcgcctacaacaagctcaccgacaacggcgctgccacccctgccggcctcatctccgcctccatcgcccatgcattcgccctcttcgtcgccgtctccgtcggcgccaacatctc

SEQ ID NO: 238873 - DNA, 341 bp, Glycine max
gaggcaggtacgcaacaaagcgatagcagtgtggaagtatttgcagaactttgtttcccaacctccattgcctccgcttctacctcgctaccatgatcattcctgagaagaaccgcaaggagatctgcaaatacctcttccaagagggagtttgctttgcgaagaaggacttcaatttggcgaagcaccctgagattgacgtgccgaatctgcaggtgattaagctgatgcagagtttcaagtctcgcgagtatgtgagggagacttttgcttggatgcactattactggttcctcaccaacgatggaatcgagtttctcagaacttaccttaaccttcct

SEQ ID NO: 238874 - DNA, 397 bp, Glycine max
ctgtgccgagattaccattgtgctttgctacttccaattgtgcagtgaggattacaattggtggtggagatcttacctcactgctgggtcctctgcgctgtaccttttcctctactcaattttctacttctttaccaagttggagatttcaaagctggtctcgggcatcctttactttggatacatgataattgtttcatatgccttctttgtgttgacgggaactatcggcttctatgcatgcttctggtttgttcgcaagatctactcgtcggtgaagattgactgatttcaggcatcaatcatataatatgaccgatgagtacaaccggaaactgatactgagatgactcaaccaaatactgccgggaagttacctttcccccaactctgaaaa

SEQ ID NO: 238875 - DNA, 311 bp, Glycine max
  unsure (1)..(311): unsure at all n locations
gcatacaatagagaccagcttttgcttctttgtgaacatggagatgaggaaatcatgtggcttcttcttcttgctcctcctccttgtctttgcttcccaggtggtggtgcagacggagggaagagtgtgtgagtcacaaagccacgggttccatggtttgtgtaatagagaccacaactgtgctttggtctgcaggaacgaaggtttctccggtggcaggtgcaaaggcttccgccgccgctgcttttgcaccaggatttgtcgagatctcatcaaacactactcttgccatgcaaattaatanatcatag

SEQ ID NO: 238876 - DNA, 303 bp, Glycine max
  unsure (1)..(303): unsure at all n locations
gacttctcaagaaaattagggtttgcagtcactgctttgtttagatcagaaccagatcgcgttctcttcttccattggcaaacatggcaactcaaatgagcaagaagagaaagtttgtggcggatggagtgttcttcgccgaactgaacgaggttctgacacgtgagttggcggaggacggttactccggcgtggaggttagggttacgccgatgcgcaccgagattatcatcagagccaccagaacccaagccgttctcggtgagaagggaaggagaattagggaactntactcagtggtgc

SEQ ID NO: 238877 - DNA, 324 bp, Glycine max
agcttacaagattgcggctcatgctgctgatttagccaaaggccatccatatgctcaagcttgggatgatgaattgagcaaggcaagatttgagttccgatggatggaccagtttgctttgtcattggatccgatgacagccacgtccttccatgacgaaaccctaccggcagatggtgcgaaagtggcccatttctgctcaatgtgtggccctaaattctgctctatgaagattacagaggatgtgaggaagtatgctgcggaacatggctatggaactgatgaagctttgcagcgtgggatggatgctatgagtgctgaatt

SEQ ID NO: 238878 - DNA, 337 bp, Glycine max
gacgttcacattcaggaatcgttttcttcagaaatttgccatcgttgagggaagcgcgagagccttcgttgttcaagatgagagctaagtggaagaagaagcgcatgaggaggttgaagaggaagcgccgaaagatgagacaaagatctaagtaggtgcttgaacaaggagtggagatgatgtgcttttccatctgctaccagcttcatgacattttatgctgtcatggctcttatgatgatcttgaggtctagtggcgaggggagcttccatcttgactttagtttagctttactggtctaaagattgctgttttagtgtgggttaagttatgata

SEQ ID NO: 238879 - DNA, 307 bp, Glycine max
aacaatagcctgacaaagggtttagccataaaatcgaatccatcattgatttgagatattgataaggtgaatactcatttctcgtcaatgctaggcataatgcgggtatagggacctaaaaaagattatcttttcttcctatcttatgaactttaaggtgtatgaagtgtcatttcctatcttagattttaattttagtaggtagataaagagtccatttaacttaagttgatctaggccagaagcagacctacgtcaagataatccttctttgaaacactttggtagtgctcttagattgtaatcc

SEQ ID NO: 238880 - DNA, 379 bp, Glycine max
ggacccaaaatacaaaccttcatttttctcattcacggctataaataatctcaaaaacccttccaaaccctcacttcgccttccgcttccggcgccatatcgcgtatctttctctgttctattcctacgatggagttttggggtgccgaggttaaggttggtgagtctgttaaggtagatccagccgaattcgaggcatgcatacacctttctcaggctgctcttggtgaggcaaagaaagacaaatcaaatgaaccagttgttctctacttgaaagttggtcaacagaaatttgtcttgggaaccctttccagggagaaaattcctcaaatacctctggaattggttttggaaaaggagtttgagcttttccacaact

SEQ ID NO: 238881 - DNA, 368 bp, Glycine max
  unsure (1)..(368): unsure at all n locations
gatcatcaaatcaaaaaccctaattcccaaattctctcatttttcaagtttcaaccaagaaaagcagcaacaatgtcgggtcgcggaaagggtgggaagggtttaggaaagggaggagcaaagaggcatcgcaaggtgctccgcgacaatatccagggaatcacgaagcccgcgattcggagactggcgagaagaggtggcgtgaagagaatcagtggtttgatctacgaagagaccaggggcgtgctcaagatctttctcgagaacgtgattcgcgatgccgtgacgtacacggagcacgctangagaaagacagtgacggccatggatgtcgtttacgctctcaagaggcanggaangactctcta

SEQ ID NO: 238882 - DNA, 319 bp, Glycine max
ggtgcttcgtctcagatcattctgcgcaggtaagacagagagaaagaactgacctcagcggcggcggcggcggcaacagaagaacaaccaccaccacacacaatgggtcgcgtgagaacaaaaacggtgaagaaatcctcccgccaggtgattgagcgttactactcgcgcatgaccctcgacttccacacaaacaaaaagcttctcgaagaagtggccatcatcccttccaagaggctgcggaacaagatcgcgggtttctccacgcatctcatgaagcgcatccagaagggtcccgttcgcggcaatctcctcaagc

SEQ ID NO: 238883 - DNA, 301 bp, Glycine max
gagcgaaacagagagtgatttcagtgagtgatcggtgttcacttgatctcatcataatcgtcagcgtcaattgaagaagatgccgatcagaaacatcgccgtcggaaggcctgaagaggcgactcaccccgacacgttgaaggcggctttggctgagttcatctcaaccttcatcttcgtgttcgccggctcaggctccggcatcgcctacaacaagctcaccgacaacggcgctgccacccctgccggcctcatctccgcctccatcgcccatgcattcgccctcttcgtcgccgtctcc

SEQ ID NO: 238884 - DNA, 397 bp, Glycine max
gagggttacacgccgtcgtcgctgtttttgtgtgtcgcttcttcgtaggtgcagctgcaatggtgaagggacgccaaggagaacgtgtcagactctacgtgaggggtacaatccttggatacaaaaggtccaagtcaaaccagtatccaaatacatccctgatccaaattgagggtgtgaatgccaaagaagaagtagcatggtatgctggcaagaaaatggcctatatctacaaggctaaggtgaagaagaatggaagccattaccgctgcatatggggcaaggttacaaggcctcatggtaacagtggtattgtccgtgcaaaattcaagtcgaaccttccacccaaatcaatgggagcccgagtaagagtattcatgtatccaagcaacatatg

SEQ ID NO: 238885 - DNA, 364 bp, Glycine max
  unsure (1)..(364): unsure at all n locations
ggggttattggacacattcttcagcgactgcgtttttggatcggaacctcttctgcggcgtagcaatgggacactccaacgtttggaactctcacccaaaaaactacggtcctggttctcgcacttgccgtgtgtgtgggaatccacatggactgatcaggaagtatggccttatgtgctgcaggcagtgcttccgtagcaatgccaaggaaattggcttcatcaagtatcgctaaaagagcagttgtcaactacggaccaatattgtgttctggcactaggatgttttgaggatgttatgtttgaagaaacttgagactttcttttttcatctaattaattatcagacgtantttgtggtact

SEQ ID NO: 238886 - DNA, 304 bp, Glycine max
gagcgaaacagagagtgatttcagtgagtgatcggtgttcacttgatctcatcataatcgtcagcgtcaattgaagaagatgccgatcagaaacatcgccgtcggaaggcctgaagaggcgactcaccccgacacgttgaaggcggctttggctgagttcatctcaaccttcatcttcgtgttcgccggctcaggctccggcatcgcctacaacaagctcaccgacaacggcgctgccacccctgccggcctcatctccgcctccatcgcccatgcattcgccctcttcgtcgccgtctccgtc

SEQ ID NO: 238887 - DNA, 411 bp, Glycine max
  unsure (1)..(411): unsure at all n locations
ggagagaagttattagggtttttgagtgcggcggtccaaacactcttctctgcagcttttgcctacaactcccttcaccatggctgaacaaaccgagaaagcttttctgaagcaaccaaaagtgtttctcagcacaaagaagactgggaagggaaagagacctggaaaaggtgggaaccgcttttggaagtccattgggcttggatttaagactcccagggaagccatcgaaggaacctatattgacaagaagtgccccttcactggcaatgtttccatccgtggccgtatcttggctggaacatgtcacagtgctaagatgaacaggactattattgttagaatgaattatctccattttatcaagaagtaccagaggtacgagaagaggcactcnaaatatcctgctca

SEQ ID NO: 238888 - DNA, 304 bp, Glycine max
agcgaaacagagagtgatttcagtgagtgatcggtgttcacttgatctcatcataatcgtcagcgtcaattgaagaagatgccgatcagaaacatcgccgtcggaaggcctgaagaggcgactcaccccgacacgttgaaggcggctttggctgagttcatctcaaccttcatcttcgtgttcgccggctcaggctccggcatcgcctacaacaagctcaccgacaacggcgctgccacccctgccggcctcatctccgcctccatcgcccatgcattcgccctcttcgtcgccgtctccgtcg

SEQ ID NO: 238889 - DNA, 357 bp, Glycine max
  unsure (1)..(357): unsure at all n locations
gaaatctatttcagtttgaattttgaaagtgagtgtggcgtaccgtgtacgtatctgcagaaagtgaatgaatggtaatgggggaagaagggtgcaaggtatgtgttacaggaggcagtggttacattggttcctggctcatcaagaagctactggccaagggctacacagtccatgcaactctcagagacttgaagaatgagtcaaaggttggcctcttaaagagccttccacaatcagaaggaaaactggtgctgtttgaagctgatatttacaacccaaatgattttgaccttgcaattgaaggctgcaagtttgtgtntcatgttgctactcccatgatccatgaacctggct

SEQ ID NO: 238890 - DNA, 309 bp, Glycine max
cgccgagcctcccccggaggagaaggaggagcccaaacctgaagccaaggctaagaaaaccaaggaacccaaacctaaaaaggtttccagaccacgcaaccctcccactcatccttcctacgaggagatgattaaagacgcaattacctcgctgaaggagaaaaccggttcgagccaacacgcgattgcgaagttcatcgaggagaagcacaagcagcttccaccgaacttcaggaagcttcttctctaccatttgaagaaacttgtagccgctggaaaactcgtcaaagtcaaaggctccttcaagct

SEQ ID NO: 238891 - DNA, 383 bp, Glycine max
gatacatagctatctatttatctatagcaagtgcgtcaagagacacgtggtaccctagctagagtgccattctgtggtttctttctttctttctttctgcatcacatcacaatttgcattgcctcgtgtcctttttcttctttgctctccaaaaatctcacacacacaggtatctagcaaatgggttctcaccaacaagaaccatggctattggagaatgggaaaccaagggttttgaccaaggagaccaggcatggccgttctgcacacagaatgtcctccacctctttgcgcaagaaatctagccgaactcttgtctcaaaggttccatgtgccactctcagaaactttcttcaaaatttgcaaaggttaatcctgggaac

SEQ ID NO: 238892 - DNA, 283 bp, Glycine max
ggtccctctgcgtttttgacaccgtgtttgttgttgtgtgtgttttccgcggaaaatcaagatgggtatcattgaaaagatcaaagaaattgaagccgagatggctcggacccagaaaaacaaagccacagagtatcatctcgggcagctcaaggcaaaaatagcaaaactgaggacacaattattggagcctccaaaaggttctagtggaggtggagaaggatttgaagttacaaaatttggtcatggacgtgttgcactgattggatttccaagtgtgggg

SEQ ID NO: 238893 - DNA, 353 bp, Glycine max
  unsure (1)..(353): unsure at all n locations
cccacgcgtccgcccacgcgtccggacgacagaaggggacaacacagaacaaaaacaaagaaaaaaaaaacccttagccaacacaaccatcatggccacctctgctattcagcaatcagcattcactggtcaaactgctctgaagcagctcaatgagttcgtccgcaagaccggtggcgccggcaaaggtcgcactaacatgcgccgcaccgccaagagtgctcctcagagcatttggtatggccctgaccgtcccaagtacttgggtccattctcggagcagattccatcatacctgaccggagaattccctggtgactacggatgggacactgctggattatcnagctgac

SEQ ID NO: 238894 - DNA, 300 bp, Glycine max
gattgttggcttgtgctctgctcgtgcctctagggttatcatatctccatttccatttcctctctctcagtttccaagaatcttaagctatgggaaagtcttacccaaccgtgagcgctgattaccagaaggccgttgagaaggcgaagaagaagctcagaggcttcatcgctgagaagagatgcgctcctctaatgctccgtttggcatggcactctgctggaacttacgacgtgagctcgaagaccggtggtcccttcggaaccataaagcacccctccgaactcgctcacggcgcta

SEQ ID NO: 238895 - DNA, 372 bp, Glycine max
  unsure (1)..(372): unsure at all n locations
gttaaatggcccattataaagccttctaatttgcactttgtctctctctttccgttcccttgatgtaatggctttatgccgattcgcttactcttattctcctgcttctgctttcaccatttttcgtttcccgaaatacccttcgaaacacactaaattctccttgctaccactctcattctcaacgatgggagctcctccagaaggctatcgtangaacgttggtatctgtctcatgaacaatcacaaaaagattttcgcggcttcgaggctcgacattcccaatgcttggcaaatgccttaaggtggtattgatgaaggtgaggattcaagaaatgcagctatcaaggagttacgagaagagacaggagt

SEQ ID NO: 238896 - DNA, 360 bp, Glycine max
gaccctagctcgcgttcttcgttcgtcttttacatcaggatggagtctcaggtgaagcacgcacttgttgtcaaagtaatgggtcgtactggattcagaggacaggtgacccaggttagagtgaagtttctggatgatcagaaccgtcagatcatgaggaatgttaaaggaccagtgagagaaggagacattctcaccctagtcgagtctgaaagggaagctagaaggttgcgctaagagggtccttctttcttgatctttatggtagttagtcggtgctaaaggttatagcaccctatcttgtcttggatctattttcattcgaattatggcttgagttttgctgttttgagtcgaagc

SEQ ID NO: 238897 - DNA, 367 bp, Glycine max
ggattgcagcgtcactgttagttattgtatcctagaggaccctatcttctcccacccccttcctatattacataaccttgcatttcattgcatgcccttcttcttgttctgatcttttggggtgtgcgtgtgtgtgaggttgattgattgattgtttgtttgttccttcatcaacacaatgaagatatctgatgagaacagttctaaaccaatcaaccctacaagttttcaaggagggatagaatgtgtggggaacagaaagatggggcagaacagaagggctttaagcgtgatcaatcaggatctggtggcggaagggagaccttacccttgtgttgttaacaagagggcagtggcagaaaaacac

SEQ ID NO: 238898 - DNA, 324 bp, Glycine max
gatccaaatccaccccaacacaaatcttagccgctattgatttttcctcttccatttctcttactttctcagcctttttcgattacccatttggttatttcgccctaatggctcttgctccatccaaagtttccaccttttctggtttttctcccaaacccagtgttgggggtgctcagaaaaacccaacttgctctgtttctctgagctttttgaatgagaaacttggaagcagaaaccttagggtttgtgcctcaacggtgcctctcactggggtgatttttgaaccgtttgaggaggttaagaagagcgagcttgctgttc

SEQ ID NO: 238899 - DNA, 357 bp, Glycine max
gacccttaacctctctgctgcgtttgcttctcctccacccatccacaaacgaacacacactttgattgagaatggggcgtgttcgcacaaagacagtgaagaagtcctcgcggcaagtgatcgagaggtactactctcgcatgacgctggacttccacacgaacaagaaggttctggaagaggtggccatcattccctccaagaggctccgcaacaagatcgcgggattctccacccacctcatgaagcggatccagaagggtcccgtacgtggaatctccctcaagctgcaggaggaggagcgcgagcgccgcatggacttcgtccccgatgtctccgccatcagaaccgaacaga

SEQ ID NO: 238900 - DNA, 372 bp, Glycine max
gaacatgccgaaaagtagtaccaagatggcttcagttgtgtatctcctctttggcttccatctcattgttatcatgtcaagttcctttaccgcaactagtgaagtgtttgcaaaacagtatccatccacagaacccgtggaagagaaactgagccaactccacttctatttccataacaacataacgggggaacacccaactgctatgaaaactgttttgcctcctaaggggtccattcatggttttggggctacgtacatgatggatgaccctctaactgaaggaccaagtccaacttcaaagcttgtgggaagatctcagggaatatacgctttggcttcagaacatgagcctgggttgctcagggtgac

SEQ ID NO: 238901 - DNA, 152 bp, Glycine max
  unsure (1)..(152): unsure at all n locations
gattgttgttgctattatcatccgcagctgcttttattcgcaccgcaaacagtgggccatggccgtcggaaagaacaagcgcatctccaaggggaanaagggtggcaagaagaaggcagctgatccctttgccaagaaggattgggatgaca

SEQ ID NO: 238902 - DNA, 396 bp, Glycine max
  unsure (1)..(396): unsure at all n locations
ggttgtcaagcctgccgagaaaaccctagttcgcttgcagtcacacaagaggccaatcctattcatagctcgagatgggtgaagaagtgaaggtagttgttccagaatcagtgttgaagaagcgcaagagggaggaggaatgggcgttggccaagaagcaagaactcgatgctgccaagaagaagagagccgagagccgcaaactcatctacaacagagctaagcagtacgctaaggagtacgatcaccaggagaaggaattgattcggttgaaacgcgaggccaagctgaaaggtggtttctatgtggatccagaggctaagctgttgtttattattcgcattcgtggtattaatgccatggaccccanatcaaggaagatcctgcagttgttgc

SEQ ID NO: 238903 - DNA, 306 bp, Glycine max
agtgcatgtaattcatattcataaagagaaaacccttagccaacacaaccatcatggccagctctgctattcaatactcaccaatcaatgcttacattgcacttcatcaccccactaaattcttccgcaagatcagttcaccgggcatcggtctcaataatattcaccgcaacgtccctagtgttcctcagattatttggtatggacctgatcgtcctatctacatctgtccaatcacggagcaggttcgatcatatctgacttgacaattctttggtaactacagatgcgacactgatgcattat

SEQ ID NO: 238904 - DNA, 363 bp, Glycine max
gatccacacctctctctctctctcagaatttctatctatctcttgtttcaatttcaacaacggttactcctttttcgttttgagtttcaatcaagccatcatcatgtctaccgcatcgcaacccaaggccaagaaaacggcgtcgtccaggaagcccctctcccaccctcccttcgccgtgatgatagcaaaggcgattgcgagtctgaaagagagaaccggttcgagccaatacgcgataaccaaatacatcgaagggaagcacaaggagttgcctgcaacctacaagaagcttgtcctcgttcatctcaagaaatctgttgctgctggcaagcttgttaaggtgaaaaactcctttaagct

SEQ ID NO: 238905 - DNA, 250 bp, Glycine max
gaatgtgcgagcacttactcgtctcactgtcttgctatatttgggtgagaacacagaggatagtggagttcaacgagatggagcacataaagcacagaacagttgaagtgaatggcataaaaatgcatgttgcagagaaaggagagggtccagtggtgttgttcctccacggcttccctcagctctggtactcatggcgccatcagattctctctctcagctccctcggctaccgcgccgtcgctcccga

SEQ ID NO: 238906 - DNA, 375 bp, Glycine max
gaaggtttttgtcgtcgctactaagaattgctgcttcttcagccactccgcaactcgcagcctctgtgccctcaacaaccatggctgaaatcgaaactaccgttccagattccacccaaatcgacgtcaaactcttcaatcgctggagcttcgaggatgttgaagttaatgatatgtctctggctgattacattggagtgtccccatcaaagcatgctacatatgttcctcacactgctggtaggtactcagtgaagaggttcaggaaagcgcagtgccccattgttgagaggctcaccaactctctgatgatgcacgggaggaacaatggaaagaagctcagggctgtcaggattaacaggcatgccatggaga

SEQ ID NO: 238907 - DNA, 342 bp, Glycine max
ggagtggaagtagtagcaagtacgtcgtatatgtggttgatcttttgctggttgtttgttttgttccgtccaattgtcagatctgaatcaccggactcactcttcagactcactcacactgaatggcttctgaaggcgaccatcagcagcagcagcaccaccatcaagatcacgatcatcatcatcatgatcatgatcaggatcatcatcacgatggagagggagagaccaactcatgggtaggtaaggatgggaacgtgtaccatagccacgatggtctggcaccgcattctcacgaacccatttactcccccggctacttcaccagaagagctccaccgc

SEQ ID NO: 238908 - DNA, 356 bp, Glycine max
gagagtcagattcgcacgcaatgcctcgcctcaaaacaacagctgcagcagcaattgctcccaaacgacgtggaaaggctccggctcttgccgctaagaagaagcctgagaaggtcacgaatccgttgttcgagaagcgtccgaagcagttcggaatcggaggggcgttgcctccgaagagagacttgactaggttcgtgaagtggccaaagaatgttcaaattcagaggaagaagaggattctgaagcagaggttcaaggttcccccagctttgaaccagtttaccaaaactcttgacaaaaacctagcaacaagtctgttcaagttgcttctgaagtacaggcccgaggacaaa

SEQ ID NO: 238909 - DNA, 278 bp, Glycine max
ggaggaagagaagtttgtattctagtcttgtgataaaatgtttggcattttaggcacactagagaggctgcaagtccccttaattttgccattttttatttgccattttgtttaacggtagcagaatgagaatatcacgatgtataaactttggtatagagatgagtgcagtgctgaaatcttagataatagtttgtttgatacagttgaattaatcaattgctagtttttatgagtgagtgaagggtggcgagagggtgggacgaggcggccgctct

SEQ ID NO: 238910 - DNA, 397 bp, Glycine max
gacaacacagaacaaaaacaaagaaaaaaaaaaacccttagccaacacaaccatcatggccacctctgctattcagcaatcagcattcactggtcaaactgctctgaagcagctcaatgagttcgtccgcaagaccggtggcgccggcaaaggtcgcactaacatgcgccgcaccgtcaagagtgctcctcagagcatttggtatggccctgaccgtcccaagtacttgggtccattctcggagcagattccatcatacctgaccggagaattccctggtgactacggatgggacactgctggattatcagctgacccggaaaccttcgccaggaagcgggagctggaggtgagtcgcagcagatgggcaatggttggtgcccttggctgcaccttc

SEQ ID NO: 238911 - DNA, 328 bp, Glycine max
gactgcaactttgctctctgtgaggcttcaatttctaattagggtttcgcttagagtaaccaataaccatgggagtcttcacctttgtcgtccgcaaatccggcagcgaatggagcgccaagcaacattccggcgacatcgaggcctccgccgattccaccttcgatctccaacggaagctcgtgcaagccgctctcgccgttgattcctccggtggagttcagtcctctttctctcccgtgtctcctacctccgctgtgttccaggtgatagtgggtggtgcagtattcgttggaggtggtggtggtgctgttgcagctgcacctgc

SEQ ID NO: 238912 - DNA, 399 bp, Glycine max
  unsure (1)..(399): unsure at all n locations
aggagggagcggagccacatgattgggagatcccttgatccgtatttcttatttgtttccattttttcctgttacatatcatcttatttttgtttgactaagggactaacgtttgtttcgttttgattgacttttgttttgtacatacatatcgtttgagttgttacgtcagtacttgtttcgttgttttcaatagtgtttgtagaaattccggaatcgcgtagaatttttttttttcatttaggaacgtcgttctaaaaataaaatgaaccaaaatcatgataaaaagagagaagtgtagtgaatanaatttttgcgtatataaagaanaaggaaaatgtgcatagaagggtttttataanaaaatatgtgtagaaagattcttgtgtgtgtgaacaa

SEQ ID NO: 238913 - DNA, 344 bp, Glycine max
  unsure (1)..(344): unsure at all n locations
gagccacaacactttccacttgtctccgaattagttatcttgagaaacattattcccattgctatatattatggctagcatgaaggttacatgggtggttgtgatcatgtgcatggccgtggtgggtgcaccgatgatggcgcaagccatgacatgcaatgatgtgacggtgaacatggcacagtgcctatcctacctgatgcagggaggaacaccttcaacactttgctgcagcggagtcaagaacattcttggctctgctgtcaccaccgttgacaaacaaactgtgtgcaactgtctcaaggcggatgctgctaggtacaacantcaatgacagtatgctc

SEQ ID NO: 238914 - DNA, 386 bp, Glycine max
agacgacagaaggggacacttactagtagtaagcatggagtcctcaaagatctatgcttacctcttcctctgcatgatctttctctcttccgccactcccattctcggttgtggctactgtggcaaaccccccaaaaagcacaagcctggtaaaacaccaaagacacccaaaacacctgttgttaagccaccagtcaccatccctcccattaatgttcctcccgttgttcttccaccaatagtgaagcccccaggtattctccctccaattccaattattaacccaccaaccacaccagggaagggagggaacactccatgcccaccaccaaagtctcctgcgcaggctacgtgccccattgacacgctcaaacttggtgcctgtg

SEQ ID NO: 238915 - DNA, 395 bp, Glycine max
  unsure (1)..(395): unsure at all n locations
ggtcttgcaggcgaagagatggccaccgttccagggcagctcgtgtgggagatcgtcaagaaaaacaattccttcttggtcaagcagtttggaaggggcacccagagcgtcgaattcagcagagagagcaacaatctctacaacctcaattcgttcaagtactctggtttggcaaacaagaaaactgttactgttcagcctgagggcaaagatcaggctgtgttgttggctacaaccaagacaaagaagcaaaacaagcccgctgcattgctccacaaatctgtgatgaagaaggagttcaggangattgcaaaagctgttgaaaaccaggtggccaaaaattactacaggcctgatctcaagaanggctgccttgcaaggttgagtgctgttca

SEQ ID NO: 238916 - DNA, 330 bp, Glycine max
ggagagagaaagagaaatggcaacaagcgaagaagtggttgcggcggcgccggaggcagccgcgccggaggcagggttgaagcacaaactggagagaaaatggacgttttggtgcgacaaccaatccaaacccaagcaaggcgctgcgtggggaacctctcttcgcaaggtctacaccttcgagaccgttgaagagttctggtgtttgtatgatcaggtattcaagcccagcaagttgcaaatcaatgccgagtttcagttgttcaagactgggattgaccctaaatgggaagatccagagtgcgccaatggaggaaagtgggtctatca

SEQ ID NO: 238917 - DNA, 398 bp, Glycine max
ggcaatcaatttgcaaaccaaacacaacacaaggagaagaaccagatctctctttctcaaatcaccaagaatagttgaaaatggggctgtctttcacgaagctgttcagccggctctttgcgaagaaggagatgcgtattcttatggtgggtctcgacgccgccggtaagaccaccattctctacaaactcaagctaggagagatcgtcacaaccattcccaccattgggtttaatgttgaaactgtggaatacaggacgatcagcttcactgtctgggatgttggtggccaggacaagatccgtcctctgtggagacactacttccaaaatacgcaggggcttatctttgtgggtgataggagtgaccgggatcgtgtggttgaagctagggatgag

SEQ ID NO: 238918 - DNA, 351 bp, Glycine max
gatccacacctctctctctctctcagaatttctatctatctcttgtttcaatttcaacaacggttactcctttttcgttttgagtttcaatcaagccatcatcatgtctaccgcatcgcaacccaaggccaagaaaacggcgtcgtccaagaagcccctctcccaccctcccttcgccgtgatgatagcagaggcgattgcgagtctgaaagagagaaccggttcgagccaatacgcgataaccaaatacatcgaagggaagcacaaggagttgcctgcaacctacaagaagcttgtcctcattcatctcaagaaatctgttgctgctggcaagcttgttaaggtgaaaaa

SEQ ID NO: 238919 - DNA, 390 bp, Glycine max
  unsure (1)..(390): unsure at all n locations
ggtaagtgtacatttcatcttagttagggttcaattctcaatcttggtctttgcagttcctagttcctactaccgtgaccttaattctcgggtttcttctgagcgagcagaaggatttcagcatcggagaccgaatcgttcgggtgaggggagtaaataaacagagtgaaccaactcaagcccccaagtagaactgataattagttgcaattttaaaagattgtgattgttgggattgcagagagaagggtggttagtgttagaataggctgagtgtggatggggaaagaggangaagagatgaggggtgagattgangaacgactgattaatgaagagtacaagatantggaagaagaacagtcctttcctgtatgatctggtcattac

SEQ ID NO: 238920 - DNA, 412 bp, Glycine max
  unsure (1)..(412): unsure at all n locations
gacagcaaaacaattttcaaactcaattaccattccataacctaaatctcctctttgtttccgagtcagagagcaatggcacgtaccaagcaaaccgctcgcaagtccaccggcggaaaggcgccgaggaagcaattggcgactaaagccgctcgcaagtcagctccggccaccggcggagtgaagaagccccaccgcttcaggcccggaacggtggctctgagggagatcagaaagtaccagaagagcactgaacttctgatccgaaaactcccattccagaggctcgtcagagaaatcgctcaagatttcaaaacagatcttcgtttccagagcagcgctgtntctgcgcttcaggaagccgcagaggcttatctcgttggactcttcgnagggacacaactctgcgcta

SEQ ID NO: 238921 - DNA, 381 bp, Glycine max
ggcgtgtgttcctcaactcaacacactcctttaaaattgcagcgtcgacaaaaaacctaactcctaacctttttttcttcctttcagctcttcagcagtcgttacagagactccataacccgaaaatgcctttcaagaggtacgttgagattggaagggttgctcagatcaactatgggaaagagtatggggaggctcgtggttattgtcgatgtcattgaccagaatagggctcttgttgacgctcctgacatggtgaggtcccaagtgaacttcaagaggctatcactcactgacatcaagatcgatattaagaggatccccaagaagaaggatctcattcaagccatggaggctgcggatgttaagaacagatgggag

SEQ ID NO: 238922 - DNA, 331 bp, Glycine max
agaagttggggttttacatggagctatgagctacctgctgcaggatgatgatggacaaatagttgagcctcactcaattagtgcaggcttggactaccctggtgtgggtccggaacataactttttgaaagatttagggcgtgctgaatatcatagcatcacagatgaagaagcattggaagcttttaagagagtttcgcgacttgaacgcataattccagctctggaaacatctcatgcgttggcatatctagagaaagtgtgtccaacccttcctaatggagccaaggttgtggttaacttcagtggccggggtgataaggatgttcaa

SEQ ID NO: 238923 - DNA, 335 bp, Glycine max
ggcagtttcaaattttcttttccttcactttcccgagaaaaaaataacacttttcactttcgtcactacgttctcacttcgatatggctcgtacgaagcaaaccgctcgcaagtccaccggtggcaaggcgccacgtaagcaggtcgccaccaagggcgctcggaagtccgctccggcgaccggaggagtggagaagccccaccgcttcaggccgggaaccgtggcgctgagggaaatcaggaagtaccaagaggaggaccgagcgtctcatcaggaaagcttccatttcagaggctcgtgagagagatcgcgcaggatttcaagaccgatttgc

SEQ ID NO: 238924 - DNA, 288 bp, Glycine max
ggcaattgcagagtttaacgtttggccatcacagaagggggaatggagttttctcaagatgattttgatcggttactgttattcgagcacacgcgaaagagcgctgaagcaaactacgcagagaatcctctagacgctgataatctgaccaagtgggggggagctttgatcgagttgtcatcgttccaagctcctaaggatgccaaggcaatgattgatgatgccctttcaaagctggaggaaggtttgctgatcaatcgagctaagcatgacactctttggggcttg

SEQ ID NO: 238925 - DNA, 359 bp, Glycine max
  unsure (1)..(359): unsure at all n locations
gctgcaacatcagctttaaacgccgacgacagttcatccaatctccgaagcccttcagcgcactgcaaccactgtcgagaagaacggttacagagtcacaggaagaaaacgtgactctgggcccagctgttagagatggcgatcatgtctttggcgtcactctcatctttgcctccttcaatgataccttcattcatgtcactgatctgtccgggagggaaacacttgtctgcagcacaagtggaatgaccgttaacgctgacacanatgactcgtcaccctatgctgctatgcctgctgcacaggacgttgctgccagatgcatcgaactgggcataactgctcatcacatcaagctc

SEQ ID NO: 238926 - DNA, 404 bp, Glycine max
  unsure (1)..(404): unsure at all n locations
gaggtgtgatggcggcttcattggggtttcccttcacaagtgcacaatggagggagcttgaaaggcaggctatgatatacaagtacatgatggcttcagttcctgttccacctgatctcctcattcctacttcactcacatcctcttctcgctcttcctgcatggatggtggtttcaatctgaggttggcaaatagcactgaccctgagccaggtaggtgcagaagaacagatggaaaaaaatggagatgttcaagagacgtggctcctaaccacaagtactgcgagcgccatatgcatagaggccgtcnccgttcaagaaagcctgtggaagttaacaccaacaccactcccactagcatcaacancaacaataacaaccaccaaatcaaaagggctcgccat

SEQ ID NO: 238927 - DNA, 384 bp, Glycine max
  unsure (1)..(384): unsure at all n locations
tcactcactcatacaatagagaccagcttttgcttctttgtgaacatggagatgaggaaatcatgtagcttcttcttcttgctcctcctccttgtctttgcttcccaggtggtggtgcagacggagggaagagtgtgtgagtcacaaagccacgggttccatggtttgtgtaatagagaccacaactgtgctttggtctgcaggaacgaaggtttctccggtggcaggtgcaaaggcttccgccgccgctgcttttgcaccaggatttgttgagatctcatcaaacactactcttgccatgcaaattaataaatcatagctaggccaaataaattgcatctactctttatccatttgggagctagctnacacaaccaactcata

SEQ ID NO: 238928 - DNA, 381 bp, Glycine max
  unsure (1)..(381): unsure at all n locations
atcgtgcctatgcacaaggtcaatttcgacgccaagagcgagtacgagatgattcagaactacaaggtccttcaagatgtcttcaacaaactcaaaatcaccaagcacatcgaggtcagcaagctggtgaaaggaaggccactggataacctcgagttcatgcaatggatgaaacgatactgcgattctgtcgattccggccttcagtacaattataatcctctggagaggagagaggtttgcaaaggaggaagagaaacgagcaagaaatctgcaaactcccaagcctcaaccaagggttctactgcacagagacctcattcttctcataatgctcgaagaaatgaggtttctaatgcanaccctacanatcaggctgca

SEQ ID NO: 238929 - DNA, 328 bp, Glycine max
ggtgctctgctcgtgcctctagggttatcatttctccatttccattttctctcccacttttcaagaatcgtaagctatgggaaagtcttacccaactgtgagtgctgattaccagaaggccgttgagaaggcgaagaagaagctcaaaggcttcatcgctgagaagagatgcgctcctctaatgctccgtttggcatggcactctgctggaacctttgacaagggcacgaagaccggtggacccttcggaaccatcaagcaccctgccgaactggctcacagcgctaacaacggtcttgacatcgctgttaggcttttggagccactc

SEQ ID NO: 238930 - DNA, 335 bp, Glycine max
ggaacctcaaaatcagtctctaatatttttctcactgtcttgtctctccagagaactgtatagagagagatggcagctgcaacatctggtgctgtgttaaatgggttgggatcttccttcttgagtggaggaaacaggagccaaacccttctggccactgctattggaggcaaagttggtgctgctgctgttactgttagtcctagaagactcattgtggtagctgctgctgcaccagagaagtcatggctccctggtgtcagaggtggtggcaacctcgtcgacccagaatggcttgatggatcgctaccaggtgactatggctttgacccact

SEQ ID NO: 238931 - DNA, 352 bp, Glycine max
ttcatagatttagggaatcgattactatactagtaataaattgtacaaaaaataaaaatataaataatataaatataaaaagaacaaacacaaattttatgtgattagtcgcggtatttaaaataaaaaatgaaagtagacaaataaaaaaggaaaggagatgtttgaataaaaataattccccttcaagttcttattttttgagaggacaggacaatatgaatgttttattatgctctagcaacacattaaaaagattatatgatatatctgctgtggaagtaggtcaacatttctattggcaaatagggagtttccaagtacatgcccaagtacgtagtacttcttgggt

SEQ ID NO: 238932 - DNA, 393 bp, Glycine max
  unsure (1)..(393): unsure at all n locations
gaggtttgtgattgtctttgcctcactttgctgccgtacctaatcggagagctcccgctgactgcgatcggatttcatggctcctaagaaagacaaggctcccccaccttcatccaagcccgccaagtctggtggtgggaagcagaagaagaagaagtggagcaagggaaagcaaaaggagaaggtgaataaccaggtgctgttcgatcaggctacctatgacaagctcctctccgaggcacccaaatacaaactcattactccttccattctctctgaccgtttgaggattaatggatcacttgcaaggaaggctattanggaattgatggccaaaggttcaataaggatggtgtctacccatgctagtcagcaaatttacactagagcgac

SEQ ID NO: 238933 - DNA, 327 bp, Glycine max
gcctagcaattcggggcaatcatcgtctgcttcaaggaaggagagcttgttattccctatcaacaaggtaaatgtcaggtgaaaacgttgttgttgcagctgagccaactgctgccatcccaggcgagcctatggatagcatgagtgccttgcaacttgtgctcagaaaatctctggcttatggtggtcttgcacgaagccttcacgaaggggcaagagtgattgacaagcatgctgcacaactctatgttctagcagaagactgtgaccagcctgactatgttaaactggttaagggcctttgtgcagagcacaatgttagcctgc

SEQ ID NO: 238934 - DNA, 340 bp, Glycine max
actcgaattgttccacgccacatccaattggcggtgaggaacgacgaagagttgagcaagcttctaggagatgttaccattgctaacggcggtgttatgcctaacattcacaaccttcttcttcccaagaaggctgggggctcatccaagggtgctgctgctgacgatgactcttaaatagggattcactgttcacaaagttcttgaatttagattcgatgtttgctctctttttttttcctttttatttgtagttagtataattgtgccctttgtagtagtagttaggttttcagtcagatgtgtttaaggaatgctcttacgcatcaagaaaggttgt

SEQ ID NO: 238935 - DNA, 405 bp, Glycine max
gacttctcttcacacctttgttcactcttcttctcttgcggctagggttttagcgcagcttcttctagatttaaggaagatgggtaaggaaaaggttcacatcagtattgtggtcattggccatgtcgactctgggaaatcgactaccactggtcacctgatttacaagcttggaggcattgacaagcgtgttattgagaggtttgagaaggaagctgctgagatgaacaagaggtctttcaagtatgcctgggtgctggacaaacttaaggctgagcgtgaaagaggaatcaccattgatattgctttgtggaagtttgaaacaacaaagtagtagtgcacagttattgatgcgcctggacatagggatttcagtaagaatatgattactgggacatcgcaagc

SEQ ID NO: 238936 - DNA, 325 bp, Glycine max
gacccttaacctctctgctgcgtttgcttctcctccacccatccacaaacgaacacacactttgattgagaatggggcgtgttcgcacaaagacagtgaagaagtcctcgcggcaagtgatcgagaggtactactctcgcatgacgctggacttccacacgaacaagaaggttctggaagaggtggccatcattccctccaagaggctccgcaacaagatcgcgggattctccacccacctcatgaagcggatccagaagggtcccgtacgtggaatctccctcaagctgcaggaggaggagcgcgagcgccgcatggacttcgt

SEQ ID NO: 238937 - DNA, 395 bp, Glycine max
  unsure (1)..(395): unsure at all n locations
gagagtggtggagtgtgcagaagagcgtcgcagtcgcaaccctaatcagaagaagcgcagcttcaagcgagtgacagccaccagccatgggtcgtatgcacagccgcggtaagggtatatcctcttctgctttgccctacaaaaggacacctcctagctggctcaagatctcttcgcaagatgtcgaagaaaatatctgcaagtttgcgaagaaaggtttgaccccgtctcagattggtgacattctcagagattctcacggtattgctcaggtcaatagcgtcactggcagcaaaatccttcgcatcctcaaagctcacggacttgcgcctgaaattcccagaggactgtaccatttgattaagaaggcagtttcaattangaagcatcttgag

SEQ ID NO: 238938 - DNA, 369 bp, Glycine max
  unsure (1)..(369): unsure at all n locations
ggttctagtgtgtgattgtttgttgttgtaactcgttcttcttcttttgttgttctgtgtttgtgtttgttttttctctcacctgaaaatgtcttgctgcggtggtaactgtggttgcggaagctcctgcaagtgcggcaacggctgcggaggctgcaagatgtacccagacttgagctacactgagtcaaccaccaccgagaccttggtcatgggagtggcacctgttaaggctcaatttgagggtgctgaaatgggtgtgcccgctgagaacgatggctgcaaatgtggaccanactgctcctgcaacccctgcacttgcaagtgangtgttgggagagcaagcttcaagcagagatagcccttaat

SEQ ID NO: 238939 - DNA, 364 bp, Glycine max
cggggcgtacacagcctcaacaaccctaacgcgtgcagagcagagagagacgcagccatggggcgaagacccgcgaagtgttatacgcaacttaagaacaaaccataccccaagtcacggttttgccgtggtgttcctgatcccaagatcaggatttacgatgttggtatgaagaagaaaggtgttgatgagtttcctttctgtgtccatctggttaattgggagaaggaaaacgtttctagtgaggccctggaagctgctcgtattgcttgcaacaagtacatggccaaatttgctggaaaggatgctttccacttgaaagtcacggtgcacccattccatgttcttaggatcaacaagatgc

SEQ ID NO: 238940 - DNA, 381 bp, Glycine max
gcaggaagacaacgacggggacgtgcacaacctcaacaaccctaacgcgtgcagagcagagagagacgcagccatggggcgaagacccgcgaagtgttataggccaattaggtacaaaccaaaccccaagtcacggttttgccgtggtgttcctgatcccaagatcaggatttacgatgttgggacgaataagaagggtgttgatgagtttcctttctgtgtccatctggttacttgggagaaggaaaacgtttctagtgaggccctgtaagctgctcgtagtgcttgcaacaagtacatggccaaatttgctggaaaggatgctttccacttgagagtcagggtgcacccattccatgttcttaggatcaacaagatgct

SEQ ID NO: 238941 - DNA, 312 bp, Glycine max
ggagttgagaggatcgtgagaggggcagtagccgagattccgtgagttgcaaaaatgaagacgattctttccaccgagaccatgaacatcccggacggcgtgagcatcaaagttcatgccaaggtcatcgaagttgagggcccccgcggaaaattggtgcgagacttcaagcatttgaatctcgattttcagctcattactgacgaaaacggtaaaagaaagctgaaaatcgacgcgtggtttggttctcggaaaacatccgccgccattcgcaccgccttgagccacgtggagaatcttatcaccggcgtc

SEQ ID NO: 238942 - DNA, 306 bp, Glycine max
gatcactctcacgcttctgattattcctcttcccattctagggttcccaaatggacgctggcggaaagatcaagaagggcgccggaggaagaaagggcggcggccctaagaagaagccggtttcaaggtccgtcaaggccggtctccaattccccgtcggaagaattggccgttatttgaagaaaggaaggtacgcccagcgtgtcggtaccggtgctcccgtttacttggccgcagttctcgagtacctagctgctgaggtgcttgagttggctgggaatgctgcacgtgacaacaagaagaaca

SEQ ID NO: 238943 - DNA, 363 bp, Glycine max
gagagaagttattagggtttttgagtgcggcggtccaaacactcttctctgcagcttttgcctacaactcccttcaccatggctgaacaaaccgagaaagcttttctgaagcaaccaaaagtgtttctcagcacaaagaagactgggaagggaaagagacctggaaaaggtgggaaccgcttttggaagtccattgggcttggatttaagactcccagggaagccatcgaaggaacctatattgacaagaagtgccccttcactggcaatgtttccatccgtggccgtatcttggctggaacatgtcacagtgctaagatgaacaggactattattgttagaaggaattatctccattttatc

SEQ ID NO: 238944 - DNA, 342 bp, Glycine max
caaactgttgctgtgggagtcatcaataacgttgagaagaatgatcctaccggagccaaggtcaccaaagctgcccagaagaagaagtgaatcgtgcgggctggttcatcaagggatgttggttacaataaatgttggtttcttttctgtactcttgtgtcttcttttctaagtagcttgtttttcggacaaagtttgaaatctccaccatcatctcgcaactgttgttcccagaactgggttcttgatcgacggtggcaaaattgcttttacttatctgtgttttaatgtgttgtgtttgtcggaacccctgattacatttttgttaagcgcaaccaattt

SEQ ID NO: 238945 - DNA, 312 bp, Glycine max
gagttttctgttggcgcgggtgaggtagaacccttccacggtggtgactgcgcgatgggtgcctacaagtatgtttcagagctatggcgcaagaagcagtctgatgtcatgcgcttcttgcagcgggtgaggtgctgggagtataggcagcaaccttcccttgttcgcttgacaaggtcgacccgccctgacaaggctcgtcgcttgggcttcaaggctaagcagggctatgtgatataccgtgttcgtgttacgatgggtggccgaaagaggccagttcccgaaggtattgtttatgggaagcccacaaac

SEQ ID NO: 238946 - DNA, 349 bp, Glycine max
gactcagcacttcaaaacactcataacacaaagcacaaagcaaagctcatccttgagttcaaaaagttggaacagcttcttccatgggtctctcatccccatccttggctggcaagggcgtgaagctgggcccatcaagcccaaaaatgggaacggggagcaatgagaagaccgtcaacaaacatgtctcctcatgaagcccatggtacgggccagaccgagtcaagtacttgggcccattctctggcgagcccccgtcctacctaaccggtgagttcccaggcgactacggctgggacactgctgggctttccgcagacccagaaaccttcgccaagaaccgtgaact

SEQ ID NO: 238947 - DNA, 317 bp, Glycine max
gaagaaagtgagggaaaaaagtagagtggtatgtgggttgctgcggcaacaaaaccattcatcaaattccaattccacagacacactacttctcttccgcttcttctgatggcaaaccaagcttcactctccttttcttcttccgtgtctcctgttcacgcgcctctcaagcgcgtgggcacgcacaacggaagctttcattgcgacgaggccctcggctgcttcatgattcgcctcacgaacaaattcaacagcgccgaaatcgttcgctcccgagaccctcaagtgttggaggttctcgatgctgttctcgatgt

SEQ ID NO: 238948 - DNA, 361 bp, Glycine max
agggcactgcaactttgctctctgtgaggcttcaatttccaattagggtttcgcttagagtaaccaattaccatgggagtcttcacctttgtcgttcgcaaatccggcgccgaatggagcgccaagcaacattccggcgacatcgaggcctccgccgactccacctacgatctccaaaggaagctcgtgcaagccgctctcgccgttgattcctccggtggagtccagtcctccttctctcccgtgtctcctacctccgctgtgttccaggtgatagtgggtggtgctgtattcgttggaggtggcggtggtgctgttgcagctgcacctgcaggttgtgctgctgcagctgatgctgccc

SEQ ID NO: 238949 - DNA, 328 bp, Glycine max
  unsure (1)..(328): unsure at all n locations
ggccgaaaagtagtaccaagatggcttcagttgtgtatctcctctttggcttccatctcattgttatcatgtcaagttccttacccgcaactagtgaagtgtttgcaaaacagtatccatccacagaacccgtggaagaaaaactcacccaactccacttctatttccataacaacataacgggggaacacccaactgctatgaaaactgttttgcctcctaaggggtccattcatggttttggggctacttacatgatggatgaccctctaactgaaggaccaagtccaacttcaaagcttgtgggaagatctcanggaatatacgc

SEQ ID NO: 238950 - DNA, 337 bp, Glycine max
ggtccaaaatcctcactccagccacacgcctcagtagaccatggcctcattgggtgggttacaaaatctaagcggcatcaattttcttatcaaaaaagagggtccaaaagtcaatgcgaagttcgagctgaagccgccaccatatccactgaatggtttggagccggtgatgagccagcagacacttgagtttcattgggggaaacaccacaagacatatgtggaaaatctgaaaaaacaaattgttgggacagagcttgatgggaaatcactagaagagattatagtgacatcatataataagggtgacattcttccagctttcaacaatgcagca

SEQ ID NO: 238951 - DNA, 331 bp, Glycine max
  unsure (1)..(331): unsure at all n locations
gagttttctgttggcgcgggtgaggtagaacccttccacggtggtgactgcgcgatgggtgcctacaagtatgtttcagagctatggcgcaagaagcagtctgatgtcatgcgcttcttgcagcgggtgaggtgctgggagtataggcagcaaccttcccttgttcgcttgacaaggtcgacccgccctgacaaggctcgtcgcttgggcttcaaggctaagcagggctatgtgatataccgtgttcgtgttangaggggtggccgaaagaggccagttccccgaagtattgtttatgggaagccacaaacaaggtgttacccaactgaaa

SEQ ID NO: 238952 - DNA, 351 bp, Glycine max
ggcgccccatatcttccaccctttggctattcctaaccattgagtacaacttcacattttagaagaataccccctcttttgctgcatcagaggagttgtaaattaagagcatggctgcacaagctcttgtatcatcatcttctcttaccttctcagcggaggctgcaagacaaagtcttggaccaagatcactccaatctccatttggcttctccagaaaagcctcctttcttgttaaggcagctgctaccccccctgtcaagcaaggatcagacagacctttgtggtttgcatcaaagcaaagtctttcttacttggatggcagccttccgggtgactatggatttgacc

SEQ ID NO: 238953 - DNA, 361 bp, Glycine max
ggtgttcctgacaaatctgaggatgaaacaccagagaaatctgaaagtgaagacaaaagtgattctggaagtgaatctgaagatacgaaagaaaagaaaaaacctaaaacatcatccacaaagaaagaatctgctaagaaaagtaaaattgagaaaattaaagttgcaactaaatctcgctcaccacaaaaaagaacacctaagaaatcatcatccaacctctcaaagtctgatgatgacagtgatgaaagtccaaatccaaaggtcttttcaaggaagaagaaaaatgagaaaggaggaaagcagaagattgatgatagtgatgaaagtccaaatccaaaggtattttcaaggaagaaga

SEQ ID NO: 238954 - DNA, 345 bp, Glycine max
gattcacacaactaactaagaaagtcttccatagccccccaaaaatgaagagcaccatcttctttgctctctttctcttttgtgccttcaccacctcatacctaccttcagccatcgctgatttcgtgctcgataatgaaggtaaccctcttgaaaatggtggcacatattatatcttgtcagacataacagcatttggtggaataagagcagccccaacgggaaatgaaagatgccctctcactgtggtgcaatctcgcaatgagctcgacaaagggattggaacaatcatctcgtccccatatcgaatccgttttatcgccgaaggccatcctttgagcctta

SEQ ID NO: 238955 - DNA, 312 bp, Glycine max
gacaacgcaactattgacaatctctctttattctattcactccctccatttcttcaaactaaatttcctgagaatggcgaaggctgcggagaaaaagcctgcggccgagaaggctccggcggagaaaaagccaaaggcggagaagaaggttccaaaggaaggcagcggcggagagaagaagaagaagaggtcgaagaagagcgtggaaacgtacaagatctacatattcaaggtgctgaagcaggtacatcctgacatcggcatttcgagcaaggccatggggatcatgaacagcttcatcaacgatatatt

SEQ ID NO: 238956 - DNA, 277 bp, Glycine max
cggggcgacagaagttattacggtttttgagtgcggcggtccaaacactcttctctgcagcttttgcctacaactcccttcaccatggctgaacaaaccgagaaagcttttctgaagcaaccaaaagtgtttctcagcacaaacaagactgggaagggaatgagacctgtaaaaggtgggaaccgcttttggaagtccactgggcttggatttaagactcccagggaagccatcgaatgaacctatattgacaagaaatgccccttcactggcaatg

SEQ ID NO: 238957 - DNA, 355 bp, Glycine max
ggacaacacaacgcaacacaacgcgcactctctcttttccctcttaacacaaaaaccctatcgttcttcgcggtttcgccgattctcgccatgccgaaagccaaatccgacgccaaagccgccgatagccggttgaagcgcaagggcgctggtgctggaaggaagcaatcgaagaaagctgctaaggatcctaacaagccaaagagacctccaagcgctttcttcgttttcatgtccgagttcagagagcagtttaagaaggagcatcctaacaacaaatccgtcgctgttgtcggtaaagctggtggtgacaaatggaaatcgctgtctgatgctgaaaagcccccttcgttgc

SEQ ID NO: 238958 - DNA, 367 bp, Glycine max
  unsure (1)..(367): unsure at all n locations
gaggttttggagttacagccgcagcttgaaacagagcagagcgaccttgaagagctatggctgtcggaaagaataagaggatttccaagggaaagaagggtggcaagaagaaagccgctgatccctttgccaagaaagactggtacgatatcaaggccccttccctcttccaggtcaagaatattggcaaaaccctcgtctctcgtacccagggaaccaagattgcatccgaaggactcaaacatcgggtttttgaggtctcattggctgatctccaangggatgaagaccactccttcaagaagattcgtttgagagctgaggacgttcaagggaagaatgttctgacaaacttctggggaatgga

SEQ ID NO: 238959 - DNA, 342 bp, Glycine max
agaaggggatatattatcaactcaatcccaaaccctagaatttcagatcctcaatcggccagcaccaacagcatcggcggcgacagtcactctccgacaacaacacttccgcggcgaaaaatgtctctggtggcgaacgaggatttccagcacattctgcgtgtgctgaacaccaacgtggatgggaagcagaagataatgttcgctgtgacctccatcaagggtattggaaggagattcgccaacatcgcttgcaagaaggccgatgttgacatgaacaaaagggctggtgagttgagtgctgcagagttggatagtgtgatgactgtggtggcgaaccct

SEQ ID NO: 238960 - DNA, 312 bp, Glycine max
ggccgaatgtgtctctccgcagcagccacacttcttcgccgtttcagctgaagagccatccgcaggtaagcaatggttaagcataataatgttatccccaatgggcacttccggaaacactggcaaaactatgtgaagacttggtttaatcaaccagcccgaaagaccagaagacggttggctcggcagaagaaggctgtcaagattttcccccaggcctactgctggatctctcaggcctattgttcatggccagactctgaaatacaacatgaaagtcagagccgggagaggattttcactggaagaatt

SEQ ID NO: 238961 - DNA, 354 bp, Glycine max
ccctgaaggagaaaaccccatcaacgaacgatgctaacatcatcatagccacaccaatttcgccatcatccgaaaaggcggcacaagttgttccctcaaagaaaaaacaagattcaaagaagcagcaatctttcgaaaaagaattgctggagatgcaggaaatgctgcagcagatgcgcctcgagaaggagaagaccgaagagctcttgaaggtcaaggacgaggctctcaagctgaaggaagaagagcttgaaaaccgtggccgggagcaagagaagcttcagaccgagctcaaaaaattgcagaagttgaaggagtttaaaccctacatgaatttgcctgtgttgaaagata

SEQ ID NO: 238962 - DNA, 225 bp, Glycine max
tttctcgatttcgaaatatatcaaaaccttgggtagaaaaaaaaagtggtatgctgtgtttccaagattggatttcatattcgaatgaacctcgtaatcgtaagaaagtgggttttttaactacgggtctagcaaacgaaaaattgagataggattcaatccaataagatctcccctttcaaaatcggacgtgaaggtttcctttcaatcggctcaagtagttat

SEQ ID NO: 238963 - DNA, 317 bp, Glycine max
  unsure (1)..(317): unsure at all n locations
gctggccattccgtttcncagatctgctccttccgttccccctcagaaatcagttgaagagcatgggtcgtggagttagcagtggtggtggtcaaagttcattgggttatctttttggcagtggagaggcccctgccccaaaaccagcaacaaataatgccccagcccaacctgaagtgcaggctgtaaataatgtgcctcctccaaaagcatctcctcctactaaaacaatagaccctaacaaggctgctggtatcaacagtcattctactgatggccagaacaccggcaacttcatcacgggccgaccctcaacc

SEQ ID NO: 238964 - DNA, 355 bp, Glycine max
ggcagcgtcccaagttccaggtttcagcgagcattctacaatggctactataccagttaatcccaagcctttcttgaacaatttgactgggaagcctgtaattgtgaaactgaagtggggaatggagtacaagggctatctcgtttccgttgattcctatatgaacttgcagctggccaacaccgaggagtacattgagggacaatttactggaaatttgggagagattttaatcagatgtaacaatgttctctaccttcgaggagtaccggaggatgaggaaatcgaagatgctgctgaagactagagagtgatagaagctgctaatggctatgacataaacagaactcgaatt

SEQ ID NO: 238965 - DNA, 336 bp, Glycine max
gaacgccaatgtttttttcaaaggagtttcaacctggaatcaaaagagtttaacctaaagtaagaaatccaagtcctaatccaatttaagggacaaaacaagagaacaataacctgacaaagggtttaaccataaaatcgaatccaacattgatttgagatattgataaagtgaatactcatttctcgtcaatgctaggcataatgcgggtatagggacctaaaaaagattatcttttcttcctatcttatgaactttaaggtgtatgaagtgtcatttcctatcttagattttaattttagtaggtagataaagagtccatttaacttaagttga

SEQ ID NO: 238966 - DNA, 326 bp, Glycine max
gaaggttagattcgttgttgttgttctaaaacgtccacacattctccgtcgccacaacaacaatggctccgaagaaaggtgtgaaaggttccgttgtagcagcgaagaagaaagttcaagagaaggtgacgaatcctttgttcgagaagcgtccgaagcaattcgggatcggaggcgcgctgccgccgaagcgggacctgacgcggttcgtgaagtggccgaagaacgtccaaatccaacgcaagaagcgcatcctcaagcagaagctcaaggtccctcctgcactcaaccagttcaccaaaaccctagacaagaatctcgccacg

SEQ ID NO: 238967 - DNA, 355 bp, Glycine max
ggcgaaacagagagtgatttcagtgagtgatcggtgttcacttgatctcatcataatcgtcagcgtcaattgaagaagatgccgatcagaaacatcgccgtcggaaggcctgaagaggcgactcaccccgacacgttgaaggcggctttggctgagttcatctcaaccttcatcttcgtgttcgccggctcaggctccggcatcgcctacaacaagctcaccgacaacggcgctgccacccctgccggcctcatctccgcctccatcgcccatgcattcgccctcttcgtcgccgtctccgtcggcgccaacatctccggcggccacgtcaaccccgccgtcaacttcggcgcct

SEQ ID NO: 238968 - DNA, 353 bp, Glycine max
ggttctagtgtatgtgattgttgtgactcgttcttcttcgtcgttatcttcttcttttgttgtttgtgtgtttgttttttctctcacctgaaaatgtcttgctgcggtggtaactgtggttgcggaagcgcctgcaagtgcggcaacggctgcggaggctgcaagatgtacccagacttgagctacaccgagtcaaccaccaccgagaccttggtcatgggagtggcaccagttaaggctcaattcgagagtgctgaaatgggtgttcccgctgagaacgatggctgcaaatgtggagctaactgcacctgcaacccctgcacttgcaagtgaggtgttggagagctaaagct

SEQ ID NO: 238969 - DNA, 312 bp, Glycine max
ggcagtttcaaattttcttttccttcactttcccgagaaaaaaataacacttttcactttcttcactacgttctcacttcgatatggctcgtacgaagcaaaccgctcgcaagtccaccggtggcaaggcgccacgtaagcagttggcgaccaaggccgcccggaagtccgctcccgcgaccgggaggagtgaagaagccccaccgcttcaggccgggaaccgtggcgctgagggaaatcagaaagtaccagaagagcaccgagcttctcatcaggaagcttccatttcagaggctcgtgagagaaatcgcg

SEQ ID NO: 238970 - DNA, 353 bp, Glycine max
attcgagcgggcgcattatattttgggatggttatattcttctttgctcatttagatcttcaatttaaacaacgctctactcaaaattgaaacacaaggtctgcttaatgtcaactgagacaaatgatgggtactaacaatgcacaaaatatggaatctacgctttttaaaaaagttttcttcatgattaaccataaagctgcctaagtactagtactaccctaaataatcccaatcttgtttgccacatccaatgcatcggaatcaggtgtcaacctgacatatgacttcctggtgacatcaggcctggataaagtgttcaattttttgagcctggatgtcacatattttct

SEQ ID NO: 238971 - DNA, 346 bp, Glycine max
gacggacgagggtttcgtttcgggtttgacgttgttcacaatcactttctgcgcttcactcactcccttcgtgcggttttctttctttgtcgaactcgtgcgaaaatgcgtgagattcttcacatacagggagggcaatgcggaaaccagatcggagcgaagttctgggaggtggtgtgcgcggagcacgggatcgattccacggggaggtaccagggggacaacgagttgcaactcgagcgagtcaacgtctattacaatgaagcgagttgcggaaggttcgtgccgagggcggtgctcatggatctagagccggggaccatggacagcgtcagatctggtccct

SEQ ID NO: 238972 - DNA, 334 bp, Glycine max
gattcgatcaaatactcagaactgttcggtttttctggaaatttttcttctctcagccatctctctctctctctgcgtccatggagttttggggtgttgaggtgaaaagtggagaatctctcaaggttgatccgggagatgacaagattatccacctttcaaatgcatgcctgggggatgtcactaaggataaagaaggtctaccagtaaccctgtatgtcaagtttggtaaccaaaagcttgtacttggaacgctttcttctgaagcttttcctcagatatcttatgatttggtatttgagaaggaatttgagctatcccataactggaaaca

SEQ ID NO: 238973 - DNA, 320 bp, Glycine max
gattcattgctccctcgaactgttgtttggtctcttctctcttatccatggcatcaacgtttctcaccctaccaactcccttcctacacaaaaccaatgccatcagtttctctaacaagagaccctcatttttgcagaggagctctctgaagattcatgcaattaccaaaaaatgggaacccacaagggttgtgcctcaggctgatagagttcttattcgtttggaggagctttcagataaaacagttggtggagttttgctgcctaaatcagctgttaaatttgagcgctatcttgtgggagaaatcctaactgttggt

SEQ ID NO: 238974 - DNA, 280 bp, Glycine max
gacagcgaaacagagagtgatttcagtgagtgatcggtgttcacttgatctcatcataatcgtcagcgtcaattgaagaagatgccgatcagaaacatcgccgtcggaaggcctgaagaggcgactcaccccgacacgttgaaggcggctttggctgagttcatctcaaccttcatcttcgtgttcgccggctcacgctccggcatcgcctacaacaagctcaccgacaacggcgctgccacccctgccgggctcatctccgcctccatcgcccatgcat

SEQ ID NO: 238975 - DNA, 350 bp, Glycine max
gggacgggaagaaacgcatcgagcgtggagaaagagaaggatgatgaggttaaggtggagtgtactcgtaatggtcacgttcgctgtttctctgttttggcttggacccctgcaagtcaaagcctctaattctgtttccgccttcgttcaaaacgccatctactccaacagaatcgccgttttctccaaatcctattgcccctactgtttgcgcgccaaacgcttgcttgctgaactcaatgaaaaaccttttgtggtggtgctcgatttgcgagatgatgggtttcaaattcagagtgttcttctggatttgataggtagaaggacagtcccgcaagtgtttgtgaatg

SEQ ID NO: 238976 - DNA, 330 bp, Glycine max
gattttcgtcgtgagtggtgacgtgccctagccccatatctagtctccctctctcaatctcacatctctcgtcgccaccgccgcgccgcacggaggcacccacggaaccaatctagccatcagttgaaacagtgagcttacaaaaaatggcaactgcacctgcacaaattcctacaagctttggccatgagttgagggcttgtcttcgttgccgccttgtcaaaacctatgatcagttcagagagtcaggctgtgagaactgctcattctttaagatggaagaagatcacgagcgtgttgttgattgcactactcccaattttaatggga

SEQ ID NO: 238977 - DNA, 333 bp, Glycine max
ggcgcattgaacgaaaattaaggtttgtagtgtagcaggaagaagcagcaatggcgccgaagataacacgtaaggttagcagaaaccctgaattgataaggggaatcggaaagtactcgaggtcgcagatgtaccacaagaggggcatttgggctatcaaggccaaaaacggtggtgttttacctcgccacgaccctaaacccaagcctgaagctcctgccgaaaaaccacccaaattttaccctgctgatgatatcaagaagccccttgtcaacaagcacaaaccgaaaccagctaagctcagtgcaaccatttggcatctgataatgtaaa

SEQ ID NO: 238978 - DNA, 325 bp, Glycine max
ggttctagtgtgtgattgtttgttgttgtaactcgttcttcttcttttgttgttctgtgtttgtgtttgttttttctctcacctgaaaatgtcttgctgcggtggtaactgtggttgcggaagctcctgcaagtgcggcaacggctgcggaggctgcaagatgtacccagacttgagctacactgagtcaaccaccaccgagaccttggtcatgggagtggcacctgttaaggctcaatttgagggtgctgaaatgggtgtgcccgctgagaacgatggctgcaaatgtggaccaaactgctcctgcaacccctgcacttgcaag

SEQ ID NO: 238979 - DNA, 363 bp, Glycine max
ggttggtagaagaaattgggcgtgtgggagttgttgaatcgggaagcaaaaaaaatgagaatccatcacatagcatgcctccaagacaattattcctatctgatcgtagacgagagcacgaaggaagccgcggcggtggacccggtcgaaccggagaaggttcttgaagttgccagctcgcacggcctcactctcaaattcgtcctcaccacccaccatcactgggatcatgctggtggaaacgacaagataaagcagctggtgccaggaatcaaagtctatggtggttccattgaaaacgtcaagggttgcactgacaaagttgaaaacggtgataaggtctctcttggaagctgaatcact

SEQ ID NO: 238980 - DNA, 327 bp, Glycine max
aaatcttcaatttaaacaactctctagtcaaaattgaaacacaaggtctgcttagtgtcaactgagacaaaagatacaaaataacaaaacacaaaatatagaatctatgctttttaaaaaagttttcttcaagaataaccatagagctgcctaagtactagtactaccctagataatcccaatcttgtttgccacatccaatgcatcgtaatcaggtgtcaacctgacatatgccttcttggtgccatcaggcctgatcaaggtgttcacttttttggcctggatgtcatacattttcttcaccgcatccttgatcttcttcttgtc

SEQ ID NO: 238981 - DNA, 353 bp, Glycine max
  unsure (1)..(353): unsure at all n locations
gaatcctcagaatcagcttcagcctttctctctaactccctcactcacactcacagttaagcaatggcggggaaaagangaaaagggcttcttgcagcgaaaaccaccgcggctaacaaggacaaagacaaggacaagaagagacctatttctcgttcatctcgtgccggaatccagtttcctgtgggacgtatccataggcagctgaaacaaagggtccaagctaatggacgtgttggtgccactgctgccgtatacttagcctcaattcttgagtatcttactgctgaagttcttgaacttgctgggaatgcaagcaaggatctgaaggtgaaaaggataacaccaaggca

SEQ ID NO: 238982 - DNA, 349 bp, Glycine max
ggctcttactctctttcgtcagtttcgggggaagagatccagcagcaatggtgtacgtcaaggctcagaaatcaaaagcctacttcaagagatatcaagtcaagttcaagagaagaagagagggaaaaaccgattaccgtgccaggattcggttgattaatcaggacaagaacaaatataacactccgaaataccgatttgtggttcgctttagcaacaaggacattgttgcacaaataatatctgctagcattgccggcgatttagttcttgctacagcatattcacatgagctgccacgatatggtcttgaagtaggacttacaaattatgcagcagcttattgcac

SEQ ID NO: 238983 - DNA, 336 bp, Glycine max
gacacaccatccgttctagtctcaacttctgctcttccaactcctacaacgcttttctctgcactcatgggcaaggtcaagatcggaatcaacggatttggaagaattggccgtttggttgccagagtcgctctgcaaagagacgatgttgaactcgttgccgttaacgaccctttcattaccaccgattacatgacatacatgtttaaatacgacagtgttcacggacactggaagcatcacgatgtcaccgttaaggacgagaagacccttctcttcggtgacaaggcagtcactgtttttggacacagaaaccctgaagagatcccatggggg

SEQ ID NO: 238984 - DNA, 397 bp, Glycine max
ggacaacacagaacaaaaacaaagaaaaaaaaaaacccttagccaacacaaccatcatggccacctctgctattcagcaatcagcattcactggtcaaactgctctgaagcagctcaatgagttcgtccgcaagaccggtggcgccggcaaaggtcgcactaacatgcgccgcaccgtcaagagtgctcctcagagcatttggtatggccctgaccgtcccaagtacttgggtccattctcggagcagattccatcatacctgaccggagaattccctggtgactacggatgggacactgctggattatcagctgacccggaaaccttcgccaggaaccgggagctggaggtgattcacagcagatgggcaatgcttggtgcccttggctgcacctt

SEQ ID NO: 238985 - DNA, 359 bp, Glycine max
ggttctagtgtgtgattgtttgttgttgtaactcgttcttcttcttttgttgttctgtgtttgtgtttgttttttctctcacctgaaaatgtcttgctgcggtggtaactgtggttgcggaagctcctgcaagtgcggcaacggctgcggaggctgcaagatgtacccagacttgagctacactgagtcaaccaccaccgagaccttggtcatgggagtggcacctgttaaggctcaatttgagggtgctgaaatgggtgtgcccgctgagaacgatggctgcaaatgtggaccaaactgctcctgcaacccctgcacttgcaagtgaggtgttgggagagcaagcttcaagcagagat

SEQ ID NO: 238986 - DNA, 330 bp, Glycine max
  unsure (1)..(330): unsure at all n locations
ggagagtcagattcgcacgcatttgctcgcctcacaacagcagctgcagcagcaatggctcccaaacgaggtggaaaggctccggctcttgccgctaagaagaagcctgagaaggtcacgaatccgttgttcgagaagcgtccgaagcagttcggaatcggaggggcgttgcctccgaagagagacttgactangttcgtgaagtggccaaagaatgttcaaattcagaggaagaagaggattctgaagcagaggttgaaggttcccccagctttgaaccagtttaccaaaactcttgacaaaaacctagcaacaagtctgttcaagttg

SEQ ID NO: 238987 - DNA, 360 bp, Glycine max
gattctgttccgcagaaaaccctagcccaaccggatcttcacgactaggagatggcaaagtcgaagaaccacaccgctcacaaccagtcctacaaggcccataagaatggcatcaaaaagccaaagaggcatcgccacacttccaccaaagggatggatccaaagtttctgaggaaccagaggtacgcgaggaagcataacaagaagagcggtgaaacagccaccgaagaagagtaaagtgccactctcaaatgggcctattaggatttgatttgttatttaagccccatatgttttgtgtcgaatctatctttagtagtatagtcatttttatgagttaacttaatccagagagaatgc

SEQ ID NO: 238988 - DNA, 352 bp, Glycine max
gacacaccatccgttctagtctcaacttctgctcttccaactcctacaacgcttttctctgcactcatgggcaaggtcaagatcggaatcaacggatttggaagaattggccgtttggttgccagagtcgctctgcaaagagacgatgttgaactcgttgccgttaacgaccctttcattaccaccgattacatgacatacatgtttaaatacgacagtgttcacggacactggaagcatcacgatgtcaccgttaaggacgagaagacccttctcttcggtgacaaggcagtcactgtttttggacacagaaaccctgaagagatccatgggggtcaactggagctgacat

SEQ ID NO: 238989 - DNA, 336 bp, Glycine max
gacaacacagaacaataacaaagaaaaaaaaaaacccttagccaacacaaccatcatggccacctctgctattcagcaatcagcattcactggtcaaactgctctgaagcagctcaatgagttcgtccgcaagaccggtggcgccggcaaaggtcgcactaacatgcgccgcaccgtcaagagtgctcctcagagcatttggtatggccctgaccgtcccaagtacttgggtccattctcggagcagattccatcatacctgaccggagaattccctggtgactacggatgggacactgctggattatcagctgacccggaaaccttcgccaggaa

SEQ ID NO: 238990 - DNA, 349 bp, Glycine max
gatctcaatttcttttctctttgtcgcaaagagaagagatctgcctcctttttatcaaatctatctcttcttcaagaatagttgaaaatggggttgtctttcaacaagttgttcagccgactgtttgccaagaaagagatgcgtatactgatggtgggtctcgatgctgcgggtaagaccaccattctgtacaagctcaagcttggagagattgtcaccaccattcccaccattgggtttaatgtggaaactgtggaatataagaacatcagcttcactgtctgggatgttggaggtcaggacaagatccgtcctttgtggagacattacttccaaaatacacaaggac

SEQ ID NO: 238991 - DNA, 245 bp, Glycine max
atcaaaaaagaaggtccaaaagtcaatgcgaagttcgagctgaagccgccaccatatccactgaatggtttggagccggtgatgagccagcagacacttgagtttcattgggggaaacaccacaagacatatgtggaaaatctgaaaaaacaaattgttgggacagagcttgatgggaaatcactagaagagattatagtgacatcatataataagggtgacattcctccagctttcaacaatgc

SEQ ID NO: 238992 - DNA, 338 bp, Glycine max
ggtacgtcgtatatgtggttgatcttttgctggttgtttgttttgttccttccaattgtcagatctgaatcaccggactcactcttcacactcactcacactgaatggcttctgaaggcgaccatcaccaccaccaccaccaccatcaagatcacgatcatcatcatcatgatcatgatcaccatcatcatcacgatggagagggagagaccaactcatgggtaggtaaggatgggaaggtgtaccatagccacgatggtctggcgccgcattctcacgaacccatttactcccccggctacttcaccagaagagctccaccgcttctcaacagaaac

SEQ ID NO: 238993 - DNA, 396 bp, Glycine max
  unsure (1)..(396): unsure at all n locations
gacttccagatttcaaagaaggcgtcttcataaacgcctttcttctccgtttccgtttcctcgttcgaattcgctttttgatctgcgaaaatgagagagtgcatctcgatccacattggtcaggctggtatccaggtcggaaatgcttgctgggagctctactgcctcgagcacggcatcgggcccgatgggcaaatgccaagtgacaagacagttggcggtggtgatgatgctttcaatactttcttcagcgagactggtgctggaaagcacgtgccacgtgcagtgtttgtagatcttgagcccactgttattgatgaggtgagaaccggaacttaccgccagcttttccacccagagcagctcatcagcggcanagaagatgccgccaacaac

SEQ ID NO: 238994 - DNA, 362 bp, Glycine max
tggtgcattactggagtgacgccagccagcacaagacagtggccaatggaaatcatgtcacatatagatacttcaattaatcatctggttttatacatcactgcacccttagagatttaaagtttaacacaaaatattattatgaacttggaattgggcataactactaggcaattttggtttgtgactcctcctgaagttcaccctgatgcgccttatacatttggtctcattggtgatctgggtcaaacttttgattcaaacaagacccttgttcactatgaatcaaaccctcacaaaggacaagctgtgttgtatgttggagacctctcttatgcagataatcacccaaatcatgataa

SEQ ID NO: 238995 - DNA, 358 bp, Glycine max
gattcagaggcaacaaaggagttgtaaattaagagcatggctgcacaagctcttgtatcatcatcatctcttaccttctcagccgaggctacaagacaaagtcttggaccaagatcactccaatctccatttggcttctcaagaaaagcctcctttcttgttaaggcagctgctactccccctgtcaagcaaggatcagacagacctttgtggtttgcatcaaagcaaagtctttcctacttggatggcaggtaaatttcatcctagttcatcaatagcttaacgtaacgatatgatcatgtctggatatataaacttctcatgagcacttgaagaataaaaaggtaaaatgaagttt

SEQ ID NO: 238996 - DNA, 482 bp, Glycine max
  unsure (1)..(482): unsure at all n locations
cacgttcgcggcctanangtcctagnnngccaggccttcccgggtcgacccacgcgtccgagaagacgacagaagggtacggctgcgagaagacgacagaagggtaatttgggaattattgctcccatcgccattggtttcattgtcggcgctaacattttgttgggtggggccttctctggagcggccatgaaccccgctgtgacatttgggcctgctgtcgtgagctggacctggaccaaccactggatctactgggccgggcctctcatcggtggtggaatcgctggccttgtttacgaggttgtctttatcagccacacccacgagcagcttcccaccactgactactagagggggggaaataaatcaagtattaaaaaatgtcaaaaaaaagcggccgctctagaggatccaagcttacgtacgcgtgcatgcgacgtcatagctcttctaaagtgtcacctaaattcaagtcactg

SEQ ID NO: 238997 - DNA, 378 bp, Glycine max
gaaatctatttcagtttgaattttgaaagtgagtgtggcgtaccgtgtacgtatctgcagaaagtgaatgaatggtaatgggggaagaagggtgcaaggtatgtgttacaggaggcagtggttacattggttcctggctcatcaagaagctactggccaagggctacacagtccatgcaactctcagagacttgaagaatgagtcaaaggttggcctcttaaagagccttccacaatcagaaggaaaactggtgctgtttgaagctgatatttacaacccaaatgattttgaccttgcaattgaaggctgcaagtttgtgtttcatgttgctactcccatgatccatgaacctggctcccagtacaaggatactagtg

SEQ ID NO: 238998 - DNA, 359 bp, Glycine max
ggttttgattagggtttgtcattagcacttcttcttttcacactgccgctgcaacaatggcttcagagaagaaactttcgaacccaatgagggagataagagtgcagaagctcgttctcaatatctctgttggcgagagtggagatcgtctcaccagagccgccaaggtgttggaacaacttagtggccaaaccccagtgttttccaaagcaaggtacactgttcgttcctttgggattagaagagatgagaagattgcatgctatgtcactgtcataggtgacaaggcaatgcaacttttggagagtggtttgaaggttaaggaatatgaacttctcagaaggaatttcactgatact

SEQ ID NO: 238999 - DNA, 323 bp, Glycine max
gaccataaccgaggtcgacgcttcgcgagtgcgcatcctaagacccacgtcttttttgttgtcgtggcctcaacgcaacatcattatcactgtcactataaaaaccctacttggctcttttcttcacttgttcactttcttccaacctctaacctacctctttttcttctctctcaacaacttcaccttcttcctcctcgatcatgtctcacttcaagggcaagtaccatgatgagcttatcgccaatgctgcgtacattggcactcctggaaagggtattcttgctgctgatgagtcaacagggacaattggcaagcgtttg

SEQ ID NO: 239000 - DNA, 359 bp, Glycine max
gagggttttgcgctgttgttgctgctcatcctccgtaacctccgagctctgcaccgaagaacgaagccatggggaagacacatggaatgggatctgctcgcaagctcaagtcccaccgcaggaggcaaaggtgggctgacaagtcatacaagaaatcacatcttggaaatgaatggaagaaaccttttgctggttcatcccatgccaagggaattgtccttgaaaagataggtattgaggctaagcagcccaactctgccattcgtaagtgtgccagggttcaacttatcaagaatgggaagaagattgccgcttttgtccctaatgacggttgcttgaactacattgaagagaatgac

SEQ ID NO: 239001 - DNA, 399 bp, Glycine max
gaggaagccacatagagacacaatacagagtgagttgttgctccttcgccacaactctctgccaacatgggtatctccagagattctatgcacaagaggcgtgccactggtggcaagaagaaggcctggaggaaaaagagaaagtatgagcttggtcgccagcctgctaacactaagctgtcaagcaacaagacagtcaggaggatccgtgttagaggtggaaatgtgaaatggagggcattgagattggatactggaaattactcctggggaagtgaagctgtaactcgcaagactcgtgtactagatgtggtttacaatgcctcaaacaatgagcttgtgcgtactcagactcttgtcaaaagtgctatcggtcaaggtgatgctgctccattcaaa

SEQ ID NO: 239002 - DNA, 318 bp, Glycine max
ggagcgccaatgtttttttcagaggagtttcatcttgtaatcaaaagagtttatcttatagtaagaaatcgatgtcttactccattttaaggaacaaaacaagagaacaatagcctgacaaagggtttagccataaaatcgaatccatcattgatttgagatattgataaggtgaatactcatttctcgtcaatgctaggcataatgcgggtatagggacctaaaaaagattatcttttcttcctatcttatgaactttaaggtgtatgaagtgtcatttcctatcttagattttaattttagtaggtagataaagag

SEQ ID NO: 239003 - DNA, 375 bp, Glycine max
  unsure (1)..(375): unsure at all n locations
ggcgtacgcagcttcatccctaacgcgtgcatagcagagtcagagacagagacgcagccatggggcggagacctgcgaggtgttataggcaaattaagaacaagccataccccaagtcacgtttctgccgtggtgttcctgatcccaagatcaggatttatgatgttggtatgaagaagaagggtgttgatgagtttcctttctgtgtccatctggttagttgggagaaggaaaatgtttcaagtgaggccctggaagctgctcgcattgcttgcaacaagtacatggccaaatttgctggaaaggatgctttccacttgagagtcanggtgcacccattccatgttcttaggatcaacaagatgctttcgtgtg

SEQ ID NO: 239004 - DNA, 476 bp, Glycine max
  unsure (1)..(476): unsure at all n locations
ctcccagctcancggcgtagtacggtcaggaattcccgggtcgacccacgcgtcagcccacgcgtccgcccacgcgtccgcccacgcgtccgtacggctgcgagaagacgacagaagggatcatactcaaaataagagtttgatcctggctcagaaggaacgctagctatatgcttaacacatgcaagtcgaacgttgttttcggggagctgggcaaaaaaaaaaaaaaaaaaaaaaaaaaaaaagcggccgctctagaggatccaagcttacgtacgcgtgcatgcgacgtcatagctcttctatagtgtcacctaaattcaattcactggccgtcgttttacaacgtcgtgactgggaaaaccctggcgttacccaacttaatcgccttgcagcacatccccctttcgccagctggcgtaatagcgaagaggcccgcaccgatcgcccttcccaacagttgcgcagcctgaatg

SEQ ID NO: 239005 - DNA, 276 bp, Glycine max
gatagcaaaatcgtttctccaatttaatcaccattgtacaacccaattcccttcgtcgttttcgattaagagagcaatggcacgtaccaagcaaaccgctcgcaagtccaccggaggaaaggctccgaggaagcaattggcaaccaaagccgctcgcaagtcagccccggcgaccggcggagtgaagaagccccaccgcttcaggccaggaacggtggctctgagggagattcgaaagtaccagaagagcaccgaacttctgattcgaaaactccc

SEQ ID NO: 239006 - DNA, 351 bp, Glycine max
gagagccggcttcgtcctctgcgcaggaattaggaatattcgacaggtagagtttcttcaatggctcctaaagttgataagaagaatgatccaaaggcccaggccttgaagactgctaaggcagttaagtcaggtgctacctttaagaagaaggtaaagaagatccgaacttctgtcactttccacaggccgaagaccttgaagaaggacaggaaccccaagtaccctcgcattagcgccccgccgaggaacaagcttgatcattatcagatcctgaaataccccctcaccactgagtctgccatgaagaagattgagggacacaacactttggttttcattgtcgacctg

SEQ ID NO: 239007 - DNA, 363 bp, Glycine max
gagtctcagtctctacacacacctcagaagaacagaacagaaccaccacataacagtgcttttcaaaggcggtttgagcaatggcgttcttaaataaaattgggaatctgctcaagaattctgctgtcaagcacatcaatcaggatttttcggcgtctaccccttcacttttccaagcaattagatccatgtcatctgcaaagcttttcgtcggaggtatttcttacagcactgatgatatgagtttgcgagagtcttttgctcgctatggagaagtaattgatgtcaaggttattatggatcgtgaaactggcaagtcaagaggttttggctttgtaacttttgcaacaagtgacgatgcat

SEQ ID NO: 239008 - DNA, 371 bp, Glycine max
  unsure (1)..(371): unsure at all n locations
gaacacttgtattgtctcaagcaaccatggcaatggcaacccaagcctctctcttaaccccacccctctccggtctcaaagccagcgaccgcgcctccgtgccatggaagcaaaactccagcctctccttctccagcccgaagcccctcaagttctccagaacaatcagagcagcagccgccgacgagaccacagaggcaccagcaaaagtagaggctgcaccggtcgggttcaccccaccagaacttgacccaaacaccccttccccgatcttcgggggcagcaccggcgggctcctgcgcaaggcacaagtggacgagttttatgtcattacgtgggactcacccanagaacagatctttgaaatgcca

SEQ ID NO: 239009 - DNA, 340 bp, Glycine max
cacctcatgttatcaccgttggagttggggaggacattgtagcaaagttattgtcatttgcaaggcagagaccaagggctgtgtgcatcttaacaggaactgggacaatttcttcagtcactctgcgccaacccgcttctactagcatcagtgttacatatgagggccgatttcaaatattatgcttgtctggttcttacttggttgctgaagaaggtggacctcacaatagaacgggtggcatgagtgtttccctttctagtcctgatggtcatatcattggtggtggtgttactaggcttgttgctgcaagcccagtgcaagtggtagcatgcagttt

SEQ ID NO: 239010 - DNA, 363 bp, Glycine max
ggaacttctcacgttcatttctacacatccctagctctgtcgttccgtcgttgacgatggcgtttcgggtgcgaagccctgacctccgctctctctttcttctctctctcttgtccatcgcttccgccaatgtcttcttcgaagagcgtttcgatgacgggtgggaaaatcgatgggttaaatcagattggaaaaaagatgagaacgtggctggggagtggaaccacacctctggtcaatggaatggagacgctaatgacaaaggtattcaaaccagtgaggattacagattctatgctatttcagctgagtaccctgaattcagcaacaagggtaagacactagtctttcaattttctgtta

SEQ ID NO: 239011 - DNA, 393 bp, Glycine max
gacatttctgcgtggcgtctccggtgagggaaaagtagtagaagagaagatgtcgaccgtaccaggacagctcatctgggagatcgtgaagaagaacaactcctttttggtgaaagagttcggaaggggcactcagagcgtgcagttcagcagagagcccaacaatctctacaacctcaacactttcaagtactccggtttggcgaaccagaaaactgtcactgttcaacctgctggtaaagaccagtccgtgttgctcgcaacaaccaagacaaagaagcaaaacaagcctgctgctttgcttcacaaatctgtcatgaaaaaggagttccgtaggatggcaaaggctgtgcaaaatcaggtagcagataactactacaggcctgatctcaa

SEQ ID NO: 239012 - DNA, 368 bp, Glycine max
  unsure (1)..(368): unsure at all n locations
gatgccgaaaagtagtaccaagatggcttcagttgtgtatctcctctttggcttccatctcattgttatcatgtcaagttccttacccgcaactagtgaagtgtttgcaaaacagtatccatccacagaacccgtggaagaaaaactcacccaactccacttctatttccataacaacataacgggggaacacccaactgctatgaaaactgttttgcctcctaaggggtccattcatggttttggggctacttacatgatggatgaccctctaactgaaggaccaagtccaacttcaaagcttgtgggaagatccanggaatatacgctttggcttcacaacatgagcctgggttgctcatggtgac

SEQ ID NO: 239013 - DNA, 319 bp, Glycine max
gctaattcccaatttaataaagtagataaatatgcttgaaacggtggtgtgtgggttttagggtttttggcagcaaggatggcgtcgagaccagaggtagttgcgccgcctgagattttctacgacgatgccgaagctcgcaagtacacctcttcttcccgtattgttcaaattcaggcgacgctgtcagagagagctctcgaactacttgctttgcctgatgacagcgttcctaaattactccttgatatcggttgtggatcgggacttagcggtgagacactctccgagaatggacaccattggattgggcttgaca

SEQ ID NO: 239014 - DNA, 364 bp, Glycine max
aagaaatcttcaaagtttctaccggtcattggttggtcaatgtggttttctgaatatcttttcctggagagaagttgggccaaggatgaacgcacattaaagtcgggcctacagcaactgagggatttccctcttcccttttggttggctctctttgtagaaggaactcgctttacccaggccaaactattagctgctcaggagtatgcagcctcagctggattgcctgttccaagaaatgttttgattccaagaactaagggttttgtttcagcagtaaaccatatgcgctcgtttgttcctgccatttatgatgtaactgtggcaattcccaagagttcacctgctcctacaatgctaagac

SEQ ID NO: 239015 - DNA, 369 bp, Glycine max
gacacaaactttattacagttgttgtattgtaattaagcaagaatattaggcaatggagtcttctagaacttcaactactcttgctctttttttaaccatcaatttgcttttctttgtcatggcaagtggctgctacacttgcacacagcctaagccaaaccctatcccattcccttaccctaaccctagtcctgccgcgaagagctgccccagggacgcacttaagctcggagtgtgcgcaaacgtgcttaatggaccaattggtgctattgtagggtcaccaccggaacaaccatgttgctcagtgctagaagggcttcttgatcttgaagttgcggtttgcctctgcactgccatcaaagccaaca

SEQ ID NO: 239016 - DNA, 309 bp, Glycine max
gtcaagtcataagtgtgtgtataatataactgataactggtgctgtgtgaatgacatatttcaatgttgaacaattccttcttgagttcttctgaaaaaaaaaaaaaaaaaaaaaaaaaaaaaaataaaaaaaaaaaaaaaaataaaaaaaaaaagcataaaaattcaatagaaaaaaacataagcacaataaaaaaaaaaggggggcgcccaaaagtttaaaatttaaattgggtgagaaggaaatttaaaaccttttaaaaggggccacaaaattcaaataaaggggacttcttaaaaaacctttta

SEQ ID NO: 239017 - DNA, 391 bp, Glycine max
gacagcacaacactctttgcaacacaacaaaaaaagacaacacagagagaagcgtcttaataaacgctcttctctgaaaaacctgatttcttctcttcttctcttctctttcgtttcgatcttcgatctctgaaaatgagagagtgcatttcaatccacatcggtcaggccggtattcaggtcggaaacgcctgctgggagctctactgcctcgaacacggcattcagcctgatgggcagatgccaagtgataagactgttggtggaggtgatgatgctttcaacaccttcttcagtgaaactggggctggaaagcacgtgcctcgtgcgatttttgtagatctcgagcctactgtgattgatgaagttaggactgggacataccgccgac

SEQ ID NO: 239018 - DNA, 371 bp, Glycine max
gacttctcttcacacctttgttcactcttcttctcttgcggctagggttttagcgcagcttcttctagatttaaggaagatgggtaaggaaaaggttcacatcagtattgtggtcattggccatgtcgactctgggaaatccactaccactggtcacctgatttacaagcttggaggcattgacaagcgtgttattgagacgtttgagaaggaagctgctgagatgaacaagaggtctttcaagtatgcctgggtgctggacaaacttaaggctgagcgtgaaagaggaatcaccattgatattgctttgtggaagtttgaaacaacaaagtattattgcacagttattgatgcgcctggacatagggatt

SEQ ID NO: 239019 - DNA, 365 bp, Glycine max
ggcactgcaactttgctctctgtgaggcttcaatttctaattagggtttcgcttagagtaaccaataaccatgggagtcttcacctttgtcgtccgcaaatccggcagcgaatggagcgccaagcaacattccggcgacatcgaggcctccgccgattccaccttcgatctccaacggaagctcgtgcaagccgctctcgccgttgattcctccggtggagttcagtcctctttctctcccgtgtctcctacctccgctgtgttccaggtgatagtgggtggtgcagtattcgttggaggtggtggtggtgctgttgcagctgcacctgcaggtggtgctgccgcagctgatgctgcccagctgc

SEQ ID NO: 239020 - DNA, 312 bp, Glycine max
aaagagacccggaaagggtgggaaccgcttttggaaatccattgggcttggatttaagactcccagggaagccatcgaaggaacctacattgacaagaagtgccccttcactggcaatgtttccatccgtggccgtatcttggctggaacatgacacagtgctaagatgaacaggactattattgttaggaggaattatctccattttatcaagaagtaccagaggtacgagaaaaggcactccaacattcctgctcatatatcacctgctttccgtgtgaaggaaggagatcacgttattattggtcaatg

SEQ ID NO: 239021 - DNA, 323 bp, Glycine max
ggtgtagtataggattctcttctttattccttttgtaatttcattcattcttaatctttgtgaaaaataatgttcatcgagaattttaaggttgagtgtcctaatgtgaagtacaccgagactgagattcagtccgtgtacaactacgaaaccaccgaacttgttcacgagaacaggaatggcacctatcagtggattgtcaaacccaaatctgtcaaatacgaatttaaaaccaacatccatgttcctaaattaggggtaatgcttgtgggttggggtggaaacaacggctcaaccctcaccggtggtgttattgctaaccg

SEQ ID NO: 239022 - DNA, 349 bp, Glycine max
gattgtagaactgaacaagggtttctctttctctttctctgtctgcttcttcactttctctcgtttcaatcgaaaaaaatcatgggcagaaaattcttcgtcggtggcaactggaaatgcaatgggaccactgaggaggtgaagaagattgttactactttaaatgaagctaaagtccctggagaagatgttgtagaagttgttgtgagccctccttttgtgttccttccttttgtaaaaagtttgctgcgccctgatttccatgtctcggcccaaaattgttgggttcgcaaaggtggtgcttatactggagaggttagtgctgaaatgcttgttaatttgggaattc

SEQ ID NO: 239023 - DNA, 363 bp, Glycine max
gttcggtgttgggaggaggatttgcccagcgtggacaatggggattttgcatataaatatgctgctggctaagatggtgcatgctttccactggctgcccaatcccaactctccacccgacccgactgagaccttcgctttcactgttgtcatgaacaaccctctcaagccacttattgtgccacgatccatttaacttatacttatagtgctccttctctgcaaactaaggaatatatcggcttctaaaataacatatgagcacaaggctttttttggaagattgctgattgcagtttgttgccatcgaattccaaccttcgtttatcgcataagatattgcacaattttattgtaatggag

SEQ ID NO: 239024 - DNA, 388 bp, Glycine max
  unsure (1)..(388): unsure at all n locations
ggagtcagattcgcacgcattgcttcgcctcacaacagcagctgcagcagcaatggctcccaaacgaggtggaaaggctccggctcttgccgctaagaagaagcctgagaaggtcacgaatccgttgttcgagaagcgtccgaagcagttcggaatcggaggggcgttgcctccgaagagagacttgactaggttcgtgaagtggccaaagaatgttcaaattcagaggaagaagaggattctgaagcagaggttgaaggttcccccagctttgaaccagtttaccaaaactcttgacaaaaacctagcaacaagtctgttcaagttgcttctgaagtacaggcccgaggacaaagctgaaaagaaggangggctcttgaaaaaggct

SEQ ID NO: 239025 - DNA, 386 bp, Glycine max
gaccgccgttctcatctctcttcccagccctcacctcaacgctgcatcttcacgtcgtctcacgaggtgcatatagtagagagggaaaatgagtcgaggaggcgcagtagcagcagcgaagggaaagaagaagggtgctacattcaccattgactgtgcaaagccagtggaagataagatcatggacattgcttctctcgaaaagtttcttcaagagaggatcaaggttggtggcaaagctggtgctcttggtgacagtatcaccgttacccgcgagaagaccaagatcattgtcacctctgacagtaacttttccaaacggtatttgaagtacttgacgaagaagtacttgaagaaacacaatgtgcgagactggctcagagtga

SEQ ID NO: 239026 - DNA, 396 bp, Glycine max
gggttctagtgtgtgattgtttgttgttgtaactcgttcttcttcttttgttgttctgtgtttgtgtttgttttttctctcacctgaaaatgtcttgctgcggtggtaactgtggttgcggaagctcctgcaagtgcggcaacggctgcggaggctgcaagatgtacccagacttgagctacactgagtcaaccaccaccgagaccttggtcatgggagtggcacctgttaaggctcaatttgagggtgctgaaatgggtgtgcccgctgagaacgatggctgcaaatgtggaccaaactgctcctgcaacccctgcacttgcaagtgaggtgttgggagagcaagcttcaagcagagatagcccttaattaagaataatgataaactattaatgt

SEQ ID NO: 239027 - DNA, 357 bp, Glycine max
gggtttctgtgttttctaacaagcaatggctatgagatcgtgggtgagtcgaggaggatccatgactcgtttgatggactcaacaaatcgaggggctttgagtcggttcttgagcgacaagggtcgcattctcagcgaggaggaacaggccaaagagaatgtctacatccagaaatgggagagggagaggttggagaaacagaagcaactgtctgagaaggccaaggctctcacggacaaagatgcttctgctgctgctcataagaaacctgaaggtgctcaaaaggactgagtttatctttcacacaacccgtcaaggccactttgtgggaaataaacatggagaaataaacacat

SEQ ID NO: 239028 - DNA, 336 bp, Glycine max
gaacatgccgaaaagtagtaccaagatggcttcagttgtgtatctcctctttggcttccatctcattgttatcatgtcaagttccttacccgcaactagtgaagtgtttgcaaaacagtatccatccacagaacccgtggaagaaaaactcacccaactccacttctatttccataacaacataacgggggaacacccaactgctatgaaaactgttttgcctcctaaggggtccattcatggttttggggctacttacatgatggatgaccctctaactgaaggaccaagtccaacttcaaagcttgtgggaagatctcagggaatatacgcttt

SEQ ID NO: 239029 - DNA, 373 bp, Glycine max
gatgccttccaatttctcgtcacttctccgcaaatcctcgccgccgccgtcccaccaacacccgcaaattacagaccttagcgtgccaaacaaaccccaaccttgatcaaaaggatacccctaccacggatgaagaaaaacttgtggtcgagcccagcacgagtacaacaacaagttctcttcctcaattgccgaccaaaaacatcaacaacaaaatcgcacttgtttctaccttagcggccttggggcttttcttatctgccaggttggatttcggtgtttccctcaaggatctctctgccaatgcaatgccttacgaagaggctctctccaatgggaagcccactgtggtggagttttatgcagattggtg

SEQ ID NO: 239030 - DNA, 408 bp, Glycine max
  unsure (1)..(408): unsure at all n locations
gatcgcatttcatagcactcaccctcattaccaacacgaaagcatagccaaaaccttttttcgaagtccctgattttcctaatggctccggcaaaggcagagaagaagccggcggagaagaagccagcggcggagaaagcaccggcggagaagaagccgaaggcggagaagaagatctcgaaggaagganggagcgagaagaagaagaagcgcacgaagaagagcgtggagacctacaagatctacatcttcaaggtcctcaagcaggttcaccccgacattggtatttccagcaaggccatgggcatcatgaacagcttcatcaacgacatcttcgagaagctcgcccaggaagcgtcgcgtttggctcgctacaacaagaagcccaacatcacctcgagggagatc

SEQ ID NO: 239031 - DNA, 373 bp, Glycine max
ggggcgaggtagccagagagtgatacaatacagagtgcgttgttgctccttcgccacaactccctgccaacatgggtatctccagagattctatgcacaagaggcgtgccactggtggcaagaagaaggcatggaggaagaagagaaagtatgagcttggtcgccagcctgctaacactaagctgtcaagcaacaagacagtcaggaggatccgggttagaggtggaaatgtggagtggagggcactgagattggatactggaaattactcctggggaagtgaagctgtaactcgcaagactcgtatactagatgtggtttacaatgcctcaaacaacgagcttgtgcgtactcagactcctgtaaaaagtgc

SEQ ID NO: 239032 - DNA, 365 bp, Glycine max
  unsure (1)..(365): unsure at all n locations
ggagacattgtgctttcaccttggctccgcactttggtttgctcaaccgatctccgcagcaatggtgaacgttccgaagacaaagaagacctactgcaagagcaaggagtgcaagaagcacacgctccacaaagtcacccaatacaagaaaggcaaggacagcatcgccgctcaaggaaaacgccgttattgacgcaaacagtccggttaccggtggcaagactaaagccgttttccacaaaaaggcgaaaaccaccaagaaaattgtgttgaggctccantgccaaggatgcaagcatgtctcgcagcacgctatcaagaggtgcaagcactttgagatcggtggtgacaagaacggaaaagga

SEQ ID NO: 239033 - DNA, 348 bp, Glycine max
gggtgtagcgcagagaaagaactagaactagggtttcatctttgccatcagtaaacgacaatgatttacgacgttaactctcctcgtttccgatccttcctcagccagaatggaagctcctctgataagaggaaatcggaccaacaaaaaccaaaagaagcagaaacccaaagccagggaaaacaaacctataatgactgagtgataacagctgaactgcaatcagttgtagaatgaaaatacgtggtaagtattgtatttggtgctaaactaagatccttttggctgtgttctgaagtatatgccggcgatgttggtctttgttattgtaatggtttgaatttggat

SEQ ID NO: 239034 - DNA, 382 bp, Glycine max
gaccaaaccaaagtaagtgttctaagagtgagcaacttcaaaacaccatagtgagaaatgacttccaagggtgcaattctcttgtgtctcaatgttctcttcttcactgtggttagttccacatatgttccatgcaacccaccccccaaaactcccaaacacccacctgtcccaaagccaccttccccaaagcaagtttcttgccccaaggacactgttaagtttggtgtgtgtgctgatgtgttaggtttgattaacgtgcaactagggaagccaccaaaaaccccatgctgcagcctcattcagggtcttgctgatcttgaagctgcagtgtgcctttgcactgctctcaaggctaatgtgttgggcatcaacctcaatg

SEQ ID NO: 239035 - DNA, 329 bp, Glycine max
gacggagcctcgaccaagaagaatcgcagtgagaagaagagggggtcagagtgagaaagagaaagagggaattcgtaaaccctaatttcggaaagatcggcgatgactgcctccaaggatcgcgagaacttcgtctacatcgccaaactcgccgagcaggccgagcgttacgaagagatggtggaatcaatgaagaacgttgcgaatctcgacgttgaactgacggtggaggagcggaatttgctttctgttgggtacaagaatgtgattggtgctcgcagagcgtcctggaggatcctgtcttccattgagcagaaggaagaaacaaa

SEQ ID NO: 239036 - DNA, 332 bp, Glycine max
gaacgttgaacgggatccctcttcgtagtgaattacattgcattgggttctagcagcgtatttcactcaccatgcaggctagtgataggtttaacatcaattctcagctcgagcatctccaagccaaatatgttggaactggccatgctgatttgaacagatttgagtgggcagtgaacattcaacgtgatagctatgcatcatatattgggcactaccctttactgggattctttgctattgctgaaaatgaatctattggaagagaacgctacagctttatgcagaaaatgctcctgccttgtggtttgcctcccgaaagagaagaagat

SEQ ID NO: 239037 - DNA, 398 bp, Glycine max
ggggctgcgagcgaatccctctctctctttctctttctctctcatccagatcttgcaaaaaaaaaaaaacacaatggcagcgagcgctcccactccacgcgaagagttcgtgtacatggcgaagctggcggagcaggccgagcgctacgaggagatggtggagttcatggagaaggtctccgcctccgccgagagcgaggagctgaccgtggaggagcgcaacctcctctccgtcgcctacaagaacgtaatcggggctcgccgcgcctcctggcgcatcatctcctccattgagcagaaggaggagagccgcggcaacgaggaccacgtcgccgtcatccgtgactaccgctccaagatcgaggccgagctctccaacatctgcgacggaatcctca

SEQ ID NO: 239038 - DNA, 349 bp, Glycine max
  unsure (1)..(349): unsure at all n locations
gacactacaactaaacacactagctatagctagaatcccctccaatccctctttgtctttgtgcttttctttagttctttccaaaacagcaacaatgatgagttgccaagcatggcctgaacccatagttcgagtccaatccttagctgacagtggcctaagctcaatcncttcacgctatattaggccacactcccaaagaccctccaacaccatgatcatgttaacatccccgttattgacctggaacatcttttctcggaggatgaaatcctccgagaaaagatattccgacacgtggacgaggcgtgtcgggagtgggggttcttccaggtggtgaaccatgggg

SEQ ID NO: 239039 - DNA, 368 bp, Glycine max
ggttctagtgtgtgattgtttgttgttgtaactcgttcttcttcttttgttgttctgtgtttgtgtttgttttttctctcacctgaaaatgtcttgctgcggtggtaactgtggttgcggaagctcctgcaagtgcggcaacggctgcggaggctgcaagatgtacccagacttgagctacactgagtcaaccaccaccgagaccttggtcatgggagtggcacctgttaaggctcaatttgagggtgctgaaatgggttgtccccgctgagaacgatggctgcaaatgtggaccaaactgctcctgcaacccctgcacttgcaagtgaggtgttgggagagcaagcttcaagcagagatagccctta

SEQ ID NO: 239040 - DNA, 348 bp, Glycine max
  unsure (1)..(348): unsure at all n locations
tacaggcaatagtacctagaattactactggaaaaatatataaaagatcgttgggccatgctggttctccataataattatgacccattcccttagccaatttagctcttaatacaggatcattcaagtcaggtttttttgttattgggataggtgaattcttatagatccatcctccgaaagaaccggatatgataatttttcatcatccggctcgagcactaatcaaagatttcgaatgtatctatagaaaaaatgtatgtgttattcacacatatatgaggattctatgtaagaaaataaactagattctctttttccgaagttacanactantccttaatggag

SEQ ID NO: 239041 - DNA, 342 bp, Glycine max
acggcactcgttttcgttctcgttctggtttatagatctttgcgaaggaggtttacagcgctcaaccaaagatgcagaacgaggaaggacagatcactgagctttacattcctaggaagtgctccgccacaaacagattgattaccgctaaggaccatgcttcggttcagatcaacattgggcatgtggatgagaatggcgtctacaatggccatttctccacttttgccctctgcggattcatccgtgctcagggtgatgctgacagtgctctagaccgcttgtggcagaagaagaaagttgaagttaagcaacagttagacacccatgatagttggttac

SEQ ID NO: 239042 - DNA, 331 bp, Glycine max
gaacaaaacaaacacaactttgcgccccttgtaaacttctcaatgggaagtctaaaaacgaaaacattgaagcctttgtggagagctggggtcagaccaaattgccctggaagggtgcacaaatgccccctaacctcaagggtccagaatatgaaggtgttgaagagaccttgaatcccacaaagtgagcctgtcctcctaaagtccaaccctgtgcacaagaaaatcccaattttcctccatggagataaagtcatttgtgaatctgcaatcataagtgagtacattgatgaggcttggactaatgttccctccaaccttccacaaaatg

SEQ ID NO: 239043 - DNA, 447 bp, Glycine max
gtaccggtcaggaattcccgggccgacacacgtccgatcaggtggcaaaaaaccacagaaaggggggccaaaagttattacaaaaagggcttcagttgggtatcccctccttggcttccatctcaatggtatcatgtcaagttccttacccgcaactagtgaagtgtttgcaaaacagtaaccatccacagaacccgtggaagaaaaactcacccaactccacttctatttccataacaacataacgggggaacacccaactgctatgaaaactgttttgcctcctaaggggtccattcatggttttggggctacttacatgatggatgaccctctaactgaagggacaagtccaacttcaaagcttgtgggaagatctcagggaatatacgctttggcttcacaacatgagcctgagttgctcatggtgacaaattttctcttcac

SEQ ID NO: 239044 - DNA, 391 bp, Glycine max
gaaccaaaaacaatggccacttgttcactcatttccacactcttcccttctccttcttcttcttctttttcactctctcgttcttcctcaaacaccaccaaaccaaccaccattcacctctccaaatccctccatctccaaactcccatcctcttcctccttcgccccccaaacccaaaaccgacacttccaataatacccctcttccccaaactcaccattcccaactcccttctccttctctgcacctccctcgctctctccttcactctcctcctctcccccgccgaatccgccgccgcctttgttgtcacctccccaaggaagctccagtccgatgaactcgccaccgtccgcctcttccaagagaacactccctccgttgtctaca

SEQ ID NO: 239045 - DNA, 391 bp, Glycine max
gatgccgaaaagtagtaccaagatggcttcagttgtgtatctcctctttggcttccatctcattgttatcatgtcaagttccttacccgcaactagtgaagtgtttgcaaaacagtatccatccacagaacccgtggaagaaaaactcacccaactccacttctatttccataacaacataacgggggaacacccaactgctatgaaaactgttttgcctcctaaggggtccattcatggttttggggctacttacatgatggatgaccctctaactgaaggaccaagtccaacttcaaagcttgtgggaagatctcagggaatatacgctttggcttcacaacatgagcctgggttgctcatggtgacaaattttctcttcactttgggc

SEQ ID NO: 239046 - DNA, 326 bp, Glycine max
ggtgtcacagtcggaaaaagaaatacatgttcttctcaaaatataattaaataattatcacatctccgtcttctatatattatcagtcgctgagtcccgttaaaaagcaccaccaccaccaccaccacaacactattcttcttcgcagcaatggcgcgagtggatctggacgggaaccccatgaaggcacttacgatctgcatgatcggcgctggcggcttcataggctcgcatctctgcgagaagctcatgttccgaaaccctcacaccgtcctcgccctcgacgtctacaacgacaagatcaaacacctcctcgaaacctccga

SEQ ID NO: 239047 - DNA, 339 bp, Glycine max
gagggtttacaccgaggagacacaccttcagcagcagcagccatggttctcaaaaccgaactatgccgattcagcggtgccaagatctacccagggaaaggcatcagatttgttcgtggtgattctcaggttttcctgtttgctaactcgaaatgtaagaggtatttccacaacaggttgaagccatcaaagctcacctggactgcaatgtacagaaagcaacacaagaaggacattgctcaagaagctgtgaagaaaagaagacgtgctgccaaaaagccttactccaggtccattgtcggtgccactttggaagttatccagaaaaagagagctgag

SEQ ID NO: 239048 - DNA, 383 bp, Glycine max
  unsure (1)..(383): unsure at all n locations
tacggcagcgagaagaagaagaagcgcacgaagaagagcgtggagacctacaagatctacatcttcaaggtcctcaagcaggttcaccccgacattggtatttccagcaaggccatgggcatcatgaacagcttcatcaacgacatcttcgagaagctcgcccaggaagcgtcgcgtttggctcgctacaacaagaagcccaccatcacctcgagggagatccagaccgccgtgcgtctcgtgctccctggtgaattggccaaacacgccgtttctgaagggaccaaggcggttaccaagtttaccagctcttgaattanggtttgttaggcggttgtgttgcagatctanggttttctgtggatttcttttcttaaaaatta

SEQ ID NO: 239049 - DNA, 386 bp, Glycine max
taatttgggaattattgctcccatcgccattggtttcattgtcggcgctaacattttgttgggtggggccttctctggagccgccatgaaccccgctgtgacatttgggcctgctgtcgtgagctggacctggaccaaccactggatctactgggccgggcctctcatcggtggtggaatcgctggccttgtttacgaggttgtctttatcagccacacccacgagcagcttcccaccactgactactagagggggggaaatgaaaataaaaaaaaaaaaaaattgtgtattattgaatttctctggaatcttcctctgtgtatggttttccttccttgtgttttcttcctaattcactttcgaaggttgtacttgttcctttcgt

SEQ ID NO: 239050 - DNA, 370 bp, Glycine max
ggcacttcaattgcaatcaaattagttcattctctttgcgcagttccctacctctcctttcaagatgcagatcttcgtcaagaccctcaccggaaagaccatcacccttgaggtggaaagctctgacaccatcgacaacgtcaaggccaagatccaggacaaggaaggaattcccccggatcagcaacgtctcatcttcgccggaaagcagctcgaggacggccgtaccctcgccgactacaacatccagaaggagtcaacccttcaccttgtccttcgtctccgtggtgacatgcagatcttcgtcaagactctcactggcaaaaccataaccctagaggtcgaaagctctgacaccattgacaacgtc

SEQ ID NO: 239051 - DNA, 351 bp, Glycine max
tgattaaggtttgtcaatagcacttcctcctttcacactgccgctgcaacaatggcttcagagaataaactttcgaacccaatgagggaaataaaagtgcaaaagctcgttctcaatatctctgttggcgaaagtggagatcgtctcaccagagccgccaaggtgttggaacaacttagtggccaaaccccagtgttttccaaagcaaggtacactgttcgttcctttgggattagaagaaatgagaagattgcatgctatgtcactgtcagaggtgacaaggcaatgcaacttttggagagtggtttgaaggttaaggaatatgaacttctcagaaggaatttcagtgat

SEQ ID NO: 239052 - DNA, 386 bp, Glycine max
ggcgtacgcagcttcatccctaacgcgtgcatagcagagtcagagacagagacgcagccatggggcggagacctgcgatgtgttataggcaaattatgaacaagccataccccaagtcacgtttctgccgtggtgttcctgatcccaagatcaggatttatgatgttggtatgaagaagaatggtgttgatgagtttcctttctgtgtccatctggttagttgggagaaggaaaatgtttcaagtgaggccctggaagctgctcgcattgcttgcaacaagtacatggccaaatttgctggaaaggatgctttccacttgagagtcagggtgcacccattccatgttcttaggatcaacaagatgctttcgtgtgctggtgctgat

SEQ ID NO: 239053 - DNA, 396 bp, Glycine max
gatatcagaagctcagacctagggatttcggccgtttgctccccaaaaaggaaagaagcagattctgtcctttgaaatcaacaagaaaagatgtcaggtgaagaggtagctgttgcagttgaggtacctgctacttcaattccaggtgagccaatggacatcatgactgctctacagcttgtgctgagaaaatctctggcctatggtggtcttgcacgaggtcttcatgaaggtgccaaggtgatcgagaagcatgctgcacagctctgtgttctagcagaagattgtgaccaacctgattatgtgaaactggtgaaggctctttgtgcagagcacaatgttagtcttttgacagttccaagtgcaaagacccttggagaatgggctggtttgtgt

SEQ ID NO: 239054 - DNA, 295 bp, Glycine max
  unsure (1)..(295): unsure at all n locations
gcacacaaactttattacagttgttgtattgtaattaagcaagaatattaggcaatggagtcttctagaacttcaactactcttgctctttttttaaccatcaatttgcttttctttgtcatggcaagtggctgctacacttgcacacagcctaagccaaaccctatcccattcccttaccctaaccctagtcctgccgcgaagagctgccccagggacgcacttaagctcggagtgtgcgcaaacgtgcttaatggaccaattggtgctattgtanggtcaccaccggaccaac

SEQ ID NO: 239055 - DNA, 479 bp, Glycine max
  unsure (1)..(479): unsure at all n locations
cgaaactctnaccgtcaggtaccggtcaggaattcccgggtcgacccacgcgtccgtacggctgcgagaagacgacagaagggcaagagacaacctggtgaactgaaacatcttagtagccagaggaaaagaaagcaaaagcgattcccgtagtagcggcgagcgaaatgggagcagcctaaaccgtgaaaacggggttgtgggagagctatacaagtgtcgtgctgctaggcgaagcagcagagaatgctgcaccctagatggcgagagtccagtagccgaaagcatcactagcttacgctctgacccgagtagcatggggcacgtggaatcccgtgtgaatcagcaaggaccaccttgcaaggctaaatactcctgggtgaccgatagtgaagtagtaccgtgagggaagggtgaaaagaacccccatcggggagtgaaatagaacatgaaaccgtaagctcccaagcagtgggagg

SEQ ID NO: 239056 - DNA, 379 bp, Glycine max
gggccacgaggtagtgattgtggtatagtgaatgcaaacatacctacaaatggagctgagattggtggtgcctttggtggagaaaaggcgaccggtggtggccgtgaggcgggaagtgactcgtggaagcaatacatgcggcgttctacatgtaccatcaattatggaagtgaactaccattagctcagggaataaactttggctagaaagctatccttgcaaatgaaactgcacaaataatgcgattttgcagcccgaaagagagatgttagtctggctgacatgggttcaaagtgttgtattaacaagatctgcctgctgtaaggatggtaccttcacatgacagtttcaatggtaaagatatcctaaatcctaaat

SEQ ID NO: 239057 - DNA, 321 bp, Glycine max
tcataaaaaaaacaaaaaaaaaaaaaacaaaaaaaaaaaaaaaaaaaaaaaaaaaaaaaaaaaaaaaactgataaacaaaaagatataaggcttccctaaaggtatatacaattgttttaactcttctaaaatgtcacaaaatcttcaattcggtgcccgtcttttaacaccgtggtcatcgttttaaacctggggtcctccaaaataccttcccttttaccacttttacctttttgcagcaggtcctcttattggcgagccccctttttttcgcccgggcctgcatttttaccccttcattgggaaaacccccccttttt

SEQ ID NO: 239058 - DNA, 324 bp, Glycine max
gactcacaaaaaccacttacaaagtagtactacttggtttcaatcaaaacaaaaactcacactttggtggccacagcaacaataacaatggcagcctcactacaagctgcagctaccttcatgcaacccaccaaggtgggcatggccactcgcaacctcaaatctacacaatgcatttctaaggcttttggcttggaacccgctgcagctaaactcatttgctcccttaagcccgatctcaaagattttgctcaaaaatgtgtcggcgccaccaaaattgcaggattcgcccttgccacctcagctctcgttgtttctggagcg

SEQ ID NO: 239059 - DNA, 393 bp, Glycine max
ggggttattggacacattcttcagcgactgcgtttttggatcggaacctcttctgcggcgtagcaatgggacactccaacgtttggaactctcacccaaaaaactacggtcctggttctcgcacttgccgtgtgtgtgggaatccacatggactgatcaggaagtatggccttatgtgatgcaggcagtgcttccgtagcaatgccaaggaaattggcttcatcaagtatcgctaaaagagcagttgtcaactacggaccaatattgtgttctggcactaagatgttttgaggatgttatgtttgaagaaacttgagactttcttttttcatctaattaattatcagacgtaatttgtggtactaagaatacttttatataaattgttttgaa

SEQ ID NO: 239060 - DNA, 392 bp, Glycine max
gatcgaagaacagcactctggttgccgtgccaccatcttctccaaagttatcatattcgaagagaaaaaaggagtgactgtccaggttgggcaattagggacggaaaaggagaaacacgaaaatgtttttccacatagtactggagcgaaatatgcagcttcatccacgctactttggtcgtaaccttcgcgataatctcgtttccaagcttatgaaagacgtggaaggcacttgcagtggccgacatggatttgtggtggcagttacagggatagagaacatagggaaagggctaattcgtgatggaacagggtttgtgacatttccagttaagtaccaatgtgttgtcttcagaccgtttaagggagagatcttggaagcagttgttact

SEQ ID NO: 239061 - DNA, 393 bp, Glycine max
agtccaggcgtcagacggctgcaagaggagtacagaaggggattcacaccttcactccctctattgctttctcaaattccattttccaattcagaagcctatctccgtgcgaagcagcacatcgggatggcaccaaaggcagataggaagccagtatagaagaagcctgtggaggagaataaatcgactgtgggatacaaagctccggcagatatcaagtcagcggccggagagaagcttccgaaagagggaggagccggcggagaatgtatgaagaataagagaaataagaatagcgtggagacatactagatctagatcggaaacgttcagaagcacgttcacactgacattggtatctcaaccaaagcaatgggaatcataagcagattc

SEQ ID NO: 239062 - DNA, 375 bp, Glycine max
gctgagcaaaaccctaatccctatttttcttcctcagtagtgtcatttacgcttctcttctctgcagcaactatgcctaaccctaaggtcttcttcgacatgaccatcggcggtcaatctgctggccgcatcgtgatggagctctacgccgacgtcactccccgcaccgccgagaacttccgcgcgctttgcaccggcgagaagggcgtagggcggagcggcaagcccctccactacaagggctcgtccttccaccgcgtgatcccgagtttcatgtgtcagggtggcgacttcaccgccggaaacggaaccggcggcgagtcgatttatggcgccaagttcgccgacgagaacttcgtgaagaagcacaccggt

SEQ ID NO: 239063 - DNA, 388 bp, Glycine max
ggcagagtttgtggccacattcttgttcctctacatcactgtcttgactgtcatgggtgtcaacagggcacccaacaagtgctcctctgttggcattcaaggaattgcatgggctttcggtggcatgatctttgccctcgtcgactgcactgctggaatatcaggtgggcacataaatccggcagtgacgttcggtttgtttctggctaggaagctgtccctgacaagagcgctgttctacattgtgatgcagtgtcttggagctatctgtggtgctggtgtggtgaaggggtttgaggggaatgccaggtatgagttattcaaaggtggagccaattttgtgagtcatggatacaccaagggtgatggccttggagccgagattgtt

SEQ ID NO: 239064 - DNA, 393 bp, Glycine max
gagggtttcaaagtggacagaagacagcgtcctagtcgcaaccctaataagaagaaccacagcttcaagcgagtgacatccaccacccatgggtcgtatgcacagccgcggtaagggtatatcctcgtctgctttgccctacaaaaggacaccccctagctggctcaagatctcttcgcaagatgtggacgacaatatctgcaagtttgcgatgaaaggtttgaccccgtctcacattggtgtcaatcttcgagattctcacggtattgctcacgtcaacagcgtcactggcagcagaatccttcgcatcctcagagctcacgggcttgcgcctgaaattccagatgatctttaccatttgattaagagagcagtttcagttacgaagcatct

SEQ ID NO: 239065 - DNA, 384 bp, Glycine max
  unsure (1)..(384): unsure at all n locations
gaactcagttagactttgttccaagagaaagaccaatcaaagcatcatgactaaagttgtgtgtgcacttcttcttatttttgtcatggcttttgtgactcaagttgcttatggtggcggcgaaggatcacttacgccccaagaatgtccgggggcttgcgattatcgttgttcaaaggctgatcggactaagaaggcgtgcctgaacttctgtaacatgtgctgtgcgaaatgtctgtgcgttccatcaggaacctatggtcacaaggaagaatgtccatgttataacaattggaaaacaaagagaggaacacccaagtgcccctaattcaacttcattattgatattcatcaataaaatgtgtantcctgtggcgtgctatg

SEQ ID NO: 239066 - DNA, 380 bp, Glycine max
gacttgaaccacattggtgcctaaccgcggtggttaccacctcctccttccccttcctaaaatcccttctttctcaacgccgcacgccgaaacaatggccggaaaaggagagggtcctggctatcggaatcgatctcggaaccacctactcttgcgtcggtgtgtggcaacatgaccgcgttgaaatcatcgccaacgaccaagggaacagaaccacgccgtcttacgtcggattcactgacaccgagcgtctcatcggtgatgcggccaagaatcaagtcgccatgaaccccatcaacaccgtcttcgatgccaagaggttgattggtcgtagattcagtgattcctctgttcagagtgatatcaaattgtggcctttc

SEQ ID NO: 239067 - DNA, 376 bp, Glycine max
gacacttactagtagtaagcatggagtcctcaaagatctatgcttacctcttcctctgcatgatctttctctcttccgccactcccattctcggttgtggctactgtggcaaaccccccaaaaagcacaagcctggtaaaacaccaaagacacccaaaacacccgttgttaagccaccagtcaccatccctcccattaatgttcctcccgttgttcttccaccaatagtgaagcccccaggtattctccctccaattccaattattaacccaccaaccacaccagggaagggagggaacactccatgcctaccaccaaagtctcctgcgcaagctacatgccccattgacacgctcatacttggtgcctgtgtgga

SEQ ID NO: 239068 - DNA, 123 bp, Glycine max
cgtagtaagcgacgaaatgcttcggggagttgaaaataagcgtagatccggggattcccgatataggtcaacctttcgaactgctgctgaatccacgggcaggcaagagaaaaaaagataaag

SEQ ID NO: 239069 - DNA, 389 bp, Glycine max
gggaactcataatattcatcactagaagtgttggatgcatttctatttctaactaattattgtgcttattattattgttgagaaagaaaagaatggcaaagttaataaaattctttgagttgaacacaggggccaagattccttctgttgggttaggcacttggcaagctgagcctggtgttgtagccaaagctgtcaccacagccattctggttggatacaggcatattgattgtgttcaagcgtataacaatcaagcagagattggttctgctcttaagaagctttttgatgatggtgtggtgaagcgtgaggacttatggatcacctccaaactctggtgttcagatcatgcttcagaagatgtgcccaaagcattggataaacat

SEQ ID NO: 239070 - DNA, 349 bp, Glycine max
gataggaaaaccaaccaaagttccaaattttttggtttggggatagatagagtgatacgcgtcacattttcataataataaaaaaatggcagcggcggcggcagtgacggtgctactcccacctaggattccgaccaccaccaacgttacccgctgctctgctttgccttctctccctcctcgcgtctccaacaccaaaaccactttgttctcaccttccctcaacaacttttcagtgtcccgaaaatcttctctgcttcagaccagagcttcttcagaggaatcatcctcagtagatgccaatgaggtgttcacagatttgaaggaaaagtgggatgctcttgaaaac

SEQ ID NO: 239071 - DNA, 345 bp, Glycine max
cgggactcaccacttcaaaacactcataacacaaagcacaaagcaaagctcatccttgagttaaaaaatggcagcagcttcttccatggctctctcatccccatccttggctggcaaagccgtgaagctgggcccatcagccccagaagtgggaagggtgagcatgaggaagaccgtcaccaagcaggtctcctcaggaagcccatggtacggcccagaccgagtcaagtacttgggcccattctctggcgagcccccgtcctacctaaccggtgagttcccaggcgactacggctgggacactgctgggctttccgcagacccagaaaccttcgccaagaaccg

SEQ ID NO: 239072 - DNA, 354 bp, Glycine max
gatagcaaaatcgtttccccaatttaatcaccaatggacaacccaattcccttcgtcgttttccattaagagagcaatggcacgtaccaagcaaaccgctcgcaagtccaccggaggaaaggctccgaggaagcaattggcaaccaaagccgctcgcaagtcagccccggcgaccggcggagtgaagaagccccaccgcttcaggccaggaacggtggctctgggggagattcgaaagtaccagaagagcaccgaacttctgatccgaaaactcccattccagaggctcgtcagagaaatcgctcaggatttcaaaaccgattcccgctttcagagcagcgccgtttcggctct

SEQ ID NO: 239073 - DNA, 381 bp, Glycine max
  unsure (1)..(381): unsure at all n locations
gtcaacctggaggatgtcttgcactgtaaatcaccacaaatttccttcaaaataattgagtgactggttcagtgttgtactatccttgtgatagcgcccttttatttttccttctatttttgtcaaatattttctttttcctttttttcctttttctctcttcattcagaaaacaatgtctcgctgctgattatcagtcttctcgtgttgactggaaaatgtcgtacccttgattcccataaagagctattgaaactattatattagctgaaaaaaaaaaaannaaaaaaaaaaaaaaaaaaaaatanaaaaanannattaaaaaaataaaaaagggaaaatgtataatcacaaaaaaaaaaaaaagcggccgcccaaaag

SEQ ID NO: 239074 - DNA, 345 bp, Glycine max
gatgcagatgcagcctatcatggcagcctactaccccaacaacgtcaccactgatcacattcaacagtacctggatgagaacaagtccttgatcctgaagattgttgaaagccagaattctggcaagctgagcgagtgtgcagagaaccaatcaaggctgcagagaaatctcatgtacctagctgcaatagctgattctcaaccccaaccatctccaatgcctggtcagtatccttctagtggacttatgcagcagggagcacactacatgcaggctcagcaggctcagcagatgtcacaacaacagctaatggcttcgcgctcctcactcttgtactcccaaca

SEQ ID NO: 239075 - DNA, 394 bp, Glycine max
gagcgccaatgtttttttcagaggagtttcatcttgtaatcaaaagagtttatcttatagtaagaaatcgatgtcttactccattttaaggaacaaaacaagagaacaatagcctgacaaagggtttagccataaaatcgaatccatcattgatttgagatattgataaggtgaatactcatttctcgtcaatgctaggcataatgcgggtatagggacctaaaaaagattatcttttcttcctatcttatgaactttaaggtgtatgaagtgtcatttcctatcttagattttaattttagtaggtagataaagagtccatttaacttaagttgatctaggccagaagcagacctacgtcaagataatccttctttgaaacactttggtagtg

SEQ ID NO: 239076 - DNA, 390 bp, Glycine max
ggctaaggcattgtctggcaacaaggatgtggccttcttctctgctaatgctgcagctcaggcttcaaggaagtcctctccaagagtgacgaacgaggctgttcagaaggctgctgctgcattgaagggttcagatcatcgccgtgcaacaaatgtcagtgccagactggatgctcaacaaaagaagctcaaccttccaatccttccaaccaccactattggatccttccctcagactgtagaactgaggagggtacgccgtgagttcaaggctaacaagatctccgaggaagagtatgttaagtcaattaaggaggaaattcgcaaagttgttgaacttcaagaagagcttgatattgatgttcttgttcatggataaccagagagaaa

SEQ ID NO: 239077 - DNA, 383 bp, Glycine max
gaagggagaattaggtttttagggtttacaccgagcagcgacacctccctcccgcagtagccatggttctcaaaactgaactatgccgattcagtggtgccaagatctaccccggaaagggcatcagatttgttcgtggtgattctcaggttttcctgtttgccaactcaaaatgtaagcggtatttccacaaccgcctgaagccctcaaagctcacctggactgctatgtacagaaagcaacacaaaaaggacattgctcaagaagctgtgaagaagaggagacgcgctgccaaaaagccttactctaggtccattgttggtgccactctggaagttatccagaaaaagagagctgagaagccagaagttcgagatgcagct

SEQ ID NO: 239078 - DNA, 395 bp, Glycine max
ggttgtgaatcaacataaatattccgttttgcgtttctctgcctaaaaggattgaaagatgggtcaagcactaggttgctatcaagttgatcagtcaaatgtggctatcaaggagcattttggaaaatttgatgatgtcctagaacctggatgtcattgcctgccttggtgtcttgggtaccagattgctggtagtttgtcactgcgtgtgcagcaacttgatgttcgatgtgagacgaaaaccaaggacaatgtctttgtcactgtggttgcatctgtgcaataccgagctgtgtctgagaaagcatctgatgcattctataggcttaccaacacaagggagcagatccaatcatatgtttttgatgtcatcagggccagtgtaccatagttgg

SEQ ID NO: 239079 - DNA, 292 bp, Glycine max
gaccagaaaactgtggacgctgcagtgttaaaagccattgagagtgtgccagacttgaagtcctatttgggtgccaggttttctctgaaggccggggtgaaaccacatgagctagtcttctagaggaaagaggggtgttactcttgtttttgatatcgtgtttgtttattgatgctggttcttatagttgccctcttataacattcttgttagcagacaaatgaagaacctaaaattttgttagtcaaattgtgacgcgtgctctttacattttgttgattgtgtgaatttc

SEQ ID NO: 239080 - DNA, 175 bp, Glycine max
gactattgctttccaattagctgtttttgcattaattgctatttcatttattttattgattagtgtacctgttgtatttgcttctcctgaaggttggtcgaataacaaaaatgttgtattttccggtacatcattatggattggattagtgtttctcgtgggtattcttaattct

SEQ ID NO: 239081 - DNA, 239 bp, Glycine max
ggtctgcgcctgatttctcagttctctcacacactcattcggtgctccgaatctcagattctagggttagggttcccaatttctccaccgatcagaaaatgagttcaactggtggttctaccaagggcggaaggggcaagcccaaagcctccaaatccgtttcaagatcgcagaaagctggtctccaattccccgttggaagaatccctcgaatccttaaaggtgggaaatacgccgaa

SEQ ID NO: 239082 - DNA, 392 bp, Glycine max
gatacctaaaaattgtaccgatatggcttcacttgtgtgtctccttttttccttgcatttcatggttatcatgtcaggttccttaccagcaaatagtgaagtgtttacaaaagagtctcctatgtctctatccacaaaacccgtggaaagactcacccaactccacttttatttccataacaacaaaatgggggaacacccgactgctatgaaaattgttgagcctcctaaggcgtccatttctggttttgggactatttacatgatggatgaccctctaaccgaaggaccaagtccaacttcaaagcttgttggaagatgtcagggaatatatgctgaggcttcgcaacatgaacctgcgatactcatggtaacgaatttgttcttcactg

SEQ ID NO: 239083 - DNA, 370 bp, Glycine max
gattgtagaactgaacaagggtttctctttctctttctctgtctgcttcttcactttctctcgtttcaatcgaaaaaaatcatgggcagaaaattcttcgtcggtggcaactggaaatgcaatgggaccactgaggaggtgaagaagattgttactactttaaatgaagctaaagtccctggagaagatgttgtagaagttgttgtgagccctccttttgtgttccttccttttgtaaaaagtttgctgcgccctgattttcatgtctcggcccaaaattgttgggttcgcaaaggtggtgcttatactggagaagttagtgctgaaatgcttgttaatttgggaattccttgggttattattggtcact

SEQ ID NO: 239084 - DNA, 394 bp, Glycine max
ggaagagtgaagagaatggctcccaagggtttaacctttctggctgtgttaatatgcgtttcagcactgtcactgagtccttctgttgcgggggaagggcaaaataatggccttgttatgaacttctacaaggaatcatgccctcaggctgaagacatcatcacagaacaagtcaagcttctctacaagcgccacaagaacactgctttctcctggctcaggaacatcttccatgactgtgctgttcagagttgtggtgcttcactgttgctggactccacaagaaggagcttgtctgagaaggaaacagatagaagctttgggttgagaaatttcaggtacattgagaccatcaaagaagctttggaaagagaatgccctggagttgtttcaa

SEQ ID NO: 239085 - DNA, 291 bp, Glycine max
gcttgcaggcgaaagagaagatggccaccgttccaagggcaactcctgttggaaattgtgaagaaaaacaactcctttttggtcaagcaattccgaaaggggaaccaaaacgtctaattctaaaaagagagcacaaatctctataaactcaattcgctcaagtataccgggttttgaaacacaaaaactgttacagtgacaacccaaggggaaaattaagggctgttttttgggacaacaaagaccaagaaaccaaacaaacccgctggaatgcctcacaaatctctgtat

SEQ ID NO: 239086 - DNA, 334 bp, Glycine max
gatgtgatagtattatcattcattcgcatcggtctcacttctctctccacctataccctaactcacgacactgtacccctctcgaatccgtcatgacacgaggaaagtccaagaccgaatctaagacagcagattgcaaacttgctgtgaataataagggagccgcgaacaatgctaagaaactcgccggcaacgggaatgcagcgaaagatgctaacaagcgaaagaggcctccaagtgcattcttcgttttcatggaggaattcacgaatgtattcaacaaagaacatcctgaaaacaaatcagtgtctgctgttggcaaaactgctggagc

SEQ ID NO: 239087 - DNA, 313 bp, Glycine max
ggtggttcttgtttgcgagatagaagcgtaagcagcggttagcctaacctcgtcttcctctctacgaatttcagctatggccgacgaagctgtggctgttccagatcctacccagatcgatgtcaagctctttaaccgctggagcttcgaggatattgaggttactgacatttcactggctgattacattggagttgcggcatccaagcacgccacatatgttcctcacaccgccggaaggtactccgtgaagcggttcatgaaggcgcagtagcccattgttgagaggctcaccacctctcccatgatgcac

SEQ ID NO: 239088 - DNA, 381 bp, Glycine max
ggttttaggttttcttagatagagttgttaccatttgctcccagtacagagcttaaccgagcttcacaaagatgaatcgggaaaagttgatgaagatggccggttcggttagaactgggggaaagggtaccatgagaagaaagaagaaggctgtccacaagacaacaaccacagatgacaaaaggcttcagagcaccctgaagagaataggggtgaatgccatcccggctattgaggaggtcaatatctttaaggatgacgtagttatccagtttctaaatcccaaagttcaagcatccattgctgctaatacttgggttgtcagtggttctccacaaacaaagaagttgcaagatatactccctagcattatccaccaat

SEQ ID NO: 239089 - DNA, 339 bp, Glycine max
ggtgttaagtgtgaatccctttccctctctactcttcactttccatttccatttttttctggttttctttctccatggcctccgccgccgccgtcgccgccgaagacgacgctgtcaacggctccactcggtcggagatgtactcggaaaacctcgccggcactgtcgacgcctacgaccgacacgtgttcctctgctacaagagctacgtgtcctggccggcacgcatcgaggcatccgacgccgatcccttccccaagcgcgtcgccgccaccttcaaagcccgcaagaacgacttgcccctcaagacgaaaatcacggtgtgcgaggcgcgcgaag

SEQ ID NO: 239090 - DNA, 382 bp, Glycine max
gacaatcgaacgggaaaaggcgtcttcataaacgccgcccaaaacttctcatacccttttattcattccattcgtttctagggttttcttttctttgccgagaaaatgagagagtgcatttcgatccacattggccaggccggtatccaggttggaaacgcctgctgggaactctattgccttgaacacggcattcagcccgatggacagatgccgagtgacaagaccgttggcggaggagacgacgccttcaacacatttttcagcgagaccggcgccggaaagcacgtgccccgcgccgtcttcgtggatcttgaacccaccgtgatcgacgaagtccgaaccggtgcgtaccggcagctcttccacccggagcagctga

SEQ ID NO: 239091 - DNA, 324 bp, Glycine max
ggaacctttgcattctattcattcaagattcagcaagtgcgttttggaagcagagaccgaaatacttcgagatggcccgtacaaagcaaactgctcgtaagtcaactggaggaaaagctcccaggaagcagcttgcaaccaaggctgcacgtaagtctgcaccaacaactggtggtgtgaagaagcctcatcgttatcgccctggaactgttgctcttcgtgagattaggaaataccagaagagcactgagctcctaatcatgaagcttcctttccagaggttggttcgtgaaattgcccaggatttcaagactgatctgcgtt

SEQ ID NO: 239092 - DNA, 248 bp, Glycine max
  unsure (1)..(248): unsure at all n locations
gcttcttcagccatttagctccatagctgcagcattagggtttttcatctgcttcaatggggaagggaacagggagttttggtaagagaaggaacaagactcacactctctgtgtgaggtgtggccgccgcagcttccatctccagaagagtcgttgcgccgcttgtgctttncccgccgcacgcactaagaaatataactggagcgtcaaggcaatccgcagaaaagaccaccggaactggcaagat

SEQ ID NO: 239093 - DNA, 163 bp, Glycine max
  unsure (1)..(163): unsure at all n locations
gaggtttttanggtttacaccgaggagacacaccttcagcagcagcagccatggttctcaaaaccgaactatgccgattcagcggtgccaagatctacccagggaaaaggcatcagattgttcgtggtgattctcaggttttcctgtntgctaactcgaaatg

SEQ ID NO: 239094 - DNA, 516 bp, Glycine max
  unsure (1)..(516): unsure at all n locations
ttagccagtccgtagccgnatagntcgaagatgcgggtcgaccacgcgtccgcccacgcgtccgacggctgcgagaagacgacagaagggtaaacccctgttctatggtttccagataaacgatactctcaaaagtactggtacgagtaaaaataccctcttctttaacttctgttattattctgatggagtgaagctcgttcataggtatttcgagaataatacgacgattttttccaggaaatccccaacgaacaaaacgtacctttttcccttttttattgaagatatcaaaaccaccacctatatcccaaaaaaaaaaaaaaaaaaaaaaaaaaaaaagcgggcgctctaaaggattcaagcttaagtacgcgtgcatgcgaagtcatagctcttccaaagtgtcacctaaattcaattcactggccgtcgttttacaacgtcgtgactgggaaaaccctggcgttacccaacttaatcgccttgcagcacatccccctttcgccagctggg

SEQ ID NO: 239095 - DNA, 294 bp, Glycine max
cacgggactcacgacttcagtacactcataatacatcagcacaaatcaaagctcatccttgagttatgaaatggcagcagcttcatccatggctctctcatccccatccttggctggcaatcgccgtgaagctgggcccatcatccccagaatttggaatggtgagcatgaagaagaccgtcaccaagcaggtctcctcaagaagcccatggtacggcccagaccgactcaagtacttgggcccattctctggcgaacccccgttctaactaacccgtgaatttccaagcgaat

SEQ ID NO: 239096 - DNA, 274 bp, Glycine max
gacagctcttggctttagcaaattccaagtcccaattcccaattcgaaacccttagtcctttcaaagaaccaaattgagtgatcgtgatggcaccaaaggcagagaagaagccagcggagaagaagcccgcggaggagaagaagtcgacggtgggagacaaggctccggcggagaagaagccaaaggccggaaagaagcttccgaaggagggatgcgccggcggagaaaggaagaagatgaagagaaacaagaagagcgtggagacatacaaga

SEQ ID NO: 239097 - DNA, 280 bp, Glycine max
ggtttttgtttcccatagcatagaagaagcagaaagagaagcattagcaaaagcaagaagaactagtctaagcagaaatggcctcttcagtgatggcatctgtggccctcaaacctgcccctttcactgttgagaagtcctcagttagaggccttccctccctctcaaggaactcctcttcattcagagtcgtggccagtggtggcaagaagatcaagactgacaagccttatggaattaatggtggcatggctttgagggaaggagctgatgcatctgg

SEQ ID NO: 239098 - DNA, 314 bp, Glycine max
gtgttggcagaggattgatgggctatcttggaaataagggatccatctcaattagtatgtctgtgcacgaaactagcttttgctttatctgtagccatttaacctcaggacagaaagaaggtgatgaactaagaagaaattctgatgtgatggagattcttaagaagacaaggtttcctcgtgttcaaggtgtggacaatgagaagtctccacagacaatccttgagcatgatcgaatcatatggcttggagatttgaattaccggattgcactctcctaccgatctgctaaagcactcgttgagatgcaaact

SEQ ID NO: 239099 - DNA, 539 bp, Glycine max
  unsure (1)..(539): unsure at all n locations
cgcnccactagcaactggtacgcctgcccgtaccggctcggaattcccgagtcgacccacgcgtccgacggctgcgagaagacgacagaagggtacggctgcgagaagacgacagaagggtacggctgcgagaagacgacagaaggggggattgcacgtgtttatggattgaacgagattcaagctggggaaatggttgaatttgccagcggtgtgaaaggaatagcgttgaatcttgagaatgagaatgtcggaattgttgtctttggtagtgataccgctataaaagaatgagatcttgtcaaacgaactggatctattgtggatgttcctgcgggaaaggctatgctanggcgtgtggtcgacgcgttgggagtacctattgatggaagaggggctctaagcgatcacgagcgaagacgtgtcgaagtgaaagcccctgngattattgaacgtaaatctgtgcacgagcctatgcaaacagggttaaaagcagtagatagcctggttcctatangccgtggtcaacgagaacttan

SEQ ID NO: 239100 - DNA, 424 bp, Glycine max
  unsure (1)..(424): unsure at all n locations
ggtgcctctcgtctccctttgcacaaaccctaacacctaaaagccagaagaagcgaaatcgtaatcgcaatctagcggatatgaaggtcgtcgctgcatacttgctcgcagtgttgggagggaatccatctccttctgccgatgatatcaaaaacatcctcggcgcagttggagctgaggctgagcatgagttgattgagttgctcttgaccgaagtcaagggcanagacttcaatgagctacttgctagtggaagttaaaaaatttctgcagtggctggtggtggtgcagcggttgctgttgctgctgcaccagcgggaggtgctggtggcggtgctgcacctgctgccgaagcaaaagaagaaaagaaagtagaagaagaagaggaatctgatgatgatatgggtttcagtttgttcgacta

SEQ ID NO: 239101 - DNA, 384 bp, Glycine max
gtgtgaaaaaaaaaaaaaaaaaaaaaaaaaaaaaaaaaaaaaaaaaaaaaaaaaaaaaaaaaaaaaaaaaaaaaaaaaaaaaaaaaaaaaaaaaaaaaaaaaaaacaaaaaaaaaaaaaaaaaaaaaaaaaaaaaaaccccccccccaaaaggtccaaacctaaatacccccgaaaagcaaaccaaaacccccccaaaaggccccccaaaaccaaatccaaggcccccccttaaaaaaccccctaacggaaaaacccccggcgtaacccaactaaacccccttaaaaaaaaccccccttccccaaaggggggaaaacccaaaaagccccccaccaatcccccccccaaaaaatgccccacccaaaatggcaaaaggaacccccc

SEQ ID NO: 239102 - DNA, 395 bp, Glycine max
gagagtggtggagtgtgcagaagagcgtcgcagtcgcaaccctaatcagaagaagcgcagcttcaagcgagtgacagccaccagccatgggtcgtatgcacagccgcggtaagggtatatcctcttctgctttgccctacaaaaggacacctcctagctggctcaagatctcttcgcaagatgtcgaagaaaatatctgcaagtttgcgaagaaaggtttgaccccgtctcagattggtgtcattctcagagattctcacggtattgctcaggtcaatagcgtcactggcagcaaaatccttcgcatcctcaaagctcacggacttgcgcctgaaattccagaggacctgtaccatttgattaagaaggcagtttcaattaggaagcatcttgag

SEQ ID NO: 239103 - DNA, 381 bp, Glycine max
ggcgtacacagcctcaacaaccctaacgcgtgcagagcagagagagacgcagccatggggcgaagacccgcgaggtgttataggcaaattaagaacaaaccataccccaagtcacggttttgccgtggtgttcctgatcccaagatcaggatttacgatgttggtatgaagaagaagggtgttgatgagtttcctttctgtgtccatctggttagttgggagaaggaaaacgtttctagtgaggccctggaagctgctcgtattgcttgcaacaagtacatggccaaatttgctggaaaggatgctttccacttgagagtcacggtgcacccattccatgttcttaggatcaacacgatgctttcgtgtgctggagctgat

SEQ ID NO: 239104 - DNA, 377 bp, Glycine max
  unsure (1)..(377): unsure at all n locations
gacacttactagtagtaagcatggagtcctcaaagatctatgcttacctcttcctctgcatgatctttctctcttccgccactcccattctcggttgtggctactgtggcaaaccccccaaaaagcacaagcctggtaaaacaccaaaggacacccaaaacacccgttgttaagccaccagtcaccatcnctcccattaatgttcctcncgttgttcttccaccaatagtgaagcccccaggtattctccctccaattccaattattaacccagcaaccacaccagggaatggagggaacactccatgcccaccaccaaagtctcctgcgcaggctacgtgccccattgacacgctcaaacttggtgcctgtgtgga

SEQ ID NO: 239105 - DNA, 389 bp, Glycine max
atcgtgcctatgcacaaggtcaatttcgacgccaagagcgagtacgagatgattcagaactacaaggtccttcaagatgtcttcaacaaactcaaaatcaccaagcacatcgaggtcagcaagctggtgaaaggaaggccactggataacctcgagttcatgcaatggatgaaacgatactgcgattctgtcgattccggccttcagtacaattataatcctctggagaggagagaggtttgcaaaggaggaagagaaacgagcaagaaatctgcaaactcccaaggctcaaccaagggtttctactgcacagagaactcaatcctcccataatgctcgaagaaatgaggtttccaatgcaaaccctacaaatcaggctgcaaaggttg

SEQ ID NO: 239106 - DNA, 429 bp, Glycine max
ttcgttacagttggtgaaagaggcattgtacgcatatggaattccaaaggtgcaggttgcatctttgagcaaaaaacttcagatgttacagccggcatggatgaggatggctcacgtaagggtttcacttctgctgttatgcttgcctcagatcaaggattgctttgtgtaactgcagatcagcagtttctgttttactctctggacttcactgaacagttgttgcaattaaatctaaccaaaagacttgtgggatataatgaagagattgtagatatgaagtttattggggatgatgaaaaattccttgctcttgctacaaatcttgaacagattcgggtttatgacctttcatctatgtcatgttcgtatgtcttatctggtcacactgaaattgttctatgccttgactcctgtgtatcaagttct

SEQ ID NO: 239107 - DNA, 296 bp, Glycine max
ggtgtgttcctcaactcaacacactcctttataattgcagcgtcgacaaaaaccctaactcctaacctttttttcttcctttcacctcttcagcagtcgttacagagactccataacccgaaaatgcctttcaagaggtacgttgagattggaagggttgctcagatcaactatggcaaagagtatgggaggctcgtggttattgtcgatgtcattgaccagaataaggctcttgttgatgctcctgacatggtgaggtccaaagtgaacttcaagagggctatcaccactgacat

SEQ ID NO: 239108 - DNA, 413 bp, Glycine max
gactcaccacttcaaaacactcataacacaaagcacaaagcaaagctcatccttgagttaaaaaatggcagcagcttcttccatggctctctcatccccatccttggctggcaaggccgtgaagctgggcccatcagccccagaagtgggaagggtgagcatgaggaagaccgtcaccaagcaggtctcctcaggaagcccatggtacggcccagaccgagtcaagtacttgggcccattctctggcgagcccccgtcctacctaaccggtgagttcccaggcgactacggctgggacactgctgggctttccgcagacccagaaaccttcgccaagaaccgtgaactcgaagtgatccactccaggtgggccatgctcggagccttgggctgcgtcttcccggagttgctgt

SEQ ID NO: 239109 - DNA, 347 bp, Glycine max
ggccgaaaaccctaacaacacaggcgcagagcgtgattcattgacgaagatggtgcagcgtcccacctaacgcaagaagcaaaactatgccaccaaatccaaccaacaaagggtcgtcaaaaccccctggtgggaagctcgtttatcagaccaccaagaagagggccagcgggcccaagtgccccgtcactggcaagaggattcaggggattccacacttgaggcctgcagagtacaagagatcaaggttacccagaaaccgtaggactgtcaaccgtgcatatggcggagttttgtctggaagtgctgtcagggagaggattatccgagctttcttagttgaagag

SEQ ID NO: 239110 - DNA, 395 bp, Glycine max
gattcctcaagaactatggtttgcagtcactgctctgtttcaccgagtttgggcgtttagatcagaaccaaatcgtgttctcttccattggcaaacatggcaactcaaatgagcaagaagagaaagtttgttgcggacggagtgttccttgccgaactgaacgaggttctgacacgtgaattggcggaggacggttactccggcgtcgaagttagggttacgccgatgcgcagcgagatcatcatcagagccaccagaacccaagccgttctaggtgagaagggaaggagaattacggaacttagctcagtggtgcagaagaggttcaaattccccgaaaacagcgtcgagctttatgctgagaaggtcaacaacagaggcctgtgtgccattgc

SEQ ID NO: 239111 - DNA, 340 bp, Glycine max
tggtaccctgtcgtacgctgcggaatcccgaggtcgaccagccgtcggtacgctgccaaaagaacaacaaaagggtcacaatcaaacgggaaaaggcgtcttcaaaaacgcggcccaaaacttctcctacccttttattcattcaattcgtttctagggtttcctttcctttgccgagaaaaatgagagattgcatttcaatccacattggcaaggccggtatccaggttggaaacgcctgctgggaactctattgccttgaacacggcattcaccccgatggacagattcccaagtgacaagaccgttggcggaggagacgacgccttcaacacatttt

SEQ ID NO: 239112 - DNA, 314 bp, Glycine max
  unsure (1)..(314): unsure at all n locations
attgggcatgtggatgagaatggcgtctacaatggccatttctccacttttgctctctgcggcttcatacgtgctcagggtgatgctgacagtgccctagatcgcttgtggcagaagaagaaagttgaagttaagcaacagtagacacccatgatagtttgttactttgctatgtattaatttctacgcatgctagagatnattgagtactatgattgtcgtcttgagcaaatactcattcgaaattttcgttggtatttggtaccgccagctaaatttgcttttttgacagtttgccagtgcgttgataaata

SEQ ID NO: 239113 - DNA, 263 bp, Glycine max
ggcagtttcaaattttcctttccttcactttcccgagaaaaaaataacacttttcactttcttcactacgttctcacttcgatatggctcgtacgaagcaaaccgctcgcaagtccaccggtggcaaggcgccacgtaagcagctcgccaccaaggccgctcggaagtccgctccggcgaccggaggagtgaagaagccccaccgcttcaggccggggaacgtggcgctgacggaaatcagaaagtaccagaagagcaccgag

SEQ ID NO: 239114 - DNA, 287 bp, Glycine max
ggcgtacacagcctcaacaaccctaacgcgtgcagagcagagagagacgcagccatggggcgaagacccgcgaggtgttataggcaaattaagaacaaaccataccccaagtcacggttttgccgtggtgttcctgattccaagaataggatttacgatgttggtattaagaaaaaggtgttgatgagtttcctttctgtgtccatctggttagttgggagaaagaaaacgtttctagtgagggcctggaagctgctcgtattgcttgcaacaagtacatggccaaa

SEQ ID NO: 239115 - DNA, 141 bp, Glycine max
gaagaaagctgctagcacagggaagttctacacttttttgtttggattgatcgagtgtactttttcttttcgagattggcttggtgtgcagtggaaagagggtggaaaagagtggtaagggggagggcggcgccccttgtc

SEQ ID NO: 239116 - DNA, 359 bp, Glycine max
gatccttcgtccagctagcaccacgttcacctgaggcttccaaagcaatggcttcccttgcagcatccactgctgctgcttcccttggcatgtcagaaatgcttggaaaccccatcaacttcagtggtgccacaaggccagctccatctgcttctagtcctgcctccttcaagactgtggctcttttctccaaaaagaaggctacaccaacacctccaaaaaaagctgctgctgctgctcctgccaatgatgagcttgccaagtggtatggtcctgacagaaggatcttcttgcctgagggtctcttggaccgatccgaaatcccagagtacttgaccggaaaagtccctggagactat

SEQ ID NO: 239117 - DNA, 374 bp, Glycine max
gatgttaagacttgagagtgagagagagagtgagagagtgagtgagatagagagagacgcttcgcaaatctcaatcgaatctcagaaaaatgagagaaatcatcggcattcacataggtcaggccgggatccaggtcggaaactcctgctgggaactctactgcctcgaacatggcatccagcccgacggcatgatgccttctgactccaccttcggtgtagcccacgacgccttcaacaccttcttcagcgaaaccggatctggcaagcacgttccccgtgctgtcttcgtcgacctcgaacccagcgtcatcgacgaggtccgctgcggcaactaccgtcaactcctttcacccgaacaactcatctccagc

SEQ ID NO: 239118 - DNA, 377 bp, Glycine max
gagctagggtttcagtggtgttagatctgtacccgcctagccattgatttggaaaagtccaagcttcaaagatgtgtaagcttcagagtgatgctcttagagaagctatctcaggaatcatgactgattccaaggaaaagaacaggaaatttgtggagaccattgaactccaaattgggctgaaaaactatgatccccagaaggacaagcgttttagtggctctgttaagttgcctcacattcctcgccccaagatgaagatttgtatgcttggagatgcccaacacgttgaagaggctgagaagataggattggactacatggatgttgaggccttgaagaagcttaacaaaaacaagaaattggtgaaaaaacta

SEQ ID NO: 239119 - DNA, 400 bp, Glycine max
gactcactcatacaatagagaccagcttttgcttctttgtgaacatggagatgaggaaatcatgtggcttcttcttcttgctcctcctccttgtctttgcttcccaggtggtggtgcagacggagggaagagtgtgtgagtcacaaagccacgggttccatggtttgtgtaatagagaccacaactgtgctttggtctgcaggaacgaaggtttctccggtggcaggtgcaaaggcttccgccgccgctgcttttgcaccaggatttgttgagatctcatcaaacactactcttgccatgcaaattaataaatcatagctaggccaaataaattgcatctactctttatccatttgggagctagcttacacaaccaactcatacttggtcattggattgc

SEQ ID NO: 239120 - DNA, 359 bp, Glycine max
  unsure (1)..(359): unsure at all n locations
gcctccgaaaaccctaacaacacaggcgcagacgcanacgcaaacgcaaacgcaaacgcaaacgcagagcgtgatccattgacgaagatggtgcagcgtcgcacctaccgcaaacgccacagctatgctaccaaatccaaccagcacagagtcgtcaagactcccggtggcaagcttgtttatcagaccacgaagaagagggccagcggacccaagtgccctgtcactggaaagaggattcaagggattccacatttaaggccagcagagtataatagatcaaggttacacagaaaccgaaggactgtgaaccgtgcatatggtggtgtgttgtctggcagtgctgttagagaaagaat

SEQ ID NO: 239121 - DNA, 408 bp, Glycine max
gacacgcaactatttctgactacgttttgctctacgcctctccctctctctcaaaaatcgttctcttcgattttagggttttgttttgctgctgcctccgttccccccttctcataaacaacgcgttttctcttctgcttcgtatctattctttgcttttggttttggttgattcaaggccttcacagcattcgttgcggcattttaatcgatttatccaagcaggactgaatgaactaatggagtctaaaggtgggaaaaagaagtctagtagtagtagtagtaaatcattgttctacgaagctcccctcggatacagcattgaagacgttagaccaaacggtggaatcaagaaattcagatctgctgcttactccaactgcgctcgcaaaccttcctgatatccat

SEQ ID NO: 239122 - DNA, 341 bp, Glycine max
gacctcaaaaaacaaaaatcaataccttagagaaaacaaaagcacagaatcgaaagaagagttcttttttgagagagattgggatggcttcgacgaagaagatcacactgaagagttcggacggcgaggccttcgaggtggaggaggcggtggcggtggagtcccagacgatcaagcacatgatcgaggacaactgcgccgacagcggaattcctctccccaatgttaccagcaagattctggccaaggttatcgagtattgcaagaagcacgttgaggccaattgcgctgacgagaagcccagtgaggatgaactcaaggcttgggacgctgatttcgtc

SEQ ID NO: 239123 - DNA, 278 bp, Glycine max
gatccttcgtccagctagcaccacattcacctgaggcttccaaagcaatggcttcccttgcagcatccactgctgctgcttcccttggcatgtcagaaatgcttggaaaccccaacaacttcagtggtggcacaagggcagctccaactgcttccaatcctggctccttcaagactgtggctcctttctccaaaaagaaggctacaccaacacctccaaaaaaagctgctgctgctgctcctgccaatgatgagcttgccaagtggtatggtcctgac

SEQ ID NO: 239124 - DNA, 268 bp, Glycine max
gacgtctctgcggattcatccttttcttctgcagacaaagaaccaacaacacttgtttcttcagccatggccagtcaacctgaatcatctgacgcaaagggcacaaaaagggattttagcaccgccatattagagcgtaagaaggctccgaatcggctcgtggttgatgaagctgtcaacgacgacaactctgttgtcgcgcttcatcctgataccatggagaaacttcaactttttcgtggtgacaccatcttgatcaaggggaaaa

SEQ ID NO: 239125 - DNA, 365 bp, Glycine max
aggaagctttagagcagcaaagaagggaggaagaacgatataaagagctggaagagatgcaaagacagaaggaagaagccatgcgaaaaaagaaacaggaggaggagcaagaacgtctaaaccaaataaagttgttgggtaaaaacaaatcccgaccaaaattgtcatttgcttttggatccaaatgaccattggcttgggcaacctgtgtctatttatttagtctaaagtgtgtttgggcttaattccctatttgtgtctgtaatttgaggaaaatcaggaaattatacacagcctcctcaactataatgtgacagcgttgttaccgttttcagtttgcattagatttcattgtttatcattgc

SEQ ID NO: 239126 - DNA, 285 bp, Glycine max
gcttgcaggcgaaagagaagatggccaccgttccagggcagctcgtgtgggagatcgtgaagaaaaacaactcctttttggtcaagcagttcggaagggggacccagagcgtcgaattcagcagagagagcaacaatctctacaacctcaattcgttcaagtactctggtttggcaaacaagaaaactgttacggtacagcctgagggtaaagatcaggctgtgttgttggctacaacaaagacaaagaagcaaaacaagcctgctgcaatgcctcaaaaatctg

SEQ ID NO: 239127 - DNA, 435 bp, Glycine max
gaccctcttgtttgctaatattctcattcttctgtctctgcttcttctccttctgaactaagagatggggttgtctttcaccaagctttttagccggctctttgctaagaaagagatgcgtattctcatggtaggtcttgatgctgctggtaagactaccatcttgtacaagctcaagctgggagaaattgtcacaaccattcccacaattggattcaatgtggagactgtggaatataagaatattagctttactgtatgggatgtgggtggccaagataagatccgtcctttatggagacactacttccaaaacactcaggggcttatctttgttgtggatagcaatgatcgtgaccgtgtagttgaggctagagatgagctccaccggatgttgaatgaggatgagttgagagatgctgttctcctggtatt

SEQ ID NO: 239128 - DNA, 324 bp, Glycine max
  unsure (1)..(324): unsure at all n locations
gagaatagagagctcctccaattagggtttttgtgatctgcagctacgatgggtaagggaacggggagtttcggtaagaggaggaacaagacccacaccctctgtgtgaggtgtggccgccgcagcttccacctccagaagagtcgttgctctgcgtgcgcttaccccgctgcgcgcaccaggaaatataactggagcgtgaaggccattangagaaagaccaccggaactggaaggatgaggtacttgcgtaacgtgcctcgcagattcaagagcggcttcagagagggtaccgaagctgcacccaagaagagaggagctgct

SEQ ID NO: 239129 - DNA, 260 bp, Glycine max
cttcagatcggaaacttcacactttcgaggatgtggcatagcacgaccagaccaatgattgctggctcatcatttctggcaaagtgtatgatgtcacccctttcatggaggatcatcccggacgtgatgaggttttgttatctgcaacatggaaagatgcaaccaatgattttgaagatgttggacacagtgattctgctagagatatgatggaaaaatactaaattggtgagattgattcatcaactgtacaactaaaa

SEQ ID NO: 239130 - DNA, 349 bp, Glycine max
gaacagcgccatatcataacccttcgaagtcgccgtttgtgttcatttcgttcgcatcttctctctctctcagaaagatgaaggtggtcgccgcgtatttgctcgccgtcctcggtggcaacaacagcccctccgccgatgtcatcaaggaaatccttggctccgttggagtagaagcagatgacgataggattgaatcgtttttgtctgaatttaagggtaaggatatagttgagcttattgctgccggtagggaaaatttggccacggttccttcaggtggtggtggtgccgttgccgtcgccgcatctcctggggaatgtgctgctgctgctgcacctgctgctga

SEQ ID NO: 239131 - DNA, 411 bp, Glycine max
gaaccaagtttgcttgcgtgtatattcattttagcatcaaggttgaatctcagagaaaaagaaacatcgacaagcatgtctggaagaggaaagggaggcaagggtctcggaaagggaagagccaaacgacaccgtaaggttctgagggataacattcagggaatcaccaagcccgcgattcgccgtctggccagacgtggtggcgtcaagcgtatcagtggtctcatctacgaagagacacgtggcgtcctcaagatcttcctcgagaacgttattcgcgacgctgtcacctacactgaacacgctcgccgcaagaccgtcactgccatggacgttgtttacgccctcaagaggcaagggaggaccctctacggatttggcggttagacaattggggatttcagcactgcg

SEQ ID NO: 239132 - DNA, 405 bp, Glycine max
ggtttctctctgcagttgcactcttgcaggcatgtgcagctgtttcccgttctgctcctctcccaacccctctgtttctttggagtgagaaagtttaatactttagaaccagctagcgagcaattgagccattgtcatacatatatataaataccgtgcgagaaatgcagcagcacctgatgcagatgcagcctatcatggaagcctactaccccaacaacgtcaccactgatcacattcaacagtacctggatgagaacaagtccttgatcctgaagattgttgaaagccagaattctggcaagctgagcgagtgtgcagagaaccattcagggctgcagagaaatctcatgtacctagctgcaatagctgattctcaaacccaaccatctccaatgcctggtc

SEQ ID NO: 239133 - DNA, 419 bp, Glycine max
gagatctgctgcttctcattgttgaaaagaaaccctagcaagtggagcaatggcagacgttgaagtcgatgtggcggcagcagcagcagcagggctgccgaagaagagaacgttcaagaagttcagttttcgaggcgtggatctcgatgcacttctcgacatgtccaccgatgaactcgtcaagatgttcagtgcccgcgctcgtagaaggttccagagaggcctcaccagaaagcccatggccttgatcaagaagctccgtaaagcgaaaagggaagctccaccaggtgagaagccagaaccagtacgcacccacctccgcaacatgattattgtgcctgagatgattggtagcattattggagtgtacaatggcaaaacctttaatcaggttgaaatcaaacctgagatgattgggc

SEQ ID NO: 239134 - DNA, 423 bp, Glycine max
ggttgtcaagcctgccgagaaaaccctagttcgcttgcagtcacacaagaggccaatcctattcatagctcgaaatgggtgaagaattgaaggtagttgttccagaatcattgttgaagaacccaagaaggaagaaggaatggccgttggcaagaagccagaaatccgtacctgcaagaagaaaagagaccaagacccacaatctcatctacaacagagctaagcagtacgctaaggagtacgatcaccaggagaaggaattgattcggttgaaacgcgaggccaagctgaaaggtggtttctatgtggatccagaggctaacctgttgtttattattcgcattcgtggtattaatgccatggaccccaaatcaaggaagatcctgcatttgttgcgattgacacagattttcaatgggtgta

SEQ ID NO: 239135 - DNA, 420 bp, Glycine max
ccaggtcaccagcgtccgtaagcgtcagacaacgatcagcgcagatatctgacaaagaatcgaacgttagctaaaagacaatacttcggtgacctcccgtattgttcataaccaaacttcttctgctcaacatgctgacgctctgatacaagctttcataggatggagggctgatgacaacgccactatagcattactgggtcacagatctgtgcatcacatgcaagaaatcagtgaagcttatgacgatatttaccacgaggatctcatcacatgccttgagtccgatatctctagtgactttgatagagctatgtaccggtggatgttgcattctgcagattgtgatactgttatggtgaatgtggaaatcaccagtggcagcacagactaccatgtgattgcagagattgcttgtat

SEQ ID NO: 239136 - DNA, 421 bp, Glycine max
ggttgtcaagcctgccgagaaaaccctagttcgcttgcagtcacacaagaggccaatcctattcatagctcgagatgggtgaagaagtgaaggtagttgttccagaatcagtgttgaagaagcgcaagagggaggaggaatgggcgttggccaagaagcaagaactcgatgctgccaagaagaagagagccgagagccgcaaactcatctacaacagagctaagcagtacgctaaggagtacgatcaccaggagaaggaattgattcggttgaaacgcgaggccaagctgaaaggtggtttctatgtggattcagaggctaagctgttgtttagtattcgcattcgtggtattaatgccatggaccccaaatcaaggaagattctgcagttgttgcgattgagacagattttcaatggtgt

SEQ ID NO: 239137 - DNA, 354 bp, Glycine max
gacaaccaagctcgcttcttccttctcgcatcaacagcatgcagatcatcgtcaagactttgagcggcaagaccatcaccctcgaggtcgagagcagcgacaccatcgacaacgtcaaggccaagatccacggcaaggaatgtatcgctcctgaccagcagaggttgatttttgctggtaagcacctggaagatggtcgcactcgtgctgattataacatacgacaggaatcaacacttcacatggtcttgaggctaaggggaggtaccatgagtagcgtgatgactttaactgggaaagaaattgagattgacattgaagcatctgatacaatcgaccggattaaggaacgtg

SEQ ID NO: 239138 - DNA, 278 bp, Glycine max
gacaactaagagagaatcgtcctgctcacatcaacacaatgcatctctgcgcaaccatgttgatcagaaacaacattactctgcacgacaagatcaggcacaccatcaagctttcaaaggacaggatgcagaagacagagcgaatacctcctgaccaggacacattgatttttaccagaaagcagatggcagatggtcttactcgtgcagtttacaacatgctctcagcatcaacacttcatctgatcttgctgctaacgttaagaaacatgagtaac

SEQ ID NO: 239139 - DNA, 350 bp, Glycine max
gaaatctgctgcttctcaatgttgaaaagaaaccctagcaagtggagcaatggcagacgttgaagtccaagttgccggaacagcaacaacaaggctggccaaaaagagaacgttcaggaagttcagttttcgaggcgtggatctcgatgcacttctcgacatgtccaccgatgaactcgtcaagatgttcagtgcccgcgctcgtagaacgttccagagaggcctcaccagaaagcccatggccttgatcaagaagctccgtaaagcgaaaagggaagctccaccaggtgagaagccagaaccagtacgcacccacctccgcaacatgattattgtgcctgagatgattg

SEQ ID NO: 239140 - DNA, 254 bp, Glycine max
  unsure (1)..(254): unsure at all n locations
cgctgcgacatgacgacataatggtaccgctgcgacaacactatacaaggcgactccgcagctgcagcactcangaccctacataggacgatatagcgtgcaactttcggcaaccacagaccatgacattcaagcgcatgaattgaggtcgcaacaaacactgccgctgacatgtcaaattcatccgatgctccaactgcggaaaatgctgccccaaagacaaagccatcaagaggtttttggttangaacatt

SEQ ID NO: 239141 - DNA, 381 bp, Glycine max
ggaacacagagcgagcgaaagtagaatctgaaaaacaatggcggcgaagctagacacccacgccgtggcttccgatctgatcgacttcctcaacgcttctccaacggctttccacgccgtcgacgaggcaaagaggcgtttgcgtagcgcggggtaccaccaactctctgagagggaagtgtgggaactgcaaccgggcaacaagtacttcttcaccagaaatcactccaccatcgtcgccttcgccatcggcaaaaagtacgttgctgggaatggattctacataattggggctcacacggatagtccttgtctcaaactcaaaccctggtcacaagggtgttaaggctggggattttggaggttggggtccaaacctat

SEQ ID NO: 239142 - DNA, 407 bp, Glycine max
ggagttgagaggatcgtgagaggggcagtagccgagattccgtgagttgcaaaaatgaagacgattctttccaccgagaccatgaacatcccggacggcgtgagcatcaaagttcatgccaaggtcatcgaagttgagggcccccgcggaaaattggtgcgagacttcaagcatttgaatctcgattttcagctcattactgacgaaaacggtaaaagaaagctgaaaatcgacgcgtggtttggttctcggaaaacatccgccgccattcgcaccgccttgagccacgtggagaatcttatcaccggcgtcaccaagggctaccgctacaaaatgaggttcgtttatgcccattttcccatcaacgcaagcatcggcaacagcaacaagtctattgagatccgaaa

SEQ ID NO: 239143 - DNA, 389 bp, Glycine max
gacaacgaaactcacagaagaaaggagaaaaagaagcgaaactaaagtcagcattcgaaaaagatgagtagcatcggtacaggttacgatctatcggtcaccactttctcccctgatggacgcgttttccagatcgagtatgccgctaaagccgtcgacaacagcgggactgttattgggatcaagtgcaaagatggggttgtgttgggcgttgagaagcttattccgtcgaaaatgatgcttccgggttccaatagaagagtacactccgttcatcgtcactctgggatggctgtagcaggattagcagctgatggcagacaaattgttgccagggctaagtctgaagctactaactatgacagcgtatatggcgaaccaattcctgt

SEQ ID NO: 239144 - DNA, 450 bp, Glycine max
  unsure (1)..(450): unsure at all n locations
ggatcttcacgattaggagatggctaagtcgaagaaccacaccgctcacaaccagtcctacaaggcccacaagaatggcatcaaaaagccaaagaggcaccgccacacttccaccaaagggatggatccaaagtttctgaggaaccaaaggtacgcgaggaagcataacaagaagagcggtgaaacagccacggaagaagagtaaagtgtcactctcaaatggggctattaggatttgatttgctattcaagtcccatatgttttgtgtcaaatctatatttagtagtatagtcattttgatgagttaatttaatccagagagaatgcagtacttactcttatagcatcgttgctggtttttgtttgttaaagacccttcaaattttatcgatggattattattcagttgtttaaaaaaaanaanaananaaaaaaaaaaaaagcggccg

SEQ ID NO: 239145 - DNA, 280 bp, Glycine max
  unsure (1)..(280): unsure at all n locations
gaagagtgatccttctacactaactaaagccgagcagcgagagagagaaaccctagcaaaaatgccggctggtcacggtttgagatcccgcaccagagattccttctctcgtcncttcaagaagaagggtaccatcgccctcaccacatacctcagaacctaccacgtcggcgattaagtcgacgtcaaagttaacggcgccgtccacaagggaatgcctcacaagttctaccatgggcgcaccggtcgcgtctggaatgtgagcagacgtgctgttggg

SEQ ID NO: 239146 - DNA, 282 bp, Glycine max
cggggaatcgtcttttacttctcagcagcttcggctagggttcagaaacgaaaaagggttcggtgttctgttcgcgatgagagccaagtggaagaagaagcgtatgaggaggttgaagaggaagcgccgaaagatgagacagagatccaagtagtgcgttaaacctactttgtttctgttgcttttacaattgcttatgttgtcgaatgggaaacccagttgttagtggcactggtttctcctttttgatgtttgatacattttgttggattcaattagttt

SEQ ID NO: 239147 - DNA, 410 bp, Glycine max
gacaacacaacgcaacacaacgcgcactctctcttttctctcttaacacaaaaaccctatcgttctccgcggtttcgccgattctcgccatgccgaaagccaaatccgacgccaaagccgccgatagccggttgaagcgcaagggcgctggtgctggaaggaagcaatcgaagaaagctgctaaggatcctaacaagccaaagagacctccaagcgctttcttcgttttcatgtccgagttcagagagcagtttaagaaggagcatcctaacaacaaatccgtcgctgttgtcggtaaagctggtggtgacaaatggaaatcgctgtctgatgctgaaaaggcccccttcgttgccacggccgaaaagaagaaacaagagtatgagaaaactattttggcttacaataag

SEQ ID NO: 239148 - DNA, 422 bp, Glycine max
gagtgtatgtgattgttgtgactcgttcttcttcgtcgttatcttcttcttttgttgtttgtgtgtttgttttttctctcacctgaaaatgtcttgctgcggtggtaactgtggttgcggaagcgcctgcaagtgcggcaacggctgcggaggctgcaagatgtacccagacttgagctacaccgagtcaaccaccaccgagaccttggtcatgggagtggcaccagttaaggctcaattcgagagtgctgaaatgggtgttcccgctgagaacgatggctgcaaatgtggagctaactgcacctgcaacccctgcacttgcaagtgaggtgttggggagctaaagcttcaagcagaaatggcccttagaaataatgataaaaactatatgtagtttcaaaacttcaaaattatgtagtaag

SEQ ID NO: 239149 - DNA, 399 bp, Glycine max
gatcctctgcaacggcaacagactaagttgtttctctctctagccctagggtttcgttctctactaccgttctttcatcagatcgctgccgtttctggcgtcattccgataattcggcggcatgaagctaacagtgaagactttgaaagggagccatttcgaaatcagggttcaaccctccgatactgttatggctgtcaagaagaatattgaagatgtacaagggaaaagataattacgcatgtggacagcaattgttgattcacaatggcaaggttttgaaagatgaaactacattagtagagaataaagtctctcaagatggctttcttgttgttatgcttagtaagagtaaaacatcacgttctgctgcagcttcatccgttcatcctgccagta

SEQ ID NO: 239150 - DNA, 286 bp, Glycine max
gaagggtttcaagttattgtgagcaaagaaagatagtgagtgaagtaactgaagagaagaaaaaatgccgtgcctcaacctcagcaccaacgtgtccctcgaaggcgtcgacacctcttccatcctcgccgaagccacctcctccgtcgccagcataatcggcaaacccgaagcctatgtgatgattgtactgaaaggatcagtacccatagcttttggtgggaatgagcagccagcagcttatggagaattggtttccattggtggtcttaaccctagtgtaaac

SEQ ID NO: 239151 - DNA, 288 bp, Glycine max
gacgctctctcactcacaaacgcacactgaattcaaaaacatcgaaagagagaggcatggccgagcaaaccttcatcatgatcaagccagatggcgttcaaagaggccttattggcgagattattagcagatttgagaggaagggtttttacttgaaagggttgaaactcgttactgtggaccgtccttttgctgagaagcactatgctgatttgtctgcaaagcctttctttagtggtttggtggattacattgtctctggccctgttgttgccaagatctgggaag

SEQ ID NO: 239152 - DNA, 219 bp, Glycine max
ggtcatagtattatcattcattctcatctttctctcttctctctccacccataccctaagtcccgaccctgttcccctctcgtatccgtcatgaatggaggaaagtccaagactgaatctaagagagccgatcccaaacttgctgtgaataagatgggagccgccatcaaggctaggaaacgcgccggcaaagggaatgcagcgaaagaccctaacaag

SEQ ID NO: 239153 - DNA, 398 bp, Glycine max
gacgcagcttcatccctaacgcgtgcatagcagagtcagagacagagacgcagccatggggcggagacctgcgatgtgttataggcaaattaagaacaagccataccccaagtcacgtttctgccgtggtgttcctgatcccaagatcaggatttatgatgttggtatgaagaagaagggtgttgatgagtttcctttctgtgtccatctggttagttgggagaaggaaaatgtttcaagtgaggccctggaagctgctcgcagtgcttgcaacaagtacatggccaaatttgctggaaaggatgccttccacttgagagtcagggtgcacccattccatgttcttaggatcaacaagatgctttcgtgtgctggtgctgataggctccaaactggaa

SEQ ID NO: 239154 - DNA, 403 bp, Glycine max
gattgttggcttgtgctctgctcgtgcctctagggttatcatatctccatttccatttcctctctctcagtttccaagaatcttaagctatgggaaagtcttacccaaccgtgagcgctgattaccagaaggccgttgagaaggcgaagaacaagctcagaggcttcatcgctgagaagagatgcgctcctctaatgctccgtttggcatggcactctgctggaacttacgacgtgagctcgaagaccggtgggcgcttcggaagcataaagcacccctccgaactcgctcacggagctaacaacggtcttgacatcgctgttaggcttttggggccactcaaagcggagtttcctattttgagctacgccgatttctaccagttggctggcgttgttgccgt

SEQ ID NO: 239155 - DNA, 434 bp, Glycine max
gtccgttcaaagcacgccgtgtttcgctgtctctcccatcctttcgcattctcaatacccttttgatttgtgaaaggaaagcaaacatggttgatcaggtccaacaccctacaatcatggacaaggttgctggtcagctccatctccgttctggtctttcatctggtattagaagttatgatggagcctaccgccacccagctatgtaccaaagaccctcttttgggaattactcgaatgctgcattgcagtttcctgtgatgcccacatgcaaagctaccatggatttgtctgctactgcaacatctgcctcacccgtctttgttgctgctccagcagagaaaggccattttcttttagactttctcatgggaggtgtttcagcagctgtctccaaaactgctgctgctcccattgaacgtgttaagcttttg

SEQ ID NO: 239156 - DNA, 130 bp, Glycine max
tgggggtgtaacgggattaggtaatgtggttacatcaagagctatggtgggaaacctcgtaagaataaacaatactaccgcccctcccataaaaatatggtgtatttcttcaataaaagttaacttatgc

SEQ ID NO: 239157 - DNA, 321 bp, Glycine max
ggaaggcatttcattagcagcgttaaagaagagagaagaaaaatgcgaaagttcgatccatggcccgttttcttcaagcgcgagtggaaacgcaactggcccttcctcgttggattcgcagtcaccggagctctaatcaccaaactttcccttggccttaccgaggaagatgctaagaattccaaattcgttaaggcgcacaaaaggtgatttctgaatcgtgacatctgcctggctttgcactttatgttaggtttgtcaagattacgttgcgtgtcgtgattttatggattgtaataacagaagagagatgctctagat

SEQ ID NO: 239158 - DNA, 303 bp, Glycine max
cggggagagaaactagtgactgacttttcgagaaaggaaaaaaaaagagtttccggcattactccatcatgaacgctcttcgcattcttctcttcttcctcttcgtttcggcattagtttatgcgaagaaaactggcgatgtgacggaattgcaaattggcgtgaagcataaaccagcatcatgtgaagttctggcacacaaaggtgacagagtcaaagtacactatcggggaaaactcactgatggaactgttttcgattctagctttgaaagaaataatccaattgaatttgagcttggta

SEQ ID NO: 239159 - DNA, 114 bp, Glycine max
ttttgcttcattgtgaacatggaggttcaggaaatcatgtggcatcatcgtcctgctcatcctccttgtctttgccttccaagtggtagtgcataatgcgggaaaagtgtgtga

SEQ ID NO: 239160 - DNA, 303 bp, Glycine max
gagcgaaacagagagtgatttcagtgaatgatcggtgttcactttattccaacaaaatcctcaacgtcaaattaagaaaatgccgatcagaaacatcgccgtcggaaagcctgaagaggcgactcaccccgacacgttgaaagcggctttggctgagttcatctcaaccttcatcttcgtgttcgccggctcaggctccggcatcgcctacaacaagctcaccgacaacggcgctgccacccctgccggcctcatctccgcctccatcgcccatgcattcgccctcttcgtcgccgtctccgt

SEQ ID NO: 239161 - DNA, 438 bp, Glycine max
  unsure (1)..(438): unsure at all n locations
ggtcttgcaggcgaagagatggccaccgttccagggcagctcgtgtgggagatcgtcaagaaaaacaattccttcttggtcaagcagtttggaaggggcacccagagcgtcgaattcagcagagagagcaacaatctctataacctcaattcgttcaagtactctggtttggcaaacaagaaaactgttactgttcagcctgagggcaaagatcaggctgtgttgttggctacaaccaagacaaagaagcaaaacaagcccgctgcattgctccacanatctgtgatgaagaaggagttcaagaggatggcaaaagctgttgaaaaccaggtggccaaaaattactacaggcctgatctcaagaaggctgcccttgcaaggttgagtgctgttcacagaagcctcaaagttgccaagtctggtgtcaagaagaggaat

SEQ ID NO: 239162 - DNA, 426 bp, Glycine max
gtcagctgcgaaaacctagtgcaccgtaagggttgtgaagcaggcagagaagagccatggtgcacgtttctttctaccgaaactatgggaaaacgttcaagaagcctcgtcgtccctacgagaaggagcgtttggacgccgagttgaagctggtcggtgagtacgggcttcgctgcaagagggagttatggagggtccagtacgccctgagccgcatccgtaacaacgccagaaacctattgacccttgatgagaagaaggctcgccgtatcttcgagggtgaagcccttctccgaagaatgttccgttacggactcctcgacgagacacagaacaagctggattatgtgttggctctcaccgtcgagaactttctcgaacgccgcctcaaaaccctcgtcttcaagtctggcatggccaagtcat

SEQ ID NO: 239163 - DNA, 418 bp, Glycine max
ggtgaacaggtgctcgctgatgccactattaagagagtgaagggagcgagtaacagaatcacgcttcaaatcatctgcattcatttttcttctctctacttcttctgcgtcatcttagggttttggtttgtgctcctctcactgattttctggagatggcttctttcgggccaaatggaactgaaaatgaggattcgttgcctcgcccacctcccgttgtaccatcagatgttgtacctgtggaggcggagccggagaagaaaaaggcttcaaggtttccaatagccaggcgtggccttgcttcaaaagggacgaagctgcaacttctcaccaatcactacagagtgaacgttgcaaacactgatgggcatttttatcagtatagtgttgctcttttttatgatgatggacgacctgt

SEQ ID NO: 239164 - DNA, 358 bp, Glycine max
ggcagcagttgagaggaggcactgtggcagaagtcctaggagtgtaaaacagagacgcacaatgaagacgatcttgtcgtctgagaccatgaatattcccgacggcgtgagcatcaaggttcacgctaaggttatcgaggttgagggccctcgtggaaaactcgtgcgagacttccaccatctgaacttggacttccaacttattaccgacgatggcggtaaaaggaagctcaagattgattcttggtttggttctcgtaaaacctccgccgccatccgcaacgccctcagccacgttgagaatttgatcaccggcgtcaccaagggatggcgatacaaagtgagattcctgtacgct

SEQ ID NO: 239165 - DNA, 407 bp, Glycine max
gacttctcttcacacctttgttcactcttcttctcttgcggctagggttttagcgcagcttcttctagatttaaggaagatgggtaaggaaaaggttcacatcagtattgtggtcattggccatgtcgactctgggaaatccactaccactggtcacctgatttacaagcttggaggcattgacaagcgtgttattgagaggtttgagaaggaagctgctgagatgaacaagaggtctttcaagtatgcctgggtgctggacaaacttaaggctgagcgtgaaagaggaatcaccattgatattgctttgtggaagtttgaaacaacaaagtattattgcacagttattgatgcgcctggacatatggatttcattaagaatatgattactgggacatcccaaactg

SEQ ID NO: 239166 - DNA, 433 bp, Glycine max
  unsure (1)..(433): unsure at all n locations
gatccatttctcgcaacaacgcttaacctctctcattccccatttcctcacctccttcaaccgctgctaaattctagggttccgaaatggacgctggcggaaagatcaagaagggcgccggaggtagaaagggcggcggcccaaagaagaagccggtttcaaggtccgtcaaagccggtctccaattccccgtcggaagaattggccgttatttgaagaaaggaaggtacgctcagcgtgtcggtaccggtgctcccgtatacttggctgcagttctcgaatacctagctgccgaggtgcttgagttggctgggaatgccgcacgtgacaacaagaagaacaggattattccaagacacgtgcttttggcagtgaggaacgatgaagagttgggaaattgcntgctggagtgacaattgcacatggtggcgtg

SEQ ID NO: 239167 - DNA, 440 bp, Glycine max
  unsure (1)..(440): unsure at all n locations
gccgcagcaagtgccattttattttgccctacctcctcgattctagggtttcaacaatggcgctgttccttccctacgaatccgcttcgggctacagcctgttcgaggttcacggcgtcgatgaaatcggccagaacaccgaagcggttcggaactccgtttcggacctcaacaggttcggcaaagtcgttaagcttcgctccttcaaccctttcacttccgctctcgatgctctcaaacagtgcaacgccgtctccgaaggcatattaactgatgagctgaggactgtcttggagaccaacttgcctaaagtgaaggaaggtaagaagtccaagttcagtttangtgtgtccgatcctaagattggttcccagatatctgaagtgactaagattccttgccaaagtaatgagtttgtgagtgaacttcttcgtggtgtg

SEQ ID NO: 239168 - DNA, 434 bp, Glycine max
  unsure (1)..(434): unsure at all n locations
gaagtcgtacacgtttaaacggagttctaaatttccggcgagttttcctctctcgaatctgcgacaccgacgaatctcgctcaccggaatttcgcattcagaaaatggctttaggtggaacagctcccccaagaggaagtgcagcggctactgcaagcatgaggagaaggagaacaaccggtggtgcggcctctggaggagcagctggaactatgctccaattttacacagatgatgcncctggactcaagatctccccaaatgttgttcttgtaatgagcattggcttcatagcatttgttgccatccttcatgtgatgggcaagctgtactttgtgcgtagggaggcttagagaatagatcaagatgttaggtccaattttttggattttcaatacacctctgttatgaaatttagatttttttgttgctgg

SEQ ID NO: 239169 - DNA, 285 bp, Glycine max
ggtgtagtataagattctcgtgcattattccttttgtaatttcattcattcttaatctttgtgaaaaataatgttcatcgagaattttaaggttgagtgtcctaatgtgaagtacaccgagactgagattcagtccgtgtacaactacgaaaccaccgaacttgttcacgagaacaggaatggcacctatcagtggattgtcaaacccaaatctgtcaaatacgaatttaaaaccaacatccatgttcctaaattagggggagtgcgtgtgggttgggggtggaa

SEQ ID NO: 239170 - DNA, 378 bp, Glycine max
  unsure (1)..(378): unsure at all n locations
ggctgtgattgaaattacccatagatagagagcgcggcataacctaaacttacccttcttctctctgtgtgtgtgcgcatcaaacgcaaccagaagcagccatggccactgcaagaactgtgaaggacgtttctcctcatgagttcgtcagagcttactcttctcacctcaagcgatctggcaagatggagctgccagagtggactgatattgtgaaaactgcaagatttaaggagttggctccttatgatcctgactggtactatgtcagagctgcttccatggcaagaaagatctacttgagaggangacctggtgttggtgcctttcagaggatttatgggtggagcaagaggaatggtagccgccctcctcatt

SEQ ID NO: 239171 - DNA, 305 bp, Glycine max
cgggaaagagaagcattagcacaagcaagaagaactaatcgaagcacaaatggcctcttcagtgatggcatctgtggccctcaaacctgctcctttcactgttgagaagtcctcagttagaggccttccctccctctcaaggaactcctcttcattcagagttgtggccagtggtggcaagaagatcaagactgacaagccttatggaattaatggtggcatggctttgagggaaggatttgatgcatctggcaggaaaggaaaaggtaagggcgtttaacagtttgtagacaaatacggtgcta

SEQ ID NO: 239172 - DNA, 411 bp, Glycine max
gatccacacctctctctctctcagaatttctatctatctcttgtttcaatttcaacaacggttactcctttttcgttttgagtttcaatcaagccatcatcatgtctaccgcatcgcaacccaaggccaagaaaacggcgtcgtccaagaagcccctctcgcagggtctcttcgccgtgatgatagcagatgcgattgcgagtctgaaagagagaaccggttcgagccaatacgcgataagcaggtggatcgaagggaagcacaaggagttgcctgcatcctacaggaagcttgtcctcgttcatctcaagaaatctgttgctgctggcaagcttgttaaggtgaaaaactcctttaagctcgcaccgactaagcctgctccggttaaggccgctgctcccagaaagccaa

SEQ ID NO: 239173 - DNA, 357 bp, Glycine max
gctctgaatggaacagttacagtcagaccccttccaattggatcatcagtcagtggaaaggtagagaagcaatgtgctcatttcattggtgtgacaataaatgagcagcaagctgagtcaggcattgtagtaagagttacttcaactgcacaaagcagattaagttgctcgactttgaacaggatgccaatggaggctatggtttggcattgcatgaagacagtgataagactggcaaggtgacatctgcaggaatgtatttcttacatttccaattgtaaaaaagggatcaaccggtaaaggcttaaccaatggcaaaggatccggaaggggccttttttaaaaaattggaaggtc

SEQ ID NO: 239174 - DNA, 359 bp, Glycine max
ggtagcgcagagaaagaactagaactagaactagggtttcatctttgccatcagaaacaacaatgatttacgacgttaactctccccttttccgatccttcctcagccagaagggaggctcctccgataagaggaaaacggatgaacagaagccaaaagagcagaaacccaaagccagcgagaacaaacctataatgacagagtgacaacaaatttgctgcattcagttgtagaatgataatacgtggtagatattggcatttggttctacacaattaagatcattttggctgtgttctgacgtatatgtggtgttttaagacttgttagtgtaatgggttgattttggatatggttat

SEQ ID NO: 239175 - DNA, 429 bp, Glycine max
gggttttgattagggtttgtcattagcacttcttcttttcacactgccgctgcaacaatggcttcagagaagaaactttcgaacccaatgagggagataaaagtgcagaagctcgttctcaatatctctgttggcgagagtggagatcgtctcaccagagccgccaaggttcacttcactcattgctcccgctttttttttttttttaatttttaatttctgtttttcttcttgcaggtgttggaacaacttagtggccaaaccccagtgttttccaaagcaaggtacactgttcgttcctttgggattagaagaaatgagaagattgcatgctatgtcactgtcagaggtgacaaggcaatgcaacttttggagagtggtttgaaggttaaggaatatgaacttctcagaaggaatttcagtgatacg

SEQ ID NO: 239176 - DNA, 308 bp, Glycine max
  unsure (1)..(308): unsure at all n locations
gaagcactacaattcgctcagaggagagaganagtgttggtgtgttttttagagagagagagaaagaaaagactgtgtgagtgtagtgtgtgtcgttctcccatggtctctatgccgttgcggccgcagcaactgcttcaaaccgccgcgccgctagtggagaatgacgcgatgaaagtggactctcgcggcggctccgacgccagcgccgaaaaggaaaatgtcagctcctgtcgcaaatggtaatgatgccctcactggtcacataatctcaaacacaattggaggcaaaaatggtgaacctaaac

SEQ ID NO: 239177 - DNA, 260 bp, Glycine max
gtgaatgctacagatgttaaaacatcacagaatgcgccagtttcccgaacgagttgatggtttagtatgcatttctcaagcaacgtgtcttcagttctaaaccagcatatggaataccagagtgaatggtatcaaataaattctaacgatcttttagctactactgagtttgaactaatgactccctccgtactataccagtactctaaccactgaattacgtaggtcatttatcaacacccccccccataagaaaaccc

SEQ ID NO: 239178 - DNA, 185 bp, Glycine max
gactccctacgacaaacaacaacaacttctttttactttcatattctctcctctttcattaacgatctctacgaagttctttcactcaaacacacccttaatacacccttaattatatcgcattcgccttctcgtaccgttagaattagattgcacttattcctctctctccctctttttctgga

SEQ ID NO: 239179 - DNA, 402 bp, Glycine max
gacctgatgcagatgcagcctatcatggcagcctactaccccaacaacgtcaccactgatcacattcaacagtacctggatgagaacaagtccttgatcctgaagattgttgaaagccagaattctggcaagctgagcgagtgtgcagagaaccaatcaaggctgcagagaaatctcatgtacctagctgcaatagctgattctcaaccccaaccatctccaatgcctggtcagtatccttctagtggacgtatgcagcagggagcacactacatgcaggctcagcaggctcagcagatgtcacaacaacagctaatggcttcgcgctcctcactcttgtactcgcaacagcctttctcagtgcttcaacagcagcaaggcatgcacagccaacttggcatg

SEQ ID NO: 239180 - DNA, 424 bp, Glycine max
ggagtttgagtgaaaccctagctagccacaatgcagatattcgtgaaaaccctaacggggaagacgataaccctagaggtagagtcttcggacacgatcgacaatgtgaaggcgaagatccaggacaaggagggcatcccgccggatcagcagcgcctgatcttcgccggaaagcagctggaggacgggcgcacccttgccgactacaacatccagaaggagtccaccctccacctcgtcctccgcctccgccgcggcgccaaaaaccgcaggaagaagacctacaccaagcccaagaagatcaagcacaagcacaagaaggtcaagctcgccctcctccagttctacaaggtcgacgactccggcaagctccagaggctccgcaaggagtgccccaatgccgaatgtggcgccgggaccttca

SEQ ID NO: 239181 - DNA, 304 bp, Glycine max
ggagagtcagattcgcacgcattgcttcgcctcacaacagcagctgcagcagcaatggctcccaaacgaggtggaaaggctccggctcttgccgctaagaagaagcctgagaaggtcacgaatccgttgttcgagaagcgtccgaagcagttcggaatcggaggggcgttgcctccgaagagagacttgactaggttcgtgaagtggccaaagaatgttcaaattcagaggaagaagaggattctgaagcagaggttgaaggttcccccagctttgaaccagtttaccaaaactcttgacaaaa

SEQ ID NO: 239182 - DNA, 292 bp, Glycine max
gaacaattcaaaggaaaatcctccctaacaaaagccttccaaaaacgaaaaaaaaaggaagagcaattttcccccaccaaagaagaagaagcaaacaagggccgataaacttaccgatgaaaagatctccgagttcaaggaagccttcagcttgttcgacaaagacggcgatggtttgttctcgctctctctctctcaagttttgtgtatttgatttgatttgatttatgcgtttgtgggttttgtagatcggtgttccgtgtcgtgatagtggattaggaaaattagatga

SEQ ID NO: 239183 - DNA, 346 bp, Glycine max
gacttcacacactctcctcactcgctcgacctagttagaactgtgctagggttttacgaaaccaccgaagttgcagaaagaagaagaaaaatggtggctgacaggagcaagaagccgaaggtctccgacaagggcgaaaacctcgatgaaatcgacggagaactcgtcctctccatcgagaagttgcaggagatccaagacgagcttgaaaagatcaacgaggaagccagtgacaaagttctggaaatagagcagaagtacaatgagatacggaagcccgtttatgataagcgcaatgatattatcaatgccattcctgatttccggttaactgcttttttgagtc

SEQ ID NO: 239184 - DNA, 415 bp, Glycine max
gaagtcaccacaacacgaagttcattgcacagtgttagtttgagtagcagcatcaatggctccaattgcagtgggaaacgtgattccaggcggcagtttggcttacttggatgaacaagacaaacctcaaaccgtctccattcactctctcgccaccggtaagatagtcatcatctttggggttcccggtgccttcactcatacttgcagcttgaagcacgttcctggcttcattgacagagcagtagagctgaatgggaagggtgtggacggcataatctgtatcagtgtgcatgatccatttgtgatgaactcatgggccaacacattcgcagagaacaagcatgttaagttccttgctgatggtgcatccaaatacaccaatgcccttggtcatgagcttgacctcactgac

SEQ ID NO: 239185 - DNA, 396 bp, Glycine max
ggagatagagttatcgatccctttggggagataagaaaatgtggcttgtgcagctctcaaccccatttctgaacggccatggccatggctccagccttctctggaaacccagttcggcggtgactcagacccactgggccccgccgagtttgctgcctcaaatcaatgcgatgaagacgatgcagggaaaagtggtgtgctccacgaacgacaagactgtggcagtggacgtggtgcggctggcccctcacccacagtacaagaggcgcgtgaggaagaagaagaagtaccaggcccacgatcccgataaccaattcaatgtcggcgacatcgtccagctccagaagaccaggcccatcagcaagaccaaggcctttctcgcactccccgttccca

SEQ ID NO: 239186 - DNA, 299 bp, Glycine max
gagtttggtataactttagccgaggtcaagaggagcactagctaagttcacaatttcaaaatggctatgggactaaagaagcatttgaaaaggctcaatgctcccaagcattggatgcttgacaaactgggtggtgcatttgcgcctaaaccctcatctggaccacacaaatcgagggagtgcctccccctcattcttagtctgcgaaaccggctgaagtatgctctgacataccgtgaagtcattgctattctgatgcagcgccatgttcctgttgatggcaaagtcaaggactgaca

SEQ ID NO: 239187 - DNA, 204 bp, Glycine max
gagggcgaggaagccacatacagacacaatacagagtgagttgttgctccttcgccacaactctctgccaacatgggtatctccagagattctatgcacaagaggcgtgccactggtggcaagaagaaggcctggaggaaaaagagaaagtatgagcttggtcgccagcctgctaacactaagctgtcaagcaacaagacagtc

SEQ ID NO: 239188 - DNA, 335 bp, Glycine max
ggcacaagtttgttgagatagctagaagcaataagatgaaaatgaaagtgcttgttttgtttgttgctacagttttggtagcatatgaatgccatggctcagactaccagaagttccctctccaaatgaaaactgggtttggtgggcaatacagcaatgaggtggcatgtgccagttggaggcttggcgtggaagcaaacaacgtagtcaagtggcaaactgttcctgcagcttgcggagagtacatagctgactacgttctaggagaccaatatagatcagattccaaaacagttaagcaacaagcttatttctatgctaaatccctcaaactc

SEQ ID NO: 239189 - DNA, 347 bp, Glycine max
  unsure (1)..(347): unsure at all n locations
ggggttattggacacattcttcagcgactgcgtttttggatcggaacctcttctgcggcgtagcaatgggacactccaacgtttggaactctcacccaaaaaactacggtcctggttctcgcacttgccgtgtgtgtgggaatccacatggactgatcaggaagtatggccttatgtgctgcaggcagtgcttccgtagcaatgccaaggaaattggcttcatcaagtatcgctaaaagagcagttgtcaactacggaccaatattgtgttctggcactangatgttttgaggatgttatgtttgaagaaacttgagactttcttttttcatctaattaattatcag

SEQ ID NO: 239190 - DNA, 395 bp, Glycine max
gacttttctcagctgctgttcctgcgcgtgaacaagcctcaggtaagccaaagccatggttaagcataacaatgttatccccaacggacacttccgtaagcactggcagaactatgtgaagacctggttcaatcagccagcacggaagacaagaagacggttggctcgtcagaagaaagctgtgaagattttccccagacctacagctggacctcttagacccattgtacatggtcaaactttgaaatacaacatgaaagtgagagctggaaggggattttcccttgaagaactcaaggcagcagggattcccaaaaagcttgcaccaacaattggtattgctgttgatcatcgccgcaagaaccgttctttggaaagtctgcaagctaatgtgc

SEQ ID NO: 239191 - DNA, 323 bp, Glycine max
ggcctgcaagtgtgagtgatatttgagcttaaaccctagccgctcttctcttcattcttcactttggaaacaatcataatggcgttctgtaataaggttggaaatgtcttgaggcagggtgctgctcgcagcacacatgcccctgttgcgtccatgcttaattacatccgctgcatgtcttcaagcaagcttttcattggaggcctttcatatggagttgatgaccagtctcttaaggatgcattttctggctttggagatgtggttgatgcaaaagttataactgatagagacagtggaagatcaaagggatttggatttgt

SEQ ID NO: 239192 - DNA, 366 bp, Glycine max
  unsure (1)..(366): unsure at all n locations
aagccaaatggaagattcttcagctataatccagcaacaaagaagacaaccctgcttgcccaagacctctactttgccaatggggttgcagtttcagcagatcaacaatttgtggtcttctgtgaatctgtcttgatgagatgcaataaatatttcgtcctgggccctaaaacaggaaccatagagaagttctgtgacctgcctggcatgcctgataacattcattatgatggacaagggcactatttgattgcaatgttcacggccctttctcccgaattggaattggcatatagataccctttcattangaaggcttttgcaatgtttacaaagtatgtanggagtctatctatctcgaagaat

SEQ ID NO: 239193 - DNA, 373 bp, Glycine max
gattctcacctttccatgcatatagcttagctagctccttcacctccttagtttcgaaagcatggcttccctggcggcttccaccgcggctatgtcagaaatccttggaaaccccgttaacctcagatgcgcaaccaggtctgctccatcaccaactacacctgccaccttcaagaccgtcgcacttttctccaagaagaagccagctccacctccaaagaaaaagcctgccgctgtatcccccgccaatgaggaactcgccaagtggtatggtcctgacagaaggatcttcttgcctgagggtctcttggaccgatctgagatccccgagtacttgaccggagaagtggctggagattatggttatgatccg

SEQ ID NO: 239194 - DNA, 346 bp, Glycine max
gacttgagacacaaactcacacactttgtactctccgtccttccttcttcgatccagatctctctccttctccctcaaatggcttcccttctgcaatgttccatgcccctcgtctctctttccaatcgagctctggtacccggtaccaggatctccaacccaagttcagtttccctttcaattaagggaagaagtttcccatccgttacattgcagcccagagggcgtcggtttcagcttagatgtgcggcaaaaccagagacagtgaagaacgtgtgtgacatagtcaagaagcaattggcactgccagatgaatcagctgttactggagagtctaaatttgctg

SEQ ID NO: 239195 - DNA, 375 bp, Glycine max
gacaacacaacgcaacacaacgcgcactctctcttttctctcttaacacaaaaaccctatcgttcttcgcggtttcgccgattctcgccatgccgaaagccaaatccgacgccaaagccgccgatagccggttgaagcgcaagggcgctggtgctggaaggaagcaatcgaagaaagctgctaaggatcctaacaagccaaagagacctccaagcgctttcttcgttttcatgtccgagttcagagagcagtttaagaaggagcattctaacaacaaatccgtcgttgttgtcggtaaagctggtggtgacaaatggaaatcgctgtctgatgctgaaaagggccccttcgttgccacggccgaaaagaagaaac

SEQ ID NO: 239196 - DNA, 400 bp, Glycine max
agagtccggaaaccctaacaacacaggcgcagacgcaaacgcaaacgcaaacgcaaacgcaaacgcagagcgtgatccattgacgaagatggtgcagcgtctcacctaacgcaagcggcacagctatgccaccaagtccaaccaacacagggtcgtcaaaacccctggtgggaagctcgtttatcagacgaccaagaagagggccagcggacccaagtgccccgtcactggcaagaggattcacgcgattccacacttgaggcctgcagagtacaagaggtcaaggttacccagaacacgtaggactgtcaaccgtgcatatggtggagttttatctggaagtgccgtcacggagacgattatccgagccgtcttagttgaagagcaaaagattgtgaag

SEQ ID NO: 239197 - DNA, 393 bp, Glycine max
ggggaaaatttgtcaaataaattcatctaaccccaaacaaaaccctagcacacttttatcgcttagtggcagcagcagtggcggcaagcaactccatccgcaatgggaatcgatttgaaggcaggaggtaagtccaagaagaccaagcgaaccgcccccaaatccgatgatatctacctcaagcttctcgtcaagctgtaccgttttcttgttcggaggactgggagtaacttcaatgctgttgtcctcaagcgccttttcatgagcaaggtcaacaagcgcccgctatccctctctagattgatccgttacacgaagggaaaggaggataagatagctgtggttgttggtgccgtgaccgatgacattaaggtttatgaagtccctgctctg

SEQ ID NO: 239198 - DNA, 395 bp, Glycine max
gcgaacttctcacgttcatttctacacatccctagctctgtcgttccgtcgttgacgatggcgtttcgggtgcgaagccctgacctccgctctctctttcttctctctctcttgtccatcgcttccgccaatgtcttcttcgaagagcgtttcgatgacgggtgggaaaatcgatgggttaaatcagattggaaaaaagatgagaacgtggctggggagtggaaccacacctctggtcaatggaatggagacgctaatgacaaaggtattcaaaccagtgaggattacagattctatgctatttcagctgagtaccctgaattcagcaacaagggtaagacactagtctttcaattttctgttaagcacgaacagaagcttgactgtggtggtgg

SEQ ID NO: 239199 - DNA, 403 bp, Glycine max
ggttgacaaaggaaacgtgtagtacgagggccaatttccaaaaaccttttgtctcgcaacctcacctcttcctccttcaatctctttcggaatttcccaaaatccttagtgggaggaagagatggttctgactcagaagattcacgaagctttcaaaggcaccgtcgagaggatcactggcccccgaaccgtttccgccttcaaagaaaaaggagttctcagtgtctccgagttcgtcaccgccggcgataatctcgttgccaaatgccccacctggtcctgggaatcgggtgatccaggcaagaggaagccatacttgccacctgagaaacagttcttgattactagaaatgtgccttgtcttcggagagctgcatctgttgaagaagaatatgaagctgct

SEQ ID NO: 239200 - DNA, 373 bp, Glycine max
gaatgcaaacccacccaccattttgtgcttctttctgtgtgcaagaaaggtaaaagctttcacacaccaagaaaagtagccatggctgcttgctcaagaacttctcttttgctccttttctttctctttggattctccgcagctaaggaactattggttggaggcaaaatagatgcttggaagattccatcttctgaatcagattccctcaatcaatgggctgaaaggtctcgtttcagagtcggcgatcatcttgtgtggaaatatgagaatgggaaggactcagtgttggaagtaacaagggaagattatgccaattgcagcacatccaagcccatcaaagagtacaatgatggaaacacaaaggtgaagc

SEQ ID NO: 239201 - DNA, 386 bp, Glycine max
gttcccaattcatcgttgtctccgccttcttttatctctctctccactcccatatcgaaacaaagtcgttttgagttccgccgaaggcaccgtacgttgcagcagctatggatttggcatccaatctcggtggcaagattgacaaagccgaagttctctctgccgttcagaagtatgagaagtatcatgtttgctatggaggtcaagaggaagagagaaaagctaattataccgatatggttaataaatactatgatcttgttaccagcttttatgagtttggctggggggaatctttccattttgcacccagatggaaaggagaatctcttcgagagagcatcagaagacatgaacacttccttgcttcacaacgtggactgaag

SEQ ID NO: 239202 - DNA, 377 bp, Glycine max
  unsure (1)..(377): unsure at all n locations
aggcgtcagacagctgcaaaaagagtacagaatgggactcagaacttcaatccctctattgctttatcaaattccattttccaattcaaaagcctaaatccgttcgaagcaccaaatcgtgatggaacaataggcagataagaagccagtatagatgaaaccagtggaagagaagaaatccacggtgggatacaaagctccggcagataacaagtcagctgccggagacaagcttccgagagaaggacgcgcctgccgagaatgtatgaagaagaagagagataatatgagcatcgagacatactatatctacatcggaaacgttcagaatcacgttcaccctgacattggtatctcatgcanagacatgggaatca

SEQ ID NO: 239203 - DNA, 383 bp, Glycine max
ggaacctgatcgatctctttaccagttgccacactacaccgagattccccctaaacccgtttgcgttgttgtttgcgaagaaatggcgactaagaggagcgtgggaacgttgaaggagggtgatttgaaagggaagagggtgttcgtgagggtcgatctgaacgtgcctttggatgacaaccttaacatcaccgatgacactagagtccgtgctgctgttcccaccatcaagtacttaactggtcatggagccaaagtgatcctttctagccacttgggacgtcctaaaggtgtaacacctaaatacagtttgaagcctcttgtgccaaggctgtctcaacttctcggaattgaggttacgatggcaaatgactctattgggg

SEQ ID NO: 239204 - DNA, 376 bp, Glycine max
  unsure (1)..(376): unsure at all n locations
gtccgccatttttcgtagctgctgttcttgcgcgtgaacaagcctcaggtaagccaaaaccatggttaagcataacaatgttatcccaaacggacacttccgtaagcactggcagaactatgtgaagacttggttcaatcagccagcacggaagacaaggagacgattggctcgtcagaagaaagctgtgaagatattccccagacctacggctggacctctcaggcccattgtacatggtcaaactttgaaatacaacatgaaagtgagaggtggaaggggattttctcttgaagaactcaaggcagcanggattcccaaaaagcttgcaccaaccataggtattgctgttgatcatcgtcccaagaaccgttct

SEQ ID NO: 239205 - DNA, 482 bp, Glycine max
gaatacgttgcctgccagtaccagtccagaattcgcgggtcgacccacgcgtccgcggctgcgagaagacgacagaagggtacggctgcgagaagacgacagaagggcgtgagcgtaatggtataagcctgcctgactgtgagaccgactggtcgaacagagacgaaagtcggccatagtgatccgggagtcccgtgtggaagggctctcgctcaacggatcaaaggtacgccggggataacaggctgatgactcccaagagctcttatcgacggagtcgtttggcacctcgatgtcgactcatcacatcctggggttgaagaaggtcccaagggttcggttgttcgccgattcaagtggtacgtgagttgggtttagaacgtcgtgagacagttcggttcctatctaccgttggtgttaaagggagaactgcgaagagccaaccctagtacgagatgactgggttgggccaacctatggtg

SEQ ID NO: 239206 - DNA, 393 bp, Glycine max
gacagcacagcactctttgcaacacaacaaaaaaagacaacacagagagaagcgtcttaataaacgctcttctctgaaaaacctgatttcttctcttcttctcttctctttcgtttcgatcttcgatctctgaaaatgagagagtgcatttcaatccacatcggtcaggccggtattcaggtcggaaacgcctgctgggagctctactgcctcgaacacggcattcagcctgatgggcagatgccaagtgataagactgttggtggaggtgatgatgctttcaacaccttcttcagtgaaactggggctggaaagcacgtgcctcgtgcgatttttgtagatctcgagcctactgtgattgatgaagttaggactgggacataccggcaacta

SEQ ID NO: 239207 - DNA, 371 bp, Glycine max
tggtaccgctgccaaaaaaacacagaaggggaactcaaccaattgccgtaaaaaagacaatcaaatttcaccttcagcctaaccggttttaggtttcagtttttgaaccaacccttgacgtaacaaaacctaagtttcggatcaagtctgaccaatctggttggtagaacctttggacttacagagtcaagttttatgtctgaattagacgataaattcctactgccttcgatacttttgctgatgcaaatgctgatgactcgggtgctgggtcaaaggagtatgtgcacattcgcgtacagcagcgaaatggaacgaaaatcctgacaaccgttcaaggattgacaaaagaattcagctataacaagata

SEQ ID NO: 239208 - DNA, 391 bp, Glycine max; identical to SEQ ID NO: 239045

SEQ ID NO: 239209 - DNA, 389 bp, Glycine max
  unsure (1)..(389): unsure at all n locations
gaagcctcagtctcaacacagaagcagaaggaggagaagcagaaagaggagacgaagcaatggcgccgaagaagccccgaaccacgtcgaggaaccctgatttggtcaggggaattggcaaatattcgaggtcgcagatgtaccacaagaggggcatctgggccatcaaggccaaaaacggcggtgttttgcccctccacgatcccaagcccaaacccgaggccccggcccagaagccgcccaagttctacccggccgatgacgtgaagaagcccctcgtcaacaagcacaagcccaagcccgcgaaactcagggctagcattactccagggactgttctgatcctgcttgctgggaggttcaagggaaaganggttgttttcttgaag

SEQ ID NO: 239210 - DNA, 380 bp, Glycine max
atgacagtgagtgagagaaagagatcatatatcagaatggcttccactcaatgtttcttgcaccaccatgctcttaccacccctgccagatccccatcagaccgcatcatggttagcaccaatcctaaccagcttgtttgcaaagcacagaagcacgaggatattgatgtcagcccaatctctcgccggttagctctaactgtgctcattggtgctgctgctgttagctccaaagtccaacctgctgatgcagcttatggggaagctgccactgtgtttggaaagccaaacacagacacagatttcctgccatgacaaggatatcgattcaaactattgattccctcaaagtggaacccaagcaaagacgtttagtacac

SEQ ID NO: 239211 - DNA, 395 bp, Glycine max
gatcatggcatctgctagggttttcggagcgatcgccgggagagcgttcatggccgcggcgtcgaagagttcggccaagaagaaacccgttccgtccggcggagccgctgcaaaagccgccgtgaaaaagccggccgcgcctaggaccaccaactccggcatacagaaggtggttccggtgtcttccgagctcggagacttcctcggcgctcctcaagtgtcgcgaaccgacgccgtcaagaaagtctgggcctacatcaagctgcagaatcttcagaatccagcaaataagaaggagatcttttgtgatgaaaagctgaagaccatttttgaggggaaagataaggttgggttcacagagattgctaaattgctgtctagccattttgtgaaat

SEQ ID NO: 239212 - DNA, 383 bp, Glycine max
gacaacttcaatccctcttttgctttaccaaattccattttccaattcaaaaccctaactccgttcgaagcaccaaatcgtgatggcaccaaaggcagagaagaagccagcagagaagaagcctgtggaggagaagaaatcgacggtgggagacaaggctccggcggagaagaagccaaaggccggaaagaagcttccgaaggagggaggcgccggcggagaaggtaagaagaagaagagaaacaagaagagcgtggagacatacaagatctacatcttcaaggttctgaagcaggttcaccctgacattggtatctcaagcaaggccatgggaatcatgaacagcttcatcaacgacatcttcgagaagcttgcccaggaat

SEQ ID NO: 239213 - DNA, 399 bp, Glycine max
ggcctctgacccaggtatggcttcgagacgcatcctgaaggagctcaaggatttgcagaaggatcctcctacgtcatgcagcgcaggtcctgtggctgaagacatgtttcactggcaagccacaatcatgggacctgctgatagcccatatgcaggtggtgttttcttagtttcaattcattttcctcctgactatcccttcaagccaccaaaggttgcttttcggactaaggtgttccacccaaacatcaacagcaatggcagtatatgtcttgacattctcaaggaacaatggagcccagctctaaccatttccaaggtccttttgtcaatttgctcattgttgacggatcccaaccctgatgaatcacttgtacctgagattgcacacatgtacaa

SEQ ID NO: 239214 - DNA, 369 bp, Glycine max
aaagagacccggaaagggtgggaaccgcttttggaaatccattgggcttggatttaagactcccagggaagccatcgaaggaacctacattgacaagaagtgccccttcactggcaatgtttccatccgtggccgtatcttggctggaacatgacacagtgctaagatgaacaggactattattgttaggaggaattatctccattttatcaagaagtaccagaggtacgagaaaaggcactccaacattcctgctcatatatcacctgctttccgtgtgaaggaaggagatcacgttattattggtcaatgcaggccactttctaagactgtgaggttcaatgtgttgaaagtgatcccagctggatc

SEQ ID NO: 239215 - DNA, 397 bp, Glycine max
tattttagggaggaatttatttcattgctacaaatatggattatttaaaagaataagacatgtatttggatatttcccttcaacttaacaaaaattgaatttttttccatacacgcacgaatagttgaagggaactctccgaagaaaaaatggattatgggagtaacaaaaaaacctgacttgaatgatcctgtattaagagctaaattggctaagggaatgggtcataattattatggagaacctacatggcccaacgatcttttatatatttttccagtagtaattctaggtactattgcctgtaacgtaggcttagcggttctagaaccatccatgattggggaacccgcggatccatttgcaactcctttggaaatattacccgaatggtatt

SEQ ID NO: 239216 - DNA, 374 bp, Glycine max
ttttcatcaaagggtaagccaccaagatcttttgttactaccatctccagttctggattgtttgtgagccaaaagcttgggaaatcaaatgctccgcggtctcaacatcaacccaaatgtgtaaagcctttgcaaactgttccagatgatgactctcctgtcacctgcatcaaaacttcttctcccaacggcaagaggatctcctctcctaattgtgacgtgggatcatcacctactactcgcagaggtgggaggaagttgatattacaatctatctcttcatttccttctctcaaccctcaccattagaatgaagatcttcatcttcggcttaagttagcctacccccaaccctcttcccttggttcacgttt

SEQ ID NO: 239217 - DNA, 392 bp, Glycine max
gatgtcatagtattatcattcattctcatctttctctcttctctctccacccaaaccctaactcccgaccctgttcccctctcgtatccgtcatgaaaggaggaaagtccaagaccgaatctaagagagccgatcccaaacttgctgtgaataagaagggagccgccaccaaggctaggaaacccgccggcaaggggaaggcagcgaaagatcctaacaagccaaagaggcctccaagtgctttcttcgttttcatggaggagttcaggaaggtattcaacaaagaacatcctgaaaacaaagcagtgtctgctgtgggcaaagctgctggagcaaaatggaagaccatgtctgatgctgacaaagcaccttatgtggcaaagtctgagaaa

SEQ ID NO: 239218 - DNA, 384 bp, Glycine max
  unsure (1)..(384): unsure at all n locations
gatgccgaaaagtagtaccaagatggcttcagttgtgtatctcctctttggcttccatctcattgttatcatgtcaagttccttacccgcaactagtgaagtgtttgcaaaacagtatccatccacagaacccgtggaagaaaaactcacccaactccacttctatttccataacaacataacgggggaacacccaactgctatgaaaactgttttgcctcctaaggggtccattcatggttttggggctacttacatgatggatgaccctctaactgaaggaccaagtccaacttcaaagcttgtgggaagatctcaaggaatatacgctttggcttcacaacatgagcctgngttgctcatggtgacaaattttctcttcac

SEQ ID NO: 239219 - DNA, 249 bp, Glycine max
gagtctaaggttacgccgtcgtcgctgtttgtgtgtgtatcaagtgcaactaccaacgatggtgaaaggtcctcaaagagaacgcgtcagactctacgtgaggggtacaatccttggatacaaaaagtccaaatccaaccaatacccaaacacatccctgattcaaattgaaggagtgaacaccaaagaagaagtaagatggtatgcttgcaaaaaaattggctaaatctacaaagctaaagtgaaaaa

SEQ ID NO: 239220 - DNA, 391 bp, Glycine max
gatacctaaaaattgtaccgatatggcttcacttgtgtgtctccttttttccttgcatttcatggttatcatgtcaggttccttaccagcaaatagtgaagtgtttacaaaagagtctcctatgtctctatccacaaaacccgtggaaagactcacccaactccacttttatttccataacaacaaaatgggggaacacccgactgctatgaaaattgttgagcctcctaaggcgtccatttctggttttgggactatttacatgatggatgaccctctaaccgaaggaccaagtccaacttcaaagcttgttggaagatgtcagggaatatatgctgaggcttcgcaacatgaacctgcgatactcatggtaacgaatttgttcttcact

SEQ ID NO: 239221 - DNA, 372 bp, Glycine max
gacagcgaaacaaagagtgatttcaatgaatgattgggggtcacttgatctcaacaaaatcctcaaggtcaattgaagaagatgccgattagaaacatcgccgtccggaagctgaagaaggactcacccgacacgttgaaagcggctttggctgagttcaacccaaacttcatcttcgtgctcgccggctcaagctccggcatcgcctacaacaagctcaccgacaacggcgctgccacccctgccggcctcatctccgcctccatcgcccatgcattcgccctcttcgtcgccgtctccgtcggcgccaacatctccggcggccacgtcaaccccgccgtcaccttcggcgccttcgtcggcggcaacatc

SEQ ID NO: 239222 - DNA, 398 bp, Glycine max
ggaatcacagtggtgccttatcgctgtggttatcatcttcttcttcctctttcttagatctcttctttctctacgccgcacgccgaaaccatggccggaaaaggagagggtcctgctatcggaatcgatctcggaaccacctactcttgcgtcggtgtgtggcaacatgaccgcgttgaaatcatcgccaacgaccaagggaacagaaccacgccgtcttacgtcggattcactgacaccgagcgtctcatcggtgatgcggccaagaatcaagtcgccatgaaccccatcaacaacgtcttcgatgccaagaggttgattggtcgtagattcagtgattcctctgttcagagtgatatcaaatttgtggctttcaaagtcgttcctggtgctgctga

SEQ ID NO: 239223 - DNA, 381 bp, Glycine max
  unsure (1)..(381): unsure at all n locations
ggtacgcagcttcatccctaacgcgtgcatagcagagtcagagacagagacgcagccatggggcggagacctgcgaggtgttataggcaaattaagaacaagccataccccaagtcacgtttctgccgtggtgttcctgatcccaagatcaggatttatgatgttggtatgaagaagaagggtgttgatgagtttcctttctgtgtccatctggttagttgggagaaggaaaatgtttcaagtgaggccctggaagctgctcgcattgcttgcaacaagtacatggccaaatttgctggaaaggatgctttccacttgagagtcanggtgcacccattccatgttcttaggatcaacangatgctttcgtgtgctggtgct

SEQ ID NO: 239224 - DNA, 385 bp, Glycine max
  unsure (1)..(385): unsure at all n locations
gagggtttttgtcgtcgctactaagagttgctgcttcttcagccactccgcacctcgcagcctctgtgccctcaacaaccatggctgaaatcgaaactaccgttccagatcccacccaaatcgacgtcaaactcttcaatcgctggagcttcgaggatgttgaggttaatgatatgtctctggctgattacattggagtgtccccatcaaagcatgctacatatgttcctcacactgctggtaggtactcagtgaagaggttcaggaaagcgcagtgcccattgttgagaggctcancaactctctgatgatgcacgggaggaacaatggaaagaagctcatggctgtcaggattatcaagcatgccatggagatcatccacttg

SEQ ID NO: 239225 - DNA, 391 bp, Glycine max
gatagatagagagcgcggcataacctaaacttacccttcttctctctgtgtgtgtgcgcatcaaacgcaaccagaagcagccatggccactgcaagaactgtgaaggacgtttctcctcatgagttcgtcaaagcttactctcctcacctcaagcgatctggcaagatggagctgccagagtggactgatattgtgaaaactgcaagatttaaggagttggctccttatgatcctgactggtactatgtcagagctgcttccatggcaagaaagatctacttgagaggaggacttggtgttggtgcctttcagaggatttatggtgggagcaagaggaatggtagccgccctcctcattttctgcagagcagtggtgctgttgctcgtcac

SEQ ID NO: 239226 - DNA, 394 bp, Glycine max
ggtttttgtttcccatagcatagaagaagcagaaagagaagcattagcaaaagcaagaagaactagtctaagcagaaatggcctcttcagtgatggcatctgtggccctcaaacctgcccctttcactgttgagaagtcctcagttagaggccttccctccctctcaaggaactcctcttcattcagagttgtggccagtggtggcaagaagatcaagactgacaagccttatggaattaatggtggcatggctttgagggaaggagttgatgcatctggcaggaaaggaaagggaaagggcgtttaccagtttgtagacaaatacggtgctaatgtcgatggttacagtcctatctacgacaccaaggactggtctccaaccggtgatgtcta

SEQ ID NO: 239227 - DNA, 386 bp, Glycine max
  unsure (1)..(386): unsure at all n locations
ggccgaatgtgtctctccgcagcagccacacttcttcgccgtttcagctgaagagccatccgcaggtaagcaatggttaagcataataatgttatccccaatgggcacttccggaaacactggcaaaactatgtgaagacttggtttaatcaaccagcccgaaagaccagaagacggttggctcggcagaagaaggctgtcaagattttccccaggcctactgctggatctctcaggcctattgttcatggccagactctgaaatacaacatgaaagtcagagccgggagaggattttcactggaagaattgaaggctgcangaattcccaagaaacttgctccaactattgggatttctgttgatcaccgcagaaagaatcgttc

SEQ ID NO: 239228 - DNA, 354 bp, Glycine max
tgggacatcacatttcgttgcgcctttgatctctgtccccgctgcgtctctcgtaatcaagcctaagcaaatccacgagattaaggatttccttctcactggcaaaacgaaggatgcgaggtcagtgaagatcaagaggagcagagatgtggttaagttcaaggtcagatgctccaagtacctctacacactttgtgtgtttgacccagagaaagctgataaattgaagcaatctcttcctccaggtttgagtgttcaagacctgtaaaggtactgggcgagagatcacgaggaagcaatccattgattcttctgaagtttgattctctgtcagtgaagcttgagatttttgtc

SEQ ID NO: 239229 - DNA, 385 bp, Glycine max
  unsure (1)..(385): unsure at all n locations
ggtgtagttccaccgagtaacaacaatgtcgaagcgaggtcgcggaagatcngcgggaaacaagttccgcatgtcgctgggtctgccggtggcggcgacggtgaactgcgccgacaacaccggcgcgaagaacctctacatcatatcactgaaggggatcaagggtatgctgaaccggttgccgtcagcttgcgtcggagacatggttatggccaccgtcaagaagggaaagcccgatctccgtaagaaggtgctgcccgccgtcatcgtccgccagcgcaagccttggcgccgaaaggacggtgtttacatgtacttcgaagataatgctggtgttatcgtgaatcacaatggtgaaatgaaaggttctgctatcactggtcca

SEQ ID NO: 239230 - DNA, 393 bp, Glycine max
ggcccttctagctttttcccagtccaagcagcctccaattcgtgccactctcttcaaaatggccgttaccttctcaaatctccacacagaatcaggtctcaagtccctcgacgacttcctctctgggaaggtctacgtttctggggatcagttcacaaaggacgacatcaaagtgtatggtgctgttttggagaagccaggtgactcttttcccaatgctgccaagtggtacgaggttgtctcatctcagcttgctgcaagcttccccggcaatgctcaaggggtgagattcagtggcaaagcttctgctccagcggaggctgctcctgcgaaaccggatgcttctgctgctgaagatgatgatgaccttgatctctttggcgatgagactga

SEQ ID NO: 239231 - DNA, 401 bp, Glycine max
  unsure (1)..(401): unsure at all n locations
ggtagttccaccgagtagcaacaatgtcgaagcgaggtcgcggaggatcggcgggaaacaagttccgcatgtcgctgggtctgccggtggcggcgacggtgaactgcgccgacaacaccggcgcgaagaacctctacatcatatcagtgaaggggatcaagggtangctgaaccggttgccgtcagcttgcgtcggagacatggttatggccaccgtcaagaagggaaagcccgatctccgtaagaaggtgctgcccgccgtcatcgtccgccagcgcaagccttggcgccgaaaggacggtgtttacatgtacttcgaagataatgctggtgttatcgtgaatcccaagggtgaaatgaaaggttctgctatcactggtccaattgggaaggagtgtgct

SEQ ID NO: 239232 - DNA, 325 bp, Glycine max; identical to SEQ ID NO: 238978

SEQ ID NO: 239233 - DNA, 361 bp, Glycine max
ggagagtgagtgagatagagagagacgcttcgcaaatctcaatcgaatctcagaaaaatgagagaaatcatcagcattcacataggtcaggccgggatccaggtcggaaactcctgctgggaactctactgcctcgagcatggcatccagcccgacggcatgatgccttctgactccaccttcggtgtagcccacgacgccttcaacaccttcttcagcgaaaccggatctggcaagcacgtcccccgtgctgtcttcgtcgacctcgaacccaccgtcatcgacgaggtccgctgcggcacctaccgtcaactcttccaccccgaacaactcatctccggcaaggaagacgccgccaaca

SEQ ID NO: 239234 - DNA, 391 bp, Glycine max
ggctgtgagtgagattacccatagatagagagcgcggcataacctaaacttacccttcttctctctgtgtgtgtgcgcatcaaacgcaaccagaagcagccatggccactgcaagaactgtgaaggacgtttctcctcatgagttcgtcaaagcttactcttctcacctcaagcgatctggcaagatggagctgccagagtggactgatattgtgaaaactgcaagatttaaggagttggctccttatgatcctgactggtactatgtcagagctgcttccatggcaagaaagatctacttgagacgaggacttggtgttggtgcctttcagaggatttatggtgggagcaagaggaatggtagccgccctcctcatttctgcaagagcag

SEQ ID NO: 239235 - DNA, 405 bp, Glycine max
gggcatagcaaaatcgtttctccaatttaatcaccattgtacaacccaattcccttcgtcgttttcgattaagagagcaatggcacgtaccaagcaaaccgctcgcaagtccaccggaggaaaggctccgaggaagcaattggcaaccaaagccgctcgcaagtcagccccggcgaccggcggagtgaagaagccccaccgcttcaggccaggaacggtggctctgagggagattcgaaagtaccagaagagcaccgaacttctgatccgaaaactcccattccagaggctcgtcagagaaatcgctcaggatttcaaaaccgatctccgctttcagagcagcgccgtttcggctcttcaggaagccgcggaggcttatctcgttggactctttgaggacactaa

SEQ ID NO: 239236 - DNA, 362 bp, Glycine max
gactcactcatacaatagagaccagcttttgcttctttgtgaacatggagatgaggaaatcatgtggcttcttcttcttgctcctcctccttgtctttgcttcccaggtggtggtgcagacggagggaagagtgtgtgagtcacaaagccacgggttccatggtttgtgtaatagagaccacaactgtgctttggtctgcaggaacgaaggtttctccggtggcaggtgcaaaggcttccgccgccgctgcttttgcaccaggatttgttgagatctcatcaaacactactcttgccatgcaaattaataaatcatagctaggccaaataaattgcatctactctttatccatttgggagct

SEQ ID NO: 239237 - DNA, 397 bp, Glycine max
gatccaaattcaagttcgcaccaaattttcctcccaaaatgtcaggccgtggaaaaggtgggaagggtttgggaaagggaggagctaagaggcacagaaaggttcttcgtgacaacattcaaggaatcacgaaacctgcgattcgtaggttagcgagaagaggtggcgtgaagaggaccagtggtttgatttacgaggaaaccagaggagttctgaagatattcttggggaacgtgattcgcgatgctgtaacctacactgagcacgctaggaggaaaactgttactgctatggatgtcgtttatgctctcaagagacagggaaggaccctctatggctttggaggctaaagaatagaatctttaggtttaatgactgtgttgcaggataaaacatt

SEQ ID NO: 239238 - DNA, 392 bp, Glycine max
gatctcattaacgtttcttctcttcactctgcccgctgcatcaatggcttcagagaagaaactttcgaacccaatgagggagataaaagtgcagaagctcgtcctcaatatctctgttggcgagagtggagatcgtctcaccagagcctccaaggtgttggaacaacttagtggccaaaccccagtgttttccaaagcaaggtacactgttcgttcctttgggattagaagaaatgagaagattgcatgctatgtcactgtcagaggtgacaaggcaatgcaacttttggagagtggtttgaaggtgaaggaatatgaacttctcagaaggaacttcagtgatactggttgcttcggctttggtattcaagagcatattgatttgggaatca

SEQ ID NO: 239239 - DNA, 358 bp, Glycine max
gacggcactcgttttcgttctcgttctggtttatagatctttgcgaaggaggtttacagcgctcaaccaaagatgcagaacgaggaaggacagatcactgagctttacattcctaggaagtgctccgccacaaacagattgattaccgctaaggaccatgcttcggttcagatcaacattgggcatgtggatgagaatggcgtctacaatggccatttctccacttttgccctctgcggattcatccgtgctcaaggtgatgctgacagtgctctagaccgcttgtggcagaagaagaaagttgaagttaagcaacagtagacacccatgatagtttgttacttcgttatgtattaat

SEQ ID NO: 239240 - DNA, 372 bp, Glycine max
gattcacaactttacccactcttcattctagcaattcgaattcccaatccaaaaccctaataccttcaaagaacctagtagtgaatcagtgatggcacctaaggcagagaagaagccagcggagaagaagccggtggaggagaagaagtcgacggtgggagacaaggctccggcggagaagaagccgaaggccggaaagaagcttccgaaggagggaggagccggcggagaaggggggaagaagaaaaagaggaacaagaagagcgtggagacatacaagatatacatattcaaggttctgaagcaggtccaccctgacattggtatctcaagcaaggccatgggaatcatgaacagcttcatcaacgacat

SEQ ID NO: 239241 - DNA, 342 bp, Glycine max
ggtagttccaccgagtagcaacaatgtcgaagcgaggtcgcggaggatcggcgggaaacaagttccgcatgtcgctgggtctgccggtggcggcgacggtgaactgcgccgacaacaccggcgcgaagaacctctacatcatatcagtgaaggggatcaagggtaggctgaaccggttgccgtcagcttgcgtcggagacatggttatggccaccgtcaagaagggaaagcccgatctccgtaagaacgtgctgcccgccgtcatcgtccgccagcgcaagccttggcgcccaaaggactgtgtttacatgtacttcgaagataatgctggtgttatcgtga

SEQ ID NO: 239242 - DNA, 157 bp, Glycine max
tcaaacgaagaaaggcttatggtggatacctaggcacccagagacgaggaagggcgtagtaagcgacgaaatgcttcggggagttgaaaataagcgtagatccggggattcccgatataggtcaacctttcgaactgctgctgaatccacgggcagg

SEQ ID NO: 239243 - DNA, 335 bp, Glycine max
gagattatctttatccttttagcctttgggtacccctctgtgtggcagtgcatcttcatctgaagtgggaagctaaactcaaaggtcaaaaagagcacaggttagtcatgacatcctcattctcaacgcagttggtgcaaagtcagaacctacctcctcgttttcatctccatgtccaggggaattttagccaacatgtgtcaaatgtttcaatgacacatgtggtccgtagcagtaacaaatcacagcttggtttacggtaaaacgttggcatcaagatctcactatgctgccagattttcagtctcaggacaatctgaagcaaaatcaatcac

SEQ ID NO: 239244 - DNA, 362 bp, Glycine max
  unsure (1)..(362): unsure at all n locations
gagggatctcactcactaaaattccaagtagccacagctctcctctcactttcatttctacatccctggctctgttccgtcgatgacgatggcgtttagggtgcgaaaccctgacctccgctttctcattcttctctctctcttgtccatcacttccgccaaggtcttcttcgaggagcgtttcgatgacggatggggaaatcgttgggttaaatcagattggaaaaaagatgagaacctggctggggagtggaaccacacctctggccaatggaatggagacgctaacgacaaaggtattcanaacagtgaaggatacagattctacgctaattcagctcagtaccctgaattcagcaaca

SEQ ID NO: 239245 - DNA, 348 bp, Glycine max
accaaggcgtccgacgacagaaggggaagtatataacttcttcgaggtgtccggaaatcgttcctatcatcacttctcaaatctcgaaccctctcgttcgtgccgatcactaggtcacacttcatcaatggcgggtagaggcaaaaccctaggattcagcgccgctaagaaggccacctcaaggagcagcaaagccggcctccaattccccgtcggtcgtatcgccaggttcctcaaggccggaaagtacgccgagcgcgtcggcgccggagcccccgtctaactcgccgccgttctcgaatatctcgctgctgaggttttggaagtggctggaaacgctgcgacaga

SEQ ID NO: 239246 - DNA, 364 bp, Glycine max
gacaccgaagcactcgcgattccagccatagcacagaactctttgcaagacagttgctgaatgacgccacagatagaagcgtcttagttcacgctcatcgctgaaaaacctgaattcttctcttcatctcttcacattcgtttcgatcttcgatatctgaaaatgacagtgtgcatttcaatccacatcggtcatgccggtattcacgtcggaaaaacctgctggtagctctattggctcgaacacggcattcagcctgataggcaaatgctaagtgatacgactgttggtggacgtgatgatgctttgaacatcttcatcagtgaaactgggtctgaatagcacgtgcctcgtgcgatttttg

SEQ ID NO: 239247 - DNA, 384 bp, Glycine max
  unsure (1)..(384): unsure at all n locations
ggacgaagaagaaaatgatggcaacaaccgcgcctgtgcggtggcaaccaccaaacattaggtttaggattgagccgaagagagcgatgagagtgaaagcctttggtaagggaggcagggatatggatagggtttggagtgaggcgtggcgaagtgctaacgatgggtttgagcggttcgtcttcgaagcgaagaagactgcggagcgcatcgaccggcgctattccctttcgcggcgtctctcctccgtggcaagggcggccgcagaccgagcccgcgagattgatcgtgagtntgagattggaaaacgttaccgcactttgagcatcgattttcaaaggaaactggcccaagtacaggaaacagctcaaggactttctggat

SEQ ID NO: 239248 - DNA, 358 bp, Glycine max
gacacctttgttcactcttcttctcttgcggctagggttttagcgcagcttcttctagatttaaggaagatgggtaaggaaaaggttcacatcagtattgtggtcattggccatgtcgactctgggaaatccactaccactggtcacctgatttacaagcttggaggcattgacaagcgtgttattgagaggtttgagaaggaagctgctgagatgaacaagaggtctttcaagtatgcctgggtgctggacaaacttaaggctgagcgtgaaagaagaatcaccattgatattgctttgtggaagtttgaaacaacaaagtattattgcacagttattgatgcgcctggacataagg

SEQ ID NO: 239249 - DNA, 242 bp, Glycine max
ggggggtcagagtgagaaagagaaagagagaattcgtaaaccctaatttcggaaagatcggcgatgactgcctccaaggatcgcgagaacttcgtctacatcgccaaactcgccgagcaggccgagcgttacgaagagatggtggaatcaatgaagaacgttgcgaatctcgacgttgaactgacggtggaggagcggaatttgctttctgttgggtacaagaatgtgattggtgctcgcag

SEQ ID NO: 239250 - DNA, 347 bp, Glycine max
gacatcacatttcgttgcgcctctgttctctgtcactgctgcgtctctcgtaaccatgcctaagcaaatccacgagattaaggatttccttctcactgctagaaggaaggacgcaaggtcggtgaagatcaagaggagcagagatgtggttaagttcaaggtcagatgctcgaagtacctctacacactttgtgtgtttgacccagagaaagctgataaattgaagcaatctcttcctccaggtttgagtgttcaagacctgtaaaggtacagggcgagagaccaagaagaagcaattcattgattcttctgaacttcgtttctccgtagttgaaacttgagattct

SEQ ID NO: 239251 - DNA, 399 bp, Glycine max
  unsure (1)..(399): unsure at all n locations
gagttcataatcaaacccttcaggaaccttgataaccttcgaaggatcaccgtcctgcactattatcaaatgataaccctcgaagaagggcctccacatccccaagaagtccaggttacgtatcgtgggaatcactatgtccacctcctccttcagaatcggcgttgctgctgctgtgcttcccgatgacgaagacatcgttccttcctcttcctcggatcgtaggttttgctgagaaagacaacgttgttgttgttcttgttgctgctgctttcgagcttcgaggagcacgaggatggtgctgtgtntgttactactttgtctgcattggagtggggggcttatgtagtagttcaaactctcgggatttggcacgtgccgaaagcgtgtatgtgtgag

SEQ ID NO: 239252 - DNA, 308 bp, Glycine max
ggaacaacagttgcggagtcaatcgaaatcggcggagatggttgccatgaggtttcaccagtaccaggtggtgggaagggctcttcctaccgaatccgatgagcatcctaagatctaccgcatgaaactctgggccaccaacgaggtccgtgccaaatccaagttctggtattttttgagaaaattgaagaacgttaagaaaagcaatggacaagtgctagccatcaatgagatttttgagaacaatcctaccaagattaagaattatggaatttggccgcgttatcagacgcgcactggttatcaca

SEQ ID NO: 239253 - DNA, 389 bp, Glycine max
agctacgagacgacagaaggggagatatacattctcttgtcacagttttctgtgtcaccggaactcgtttctttcaaaacacttcaaacatctcgaacgctctctttccggcaactaggttaaagttcatcaatggcaggtcgcggcaaaaccctaggatctagcgccgccaagaaggctacctcaaggagcagcaaagccggcctccaattccccgtcggccgtatcgcccgtttcctcaaggccggaaaatacgctgagcgtgtccgcgccggcgcccctgtctacctcgccgccgtactcgaatatctcgcggctgaagttttggaattggctggaaacgctgccagagacaacaagaagactcgaattgtgccgcgccacattca

SEQ ID NO: 239254 - DNA, 381 bp, Glycine max
gagtgagagagagagaaggcaagatgtcgaagagaggacgcggtggttcggcggggaacaagttccggatgtcgctgggtctgccggtggcggcgacggtgaactgcgccgacaatacgggggcgaagaacctctacatcatatcggtgaaagggatcaaagggcgtttgaaccgtctcccctcggcttgcgttggcgacatggtgatggccaccgtgaagaaggggaaacccgatctgaggaagaaggttttgccagctgtcattgttcgccagcgcaagccatggcgccgaaaggacggcgtctacatgtatttcgaagataatgctggtgttattgtcaatcccaaagggagaaaataaacgttctgctatcactggt

SEQ ID NO: 239255 - DNA, 325 bp, Glycine max
gaagatttgtgagagaaagggagaaagggtgtgagaatggagagcaaagaggaagatgtaagggttggagcaactaggttctcagaaaggcacccaattggtacagcagctcacggtgacaaggactacaaagaaccacccccagcacctttgtttgagcctggtgagctaaagtcatggtccttctacagagctggaagtgctgagtttgtggccagtttcctgttcctccacattaccatcttaagctgtcatgggtgtcaacacgtcacccttccaagtgtgcctctgtgggcattcaatgcattgcttgggcctttggggg

SEQ ID NO: 239256 - DNA, 397 bp, Glycine max
  unsure (1)..(397): unsure at all n locations
ggaactcattcttcttcaactcaacagagcaagggttcgcactcgcagattcttgagcaagaataatggggaagaaaagaaaacacagtgagactactcaagctgtagcacaacccaaaaaggaagaggctgctccagagagaccggctaggacccttttggggtggaaggataagaatcaagttgaggatgattcaccaatatttaggaacaaagagaagctattggtcacttgctctaggcgcatcaattacaggtaccggcatttgatgttgaatttggtcacacttttgcctcattgtaagaaggataacaaagttggattaaaggaaactaaaggagccaccctcaacgagcttgttgagctaanaaattgttcctcttgtttaatttttga

SEQ ID NO: 239257 - DNA, 224 bp, Glycine max
gactcgagcttccctcacacattctctgtgactgcctctgttccgccgaacccagcattttcccaccgttcgggccaccggcggagttagttttccggcaaggatgggtgctgctctgctgtctgagcttgcgacggagatagttgtgccggcctgcgccgtcatcgggatcgtgttctcgttggtgcagtggttccccctgtcgcgcgtcaagctcactcccc

SEQ ID NO: 239258 - DNA, 397 bp, Glycine max
aaaagggcactgaacgctatcgcttgcaggttgccacactacggtgatgtttccaccaaacccgtttgcgttgttgtttgcaaatacatggcaacgataaggatcctaggaacgctgaaagagggtgacttgcatgggaaaacggtactcgttaaggtccatcttaacgtgactttggatgacacccttaatatcagcgatgacactaaagtccgtgctgctgttcccaccatcaagtacttcactcggaacggtccaaaagtaatcctttccagccatttgcgacgttcaagatgtttaacacctaaatacagtttgaaccctcttgtgccaacgctgtcacaacctcctggaactgaagttactattgccaacgaacccaattgggaagaaattt

SEQ ID NO: 239259 - DNA, 383 bp, Glycine max
ctgccaaaagaccactgaaaggggttcctaatcgtgtccctgaaaaagcctaaactataaacactccagtctgagtattgatcgttctctttcagcgttcctcaggtccatagggcattctaagcttcgcgagcaataagttcgaatgctttcccaacatgaccgccttcaactagattaagcacatagagataccaattcgccgcaaggaagaatcactggaagaaccggaagtgccgaaatacagagatcgagctaaagagcgtagagaggatcagaatcctgattatgaacaaactgagcttggatttcatgcagttgctccacctggtactgtggatattccgtcatctgatgcgcacaagttatctattgagaagagc

SEQ ID NO: 239260 - DNA, 354 bp, Glycine max
ggctagctagcgggccaaagtagtgcctaagtcttcctcatatcttccaccctttggcttattagtgggagcaatacatatcattcattcagaggcaacaaaggagttgtaaattaagagcatggctgcacaagctcttgtatcatcatcatctcttaccttctcagccgaggctacaagacaaagtcttggaccaagatcactccaatctccatttggcttctcaagaaaagcctcctttcttgttaaggcagctgctactctccctgtcaagcaaggatcagacagacctttgtggtctgcatcaaagcaaagtctttcctacttggatggcagccttccgggtcaccatgg

SEQ ID NO: 239261 - DNA, 399 bp, Glycine max
  unsure (1)..(399): unsure at all n locations
ggcattttcatttcattttgaattgaaaccgcggagagtttgctgctacatcgatcatcatcacctcatggacggacacgatccacaagacccaaagcagagccctgctgacatgactgcctttgtgcaaaatcttcttcagcagatgcaaaataggttccagacaatgtccgactccattgttacaaagattgatgatatgggaagtcgcataaatgagttggaacaaagcatcaatgacctgagagcagagatgggagtggagtcctctccatcacctgcagcccctgctaagctaacggaggagataaccanagaagaaggttcagcttaagtggcattctgatttcagttgctcattattcatgcattgtattgcacaaggattgatattctgca

SEQ ID NO: 239262 - DNA, 270 bp, Glycine max
ggtccaaaatcctcactccagccacacgcctcagtagaccatggcctcattgggtgggttacaaaatctaagcggcatcaattttcttatcaaaaaagagggtccaaaagtcaatgcgaagttcgagctgaagccgccaccatatccactgaatggtttggagccggtgatgagccagcagacacttgagtttcattgggggaaacaccacaagacatatgtggaaaatctgaaaaaacaaattcttgggacagagcttgatgggaaatc

SEQ ID NO: 239263 - DNA, 365 bp, Glycine max
ggtgtagaggcagctaaaaacaaagagtgtgatagtaagagtagtagaagagcggtctggtccaagtgctgcaatatgcaaggcaaagaaatggaagggttgtcgtcttcgtcggcgatcgcgcagaaaacatgggaactcgagaacaacatcatcccgatggacactccgggcggcgccgccatctcctccacaaccaccacgacaagcgccgacgactcgatcttctactacgacgaggcgggccagaacgagttccagcgcgacaagccctgggccaacgacccccactacttcaagcgcgtgaagatctccgcactcgcgctcctcaagatggtcgtccacgcgcgctccgggcgcaacat

SEQ ID NO: 239264 - DNA, 366 bp, Glycine max
aggggtatagagggagctacatacaaagagtgtgatagtaagagtaatagaagagcggtctggtccaagtgctgcaatatgcaaggcaaagacatggaatggttgtcgtcttcgtcggcgattgcacagaaaacatgggaactcgagaacaacatcagcccaatggacactccgggcggcgccgccatctcctccacaaccaccacgactagcgccgacgagtcgatcttctactacgacgaggcgggccagaacgagttccagcgcgacaagccctgagccaacgacccccactacttcaagcgcgtgaagatctccgcactcgcgctcctcaagatggtcatccacgcccgctccggcgggacc

SEQ ID NO: 239265 - DNA, 374 bp, Glycine max
ggtgctcactcatctatctattataaacaaacactcttcttcatattcttcttcttcttcttgttcttgttctatctgtgacgagcatcatggcctcgagagcagtgctattgttggctatgtgtgtgcttccggccatggttgtggccattcgcccagcaaagaaccctttttgcgtgaagggtcgcgtctactgtgacccttgccgtgctggttttgagacctcagcaaccacctacattgccggtgctgagattatgttgcaatgcaagagcagggttagcaacgaggttgtgtacaccaagaacgggtacactgactcaactggagcatacacaatgtacgtggaccaagattacgcagattaaatatgc

SEQ ID NO: 239266 - DNA, 322 bp, Glycine max
gcatttggagagacagagtagtgagtagtgagagggcgaagcgatgaatgccccagatcgttacgagcgtttcgtcgtccctgaaggcaccaaaaaggtttcttatgagagggacacgaagatcatcaatgcggcgtccttcaccatcgagagagaggagcacactatcggcaacatcctccgcatgcagctgcacagagaccccaatgtcttgtttgccggatacaagcttcctcatcctcttcaatacaaaattattgtcaggatacacaccactagtcagtcctcgccaatgcacgcatataaccagtccgttaatgat

SEQ ID NO: 239267 - DNA, 362 bp, Glycine max
ggttttgattagggtttgtcattagcacttcttcttttcacactgccgctgcaacaatggcttcagagaagaaactttcgaacccaatgagggagataaaagtgcagaagctcgttctcaatatctctgttggcgagagtggagatcgtctcaccagagccgccaaggtgttggaacaacttagtggccaaaccccagtgttttccaaagcaaggtacactgttcgttcctttgggattagaagaaatgagaagattgcatgctatgtcactgtcataggtgacaaggcaatgcaacttttggagagtggtttgaacgttaacgaatatgaacttctcagaagggaattcagtgatactggg

SEQ ID NO: 239268 - DNA, 196 bp, Glycine max
gacccccaaactctgcatcggaagaaaccctagccactctcccggcgtcacgatgcagatcttcgtgaaaagcctaacgggtaaaacgatcacgttggaggtggagtcttcggacaccatcgacaacgtgaaggccaagatccaggacaaggaaggcatccctccggagcaccagcgcctcatcttcgccgggaag

SEQ ID NO: 239269 - DNA, 198 bp, Glycine max
gaagagtgatccttctacactaactaaagccgagcagcgagagagagaaaccctagcaaaaatgccggctggtcacggtttgagatggcgcaccagagattccttctctcgtcccttgaggaagaatggtaccatcgccctcaccacatacctcagaacctatgacgtcggcgattatgtccacgtccatgttaacgg

SEQ ID NO: 239270 - DNA, 356 bp, Glycine max
ggcgtacacagcctcaacaaccctaacgcgtgcagagcagagagagacgcagccatggggcgaagacccgcgaggtgttataggcaaattaagaacaaaccataccccaagtcacggttttgccgtggtgttcctgatcccaagatcaggatttacgatgttggtatcaagaacaagggtgttgacgagtttcctttctgtgtccatccggttagttgggacaaggaaaacgtctctagtgaggccctgcaagctgctcgtactgcctgcaccaagtacatgggcagatctgctggaaaggatgctttccacttgagagtcacggtgcacccattccatcttcttaggatcccccc

SEQ ID NO: 239271 - DNA, 349 bp, Glycine max
ggagggttattggacacattcttcagcgactgcgtttttggatcggaacctcttctgcggcgtagcaatgggacactccaacgtttggaactctcacccaaaaaactacggtcctggttctcgcacttgccgtgtgtgtgggaatccacatggactgatcaggaagtatggccttatgtgctgcaggcagtgcttccgtagcaatgccaaggaaattggcttcatcaagtatcgctaaaagagcagttgtcaactacggaccaatattgtgttctggcactaggatgttttgaggatgttatgtttgaagaaacttgagactttcttttttcatctaattaattatcag

SEQ ID NO: 239272 - DNA, 388 bp, Glycine max
ggtacacagcctcaacaaccctaacgcgtgcagagcagagagagacgcagccatggggcgaagacccgcgaggtgttataggcaaattaagaacaaaccataccccaagtcacggttttgccgtggtgttcctgatcccaagatcaggatttacgatgttggtatgaagaagaagggtgttgatgagtttcctttctgtgtccatctggttagttgggagaaggaaaacgtttctagtgaggccctggaagctgctcgtattgcttgcaacaagtacatggccaaatttgctggaaaggatgctttccacttgagagtcagggtgcacccattccatgttcttaggattaacaagatgctttcgtgtgctggagctgataggctccaa

SEQ ID NO: 239273 - DNA, 366 bp, Glycine max
gacaacacaacagagaaagaaaagagtaagagtatgggaggctcatggtcatggcagctcacatgtgccctcttgctactcttctccgccgtagtcaccgccactgaccacattgtgggtgcgaatcgtggctggaaccctggctttaactacactctttgggccaacaaccacactttctatgttggcgatcttatctcattcaggtaccaaaagaaccaatacaatgtgtttgaggtgaaccaaactgggtatgacaactgcactacagaaggggcagtggggaattggagcagtgggaaggatttcataccccttaacaaggccaagagatattacttcatttgtggcaatggccaatgcttc

SEQ ID NO: 239274 - DNA, 321 bp, Glycine max
gacgctttacgatttctctttttttgttttttgttgcgtgtgttagggttttaaggaagcatgggaaaggttcaggtgagtgacaaggaagaattctctcaaatggagaacaacgatttcagtgattcgcagttagttcatcacttcagaggtgtgcttgttgcagtgacaacgggtgatcgagagaattacgatgagctcgttggttatttgcaaccgaagaaacatcttaatcctgatgaggttgctatacttgtgacaactttgaaagcgctttctggagcagtgtcctatatagattctgttcatcatgaatccctg

SEQ ID NO: 239275 - DNA, 383 bp, Glycine max
gaagaagaactagtctaagcagaaatggcctcttcagtgatggcatctgtggccctcaaacctgcccctttcactgttgagaagtcctcagttagaggccttccctccctctcaaggaactcctcttcattcagagttgtggccagtggtggcaagaagatcaagactgacaagccttatggaattaatggtggcatggctttgagggaaggagttgatgcatctggcaggaaaggaaagggaaagggcgtttaccagtttgtagacaaatacggtgctaatgtcgatggttacagtcctatctacgacaccaaggactggtctccaaccggtgatgtccaccctggcggtacgactggcctggctatctgggctgtgactct

SEQ ID NO: 239276 - DNA, 393 bp, Glycine max
gatttcgcttcttttcctaacctaaaccctactcattctccatacctcaacgaagaggttaaagagacggcaacactttgctgtccgccttgaccgagcagagcttcgtcttggccctcgattttgccctaaagtactctcagtcacaacagacaccgtcgtcgtcgtcgtcgtcatcaatggcaccgaagcagaccaaggctgagaagaagatcgcttacgatgcgaagctgtgcgacctaatggaggagtacggccagatcctcgttgtgaactccgataacgtgggatcgaaccagctccagaacattcgcaagggtctccgtggcgactccgtcgtcctcatgggggaagaacaccatgatgaagcgctcagtcaggatgcacgctgag

SEQ ID NO: 239277 - DNA, 175 bp, Glycine max
gatcccataaaaaacacaagcaaaaaaaaaaaaaaaaaaaaaacaaaaaaagcggccgcccaaagaagaagccggtttcaaggtccgtcaaagccggtctccaattccccgtcggaagacatggccgttatttgaacaacggaaggtacgctcagcgtgtccgtaccggtgctcc

SEQ ID NO: 239278 - DNA, 317 bp, Glycine max
gagcgaaacagagagtgatttcagtgagtgatcggtgttcacttgatctcatcataatcgtcagcgtcaattgaagaagatgccgatcagaaacatcgccgtcggaaggcctgaagaggcgactcaccccgacacgttgaaggcggctttggctgagttcatctcaaccttcatcttcgtgttcgccggctcaggctccggcatcgcctacaacaagctcaccgacaacggcgctgccacccctgccggcctcatctccgcctccatcgcccatgcattcgccctcttcgtcgccgtctccgtcggcgccaacatct

SEQ ID NO: 239279 - DNA, 347 bp, Glycine max
aaagagacccggaaatggtgggaaccgcttttgggaatccattgggcttggatttaagactcccagggaagccatcgaaagaacctacattgacaacaactgccccttcactggcaatgtttccatccgtggccgtatcttggctggaacatgtcacagtgctaagatgaacaggaccattattgttaggacgaattatctccattttatcaagaagtaccagaagtacgagaaaaggcactccaacattcctgctcatatatcacctgctttccgtgtgaacgaatgagatcacgttattattggtcaatgcatgccactttctaagactgtgacgttcactgtgt

SEQ ID NO: 239280 - DNA, 330 bp, Glycine max
aaagggacacttaagggaaaaatacccggcaaaggttggaaacgcttttggaaatccattgggcttggatttaagactcccattgaatccatctaaagaacctacattgacaataagtgccccttcactggcaatgtttccatccgtggccgtatcttggctggaacatgtcacagtgctaagatgaacaggactattattgttaggacgaattatctccactttatcaagaattaccacaggtacgacaaaaggcattccaacattcctgctcatacatcaactgctttccatgtgaacgaacgagatcacgttactattggtcaatgc

SEQ ID NO: 239281 - DNA, 363 bp, Glycine max
ggcggcaaaagaacaacaaaaggggcttgttggctccctttggattccccggctttcaaatacacaccacaaaaccccccttttttttcaaaaaccctccgagaaaaaccagatgggtgaaaagcaccacaaccatccaccgccaccggttcaggcacctccggcaggtccacaaccgccaaacctagcactttcaagaggccccgtttggcatccacctgaacaactctcgcagcttcactattgcatccactcaaatccttcatggccggtggcaattctactgggttttcagcactacattgtgatgcttggaacaacggttctgattgcaaccacactggttcctgcaatgggtgggga

SEQ ID NO: 239282 - DNA, 291 bp, Glycine max
gacaacacaacgcaacacaacgcgcactctctcttttctctcttaacacaaaaaccctatcgttcttcgcggtttcgccgattctcgccatgccgaaagccaaatccgacgccaaagccgccgatagcaggttgaagcggaagggcgctggtgctgggaggaagcaatcgaggaaagctgctaaggaccctaacaagccgaagagacctgcaagcgctttcttcgttttcatgtccgagttcagagagcagttcaagaacgatcatcataacaacaaatccgtcgctgttg

SEQ ID NO: 239283 - DNA, 341 bp, Glycine max
gggatggaatcctaagacttcactttgggacctgcttgaatccactctgacatatcagcacaggacatatgctgaagccgttaagaaagtcattgcaaaacccctcgcaagttaagcttttacagtgatggtgatgtgctacctttgagaaggggtgttcttgcccaagtgttctgccatattttactggttggttttatataaaatcgcaaattttcctccttttggtttcgttagccagtaggcaatatagcccacataagccccaatgccttggtgtatgttcctggagaagtacgaatttatatatagggcaatctgtgctgctatgtaattttaat

SEQ ID NO: 239284 - DNA, 380 bp, Glycine max
ggtagcaatagcatactcttactctgattcgttagtgaagaaaaatggcaacaatcatcgccggcaccccaactacatcaatcactcgcacaggtcatgtgctcaaacgacctgttggggcctcatcctctaccgttcttggattgccagcaatggccaaggcggggagagtgaggtgctccatggaggaaaagccttcaagcagctcaaacctaaggatgggggcatccttgttagcagctgcagctgccgcaaccatgtcaagcccagcagccatggctttggttgatgagagactcagcactgaaggaactgggcttccctttgggcttagcaacaaccttcttggttggatcctgtttggtgtccttggtctcata

SEQ ID NO: 239285 - DNA, 493 bp, Glycine max
  unsure (1)..(493): unsure at all n locations
ctacagtatgaccggccaggtaccagtcaggaattcccgggtcgacccacgcgtccacccacgcgtccgtacggctgcgagaagacgacagaagggtacggctgcgagaagacgacagaagggtacggctgcgagaagacgacagaaagggtcaaacgaagaaaggcttatggtggatacctaggcacccagagacgaggaagggcgtagtaagcgacgaaatgcttcggggagttgaaaataagcgtagatccggggattcccgatataggtcaacctttcgaactgctgctgaatccacgggcaggcaagagacaacctggtgaactgaaacatcttagtagccagaggaaaagaaagcanaaaaaaaaaaaaaaaaaaaaaaaaaaaagcggccgctctagaggatccaagcttacgtacgcgtgcatgcgacgtcatagctcttctatagtgtcacctaaattcaattcactggccgtcgttttacaag

SEQ ID NO: 239286 - DNA, 389 bp, Glycine max
gacagcactgcactcttcgcaacacaacaaaaaaagacaacccagagagcgcgtcttaataaacgctcttctctgaaaacccccatttcttttcttctttcttcttctctttcgcttcttcgatcttcgatcctcgtcgctgaaaatgagagagtgcatttcaatccacatcggccaggccgggattcaggttggaaacgcctgctgggagctttactgcctcgaacacggcattcagcctgatgggcagatgccaagtgacaagaccgttggtggaggtgatgatgctttcaacaccttcttcagtgaaactggggcaggaaagcacgtgccccgtgagatttttgtatatcttgagcccactgtgattgatgaggttaagactggga

SEQ ID NO: 239287 - DNA, 258 bp, Glycine max
ggcccaaattttttcatagcattttcagaggaacaatggcgggtagggtttcgacgtgcttcttcttcgtgtttgctctttctctccttcttccttttcagatctccgctgaggaatcatcggagaaagagttcgtactcacattggatcactctaactttcacgacactgtcagcaagcacgatttcatcgtcgtcgagttctacgctccatggtgtggccactgtaagaagcttgctcccgagtatgagaaagctg

SEQ ID NO: 239288 - DNA, 329 bp, Glycine max
gagggttacacgccgtcgtcgctgtttttgtgtgtcgcttcttcgtaggtgcagctgcaatggtgaagggacgccaaggagaacgtgtcagactctacgtgaggggtacaatccttggatacaaaaggtccaagtcaaaccagtatccaaatacatccctgatccaaattgagggtgtgaatgccaaagaagaagtagcatggtatgctggcaagaaaatggcctatatctacaaggctaatgtgaagaagaatggaagccattaccgctgcatatggggcaaggttacaaggcctcatggtaacagtggtattgtccgtgcaaaattc

SEQ ID NO: 239289 - DNA, 245 bp, Glycine max
gattgcattgtggtgaatgtttgagtgcagaaggtaaaaaagaaaatggtggtgaagattcgattggcaacgctcgggtgccggaaccacccattcgatcgtgtggttgttacggatagtggaacggcaagagatggcaagcaacttgaagttttaggtttctacaagcccgtcgcaggcaaggatgatgacaaaagaatgagcctcagactggagagaatcaagtagtggcgttccggttggag

SEQ ID NO: 239290 - DNA, 301 bp, Glycine max
gtagaatccccattccagagccaaggtaggttaaacactcttcttcatcgtcgtcgcaatgggacgtgtgatccgtgcgcagcgtaagggagcacgctcggtcttcaagtcccacacgcaccaccgcaagggccctgcccgcttccggagcctggatttcggagagcgcaacggctacctgaagggtgtcgtcactgacgtcatcgacgatcctggccgtggcgcgcctctcgctaaggtcgccttccgccaggcgttccgctacaagaagcagaacgagctcttcatcgccgccgagggt

SEQ ID NO: 239291 - DNA, 886 bp, Glycine max
  unsure (1)..(886): unsure at all n locations
gagggcactctctcctgggcgntantgtggaattnagaggcaacgtcgagcgggcctgtaggcgtcctaaaattccaaggtcgacgcacccgtccgaacggctgagagaagacgacagaagggtacggctgcgagaagacgacagaagggcgtagtaagcgacgaaatgcttcggggagttgaaaataagcgtagatccggggattcccgatataggtcaacctttcgaactgctgctgaatccacgggcaggcaagagacaacctggtgaactgaaacatcttagtagccagaggaaaaaaaaaaaaaaaaagaaaaaaaaaaaagggccgctctagaggatccaagcttacgtacgcgtgcatgcgacgtcatagctcttctatagtgtcacctaaattcaattcactggccgtcgttttacaacgtcgtgactgggaaaaccctggcgttacccaacttaatcgccttgcagcacatccccctttcgccagctggcgtaatagcgaaaaggcccccaccgattgcccttcccaacaattgcgcagccgtaaaaggggaatgggaacgcgccctgtatacggggcattaaagcgccggccgggttgtggtgggtaacgccgcagccttggacggctaaaactttgcccaacgcccctaacgggcccggggcccttttcccctttcctttccccttccccgttccccgcgccaaggtttctgcgccgggcttttccccccgggtcaaaaacctccccaaaagcccggcgggggcgcccgcgctttataagcggtttcccccaaattttaaatttgccttttaaagaggagagccttccagaagcgcccgaagaaagagaccttggaaatttaaggggtgtaaatg

SEQ ID NO: 239292 - DNA, 367 bp, Glycine max
ggagtaagcaggcggcatggcattctcagcggtctggcgactagcgaatcttgggcgacacttggatttgagtgaatcagtgaacaaggctgcgccagttgggtcaatcaagttgaaggtagcttcagaggtttctgaagcattatcactgggtcgtgctgttgttgctcttgaatctaccattatttcgcatgggatgccatatccccaaaatttggaaactgcaaaagaggtggaacgtattgtaagagagaacggtgcagttcctgcaaccattgcaattttagatggcacgccttgtgtaggcctaagtgtagaagaacttgaaaggctagctattttgggaaccagagctcagaggacagct

SEQ ID NO: 239293 - DNA, 323 bp, Glycine max
gaatttcaatatccgctcaaaccctatcctaactcctcgcgtcgtcacataaagtcttcttctccgatcgttacgatgttggaactccgtctcgtgcaatgttcccttctgaacaaggttctggaatcgatcaacgagctcgtagacgacgcgaacttcgactgctcctccaccgggttctccctctaggccatggattccaggcacatcgccctcgttgcgctcctcctccggtccgagggctttgatcactagcgctgcgaccgcaatacctccatgggcatgaacctcaacaacatggccgagatgctcaagtgcgccgg

SEQ ID NO: 239294 - DNA, 360 bp, Glycine max
gagggttacacgccgtcgtcgctgtttttgtgtgtcgcttcttcgtaggtgcagctgcaatggtgaagggacgccaaggagaacgtgtcagactctacgtgaggggtacaatccttggatacaaaaggtccaagtcaaaccagtatccaaatacatccctgatccaaattgagggtgtgaatgccaaagaagaagtagcatggtatgctggcaagaaaatggcctatatctacaaggctaaggtgaagaagaatggaagccattaccgctgcatatggggcaaggttacaaggcctcatggtaacagtggtattgtccgtgcaaaattcaagtcgaaccttccacccaaatcaatgggag

SEQ ID NO: 239295 - DNA, 284 bp, Glycine max
tggaagaaggggaagctggccatgacggtcgaggtattcgaggtggcgccggaggtttcggtggttgagttcgccaagtctgctggagacacgcttgaatacattaaattctgtgaggaccaagtcagaccttctctcaaagacattgtgtggagttggcaaggggacgctaattgccaccagtaacgcaatggagttactttccgttatgtcttaatcttttgcgtgtttccattatcacaatccgtttgggtttagatttattacccatgtaatgtaatatt

SEQ ID NO: 239296 - DNA, 344 bp, Glycine max
ggaaacccacatcatgagcacactttgtatggcggaaaatatgaaggaggtggaagttgaagatggatatgtcttgaaagaagagatccatctcacggtgctaaaaacctctctgttcttcgcgggcgatggcttcagcgtcgacgattgcaaaggtcaactcgtgttcagagttgactcttatggacccgacactcgcgacatagacgaactcgttctcatggatcctaacggacgttgcctcctcagcgttcgtcgaaagcggccgagtttgcatcaacggtcggaaggtttcaaaggggagagaatgggacggtgagaagaccatcttcagcgtgaggaga

SEQ ID NO: 239297 - DNA, 794 bp, Glycine max
  unsure (1)..(794): unsure at all n locations
gaggtggagtncntggcggcagnccggtgtaattaccatccaaccctacgcaggggctatnnaaggcgngtatccggtcctacacctcncgggccgacccaagcgtccgataggctgcgagaagacgacagaaggggaatcctctgttgtttctcagccgcctcggctagggttcggaaacgaagaagggttctgttttcttttcgcgatgagggccaagtggaagaagaagcgtatgaggaggctgaagaggaagcgccgaaagatgagacagagatccaagtagtgcgttaaacctagtttgtttccgttgcttttacaattgcttatgttgtcaaataggacacccagttgttagtggcactggtctctcctttttgatgttttgatacattttgttggattttatttcgtcttatgttcttagctgaaaacaatgctgttactgcgtttgcgaatcaacaggatatcttgtttacaaaagaaggaaggggcggagaaaaaaaaaagcggccgctctagaggatccaagcttacgtacacgtgcatgcgacgtcatagctcttctatagtgtcacctaaattcaattcactggccgtcgttttacaacgtcctgactgggaagaccctggcgttacccaacttaatcgccttgcaggagaatcccctttcgccagctggcgtaatagcgaaagaggccgcaccgatggcccttcccaagaattgcgcagcctgaatggcaaatgggacgcgccctgtaacgcggaatgaaccccgccgggttttgttgttn

SEQ ID NO: 239298 - DNA, 261 bp, Glycine max
gaaccaagtttgcttgcgtgtatattcattttagcatcaaggttgaatctcagagaaaaagaaacatcgacaagcatgtctggaagaggaaagggaggcaagggtctcggaaagggaggagccaaacgacaccgtaaggttctgaaggataacagtcagggaatcaccaagcccgcgattcgccgtctggccagacgtggtggcgtcaagcgtatcagtggtcgtatctatgaagaagctcgcggtgttctcaagatcgtt

SEQ ID NO: 239299 - DNA, 347 bp, Glycine max
gctctgaaaactgaaaagtaaaggcgaaagactttaggtttggaattgggaattagggttgttcgcgtcacgaagatgatcgaggtggtgttgaacgatcgattggggaagaaggtgcgcgtgaagtgcaacgacgatgacaccatcggcgacctgaagaagctggtggcggctcagacgggcacaagagccgacaagatccgcatccagaagtggtacaccatatacaaggatcacatcactctcaaggattacgagatccacgacggcatgggtctcgaactctactacaactaaacacaaagtgtgttttatgcatgatatattactatgatctgggaatggga

SEQ ID NO: 239300 - DNA, 362 bp, Glycine max
ggcgtacgcagcttcatccctaacgcgtgcatagcagagtcagagacagagacgcagccatggggcggagacctgcgaggtgttataggcaaattaagaacaagccataccccaagtcacgtttctgccgtggtgttcctgatcccaagatcaggatttatgatgttggtatgaagaagaagggtgttgatgagtttcctttctgtgtccatctggttagttgggagaaggaaaatgtttcaagtgaggccctggaagctgctcgcattgcttgcaacaagtacatggccaaatttgctggaaaggatgctttccacttgagagtcagggtgcacccattccatgttcttaggattaacaag

SEQ ID NO: 239301 - DNA, 430 bp, Glycine max
  unsure (1)..(430): unsure at all n locations
gcagaatgcaaggaacgcaaggaaagttaacaatgaccagaatttacagggagacaatggacaaagagttggatactcatangctggagcatggtcccaagaaaagaaagatccctgacgaaaacaataatgacgacgatgatgatgtggaagatataaatgtgggagaggatgacatgatggatgatgaattagacgatgattctagtangaggattgatgaaacaaccaagacggaagcacgtagtgccagttcagatcctgcagctgatgctgataatgcgggagggaagtgatcacccgcaaggacacaattttcaatagttttgagttatttatgtttttgtagtttattccttggtattctaacttttacgtaattggatttatagccgttgtagtttctgtatgcaaatgaaatttcttcact

SEQ ID NO: 239302 - DNA, 255 bp, Glycine max
aatccgagaagtgatttactcattcaacctgccaaggagcttgtgacagaggagaggccggccttgtactcaccaatgacctatgaggaagacagactttacattaggctaaatggaccttgtggaaaggcccaagttgaatcactggctttccaacgatgacttaataatgtcaattaataacgtgtttggtttcacaatgtaattttctatgtttcatgtggaattttaagttgagagttataacttaagggg

SEQ ID NO: 239303 - DNA, 339 bp, Glycine max
ggcagccaagaaaagaaaatcctcacccattttcttcgtagccaaacactctgaaattctcagttatgtcgtggcaagcgtatgtggatgatcacctactgtgtgaaatcgaaggtaaccacctcactcacgccgctatcatcggccaagacggaagcgtttgggctcagagcaccaacttccctcagttcaaacctgaggaaataactgccatcaataatgactttaatgagcctggatcacttgctccaactggattgtatatcggtggcaccaaatacatggtcatccagggtgagcctggtgctgtcattcgagggaagaagggtcctggtggtg

SEQ ID NO: 239304 - DNA, 408 bp, Glycine max
gatgcatagcaattcccaattcctaattgtttaaacctaattctcatttcttcatcgttcgattcttctcctcctaaagatgcagatcttcgtgaaaactttgaccggtaagaccatcacccttgaggtggagtcctccgacaccatcgataacgtgaaagctaagattcaagacaaggaagggatcccacctgaccagcagagacttatctttgcgggtaaacagcttgaggatggtcgaacccttgccgactacaacatccaaaaggaatccactctccacctcgtgcttcgcctcaggggtggcatgcaaatctttgtcaagactttgactggcaagaccatcagcctcgaggtccaatcctcggacacgattgataatgtcaagggcaagatccaggaacagga

SEQ ID NO: 239305 - DNA, 446 bp, Glycine max
ggaacctgatcgatctctttaccagttgccacactacaccgagattccccctaaacccgtttgcgttgttgtttgcgaagaaatggcgactaagaggagcgtgggaacgttgaaggagggtgatttgaaagggaagagggtgttcgtgagggtcgatctgaacgtgcctttggatgacaaccttaacatcaccgatgacactagagtccgtgctgctgttcccaccatcaagtacttaactggtcatggagccaaagtgatcctttctagccacttgggacgtcctaaaggtgtaacacctaaatacagtttgaagcctcttgtgccaaggctgtctcaacttctcggaattgaggttacaatggcaaatgactctattggggacgaagttgagaagttggttgcacaacttccagaaggtggtgttttgcttctagagaatgtga

SEQ ID NO: 239306 - DNA, 226 bp, Glycine max
gaaaagctttgtttattaataataataacaagcgaggtaaaacacttcgagcggcggggcaggggcagagttgattgcagttgagagagttgtagtgagtaacgagtacgatgatctgttcaagcttctcctaatcggcgacgcttccgttggaaaatcctgcttgcttctcagattcgctgaggactccgacgtcgacagctacatgagtaccagtggacttgat

SEQ ID NO: 239307 - DNA, 440 bp, Glycine max
gggctgccaaaagaccaaagaaagggggaaggcaaagaaaagattggcaacgttccaagggaactccttttggaaattcttaagaaaaacaactcctttttgggcaacaatttcgaaaggggaaccaaaacgttcaatttaacaaagagagcacaatcctcacaacctaaattcgttcaagtactctggtttggcaaacaagaaaactgttacggtacagcctgagggtaaagatcaggctgtgttgttggctacaacaaagacaaagaagcataacaagcctgctgcattgcttcacagatctgtgatgaagaaggagttcaggaggatggcaaaggctgttgaaaatcaggtggcagaaaattactacaggcccgatctcaagaaggccgcccttgcaaggttgagttctgttcacaaaagcctcaaagttgccaagt

SEQ ID NO: 239308 - DNA, 366 bp, Glycine max
gactgcaactttgctctctgtgaggcttcaatttccaattagggtttcgcttagagtaaccaattaccatgggagtcttcacctttgtcgttcgcaaatccggcgccgaatggagcgccaagcaacattccggcgacatcgaggcctccgccgactccacctacgatctccaaaggaagctcgtgcaagccgctctcgccgttgattcctccggtggagtccagtcctccttctctcccgtgtctcctacctccgctgtgttccaggtgatactgggtggtgctgtattcgttggacgtggcggtggtgctgttgcagctgcaactgcaagtggtgctgctgcagctgatgccggcccggccgcct

SEQ ID NO: 239309 - DNA, 178 bp, Glycine max
gatgtcatagtattatcattcattctcatctttctctcttctctctccacccaaaccctaacttccgaccctgttcccctctcgtagccgtcatgaaaggaggaaagtccaagaccgaatctaagagagccgatcccaaagttgctgtgaataagaaaggagccgccaccaaggctag

SEQ ID NO: 239310 - DNA, 431 bp, Glycine max
acagaaggggatgccgaaaagttataccaagatggcttcaattgtgtaacccctccttggcttccaacccaatggtaacaagtcaagttccctaaccgcaactaatgaaatgtttgcaaaacagtttccatccacaaaaaccgttgaagaaaaactcagccaactccacttctatttccataacaacataacgggggaaacaccaactgctatgaaaactgttttgcctcctaaggggtccattcatggttttggggctacttacatgatggatgaccctctaactgaaggaccaagtccaacttcaaagcttgtgggaagatctcagggaatatacgctttggcttcacaacatgagcctgggttgctcatggtgacaaattttctcttcactttgggcatttacaatggcagcaccctcagcattcttg

SEQ ID NO: 239311 - DNA, 387 bp, Glycine max
  unsure (1)..(387): unsure at all n locations
ggcgcctctgcttgcaagagtgaaaaccttctcttacccttctctcaagtttcaagagatttcatcatggctccaaagaaggacaaggctccaccaccttcctccaagcccgccaaatctggcggtggcaagcagaagaagaagaagtggagcaagggaaagcaaaaggagaaggtgaacaatatggtgctgtttgatcagggcacctatgacaagctcctttctgaagctcccaaatacaagctcatcactccttccattctctctgatcgtttgaggattaatggatcacttgcaaggaangctataagagaattgatggcaagaggttctatcangatggtgtctgcccatgcaagtcagcanatttataccagggcaacaaac

SEQ ID NO: 239312 - DNA, 434 bp, Glycine max
agggcttcaactacataactccatcactgcagcattaaggtttaacatctgcctcaatggggaaaggaacaaggaacttcggttagaagaagaacaagacccacactctctgtgtgaagtgtggccgccgcaacttccacctccagaagagtcgctgcgccgcttgtgctttccccgctgcacgcacgcggaaatataactggagcgtcaaggcaattcgcagaaagaccaccggaactggcaggatgagatacttgcgtaacgtgcctcgccgtttcaagagtggcttcagagaaggtaccgaagctgcaccaaggaagaagggagcagctaccactgcatagacctttcaaagatcgttctcgttgggtacggatttacaggaatagattgctttttgtgcttttggcaagtattttggaacatttattttt

SEQ ID NO: 239313 - DNA, 323 bp, Glycine max
agaacaaagaagagcgttgagacctacaagatctacatcttcaaggtgttgaagcaagtgcaccccgacatcgggatctccagcaaggctatggggatcatgaacagtttcataaacgacatcttcgagaagctcgcccaggagtcatcgcgtctcgctaggtacagcaagaagcccaccattacttccagggagatccaaacggcggtgcgtttggtcctccctggggagttggccaagcatgccgtttctgaaggcaccaaggccgtcaccaaattcaccagctcttgagtggtttcgtgtgtttaggtcaggcttttctg

SEQ ID NO: 239314 - DNA, 379 bp, Glycine max
gagcgccaatgtttttttcagaggagtttcatcttgtaatcgaaagagtttatcttatagtaagaaatcgatgtcttactcgagttgaaggaactgggcaagagaacaatagcctgacaaagggtttagccataaaatcgaatccatcattgagttgagatattgataaggtgaatactcatttctcgtcaatgctaggcataatgcgggtatagggacctgagaaagattatcttttcttcctatcttatgaactttaaggtgtatgaagtgtcatttcctagcgtagagttgaatttgagtaggtagagtgggagtcgatttaacttaagttgatctaggccagaggcagacctacgtcgagataagcgttcgttga

SEQ ID NO: 239315 - DNA, 252 bp, Glycine max
tagagtcagtggtttatcgctgttcaaatgctccttcatgattgctctccagcatcatcatcatcaccgttaagttcgaaaggggtcatcaagtgtcatcgccatcggaaggcctcatgacgctactcagccccgcactttgagcgcggggtttgctcagttcatctccaggttgatcttcgtgttcgcccgttcacgttccggcaatcccctacagcgtgctcacggacactggccgccgtcactcccgcc

SEQ ID NO: 239316 - DNA, 320 bp, Glycine max
gacttctcttcacacctttgttcactcttcttctcttgcggctagggttttagcgcagcttcttctagatttaaggaagatgggtaaggaaaaggttcacatcagtattgtggtcattggccatgtcgactctgggaaatccactaccactggtcacctgatttacaagcttggaggcattgacaagcgtgttattgagaggtttgagaaggaagctgctgagatgaacaagaggtctttcaagtatgcctgggtgctggacaaacttaaggctgagcgtgaaagaggaatcaccattgatattgctttgtggaagtttg

SEQ ID NO: 239317 - DNA, 165 bp, Glycine max
ggggatatggcgaaattggtagacgctacggacttaattggattgagtcttggtatggaaacttaccaagtgagaactttcaaattcagagaaaccctggaattcacaaagggcaatcctgagccaaatcctgttttccgaaaacaaggaagaaggggggaaagg

SEQ ID NO: 239318 - DNA, 388 bp, Glycine max
gatacccttctctcttatttctctttcaattttcaccttactcattgtttctcccaccttacctctttgtccctctgcttctcgctgtgaaacttcattatctttctctttctttatttactaataccacttcacctcactttgctttcattctccataccctatcaaactccactttccttttttcctctctttgtctctctctttctacctcacatcacacattctcatcctctttttatatccttcccctccaaagctgagagagccacaacacaaccaaaaccctatattattcacttggtcaaacactctttcacttgacaaacaaacactttgtgtagctacaatggaagcgtattactacaagaggcaacatgttccagca

SEQ ID NO: 239319 - DNA, 454 bp, Glycine max
  unsure (1)..(454): unsure at all n locations
ggagaaaaacgagccaattcatcattttctctcttctctgcttcttcttgttcaaatcttangagctgaggagaatcaatcgagagaaatatgtctggtatcgctcgtggacgccttgctgaggaacgaaagtcatggcgcaaaaaccatccacacggtttcgttgccaagcccgagactctacctgatggcaccgtaaatttgatggtctggcattgcactattcctggcaagaccgggactgattgggagggtggatatttcccactgacaatgcacttcagtgaggattaccctagcaagcctcccaagtgcaaattccctcaaggtttctttcaccctaatgtgtatccatctggaactgtttgcttgtctatacttaatgaagatagtgggtggagaccagctataacagtgaagcagattcttgtgggcatccaagacctgcttgatc

SEQ ID NO: 239320 - DNA, 265 bp, Glycine max
gactcactcacttcagtgtcattttttcttattctcttcctctctctctactctgagacacaaaggagaattataagaaattatggctggttattcaaaagcttcagctctttggatcctttttcttctctttggcttctctgtagctaaggaaattttggttggaggtaagactgatgcatggaaggtttcagcctctgaatcagattcactcaaccaatgggcagaaaagtctcgtttccaagttggagacgagcttgtttgg

SEQ ID NO: 239321 - DNA, 341 bp, Glycine max
ggttctagtgtgtgattgtttgtttttgtaactcgttcttcttcttttgttgttctgtgtttgtgtttgttttttctctcacctgaaaatgtcttgctgcggtggtaactgtggttgcggaagctcctgcaagtgcggcaacggctgcggaggctgcaagatgtacccagacttgagctacactgagtcaaccaccaccgagaccttggtcatgggagtggcacctgttaaggctcaatttgagggtgctgaaatgggtgtgcccgctgagaacgatggctgcaaatgtggaccacactgctcctgcaacccctgcacttgcaagtgaggtgttgggagag

SEQ ID NO: 239322 - DNA, 359 bp, Glycine max
gactcactcatacaatagagaccagcttttgcttctttgtgaacatggagatgaggaaatcatgtggcttcttcttcttgctcctcctccttgtctttgcttcccaggtggtggtgcacacggacggaagagtgtgtgagtcacaaagccacgggttccatggtttgtgtaatagagaccacaactgtgctttggtctgcaggaacgaaggtttctccggtggcacgtgcaaaggcttccgccgccgctgcttttgcaccaggatttgttgagatctcatcaaacactactcttgccatgcaaattaatacatcatagctaggccacttaaattgcatcctactctttatccatttggg

SEQ ID NO: 239323 - DNA, 321 bp, Glycine max
gagttcggtggagggagggagccgtagcagcggaagctctagcttgggtagcgaatcacaatggcgagaggattaaagaagcatctgaagaggcttaatgccccaaagcattggatgcttgacaaactgggtggtgcatttgctcctaagccctcatctggaccacacaaatcgagggaatgcctgccactcatactcattttgcgaaaccggctgaagtatgctctaacataccgtgaagtcattgctattctgatgcagcgacatgtccttgttgatggcaaagtcaggactgacaaaacataccctgctggttttatg

SEQ ID NO: 239324 - DNA, 352 bp, Glycine max
aggggcgtacacagcctcaacaaccctaacgcgtgcagagcagagagagacgcagccatggggcgaagacccgcgaggtgttataggcaaattaagaacaaaccataccccaagtcacggttttgccgtggtgttcctgatcccaagatcaggatttacgatgttggtatgaagaagaagggtgttgatgagtttcctttctgtgtccatctggttagttgggagaaggaaaacgtttctagtgaggccctggaagctgctcgtattgcttgcaacaagtacatggccaaatttgctggaaaggatgctttccacttgagagtcagggtgcacccattccatgttcttagga

SEQ ID NO: 239325 - DNA, 410 bp, Glycine max
gggcagttggaatcttggacaaggttgtcctacgatggaggagaaaaggagctggtttacgaggtttccgacaagagatggacatcaatgaaaatgaagatgaagatattctcaaggtgttccgaaaacagaaattagatgtagaaattgaagaggctgtttcaagggtgctgtccatggttgactcaccggattctcgtgagcaatatcatcgcatgcttgagaaatatcgtcaagctaaggctgaacttgcgggtacgagtgacgaagcatcattatcaacttctgtaggagatgacttatttatggatgagttttatccatttccctaagagcaaacgctagccttgttaatcttcattcttctgaactatcaatttgtggaacaagctgacttattagtttgagac

SEQ ID NO: 239326 - DNA, 362 bp, Glycine max
gctagtggcagtgaccaaactccatttctcactcgccgtcgtctcttccgtctagggtttctcctcttcacaaaaatggttgccgcaaaaaaaaactaagaagacccatgagagcatcaacaacaggctcgctctcgtcatgaagagtggcaaattcaccctcggttacaagaccgttctcaaatctcttaggagctccaaagggaaattgattatcattgctaacaactgcccccctttgaggaagtcagagattgaatactatgctatgttggcaaaggttggggttcatcattacaatgggaacaatgtggatttgggcaatgcatgtggcaaatattacagagtgtgctgccttagca

SEQ ID NO: 239327 - DNA, 425 bp, Glycine max
  unsure (1)..(425): unsure at all n locations
ggagagagagagagaaacaaagcagcacccatttggatcctctcttctcttctttgatctccgttaccctttttgttttctcaacagagagagagagagagaatctttcgaagttcgtttgcgtgtgttgtgtggtcagtcaccgatggcagcaccacctgcgagggcacgtgccgattacgattacctcatcaagcttcttcttattggcgatagcggtgtgggaaagagttgtctgcttttgcgattttctgatggttccttcacaaccagttttatcaccaccattggcattgattttaagataagaaccattgaacttgatggcaaacgcattaagttacaaatctgggatacagctggtcaggancgatttcgaactattaccacagcttattaccgtggagccatgggtatcttgctcg

SEQ ID NO: 239328 - DNA, 365 bp, Glycine max
gacttccagatttcaaagaaggcgtcttcataaacgcctttcttctccgtttccgtttcctcgttcgaattcgctttttgatctgcgaaaatgagagagtgcatctcgatccacattggtcaggctggtatccaggtcggaaatgcttgctgggagctctactgcctcgagcacggcatcgggcccgatgggcaaatgccaagtgacaagacagttggcggtggtgatgatgctttcaatactttcttcagccagactggtgctggaaagcacgtgccacgtgcagtgtttgtagatcttgagcccactgttattgatgaggtgagaaccggaacttaccgccagcttttccaccagagcagctc

SEQ ID NO: 239329 - DNA, 351 bp, Glycine max
ctaatatcgcaatcgctgaacaatgttatttaacaaaaggatcgaccacaaataaaaacaacccaactccaatcatcatcaccacgtccagcaaaatacattcaaaagctatctaaaaatttgaggaacccacagtggcgcattagaaaccatgaccatagaatttatgagagaaatattatgggcaccgtgcctctccaacaatccccaaaacgttgcttaggcttcagcaaacccaagctcagaaagcttttggtgagcctcagcgtaatcagcgaagaaggcatcttcgtccgatgcatatttctcaacaagagggcggaacacagggtcagacaaaagtgccttgtc

SEQ ID NO: 239330 - DNA, 403 bp, Glycine max
ccgggtcgaccacgcgtccatccacacaacgggacagaaccataagcttcagcaatgggaaccacacatttcgagaaaaacagcttttacatccatgaacttatgggtattctcgtatactcttgaatcttcgacatgtcatcatacttgacccttattcccattcggtgatgattacagccggaatagtgtatgcgtcatacagacaatggttcaaaggtttgtgtaatatagaccacaactgtgctttggtctgcaagaacataggtttctacgttggcatgtacacaagcttctgccgctgctacatttgcaccaagatttgttgagatctcattagtcactactcttgctaagcagattaataaatcatttcctaagccaaatacattgcatctactct

SEQ ID NO: 239331 - DNA, 196 bp, Glycine max
agggtcaaacgaagaaaggcttatggtggatacctaggcacccacagacgaggaacggcgtagtaagcgacgaaatgcttcggggagttgaaaataatcgtagatccggggattcccgatataggtcaacctttcgaactgctgctgaatccacgggcaggcaacacacaacctggtgaactgaaacatcttagta

SEQ ID NO: 239332 - DNA, 382 bp, Glycine max
ggatcctttgtattctattcttcaagattcaggtactgcgtttcggaagcagacacagatggctcgtacgaagcaaaccgctcgtaagtccacaggaggaaaggctcctaggaagcagcttgcaaccaaggctgcacgtaagtctgcaccaactactggtggtgtgaagaagccccaccgttatcgtcctggtaccgttgctcttcgtgagattaggaaataccagaagagtaccgagcttttgatccggaagctccccttccagaggctggttcgtgaaattgctcaggacttcaagactgatctgcgtttccagagccacgccgtgcttgcattgcaagaagctgctgaggcaaaccttgttgggctctttgaagacact

SEQ ID NO: 239333 - DNA, 369 bp, Glycine max
gaaacacacttgattagctgaggaggaagagagaaaaaccatggcaataacactcaacaatggcttcaagatgcctatcattggattgggcgtgtggcgcatggaaggaaacgaaatcagggacctaattctcaattccatcaaaattggttatcgccattttgattgtgctgctgactacaaaaacgaagcagaagttggagatgcgcttaaggaggcttttgatagtggccttgtgaagagagaggatctcttcattaccaccaagctttggaaattctgatcaaggccacgttcttgaggcgtgtaaagacagtctcaagaagcttcagttaacgtatctagatttatatcttgttcactttcctg

SEQ ID NO: 239334 - DNA, 330 bp, Glycine max
gggatcgtccttgtcctattaaataacaccgcccaccgactgtgtgagtccgagtgtgagagaaaccagtgactgacttttcgagaaagaaaaacaaaaatgagtttccgtcattccatcatgaacgctcttcccattctcctcttcttcctcttcgtttctgcattagtttctgcgaagaaaactggtgatgtgacggagctgcaaattggcgtgaagcataaaccagtatcatgtgaagttcaggcacacaaaggtgacagagtcaaagtacactataggggaaaactcactgatggaactgttttcgattctagctttgaaagaaat

SEQ ID NO: 239335 - DNA, 373 bp, Glycine max
gactgatacaggaacagcagagaaacaaagttagaagtaaagaagatcatggcttctctagcaaccttggctgctgttcaaccagctacgatcaatggccttgctggaagttccctctctggaactaagctctctttcaagccctctcgccacagtgtcaaatccaagaacttcaggagtggtgccgtggtagcaaagtatggtgacaagagtgtgtactttgatttggaggatctgggcaacactacagggcagtgggacttgtatggctcagatgcaccttcaccctacaaccctcttcagagcaagttcttcgagacatttgctgctccattcacaaagaggggattgttactcaagtttctgatattgg

SEQ ID NO: 239336 - DNA, 265 bp, Glycine max
gcttgcaggcgaaagagaagatggccaccgttccagggcagctcgtgtgggagatcgtgaagaaaaacaactcctttttggtcaagcagttcggaagggggacccagagcgtcgaattcagcagagagagcaacaatctctacaaactcaattccttcaagtactctggtttggcaaacaagaaaactgttacggtacagcctgagggtacagatcacgctgtgttgttggctacaacaaagacaaagaagcaaaacaagcctgc

SEQ ID NO: 239337 - DNA, 360 bp, Glycine max
gataacactgtggctcttacaatcccagctcatagcattcttcatcttccaacgagaatcagtctttgtgttccaaatggctcgtacgaagcaaacagcaagaaagtccaccggaggaaaagctccaaggaagcagctcgccaccagggcagcacgtaagtccgctccggcgacgggcggcgtgaagaagccccaccgtttcaggccggggacagtggctctgagggagattcggaagtaccagaagagcacggagcttctcataaggaagcttccgttccagaggctcgtaagggaaatcgctcaggacttcgagagcgatctacgcttccagagcagttctgtctgcgctcttcagga

SEQ ID NO: 239338 - DNA, 385 bp, Glycine max
gaacggtgcgtttaaacttttaaagtgtgaacagtgaccgacattgcttcttccctgcgtcgtcgtttttttcttctctcctctttgttagggtttgctcggttccatttttcccaaaccattcggcacaacatcgaaatttccccattgtccgcttccgcaacgaaataactctaccgtgccctacgataaggggtttctcagagcaggagcaatgtcttccccttatctacctgccacaactgactcacttgctctcgcaactgaggccaaagacccatctgaggccatctccattctttatcgggtgcttgatgatccttcttcttcaccagatgctctgcgtatgaaagagcacgcaatcacaaacctcactaagcttctc

SEQ ID NO: 239339 - DNA, 326 bp, Glycine max
ttgtgcaatttaatttctaattaagttcaattctcatcagtaaaaaagtggtacacccaaaaatacagataattcgccagctttatgtgcaatttgtgtcccattcaaattatcttcaatacgagtcaagggaataaacccctgttctatggtttccagataaacgatactctcaaaagtactggtacgagtaaaaataccctcttctttaacttctgttaatattctgatggagtgaagctcgttcataggtatttcgagaataatacgacgattttttccaggaaatccccaacaaacaaacgttaccttttccctttttaatg

SEQ ID NO: 239340 - DNA, 298 bp, Glycine max
gggcgcgggtgaggtagaacccttccacggtggtgactgcgcgatgggtgcctacaagtatgtttcagagctattgcgcaaggaacagtctgatgtcatgcgcttcttgcagcgggtgaggtgctgggagtataggcagcaaacttccattgttcgcttgacaaggtcgacccgccctgacaaggctcgtcgcttgggcttcaaggccaagcacggctatgtgatataccgtgttcgtgttacgatgggtggcccacataggccagttcccaaagggtattgtttatgggaagcccac

SEQ ID NO: 239341 - DNA, 232 bp, Glycine max
ggttctagtgtgtgattgtttgttgttgtaactcgttcttcttcttttgttgttctgtgtttgtgtttgttttttctctcacctgaaaatgtcttgctgcggtggtaactgtggttgcggaagctcctgcaagtgcggcaacggctgcggaggctgcaagatgtacccagacttgagctacactgagtcaaccaccagcgagaccttggtcatgggagtggcacctgttaag

SEQ ID NO: 239342 - DNA, 285 bp, Glycine max
cggggagtgatccttctacactaactagagccgagcagcgagagagagaaaccctagcaaaaatgccggctggtcacggtttgagatcccgcaccagagattccttctctcgtcccttcacgaagaacggtaccatcgccctcaccacatacctcagaacctaccacgtcggcgattatgtccacctcaaggttaacggcgccgtccacaagggaatgcctcacaagttctaccatggccgcaccggtcgcctctggaatgtcaccaaacgtgctgttggggtcg

SEQ ID NO: 239343 - DNA, 387 bp, Glycine max
ggatttggagaaaagaaaaagaaagaagacatttccttccgaattgaggaagggaaaggtgtcttggatggccaagtcatcttccttagctatcacgttgatctgcgccgccacggtattggtggcgatgagtcggtggccgacagccgtgggcggcggggaccaccacttgggaatgggatgggtttccagcacgtgcaaggggaccattgctgattgcctgggaggggaggagtacgagttggattcggagatcaaccggcgcatcttagccaccaacaagtacatcagctacgttgcgctgcagaggaacactgctccctgctctcgccgcggcgcctcctactacaattgccgacccggagcacaggccaatccttacagccg

SEQ ID NO: 239344 - DNA, 397 bp, Glycine max
gacctaaaaattgtaccgatatggcttcacttgtgtgtctccttttttccttgcatttcatggttatcatgtcaggttccttaccagcaaatagtgaagtgtttacaaaagagtctcctatgtctctatccacaaaacccgtggaaagactcacccaaccccacttttatttccataacaacaaaatgggggaacacccgactgctatgaaaattgttgagcctcctaaggcgtccatttctggttttgggactatttacatgatggatgaccctctaaccgaaggaccaagtccaacttcaaagcttgttggaagatgtcagggaatatatgctgaggcttcgcaacatgaacctgcgatactcatggtaacgaatttgttcttcactgagggcat

SEQ ID NO: 239345 - DNA, 351 bp, Glycine max
gatgccgaaaagtagtaccaagatggcttcagttgtgtatctcctctttggcttccatctcattgttatcatgtcaagttccttacccgcaactagtgaagtgtttgcaaaacagtatccatccacagaacccgtggaagaaaaactcacccaactccacttctatttccataacaacataacgggggaacacccaactgctatgaaaactgttttgcctcctaaggggtccattcatggttttggggctacttacatgatggatgaccctctaactgaaggaccaagtccaacttcaaagcttgtgggaagatctcagggaatatacgctttggcttcacaacatgagcc

SEQ ID NO: 239346 - DNA, 366 bp, Glycine max
acgcgtcagagacgacagaaggggctcattacagatcttccaaacttcagagcgcaggcaaacaacttcttctctcagacatggcatctcaagatggtgtgagaaaatgaagctgtgttgcacacattctgcttgcatttgctttcatggaggagaagcttctgatatttgtgcaagggaagcgtgtggcagtcaagtattactcagatgactggccaacaaacaatgcaaagttagcttttgagaagtttgtatttaccaagactgttaagacaaatgctcgtacagaagctgaggtaacactacttgagaacaatatcattatttacaaatttgtaacagacctgcatttttttgtcactggtg

SEQ ID NO: 239347 - DNA, 288 bp, Glycine max
aggagcagcaaaggcagtggcccttgtcctcccaaccctcaagggcaaactcaatggcattgcactccgtgtgccaacaccaaacgtctcagtggtggacctcgttgttcaggtctcaaagaagacctttgcagaagaagtgaatgcagcattcagagagagtgcagacaatgagctccagggaatcctctctgtgtgtgatgagccacttgtgtctgttgacttcaggtgcactgatgtgtcctcaaccgttgactcatcgttgaccatggtcatgggagatgacat

SEQ ID NO: 239348 - DNA, 375 bp, Glycine max
aggaaaaagggttgagtagtagtgttgaggacaaggtgagttgtgttggggacaaggtggttgttgtggaaaaagtgagtagtgttgaggagaaacaagtggtttcgaaaacgattgagcaagggaaaagggtggtggaccctgtggaggaagaaaaaactgtcacaagcacgaggagtgtgaacttggtgtttggtgaagatataaggtgggcagagttagccgtgcattgtactgtgaagctggctacggatataactagggatcggtatccaggtctgaagggtgctcttgtcaagtacaaggatacacagggtgaattggttacaatcactgccaccgaataactgcggctagctgaacaatctgcccctg

SEQ ID NO: 239349 - DNA, 342 bp, Glycine max
gagagtggtggagtgtgcaaaagagcgtcgtagtcgcaaccctaatcagaagaagcgcagcttcaagcgagtgacagccaccagccatgggtcgtatgcagagccgcggtaagggtatatcctcttctgctttgcccgacagaaggacacctcctagctggctcaagatgccttcgcaggatgtcgaagaagatatctgcacgtttgctaagaaaggtttgaccccgtcgcagattggtgtcattcgcacagattcgcacggtattgctgagggtaagagcgtcgctggcagcacaatccttcgcatccccaaagctcatggacgtgcgcccgagagtccag

SEQ ID NO: 239350 - DNA, 485 bp, Glycine max
ttgtagaggcacgtacaccggtagggtaccggtgcaggaattcccggttcgacccacgcgtcaaacggctgcgagaagacgacagaagggtaatttgggaagtattgctcccatcgccattggtttcattgtcggcgctaacattttgttgggtggggccttctctggagcggccatgaaccacgctgtgacatttgggcctgctgtcgtgagctggacctggaccaaccactggatctactgggccgggcctctcatccgtggtggaatctctggccttgtttacgaggttgtcattatcagccacacccacgatcagcttcccatcactgactactatatggggggaaatgaccataacattaccgcacttaatcgccttgcaaaagcggccgctctagaggatccaagcttacgtacacgtgcatgcgacgtcttacctcttctacagtgtcacctacattcatttcaatggccatcctctg

SEQ ID NO: 239351 - DNA, 401 bp, Glycine max
agaaggggacttcaacatctcttaataaagattagaaatcgacatatggggggagcaaagagttactcttgttttgcagtaatagctgtggccttggttttgctacttctgaatgtggctgtggtttgcaatggaggcaagacaagcacattcattaggaaggttgagaaaactgaggacatgccccttcatagtgatgtatttgttgccccttctggctataatgctcctcagcaggttcatataacacaaggtgaccaagtgggaagggccatgatcgtgtcatgggtgactgtggacgaaccaggaaagagtctagtgcattactggagtgacgccagccagcacaagagagtggccaagggaaatcatgtcacatatagatacttcaattattcttc

SEQ ID NO: 239352 - DNA, 362 bp, Glycine max
cggctgccagacgactgaaggggacttcatcatcgcttaacaaagattagaaatcgacatatggggggagcaaagagttactcttgttttgcactactagctgtggccttggttttgctacttctgaatgtggctgtggttttcactggacgcaagacatgcatattcattaggaaggttcacaaaactgacgacatcccccttcatagtgatgtatttgttgccccttctggctataatgctcctcagcatgttcacatgacacatcgtgaccaagtgtgaagggccataatcgtgtccccggtcactgtgcattaatcaggaactagtctatgtcatctctggactgactcccgccagcc

SEQ ID NO: 239353 - DNA, 76 bp, Glycine max
ggggaaggggtcagatttatcttgacgggagcaagagtaataataatgtgtataatgctacatcagcgggtatggt

SEQ ID NO: 239354 - DNA, 194 bp, Glycine max
ggcatcacacacagacaaacactcccattttctctctttctctttctctccgacctagcgagaccgagcgatccgatcctaatcccgcgatgctccgccgcgcaaccacctccctcatctccggcgcctcccgccgctgcctctccaccgacgtgccggcgacgccggcggcggattccgtcttcgcggacgcg

SEQ ID NO: 239355 - DNA, 390 bp, Glycine max
ggtggtgtcgagctgagaataccagttgctccagtagccggcactaaacaacatggcggacaaggcagtcaccatccgaaccaggaagtttatgacaaacaggcttctctccagaaagcagttcgtcgttgatgtccttcatccagggagggctaatgtttccaaggctgaactgaaggagaagctgggaagaatgtatgacgtgaaagacaccaacactgtatttgtcttcaagttccgaactcattttggtggtggcaagtccactgggtttggtttgatctatgattcagttgagaatgctaagaagtatgagcctaaatacaggcttatcaggaatggacttgataccaaagtagagaaatcaaggaagcacatgaaggagagaaa

SEQ ID NO: 239356 - DNA, 398 bp, Glycine max
tattcacacaactaactaagaaagtcttccatagccccccaaaaatgaagagcaccatcttctttgctctctttctcttttgtgccttcaccacctcatacctaccttcagccatcgctgatttcgtgctcgataatgaaggtaaccctcttgaaaatggtggcacatattatatcttgtcagacataacagcatttggtggaataagagcagccccaacgggaaatgaaagatgccctctcactgtggtgcaatctcgcaatgagctcgacaaagggattggaacaatcatctcgtccccatatcgaatccgttttatcgccgaaggccatcctttgagccttaagttcgattcatttgcagttataatgctgtgtgttggaattcctaccgagtgg

SEQ ID NO: 239357 - DNA, 316 bp, Glycine max
acttgagacacaaactcacacactttgtactctccgtccttccttcttcgatccagatctctctccttctccctcaaatggcttcccttctgcaatgttccatgcccctcgtctctctttccaatcgagctctggtacccggtaccaggatctccaacccaagttcagtttccctttcaattaagggaagaagtttcccatccgttacattgcagcccagagggcgtcggtttcagcttagatgtgcggcaaaaccagagacagtgaagaaggtgtgtgacatagtcaagaagcaattggcactgccagatgaatc

SEQ ID NO: 239358 - DNA, 388 bp, Glycine max
gacttcaattgcaatcaaattagttcattctctttgcgcagttccctacctctcctttcaagatgcagatcttcgtcaagaccctcaccggaaagaccatcacccttgaggtggaaagctctgacaccatcgacaacgtcaaggccaagatccaggacaaggaaggaattcccccggatcagcaacgtctcatcttcgccggaaagcagctcgaggacggccgtaccctcgccgactacaacatccagaaggagtcaacccttcaccttgtccttcgtctccgtggtggcatgcagatcttcgtcaagactctcactgggaaaaccataaccctagaagtcgaaagctctgaaaccattgacaacttcaaggccaagatccaggacaa

SEQ ID NO: 239359 - DNA, 365 bp, Glycine max
gactcatctcttacaacgaaaccctcttcatcttgttctatctgtgacgagcatcatggcctcaagagcagtgttattgttggctatgtgtgtgcttccggcgatggttgtggccattcgcccagcaaagaaccctttttgcgtgaagggtcgtgtctactgtgacccttgccgtgctggttttgagacctcagctaccacctacattgctggtgctgagattatgttgcaatgcaagagcagggttagcaacgaggttgtgtacacgaagaaggggtacaccgactcaaccggagcatacacaatgtacgtggatgaggatcacgcagatcagatctgcagtgccaagctttgtagcagccctc

SEQ ID NO: 239360 - DNA, 359 bp, Glycine max
ggacgacttaaccccaaacgaagaaaaaagactgagagcaattgcatcaacaacaaattgaaaggatgtcgatcttcgagtacaacggaagcgccgtggtggctatggtcggcaagaactgcttcgccattgccagcgaccgaaggctcggcgttcagctccaaaccatagccacggatttccaacgcatttccaagattcacgacaagctcttcatcgctctctctggcctcgccaccgatgctcaaacattgtatcagcgtcttgttttccggcacaaactgtatcagcttcgtgaagagaaggatatgaaaccagagacctttgccagcttagtctctgctctgctttatgagaaa

SEQ ID NO: 239361 - DNA, 287 bp, Glycine max
ggtgttgctttagaatctgggtgctgcggctgaagatctcgattagccgaaaattgcaagaacggcttcaggctcttgcgatcaacaaacgcagcgttttgatctcagatttgagggggagagaatggcaacaacagtgagaagtctgaagataaagacaagtacgtgcaaacgtatagtgaaggagctgcattcttatgagaaggaagttgagagagaagctgccaaaacagctgatatgaaggaaaaaggagccgatccctatgatctcaagcaacaggaaaatg

SEQ ID NO: 239362 - DNA, 309 bp, Glycine max
accactaccaaaggccccaagagaagccaaatacctactagtcgtcattgactacttcaccaagtggataaaagcaagaccactgtgggaaattacagctaacgaggtggaaaatttcacctagaaacacctcatctgcagctacggcctcccatacgccattgttgtggacaacgacactcagttcgaagcttagacttctgaataattcttgacaaggataggcatcaagcacctagtcacctttgttgaacatcctcaaactaacggttgggtagagacaaccaatagagtccccttgagagccct

SEQ ID NO: 239363 - DNA, 399 bp, Glycine max
  unsure (1)..(399): unsure at all n locations
gacaaacagacacacagtcggttcttccttctcaaatattcttgagatccccattttctccgaagcaaagccatggctaagggtcctggtctctactctgacatcggcaagaaagctagggatctgctgttcaaggactaccacagtgaccagaagttcaccatcaccacctactcaccgactggagtggctattacagcatcaggaaccaggaaaagtgaactgtttctggctgatgtcaacacccagttgaagaacanaaacatcactactgatatcaaagttgatacagattctaatctcttcacaactatcactgtcaatgaacctgctcctggtctgaaggctatttttagcttcaaagttcctgaccaaaggtctggaaaggtggaagttcag

SEQ ID NO: 239364 - DNA, 303 bp, Glycine max
attcccgggactgacccacgcgtccgcccacgcgtcagtacaggcgtcagagggctacgaaaagacaaggtctgggagacggtcagttctattcgggagatcccgatgttctccggtccagtgccatggcttggggtcctggtcgctactctgagatccgcatgagggctacggatgggctgttcacggactaccacagtgacgacgaggttcatcatcaccagctactcacctactggagtggctattacagcagtcaggaaccacgagaagtgacctgtgtctggctgatgtcggcaccca

SEQ ID NO: 239365 - DNA, 362 bp, Glycine max
ggcagacgccgtgactagacactcatctcactcgcgccatcttagggtttctccttttgtttcgcaacatggttgccgctaagaaaactaagaagacccatgagagcatcaacaacaggctcgctcttgtcatgaagagtggcaaattcaccctcggttacaagaccgttctcaaatctcttaggaactccaaaggaaaattgattatcattgctaacaactgcccccctttgagaaagtcagagattgaatactatgctatgttggcaaaggttggagttcatcattacaatgggaacaatgtggatttggggactgcatgtggaaaatattacagagtgtgctgccttagcaatattgat

SEQ ID NO: 239366 - DNA, 176 bp, Glycine max
gactcaccacttcaaaacactcataacacaaagcacaaagcaaagctcatccttgagttaaaaaatggcagcagcttcttccatggctctctcatccccatccttggctggcaaggccgtgaagctgggcccatcagccccagaagtgggaagggtgagcatgaggaagaccgtca

SEQ ID NO: 239367 - DNA, 275 bp, Glycine max
gacacagactttattacagttgttgtattgtaattaagcaagaatattaggcaatggagtcttctggaacttcaactactcttgctctttttttaaccatcaatttgcttttctttgtcatggcaagtggctgcgacacttgcacagagcctaagccaaagcctatcccattccgttaccctaaccctagtgcgtgcgcgaagaggtgccccagggacggacttaagctcggaatgtgcgggaacgtgcttaatggaccaattggtgctattgta

SEQ ID NO: 239368 - DNA, 307 bp, Glycine max
taatttgggaattattgctcccatcgccattggtttcattgtcggcgctaacattttgttgggtggggccttctctggagcggccatgaaccccgctgtgacatttgggcctgctgtcgtgagctggacctggaccaaccactggatctactgggccgggcctctcatcggtggtggaatcgctggccttgtttacgaagttgtctttatcagccacacccacgagcagcttcccaccactgactactacagggggggaaatgaaattaaatgcctgcacaccttacccttaaaaaaaaccgccgcc

SEQ ID NO: 239369 - DNA, 283 bp, Glycine max
gagtgttagtgttcctcaagccatcgtaccgtgttgcctctctgcaatctacagccaaaatgcctttcaagaggtacgttgagatcgggagggttacccaaatcaactacggcacggaatatggcaggctcgtcgtcattgtcgacgtcattgatcagaacagagctcttgtcgatgcccctgatatggtgaggtcccaagtcaatttcaaaaggctttccctaaccgatattaagattgacattaatagggtccctaagaagaaagatcttgtcaaagccat

SEQ ID NO: 239370 - DNA, 292 bp, Glycine max
ggctagagtggattctggctcgcatggttctccaccctgaaatccaagcaaaggcacagcgcgaaatagacttcgtttgcggatcctccaggctcgtatccgaagcagacattccgaacctgcgctaccttcaggtgcatagtaaaagaaaccctccgtgtgcagccaccaggcccgctacgctcgtgggctcgccttgctgtgcacgacgttacggttggcggcaagcacgtgattcccaagggcaccaccgcgatggtgaacatgtgggccatagacccacgacgagagg

SEQ ID NO: 239371 - DNA, 271 bp, Glycine max
gggttattaaggagcatagggtgaagagggagaggggtgactgtgtgaaggatgaacgatctgaggattttgttgatgttctgcttgatttggacaatgaaaccatgctcagtgaagctgacatgattgctgttctttgggaaatgatattcaggggaactgacacggtagcaattctgctagagtggattctggctcgcatggttctccaccctgaactccaagcaacggcacacctcgaaatacacttcctttgcggatcctccaggct

SEQ ID NO: 239372 - DNA, 334 bp, Glycine max
gaaccaagtttgcttgcgtgtatattcattttagcatcaaggttgaatctcagagaaaaagaaacatcgacaagcatgtctggaagaggaaagggaggcaagggtctcggaaagggaggagccaaacgacaccgtaaggttctgagggataacattcagggaatcaccaagcccgcgattcgccgtctggccagacgtggtggcgtcaagcgtatcagtggtcttatctatgaagaaactcgcggtgttctcaagatctttctagagaacgtcattcgcgacgctgtcacctacactgaacacgctcgccgcaagaccgtcactgccatggacg

SEQ ID NO: 239373 - DNA, 398 bp, Glycine max
cgggtcgaggcacgcgtccacccacgcgtccgaattcgagcggccgctttatccagcgactcctttacctccaaaggccacatttcttgatgatccattacgagttcttcgagcaattagatttggtgctagatttgaatttactctagatgaagatctgaaagtagctgctgcatgtgatgatgtgaaagatgctctagctgctaaaattagcagagagcgcattggaactgagagtgatctgatgatatccggaaatcaacctgtcaaagctatgacgtataattgtgatcttacactattttggattgtattcagtcttcctcctgaatttgaaccttacatttcagatgggtgttaaaggctttgcatttcttacttggatactgcatggaacc

SEQ ID NO: 239374 - DNA, 216 bp, Glycine max
gattccaattcaaacagaaaacctaatttctcaaagttgagttcgcaccaaattttcctcactaaaatgtctggtcgtggaaagggtggcaagggtttgggaaagggaggtgccaagaggcacaggaaggttctgcgcgataacattcaaggaatcacgaaacctgcgattcgtgagttagcgagaagaggtggggtgaaaaggatgagtggtttg

SEQ ID NO: 239375 - DNA, 152 bp, Glycine max
gagagaaagagagagaacgatgtcgaagcgtggtcgtggtggttcggcggggaatgagttccgcatgtcgctgggtcttccagtggcggcgacagtgaactgcgcctacaacacggcggcgaagaagctgtagatcagttcggtgaaaggga

SEQ ID NO: 239376 - DNA, 302 bp, Glycine max
gctgaatcgtcgtttacttctcagcagcttcggctagggttcagaaacgaaaaagggttcggtgttctgttcgcgatgagagccaagtggaagaagaagcgtatgaggaggttgaagaggaagcgccgaaagatgagacagagatccaagtagtgcgttaaacctagtttgttgctgttgcttttacaattgcgtaggttgtcgaaggggacacccagttgttagtggcactggtttctccgttttgatgtgtgatacattttgttggattcaagtagtttacgttcgtcctaggttattag

SEQ ID NO: 239377 - DNA, 368 bp, Glycine max
ggagttgagaggatcgtgagaggggcagtagccgagattccgtgagttgcaaaaatgaagacgattctttccatcgagaccatgaacatcccggacggcgtgagcatcaaagttcatgccaaggtcatcgaagttgagggcccccgcggaatattggtgcgagacttcaagcatttgaatctcgattttcagctcattactgacgaaaacggtaaaagaaagctgaaaatcgacgcgtggtttggttctcggaaaacatccgacgccattcgcaccgccttgagccacgtggagaatcttatcaccggcgtcaccaacggctaccgctacaaaatgaggttcgtttatgcccattttcccatcaacgc

SEQ ID NO: 239378 - DNA, 287 bp, Glycine max
ggagcgaagaagatattagggtttttgagtgcggtgcggcgatcctagcactctcgtctgcagctttcgccgacagcttcattcagcatggctgagcaaaccgagaaggcttttttgaaacaaccaaaagtgtttctcagctcgaagaaaagtgggaagggaaagagacccggaaagggtgggaaccgcttttggaaatccgttgggcttggatttaagactcccagggaagccatcgaatgaacctacattgacaagaagtgccccttcactggcaaggtttccat

SEQ ID NO: 239379 - DNA, 150 bp, Glycine max
gcttcttcagccatttagctccatagctgcagcattagggtttttcatctgcttcaatggggaagggaacagggagttttggtaagagaaggaacaagactcacactctctgtgtgaggtgtggccgccggagcttccatcgccagaaga

SEQ ID NO: 239380 - DNA, 333 bp, Glycine max
ggtgacagtgaagagatggaaggcatagtacacaggacagttgaagtgaatggcataaaaatgcatgttgctgagaaaggtgaaggtcccgtggtcttgttcctccacggcttcccggagctctggtactcctggcgccaccagattctggctctcagcaacctcggctaccgcgccgtggctccagatctccgcggctacggagacaccgaggcaccagcttcaatcagcagctacaccatcctccacttagtttctgacatcgtcgcgctcattcactcacttgctgtggattaagtcttcctcgtagcccatgattggggggctgtcata

SEQ ID NO: 239381 - DNA, 349 bp, Glycine max
aattcgccggtcgacccacgcgaccacccacgcgtccgcccacgcgtccgggctgccatcatctacaacagagaccatgcatgggatgaccaatggattttctgggttggacctttcattggagctgcccttgctgctgtgtatcaccagatagtcatccgagccatccctttcaagacaagggcttaggctcttgtttttgtatgtgcttgcttgtattagttgttatttatgtatctggagtcttcttcatttggaaattcatgtgaatctttttgttttaatccactgtatggatgtaaattatgacatgattagttccttgattgtatctgtgacactctgcaaa

SEQ ID NO: 239382 - DNA, 367 bp, Glycine max
ggagaaaaacgagccaattcatcattttctctcttctctgcttcttcttgttcaaatcttaggagctgaggagaatcaatcgagagaaatatgtctggtatcgctcgtggacgccttgctgaggaacgaaagtcatggcgcaaaaaccatccacacggtttcgttgccaagcccgagactctacctgatggcaccgtaaatttgagtgtctggcattgcactattcctggcaagagggggactgattgggaaggtggatattttccactgacaatgcacttcagtgaagaataccctagcaagcctcccaagtgcaaattcgctcaaagtttctttcaccctaatgtgttaccatctggaactgttt

SEQ ID NO: 239383 - DNA, 344 bp, Glycine max
ggtgtgagtgaagaagcagagggagtagcggcattaaaaatgcagatcttcgtgaaaactctgacagggaagactataaccctcgaggtcgagagcagcgacaccatcgacaatgtcaaggccaagattcaagacaaggaaggcattcctccggatcagcagcgtttgattttcgccggaaagcagcttgaagatggaaggaccctggccgattacaacatccagaaggaatcaacccttcatctcgtcctcaggcttcgtggtggcatcattgagccttccctcatggctttggctcgcaaatacaaccaggacaagatgatttgccccaggtgctatgcccg

SEQ ID NO: 239384 - DNA, 354 bp, Glycine max
gaacctttgcattctattcattcaagattcagcaagtgcgttttggaagcagagaccgaaatacttcgagatggcccgtacaaagcaaactgctcgtaagtcaactggaggaaaagctcccaggaagcagcttgcaaccaaggctgcacgtaagtctgcaccaacaactggtggtgtgaagaagcctcatcgttatcgccctggaactgttgctcttcgtgagattaggaaataccagaagagcactgagctcctaatcaggaagcttcctttccagaggttggttcgtgaaattgcccaggatttcaagactgatctgcgtttccagagccatgctgtgcttgcattgcaaga

SEQ ID NO: 239385 - DNA, 366 bp, Glycine max
gactcctttccgtcacttttggggaagaggtcgagtttcacagcagcaatggtgtacgtcaaggctcagaaatcaaaagcctacttcaagagatatcaagtcaagttcaagagaagaagagagggaaaaaccgattaccgtgccaggattcggttgattaatcaggacaagaacaaatataacactccgaaataccgatttgttgttcgctttagcaacaaggacattgttgcacaaataatatctgctagcattgctggcgatattgttcttgctgcagcatatgcacatgagctgccacaatatggtcttgaagttgggcttacaaattatgctgcagcttattgcactggtctcctgttgggc

SEQ ID NO: 239386 - DNA, 195 bp, Glycine max
taagttgggaattattgctcccatcgccattggtttcattgtcggcgctaacattttgttgggtggggccttctctggagcggccatgaaccccgctgtgacatttgggcctgctgtcgtgagctggacctggaccaaccactggatccactgggccgggcctcgcatcggtggtggaagcgctggccttgttta

SEQ ID NO: 239387 - DNA, 362 bp, Glycine max
gatctttcactcgttctctgaaattttaattgacttttctcccctcataaaaaaaacctaccaatggctcccgcaaaggcagagaagaagcccgcggagaagaagccggcagagaaggccccagcggagaagaagccgaaggcggagaagaagatatcgaaggaaggaggaagcgagaagaagaagaagagaacaaagaagagcgttgagacctacaagatctacatcttcaaggtgttgaagcaagtgcaccccgacatcgggatctccagcaaggctatggggatcatgaacagtttcataaacgacatcttcgagaagctcgcccaggagtcatcgcgtctcgctaggtacaacaagaa

SEQ ID NO: 239388 - DNA, 320 bp, Glycine max
ggccatttttcgtagctgctgttcttgcgcgtgaacaagcctcaggtaagccaaaaccatggttaagcataacaatgttatcccaaacggacacttccgtaagcactggcagaactatgtgaagacttggttcaatcagccagcacggaagacaaggagacgattggctcgtcagaagaaagctgtgaagatattccccagacctacggctggacctctcaggcccattgtacatggtcaaactttgaaatacaacattaaagttagacgtggaaggggattttctcctgaagaactccagggaacagggattcccaaaa

SEQ ID NO: 239389 - DNA, 207 bp, Glycine max
gagagaacaagaatcaaagaatggcaactatgactggtgtgagcctttcaagccccagggttttcttcaacgcatcaccctcgccgcaaaacacgtacgccgtaaagttcgcagttccactcagccaagggactcgacttggtagtgtcaggttgggtcgggtgatgaggatgcgagccgttcgcgcagctccagagcgcagttcgg

SEQ ID NO: 239390 - DNA, 300 bp, Glycine max
gcagctgcgaaaacctagtgcaccgtaagggttgtgaagcaggcagagaagagccatggtgcacgtttctttctagcgaaactatgggaaaacgttcaagaagcctcgtcgtccctacgagaaggagcgtttggacgccgagttgaagctggtcggtgagtacgggcttcgctgcaagagggagttatggacggtccagtacgccctgagccgcatccgtaacaacgccagaaacctattggaccttgatgagaagaacctcgccgtatcttcgaggggtaagcccttctccgaagaatg

SEQ ID NO: 239391 - DNA, 330 bp, Glycine max
gctctttctaaaaaccagaaacaacaaacacaaaccgaaaaggcgaaaggggttttccgagtgagatctagggtttccatcgattcggagagaggatattgatcgaacgacctcagcgagcaaggacaggaggtggagtactagatcatggattcggtgccttcgaattcgcatggaaacctcgatgagcagatttctcagctcatgcagtgcaaacccttgtccgagcaagaggtatgggtcttgtgtgataaggcaaaagagattttgatggaagagagcaatgtacagcctgtgaaaagtcctgttacaatttgtggtgatattcat

SEQ ID NO: 239392 - DNA, 336 bp, Glycine max
gattgagtacaacttcacattttagaagaataccccctcttttgctgcatcagaggagttgtaaattaagagcatggctgcacaagctcttgtatcatcatcttctcttaccttctcagcggaggctgcaagacaaagtcttggaccaagatcactccaatctccatttggcttctccagaaaagcctcctttcttgttaaggcagctgctaccccccctgtcaagcaaggatcagacagacctttgtggtttgcatcaaagcaaagtctttcttacttggatggcagccttccgggtgactatggatttgaccctctgggactttcagaccctga

SEQ ID NO: 239393 - DNA, 304 bp, Glycine max
ggcacttcaattgcaatcaaattagttcattctctttgcgcagttccctacctctcctttcaaggttcgtagatttcttctgtttttttttcttcttctttattgtttgttctacatcagcatgatgttgatttgattgtgttttctatcgtttcatcgattataaattttcataatcagaagattcagcttttattaatgcaagaacgtccttaattgatgactttataaccgtaaattaggtctaattaaagtttttttcataaagattttcagatccgtttacaacaagccttaattgttg

SEQ ID NO: 239394 - DNA, 322 bp, Glycine max
gagggttttgcgctgttgttgctgctcatcctccgtaacctccgagctctgcaccgaagaacgaagccatggggaagacacatggaatgggatctgctcgcaagctcaagtcccaccgcaggaggcaaaggtgggctgacagcggagagaggaaatcacatcttggaaatgaatggaagaaaccttttgctgggtcagcgcatggcgggggaattgtccttgaggaggggggtattgaggctaagcaagccggaggcggccattcgtaagtgtgccagggttcaacttatcaagaatgggaagaagattgccgcgtttgtcc

SEQ ID NO: 239395 - DNA, 268 bp, Glycine max
  unsure (1)..(268): unsure at all n locations
cccacgcgtccgacgacagaaggggagagtggtggagtgtgcaaaagagcgtcgtagtcgcaaccctaatcagaagaagcgcagcttcaagcgagtgacagccaccagccatgggtcgtatgcacagccgcggtaagggtatatcctcttctgctttgccctacagggggggggctcctanctggctcaagatctcttcgcaggatgtcgaggagggtggcggcagcgtggggaggaaaggtttgggggcggcggagattggtgtcag

SEQ ID NO: 239396 - DNA, 403 bp, Glycine max
gaccaaaccattctccaaacccttccacaaaacatcaacacggttttccttccaccggtgaaccctaatgacctaccacaaggtgttcccgtagttgtccaaattcagctagcaatggctcactccatgccctccatccaccacaccctcaagtccataacttcaaagactccctacgtggccatggtggttgattctttcgccatgcatgccctagatttcgctcacgagttcaacatgttgtcctacgtttacttccctatatcagccaccacactctccatgcacttgaacttgcccttgttggacgaggaaacatcatgtgagtacagatatctgccggaggctatcaaattaccgggttgcgtgccgtttcacggccgcgatctctatgcccaagccc

SEQ ID NO: 239397 - DNA, 219 bp, Glycine max
cccacgcgtccgcccacgcgtccgactcctggaaagaagtctcttgctattgaggcattctcccgtgcactcgtggctattccaacaatcattgctgataatgctggtttggacagtgctgagttgatttctcagctccgtgcagagcatcagaaggagggctgcactgcggggagtgatgttatttctggctctgttggagacatggctgaagggggg

SEQ ID NO: 239398 - DNA, 325 bp, Glycine max
ggcagtttcaaattttcttttccgtcactttcccgagaaaaaaataacacttttcactttcttcactacgttctcacttcgatatggctcgtacgaagcaaaccgctcgcaagtccaccggtggcaaggcgccacgtaaggagggggcgcggcaaggccgctcggaagtccgctccggcgaccggaggagtgagggggcgccagcgggtcaggccgggaaccgtggcggggggggaaatcagaaagtagcaggggggcagcgagcttctcatcaggaagcttccatttcagaggctcgtgagagaaatcgcgcacgatttcaaga

SEQ ID NO: 239399 - DNA, 305 bp, Glycine max
gaacagccagaacactttccacttgtctccgaattagttatcttgagaaacattattcccattgctatatattatggctagcatgaaggttacatgggtggttgtgatcatgtgcatggccgtgggagggtggagcgatgatggcgcaagccatgacatgcagtgatgtggcggtgagcagtggacacgggcgatcctacctgatgcgggggggggcaccttcaacactttgcttggagggggtcaagaacattcttggcgctgctgtcaccaccgttgacagacaaactgtgtgcaactgtctc

SEQ ID NO: 239400 - DNA, 378 bp, Glycine max
gggtgccgtttattcatggaccagaagaatacatcatagcttctttctcatttcacacacacaagaaccttgagacatcatgaagatttcaagttccaagcaattggctgtgggatttgcacttggcaatgaaggataggcaacgttggagagctgaagaggatgctttacttcgtgcatatgtcaaacagtatggtcctagggaatggaatctcgtgtctcagcgcatgaacacacctcttaacagggatgccaagtcatgcttagaaaggtggaagaactacctcaaacccggcattaaaaaaggatctcttactgaggaagagcagcgtctagtcatcaatcttcaagcaacgcacgggaacaagtggaagaaaa

SEQ ID NO: 239401 - DNA, 328 bp, Glycine max
gaacatttgtctcgcatctttcaatttgaatcaacggttatacccttttctatttgagcatcatcatgtccaccgcagcgcagcccaaggccaagaaaacggcgtcgtccaagaagcccctctcccatcctaccttcgccgctgcggggggcggaggcgatagcgagtctgaaggagagaaccggttcgagcgaagaggcgggtgcgaggttcatcgagggcaagcggagggggttgcctccaacctacaggaggggtgttctcgttcatctcaggaagtctgttgctgctggcaagctcgttaaagtcaaaagctctttcaagctcg

SEQ ID NO: 239402 - DNA, 296 bp, Glycine max
  unsure (1)..(296): unsure at all n locations
cggggcgagagaagttattagggtttttgagtgcggcggtccaaacactcttctctgcagcttttgcctacaactcccttcaccatggctgaacaaaccgagaaagcttttctgaagcggggaggagtgtttctcancacaaagaagactgggaagggaaagagacctggaggaggtgggaagcgcgtttggaagtccagtgggcggggatttaagactcccatggaggggggcgaaggaacctagattgacaagaagtgccccttcactggcaatgtttccatccgtgggcgtat

SEQ ID NO: 239403 - DNA, 289 bp, Glycine max
gagggtttcaaagtggacagaggagagcgtcctagtcgcaaccctaataagaagaaccacagcttcaagcgagtgacatccaccagccatgggtcgtatgcacagccgcggtaagggtatatcctcttctgctttgcgtgggggaaggacacctcctagctggctcaagatctcttcgcaagatgtcgaggaggggatctgggggtttgcgaagaagggtgtggggggcgtctcagattggtgtcattgggcgggagtctcacggtattgctcaggtcaacagcgtcac

SEQ ID NO: 239404 - DNA, 351 bp, Glycine max
ggaaacagagagtgatttcagtgagtgatcggtgttcacttgatctcatcataatcgtcagcgtcaattgaagaagatgccgatcagaaacatcgccgtcggaaggcctgaagaggcgactcaccccgacacgttgaaggcggctctggctgagttcatctcaaccttcatcttcgtgttcgccggctcaggctccggcatcgcctacaacaagctcaccgacaacggcgctgccacccctgccggcctcatctccgcccccatcgcccatgcattcgccctcttcgtcgccgtctccgtcggcgccaacatctccggcggccacgtcaaccccgccgtcaccttcggcgc

SEQ ID NO: 239405 - DNA, 304 bp, Glycine max
gaaagtagcagagcagagtaaccagcgaggtagggttttctctttctcacgttcctcttcgcagcgccacagtagcttcgcattagcaatggcgagaatcaaggtgtacgagctgaggtacaagacaaaagcagagcttctgaggcgagcggaaggatctcaaagcagaactcgctctcctccgcgtcgctaaggtcacgggcgggggcgcagacaagctttccaggggcggagtggttcggctttcgagagggcgggtgctgacagtgatttcccagaagcaaaaggcagcgttgagggaagc

SEQ ID NO: 239406 - DNA, 279 bp, Glycine max
gactcctcaacgctttctcatcgctgatcaaacttcaaaccctagctaggatttcaaggtacacttaacgatggcttcaaaacgcattactaaggagttgaagggtcggcagcaggaccctcctgtttcctgcagtgctggccctgttggtgatgagaggtttcagggggaagctacaattaggggtggagcggacagtccttatgctggtggggtagtcctggtgaccattcacttcccaccagattatccatttaagccaccaaaggtttccttccg

SEQ ID NO: 239407 - DNA, 303 bp, Glycine max
ggaaacagagagtgatttcagtgagtgatcggtgttcacttgatctcatcataatcgtcagcgtcaattgaagaagatgccgatcagaaacatcgccgtcggaaggcctgaagaggcgactcaccccgagggggtgaaggcggctttggctgagttcatctcagccttcagcggcgtgtgtcgggggcgcaggcgccggcatcgcctagaggaagggggccgacaacggcgctgcgacgggggccgggctcatctccggctccatcgcccatgcattcgccctcttcgtcgccgtctccgtcg

SEQ ID NO: 239408 - DNA, 359 bp, Glycine max
ggaagaaatgcaacagattatggaagaaaacaggactttgcatgaacttaacttctcttccaccaggtcattgaaaaatcagcaaatggaaatttctgagctgaagaagatcaaagagaaacttgaacgagagtttgctgtaaaagttgaagaaagtaatgtcctccaatgggaatctcatcaaataaaggatgaaatcctgggcttgaataatagataccaggctatactggaagaactaggctctgtgggtttgaatcctaaatcttttgcagcatctgtgaaggatttacagaaggagaatacaatgataaaggatgcttgcaaaatggagcgagatgagaaagaagctctgcatg

SEQ ID NO: 239409 - DNA, 378 bp, Glycine max
gaaccaagtttgcttgcgtgtatattcattttagcatcaaggttgaatctcagagaaaaagaaacatcgacaagcatgtctggaagaggaaagggaggcaagggtctcggatagggaggagccaaacgacaccgtaaggttctgagggataacattcagggaatcaccaagcccgcgattcgccgtctggccagacgtggtggcgtcaagcgtatcagtggtcttatctatgaagaaactcgcggtgttctcaagatctttctagagaacgtcattcgcgacgctgtcacctacactgaacacgctcgccgcaagaccgtcactgccatggacgttgtttacgcgctcaagatgcacgggaggaccctctacggattt

SEQ ID NO: 239410 - DNA, 467 bp, Glycine max
agattcgctaactttgccgcggcaggtacaggtcaggaattcccgggtcgacccacgcgtccgcccacgcgtccgacggctgcgagaagacgacagaaggggtcatagctctaccctatcttttatttcagttcttcggcaataatcacaaaaactttttgaattatggatacaagaatccaaattcaatacgtaattttagtattcaaagaatcttctttcataatcttatttttcagttattaaaccccttttttttaccaagttcaatattaataagattagtaaatatttatttgtttcgatgcaacaataaatttatatttttaataagtagttttattggttggataattggtcacactttttttatgaaatggattgaatttatattagtccgcatacagcaaactaattcgattaaatctaacgtacgtattcaatcaaataaatacattatgtcagag

SEQ ID NO: 239411 - DNA, 345 bp, Glycine max
tttttgtttttttgccttctcatcatagggtctcttttgttcttctgtcatgtttttccactcttcggctgtgatctttggaacctccaagaaattcttgttctcagcaacaagagctgcccgtcaatcactagtgaacaagaaataagctgacatggggtgcttcggtttcaatggatccttctcattcttgttcttcttgccctcattttctgcctcttgtttgaattgcatgtactgttcgagcaactccatggcagtcttctgcttctgcacgtcttccaacaacctcattgcctcagtctcacgtttttcctttgcaatcatttgcaaataagcttcttt

SEQ ID NO: 239412 - DNA, 325 bp, Glycine max
  unsure (1)..(325): unsure at all n locations
gagggttttgcgctgttgttgctgctcatcctccgtaacctccgagctctgcaccgaagaacgaagccatggggaagacacatggaatgggatctgctcgcaagctcaagtcccaccacaggaggcaaaggtgggctgacaagtgggagaggaaatcacatcttggaaatgaatggaagaaaccttttgctggttcagcccatgcgaagggaattgtccttgaagggagggggattgangctaagcagcgcagggcggccattcgtaagtgtgccaaggttcaacttatcaagaatgggaagaagattgccgcttttgtccctaa

SEQ ID NO: 239413 - DNA, 325 bp, Glycine max
ggctgtgagtgagattacccatagatagagagcgcggcataacctaaacttacccttcttctctctgtgtgtgtgcgcatcaaacgcaaccagaagcagccatggccactgcaagaactgtgaaggacgtttctcctcatgagttcggtcgaagcttactcttctcacctcaagcgatctggcaagatggagctgccagagtggacggatattgtgaaaactgcaagatgtgagggagttggctccttattatcgtgactggtactatgtcagagctgcttccatggcaagaaagatctacgtgagaggaggacgtggtgttggt

SEQ ID NO: 239414 - DNA, 323 bp, Glycine max
  unsure (1)..(323): unsure at all n locations
ggttctagtgtatgtgattgttgtgactcgttcttcttcgtcgttatcttcttcttttgttgtttgtgtgtttgttttttctctcacctgaaaatgtcttgctgcggtggtaactgtggttgcggaagcgcctgcaagtgggggaagggctgcggaggctgcaagatgtagccagacttgagctacaccgagtcagccagcagggagaccttggtcatgggagtggggccanttaangctcaagtcgagagtgctgaaatgggtgttcccgctgagaacgatggctgcaaatgtggagctaactgcacctgcaacccctggac

SEQ ID NO: 239415 - DNA, 372 bp, Glycine max
gacagacagacacacactcggttctgccttcacaaaataattatcgagatcccctttttctcctaagaaaagccatggctaacggtcccggtctctactctgacatcggcaagaaagccagggatctgctgttcaaggactaccacagtgaccagaagttcaccatcaccacctactcacccactggagttgctataacagcatcaagaaccaggaaaagtgaactgtttgtggctgatgtcaacacccagttgaagaacacaaacatcactactgatatcaaagttgatacagattctaatctcttcacaactatcactgttaatgaacctgctcctggtctgaacgctatttttagcttcaaagttcctg

SEQ ID NO: 239416 - DNA, 375 bp, Glycine max
gctagcaatactaatagcaaaaactcattcgcgatctcgttccgtacgtgcagccgcagcaagtgatcgaagcgaaagagagagaaattcatcgtcgcagtaatcatgggtaaggttcatggatcacttgcacgtgctggtaaggttagagggcaaaccccgaaggtggccaagcaggataagaagaagaagccacgtggccgcgcccacaagaggatgcagtacaatcgccgattcgtcaccgccgtggtgggattcggcaagaagaggggacccaactcgtctgagaagtgaggccgaggcttgaggaatatgttgctactctatttgatttatctttgttgttttttatttatgtttaatttgtatgttttg

SEQ ID NO: 239417 - DNA, 375 bp, Glycine max
gagggtttttgtcgtcgctactaagagttgctgcttcttcagccactccgcacctcgcagcctctgtgccctcaagaaccatggctgaaatcgaaactaccgttccagatcccacccaaatcgacgtcaaactcttcaatcgcgggagcttcgaggatgttgaggttaatgatatgtctctggctgattacattggagtgtccccatcaaagcatgctacatatgttcctcacactgctggtaggtactcagtgaagaggttcaggaaagcgcagtgccccattgttgagaggctcaccaactctctgatgatgcacgggaggaacaatggaaagaagctcatggctgtcaggattatcaagcatgccatggaga

SEQ ID NO: 239418 - DNA, 352 bp, Glycine max
gatgccgaaaagtagtaccaagatggcttcagttgtgtatctcctctttggcttccatctcattgttatcatgtcaagttccttacccgcaactagtgaagtgtttgcaaaacagtatccatccacagaacccgtggaagaaaaaggcacggagctccacttctatttccataacaacataacgggggaacacccaactgcgatgaaaactgttttgcctcctaaggggtgcagtgatggttttggggctagttacatgatggatgaccctctaactgaaggaccaagtccaacttcaaagcttgtgggaagatctcagggaatatacgctttggcttcacaacatgagcct

SEQ ID NO: 239419 - DNA, 335 bp, Glycine max
gatcacaacactaacacagattttgattcgattcgattcgattcagtcgaggttttaagcagcagcaagatgtctgggcgtggaaagggaggaaagggattgggaaaaggaggagcaaaacgacatcgtaaggtgctccgcgagagacattcagggaattacgaagccagcgattcgtcgtttggctcgcaggggtggcgtgaaaggtatcagcggtttgatctacgaggagactcgcggtgttctcaagatggtcgtggggaatgtcatccgtgacgccgttacttacacggagcacgctaggaggaagaccgttacggctatggacgttgttt

SEQ ID NO: 239420 - DNA, 330 bp, Glycine max
gtctctctcacacacacacatcccagccatgagcctcttcggtataggcagaaaccagagaacattccgcccgaaaaaaagtactccttctggaagtaagggagctcaacttcgaaaacatattgatgccacgttaggtagtgggaggctgagggaagcagtaaagctacctcctggggaggatttaaatgagtggctagctgtcagcactgttgatttcttcaaggaggggggtctgctttatggtaccgttagagagttctgtactcctgagaattgtcgggcaatgtctgcaggacccaagtatgaatagagatgggcagatggtgt

SEQ ID NO: 239421 - DNA, 310 bp, Glycine max
  unsure (1)..(310): unsure at all n locations
gagaggcggaagcggcaaatcgcttcgaccgagttccacaacagcagcttagcttagtagcttaactctttctactggcgtggcgctgctggatgcttttgatcaatagaacaggaagaggagtcagccaaaaagaaagaccgggagggagggatgaccaccaagatatgcatagtgagtcgatcgtttggatgagccagttttggggaggcagtttggggggcttcaggggggacacngaagattggattaggggaatcacgagtcttatatactgtgttacgatcacctcagattgataaaaagtcca

SEQ ID NO: 239422 - DNA, 338 bp, Glycine max
gactcaccacttcaaaacactcataacacaaagcacaaagcaaagctcatccttgagttaaaaaatggcagcagcttcttccatggctctctcatccccatccttggctggcaaggccgtgaagctgggcccatcagcgcgagaggtgggaagggtgagcatgaggaagaccgtcaccaagcaggtctcctcaggaagccgatggtacggcccagaccgagtcaggtggttgggcccattctctggctgaggcgccgtcctacctaaccggtgagttcccaggcgactacggctgggacactgctgggctttccgcagacccagaaagcttcgccaag

SEQ ID NO: 239423 - DNA, 330 bp, Glycine max
gatatatatatatatatatgtgtgtgtgtgtgtgtgtgtgtcaaactctatttttgtttcattcatacaaatacaaattaataaaaacaacaggttctttgctccttgtggctctcatcaggctctgatcacacttcgatggcaaagtttggattatctccactcttggtgctttccatattgttgctgatcatgagtggtggtgcagtgagaggccaaagagaaatggtgcctgccttgttcatatttggtgactctctcattgacaatggcaacaacaacaaccttccttcctttgctaaggccaactattacccttatggcatcgac

SEQ ID NO: 239424 - DNA, 318 bp, Glycine max
ggtggtggggtgtgcagaagagcgtcgcagttgtaaccctaatcagaagaagcgcagcttcaagcgagtgacagccaccagccatgggtcgtatgcacagccgcggtaagggtatatcctcttctgctttgccctacagatgcggaggctcctagctggctcaagatctcttcgcaagatgtcgaagaggatagctgcaggtttgcgaggagaggtttgaccccgtcggagagtggtgtcattctcagagaggcggcggtattgctcaggtcaatagcgtcactggcagcaaaatccttcgcatcctcaaggctcacg

SEQ ID NO: 239425 - DNA, 378 bp, Glycine max
  unsure (1)..(378): unsure at all n locations
caacataggtcatcgaaaggatctcgaagacccaccaacgcacgaaagccgggatctttcagaaaatggattcctattcgaagggtgcataaccgcatggataagctcacactaacccgtcaatttgggatccaattcggtgccggaggaggtatcgggaaggaattttggaatgtaataatatcgattcatacagatacagaggaaagggttctctattgagtgagaggctctacctacgagatgnggatagagaaagaggaaaaaaccgaggatttcacatagtacttttggtcgaaaaatcgatctgatttttttcgtacttttcgctcaatgatgaaatgggtcagattcgacaggaccagagcttggtggagt

SEQ ID NO: 239426 - DNA, 318 bp, Glycine max
gaaggttttgtgccgttgtcgctgctcatcctccataacctccgaactctactcctaataacgacgccatgctgaagacacatggttcgtcacctgctcgcatcctcatgtctcacctcatgaggtactggtgggctgagaggtcgatttcaatctcccatcttgagaatgattttcaggtcccttttgccggttgagcgcatgccaggggaattgtccgtgaggggcgaggtattgaaactaagcaggggaactctgctattcgtaagtgtgccagcgttcaacttatcaataatgggaactgaattgcagcttttg

SEQ ID NO: 239427 - DNA, 340 bp, Glycine max
gaccgtgcgctagttctgagtattctgatcgctccctgagagagctcgtcgcggcggttgcagaagaagattgcaagatgaagttcaacatcgcgaatcccaccactggatgccagaagaagctcgagatcgacgacgagtggaggcggggagcattttgggacaagaggatctcacaggaggtcatcggagatgcactcggtgaggaatttaagggctatgtcgggaggattaccggaggttgtgacaggggagcgatttccaatgaagcagggagtgctgactcctggtcgtgttagacttttgcttcacaggggaactccttgcttccgtggagatg

SEQ ID NO: 239428 - DNA, 377 bp, Glycine max
gagggttttgcgctgttgttgctgctcatcctccgtaacctccgagctctgcaccgaagaacgaagccatggggaagacacatggaatgggatctgctcgcaagctcaagtcccaccgcaggaggcaaaggtgggctgacaagtcatacaagaaatcacatcttggaaatgaatggaagaaaccttttgctggttcatcccatgccaagggaattgtccttgaaaagataggtattgaggctaagcagcccaactctgccattcgtaagtgtgccagggttcaacttatcaagaatgggaagaagattgccgcttttgtccctaatgacggttgcttgaactacattgaagagaatgacgaagtcttgattgctgga

SEQ ID NO: 239429 - DNA, 256 bp, Glycine max
gggttttggctcgagctctgcgagatcttcattcgccgattttaaaagatgagtaagcctcagagtgatgcttttccttaaaccaattcaaggatcaagggcgaatccaaggagaagaatcccaaatttgtggagaccatcgaactccaaatcgggttgaaaaactacgatccacagaaagacaagcgtttcagtggctctgtcaagctgccccacatccctcgccccaagatgaaaatttgcatgcttggtgatg

SEQ ID NO: 239430 - DNA, 281 bp, Glycine max
gagggttacaatccttggtgttgatccaaaacgtccacacattcgtcatggacatatacacaatgggtccgacagaaacgtgtcaaagggtccgttgtaacagcgaacaagaatgttcaggaaaaggtcatcaatcctttgttcgagaagcgtctcaagcagttcgggatcggaggcgcgctgccgccaaaaccggacctgacgccgttcgtgaagtggccgaagaaagtccaaatccaacgcaagaagcacatcctcaagcagaggctcaaggtccctct

SEQ ID NO: 239431 - DNA, 320 bp, Glycine max
ttcatagatttagggaatcgattactatactaataataaattgtacaaaaaataaagatataaataatataaatataaaaagaacaaacacaaattttatgtgattagtcgccgtatttaaaataaaaaaagggaggagggaaataaagaaggaaaggagatgtttggataaagggaagtccccgtcgagttcggaggttttgagaggacagggaaggaggggatgttttattatgctctaggagagacagtaagaagattatatgagatatctgctgtggaagtaagtcaacatttctattggcaaatagggagtttcc

SEQ ID NO: 239432 - DNA, 322 bp, Glycine max
  unsure (1)..(322): unsure at all n locations
gacctcacccagttgcagaaagaaaagaccatcaaagtttcacttcagccttatccggtttagggtttcggtttttgacccaacctttgacgtatcgaaaccttaagtttcggatgaggtcggagcaatctggttggtagaacctttggtcttagagagtcaagttttatgtctgagttagacgatcaaattcctagggcgggggatccttttgctgatngaagtgcggatgactcgggtgctgggtcaaaggagtatgtgcatattcgcgtacagcagcgaaatggaaggaaaagcctgacaaccgttcagggattgagga

SEQ ID NO: 239433 - DNA, 332 bp, Glycine max
gaacagcgaaacagagagtgatttcagtgagtgatcggtgttcacttgatctcatcataatcgtcagcgtcaattgaagaagatgccgatcagaaacatcgccgtcggaaggcctgaagaggcgactcaccgcggaggaggtggaaagcggctttggctgagttcatctcaaccttcagcttcgtgttcgccggcgcaggctccggcatcgcctaggagaggggcaccgacaacggcgctgccagggcctgccgggctcatctccgcctccatcgcccatgcattcgccctcttcgtcgccgtctccgtcggcgccaagatctccggcgggc

SEQ ID NO: 239434 - DNA, 391 bp, Glycine max
gaaaattctaattaaaaaaaagacaaaaataatttatattttcttaaagaacaaaatgtttgttatgcttaatatctttaatttggtctgtatttgtattcactccgtcctttattcaagtagttttttctcggcgaaggtggcgcgaagcctacgctttcttgaatccaattgtggatattatgccagtgatacccttaggcgtttttcttttagcttttgtggggcgagctgctgtaagtttgccgggagatctgtaatttgagtaatgtcttaaaaaaaaattaagaatttatcagaaaactaaaattcgaacattttaacaatttaaaagatgggataagtcttacagtgtgaattagggattccgagattgaaatttttggatata

SEQ ID NO: 239435 - DNA, 386 bp, Glycine max
gatctcattaacgtttcttctcgtcactctgcccgctgcatcaatggcttcagagaagaaactttcgaacccaatgagggagataaaagtgcagaagctcgtcctcaatatctctgttggcgagagtggagatcgtctcgggagggcgtccaaggtgttggaacaacttagtgggcaaaccccagtgttttcgagggcagcgtagactgttcgttcctttgggaggggggaaatgagaagattgcatgcgatgtcactgtcagaggtgacaaggcaatgcaacttttggagagtggtttgaaggtgaaggaatatgaacttctcagaaggaacttcagtgagactgggtgcttcggcgttgggagtcagggacatattgatttggg

SEQ ID NO: 239436 - DNA, 199 bp, Glycine max
ggatagctgagagagaaaggaaaggttaactaagaagcaatacttcaatggccacccttgttgttcataaccaaggttcttctgctcaagatgctgaggctctcgaacaggctttcaaaggatggggggctgatgacaatgccattatagcaatactgagtcacagaaatgttcatcagaggcaagaaatcagaaaagc

SEQ ID NO: 239437 - DNA, 300 bp, Glycine max
gagatagctcagagagaaaggaaaggttaactaaagaagcaatacgtcactggacacgcttgttgttcatatccacacgtcttctactcaagatgccgacgctctcgaacaggctttcaaaggatggggggcttgatgacaaggccattataccagtactgggtcacagtaatgttcatcagaggcaatgcatcagaaaagcttatcaggagatttactaataggatctcagcaagcacctttagtccgacatctctggtgactttgctaaatctatataccgatggatgttgcagcctg

SEQ ID NO: 239438 - DNA, 318 bp, Glycine max
ggttctagtgtgtgattgtttgttgttgtaactcgttcttcttcttttgttgttctgtgtttgtgtttgttttttctctcacctgaaaatgtcttgctgcggtggtaactgtggttgcggaagctcctgcaagtgcggcaacggctgcggaggctgcaagatgtacccagacttgagctacactgagtcaaccaccaccgagaccttggtcatgggagtggcacctgttaaggctcaatttgagggtgctgaaatgggtgtgcccgctgagaacgatggctgcaaatgtggaccaaactgctcctgcaacccctgcac

SEQ ID NO: 239439 - DNA, 377 bp, Glycine max
gaccctgcggtgtcgtccccgccagtgccgcgcacacagcatcagtgagccaagaacatgaagtaacgcgacaacatcagctgcctggaaacacctttccggctttccttcgcaaccctggcccccctgggtcctggcgggcataaattgacttgagaatggaatacgtcagcccaaaaggacttcgcttggatggccgccgaccaatggaaatgcgacaaattcgtgcagagattggtgctgtatccaaagcagatggttctgccatttttgagatgggtaataccaaagttattgctgctgtttatggccccagagaggtgcaaaataggagccagcaaataagtagccatgccctggttcggtgtgagtactgc

SEQ ID NO: 239440 - DNA, 383 bp, Glycine max
gcagcgcttgatttgaggccaggcaagccccactcaaccaccacacctctcctcgttcacgctacccctttctgctcttcttctacctttcaagttttaaaagtataaagatggcagagacattcctatttacctcagagtcggtgaacgagggacaccctgacaagctctgcgaccaaatctccgatgctgtcctcgacgcttgcctcgagcaggacccagacagcaaagttgcctgcgaaacatgcaccaaaaccaacttggtcatggtcttcggagaaatcacgaccaaggccaacgttgactacgagaagatagtgcgtgacacctgcaggaacatcggcttcgtctcaaatgatgtgggactggatgccgacaactgc

SEQ ID NO: 239441 - DNA, 408 bp, Glycine max
gagggttttgtgctgttgtcgctgctcatcctccataacctccgagctctacaccgaagaacgaagccatggggaagacacatggaatgggagctgctcgcaagctcaagtctcaccgcaggaggcaaaggtgggctgataagtcatacaagaaatcccatcttgggaatggatggaagaaaccttttgccggttcatcccatgccaagggaattgtccttgaaaagataggtattgaagctaagcagcccaactctgctattcgtaagtgtgccagagttcaacttatcaagaatgggaagaaaattgcagcttttgtccctaatgatggttgcttgaactacattgaagggaatgacgaactcttgattgctggatttggacgaaagggtcatgctgtgggagata

SEQ ID NO: 239442 - DNA, 412 bp, Glycine max
ggttctagtgtgtgattgtttgttgttgtaactcgttcttcttcttttgttgttctgtgtttgtgtttgttttttctctcacctgaaaatgtcttgctgcggtggtaactgtggttgcggaagctcctgcaagtgcggcaacggctgcggaggctgcaagatgtacccagacttgagctacactgagtcaaccaccaccgagaccttggtcatgggagtggcacctgttaaggctcaatttgagggtgctgaaatgggtgtgcccgctgagaacgatggctgcaaatgtggaccaaactgctcctgcaacccctgcacttgcaagtgaggtgttgggagagcaagcttcaagcagagatagcccttaattaggaataatgataaactattaatgtgtagctaaaaacttatg

SEQ ID NO: 239443 - DNA, 416 bp, Glycine max
ggatacagtgtgggcataaaattttcgaagttgaagcgagaacttgccatttcaagggttttagggttagggttttctcaaattgcaaggacatgggtttcaaccttcaaccatatgggattcaatccatgctcaaggaaggccataagcacctttctggcctcgacgaagcggttctcaagaacatcgacgcttgcaaacaactttccactattactcgaacttccctcggtcccaatggaatgaataagatggttataaatcacttggacaagctttttgtcacgaacgatgctgggacaattgtgaatgaacttgaagttcagcatcctgctgccaaggttttggttttggctgggaaggctcaacaagaggagattggggatggagctaatttaactatttcatttgctggg

SEQ ID NO: 239444 - DNA, 388 bp, Glycine max
gaccacaccgagtcgcagaaaaagaaaaaagcgatcatagtttcacttcggccttatccagtttagggtttcggttctctaccctatctttcacgtatcgaaaccttaaatttacgatcaggtctgagcaatctggttggtagaacctttggtcttagtgagtcaagttttatgtctgaattagacgatcaaattcctactgccttcgatccttttgctgatgcaaatgctgatgactcgggtgctgggtcaaaggagtatgtgcatattcgtgtacagcagcgaaatggtaggaaaagcctgacaaccgttcaaggattgaaaaaggaattcagctataacaagatacttgaagacgtcaagaaagagtactggttcaatggaacag

SEQ ID NO: 239445 - DNA, 309 bp, Glycine max
gaccgcaaactctctctgtaaagtgcaaagcctctattttttcttgtgaatttgaaggacgatgagttccacagaggtcgcagccacaacgaagaagggtggaagagggaaacccaagaccacaaagtccgtttcccgttcctccaaagccggccttcagttccccgtcggccgcgtcgctcgctacctcaaggccggtcgctatgcccagcgcgttggttccggttcccctgtttacctatctgcggttctcgactaccttgccgctgaggttttggagcttgccggccacgctgcgacggacacccg

SEQ ID NO: 239446 - DNA, 359 bp, Glycine max
gacttgcggctgcagcagagaagcactcatcattcttcgtttgtctaagatccgccttctctgaattgtaaaaatgtcgctcggagaaactgcttgttcatacgcagctcccaaccttcaataagatggaatcagtgttactgccgacaagattagcaccctgttgggaactggcaaaggtcaagttgatacctattggccaaccttatttgcgaaacttgctgagaagaaaaatcttggcgatttgatagccaatgcagcatgcggtggtgcaccaattgctgttgcaagtgcccctgttgctgcctcacgtggtggtggtgccgctgatggcgcaccagctgccgacgagaaaaaga

SEQ ID NO: 239447 - DNA, 395 bp, Glycine max
ggaaattctaagagcttgttccgtcgtcccccaagtgctgcagagccgcattttgcttgcaattcagaaactttgtgcgtagaggggacgaaacaatacaatggcttacgctgcaatgaagcctactaaggccggcttggaggagcctcaggagcagatccacaagattaggatcaccctttcctctaagaacgtcaagaatctcgagaaagtgtgcgccgaccttgttcgtggtgccaaggacaagcgcctcagggtgaagggacctgttaggatgccaactaaagtacctaacatcaccaccaggaaatccccgtgtggtgaatgcaccaacacatgggacaaatttgagctgcgtgtgcacaagagaattattgatctctacagttcccctg

SEQ ID NO: 239448 - DNA, 417 bp, Glycine max
gacaacacaacgcaacacaacgcgcactctctcttttctctcttaacacaaaaaccctatcgttcttcgcggtttcgccgattctcgccatgccgaaagccaaatccgacgccaaagccgccgatagccggttgaagcgcaagggcgctggtgctggaaggaagcaatcgaagaaagctgctaaggatcctaacaagccaaagagacctccaagcgctttcttcgttttcatgtccgagttcagagagcagtttaagaaggagcatcctaacaacaaatccgtcgctgttgtcggtaaagctggtggtgacaaatggaaatcgctgtctgatgctgaaaaggcccccttcgttgccacggccgaaaagaagaaacaagagtatgagaaaactattttggcttacaataagaaattgg

SEQ ID NO: 239449 - DNA, 372 bp, Glycine max
gaacatacctaaaaattgtaccgatatggcttcacttgtgtgtctccttttttccttgcatttcatggttatcatgtcaggttccttaccagcaaatagtgaagtgtttacaaaagagtctcctatgtcactatccacaaaacccgtggaaagactcacccaactccacttttatttccataacaacaaaatgggggaacacccgactgctatgaaaattgttgagcctcctaaggcgtccatttctggttttgggactatttacatgatggatgaccctctaaccgaatgaccaagtccaagttcaaagcttgttggaagatgtcagggaatatatgctgaggcatcgcaacatgaacctgcgatactcat

SEQ ID NO: 239450 - DNA, 410 bp, Glycine max
agaaggggactgcgagagtgtgggagccagaaaactgctgcttctcgacccacttttgaagttcaaaacttaaaccctagttctctctctctttctttctcctgcatcttcaaccatgtcagcaatgctgcaacctcagatcattctgctcaaggaaggcacggacacttcgcaagggaagccacagctggtgagcaacatcaatgcctgcaccgccgtcgccgacgtcgtccgcaccaccctcggccctcgcggcatggacaagctcatccacgacgacaagggaaccgtcaccatctccaacgacggcgccaccatcatgaagctcctcgacatcgtccaccccgctgcaaaaatcctcgccgacatcgccaagtctcaggactccgaggttggcgatggaaccacca

SEQ ID NO: 239451 - DNA, 412 bp, Glycine max
gaacatttgtctctcatctttcaatttcaatcaacggttatacccttttctatttgagcatcatcatgtccaccgcagcgcagcccaaggccaagaaaacggcgtcgtccaagaagcccctctcccatcctaccttcgccgcgatgatagcggaggcgatagcgagtctgaaggagagaaccggttcgagccaatacgcgataaccaaattcatcgaaggcaagcacaaggagttgcctccaacctacaagaagcttgttctcgttcatctcaagaagtctgttgctgctggcaagctcgttaaggtcaaaaactctttcaagctcgcaccgactaagtctgctcctgttaaagccgctgctgctcccaagaagcccaccaaagctgcggctaagcccgccgccaagcccgc

SEQ ID NO: 239452 - DNA, 397 bp, Glycine max
gattgttggcttgtgctctgctcgtgcctctagggttatcatatctccatttccatttcctctctctcagtttccaagaatcttaagctatgggaaagtcttacccaaccgtgagcgctgattaccagaaggccgttgagaaggcgaagaagaagctcagaggcttcatcgctgagaagagatgcgctcctctaatgctccgtttggcatggcactctgctggaacttacgacgtgagctcgaagaccggtggtcccttcggaaccataaagcacccctccgaactcgctcacggcgctaacaacggtcttgacatcgctgttaggcttttggagccactcaaagcggagtttcctattttgagctacgccgatttctaccagttggctggcgttgt

SEQ ID NO: 239453 - DNA, 398 bp, Glycine max
gatggaatggttagagaaaagagaggcccatatagtgatccacagcatccttacttttatgaagaagaggatgtgtggatggcacctggcttcattaaccagttttatgaagtccctgattactggaaagtatatgtgcatgaagttgatcaagaaagagaaatgtggttaaactctttttataaagctcctcttaggttacccatgccagctgagctagagcactggtggtcaaaagaggagaatcataagattcctgaatttgtccttattaacaaggaaccggagcctgatcctgaagatccttcaaagcttatatatactgaggatcctctcatcctccatacaccaactggaaatattatcaattatgtccaggatgagaaatatggaatacg

SEQ ID NO: 239454 - DNA, 364 bp, Glycine max
ggcccaaattttttcatagcattttcagaggaacaatggcgggtagggtttcgacgtgcttcttcttcgtgtttgctccttctctccttcttccttttcagatctccgctgaggaatcatcggagaaagagttcgtactcacattggatcactctaactttcacgacactgtcagcaagcacgatttcatcgtcgtcgagttctacgctccatggtgtggccactgtaagaagcttgctcccgagtatgagaaagctgcctctatcttgagtagtcatgatcctccggttgttttggctaaaattgatgcccatgaggagaagaacgcagaccttgcatctcactacgacgttacgggataccc

SEQ ID NO: 239455 - DNA, 260 bp, Glycine max
acacaccgtttgttctattcttaactcaacttctgctacccactctcttcttccaagtccaaccacgcttttctctacagtcatgggcaaggtcaagatcggaatcaacggatttggaagaattggccgtttggttgccagactcgctctgcaaagagacgatgtggagctcgttgccgttaacgaccctttcattaacaccgattacatgacatacatgtttaaataccacagtgttcacggacactggaagcatcacg

SEQ ID NO: 239456 - DNA, 409 bp, Glycine max
gacccttaacctctctgctgcgtttgcttctcctccacccatccacaaacgaacacacactttgattgagaatggggcgtgtccgcacaaagacagtgaagaagtcctcgcggcaagtgatcgagaggtactactctcgcatgacgctggacttccacacgaacaagaaggttctggaagaggtggccatcattccctccaagaggctccgcaacaagatcgcgggattccccacccacctcatgaagcggatccagaagggtcccgtacgtggaatctccctcaagctgcaggaggaggagcgcgagcgccgcatggacttcgtccccgatgtctccgccatcagaaccgaccagatcgaggtcgacaaggagacgctcgacatgctcgccgccctcggaatgtccga

SEQ ID NO: 239457 - DNA, 414 bp, Glycine max
ggtcaacaacagtgttcccataggagataataaaaatcctctcatcattctgcctcagcctcattgcatcccacaaactataggatcctcacattgctagcaccatgatcaagaccttgaatccttacccaaatccagcaaaaactgctgagatcatgtcgaggtaccggccaatagcaccaaagcctgaaacctctccaaactccatgagtgagggcccttcttcctcttctctctcccagaagatcaagcaatctccttaccttaggaatttatggccacagcttcaagccagacccaccaggaccagaaagagaggtaaagctcctttgacactaccctcttcctccctcaagagacacaagacaacacatcatcatgtcctaagattttgtcccccttgtcatcatgttg

SEQ ID NO: 239458 - DNA, 393 bp, Glycine max
gagggtttttgtcgtcgctactaagagttgctgcttcttcagccactccgcacctcgcagcctctgtgccctcaacaaccatggctgaaatcgaaactaccgttccagatcccacccaaatcgacgtcaaactcttcaatcgctggagcttcgaggatgttgaggttaatgatatgtctctggctgattacattggagtgtccccatcaaagcatgctacatatgttcctcacactgctggtaggtactcagtgaagaggttcaggaaagcgcagtgccccattgttgagaggctcaccaactctctgatgatgcacgggaggaacaatggaaagaagctcatggctgtcaggattatcaagcatgccatggagatcatccacttgctcactg

SEQ ID NO: 239459 - DNA, 404 bp, Glycine max
gacggcactcgttttcgttctcgttctggtttatagatctttgcgaaggaggtttacagcgctcaaccaaagatgcagaacgaggaaggacagatcactgagctttacattcctaggaagtgctccgccacaaacagattgattaccgctaaggaccatgcttcggttcagatcaacattgggcatgtggatgagaacggcgtctacaatggccatttctccacttttgccctctgcggattcatccgtgctcagggtgatgctgacagtgctctagaccgcttgtggcagaagaagaaagttgaagttaagcaacagtagacacccatgatagtttgttacttcgttatgtattaatttctactcttgctagagatatttgagtactacgattgtcgttttga

SEQ ID NO: 239460 - DNA, 409 bp, Glycine max
gagagaagttattagggtttttgagtgcggcggtccaaacactcttctctgcagcttttgcctacaactcccttcaccatggctgaacaaaccgagaaagcttttctgaagcaaccaaaagtgtttctcagcacaaagaagactgggaagggaaagagacctggaaaaggtgggaaccgcttttggaagtccattgggcttggatttaagactcccagggaagccatcgaaggaacctatattgacaagaagtgccccttcactggcaatgtttccatccgtggccgtatcttggctggaacatgtcacagtgctaagatgaacaggactattattgttagaaggaattatctccattttatcaagaagtacagaagtacgagaagaggcactcaaatattcctgctca

SEQ ID NO: 239461 - DNA, 384 bp, Glycine max
ggattgagaagtaagatggaggttgttatgcgccgtaagtaatttgtttgttggattggaattgagaaaacagcaacaaggggaaatgggagatagagaagaacaaggcgagggtgctggctcctccttggaattggaagctcctattccagagacccaaaaagaaatcccaatttcagatggcatcgcattcaacaatcagagcgcgattttccaagccatcgaggttgtggaacgagactcgttggccatcgctcagagtttcacttctctcttcgcttccctccgattggctctctccgaatccacatccacctctcgccatcacatgcagtgcttcaccgatgccaccggtcgccttcaggaatctggtgcttgcttgat

SEQ ID NO: 239462 - DNA, 349 bp, Glycine max
ggtgttcaccacagtttacacgcacgagagtacccattttctcttctcaatttctcaagtgtgccgagaaaatcatggtggacgcagcagaacgtagatacttggaggatgatgattcatctctcatgaaaactatcaagggcgcaacaactggtttagtggctggaactatctggggtactgtagttgccacctggtatgatgtcccccgtgtcgagagaaatgttgctcttccagggctgattaggactatcaggatgatgggcaactatggtctgagctttgctgccagaggaggagtcgaccatagtgtagagccattggtgcagaactatatgatgaagaggga

SEQ ID NO: 239463 - DNA, 357 bp, Glycine max
gattgtaaagcattcttcgcctttctctctcttctttttactctctctctgtctctctctacgctttctcgttcgagatccctcaagggatccactaactgaaggagaaatggggttgacattcaccaagcttttcagccggcttttcgccaagaaggaaatgcgaattctgatggtgggtctcgatgcagctggtaagaccaccatcctgtacaagctcaaacttggagagatcgttaccacaattcccagcattgggttcaatgtggagactgtggaatacaagaacattagtttcactgtctgggatgttggtggccaagacaagattcgtcgcttgtggaggcactacttcca

SEQ ID NO: 239464 - DNA, 348 bp, Glycine max
gactcaccacttcaaaacactcataacataaagcacaaagcaaagctcatccttgagttaaaaaatggcagcagcttcttccatggctctctcatccccatccttggctggcaaggccgtgaagctgggcccatcagccccagaagtgggaagggtgagcatgaggaagaccgtcaccaagcaggtctcctcagggagcccatggtacggcccagaccgagtcaagtacttgggcccattctctggcgagcccccgtcctacctaaccggtgagttcccaggcgactacggctgggacactgctgggctttccgcagacccacaaaccttccccaagaaccgtgaact

SEQ ID NO: 239465 - DNA, 260 bp, Glycine max
acgcgtccaaccgaggccaaaagacaaccgaagggggccattattgctgtcaacatccgcagctgctgttattcgcagcgcaaacaaccagtgagccatgggcgtccgaaagaacaagcgcagctccaaagggaaaaagggtggccagaagaaggcagctgatcgctttgccaagaaggattggtatgacactaaggccccctccctctttcaagtgaacgatgtgcgcagaacccgcgtcgctcgtacgcacggtagca

SEQ ID NO: 239466 - DNA, 410 bp, Glycine max
ggccgaaaagtagtatcaagatggcttcagttgtgtatctcctctttggcttccatctcattgttatcatgtcaagttccttacccgcaactagtgaagtgtttgcaaaacagtatccatccacagaacccgtggaagaaaaactcacccaactccacttctatttccataacaacataacgggggaacacccaactgctatgaaaactgttttgcctcctaaggggtccattcatggttttggggctacttacatgatggatgaccctctaactgaaggaccaagtccaacttcaaagcttgtgggaagatctcacggaatatacgctttggcttcacaacatgagcctgggttgctcatggtgacaaattttcccttcactttgggcatttacaatgggagcaccctc

SEQ ID NO: 239467 - DNA, 378 bp, Glycine max
gattctcacctttccatgcatatagcttagctagctccttcacctccttagtttcgaaagcatggcttccctggcggcttccaccgcggctatgtcagaaatccttggaaaccccgttaacctcagatgcgcaaccaggtctgctccatcaccaactacacctgccaccttcaagaccgtcgcacttttctccaagaagaagccagctccacctccaaagaaaaagcctgccgctgtatcccccgccaatgaggaactcgccaagtggtatggtcctgacagaaggatcttcttgcctgagggtctcttggaccgatctgagatccccgagtatttgaccggagaagtgcctggagattatggttatgatccgtttgg

SEQ ID NO: 239468 - DNA, 385 bp, Glycine max
gccacaacacagaacaaaaacaaagaaaaaaaaaaacccttagccaacacaaccatcatggccacctctgctattcagcaatcagcattcactggtcaaactgctctgaagcagctcaatgagttcgtccgcaagaccggtggcgccggcaaaggtcgcactaacatgcgccgcaccgtcaagagtgctcctcagagcatttggtatggccctgaccgtcccaagtacttgggtccattctcggagcagattccatcatacctgaccggagaattccctggtgactaccgatgggacactgctggattatcagctgacccggaaaacttcgccaggaaacgggagctggacgtgattcacaacagatgggcaatgcttggtgccc

SEQ ID NO: 239469 - DNA, 360 bp, Glycine max
aaagagacccggaaagggtgggaaccgcttttggaaatccattgggcttggatttaagactcccagggaagccatcgaaggaacctacattgacaagaagtgccccttcactggcaatgtttccatccgtggccgtatcttggctggaacatgacacagtgctaagatgaacaggactattattgttaggaggaattatctccattttatcaagaagtaccagaggtacgagaaaaggcactccaacattcctgctcatatatcacctgctttccgtgtgaaggaaggagatcacgttattattggtcaatgcaggccactttctaagactgtgaggttcaatgtgttgaaagttattcc

SEQ ID NO: 239470 - DNA, 371 bp, Glycine max
gacgccaaagccctctcttatttccagacgcggggggttcttcatccgtttttgtcaatcggggttgaaaatggcgacttacgctgcgatgaagcccacaaagcccggcttggtggagccccatgaacagattcacaagatgaagatcaccctttcctccaagcacgtcaaaaacctcaagaatgtttgtgtcgacatgggtcgcggtgcacaggaaaggcgcctcagggttaatggacctgtcatgatgcccactaaaggtcttctcagcactaccatgaagtcgccctgtggtcaaggtagcaatacatgggacacgcttgaagatcgtgtgcactagagagtgcttgacctccacacttttccagatg

SEQ ID NO: 239471 - DNA, 325 bp, Glycine max
gatcagtcacactagtctctgtgaaaggcgacacgacacaacacaacacaagctttaatctttttcttcgcttcttctgtacagcacccaagattgaagatgatagaccttgcgcgcgtgcagaaggagcttgtggaatgcagcaaggacgcggagggatcgggcatcaaagtcagccccaaaaacgacaaccttgttctcttgatcggcaccattcctggccccgtcggaactccatatgaagggggcattttccagattgatagcacattgcctgatgggtacccgtttgaaccccccaagatgcagtttaaaaccaaagttt

SEQ ID NO: 239472 - DNA, 395 bp, Glycine max
gactcaccacttcaaaacactcataacacaaagcacaaagcaaagctcatccttgagttaaaaaatggcagcagcttcttccatggctctctcatccccatccttggctggcaaggccgtgaagctgggcccatcagccccagaagtgggaagggtgagcatgaggaagaccgtcaccaagcaggtctcctcaggaagcccatggtacggcccagaccgagtcaagtacttgggcccattctctggcgagcccccgtcctacctaaccggtgagttcccaggcgactacggctgggacactgctgggctttccgcagacccagaaaccttcgccaagaaccgtgaactcgaagtgatccactccaggtggggcatgctcggagccttgggctgcg

SEQ ID NO: 239473 - DNA, 383 bp, Glycine max
catgagagtgagaataaatcggggtcttctttgtcctcgtgtgaaaaaaaaaaaaaaaaaaaaaaaaaaaaaaaaaaaaaaaaaaaaaaaaacaaaaaaaaaaaaaaaaaaaaaaaaaaaaaaaaaaaaaaaaaaaaaaaaaaaaaaaaaaaaaaaacccaaaaaaaaaaaaaaaaaaaaaaaaaaaaaaggggccccccaaaaggttccaagtttatttccccggaaaaggaaccccaaagcccctcaaagagggcccccaaattaaattccggggccctttttttaaaaaactgcacggggaaaaaccctgggtttaccccaataaaaccccttgaaaaaaaacccccttttccaaaggggtataataccaaaaagccccc

SEQ ID NO: 239474 - DNA, 406 bp, Glycine max
gagatcccaaaggtactcttatagtacttcttctctttctctcactgtttttgttgcttattctgccttatcctgtctccctctcttcactacccttttttttttttcactttccttcttatcatctttttttcttttttggtttatattttgggggggtatttttcttttcatttgtacttttttatttattgatcttgggttttggtttattttattgtgtgtggaatacaagtggtgaagttagaaattttgttgtttcccatctgcatgtggagtttgaggtcagctttgtgtttgttaaggttacatgaagccatttctctttttaaatcttcccaacaccgagttcaattcttcacaagttgattgtcaccactcaatggctcattcttcttatccctag

SEQ ID NO: 239475 - DNA, 313 bp, Glycine max
ggagcgaagaagatattagggtttttgagtgcggtgcggcgatcctagcactctcttctgcagctttcgccgacagcttcattcaccatggctgagcaaaccgagaaggcttttttgaaacaaccagaagtgtttctcagctcgaagaaaactgggaagggaaagagacccggaaagggtgggaaccgcttttggaaatccattgggcttgggtttaaggactcccagggaagcgatcgaaggaacccacattgacaacaagtgccccttcactggcgatgtttccagccgtgggcggtagcgtggcgggaac

SEQ ID NO: 239476 - DNA, 345 bp, Glycine max
gacagaaactgaaaagaaaaacttactcgagaaaatgtctggaaaggcgaagaggagagacgacgacgatgcttccgacgccgactccgaaggccacgcgccgcccatgaagtccctcaagaaggattccgacgacgatcccgactctgttaccatttgcgaaatttcgaagaacaggagggttgccgtgaggaactggaaaggcagcattatggttgacattcgcgagttttacgtcaaagatggcaagcaattgcctggcaggaaaggtatctcgttgaccatggatcagtggaatgtgcttcgtaatcatgttgaagaaattgacaaggcagttaatgagaa

SEQ ID NO: 239477 - DNA, 406 bp, Glycine max
gagggtttttgtcgtcgctactaagagttgctgcttcttcagccactccgcacctcgcagcctctgtgccctcaacaaccatggctgaaatcgaagctaccgttccagatcccacccaaatcgacgtcaaactcttcaatcgctggagcttcgaggatgttgaggttaatgatatgtctctggctgattacattggagtgtccccatcaaagcatgctacatatgttcctcacactgctggtaggtactcagtgaagaggttcaggaaagcgcagtgccccattgttgagaggctcaccaactctctgatgatgcacgggaggaacaatggaaagaagctcatgggtgtcaggattatcaagcatgccatggagatcatccacttgctcactgacctgaacccaat

SEQ ID NO: 239478 - DNA, 402 bp, Glycine max
aaagcagtcatcaaagaaactctgagattacatcccgcaactcccgtattgattccaagggaatcaatgcaagacaccaaagtgatgggttatgacattgcagctggcacacaagtactagttaacgcgtgggcgatttcggtggatccttcatattgggatcagcctctggagtttcaaccagagagacacttgaacagttcaattgatatcaaaggacatgattttcaatttatcccttttggagctggaaggagggggtgtcctggaatagcatttgccatgcttctgaatgagttggtccttgcaaacattgtgcaccaatttgattgggcagttcctggtggacttttgggggaaaaggcattggatttgtctgaaactactggattgtctgttcac

SEQ ID NO: 239479 - DNA, 413 bp, Glycine max
ggtgtagtataggattctcttctttattccttttgtaatttcattcattcttaatctttgtgaaaaataatgttcatcgagaattttaaggttgagtgtcctaatgtgaagtacaccgagactgagattcagtccgtgtacaactacgaaaccaccgaacttgttcacgagaacaggaatggcacctatcagtggattgtcaaacccaaatctgtcaaatacgaatttaaaaccaacatccatgttcctaaattaggggtaatgcttgtgggttggggtggaaacaacggctcaaccctcaccggtggtgttattgctaaccgagagggcatttcatgggctacaaaggacaagattcaacaagccaattacgttggcccctcaaccaagcctcagctatccgagttgggtcc

SEQ ID NO: 239480 - DNA, 389 bp, Glycine max
attgtagaactgaacaagggtttctctttctctttctctgtctgcttcttcactttctctcgtttcaatcgaaaaaaatcatgggcagaaaattcttcgtcggtggcaactggaaatgcaatgggaccactgaggaggtgaagaagattgttactactttaaatgaagctaaagtccctggagaagatgttgtagaagttgttgtgagccctccttttgtgttccttccttttgtaaaaagtttgctgcgccctgatttccatgtctcggcccaaaattgttgggttcgcaaaggtggtgcttatactggagaggttagtgctgaaagtgcttgttaatttgggaattccttgggttaatagtggtcactctgaacggagggagctttt

SEQ ID NO: 239481 - DNA, 141 bp, Glycine max
gaatgcgcaatccaagcctaagctccgtatacaataacatgggacaacaccacacgatcccgatactatcgcgttcgtcttcgggatcggagtcatcatcaaaagggacagtccgggggagtcgtaattcatagtcagaag

SEQ ID NO: 239482 - DNA, 341 bp, Glycine max
gatcactctcacgcttctgattattcctcttcccattctagggttcccaaatggacgctggcggaaagatcaagaagggcgcccgaggaagaaagggcggcggccctaagaagaagccggtttcaaggtccgtcaaggccggtctccaattccccgtcggaagaattggccgttatttgaagaaatgaaggtacgcccagcgtgtcggtaccggtgctcgcgtttacttggccgcagttctcgagtacctagctgctgaggtgcttgagttggctgggaatgctgcacgtgacaacaagaagaacaggattattccgagacatgtgctgttggctgtaagg

SEQ ID NO: 239483 - DNA, 276 bp, Glycine max
  unsure (1)..(276): unsure at all n locations
taatttgggaattattgctcccatcgccattggtttcattgtcggcgctaacattttgttgggtggggccttctctggagcggccatgaaccccgctgtgacatttgggcctgctgtcgtgagctggacctggaccaaccactggatctactgggccgggcctctcatcggtggtggaatcgctggccttgtttacgaggttgtctttatcagccacacccacgagcagcttcccaccactgactactagagggggggaaatgaaaaannnngaaa

SEQ ID NO: 239484 - DNA, 386 bp, Glycine max
gatgccgaaaagtagtaccaagatggcttcagttgtgtatctcctctttggcttccatctcattgttatcatgtcaagttccttacccgcaactagtgaagtgtttgcaaaacagtatccatccacagaacccgtggaagaaaaactcacccaactccacttctatttccataacaacataacgggggaacacccaactgctatgaaaactgttttgcctcctaaggggtccattcatggttttggggctacttacatgatggatgaccctctaactgaaggaccaagtccaacttcaaagcttgtgggaagatctcagggaatatacgctttggcttcacaacatgagcctgggttgctcatggtgacaaattttctcttcactt

SEQ ID NO: 239485 - DNA, 386 bp, Glycine max
acatccacacatttatagaacagaaggaacacgtatccacaaagtacttcatgaataattcttcattcagagttgtggccactggtggcaagaagatcaagactgacaagccttatggaattaatggtggcatggctttgagggaaggagttgatgcatctggcaggaaaggaaagggaaagggcgtttaccagtttgtagacaaatacggtgctaatgtcgatggttacagtcctatctacgacaccaaggactggtctccaaccggtgatgtctacgctggcggtaccactggcttggctaactgggctgtgactctacttggtcttcatgctggtggtgcacttcctgtctacaacacaagtgctttggcgcaataaaccttg

SEQ ID NO: 239486 - DNA, 287 bp, Glycine max
gaaagtggacagaagagagcgtcctagtcgcaaccctaataagaagaaccacagcttcaagcgagtgacatccaccagccatgggtcgtatgcacagccgcggtaagggtatatcctcttctgctttgccctacaaaaggacaccccctagctggctcaagatctcttcgcaagatgtggaagaaaatatctgcaagtttgcgaagaagggtttgaccccgtctcagattggtgtcattcttcgagattctcacggtattgctcaggtcaacagcgtcactggcagc

SEQ ID NO: 239487 - DNA, 336 bp, Glycine max
gatacctaaaaattgtaccgatatggcttcacttgtgtgtctccttttttccttgcatttcatggttatcatgtcaggttccttaccagcaaatagtgaagtgtttacaaaagagtctcctatgtctctatccacaaaacccgtggaaagactcacccaactccacttttatttccataacaacagaatgggggaacacccgactgctatgaaaattgttgagcctcctaaggcgtccatttctggttttgggactatttacatgatggatgaccctctaaccgaaggaccaagtccaacttcaaagcttgttggaagatgtcacggaatatatgc

SEQ ID NO: 239488 - DNA, 466 bp, Glycine max
  unsure (1)..(466): unsure at all n locations
tcaccatctntggcgcctaaggtcacgggcctccgggccgacccacgcgtccacccacgcgtccgacggctgcgagaagacgacagaaggggaagaagggttcgtagacagcccgatagaatgtcatctcttcgtattctatacaaagacgaagtagcgtaagagaagatagtagacaggatttggattcgaggcttgctaggtgaagtcaacactatcaacacgaatttgaaaaagtcaaatgcggccgctctagaggatccaggcttacgtactcgtgcatgcgacgtcatagctcttcgatattgtcatctaaatgcaattgactggccgtcgttttacaacatcgtaagtgggaaaaacctggcgtttgcccaacttaatcgccttgcagcaaatccccctttcgtcagctgggcgtatgatcgaagaggcgcggaccaattgccgttccgaaacttgcgtn

SEQ ID NO: 239489 - DNA, 195 bp, Glycine max
gagcgaaacagagagtgatttcagtgagtgatcagtgttcacttgattacaacaaagtcgtcagagtcaattgaagaagatgccgatcagaaacatcgccgtccgcaggccggtagaggcgacgcaccccgagacgttgaaggcggatttcggcgagttcatcacaaccttcatcttcatgtgcgccggctcaag

SEQ ID NO: 239490 - DNA, 490 bp, Glycine max
ctcaaccgtcaccggcacgtaacggtctacaattcccgggtcgacccacgcgtcagtacggctgcgagaagacgacagaagggtacggctgcgagaagacgacagaagggtacggctgcgagaagacgacagaagggtacggctgcgagaagacgacagaagggtacggctgcgagaagacgacagaagggtacggctgcgagaagacgacagaagggtacggctgcgagaagacgacagaagggtacggctgcgagaagacgacagaagggtacggctgcgagaagacgacagaagggtacggctgcgagaagacgacagaagggtacggctgcgagaagacgacagaagggcccatctaagagcacgtgctattatatacatctagaatgtctaacaacaagccggtcgccgcgcagaaaaagcggccgctctagacgatccaagcttacgtacgcgtgcatgccgacgtcatagctcctccgtagtg

SEQ ID NO: 239491 - DNA, 260 bp, Glycine max
ggctgcaagggatcaactgaggagagtgagagaaaagagaagagaagatgacaacacgcttcaagaagaacaggaagaagaggggccacgtcagcgctggccacggtcgaatcggaaagcacaggaagcaccctggaggacgcggtaacgccggaggcatgcaccaccacaggatcctcttcgacaaataccaccctggttcttcggcaaggtaggaatgcgctattttcacaagcttcgcaacatattctactctccga

SEQ ID NO: 239492 - DNA, 321 bp, Glycine max
ggggtctgagagaaaccctagctagccacaatgcagatattcgtgaaaaccctaacggggaagacgataaccctagaggtagagtcatcggacacaatcgacaatgtgaaggcgaagatccaggacaaggagggcatcccgccggaccagcagcgcctgatcttcgccggtaagcagctggaggacggccgcaccctcgccgactacaacatccagaaggagtccacgcttcacctcgtcctccgcctccgcggcggcgccaagaagcgcaagaagaagacctacaccaagcccaagaagatcaagcacaagcacaagaaa

SEQ ID NO: 239493 - DNA, 356 bp, Glycine max
ggttctagtgtgtgattgtttgttgttgtaactcgttcttcttcttttgttgttctgtgtttgtgtttgttttttctctcacctgaaaatgtcttgctgcggtggtaactgtggttgcggaagctcctgcaagtgcggcaacggctgcggaggctgcaagatgtacccagacttgagctacactgagtcaaccaccaccgagaccttggtcatgggagtggcacctgttaaggctcaatttgaaggtgctgaaatgggtgtgcccgctgagaacgatggctgcaaatgtggaccaaactgctcctgcaacccctgcacttgcaagtgaggtgttgggagagcaagcttcaagcaga

SEQ ID NO: 239494 - DNA, 259 bp, Glycine max
gctacttctcaagaaaattagggtttgcagtcactgctttgtttagatcagaaccagatcgtgttctcttcttccattggcaaacatggcaactcaaatgagcaagaagagaaagtttgtggcggatggagtgttcttcgccgaactgaacgaggttctgacacgtgagttggcggaggacggttactccggcgtggaggttagggttacgccgatgcgcaccgagattatcatcagagccaccagaacccaagccgtt

SEQ ID NO: 239495 - DNA, 393 bp, Glycine max
ggacgggaagaaacgcatcgagcgtggagaaagagaaggatgatgaggttaaggtggagtgtactcgtaatggtcacgttcgctgtttcactgttttggcttggacccctgcaagtcaaagcctctaattctgtttccgccttcgttcaaaacgccatctactccaacagaatcgccgttttctccaaatcctattgcccctactgtttgcgcgccaaacgcttgcttgctgaactcaatgaaaaaccttttgtggtggagctcgatttgcgagatgatgggtttcaaattcagagtgttcttctggatttgatacgtagaaggacagtcccgcaagtgtttgtgaatggcaagcatattggtggatccgatgatctcagtgctgccgtccaa

SEQ ID NO: 239496 - DNA, 388 bp, Glycine max
gacctaaaaattgtaccgatatggcttcacttgtgtgtctccttttttccttgcatttcatggttatcatgtcaggttccttaccagcaaatagtgaagtgtttacaaaagagtctcctatgtctctatccacaaaacccgtggaaagactcacccaactccacttttatttccataacaacaaaatgggggaacacccgactgctatgaaaattgttgagcctcctaaggcgtccatttctggttttgggactatttacatgatggatgaccctctaaccgaaggaccaagtccaacttcaaagcttgttggaagatgtcagggaatatatgctgaggcttcgcaacatgaacctgcgatactcatggtaacgaatttgttcttcac

SEQ ID NO: 239497 - DNA, 317 bp, Glycine max
gacagcacaatagaacgcgcacgctctcatttgcgcgccgtcttttgttctcgcatcgcatagacactatcgttcgtctcgtattcgccgattctcgccaggctgaaagcgagatccgacggtaaagacgcagatagcacgttgaaacagaaaggcgctggagctgggatgaaacaatcgaggaaagctgcgaaagaccctaagcaaccgaaaatgattacaagcgcattgttctgatttatgtctgagttaagagagcaattcaggaaggagcatcataacaacggatccgtcgatgttgtcggcaaagctggtgg

SEQ ID NO: 239498 - DNA, 395 bp, Glycine max
gaggcgaaagagaagatggccaccgttccagggcagctcgtgtgggagatcgtgaagaaaaacaactcctttttggtcaagcagttcggaagggggacccagagcgtcgaattcagcagagagagcaacaatctctacaacctcaattcgttcaagtactctggtttggcaaacaagaaaactgttacggtacagcctgagggtaaagatcaggctgtgttgttggctacaacaaagacaaagaagcaaaacaagcctgctgcattgcttcacaaatctgtgatgaagaaggagttcaggaggatggcaaaggctgttgaaaatcaggtggcagaaaattactacaggcccgatctcaagaaagccgcccttgccaggttgagtgctgttcacag

SEQ ID NO: 239499 - DNA, 381 bp, Glycine max
gcagcaactcattctgtttcttcagtttggtataactttagccgaggtcaggaggagcactagctaagttcacaatttcaaaatggctaggggactaaagaagcatttgaaaaggctcaatgctcctaagcattggatgcttgacaaactgggtggtgcatttgcgcctaaaccctcatctggaccacacaaatcgagggagtgcctccccctcattcttattctgcgaaaccggctgaagtatgctctgacataccgtgaagtcattgctattctgatgcagcgccatgttcttgttgatggcaaagtcaggactgacaagacttaccctgctggtttcatggatgttgtttcaatcccaaaaacaaatgagaacttccg

SEQ ID NO: 239500 - DNA, 386 bp, Glycine max
tgggagtttgcgtttggcgtaagtggaagaagaagagaaaagagagagaagggtaaggtaaccctagagtggtgaatcgaatctgcaaagatggaagctgcttctcgaagaagaggtggaggcattttcgaaagcctctacacggtcgttatgcgtcgcaactctgtctacgttaccttcgtcatcgctggcgccttcctcggagaacgggctgtagattatggagtccacaagctctgggaggctaataatgttgggaaacgatatgaagacattcctgtgctaaggcaaaggcagtcagaatagtgaccagcttgttagccattttgaagttttattattttcatgaaaatttgaagtgattaagagctggaagcagtttccat

SEQ ID NO: 239501 - DNA, 397 bp, Glycine max
gtcccgtcgtcgcaggcgcagagtagagcagcacagaagagggaaaacggcaccgccgccgtagaagaaaacaaccatggtgcacgtctccttttacaggaactatgggaagacattcaagaagccgcgtcgtccgtacgagaaggagcgtctcgacgcggagttgaagctggttggtgagtacgggcttcggtgcaagagagagctgtggagggtgcagtacgcgctcagccgcatccgcaacaacgcgcggaacctcctcaccctcgacgagaagaacccgcgccggatcttcgagggagaggcgctgctccgaaggatgttccgttacggtctcctcgatgagacacagaacaagcttgattacgtcctcgccctcaccgtcgagaactttctc

SEQ ID NO: 239502 - DNA, 206 bp, Glycine max
tccacctaataacagcttatggtggatacctcagcacccagagacgacgaaaggcctactatgcgacaaaatgcctctgggacttgtacctattcgtagatctagggaatcccgattctacgtcaacccttcgtcactgctgctaagtccactcgccacgcaagatacaacctggtgaactgatacatcttatctagccacaggaa

SEQ ID NO: 239503 - DNA, 361 bp, Glycine max
gactcacaatcgaacgggaaaaggcgtcttcataaacgccgcccaaaacttctcatacccttttattcattccattcgtttctagggttttcttttctttgccgagaaaatgagagagtgcatttcgatccacattggccaggccggtatccaggttggaaacgcctgctgggaactctattgccttgaacacggcattcagcccgatggacagatgccgagtgacaagaccgttggcggaggagacgacgccttcaacacatttttcagcgagaccggcgccggaaagcacgtgccccgcgccgtcttcgtggatcttgaacccaccgtgatcgacgaagtccgaaacggtgcgtaccgg

SEQ ID NO: 239504 - DNA, 397 bp, Glycine max
ggtcgtcgcaggcgcagagtagagcagcacagaagagggaaaacggcaccgccgccgtagaagaaaacaaccatggtgcacgtctccttttacaggaactatgggaagacattcaagaagccgcgtcgtccgtacgagaaggagcgtctcgacgcggagttgaagctggttggtgagtacgggcttcggtgcaagagagagctgtggagggtgcagtacgcgctcagccgcatccgcaacaacgcgcggaacctcctcaccctcgacgagaagaacccgcgccggatcttcgagggagaggcgctgctccgaaggatgttccgttacggtctcctcgatgagacacagaacaagcttgattacgtcctcgccctcaccgtcgagaactttctcgagc

SEQ ID NO: 239505 - DNA, 345 bp, Glycine max
gaagtgatccactccacgtgggccatgctcggagccttgggctgcgtcttcccggagttgctgtcccgcaacggggtgaagttcggagaagccgtgtggttcaaggccgggtcccagatcttcagcgagggtgggctcgactacttgggcaacccaagcctgatccacgcccagagcatcctcgccatctgggccacacaagttatcctaatgggtgccgttgaaggttaccgtattgctggtggccccctcggtgaggtcactgacccaatctactcaggtggcaacatcgacccattgggccctgctgatgacccagaggcttttgctgagcttaaggtgaag

SEQ ID NO: 239506 - DNA, 370 bp, Glycine max
gctagtggcagtgaccaaactccatttctcactcgccgtcgtctcttccgtctagggtttctcctcttcacaaaaatggttgccgcaaaaaaaaactaagaagacccatgagagcatcaacaacaggctcgctctcgtcatgaagagtggcaaattcaccctcggttacaagaccgttctcaaatctcttaggagctccaaagggaaattgattatcattgctaacaactgcccccctttgaggaagtcagagattgaatactatgctatgttggcaaaggttggggttcatcattacaatgggaacaatgtggatttgggcactgcatgtggcaaatattacagagtgtgctgccttaacattattgat

SEQ ID NO: 239507 - DNA, 364 bp, Glycine max
gacttcaattggaatcagattatttcaatctcctagcgcagttccctagttctcccttcaatatgcagatcctcgtcaagaccctcatcggtaagaccatcacccttgaggtggaaagctctgacaccatcgacaacgtcaaggccaatcatccaggacaaggaaggaattcccccggatcagcaacgtcccatcttcgccgagagagcacctcgaggacggtcgtacccatctccgactacaagatccacaatgagtcaatccttcaccgtgtcctacgtcaccttggtggcaggcagatcttcgtcaagactctcactggcagtaccattaccctatacgtctagagctctgacaccattga

SEQ ID NO: 239508 - DNA, 357 bp, Glycine max
ggactctcaaaggaatttatgcaacaagacagcgacacaaagttcccacttccagatctacttctgttctgtcagtcaccacagatagtttaactccactcacctctcaccgcaaccttaacttactatgtacctttcttcttcttttctttgtgtaaagtttaaaacttgaagcaaaaccaattgccccatttgccatttggtggtaataatcgatcgatggagttcactgaatcttacaagcaaacgggtccctgttgtttctctcccgacgctcgcttcattgccgttgctgttgattatcgtctcgtcattcgggagaccgtttctttcaaggttgtgcagttgttttcatgc

SEQ ID NO: 239509 - DNA, 407 bp, Glycine max
agggagcaactcgagaggaatactatatggtaacaacaagaaattctttggcacttaatcgagatattcatgatgaacagactgttccagcccgataccgtcacgaatttcatacgattgcatgggaacaagttcatcttcgacgtctttttcccttccaaaaagttttctacttggagcttctctgattccttttattgaacattgtgatgccaatcgagctttaatgatttctaatatccaacgtccagcagttccgctttcgcagtccgaaaaatgcattgttcgaactggattggaacgccaagtatctttacattcaggagtttccgctcataccggtcacgaaggatacatcattcataccactacttgacggatatttttaggtcgaaatggacagactc

SEQ ID NO: 239510 - DNA, 346 bp, Glycine max
ggcgcctctgcttgcaagagtgaaaaccttctcttacccttctctcaagtttcaagagatttcatcatggctccaaagaaagacaaggctccaccaccttcctccaagcccgccaaatctggcggtggcaagcagaacaagaagaagtggagcaagggaaagctaaaggagaaggtgaacaatatggtgctgtttgctcagggcacctatgacaagctcctttctgaagctcccaaatacaagctcatcactcctgccactctctctgatcgtttgaggattactggatcacttgcaacgaacgccatcggagaattaatggcaacacgttcgatcaggatggtgt

SEQ ID NO: 239511 - DNA, 378 bp, Glycine max
gattcacacaactaactaagaaagtcttccatagccccccaaaaatgaagagcaccatcttctttgctctctttctcttttgtgccttcaccacctcatacctaccttcagccatcgctgatttcgtgctcgataatgaaggtaaccctcttgaaaatggtggcacatattatatcttgtcagacataacagcatttggtggaataagagcagccccaacgggaaatgaaagatgccctctcactgtggtgcaatctcgcaatgagctcgacaaagggattggaacaatcatctcgtccccatatcgaatccgttttatcgccgaaggccatcctttgagccttaagttcgattcatttgcagttataatgctgtgtg

SEQ ID NO: 239512 - DNA, 355 bp, Glycine max
gtccaggaacatttctgttacaagaagtggcgaaaagtgcacataattgttgaatgcattcttaattgtactttcttcatttaggtattgttgtatactatgtttagtttataaaaaaaaaaaaaaaaaaaaaaaaaaaaaaaaaaaaaaaaaaaaaaaaaaaaaaaaaaaaaacaaaaaaaaaaaaaaaaaaaagtaaaaaaaaaaaaaaaaagaaaaaaaaaaaaggggcggctcaaaaggttcaatgctaaattcccgttgaagggaacgtaaaaacttttcaaacagtcaactaaaattcatttcaagggcgttcttttaaaaaattgtaaacgggaaaaccctggggttt

SEQ ID NO: 239513 - DNA, 392 bp, Glycine max
gatctcaagccacgtcagagaaaatggcggtacctctgctctcgaagaagatcgtgaagaagagggtgaagaagttcaagaggcctcagagtgacaggaaaatttccgtcaagagaaactggcgtagaccagagggtatagattcccgtgttacgagaaagttcaagggatgcactttgatgccaaacatccgttatggttctgacaagaagacccgccactatctccctaatggtttgaagaaatttgttgttcacaatgtgaaggacttggaactgctcatgatgcacaacaggacttactgtgctgagattgctcacaatatatccacaagaaagagaacagatatagttgagagagctgcgcaacttgatgttgttgtgacaaacaaa

SEQ ID NO: 239514 - DNA, 208 bp, Glycine max
gagtaatacagacagcaacatgcgcccagcggttattctcaaaactaccatctctcttttggaggcgtcgtcgtcctcaacaccctgtgatggcagactcaacactctcgctagacacgtccttccacaaatggcttctcatgacatgatctgagaatcttcaacctacgcatctgaatccgtcatcaatcatctcgttcgtactccc

SEQ ID NO: 239515 - DNA, 394 bp, Glycine max
ggagagagagagtaatgaaatgagtgaagaagctaaaaagaacttcgtccgcgctctaacggcgacgcccacctccgatgaccagaaacaagcgccggcgctgaatgtccctccgaagaacgtcatcatcaagagcgctgatatgatccccgacatgcagaatgaggccgttgatatcgctgtcgctgcgtttgagaggtacaatgtggagaaagacgtcgcggaatagataaagaaggagttcgataagatgcatggccccacttggcattgcatcgttggtcgtaattttggttcatatgtgactcatgaaacaaaccactttgtttatttctacttggatcagaaagcggttttactctttaaatctggctagccttattgtggtagcaaa

SEQ ID NO: 239516 - DNA, 311 bp, Glycine max
ggagtgtagaagacgaaaagagagtggagagagagagaagtgagagtgtgagagggagcacagtgaagaagagaacgaaggaacgaagatggagactcctcctccgcaacaaggcgtggtgaagaagaacgagactaggggccgaaaacccaggccgagagacgaacacgccaaggcgttgaatgaagggagaataacacagcaacagcaacatgatcagcagcaacaacaacaacagcaacatcaaccttcggtggacgagacatacacgcagtggaagtcccttgttcctgtcctctacgactggcacg

SEQ ID NO: 239517 - DNA, 392 bp, Glycine max
ggagaagggttttacattttattcgttctccggtgaaacagaaacagagagagagagtgagaaaaaacgaaacgatggagggaggagtctcctacgcgcgcatgcctcgtgtcaaaatccgcgagctgaaggacgactacgccaagttcgagctccgcgacaccgacgcgagtatagccaacgcgctgcggcgcgtgatgatcgcggaggtgccgacggtcgccatcgacctcgtggagatcgaggtcaactcgtcggtgctcaacgacgagttcatcgcgcacaggctcggcctcattcccctcacgagcgagcgcgccatgtccatgcgcttctcacgtgactgcaatgcctggaacggtgacggacagtgcgagttttgctccgtcgag

SEQ ID NO: 239518 - DNA, 338 bp, Glycine max
actgttcctcctactttccaagcttcctggcacactttgataagttttttgtgcagctccaatggcaacctctcaaatcacttcatcattgaggaacttgcctgcatttgaaaggtttcaaccttcaacgcttcgatttccttctgctgggcacgtcagaattgggacactgacacaaacctcgtttccctctttcgttgtcaaagccgccactgttgtcgcccccaagcacaccactgttaagcctctgggtgatagagtactggtgaaaattaaggatgcagaggagaagactgcaggtgggattttactgccagcaactgctcaaggcaagcctc

SEQ ID NO: 239519 - DNA, 381 bp, Glycine max
ggttctagtgtgtgattgtttgttgttgtaactcgttcttcttcttttgttgttctgtgtttgtgtttgttttttctctcacctgaaaatgtcttgctgcggtggtaactgtggttgcggaagctcctgcaagtgcggcaacggctgcggaggctgcaagatgtacccagacttgagctacactgagtcaaccaccaccgagaccttggtcatgggagtggcacctgttaaggctcaatttgagggtgctgaaatgggtgtgcccgctgagaacgatggctgcaaatgtggaccaaactgctcctgcaacccctgcacttgcaagtgaggtgttgggagagcaagcttcaagcagagataacccttaattaagaataatga

SEQ ID NO: 239520 - DNA, 348 bp, Glycine max; identical to SEQ ID NO: 238567

SEQ ID NO: 239521 - DNA, 185 bp, Glycine max
aaagagacccggaaaaggtgggaaccgcttttggaaatccattgggcttggatttaagactcccacggaagccatcgaaggaacctacattgacaagaagtgccccttcactggcaatgtttccatccgtggccgtatcttggctggaacatgtcacagtgctaagatgaacaagactattattg

SEQ ID NO: 239522 - DNA, 376 bp, Glycine max
gggatccgaggttcttaagtaacagaacacacaaaaccctagttagtgttagtgttcctcaagccaccgtaccgtgttgcctctctgcaatctacagccaaaatgcctttcaagaggtacgttgagatcgggagggttgcccaaatcaactacggcaaggaatatggcaggctcgtcgtcattgtcgacgtcattgatcagaacagagctcttgtcgatgcccctgatatggtgaggtcccaagtcaatttcaaaaggctttccctaaccgatattaagattgacattaagagggtccctaagaagaaagatcttgtcaaagccatggaggatgctgatgttaagaccaagtgggagaagagttcatggggcagga

SEQ ID NO: 239523 - DNA, 357 bp, Glycine max
gaagtatataacttcttcgaagtgtccggaaatcgttcctatcatcacttctcaaatctcgaaccctctcgttcgtgccgatcactaagtcacacttcatcaatggcgggtagaggcaaaaccctatgattcagcgccgctaaaaaggtcacctcaaggagcaccaaagccggtctccaattccccgtcggtcgtatcgccaggttcctcaaggccggaaagtacgccgagcgcgtctgcgccggagcccccgtctagctcgccgccgttctcgaatatctcgctgctgaggttttggaattggctggaaatgctgcgagagataacaagaagactcgaattgttccacgccacatc

SEQ ID NO: 239524 - DNA, 361 bp, Glycine max
ggcactgcaactttgctctctgtgaggcttcaatttctaattagggtttcgcttagagtaaccaataaccatgggagtcttcacctttgtcgtccgcaaatccggcagcgaatggagcgccaagcaacattccggcgacatcgaggcctccgccgattccaccttcgatctccaacggaagctcgtgcaagccgctctcgccgttgattcctccggtggagttcagtcctctttctctcccgtgtctcctacctccgctgtgttccaggtgatagtgggcggtgcagtattcgttggaggtggtggtggtgctgttgcagctgcacctgcacgtggtgctgccgcagctgatgctggccca

SEQ ID NO: 239525 - DNA, 367 bp, Glycine max
tgtggggcagtgtaggtaccaggagctgagaaggaggcaggttaagattgagactgagacgtgggaagaggcggcaaaggagtatagggagcttttgatggacatgtgtgagcataagctggcacccaatttgccgtacatgaagtcgctctttctcggctggtttgagcctctgagggatgccattgtcaaggaacaggagatgtatggtgaagggaagaataggacggcctatgtgccatactttgttcagttgccggcagacaagatggctgttatcgcaatgcataagttgatggggctgttgatgacaggaacagaacatgccaccgttggcactgccagcgttgtgcaggctgcgtgtggc

SEQ ID NO: 239526 - DNA, 382 bp, Glycine max
  unsure (1)..(382): unsure at all n locations
gacaatcgaacgggaaaaggcgtcttcataaacgccgcccaaaacttctcatacccttttattcattccattcgtttctagggttttcttttctttgccgagaaaatgagagagtgcatttcgatccacattggccaggccggtatccaggttggaaacgcctgctgggaactctattgccttgaacacggcattcagcccgatggacagatgccgagtgacaagaccgctggcggaggagacgacgccttcaacacatttttcagcgagaccggcgctggaaagcacgtgccccgcgccgtcttcgtggatcttgaacccaccgtgatcgacgaagtccgaaccggtgcgtaccggcagctcttccnaccggagcagctga

SEQ ID NO: 239527 - DNA, 374 bp, Glycine max
ggccattgttgctgtcatcatccgcagctgctgttattcgcaccgcaaacaaacagtgagccatggtcgtcggaaagaacaagcgcatctccaaagggaaaaagggtggcaagaagaaggcagctgatccctttgccaagaaggattggtatgacattaaggccccttctctttttcaagtgaaaaatgttggcaaaaccctcgtctctcgtacgcagggtaccaagattgcttctgaaggacttaaacatagagtgtttgaggtctccttggctgatcttcaaggggatgaggatcatgcattcaagaagattaggttgagagctgaagatgtgcaagggaagaatgtcctgacaaatttctggggaatggat

SEQ ID NO: 239528 - DNA, 373 bp, Glycine max
ggatccatttctcgcaacaacgcttaacctctctcattccccatttcctcacctccttcaaccgctgctaaattctagggttccgaaatggacgctggcggaaagatcaagaagggcgccggaggtagaaagggcggcggcccaaagaagaagccggtttcaaggtccgtcaaagccggtctccaattccccgtcggaagaatcggccgttatttgaagaaaggaaggtacgctcagcgtgtcggtaccggtgctcccgtatacatggctgcagttctcgaatacctatctgccgaggtgcttgagttggctgggaatgccgcacgtgacaacaagaagaacaggattattccaagacacgtgcatttggcag

SEQ ID NO: 239529 - DNA, 185 bp, Glycine max
  unsure (1)..(185): unsure at all n locations
ggaaggatagtgattttagagtagaaaaagcanaaaaaaaaaaaaaaaaaaaaaaaaaaaaccggccgcccaaaaggatcaaacctaacttacccttgaatgcaacttcaaactcctccaagagtgccaccaaaatacaatacagggcccctctttaaacaatctcgacacggaaaaaacccggg

SEQ ID NO: 239530 - DNA, 358 bp, Glycine max
ggcagcgcttgagaccaagccccactcaaccaccacaccactctctctgctcttcttctacctttcaagtttttaaagtattaagatggcagagacattcctatttacctcagagtcagtgaacgagggacaccctgacaagctctgcgaccaaatctccgatgctgtcctcgacgcttgccttgaacaggacccagacagcaaggttgcctgcgaaacatgcaccaagaccaacttggtcatggtcttcggagagatcaccaccaaggccaacgttgactacgagaagatcgtgcgtgacacctgcaggaacatcggcttcgtctcaaacgatgtgggacttgatgctgacaactgc

SEQ ID NO: 239531 - DNA, 342 bp, Glycine max
ggaaatcgagaagaagaagaagaagaagatggagaagtatcagatctggagcaggagaatagcgttggcagcgtttgcgtttgctctgctgttccaatcggcctcagcagacgacgtcgttgtgctctctgaagataacttcgagaaggaagttggtcaggacagaggagctctcgttgagttctatgctccttggtgtggacactgcaaaaagcttgctccagaatatgaaaagcttggtagcagcttcaagaaagccaaatctgttttaattggcaaggttgactgtgatgagcataagagtttgtgcagcaagtatggagtctctgggtacccaacaat

SEQ ID NO: 239532 - DNA, 375 bp, Glycine max
  unsure (1)..(375): unsure at all n locations
taatttgggaattattgctcccatcgccattggtttcattgtcggcgctaacattttgttgggtggggccttctctggagcggccatgaaccccgctgtgacatttgggcctgctgtcgtgagctggacctggaccaaccactggatctactgggccgggcctctcatcggtggtggaatcgctggccttgtttacgaggttgtcnttatcagccacacccacgaacagccttccaacaactgactactagaggggggaaattgaaattanaaaaaaaaaattgtgtattattgaatttctctggaatcttcttcggtgtatggttttcgttccttgtgttttcttcccaattcactttcgagggttgtacttgt

SEQ ID NO: 239533 - DNA, 400 bp, Glycine max
  unsure (1)..(400): unsure at all n locations
gacattcaatcacacacacatgcccctatcttccatagctacctagattattcactccctccctaacaagccacaacgtttcctgctccaattggcagctttggatctcacaataagcatgttggcactcatagttgttgttgtntctcttggcctgtgggttggtgtcaaggtgcgccacaagttccaagccacttcaattttggtgaatccttgggtgataatgggaacaacaaccagctccaatctttggctaaggctgattacttgccttatgggattgacttccctggtggaccttctggaaagttttccaatggaaaaaccactgttgatgcaattgctgaacttttgggattcgatgattacatacctccaatatgctgatgctagtggcgat

SEQ ID NO: 239534 - DNA, 359 bp, Glycine max
gagcgaaacagagagtgatttcagtgagtgatcggtgttcacttgatctcatcataatcgtcagcgtcaattgaagaagatgccgatcagaaacatcgccgtcggaaggcctgaagaggcgactcaccccgacacgttgaaggcggctttggctgagttcatctcaaccttcatcttcgtgttcgccggctcaggctccggcatcgcctacaacaagctcaccgacaacggcgctgccacccctgccggcctcatctccgcctccatcgcccatgcattcgccctcttcgtcgccgtctccgtcggagccaacatctccggcggccacgtcaaccccgccgtcaccttcggcgccttcg

SEQ ID NO: 239535 - DNA, 349 bp, Glycine max
ggttcattttgttgttcgaagccaaaaccctagcagccggcgagaatggcagacgttgaggttgatgcggcggcagcggcaggggcagcgcagccgaagaagagaacgttcaagaaattcagcttcaggggcgtggatctggacgcgcttctggacatgtccaccgacgaactggtgaagatgttcagtgcgcgtgcacgtagaaggttccagagaggtctgacgaggaagcccatggccttgattaagaagctccgcaaagctaaaagggaagcaccagcaggtgagaagccagaaccagtgcgcacccatctccgcaacatgattattgtgcctgagatgattggta

SEQ ID NO: 239536 - DNA, 385 bp, Glycine max
ggcagcgcttgagaccaagccccactcaaccaccacaccactctctctgctcttcttctacctttcaagtttttaaagtattaagatggcagagacattcctatttacctcagagtcagtgaacgagggacaccctgacaagctctgcgaccaaatctccgatgctgtcctcgacgcttgccttgaacaggacccagacagcaaggttgcctgcgaaacatgcaccaagaccaacttggtcatggtcttcggagagatcaccaccaaggccaacgttgactacgagaagatcgtgcgtgacacctgcaggaacatcggcttcgtctcaaacgatgtgggacttgatgctgacaactgcgaaggccttgtaaacattgagcagcag

SEQ ID NO: 239537 - DNA, 372 bp, Glycine max
gactcatgcgatatagaccatcttttgcgtccttgtgaacatggacatgaggaaatcatgtagcgtcatcgtcttgcacctcctccatgtcgctgcctctccagatgtggtggtgcagactgacggaagagtgtgtgagtcacatatccacgggttccatggtttgtgtaatagagaccacaactgtgctttggtctgcatgaacgaacgtttctccggtggcaagtgcaaaggcgtctgccgctcgcatgcgtttgcaccaggatttgttgacatctcatcaaacactacacttgccatgcgaattagtaaatcatagctaggccacatatattgcatctactcgttatccatttgggatctagctaccac

SEQ ID NO: 239538 - DNA, 320 bp, Glycine max
gaagcttagcttcaccgtcagttgcaggaaaaatggtttcgctgaaactgcagaagcggctcgccgcgagcgtgctcaagtgtggcagaggaaaggtttggcttgaccccaatgaagtcaacgaaatctccatgggcaattctcgccaaaacataaggaagctggttaaggatgggtttatcatcaggaagcccaccaagattcactctcgctcacgtgctcgtcgaatgaatgaagccaagaggaaaggacgtcactctggatacggtaagcgtaagggtacaagggaggcaaggcttcccaacaaaattctatggatg

SEQ ID NO: 239539 - DNA, 343 bp, Glycine max
ggagcgaagaagatattatggtttttgagtgcggtgcggcgatcctagcactctcttctgcagctttcgccgacagcttcattcaccatggctgagcaaaccgagaaggcttttttgaaacaaccaaaagtgtttctcagctcgaagaaaactgggaagggaaagagacccggaaagggtgggaaccgcttttggaaatccattgggcttggatttaagactcccagggaagccatcgaaggaacctacattgacaagaagtgccccttcactggcaatgtttccatccgtggccgtatcttggctggaacatgtcacagtgcctagatgaacaagactatta

SEQ ID NO: 239540 - DNA, 314 bp, Glycine max
ggaaacagagagtgatttcagtgagtgatcggtgttcacttgatctcatcataatcgtcagcgtcaattgaagaagatgccgatcagaaacatcgccgtcggaaggcctgaagaggcgactcaccccgacacgttgaaagcggctttggctgagttcatctcaaccttcatcttcgtgttcgccggctcaggctccggcatcgcctacaacaagctcaccgacaacggcgctgccacccctgccggcctcatctccgcctccatcgcgcatgcattcgccctcttcgtcgccgtctccgtcggcgccaacatct

SEQ ID NO: 239541 - DNA, 377 bp, Glycine max
ggtagcgcagagaaagaactagaactagggtttcatctttgccatcagtaaacgacaatgatttacgacgttaactctcctcttttccgatccttcctcagccagaagggaggctcctctgataagaggaaatcggacgaacagaagccaaaagagcagaaacccaaagccagcgagaacaaacctataatgactgagtgataacagctgagctgcattcagttgtagaatgaaaataggtggtaggtattgtatttggtgctaaactaagatctttttggctgtgttctgaagtatatgccggcgatgttggtctttgttattgtaatggtttgattttggatatgggttatacgaaaaccttatatgggcacaag

SEQ ID NO: 239542 - DNA, 469 bp, Glycine max
  unsure (1)..(469): unsure at all n locations
gtcnagctgccagtgcggtctagaattatcgggccgacgcccgcgtcaatattgatgcgacaagactacaggatggcaacttatattcgcatgcatgcgacgtcatagctcttctataatgtggccgctctacaggatacaggcttatcgtatttatgcagtcgagatcgtgacacttctatagtgtcacataattttcattcagtggcagatcttttatacgctagttagtgggaaaaccctgaggttagcaacgataatccctctgaagaatatcgcactttcaatagctagtgtgatacccactatgcccgcacatttagcgcttccgatgaggtgggcaccctcaatggtaaatgggaacctgccagtacccgagcattaactcctttcggtttcgtggctacccttatcgtcacgttcacaagttttaagcgtctagctgcaaatccttggccctttttaaggt

SEQ ID NO: 239543 - DNA, 360 bp, Glycine max
gactcactcatacaatatagaccagcttttgcttctttgtgaacatggagatgaggaaatcatgtggcttcttcgtcttgctcctcctccttgtctttgcttcccatgtggtggtgcagacggatggaagagtgtgtgagtcacaaagccacgggttccatggtttgtgtaatagagaccacaactgtgctttggtctgcacgaacgaaggtttctccggtggcaggtgcaaaggcttccgccgccgctgcttttgcaccaggatttgttgagatctcatcagacactactcttgccatgcaaattaatacatcatatctaggccaaataaattgcatctactctttatccatttgggag

SEQ ID NO: 239544 - DNA, 386 bp, Glycine max
acccaggcgtcagcccacgcgtcagcggacccgtcagattgctgccagacgacaactgaacggggtccgcgcacatctcacagcataactgtacacaatgcgcaatctctcatttctctcatattacgaatgccctaacgttcatctcggtttcaccgattctcggcatgccgaaagtgtcatacgatgctatcgtcgccgatagccggttgaagcacacaggcgctggtgcttgaatgaatcaatcttggatagctgatatggatcctaacattccaatcagatctccacacgctttcgtcatattcaagtccgagttcagagagcattttaaggaggagcattctaacaacaagtccgtctctgtagtcggtaaagctggtggt

SEQ ID NO: 239545 - DNA, 361 bp, Glycine max
gatttttctgccgaggaaaagaaagaaagaaaaagaagaacagcgccctagatttgctcttctttgcttcggaagaaagagaggaacaaataacaatggcgttcgcttctttcctcagcagagttctcttcgcttccgtcttcatactctctgcttaccaagaatttaacgaatttggagttgatgggggacctgcagcaaaagcactcagacctaagtttgatgcctttacacatcgagtgcattctcaagttggctttcaacttcctgagactgatcggaaatttttaattgctggggctattgctcataaaggccttggaggggttctttgcagatgtggcagctcttttggagcttc

SEQ ID NO: 239546 - DNA, 359 bp, Glycine max
ggcacttcaattgcaatcaaattagttcattctctttgcgcagttccctacctctcctttcaagatgcagatcttcgtcaagaccctcaccggaaagaccatcacccttgaggtggaaagctctgagaccatcgacaacgtcaaggccaagatccaggacaaggaaggaattcccccggatcagcaacgtctcatcttcgccggaaagcagctcgaggacggccgtaccctcgccgactacaacatccagaatgagtcaacccttcacgttgtccgtcgtctccgtggtgggatgcagatcttcgtcaagactctcactggcaaaaccataaccctagcagtcgaaagctctgacacca

SEQ ID NO: 239547 - DNA, 389 bp, Glycine max
accatcgaaattctagacacacaacacataaaagatttccttgttctttttactgcttaactgttcggctatctcatatatgaacaacaacatgttaggaatgaagagacggagagatgataatgaagggtccttggatttggcaaaatgtcttatgctgttttcttgtccaatagaaagcaacaagacacaacagaaaagttttggttctgtggaatttgagtgcaagacgtgcaaccgcaagttctcttcttttcaagcactgggagggcacagggcaagccacaagaggcagaagctggagggggaagaactgaaagaacaggccaaaagtcttagcttgtggaacaaacccaaaatgcacgagtgctccatttgtggccttgaat

SEQ ID NO: 239548 - DNA, 367 bp, Glycine max
ggttctagtgtgtgattgtttgttgttgtaactcgttcttcgtcctttgttgttctgtgtttgtgtttgttttttctctcacctgaaaatgtcttgctgcggtggtaactgtggttgcggaagctcctgcaagtgcggcaacggctgcggaggctgcaagatgtacccagacttgagctacactgagtcaaccaccaccgagaccttggtcatgggagtggcacctgttaaggctcaatttgagggtgctgaaatgggtgtgcccactgagaacgatggctgcaaatgtggaccaaactgctcctgcaacccctgcacttgcaagtgaggtgttgggaaagcaagcttcaagcaaagataaccctta

SEQ ID NO: 239549 - DNA, 266 bp, Glycine max
ggaggaaaagaaagaaagaacaaaaaaaacagcgccctagatttgctcttctttgcttcggaagaaagagaaaaacaaataacaatggcgttcgcttctttcctcggcagagttctcttcgcttccgtcttcatactctctgcttaccaagaatttaacgaatttggagttgatgggggacctgcagcaaaagcactcagacctaagtttgatgcctttacacatcgagtgcattcccaagttggcgttcaacttcctgagattga

SEQ ID NO: 239550 - DNA, 390 bp, Glycine max
gacacaccgtttgttctattcttaactcaacttctgctacccactctcttcttccaagtccaaccacgcttttctctacagtcatgggcaaggtcaagatcggaatcaacggatttggaagaattggccgtttggttgccagagtcgctctgcaaagagacgatgtggagctcgttgccgttaacgaccctttcattaccaccgattacatgacatacatgtttaaatacgacagtgttcacggacactggaagcatcacgatgtcaccgttaaggacgagaagacccttctcttcggtgacaagccagtcactgtttttggacacaggaaccctgaagagatcccatgggggtcaactggagctgatatcattgttgagtccaccggag

SEQ ID NO: 239551 - DNA, 236 bp, Glycine max
gaacgacgtatggactgatctcagtgcatgatctgtgatcaattcatctcatcaaaatcgacagagtcaattcactaaaatgccgatcaaagacatcatcgtcagcaagcctgatgaggcgactcaccccgagacgttcaaagccgctttggctgaattcaactcaagcctcatcttcgtgtacgacggctcaagctccagcatcgcctacaacaagctcaccgacaacggcactg

SEQ ID NO: 239552 - DNA, 353 bp, Glycine max
gacagcaaaacaattttcaggctcacttaccattccataacctaaatctcctctttgtttccgagtcagagagcaatggcacgtaccaagcataccgctcgcaagtccatcggcggaaaggcgccgaggaagcaattggcgactaaagccgctcgcaagtcagctccggccaccggcggagtgaagaagccccaccgcttcaggcccggaacggtggctctgagggagatcagaaagtaccagaagagcactgaacttctgatccgaaaactcccattccagaggctcgtcagagaaatcgctcaggatttcagtacagatcatcgtttcgagagcagcgctgtgtctgcgct

SEQ ID NO: 239553 - DNA, 384 bp, Glycine max
ggtcactcaccacttcaaaacactcataacacaaagcacaaagcaaagctcatccttgagttaaaaaatggcagcagcttcttccatggctctctcatccccatccttggctggcaaggccgtgaagctgggcccatcagccccagaagtgggaagggtgagcatgaggaagaccgtcaccaagcaggtctcctcaggaagcccatggtacggcccagaccgagtcaagtacttgggcccattctctggcgagcccccgtcctacctaaccggtgagttcccaggcgactacggctgggacactgctgggctttccgcagacccagaaaccttcgccaagaaccgtgaactcgaaatgatccactccaagtgggccaatgccgg

SEQ ID NO: 239554 - DNA, 304 bp, Glycine max
gaaagaagttaagagagttttttttgttccacactgaccaacccttggagacgcaagtgatactttcgttacctatcttggtcttgtatcccttagccttattttcaaacatagtctttggtaaatggttcaaattggacgttcattcaagagtaactgggctcgtaacaagttgggaccaatggcattactcacagcatgacactcagggtgacaagcgggtatgcttgccatgatgtgacaagtcacatcgtaggaagcactagcgagagacacacttcgttgttgttcgtgacaagcttcg

SEQ ID NO: 239555 - DNA, 385 bp, Glycine max
gacttcacaactcaaactgcttcattgcataattgcagataagatcaacccttctaccttcagattcgcgggaagatggcatcacttcatgctaatgtgacatcagttgtttacaacagtggcaaccgtgtttctcaatcgaaatttgcaagctcttccttcttgtctgggttcgatgttgttggtcgtgcttcaagtgcttggaagaaggaacttgtcccatcttccatttccttggtgcctagagccaccctaacatttgatcccccaactaccaattcagacataaccaagcaaaagaagcacactcttgaccctgcttctccagattttcttcctcttccttcatttgaacagtgctttccaaagagcaccaaggaacaca

SEQ ID NO: 239556 - DNA, 388 bp, Glycine max
gatacctaaaaattgtaccgatatggcttcacttgtgtgtctccttttttccttgcatttcatggttatcatgtcaggttccttaccagcaaatagtgaagtgtttacaaaagagtctcctatgtctctatccacaaaacccgtggaaagactcacccaactccacttttatttccataacaacaaaatgggggaacacccgactgctatgaaaattgttgagcctcctaaggcgtccatttctggttttgggactatttacatgatggatgaccctctaagcgaaggaccaagtccaacttcaaagcttgttggaagatgtcagggaatatatgctgacgcttcgcaacatgaacctgcgatactcatggtaacgaatttgttcttc

SEQ ID NO: 239557 - DNA, 388 bp, Glycine max
gacctaaaaattgtaccgatatggcttcacatgtgtgtctccctttttccctgcatttcacgggtaccatgtcaggttccttaccagcaaatagtgaagtgtttacaaaagagtctcctatgtctctatccacaaaacccgtggaaagactcacccaactccacttttatttccataacaacaaaatgggggaacacccgactgctatgaaaattgttgagcctcctaaggcgtccatttctggttttgggactatttacatgatggatgaccctctaaccgaaggaccaagtccaacttcaaagcttgttggaagatgtcacggaatatatgctgaggcttcgcaacatgaacctgcgatactcatggtaacgaatttgttcttcac

SEQ ID NO: 239558 - DNA, 228 bp, Glycine max
gcccgccgatatgtctattcatagccttgctggaaagccacatttcactacatgtcgaattccacaacaagtcaataccggtggcccctcctgacagttgcgcagccgggatgcccaaggggacgcgctctgtaattgcgcattaagagatgcgggtgtagtcgctacggggcaggatgaacgctacacttaccaattgcctatcgcatggctcggatcacattcttc

SEQ ID NO: 239559 - DNA, 383 bp, Glycine max
gaatccgaacagtagtaccaacatggcttcagttgtgtacctccactttggcttccatctcattgttatcatgtcaagttccttacgcgcaatcactgaactgtttgctgaacagtatcaatccacagaacccgtggaagaaaaactcacccaactccacttctatttccataacaacatatccggggaacacccaactgctatgaaaactgtcttgcctcctaaggggtccattcatggttttggggctacttacatgatggatgaccctctaacggaacgaccaagtctaacttcaaagcttgtgggaagatctcagggaatatacgctttggcttcactacatgagcctgagttgctcatggtgacaaatttctcttcac

SEQ ID NO: 239560 - DNA, 385 bp, Glycine max
agggatacacactctgtcacgcacccaccagtctactacactcctctcactcagtctcactctctgctccgtgatagctgtaccacgtttttctctccatctcgaaacaccatctctgcctcagtcccaacccatcaccattctcatggctgctctagctctagcacttcttcttctggctttcaccggcacttcaagtgctacatggtgcgtttgcaaggatggaagcgacgcgatcctgcagaagacgttagactatgcttgtggagctggtgctgactgtaaccctcttcacctaaacgggccttgttttcagcccaacaccgtcagggcccactgtaactacgccgtgaacatctacttccaaaagaagggtcaagctcaa

SEQ ID NO: 239561 - DNA, 403 bp, Glycine max
gaagacgacagaagggggcgcaggtagagagagcgagagaacacgaacataagggaaccacagcggcggtaacagaagaacaagcagagaatgggtcgagtgagaacgaagacggtgaagaaatcctctcggcaggtgatagagcgtcactactcgcgcatgaccctggacttccacacgaacaagaagcttctggaggaagtggcgataatcccgtcgaagaggctaaggaacaagatcgcggggttctcgacgcacctgatgaagcgcatccagaagggccctgtgcgcggcatctccctcaagctccaggaggaggagcgcgagcgccgcatggacttcgtccccgacgtctccgccatcaacaccgaccacatcgaggtcgacaaggaaaacctcgaca

SEQ ID NO: 239562 - DNA, 365 bp, Glycine max
ggttcttttcatgcatgtgttgaatgcacatgctggatctccggtccggttagggcatttctgggaccttaaatcaccaatttctcacccaatcaattccaattaagctgaaggtgtctctgatctatatgtgatgggtgctccgaagcacacatggactgcagaagatgaacaagcacttacagccggagttgtcaaacatggtgttggtaaatggcgcaccatactgaaggatccagagtttagtagtgtcttgtacctgcggtcaaatgtggatctcaaggataaatggagaaatctgactgtgatggcaaatggatggagctctagggaaaaatctaggttatcactcagaagggtgcatc

SEQ ID NO: 239563 - DNA, 366 bp, Glycine max
gactgcaactttgctctctgtgaggcttcaatttccaattagggtttcgcttagagtaaccaattaccatgggagtcttcacctttgtcgttcgcaaatccggcgccgaatggagcgccaagcaacattccggcgacatcgaggcctccgccgactccacctacgatctccaaaggaagctcgtgcaagccgctctcgccgttgattcctccggtggagtccagtcctccttctctcccgtgtctcctacctccgctgtgttccaagtgatagtgggtggtgctgtattcgttggaggtggcggtggtgctgttgcagctgcacctgcaggtggtgctgctgcagctgatgctgccccggctgctg

SEQ ID NO: 239564 - DNA, 379 bp, Glycine max
gaacaaaacagccatcatcatggccacctctgctattcagcaatcagcattcgcaggtcaaactgctctgaagcagctcaatgagttggtccgcaagaccggtggcgccggcaaaggtcgcaccaacatgcgccgtaccgtcaagagtgctcctcagagcatttggtatggccctgatcgtcccaagtacctgggtccattctcagagcaggttccgtcatacctgaccggagaattccccggtgactacggatgggacactgctggactatcagctgacccggaaaccttcgccaggaaccgggagctggaggtgattcacagcagatgggccatgcttggtgcacttggctgcaccttcacagagatccttgagaag

SEQ ID NO: 239565 - DNA, 388 bp, Glycine max
gggctgatatttcctgataagtggacagacgcttaaacagagaaactaacacagatttgcatgcatggggaaaataacgcacattgtagtaattcccagtgcagggtacagccacttcgttcccgttatccacttctcaaagagacttgttgagcttcacccagaaattcacgtcacatgcatcattcccattctggggtctctcccaagtgctgcaaaacccattctccaaacccttccacaaaacatcaacacggttttccttccaccggtgaaccctaatgacctaccacaaggtgttcccgtagttgtccaaattcagctagcaatggctcactccatgccctccatccaccacaccctcaagtccataacttcaaagactccc

SEQ ID NO: 239566 - DNA, 349 bp, Glycine max
ggattgattccctcattcttcatccatagacatggccaccgtcacttctgcagccgttgctattccctcattcactggcctcaaggcaagcgcaggcaaagtgagtgccgcagttaaagtctcagctccccaagccacaaggttgggcatcaaggcttcgctgaaagacgttggagtcgctgttgtggccactgccgcgagtgcagtgctggctagcaacgccatggccattgaagtgttgctgggtggtgatgacgggtctctggctttcgttcccaacaatttctccgtggcctctggggagaagatcgtgttcaagaacaacgcaggtttcccccacaacgttgtg

SEQ ID NO: 239567 - DNA, 351 bp, Glycine max
aactacaacacaagagactgtagcttctttttgaactctctgtgggttggggttttggagtgggagcaccaatggctttcttgatggcaattgtagtattaagtgttgtcttggtgctctgtttttgctctgctctcttgaggtggaatgaagtaaggtacaggaagaaaggtttgcctcctggcacaatgggttggccactttttggggagacaactgagtttcttaagcagggtccaaacttcatgaaaacccagagagcaaggtatggcagttttttcacatcccacatactgggttgtcctaccattgtttccaggattcaaagcttaacagatacatcctaatgaa

SEQ ID NO: 239568 - DNA, 348 bp, Glycine max
ggactgcaaatccctttcagctttctgggtacggagaattttgtaagatggtagagtttcaaaggttgttggtgtgcatcaccacctgcattctatgttggatgcccaatggtgccactgccgccacagatccaaatgatgctgctgctgtgagatttttgtttcaaaatatgaactcaccaccccagctaggttggcctcctaatggtgatgatccatgtggacaatcttggaaaggcattacttgctctggcaatcgtgttacagagattaagttatctaatcttgggctaactggatcgttgccttatggattacatgtcctgacatctttgacctacgtacaca

SEQ ID NO: 239569 - DNA, 367 bp, Glycine max
tgggactcactcatacaatagagaccagcttttgcttctttgtgaacatggagatgaggaaatcatgtggcttcttcttcttgctcctcctccttgtctttgcttcccaggtggtggtgcagacggagggaagagtgtgtgagtcacaaagccacgggttccatggtttgtgtaatagagaccacaactgtgctttggtctgcaggaacgaaggtttctccggtggcaggtgcaaaggcttccgccgccgctgcttttgcaccaggatttgttgagatctcatcaaacactactcttgccatgcaaattaataaatcatagctaggccaaataaattgcatctactctttatccatttgggagctag

SEQ ID NO: 239570 - DNA, 375 bp, Glycine max
gtcagttcggtggaaggagccgtagcagcagcggaagctctagcttgggcagcgaatcacaatggcgagaggattgaagaagcatttgaagaggcttaatgccccaaagcattggatgcttgacaaactgggtggtgcatttgctcctaagccctcatctggaccacacaaatccagggaatgcctgccactcatactcattttgcgaaaccggctgaagtatgctctgacataccgtgaagtcattgctattctgatgcagcgacatgtccttgttgatggcaaagtcaggacagacaagacatatcctgctggtttcatggatgttgtatcaacccctaaaacaaatgagaacttccgcctgctgtatgacac

SEQ ID NO: 239571 - DNA, 381 bp, Glycine max
gacagcactgcactcttcgcaacacagcaaaaaaagacaacccagagagcgcgtcttaataaacgctcttctctgaaaacccccatttcttttcttctttcttcttctctttcgcttcttcgatcttcgatcttcgtcgctgaaaatgagagagtgcatttcaatccacatcggccaggccgggattcaggttggaaacgcctgctgggagctttactgcctcgaacacgggattcagcctgatgggcagatgccaagtgacaagaccgttggtggaggtgtggatgctttcaacaccttcttcagtgaaactggggcaggaaagcacgtgccccgtgcgatttttgtagattttgagcccactgtgattgatgaggttag

SEQ ID NO: 239572 - DNA, 385 bp, Glycine max
ggccattgttgttgctattatcatccgcagctgcttttattcgcaccgcaaacagtgagccatggccgtcggaaagaacaagcgcatctccaaggggaacaacggtggcaagaagaaggcagctgatccctttgccaagaaggattggtatgacattaaggctccttctgtttttcaagtggaaaatgttggcaaaaccctcgttctcgtactcaaggtaccaagattgcttctgaaggactcaagcatagagtgtttgaggtctccttggctgatcttcaaagggatgaggatcatgcattcaagaagattaggttgagagctgaagatgtgcaatggaagaatgtgctgacaaatttctggggaatggatttcacaacagaca

SEQ ID NO: 239573 - DNA, 350 bp, Glycine max
gagggtttcggagtcgttgcagagctgcgcgttgatctagaaaaatggcgaggataaaggtgtacgagttgaggaataagacgaaggcggagctactgaaccagctcaaggatctcaaggcggagctagccctgctccgcgtcgccaaggttaccggcggcgccccaaacaagctctccaaaattaaggtggtgaggctatcgatagcgcaggttttgacggttatttcccagaagcagaaagcggcgctgagagaggcttacaagaagaagaagtatttgccccttgacctccgtcccaagaagacccgcgccattcgcagacgccttaccaaacaccaggtgtctttg

SEQ ID NO: 239574 - DNA, 379 bp, Glycine max
gagtcagagagacagaaggcaggaagtcaaagagaggacacggtggttcggcggggaacaagttcctgatgtctctgggtctgccggtggccgctacagttaaatgccccgacaacacggcggcgaataagctcgacatcatagcggtgaaagggatcaaagggcatttgaaccgtctcgcctcggcttgcgttggcgacatggtgatggccaccgtgaagaaggggagacccgatcttaggaagaatgttttgccagctgtcattgttcgccagcgcgcaccatagcgcctaaaggacggcgtctacatgtattgcgaagataacgcaggtgtgattgtcaatcccaaacgataaattaaaggttctgctatcactgg

SEQ ID NO: 239575 - DNA, 394 bp, Glycine max
aagaatgtgattggtgctcgcagagcgtcctggaggatcctgtcttccattgagcagaaggaagaaacaaaagggaacgagttgaatgcgaagcggattaaggagtacagacagaaggttgaattggagctatcgaacatctgtaatgatgttatgagagtgattgatgagcaccttatcccttcggctgcagctggtgaatccactgtgttttactataagatgaaaggagattattatcgttatcttgctgaatttaagtcaggcaatgagaagaaggaagctgctgatcagtctatgaaagcatatgagtctgctaccgctgcagcagaggctgatttacctcccacacatcccatccgattgggtctagctttaaatttctctgttttca

SEQ ID NO: 239576 - DNA, 377 bp, Glycine max
ggaaacacgagtcttgaacaaacttcgaggaaagggatcgccggcggcaccctccgaagacggagatacacccactcactcaccaccactttcccagaaaataaccaccgcctacaatttctcggaatttattttgcgttttggtgcctttgttgttcggattttcaggtgagggagctcgtgtcgtgtgtcgtttagggttaaaaatggggtttaagtgggtgcactgatgtcattgttgtggcttgtgattcgtcaacttgcagaaatcgaggcaatggctgcatctaagaaactgataacaagagaagagtgggagaagaagcttagtgatgtgaagattagaacagaagacatgaataagttggtaatgaatt

SEQ ID NO: 239577 - DNA, 387 bp, Glycine max
gacatcacattttctcaaagtaatttattaattaataaataaatggcggcggcggcggcagtgacggtgctactcccacctaggattccgaccgccaccaacgttacccgctgctctgctttgccttctctgcctcctcgcggcaccaacactaaaaccactttgctcttatcttccctcaaccacttctcagtgtcccgaaaatcttctctgcttcagaccagagcttcttcagaggaatcatcctcagtagatgccaatgaggtgttcacagatttgaaggaaaagtgggatgctcttgaaaacaagtccacagtacttttttatggtggtggggctttagttgctgtttggctatcgtcgattcttgtgagcgccatcaactct

SEQ ID NO: 239578 - DNA, 276 bp, Glycine max
ggttctagtgtgtgattgtttgttgatgtaactcgttcttcttcttttgatgttctgtgtttgtgtatgttttttctctcacctgaagatgtcttgctgcagtggtaactgtggttgcggcagctcctgcaagtgtagcaacggctgcaggagctgcaagatgttcccagacttgaactatcatgaggtcaaccatcgacgagaacttggtcatgggagtggcacgtgttaaggctcaattttagggtgcttaaatgggtgtgcccgctgagaacg

SEQ ID NO: 239579 - DNA, 360 bp, Glycine max
ggcttgctgatcctcatcatgggaaccatttttcctcctcactctctctctccactcctcaacatcaaaccttcaccctcaagaattctcttggctccctctccccaacccaagtcaaattctctcttttgctccaaacccattgtttcaagtctcagaaagaaccaaacttcatctcccaaaccttcatcgggcacaagctggttggctcatgctcaacagggcctagcagctttggctatctccttggcactcaactttagcccagttttgtttaatggcaatgcattggcatctgagtttgatgtgcttaatgagggtccacccaaagattcttatgtgtttgatgatgcaggagtg

SEQ ID NO: 239580 - DNA, 312 bp, Glycine max
gactcaccacttcaaaacactcataacacaaagcacaaagcaaagctcattcttgagttaaaaaatggcagcagcttcttccatggctctctcatccccatccttggctggcaaggccgtgaagctgggcccatcagccccagaagtgggaagggtgagcatgaggaagaccgtcaccaagcaggtctcctcaggaagcccatggtacggcccagaccgagtcaagtacttgggcccattctctggcgagcccccgtcctacctaaacggtgagtttccaggcgactacggctgggacactgctgggctttc

SEQ ID NO: 239581 - DNA, 343 bp, Glycine max
ggagaacacaaacagcagcgtcttggtttgtgagagagacagaggcacagagagaaaatggtttcggggtcaggaatctgcgcgaagagggtagttgtggacgcgcggcaccacatgctggggaggctggcatcgatcgtggcgaaggaacttctgaatgggcagaaggtggtggtggtgcgctgcgaggagatttgcatctccggtgggctcgtcaggcagaagatgaagtacgtggcgtttcctccgcaagcgcatgaacaccaagccctctcacggggccatccatttccgtgcacccggcaagatcttctggcgcaccgttcgtgggatgataccacac

SEQ ID NO: 239582 - DNA, 357 bp, Glycine max
  unsure (1)..(357): unsure at all n locations
ggcgcacccagagaggaagcttagagagagagagagagagagagagaggagagagtattggcgcttcatcaagatgggtatttctagggattccatgcacaagaggcgtgccactggtggcaagaaaaaggcttggagaaagaagagaaagtatgagcttgggcgtcaggcagcaaacaccaagttatcaagcaacaggacaatcaggaggattcgtgttagaggtggcagtgttaaatggagggcattgaggctggatactggcaattactcaggggggtactgaagcagttactcgcaagactcgtattcgagatattgtttacaatgcctcanacaacgagcttgtgcgaactc

SEQ ID NO: 239583 - DNA, 389 bp, Glycine max
gaaaacagagagtgatttcagtgagtgatcggtgttcacttgatctcatcataatcgtcagcgtcaattgaagaagatgccgatcagaaacatcgccgtcggaaggcctgaagaggcgactcaccccgacacgttgaaggcggctttggctgagtccatctcaaccttcatcctcgtgttcgccggctcaggctccggcatcgcctacaacaagctcaccgacaacggcgctgccacccctgccggcctcatctccgcctccatcgcccatgcattcgccctcttcgtcgccgtctccgtcggggccaacatctccggcggccacgtcaaccccgccgtcaccttcggcgccttcgtcggcggcaacatcaccttcctccgcggcatcg

SEQ ID NO: 239584 - DNA, 371 bp, Glycine max
gcttcacactcatctactccacattgtcctctcaccactctccaattgaaaaggcttctttatcaaaagaaaaatggctcaagtttgtttgctcttggtggggcttctcacaatgttctcctctgcctatggctatggatatggtggtggctgggttaatgcacatgccaccttctatggaggaagtgatgcctcaggaacaatgggtggggcatgtggatatggcaacctctacagccaagggtatggaacaaacactgctgctttgagcactgctttgttcaacaatggtcttagttgtggctcatgctataaaataaggtgtgtgaatgaacataggtggtgcctccctggctccattatggtcactg

SEQ ID NO: 239585 - DNA, 371 bp, Glycine max
gaaaaggccatggctggttcctctgcttctcttttgttccttttccttctctttggattctcagcagctaaggagctattggttggaggcaaaatagatgcttggaagattccatcttctgaatcagataccctcaatcaatgggctgaaaggtctcgtttcagagtgggcgatcatctagtgtggaaatatgagagtgggaaggactcagtgttggaagtaacaagggaagattatgctaattgcagcacatccaagcccatgagggagtacaatgatggaaacactaaggtgaagcttgaacatcctggtccattttacttcatcagtggatcaaaggggcactgtgagaaggggcaaaagttgattgt

SEQ ID NO: 239586 - DNA, 510 bp, Glycine max
  unsure (1)..(510): unsure at all n locations
ggcgcgcgagcgtgggcggcggcgtgtgccgtcaactgtcatcgcggcgaggtaccggtcaggaattcccgggctgacccacgcgtcagtacggctgcgagaagacgacagaagggatcatactcaaaataagagtttgatcctggctcagaaggaacgctagctatatgcttaacacatgcaagtcgaacgttgttttcggggagctgggcagaaggaaaagaggctcctagcgtgaaggttgcttgtctcgcccaggaggtgggaacagttganaacaaagtggcgaacgggtgcgtaaggcgtgggaatctgccgaacagttcgggccaaatccaggggagcggactgcgagggggaaagcaaggcggccgctcgagaggagtcagggcggaggtcggcgtccatgcgagcgcatcggcgcttcgagagtgtcaccgagattcaattcactggccgtcgttttacaacctcctgactggggaaaccctggggttacccaacttaagc

SEQ ID NO: 239587 - DNA, 388 bp, Glycine max
ggaaccacctacttggtgtcttgcaattcccaatggcctccattttcaagctctcaacgccatctccagctgcttccttatcagaagcgcttcgccccagagattctcgcttcctctccttcaatccttcttccaacgctattaattacaaaattaacctctccgcttccctccgatccattcactccctccctcttaaaacctccttgcggatcaaatgctcccaaacagatgggaatggaagtcctgcaaagaggacagtgcttcatgatctttatgagaaagaagggcagagtccatggtatgataatctctgcagacctgttacagaccttcttcctcttatagcaagtggtgtcagaggcgtcactagcaaccctgcgatttt

SEQ ID NO: 239588 - DNA, 384 bp, Glycine max
  unsure (1)..(384): unsure at all n locations
ggtagttccaccgagtagcaacaatgtcgaagcgaggtcgcggaggatcggcagggaacaagttccgcatgtcactgggtctgccggtggcggcgacggtgaactgcgccgacaacaccggcgcgaagaatctctacatcatatcagtgaaggggatcaagggaacgctgaaccggttgccgtcagcttgcgtgggtgacatggttatggccaccgtcaagaagggaaagcctgatctccgtaaaaaggtgctccccgccgtcatcgtccgtcagcgcaaaccctggcgccgaaaaggacgtgtctacatgtacttcgaaaataatgctggggtcatantgaatcgcaagggtgaatatgaaagttctgctatcactggtccta

SEQ ID NO: 239589 - DNA, 394 bp, Glycine max
gactcactcatacaatagagaccagcttttgcttctttgtgaacatggagatgaggaaatcatgtggcttcttcttcttgctcctcctccttgtctttgcttcccaggtggtggtgcagacggagggaagagtgtgtgagtcacaaagccacgggttccatggtttgtgtaatagagaccacaactgtgctttggtctgcaggaacgaaggtttctccggtggcaggtgcaaaggcttccgccgccgctgcttttgcaccaggatttgttgagatctcatcagacactactcttgccatgcagattaataaatcatagctaagccaaataaattgcatctactctttatccatttgggagctagctaccacaaccaactcatacttggtcattg

SEQ ID NO: 239590 - DNA, 204 bp, Glycine max
ggttggtagaagaaattgggcgtgtgggagttgttgaatcgggaagcaaaaaaaatgagaatccatcacatagcatgcctccaagacaattattcctatctgatcgtagacgagagcacgaaggaagccgcggcggtggacccggtcgaaccggagaaggttcttgaagttgccagctcgcacggcctcacgctcaaattcgtc

SEQ ID NO: 239591 - DNA, 391 bp, Glycine max
gaccgtgcgctagttctgagtattctgatcgccccctgagagagctcgtcgcggcggttgcagaagaagattgcaagatgaagttcaacatcgcgaatcccaccactggatgccagaagaagctcgagatcgacgacgatctgaaactgcgagcattttgggacaagaggatctcacaggaggtcatcggagatgcactcggtgaggaatttaagggctatgtcttcaaaattaccggaggttgtgacaaacaaggatttccaatgaagcagggagtgctgactcctggtcgtgttagacttttgcttcacaggggaactccttgcttccgtggatatggaaggcgtaatggagagcgtaggagaaagtctgttcgtgggtgcattgtcag

SEQ ID NO: 239592 - DNA, 169 bp, Glycine max
gacggttacacgccgtcgtcgctgtttttgtgtgtcgcttcttcgtacgtgcagctgcaatggtgaagggacgccaaggagaacgtgtcagactctacgtgaggggtacaatccttgggtaaaaaaggtccaattcaaaccagtatccaaatacatccctgatccaaat

SEQ ID NO: 239593 - DNA, 369 bp, Glycine max
gacatctttcactcgttctctgaaattttaattgacttttctcccctcataaaaaaaacctaccaatggctcccgcaaaggcagagaagaagcccgcggagaagaagccggcagagaaggccccagcggagaagaagccgaaggcggagaagaaaagatatcgagggagggaggaagcgagaagaagaagaagagaataaagaacagcgttgagacgtaggatatctacatcatcagggtgtagaagcatgtggaccacgacatggggatctcgagcaaggctatgggggatatgaggagtttcataaacgacatcttcgagaagctcgcccaggaatcatcgcgtcccgctaggtacaacaagaagcc

SEQ ID NO: 239594 - DNA, 330 bp, Glycine max
gaccgcattagcactcgtctttggttctggtttatagatctctgtgaagtcgctttataacactcaacctaagatgcagaacgaggaaggacagatcaccgagctttacattcctaggaagtgctctgccacaaaccgattgattaccgctaaggaccatgcgtcggttcaggttaacattgggcatgtggatgagaatggcgtctacaatggccatttctccacttttgctctctgcggcttcatacgtgctcagggtgatgctgacagtgccctagatcgcttgtggcagaagaagaaagttgaagttaagcaacagtagacacccat

SEQ ID NO: 239595 - DNA, 232 bp, Glycine max
ggttgtcaagcgtgccgagaaaaccctacttcgcttgcagtcacacaagaggccaatcctattcatagctcgagatgggtgaagaagtgaaggtagttgttccagaatcagtgttgaagaagcgcaagagggaggaggaatgggcgttggccaagaagcaagaactcggtgcggccgggaggaagagagccgagagccgcagacgcatctacgggggagggaagcagtacgc

SEQ ID NO: 239596 - DNA, 330 bp, Glycine max
gaaggaagggagggaagaatagaatgggatctggaagtggaaaacacactggagagttcttcaggagaagggatgcatggaggaagcatccgatgctcaccaatcagctccgccacgccacccctggccttggcatcgccgtcgtcgccttcggtatctacctcgtcggcgaacaagtctacaataggctctatgctcccgatcctcattcgatttctcacgtgaaagccggggatcaccactaaacgtttggacggacgcactccatttcatcatcacttaataagcttgctagcatgttctcgcatcctttaatgtttaaatttcaga

SEQ ID NO: 239597 - DNA, 222 bp, Glycine max
cagagcacaactcatccgtgagtgtaaggatggagacagcttcttccatggctctctcatccccatccttggatggcaacgccgtaaagctgggccgatcaacgggatcaatgctaacggtgcgtatgaggaagatcgtcacccttcaagtctcctcaggaatcccattctacggcccatactttgacaagtacttgagcggaatctccggggagctcccgt

SEQ ID NO: 239598 - DNA, 351 bp, Glycine max
gactcaccacttcaaaacactcataacacaaagcacaaagcaaagctcatccttgagttaaaaaatggcagcagcttcttccatggctctctcatccccatccttggctggcaaggccgtgaagctgggcccatcagccccagaagtgggaagggtgagcatgaggaagaccgtcaccaagcaggtctcctcaggaagcccatggtacggcccagaccgagtcaagtacttgggcccattctctggcgagcccccgtcctacctaaccggtgagttcccaggcgactacggctgggacactgctgggcttttcgcagagccagaaaaccttcgccaagaaccgtgaactcg

SEQ ID NO: 239599 - DNA, 373 bp, Glycine max
gagataaaagaagacgaagttgcatcttatctgcaacactccgtatccacttcgctggtaataagagaagagaagagagagagagagagagagagggcgtggagaatgttaagtctctcagttgcttctccttcttcttcaaccatttcctttctcccaaagccattcaatggcattcagctccgtcgctctgccacatgctccattccacccacgaaatgcagcgcttcggtgccagtggtgatgatgtctaaaaggacggaggaattgaaggaaattagacaaatgaccaccgaacaaattaacgaagaggttgtcgaccttaagggcgagcttgtcatgcttcgccttcagaaatcggctcgcaacgagt

SEQ ID NO: 239600 - DNA, 231 bp, Glycine max
gacaatagagactagagaagagagaggtgttggtgccctaatcgtgagaagaaaggaaagggaaaagaggaaaatggtgtgcataaggaaggcgacggtgaaggaccttctggcgatgcaggcgtgcaacctgttctgcctccctgagaactaccagatgaagtactacctctatcacatcctctcctgggcccagctcctctacgtcgccgaagaagagaacgggcgcat

SEQ ID NO: 239601 - DNA, 254 bp, Glycine max
tggtctgcgcctgatttctcagttctctcacacacgcattcggtgctccgaatctcagattctagggttagggttcccaatttctccaccgatcagaaaatgagttcaactggtggttctaccaagggcggaaggggcaagcccaaagcctccaaatccgtttcaagatcgcagaaagctggtctccaattccgcgttgggagaatcgcgcgattccttaagggtggggaaagacccggagcgtgttcgtgctg

SEQ ID NO: 239602 - DNA, 383 bp, Glycine max
gatcatatttaaaatcaaaacaacaaattttcagactcaacaagcttcgaaccaaatcttactgagaaaatgtctggtcgtggaaagggtggaaagggtttgggaaagggaggtgccaagaggcacaggaaggttcttcgtgacaacatccagggcatcacgaaacctgcgattcgtaggttagcgagaagaggtggcgtgaagaggatcagtggtttgatctacgaggaaaccagaggagttctgaagatattcttggagaacgtgattcgcgatgctgtgacctacactgagcacgctaggaggaagacggttactgctatggatgttgtttatgctcttaagaggcacggaaggaccctctatggttttggaggctaaaa

SEQ ID NO: 239603 - DNA, 377 bp, Glycine max
gaccgcgcaccacactgagaggaagagggagtgagagagagtgttcttcgtttgctaccttctcccagaaatggttacgttcaggtttcaccagtaccaggtggtcgggagggctctcccaacggaagcagatcagcatccgaagatctaccgaatgaagctctgggccaccaacgaggttcgcgccaagtctaagttctggtattttttgaggaagctgaagaaggtgaagaagagcaatggtcaagttcttgctatcaacgagatttttgagaagaacccaaccaagattaagaactacgggatatggttgcggtatcagagtaggactggttaccacaacatgtacaaagagtaccgcgattccaatctaaacg

SEQ ID NO: 239604 - DNA, 265 bp, Glycine max
ttagggttttccaattcacagagcaacacaacgaaccaacaatggcgcagcctcagccgcagtcgcagccgcagcacgggcaagcagcgctggagcaggtgcagtgcttcggtcgcaagaagaccgccgtggccgtgacctactgcaagcgcgggcgcggtctcatcaagatcaacggctgccccattgagctcgtggagccggagatcctccgcttcaaggccgtcgagccgaggcaccggttgggtaagagccgcttcgccgg

SEQ ID NO: 239605 - DNA, 187 bp, Glycine max
ggtttgattagggtttgtcattagcacttcttcttttcacactgccgctgcaacaatggcttcagagaagaaactttcgaacccaatgagggagataaaagtgcagaagctcgttctcaatatctctgttggcgagagtggagatcgtctcaccagagccgccaatgtgttggaacaacttagtggg

SEQ ID NO: 239606 - DNA, 122 bp, Glycine max
taatttgggaattattgctcccatcgccattggtttcattgtcggcgctaacattttgttgggtggggccttctctgaaccggcaatgaaccccgcggtgacatttgggcctgcggtcgtaa

SEQ ID NO: 239607 - DNA, 159 bp, Glycine max
cgcacgaagaagagcgtggagacctacgggatctacatcttcaaggtcctcaagcaggttcattgcgatgttggtagttccagcggggtcatggggcatcctgagcggcttcgagcacgacatcttcgagaagctcgctgaggaggcgtcgcgtttggg

SEQ ID NO: 239608 - DNA, 369 bp, Glycine max
gaaatcaagagaattctagagaagattgtgcagccaagcaggaaagattggagtaccaggcttgatgatgctctctgggcacatcggactgcctacaaagcacccataggaatgtctccttatcgggttgtctttggaaaggcatgtcatcttccagtggaaatttagcacaaagcatactgggcagtgaagacttgcaacttctctatggatcaagttggcgaggaaaggaagttgcaactgagtgagttagatgaaatccgcctagaagcctacgagaatgccaagttctacaaagaaaagaccaagaagttccatgatagcatgatagttaaaaaagacttcgtggttgggcaaaaagtgttattg

SEQ ID NO: 239609 - DNA, 390 bp, Glycine max
ggccgctctctgaggaaaacagatagtgtgggagagagaagagcggaagagaaaatgacgaccaggttcaagaagaacaggaagaagagaggtcacgtcagcgccggacacggccgtatcggaaagcaccgcaagcatcccggaggtcgcggtaacgccggtggcatgcatcaccaccgtatcctcttcgacaagtaccatcctggtttcttcgggaaggtaggcatgcgctacttccacaaacttcgcaacaaattctacaatccgatcatcaacatcgacaagctgtggtccctcctcgcccaggaggccaaagacaaggccaccgccgacaagggcaccttgctcgatgtcacccagttcggttaccttaaggttttgggtaaaggg

SEQ ID NO: 239610 - DNA, 172 bp, Glycine max
ggagagagagagagagagagagaggcacttggaatccaaaaatgagagaaatcatcagcattcacataggtcaggccgggatccaggttggcaactcctgctgggaactctactgcctggaacatggcatccagcccgatggcatgatgccaagtgactcctccttcggtgt

SEQ ID NO: 239611 - DNA, 344 bp, Glycine max
ggagaattcgaatctaggatttgtttgagcgtgcgcgaaggatcatggtggggttcagaaacagatacatggtgatggaggtttttctgaaccctaatagagacaaagttggggatgcgtctgttataattacacagtttaatgtgtcaaaagctgtaagagacagcatattggtgaattttggggagtgtggtttggcttcatcattgggatcgttccaggttaagtacgtgaatccaatcactaatgtgtgtataattagggcatcaagggaggagtatcacagagtatgggctgcgattagaggggtcacaaatattggaaactgcccggtcatgtttaac

SEQ ID NO: 239612 - DNA, 254 bp, Glycine max
ggaagagtgaagagaatggctcccaagggtttaacctttctggctgtgttaatatgcgtttcagcactgtcactgagtccttctgttgcgggggaacggcaaaataatggccttgttatgaacttctacaaggaatcatgcccccaggctgaagacatcatcacagaacaagtcgagggtctctacggggcggccgcaagaacactgctttctcggggcgcaggaacatcttccatgactgtgcggttcagagt

SEQ ID NO: 239613 - DNA, 385 bp, Glycine max
ggttctagtgtgtgattgtttgttgttgtaactcgttcttcttcttttgttgttctgtgtttgtgtttgttttttctctcacctgaaaatgtcttgctgcggtggtaactgtggttgcggaagctcctgcaagtgcggcaacggctgcggaggctgcaagatgtacccagacttgagctacactgagtcaaccaccaccgagaccttggtcatgggaatggcacctgttaaggctcaatttgagggtgctgaaatgggtgtgcccgctgagaacgatggctgcaaatgtggaccaaactgctcctgcaacccctgcacttgcaagtgaagtgttgggagagcaagcttcaagcagagatagcccttaattaggaataatgataaa

SEQ ID NO: 239614 - DNA, 293 bp, Glycine max
gactcgcagttgtattgttgaacaagggtttctctgtctgcttcttcactttctctcgtttcaatcgaaaccaaaacaaaaacatgggcagaaaattcttcgtcggtggcaactggaaatgcaatgggaccactgaggaggtaaagaagattgttactactttgaatgaggctaaagtccctggagaagatgtcgtagaagttgttgtgagccctccttttgtgttccttcctgttgtaaaaagtttggctgcgccctgatttccatggttcggcacaaaactgttgggttcg

SEQ ID NO: 239615 - DNA, 266 bp, Glycine max
ggcgatggtgactgactgagagagaagagaaaaacaatgtcagggctgaatgaattgctgaacaaatggttaggtttatgcgacatggcgttcaacgccggctgcggagccataacctggttccccggccacatggtcgccgctatacctgccaaccgccaccgcctcaatctcgctgacctcgtcatcgaagttcgcgacgctcgcattcccctctcctccgtcaacgccgacctccatccacatctctccgctaaacgatgcgt

SEQ ID NO: 239616 - DNA, 340 bp, Glycine max
gggttctggatgctgacagtttcagtctgaaagctattccccaacgtagccgcaagcttcgccgtttgaaacagtgcctcaaccatggcagaacaaacagagaaggcttttctgacgcaaccaaatgtgtttcacagcacagagaatactgagaagggaaagagacctgcaaaaggtgggaaccgctttaggtagtccattgagcttggatttaagactcgcagggaagctatccaacgaacctacattgagaagaagtgtccctgcactgcgacggtggccatccgtagacgtatcttggctgggacatctcacaatgctaatatgaacaggactacta

SEQ ID NO: 239617 - DNA, 263 bp, Glycine max
ggcagtgatagagataagaaaatgtggcttgtgcagctctcaaccccatttctgaacggacatggtcattccaccacccttctctccaagcacagttcggcggtgactcagacccactgggccccaccgagtttcctgcctcaaatcaatgcgatgaagacaatgcaggggagagtggtgtgctccagcagggacaagacggtggcagtggaggtggtgcggctggccgctcggccaaagtacaagaggcgcgtgaggaagaa

SEQ ID NO: 239618 - DNA, 161 bp, Glycine max
ggcaacattgttaaccattctcttcactttaaagttacatagtttttcattgttttacttaatctacaatggctgcttcaacaatgactctctcttcatcatcattggctggccaagctatcaagcttgtcacctccacccctgaacttggtgtttgaatg

SEQ ID NO: 239619 - DNA, 366 bp, Glycine max
  unsure (1)..(366): unsure at all n locations
gaggtttgtgatactgattgcctccctctgctgccgtccctaatctgaaggctcccgccatctgcgatcggatttcatggctccaaagaaggacaaggctcccccaccttcatccaagcctgccaagtctggcggtggcaagcagaagaagaagaagtggagcaagggtaagcaaaaggaaaaggtgaataacatggtgctcttcgatcagggtacctatgacaagctcctctctgaggcacccanatacaagctcattactcctgtcattctctctgaccgtttgatgattaatggatcacttgcaaggaaggctattagggaattgatggctataggttcaatcaggatggtgtctgcccatgc

SEQ ID NO: 239620 - DNA, 126 bp, Glycine max
gtctgcctatttttacatctaggatttacatatacaacatatatcactgtcaagattaagagtgaatttttggattatttagattagatatttcgattccaaaattaaaaaaagggataggagatt

SEQ ID NO: 239621 - DNA, 354 bp, Glycine max
agtgtagaatcggatctgaagctctttactaggattggaacaagcgaggaacgagtgaccacaagctccgcttaagcgctcgacatttagcttaaaacatgttcatcatgtggccgagcgaagcgcacctgcgtgaagcagcctagcatcactttagataggagcagaatggatgacttacaactgaaagttcttcggatcgatatatcgtacgacgtaatggagattttgggctacgtccggtgggtcgcagaattccggacctaacaatgttcgattcgtcacatgaacgggaacggacgattccctcgtcgcgcccgttttcggggaatggctgcattcacaggcaagtga

SEQ ID NO: 239622 - DNA, 281 bp, Glycine max
caatattatatgtgagcttgttgatcccgatggtctactaacgcagctaagggtgttgaaatcagtacatgttgatggtgttatggtagactgttggtggggaatagtggaggcacatgctccacaagagtataattggaatggctacaagagactctttcaaatggtgcgagagcttaagcttaagctgcaggttgtaatttcatttcatgaatgtggaggcaattttggtgatgatgtttgtattccactaccgcattgggttgctgaaattggtcgga

SEQ ID NO: 239623 - DNA, 400 bp, Glycine max
gaggcatggattcgttaccacctgcaaaacggcgtcgtgagagcaaagacggcgagactgaagcttcaacgttgtcaccggttgtgatcttcgctcacggtgccggtgctccttcctcttctgattggatgcaaagatggaagaacatgataaaggaggcactgcgcgctgtcgatgttgtcacttttgactatccttacatgtctgcgaaaaagaaggcccctcctaaggcggaaaaactggtggagtttcactcaaattttgtcaaggaaactgcaactaagtaccctggtcatcccctgatacttgcaggcaaatcaatgggttcaagagttggctgcatggtggctagcatgaaagacattaatgtttctgctgtagtatgcttgggctacccaat

SEQ ID NO: 239624 - DNA, 358 bp, Glycine max
gggctccgccatttttcgtagctgctgttcttgcgcgtgaacaagcctcagccaaaaccatggttaagcataacaatgttatcccaaacggacacttccgtaagcactggcagaactatgtgaagacttggttcaatcagccagcacggaagacaaggagacgattggctcgtcagaagaaagctgtgaagatattccccagacctacggctggacctctcaggcccattgtacatggtcaaactttgaaatacaacatgaaagtgagaggtggaaggggattttctcttgaagaactcaaggcagcagggattcccaaaaagcttgcaccaaccataggtattgctgttgatcatcg

SEQ ID NO: 239625 - DNA, 321 bp, Glycine max
aaccacagcggcggtaacagaagaacaagcagagaatgggtcgagtgagaactaacacggtgaagaaatcctctcggcaggtgatagagcgtcactactcgcgcatgatcctggacttccacacgaacaataagcttctggaggaagtggcgataatcccgtccatcaggctaaggaacatgatctcggggttctcgacgcacctgatgactcgcatccagaagggccctgtgcgcggcatctccctcaagctctaggatgaggagcgctagcgccgcatggacttcgactgcgaggtctccgccatcagcaccgaccaca

SEQ ID NO: 239626 - DNA, 367 bp, Glycine max
agggtgtgtagctccaccgagtagcagcaatgtctaagcgatgtcgcagatgatcggcagggaacaagttccgcatgtcactgggtctgccggtggcggcgacagtgaactgcgccgacatcaccggggcgaagaatctctacatcagatcagtgaaggggatcaacggaaagctgaaccggttgccgtcagcttgcctgggtgacatggttatggccaccgtcaagaatggaaagcctgatctccgtaaaaaggtgctccccgccgtcatcgtccgtcagcgcaagccgtggcaccgaaaggacggtgtttacatgtacttccaacataatgctggggtcatagtggatcacaatggtgaaatgaa

SEQ ID NO: 239627 - DNA, 360 bp, Glycine max
gacactgtgtttggagcagaatcagatcgtgtgttccgtacgttcgttcgttcatttccagtgtcaaacatggcgtctcagatgagcaagaagagaaagtttgttgcggacggagtgttcttcgccgaactgaacgaggttctgacacgtgaattggcggaggacggttactccggcgtggaagttagggttacgccgatgcgcaccgagatcatcatcagagccaccagaacccaggctgttctaggtgagaagggaaggagaattagggaacttacctcagtggtgcagaagaggttcaaattccccgaaaacagtgtcgagctttatgctgagaaggtcaacaacagaggcttgtgt

SEQ ID NO: 239628 - DNA, 382 bp, Glycine max
gggcagcgcttgatttgaggccaggcaagccccactcaaccaccacacctctcctcgttcacgctacccctttctgctcttcttctacctttcaagttttaaaagtataaagatggcagagacattcctatttacctcagagtcggtgaacgagggacaccctgacaagctctgcgaccaaatctccgatgctgtcctcgacgcttgcctcgagcaggacccagacagcaaagttgcctgcgaaacatgcaccagaaccaacttggtcatggtcttcggagaaatcacgaccaaggccaacgttgactacgagaagatagtgcgtgacacctgcaggaacatcggcttcgtctcagatgatgtgggactggatgccgacaac

SEQ ID NO: 239629 - DNA, 383 bp, Glycine max
tattaaaaattatttatatttttattaaggtttaattacttatttagtttctatagtttttaaacttatttattttagtctctatcgttaataagttgattttttagtttctaaaatctacattttaattcccaaacaatttcaactgttaaaattatttaactaatgaagttaaaaaaattttaataacattgatattttaggaattaaaatgtaaattgcaggaattaaaaaatatacttattaaatttcaaaaattaaaaaattcacttattaaatataagaattaaaaggaataagtttaaaaactataaaaactaaatggataattaaatcttaattaaataactttttgaatcaacattttcattaaataatagaca

SEQ ID NO: 239630 - DNA, 360 bp, Glycine max
ggctcctcctcctccttcttcttctgccttacatcacatacttcactctcttgtttttccctttcctctcctcaaaatttcttctgattcatttaatctttactcatcaatggctctgagactgaaccctatccccacccaaaccttctccctctcccaaatggccagtctcagatttcccaggttccgcatggcctccaacctccgctccggttccaaagaagttgaaaatattaagaagccattcactcctcccaaagaagtgcatgttcaagtaagccactctatgccttctcagaagaattagattttcaaatctttggaagattgggcttagcacaacatcttgactcatcttaa

SEQ ID NO: 239631 - DNA, 290 bp, Glycine max
ggcagtttcaaattttcttttccttcactttcccgagaaaaaaataacacttttcactttcttcactacgttctcacttcgatatggctcgtacgaagcaaaccgctcgcaagtccaccggtggcaaggcgccacgtaagcagctcgccaacaaggccgctcggaagtccgctccggcgaccggaggagtgaagaagccccaccgcttcaggcccggaaccgttttcgctcagggaaatccagaacgtatcacacgagcaccgcgcttcccatcaggaagcttccacttc

SEQ ID NO: 239632 - DNA, 482 bp, Glycine max
ggtccacgcaacgttagccgcaggtagcggtctagaattcacgggccgacgcacgcgtccatacggatgcgagaagacgacagaagggtacggctgcgagaagacgacagaagggtacggctgcgagaagacgacagaagggtacggctgcgagaagacgacagaagggtacggctgcgagaagacgacagaagggaattgggactgtgcctatttatcaagcacttgaaaaagttaatgggattgctgaggatcttaactggaaagttttcagggacaccctgattgaacaagctgagcaaggtgtggattacttcaccatccatgcaggagttcttctgagatacgttccattaacggctaagcgcatgacaggaatagtctcaagacgagggtctattcatgcaaagtggtgcttagcttatcacaaagagagatttgcttatgagcactgggatgagatacttgacatctgcaatcag

SEQ ID NO: 239633 - DNA, 234 bp, Glycine max
gctcctacagattcttcagcaactgcgattttggatcggaacctcttctgcggcgtagcaatgggacactccaacgtttggaattctcacccaaaaaactacggtcctggttctcgcacttgccgattgtgtgggaatccacatggattgttcaggaattatggccttatgtgctgcaggcattgcttccgtaccaatgccaaggaaattggcttcatcaattatcgctaaaaa

SEQ ID NO: 239634 - DNA, 401 bp, Glycine max
ggttcgtggaatgcgcaccttccctaacacccccattacaaatctctgtatttcagggttgaagattcacacattgaattgaagtttggaaatttgacacctaccccacaccatcatggcctgcatcgacaaattttgggttttcgccctcgctcttctcctcctcgcttcccctctcctccaagttgctaggtgccagtcagactctgatgatgtagtggaggctgctgaagaatcaggtgatattggcattgttggtgatgatgtccaagactttggtgatgggactttcccttctgctccaggaattgaaacaataagtgtatttccgaaaaatagtgcaagattgataacagctggagaagagtcagagctgcttgttggtgttaaaaattgatggg

SEQ ID NO: 239635 - DNA, 343 bp, Glycine max
ggccgagcttagtagaagagaaaaggaggagcaggaggcatcaccgttaccaaacatggtgaaagggcgccaaggagagcgtgttagactttacgtcaggggttcaatacttggatacaagaggtccaagtcaaatcaatacccaaacacctcattaatccagattgagaatgtaaacactaaggaagaagttgcgtggtactgtgggaagcgtatggcttacatttacaaagccaaggtaaagaaggacggaagccactatcgctgcatttggggtaaggtcaccaggcctcatggtaacagtggtatagttcgtgctaagttcaagtccaatctgccgccc

SEQ ID NO: 239636 - DNA, 373 bp, Glycine max
gaagtctcatctaatctataccccgtctaaatctccgagtggttgacaccgatcgaagtagcagcacacagaaaatgggcactcgagaggtgtacgaagagaaactaaggaccggaaatctccaccacgattccaacatcaaccctggcctcggttccgctcgatgccctcgctgtctctctcccctcaaacctaaatttcaaagaaggcaattgaacaacaatcccgttctgcaagaagccaatggcgtccctgggttcgggattggtggtatgcttggttttgttcatggtttcaatacaggtttacctcctcttcaaaatggtctgaagggaccgaagtggcttccttttgttgttgggattcctccaat

SEQ ID NO: 239637 - DNA, 388 bp, Glycine max
gacacaaactttattacagttgttgtattgtaattaagcaagaatattaggcaatggagtcttctagaacttcaactactcttgctctttttttaaccatcaatttgcttttctttgtcatggcaagtggctgctacacttgcacacagcctaagccaaaccctatcccattcccttaccctaaccctagtcctgccgcgaagagctgccccagggacgcacttaagctcggagtgtgcgcaaacgtgcttaatggaccaattggtgctattgtagggtcaccaccggaccacccatgttgctcagtgctagaaaggcttcttgatcttgaagttgcggtttgcctctgcactgccatcaaagccaacattcttggcattaaccttaa

SEQ ID NO: 239638 - DNA, 377 bp, Glycine max
gacttcaattgcaatcaaattagttcattctccttgcgcagttccctacctctcctttcacgatgcagatcttcgtcaagaccctcaccggaaagaccatcacccttgaggtggaaagctctgacaccatcgacaacgtcaaggccaagatccaggacaaggaaggaattcccccggatcagcaacgtctcatcttcgccggaaagcagctcgaggacggccgtaccctcgccgactacaacatccagaaggagtcaatccttcaacttgtccttcgtctccgtggtggcatgcagatcttcgtcaagactcccactggcaataacataaccctagaggtcgaaagctctgacaccattgacaacgtccaggccaag

SEQ ID NO: 239639 - DNA, 337 bp, Glycine max
gacacttggtatagtgcaggaggaacagagaaaggggatggccataacactcaacaatggcttcaagatgcctatcattggattgggcgtgtggcgcatggaaggaaacgaaatcagggacctaattctcaattccatcaaaattggttatcgccattttgattgtgctgctgactacaaaaacgaagcagaagttggagatgcgcttaaggaggcttttgatagtggccttgtgaagagagaggatctcttcattaccaccaggctttggaattctgatcaagggcacgttcttgaggcgtgtaaagacagtctcaagaagcttcagttaacgtat

SEQ ID NO: 239640 - DNA, 267 bp, Glycine max
gatcacaacactaacacagattttgattcgattcgattcgattcagtcgaggttttaagcagcagcaagatgtctgggcgtggaaagggaagaaagggaatgggaaaaagacgaacataacgacatcgtaaggtgctccgcgacaacattcagggaattacgaaaccagcgattcgtcgtttggctcgcacgggtggcgtgaaacgtatcagccgtttgatctacgaagaaactcccagtgttctcaagatcttcctggagaatgtc

SEQ ID NO: 239641 - DNA, 382 bp, Glycine max
gacaacacagaacaggaacacagaaaaaatacaacccttagccaacacaaccatcatggccacctctgctattcatcaatcagcattcactggtcaaactgctctgaagcagctcaatgagttcgtccgcaagaccggtggcgccggcaaaggtcgcactaacatgcgccgcaccgtcaagagtgctcctcagagcatttggtatggccctgaccgtcccaagtacttgggtccattctcggagcagattccatcatacctgaccggagaattccctggtgactacggatgggacactgctggattatcagctgacccggaaaccttcgccaggaaccgggagctggatgtgattcacagcagatgggcaatgcttggtgcc

SEQ ID NO: 239642 - DNA, 305 bp, Glycine max
gatagcaaaatcgtttctccaatttaatcaccattgtacaacccaattcccttcgtcgttttcgattaagagagcaatggcacgtaccaagcaaaccgctcgcaagtccaccggaggaaaggctccgaggaagcaattggcaaccaaagccgctcgcaagtcagccccggcgaccggcggagtgaagaagccccaccgcttcaggccaggaacggtggctctgagggagattcgaaagtaccagaagagcaccgaacttctgatccgaaaactcccattccagaggctcgtcagagaaatcgctc

SEQ ID NO: 239643 - DNA, 366 bp, Glycine max
ggaaaactgaaaagtaaaggcgaaagactttaggtttggaattgggaagtagggttgttcgcgtcacgaagatgatcgaggtggtgttgaacgatccactggggaagaacgtgcgcgtgaagtgcaacgacgatcacaccatcggcgacctgaagaagctggtggcggctcacacgggcacaagagccgacaagatccgcatccataagtggtacaccatatacaaggatcacatcactctcaaggattacgagatccacgacggcatgggtctcgaactctactacaactaaacacaaggtgtgttttatgcatgatatattactatgatctgggaatgggattacgcgccaaatgtaattttga

SEQ ID NO: 239644 - DNA, 360 bp, Glycine max
gagcgaaacagagagtgatttcagtgagtgatcggtgttcacttgatctcatcataatcgtcagcgtcaattgaagaagatgccgatcagaaacatcgccgtcggaaggcctgaagaggcgactcaccccgacacgttgaaggcggctttggctgagttcatctcaaccttcatcttcgtgttcgccggctcaggctccggcatcgcctacaacaagctcaccgacaacggcgctgccacccctgccagcctcatctccgcctccatcgcccatgcattcgccctcttcgtcgccgtctccgtcggatccaacatctccggcggtcaggtcaccccgccgtcaccttcggcgccttcgtc

SEQ ID NO: 239645 - DNA, 365 bp, Glycine max
gacactgctacaaaaacattgaaagaaatagaaaaagcaaaactggtttctcgcatttcctccgaaacaaaccgtttcgctcgtttctcggatctgcaatggaagccccacccaaaggcgctgctggaagaagaggtgacaggaagaagtccgtttccaaatccatcaaagctggcctccaattccccgtcagccgcgtcgccaggtacttgaagaaaggccgttactctcgccgccttggcaccggcgctcccatttatctcgccgccgttctcgaatatctcgccgcagaagtgttggagctggccgggaacgctgcacgtgacaacaagaagaataggattaaccctaggcacgtgttgctg

SEQ ID NO: 239646 - DNA, 375 bp, Glycine max
ggcccttctagctttttcccagtccaagcagcctccaattcgtgccactctcttcaagatggccgttaccttctcaaatctccacacagaatcaggtctcaagtccctcgacgacttcctctctgggaaggtctacgtttctggggatcagttcacaaaggacgacatcaaagtgtatggtgctgttttggagaagccaggtgactcttttcccaatgctgccaagtggtacgaggttgtctcatctcagcttgctgcaagcttccccggcaatgctcaaggggtgagattcagtggcaaagcttctgctccagcggaggctgctcctgcgaaacctgatgcttctgctgctgaagatgatgatgaccttgatct

SEQ ID NO: 239647 - DNA, 391 bp, Glycine max
gagggtttggttattacggttttcgctgaccggtgcgcagtcgagcctccagaagacgaatcgaaaatgccgtcgcacaagacattcagaatcaagaagaagttggcgaagaagatgaggcagaacaggcccattccctactggatccgcatgaggaccgataacaccatcaggtacaacgcgaagcgccgtcactggcgtcgcaccaagcttggattctgaggtgtatgctctgcctaggttcaatttatccaattaattagtgttttattttcttgaggcaagaacaatgttttgagtttttaatattttccatttgttcgaagactatattgtgtaaggaacttattgtagttcatactcatggcgtttgtcaactccttttaaagta

SEQ ID NO: 239648 - DNA, 235 bp, Glycine max
gatttcactcccatacagacgtcgaagaagttagatttgaaattgaccgagaaacaaacttgggatataagaagaatggctagtggaggaggctatggagacgcgaaccagaaggtatattacgtgttcacggtggtgctaactggtgattcagccgtggggaagtcacacagacctgcacgcttcgcgagaaatgagttcagtttggactcagacgccacagtcggcgtccagt

SEQ ID NO: 239649 - DNA, 365 bp, Glycine max
gacacaccgtttgttctattcttaactcaacttctgctacccactctcttcttccaagtccaaccacgcttttctctacagtcatgggcaaggtcaagatcggaatcaacggatttggaagaattggccgtttggttgccagagtcgctctgcaaagagacgatgtggagctcgttgccgttaacgaccctttcattaccaccgattacatgacatacatgtttaaatacgacagtgttcacggacactggaagcatcacgatgtcaccgttaaggacgagaagaaccttctcttcggtgacaagccagtcactgtttttggacacaggaaccctgaagagatcccatgggggtcaactggagct

SEQ ID NO: 239650 - DNA, 320 bp, Glycine max
ggttacggtaaatagcgtttcgttaacttactcagtcctctatgacggtgtgcgtgcgcaaaccctaacctagttcttctatatcggcacctctatcccctgaaccctgttccatcttccaaccatggcgaaccaagacttcgaagagcgctcgcagcaaccgcaggagctagggtacgacccgaactttgtccccgactcggtaaaatcttttgtggttcacctgtagcgtcacatccgtgaaaagaacgtgtacgagatccaccagatgtactagagctccttccagaccctctcggagcgtctcttcaaggataccc

SEQ ID NO: 239651 - DNA, 347 bp, Glycine max
gaggaggttctgatcttctttcttttttgtctggttccctttcttccttcaaccaatttcgagatccgaaaccggcatcagatccgatccgaaatgtacggattcgaagctctcaccttcaacatccacggcggcttcctaaaaggcaacctccgcgggcaacgcgccgggctcctcaacaacgccgattacaacaacctctgccaatgcgaaaccctcgacgacatcaagatgcacctctccgccaacgagtacgggccttaactccaaaacgaaccttccccaatggataacacaacgattgtggagaaatgtactcctaagctgggtgatgaataccagaacat

SEQ ID NO: 239652 - DNA, 312 bp, Glycine max
ggtccaaaatcctcactccagccacacgcctcagtagaccatggcctcattgggtgggttacaaaatctaagcggcatcaattttcttatcaaaaaagagggtccaaaagtcaatgcgaagttcgagctgaagccgccaccatatccactgaatggtttggagccggtgatgagccagcagacacttgagtttcattgggggaaacaccacaagacatatgtggaaaatctgaaaaaacacattgttgggacagagcttgatgggaaatcactagaagagattatagtgacatcatataattaagggtgaca

SEQ ID NO: 239653 - DNA, 390 bp, Glycine max
gatcgcttctcttctcttcaaagtgaactttgcaactttgagcagaaaatctcacagtcgaaggaagaaataatcgccaatggcaattgaacacgaagacgatctcaaagacgagaagaacccacgacccctcgacgaggatgacatcgccctcctcaaaacctacggtttgggaccttattccacaagcataaaaaaggcggagaaggaaatcaaagatatggccaagaaagtgaatgacttatgtggtatcaaggagtctgatactggattagcagcaccaagccagtgggatcttgtttctgataagcaaatgatgcaggaagagcagcctcttcaggtggcacgatgcacaaagatcataaatccaaactctgaagatgccaaata

SEQ ID NO: 239654 - DNA, 391 bp, Glycine max
ggctgacaagccaatcctttgtgtaggtgctcaaccctagtaagccgcaatggtgaagtactcaagggagcctgacaatccaactaagtcttgcaaggctagaggcgccgaccttagggttcattttaagaacacaagggaaactgcctttgcaatcaggaagttgcccttggtcaaggctaaaaggtacttggaagatgttcttgcccacaagcaggcaattccattcagacgtttttgtcgaggtgttggaaggacagcccaggctaagaatagacactctaatggccaaggacggtggcctgtcaagtcagcaaaattcattcttgatttgctcaaaaatgctgagagcaatgctgaagtgaaaggttggatgttgatgcactgtaca

SEQ ID NO: 239655 - DNA, 350 bp, Glycine max
  unsure (1)..(350): unsure at all n locations
gccttagggttagattcgttgttgttgttctaaaacgtccacacattctccgtcgccacaacaacaatggctccgaagaaaggtgtgaaaggttccgttgtagcagcgaagaagaaggttcaagagaaggtgacgaatcctttgttcgagaagcgtccgaagcagttcgggatcggaggcgcgctgccgccgaagcgggacctgacgcggttcgtgaagtggccgaagaacgtccaaatccaacgcaagaagcgcatcctcaagcagangctcaaggtcnctcctgcactcaaccagttcaccaaaaccctagacaagaatctcgccacgaatctatttaagatgctgct

SEQ ID NO: 239656 - DNA, 322 bp, Glycine max
gctctacggcactcgttttcgttctcgttctggtttatagatctttgcgaaggaggtttacagcgctcaaccaaagatgcagaacgaggaaggacagatcactgagctttacattccgaggaagtgctccgccacaaacagattgattaccgctaaggaccatgcttcggttcagatcaacattgggcatgtggatgagaatggcgtctacaatggccatttctccacttttgccctctgcggattcatccgtgctcagggtgatgctgacagtgctctagaccgcttgtggcagaagaagaaagttgaagttaagcaacag

SEQ ID NO: 239657 - DNA, 367 bp, Glycine max
ggctctgtggctctctacatttcatcattcatcggaaaaatggctctcgaggttgctgttaaggctgctgttggtgctccaaatgttctcggagattgtccattttcccaaagggtcctcttaactttagaggagaagaaaatcccttacaaactccacctcatcgatctcagtagtaaacccgaatggtttttgggtgtgaatcccgaagggaaggtgccagtggttctttttgatggcaaatgggtggctgattctgatgtgattgtggggatactcgaggaaaagtacccagaaccctctctcgtcactcctcctgaatttgcctccgtgggatcaaagatatttgggtcctttgtgagttttt

SEQ ID NO: 239658 - DNA, 386 bp, Glycine max
  unsure (1)..(386): unsure at all n locations
ggttctagtgtgtgattgtttgttgttgtaactcgttcttcttcttttgttgttctgtgtttgtgtttgttttttctctcacctgaaaatgtcttgctgcggtggtaactgtggttgcggaagctcctgcaagtgcggcaacggctgcggaggctgcaagatgtacccagacttgagctacactgagtcaaccaccaccgagaccttggtcatgggagtggcacctgttaaggctcaatttgagggtgctgaaatgggtgtgcccgctgagaacgatggctgcaaatgtggaccaaactgctcctgcaacccctgcacttgcaagtgaggtgttgggagagcaagcttcaagcagagatagcccttaattangaataatgataaac

SEQ ID NO: 239659 - DNA, 384 bp, Glycine max
gacctttcacctttgacatacaacaggtgcagagtgatacgatgccgtgcctcaacctctccaccaacgttaacctaaatggcgtcgacaccacctccattctctcagaagcaaactcaaccgtctccagcaacatcggcatagccgaagcctatgtgatgactgtactgaaaggatcagtacctaaatctcatggcgggagtgagcagccaacagcttatggtgaattggtgtccattggtagtcctagccctgacgtgaccaagaaacttagtgctggcagtgcttcaagtctcgattacaagttgtctgtgacgtagtcgcgattctacgtgacgtattatgacaccaagggttccagcattggatagaatggatctacat

SEQ ID NO: 239660 - DNA, 383 bp, Glycine max
gattgttggcttgtgctctgctcgtgcctctagggttatcatatctccatttccatttcctctctctcagtttccaagaatcttaagctatgggaaagtcttacccaaccgtgagcgctgattaccagaaggccgttgagaaggcgaagaagaagctcagaggcttcatcgctgagaagagatgcgctcctctaatgctccgtttggcatggcactctgctggaacttacgacgtgagctcgaagaccggtggtcccttcggaaccataaagcacccctccgaactcgctcacggcgctaacaacggtcttgacatcgctgttaggcttttggagccactcaaagcggagtttcctattttgagctacgccgatttctaacag

SEQ ID NO: 239661 - DNA, 362 bp, Glycine max
gaagcacaaaccttattcaacactcatatccttatcctgtttctttcaatggaagtcatttctgcttctagcttgaatcccaacgctccgatgttcgtgccactcgcctatcggacggtggaggatttctccgaccagtggtgggacctcgttcactcctccccctggttccgcgactactggctccgcgagtgcttccaatatccccagttccaaaacgacgacgctttcgacttcgactttgacctagatctccaagatgaagatgaaatggaacgagatgaatggaaagatgtggtgtcattggggctgctgaaatggcgacgctgtggatgatgatcggcccatgcgccgaggtatgt

SEQ ID NO: 239662 - DNA, 270 bp, Glycine max
gacacatgcccatcatcaaagtttcttcctttctctgctctttgtcttctctgacacatttggggccttgttgagtgtgtttttgcgagagggtatggcgaaggacgttgaggttgctgaacgttgctccttccctgggaaagactaccaagaccctccaacagcaacactcattgatgctgaagaactcacaaagtggtccttttacagggctcttaatgctgagttcaatgccactttgctcttcctctacattaatgtgctcacagt

SEQ ID NO: 239663 - DNA, 389 bp, Glycine max
gggcagccaaagaaaagaaaatcctcaattttctgagcagccaaacactctctctctgtctctcgaaaattctcagtttgcagagaaaatctgaatcatgtcgtggcaagcgtatgtcgacgatcaccttctgtgtgacatcgaaggtaaccacctcactcacgctgctatcatcggccaagacggcagcgtttgggctcagagtaccgacttccctcagttcaaacctgaggagataactgccatcatgaatgactttaatgagcctggattacttgctccaactggattgtatctcggtggcaccaaatatatggtcatccagggtgaacccggtgctgtcattcgagggaagaagggtcctggtggtgttactgtgaagaagaccg

SEQ ID NO: 239664 - DNA, 312 bp, Glycine max
ggcttttgctggaactgtgaaggatcagagcctctatgaccctcacaagtattcctctgtggaagcttttgctgatgacttgatcactctgctgaatgagatggacctcaaagctgtcacttttgttggccactccatgtcgggcatcattggttgcattgcctctgtcaaaagacctcaactcttcaagacccttattctcgttggtgcttccccaaggtttctaaattcagatgattatgagggaggctttaacagctcagatattgagcaattgctctcaaacatatggaacaactatgaaaactttgc

SEQ ID NO: 239665 - DNA, 393 bp, Glycine max
  unsure (1)..(393): unsure at all n locations
gatgtcatagtattatcattcagtctcatctttctctcttctctctccatccaaaccctaactcccgaccctgttcccctctcgtatccgtcatgaaaggaggaaagtccaagaccgaatctaagagagccgatcccaaacttgctgtgaataagaacggagccgccaccaaggctagggaaacccgccggcaaggggaatgcagcgaaagaccctaacaagccaaagaggcctccaagtgctttcttcgttttcatggaggagttcaggaaggtattcancanagaacatcctgaaaacaaagcagtgtctgctgtgggcaaagctgctggagcaaaatggaagaccatgtctgatgctgaaaaagcaccttatgtggcaaagtctgagaaa

SEQ ID NO: 239666 - DNA, 397 bp, Glycine max
gattgttggcttgtgctctgctcgtgcctctagggttatcatatctccatttccatttcctctctctcagtttccaagaatcttaagctatgggaaagtcttacccaaccgtgagcgctgattaccagaaggccgttgagaaggcgaagaagaagctcagaggcttcatcgctgagaagagatgcgctcctctaatgctccgtttggcatggcactctgctggaacttacgacgtgagctcgaagaccggtggtcccttcggaaccataaagcacccctccgaactcgctcacggcgctaacaacggtcctgacatcgctgttaggcttttggagccactcaaagcggagtttcctatttttgagctacgccgatttcttacagttggctggcgttg

SEQ ID NO: 239667 - DNA, 383 bp, Glycine max
gactcctttccgtcacttttggggaagaggtcgagtttcacagcagcaatggtgtacgtcaaggctcagaaatcaaaagcctacttcaagagatatcaagtcaagttcaagagaagaagagagggaaaaaccgattaccgtgccaggattcggttgattaatcaggacaagaacaaatataacactccgaaataccgatttgttgttcgctttagcaacaaggacattgttgcacaaataatatctgctaacattgctggcgatattgttcttgctgcagcatatgcacatgagctgccacaatatggtcttgaagtagggcttacaaattatgctggagcttaatgcactggtctcctgttggcccgaagagtcctcaatac

SEQ ID NO: 239668 - DNA, 379 bp, Glycine max
gacagcgaaacagagagtgatttcagtgagtgatcggtgttcacttgatctcatcataatcgtcagcgtcaattgaagaagatgccgatcagaaacatcgccgtcggaaggcctgaagaggcgactcaccccgacacgttgaaggcggctttggctgagttcatctcaaccttcatcttcgtgttcgccggctcaggctccggcatcgcctacaacaagctcaccgacaacggcgctgccacccctgccggcctcatctccgcctccatcgcccatgcattcgccctcttcgtcgccgtctccgtcggcgccaacatctccggcggccacgtcaaccccgccgtcaccttcggcgccttcgtcggcggcaacatcacct

SEQ ID NO: 239669 - DNA, 263 bp, Glycine max
ggcagtttcaaattttcttttccttcactttcccgagaaaaaaataacacttttcactttcttcactacgttctcacttcgatatggctcgtacgaagcaaaccgctcgcaagtccaccggtggcaaggcgccacgtaagcagctcgccaccaaggccgctcggaagtccgctccggcgaccggaggagtgaagaagccccaccgcttcaggccgggaaccgtggcgctgagggaaatcagaaagtaccagagagcaccgagc

SEQ ID NO: 239670 - DNA, 384 bp, Glycine max
gatctcattgctctgcattgcaacactcacacaccaatggcactcagacccatcgacaacgctcttccgacaacaaccccagagagacccaagagacaagctaaaatcgctgttgcaacccagagacaacaagatcgtgcttccgtcaacggcgaaaacgtagttccattgccatcatctgaggatgccactgttgactatgtctcctccgacaaccttaaacccttggcggaccccgaagttaagattcagagtttggtggaagatttggattcgaaaaattggatcaaggtttgtgaatcgttgaatgatgttaggcgcttctcgttactccactcctctcgtcgagtcccaatcttgggtaaaattgtgttgggtgtgggg

SEQ ID NO: 239671 - DNA, 393 bp, Glycine max
gacttgcggctgcagcagagaagcactcatcattcttcgtttgtctaagatccgccttctctgaattgtaaaaatgtcgctcggagaaactgcttgttcatacgcagctctcatccttcatgaagatggaatcagtgtaactgccgacaagatcagcaccttgttggaaactgcaaaggttcaagtagatacctattggccaaccttatttgctaaacttgctgagaagaaaaatcttggcgatttgatagccaatgcagcaggcggtggtgcaccagttgctgttgcagctgcccctgttgctgcctcaggtggtggtggtgctgctgctgccgccccagctgctgaggagaaaaagaaggacgaacctgaagaagagagtgatgatgatat

SEQ ID NO: 239672 - DNA, 331 bp, Glycine max
gaaagcaatctcaacttccaagttaggtcactcttccagatggcgcgtacaaagcaaactgctcgcgagtccaccggcggcaaggctccccggaagcagctggcgacgaaggccgctcggaagtctgctccggcgaccggcggagtgaagaagccgcacaggttcaagcctggaacagtggccctgagggagatcagaaagtaccagaagagcacggagcttctgatccgaaagcttccgtttcagcgtttggttcgtgaaatcgctcaagatttcaaaacggatctgaggtttcagagcagtgctgtttcggcgctccaggaagctgctg

SEQ ID NO: 239673 - DNA, 371 bp, Glycine max
ggttctaatgtgtgattgtttgttgttgtaactcgttcttcgtcatttgttgttctgtgtttgtgtatgttttttctctcacctgaaaatgtcttgctgcggtggtaactgtggttgcggaagctcctgcaagtgcggcaacggctgcagaggctgcaaaaatgtacccaagacttgagctacactgagtcaactaccaccgagaccttggtcatgggagtggcacctgttaaggctcaatttgagggtgctgaaatgggtgtgcccgctgagaacgatggctgcaaatgtggaccaaactgctcctgcaacccctgcacttgcaagcgacgtgttgggagagcaagcttcaagcagagatagcccttaat

SEQ ID NO: 239674 - DNA, 363 bp, Glycine max
tgggcttcttatttgtaacgaagcaaacgctgccgaattcgttatcgctttgcactagcagctttgaaacccggttcatccgaagcccttcaccgaaccatgtcgatgagaaaggttagagagccaaaggaggaaaatgtgactctgggtccagctgttagagatggtgaacacgtttttggcgttgctcgcatctttgcctccttcaacgacaccttcatccatgtcactgatttgtctggcagggaaacccttgtccgaatcactggtggtatgaaagttaaagctgacagagatgaatcatctccttatgctgctatgcttgcagctcacgatgttgctgccagatgcaaagaactgggc

SEQ ID NO: 239675 - DNA, 380 bp, Glycine max
gagaacaaaacacacagagtcttttctgtttttatacaaacctcatgtaggtgggagagagagtgtctttcttggctcatagcatagcatcactatggctcttctgagtcgagcctcttcacgcttccctcagctggtttcccctcaaagagttgtttccctccacacaacgctcccatctcttaacgcatcaacatccacacccacgcccgccccatatgccccgccaccgcctccgtccgcttcccctcccgccggcgtgtcgaaggcggcggagttcgtgatctcgaaggttgacgatctgatgaactgggcccggcgcggctccatcctggcccatgaccttcggcctcgcctgctgcgccgtcgaaatgatgcac

SEQ ID NO: 239676 - DNA, 385 bp, Glycine max
gacctaaaaattgtaccgaaatggcttcacttgggtgtcccctttttcccttgcattcaagggtaacaaggtaaggttcctaacaacaaaatagtgaaattgtttaaaaaagaatcccctaagtctctaatcacaaaaacccgtggaaagactcacccaactccacttttatttccataacaacaaaatgggggaacacccgactgctatgaaaattgttgagcctcctaaggcgtccatttctggttttgggactatttacatgatggatgaccctctaaccgaaggaccaagtccaacttcaaagcttgttggaagatgtcagggaatatatgctgaggcttcgcaacatgaacctgcgatactcatggtaacgaatttgttc

SEQ ID NO: 239677 - DNA, 330 bp, Glycine max
gctagctagggtttctgagtttatgtggttgcgcctctgcctgtaagagtgaaaaaaccttctcttttccttctctcaagtctcaagagatttcatcatggctccaaagaaggacaaggctccaccaccttcctccaagcccgccaaatctggcggtggcaagcagaagaagaagaagtggagcaagggaaagcaaagggagaaggtgaataacatggtgctgtttgatcagggcacctatgataagctcctttctgaagctcccaaattcaagctcatcactccgtccagtcgttctgatcgtttgaggattaatggatcacttgcaag

SEQ ID NO: 239678 - DNA, 363 bp, Glycine max
  unsure (1)..(363): unsure at all n locations
gactcactcatacaatagagaccagcttttgcttctttgtgaacatggagatgaggaaatcatgtggcttcttcttcttgctcctcctccttgtctttgcttcncaggtggtggtgcagacggagggaagagtgtgtgagtcacaaagccacgggttccatgggttgtggtatagaggacaaaactgtgctttggtctgcaggaacgaaaggttctccggtggcaggtgcaaaagctttcgccgccgctgcttttgcaccaggatttgttgagatctcatcaaacactactcttgccatgcaaattaataaatcatagctaggccaaataaattgcatctactctttatccatttgggagcta

SEQ ID NO: 239679 - DNA, 329 bp, Glycine max
gatccacatcctccacaacacaactccactcttaactgccattggtttttcctcctccaattcccctcctttccaaacttttttcgattacccatttggagattctgtcctaatgggtcctgctccctccaaaatttcctcccttttccgggttttctcacaaacccattgttggggatctctgaaaaacccaacttgctctgtttctctgagctttgcgaatgtgaaacttggaagcagaaaccttagggtttgtgcctcaactgtgcctctctcacgggtgattttcgaacccttcgaggaggttaagaagggtgaacttgctgttc

SEQ ID NO: 239680 - DNA, 374 bp, Glycine max
ggcgatccaaatccaaaaaaagaagacttcaaaaaatcggaagggtacttttgtaattatatggaaacccgtgagatcagaatatcagatcgaatttaaacgggtcaaattcgcattttcatttcattttgaattgaaaccgcggaaagtttgctgctacatcgatcatcatcacctcatggacggacacgatccacaagacccaaagcagagccctgctgacatgactgcctttgtgcaaaatcttcttcagcagatgcaaaataggttccagacaatgtccgactccattgttacaaagattgatgatatgggaagtcgcataaatgagttggaacaaagcatcaatgacctgagagcagagatgggagtgg

SEQ ID NO: 239681 - DNA, 296 bp, Glycine max
gacacaaactttattacagttgttgtattgtaattaagcaagaatattaggcaatggagtcttctagaacttcaactactcttgctcttttttaaccatcaatttgcttttctttgtcatggcaagtggctgctacacttgcacacagcctaagccaaaccctatcccattcccttagcctaaccctagtcctgccgcgaagagctgccccagggacgcacttaagctcggagtgtgcgcaaacgtgcttaatggaccaattggtgctattgtagggtcaccagcggaacacccat

SEQ ID NO: 239682 - DNA, 260 bp, Glycine max
gactgcaactttgctctctgtgaggcttcaatttctaattagggtttcgcttagggtaaccaatagccatgggagtcttcacctttgtcgtccgcaaatccggcagcgaatggagcgccaagcagcattccggggacatcgaggcctccgccgagtccaccttcgatctccaacggggagctcgtgcaagccgctcgcgccgttgattcgtccggtggagttgagtcctctttcgcgcgcgtgtcgcggagctccgcggt

SEQ ID NO: 239683 - DNA, 372 bp, Glycine max
gatggaatggttagagaaaagagaggcccatatagtgatccacagcatccttacttttatgaagaagaggatgtgtggatggcacctggcttcattaaccagttttatgaagtccctgattactggaaagtatatgtgcatgaagttgatcaagaaagagaaatgtggttaaactctttttataaagctcctcttacgttacccatgccagctgagctagagcactggtggtccaaaagaggagaatcaatagattcctgaatttgtccttattaacaaggaaccggagcctgatcctgaagatccttcaaagcttatatatactgaggatcctctcatcctccatacaccaactggaaatattatcaatta

SEQ ID NO: 239684 - DNA, 345 bp, Glycine max
ggatgcagatgcagcctatcatggcagcctactaccccaacaacgtcaccactgatcacattcaacagtacctggatgagaacaagtccttgatcctgaagattgttgaaagccagaattctggcaagctgagcgagtgtgcagagaaccaatcaaggctgcagagaaatctcatgtacctagctgcaatagctgattctcaaccccaaccatctccaatgcctggtcagtatccttctagtggacttatgcagcagggagcacactacatgcaggctcagcaggctcagcagatgtcacaacaacagctaatggcttcgcgctcctcactcttgtactcccaac

SEQ ID NO: 239685 - DNA, 376 bp, Glycine max
gacctgatccagatgaacccaaccagggaagccaataacccaaccaagttaacaacggataacattcaaaagtacctgaatgaaaaaaagtccttgatcctgaaaattgttgaaagccagaattctggcaagctgagcgagtgtgcagagaaccaatcaaggctgcagagaaatctcatgtacctagctgcaatagctgattctcaaccccaaccatctccaatgcctggtcagtatccttctagtggacttatgcagcagggagcacactacatgcatgctcagcaggctcagcagatgtcacaacaacagctaatggcttcgcgctcctcactcttgtactcccaacagcctttctcagtgcttcaacagcagc

SEQ ID NO: 239686 - DNA, 366 bp, Glycine max
gacttctcttcacacctttgttcactcttcttctcttgcggctagggttttagcgcagcttcttctagatttaaggaagatgggtaaggaaaaggttcacatcagtattgtggtcattggccatgtcgactctgggaaatccactaccactggtcacctgatttacaagcttggaggcattgacaagcgtgttattgagaggtttgagaaggaagctgctgagatgaacaagaggtctttcaagtatgcctgggtgctggacaaacttaaggctgagcctgaaagaagaatcaccattgatattgcttttgtggagtttgaaacaacaaagtaatagtgcacagttattgatgcgcctggacatag

SEQ ID NO: 239687 - DNA, 364 bp, Glycine max
gacaacacaacgcaacacaacgcgcactctctcttttctctcttaacacaaaaaccctatcgttcttcgcggtttcgccgattctcgccatgccgaaagccaaatccgacgccaaagccgccgatagccggttgaagcgcaagggcgctggtgctggaaggaagcaatcgaagaaagctgctaaggatcctaacaagccaaagagacctccaagcgctttcttcgttttcatgtccgagttcagagagcagtttaagaaggagcatcctaacagcaaatccgtcgctgttgtcggtaaagctggtggtgacaaatggaaatcgctgtctgatgctgaaaaggcccccttcgttgccacgggcga

SEQ ID NO: 239688 - DNA, 358 bp, Glycine max
gacaacaaaatttgccaattgccatttcaatcctcagtttctttcttcaacgtttccatcatacacagatcccaatcctctctcaagccctaatttcccctcatttccatggccacagaagagcccactgtcgcggtggaaccgctcccgaacctgcctccggcgatcctcccccggaggagaaggaggagaccaaacctgaagccaaggctaagaaaaccaaggagcccaaacctaaaaaggtttccagacctcgcaaccctcccactcatccttcctacgaagagatggttaaagatgcaattacctcgctgaaggagaaaaccggttcgagccaatacgcgattgcgaagttcat

SEQ ID NO: 239689 - DNA, 384 bp, Glycine max
gaactcaaactgcttcattgcataattgcagataagatcaacccttctaccttcagattcgcgggaagatggcatcacttcatgctaatgtgacatcagttgtttacaacagtggcaaccgtgtttctcaatcgaaatttgcaagctcttccttcttgtctgggttcgatgttgttggtcgtgcttcaagtgcttggaagaaggaacttgtcccatcttccatttccttggtgcctagagccaccctaacatttgatcccccaactaccaattcatacataaccaagcaaaagaagcacactcttgaccctgcttctccagattttcttcctcttccttcatttgaacagtgctttccaaagagcaacaaagaacacagggaag

SEQ ID NO: 239690 - DNA, 355 bp, Glycine max
gacagcaaaacaattttcaaactcaattaccattccataacctaaatctcctctttgtttccgagtcagagagcaatggcacgtaccaagcaaaccgctcgcaagtccaccggcggaaaggcgccgaggaagcaattggcgactaaagccgctcgcaagtcagctccggccaccggcggagtgaagaagccccaccgcttcaggcccggaacggtggctctgagggagatcagaaagtaccagaagagcactgaacttctgatccgaaaactcccattccagaggctcgtcagagaaatcgctcaggatttcaaaacagatcttcgtttccagagcagcgctgtttctgcgcttc

SEQ ID NO: 239691 - DNA, 322 bp, Glycine max
ggccgttttcttcttcatcatagtcgtggccgtgtcgcagcaaaaccaaaccacatattaacttgtttgctctaagtcatggctctgatcttgcacgcaaccaaagcaaacaagaatgctttcaagactctgattgcggcagagtacagtggcgtccaagtggaattggcccctaatttcgagatgggtgtctctaatagaactcctgaattccttaaaatgaatcccataggaaaggttcctgtcttggaaacgcccgatggtccagtctttgagagcaatgccattgctcgttacgttgctcgactcaagggtgacaacg

SEQ ID NO: 239692 - DNA, 379 bp, Glycine max
actcaccacttcaaaacactcataacacaaagcacaaagcaaagctcatccttgagttaaaaaatggcagcagcttcttccatggctctctcatccccatccttggctggcaaggccgtgaagctgggcccatcagccccagaagtgggaagggtgagcatgaggaagaccgtcaccaagcaggtctcctcaggaagcccatggtacggcccagaccgagtcaagtacttgggcccattctctggcgagcccccgtcctacctaaccggtgagttcccaggcgactacgggtgggacactgctgggctttccgcagacccagaaaccttcgccaagaaccgtgaactccaagtgatccactccaggtgggccatgctcg

SEQ ID NO: 239693 - DNA, 344 bp, Glycine max
gagcgaaacagagagtgatttcagtgagtgatcggtgttcacttgatctcatcataatcgtcagcgtcaattgaagaagatgccgatcaggaacatcgccgtcggaaggcctgaagaggcgactcaccccgacacgttgaaggcggctttggctgagttcatctcaaccttcatcttcgtgttcgccggctcaagctccggcatcgcctacaacaagctcaccgacaacggcgctgccacccctgccggcctcatctccgcctccatcgcccatgcattcgccctcttcgtcgccgtctccgtcggcgccaacatctccggcgggcacgtcaaccccgccgtca

SEQ ID NO: 239694 - DNA, 380 bp, Glycine max
ggtaatccttacgctctctcactcacaaacgcacactgaattcaaaaacatcgaaagagagaggcatggccgagcaaaccttcatcatgatcaagccagatggcgttcaaagaggccttattggcgagattattagcagatttgagaggaagggtttttacttgaaagggttgaaactcgttactgtggaccgtccttttgctgagaagcactatgctgatttgtctgcaaagcctttctttagtggtttggtggattacattgtctctggccctgttgttgccatgatctgggagggtaagaatgttgttacaactggccgaaagattatcggagccacaaacccagctcaatctgagcctggaactattcgtggtgac

SEQ ID NO: 239695 - DNA, 392 bp, Glycine max
gccgcagcaagtgccattttattttgccctacctcctcgattctagggtttcaacaatggcgcagttccttccctacgaatccgcttcaggctacagcctgttccacgttcacggcgtcgattaaatcggacagaacaccgaagcggttcggaactccgtttcggacctcaacaagttcggcaaagtcgttaagcttcgctccttcaaccctttcacttccgctctcgatgctctcaaacagtgcaacgccgtctccgaaggcatattaactgatgagctgaggactgtcttggagaccaacttgcctaaagtgaacgaaggtaagaagtccaagttcactttacgtgtgtccgattctaagattgggtcccagatatctgaagtgactaag

SEQ ID NO: 239696 - DNA, 346 bp, Glycine max
tggggtgctctgctcgtgcctctagggttatcatttctccatttccattttctctctcacttttcaagaatcgtaagctatgggaaagtcttacccaactgtgagtgctgattatcagaaggccgttgagaaggcgaagaagaagctcagaggcttcatcgctgagaagagatgcgctcctcgaatgctccgtttggcatggcactctgctggaacctttgacaagggcacgaagaccggtggacccttcggaaccatcaagcaccctgccgaactggctcagatcgctaacaacggtcttgacatcgctgttacgcttttggagccactcaaagcggagttccct

SEQ ID NO: 239697 - DNA, 282 bp, Glycine max
ggtgtgtagtataagattcacttccttactcattttgtaatttcagtcagtcataatctttgtgaaaaataatgttcatcgagaattttaaggttgagtgtcctaaggtgaagtacagcgcaactgagattcagtccgtatacaactaccacatcaccgaccttgtttacgagaacacgaatgggacctatcagtggattgtcaaaccaaaatctgtcacgtccgaatttacaagcaacatccacgttcctatcttaggggtaatgcctgtgggttggggtg

SEQ ID NO: 239698 - DNA, 370 bp, Glycine max
agccgagacgaagacgacagaaggggaaaagtagagagaattagcagggtgttattggtgggtgtagaaagtagcagaaaatggctgtgatcccgtgtcactgttaccgtaccgtcggatcagacaaaccctacctctccggtcagagtctccgccgtcgcgctcctttccccgccgtctctgtttcatttcgacgccgaatatcatgcgtcgcctcttctgccatcgctcacaaagttgggctgagagattttcttcacttagatgattttgataaggacactattctgaagatgctggaccgggcacttgaggtcaaggccttgctgaagtcaagggacaggtcgtttcgaccttttgaggggaagac

SEQ ID NO: 239699 - DNA, 366 bp, Glycine max
gacacagaccaatattcattcatttagattcatcaaaagcttataacaacaattaaacatgagtgcagccagcagagcttggattgtggcatcaagcattggagcagtggaggcattgaaggatcaattgggggtgtgcaggtggaaccatgcattgaggtcactgcagcagcatgccaagagcaacattagatcctacactcaggccaaaaccttgtcttctgctacttctgctgctgtctccaataaggtcaagaggaccaaggaggagtccatgaggaaagtcatggacttgagctgttggggtcccaatacttcaaggttttagtgtgtggactattctaattgcattcatcattgtgctgc

SEQ ID NO: 239700 - DNA, 284 bp, Glycine max
gacgttccattctcttcaaacgtaacgcagcatcgctattctcttcattccatggctttgcgcagccagcagaccgtggattacccgagtttcagactcgttatcgtctgcgatggtggcacaggaaagacaagctttgtggggaggcatcgcacggggagaattctgggaggagatatgagccgggcagcggtgtgggggtgcacccattggagtttttcagagactgtggaaagagtcgatgttactgccggggagcggctgggcaggagaagtttggtggg

SEQ ID NO: 239701 - DNA, 335 bp, Glycine max
gacactcattccatttttacctttctctctcgctcgcatacgcaaataataaagaacaaggttttagccatggcatcgaagcggatcttgaatgaactcaaggatctctaaaaggatactcctacctcatgcatcgccggtcctgttgctgaagacatgtttcactggcaagcaacaattatgggtcctccagacagtccttatgctggaggtgttttcctagtcactattcatttcactccagattatccctttaagccacccaaggatgcattcaggacgaaggtatttcacccatatataaatagcaatggtagcatttgccttgacatatt

SEQ ID NO: 239702 - DNA, 234 bp, Glycine max
ggagggttacacgccgtcgtcactgtttttgtgtgtcacttcttcgtaggtgcaactgcaatggtgaagggacgccaaggggaacgtgtcaaagtctacgtgatgggtacaatccttggatacaacaggtctcagtcaaaccagtatccaaatacatccctgagtcaaattgagggtgtgaatgtcactgaagaaatagcatgggatgctgggcaaaaaatggcctatatctac

SEQ ID NO: 239703 - DNA, 379 bp, Glycine max
atcaacatttgtctctcatctttcaatttcaatcaacggttatacccttttctatttgagcatcatcatgtccaccgcagcgcagcccaaggccaagaaaacggcgtcgtccaagaagcccctctcccatcctaccttcgccgcgatgatagcggaggcgatagcgagtctgaaggagagaaccggttcgagccaatacgcgataaccaaattcatcgaaggcaagcacaaggagttgcctccaacctacaagaagcttgttctcgttcatctcaagaagtctgttgctgctggcaagctcgttaaggtcaaaaactctttcaagctcgcaccgactaagtctgctcctgttaaagccgctgctgctcccaagaagccc

SEQ ID NO: 239704 - DNA, 389 bp, Glycine max
ggctggaatgctttacaaatcaccgaggactcgggaattttggatgatgttggaaatcaccatgtctattttgtgcactcttatcgtgccatgccttcagatgacaacaatgagtggatatcctccaactgtgactatggtgacaaatttatagcatctattagaagaggaaatgtgcatgcagttcaattccatccagagaagagtggacatgttggcctctctattttgggaagattcttgaatccgaagtcagacatggcaaagaagcctggggaaggcaaagcttcaaaacttgcaaaaagggtgattgcttgtctcgatgtgagaacaaatgataacggggaccttgttgtaaccaaaggagaccagtatgatgtaagagaaca

SEQ ID NO: 239705 - DNA, 405 bp, Glycine max
gatctcattgctctgcattgcaacactcacacaccaatggcactcagacccatcgacaacgctcttccgacaacaaccccagagagacccaaaaaacaacctaaaatcgctgttgcaacccaaaaacaacaagatcgtgcttccgtcaacggcgaaaacgtagttccattgccatcatctgaggatgccactgttgactatgtctcctccgacaaccttaaacccttggcggaccccgaagttaagattcagagtttggtggaagatttggattcgaaaaattggatcaaggtttgtgaatcgttgaatgatgttaggcgcttctcgttactccactcctctcttctattcccaatcttgggtaaaattgtgttggtggtggcgaagacaatgaggaaccctcgt

SEQ ID NO: 239706 - DNA, 393 bp, Glycine max
gacttgcggctgcagcagagaagcactcatcattcttcgtttgtctaagatccgccttctctgaattgtaaaaatgtcgctcggagaaactgcttgttcatacgcagctctcatccttcatgaagatggaatcagtgtaactgccgacaagatcagcaccttgttggaaactgcaaaggttcaagtagatacctattggccaaccttatttgctaaacttgctgagaagaaaaatcttggcgatttgatagccaatgcagcaggcggtggtgcaccagttgctgttgcagctgcccctgttgctgcctcaggtggtggtggtgctgctgctgccgccccagctgctgaggagaaaaagaaggaggaacctgaagaagagagtgatgatgatat

SEQ ID NO: 239707 - DNA, 296 bp, Glycine max
ggttctagtgtgtgattgtttgttgttgtaactcgttcttcgtcttttgttgttctgtgtttgtgtttgttttttctctcacctgaaaatgtcttgctgcggtggtaactgtggttgcggaagctcctgcaagtgcggcaacggctgcagaggctgcaagatgtacccagacttgagctacactgagtcaaccaccaccgagaccttggtcatgggagtggcacctgttaaggctcaatttgaaggttcttaaattggttttcccgcttaaaaccaatggtggcaattttgaacaa

SEQ ID NO: 239708 - DNA, 392 bp, Glycine max
gaccgcattagcactcgtctttggttctggtttatagatctctgtgaagtcgctttataacactcaacctaagatgcagaacgaggaaggacagatcaccgagctttacattcctaggaagtgctctgccacaaaccgattgattaccgctaaggaccatgcttcggttcaggttaacattgggcatgtggatgagaatggcgtctacaatggccatttctccacttttgctctctgcggcttcatacgtgctcagggtgatgctgacagtgccctagatcgcttgtggcagaagaagaaagttgaagttaagcaacagtagacacccatgatagtttgttactttgctaagtattaatttctacgcttgctagagatatttgagtactatg

SEQ ID NO: 239709 - DNA, 393 bp, Glycine max
gcttcttatttgtaaccaagcaaacgctgccgaattcgttatcgctttgcactagcagctttgaaacccggttcatccgaagcccttcaccgaaccatgtcgatgagaaaggttagagagccaaaggaggaaaatgtgactctgggtccagctgttatagatggtgaacacgtttttggcgttgctcgcatccttgcctccttcaacgacaccttcatccatgtcactgatttgtctggcagggaaacccttgtccgaatcactggtggtatgaaagttaaagctgacagagatgaatcatctccttatgctgctatgcttgcagctcaagatgttgctgccagatgcaaggaactgggcataactgctcttcatatcaagctccgtgctact

SEQ ID NO: 239710 - DNA, 391 bp, Glycine max
gacctaaaaattgtaccgatatggcttcacttgtgtgtctccttttttccttgcatttcatggttatcatgtcaggttccttaccagcaaatagtgaagtgtttacaaaagagtctcctatgtctctatccacaaaacccgtggaaagactcacccaactccacttttatttccataacaacaaaatgggggaacacccgactgctatgaaaattgttgagcctcctaaggcgtccatttctggttttgggactatttacatgatggatgaccctctaaccgaaggaccaagtccaacttcaaagcttgttggaagatgtcagggaatatatgctgaggcttcgcaacatgaacctgcgatactcatggtaacgaatttgttcttcactga

SEQ ID NO: 239711 - DNA, 445 bp, Glycine max
ggtcgagcacgcgtccacgacagaagggggatcatagagtaagtgagtgagagaaggagattctgatttgatctctcagatctgagcttaccgtcgccggaatccaactcaacctgggtcggattcttgggtatcatcgcatcgccattcgttttagcctctcaataagagattttagttcgcttcaaattcgaggtttgatttgaagttgaaagttggaatagcttaactgttgtgtaaaacaaccaacacacacgagcatgggaagccaagacaacaacgtagaattgtcatccaattcatttctagcttacaaatctgctaaggtgtttgttgctggtcaccggggtcttgttggctcggccattggtcgcaagctcacccaacttgggttcactaatctagtcttgcgctcccatgccgagcttgatctcactcgacaatc

SEQ ID NO: 239712 - DNA, 354 bp, Glycine max
ggattccatcaaatctcttcagatccgccaggtcctcacccaggctgtgagcctaggcatgattgttacgtctgcactgataatatggaaggcattgatgtgcgttactggcagtgaatctcccgttgttgttgttctttctggaagcatggaacccggattcaagcggggagacatcttgttcttgttgtgtttaatgttgatggacgtgagattccaattgttcatcgcgtaattaacgtacatgaaatggaagatactggggaggttgatgttctcacataaggagacaacaattatggggatgacaggctactgtacgctcactggcaactttggctgcaaaggcaccac

SEQ ID NO: 239713 - DNA, 406 bp, Glycine max
gctagctagggtttctgagtttatgtggttgcgcctctgcctgtaagagtgaaaaaaccttctcttttccttctctcaagtctcaagagatttcatcatggctccaaagaaggacaaggctccaccaccttcctccaagcccgccaaatctggcggtggcaagcagaagaagaagaagtggagcaagggaaagcaaagggagaaggtgaataacatggtgctgtttgatcagggcacctatgataagctcctttctgaagctcccaaattcaagctcatcactccttccattctttctgatcgtttgaggattaatggatcacttgcaaggaaggctataagagaattgatggctaagggttcaatcaggatggtgtctgcccatgcaagccagcaaatttacacc

SEQ ID NO: 239714 - DNA, 376 bp, Glycine max
gactcactcatacaatagagaccagcttttgcttctttgtgaacatggagatgaggaaatcatgtggcttcttcttcttgctcctcctccttgtctttgcttcccaggtggtggtgcagacggagggaagagtgtgtgagtcacaaagccacgggttccatggtttgtgtaatagagaccacaactgtgctttggtctgcaggaacgaaggtttctccggtggcaggtgcaaaggcttccgccgccgctgcttttgcaccaggatttgttgagatctcatcaaacactactcttgccatgcaaattaataaatcatagctaggccaaataaattgcatctactctttatccatttgggagctagctaccacaacca

SEQ ID NO: 239715 - DNA, 261 bp, Glycine max
cccacccgtccgcccacgcaaacataccgctgctatatactacagaacgggatccacatcctccacaccacatctccactcttagctgccattggcttttcttcttccatttctcttcctttctaaccttgtttctattacccattctcgtattctgtcctaatcactcttgctccttccaaactttcctccttttccgagttttctcccaaacccacttttggggattctcttaaaataccaacttgctccgtttccctc

SEQ ID NO: 239716 - DNA, 379 bp, Glycine max
ggcgatccaaatccaaaaaaagaagacttcaaaaaatcggaagggtacttttgtaattatatggagactcgtgagatcagaatatcagatcgaatttaaacgggtcatattcgcattttcatttcattttgaattgaaaccgcggagagtttgctgctacatcgatcatcatcacctcatggacggacacgatccacaagacccaaagcagagccctgctgacatgactgcctttgtgcaaaatcttcttcagcagatgcaaaataggttccagacaatgtccgactccattgttacaaagattgatgatatgggaagtcgcataaatgagttggaacaaagcatcaatgacctgagagcagagatgggagtggagtcc

SEQ ID NO: 239717 - DNA, 402 bp, Glycine max
gacacaaactttattacagttgttgtattgtaattaagcaagaatattaggcaatggagtcttctagaacttcaactactcttgctcttttttaaccatcaatttgcttttctttgtcatggcaagtggctgctacacttgcacacagcctaagccaaaccctatcccattcccttaccctaaccctagtcctgccgcgaagagctgccccagggacgcacttaagctcggagtgtgcgcaaacgtgcttaatggaccaattggtgctattgtagggtcaccaccggaccacccatgttgctcagtgctagaagggcttcttgatcttgaagttgcggtttgcctctgcactgccatcaaagccaacattcttggcattaaccttaacatccccatttcgct

SEQ ID NO: 239718 - DNA, 357 bp, Glycine max
ggacaagccaatcctttgtgtaggtgctcaaccctagtaagccgcaatggtgaagtactcaagggagcctgacaatccaactaagtcctgcaaggctagaggcgccgaccttacggttcattttaagaacacaagggaaactgcctttgcaatcaggaagttgcccttggtcaacgctaaaaggtacttggaagatgttcttgcccacaagcaagcaattccattcagacgtttttgtccacgtgttggcaggacagcccaggctaagaatatacactctaatggccaaagacggtggcctgtcaagtcaccaaaattcattcttgatttgctcaaaaatgctgagagcaatgctga

SEQ ID NO: 239719 - DNA, 379 bp, Glycine max
ggaaatgaaaaaagtgacatgaagtgacgagaatgcgggttgtttgttgttccaattcaagcgtgagtgctttccctagttgtcttagattccctccactgatcgcaatttcaacaacaccctcttcgatccgcgttctaaattctccacccctccgttccactgcttcgtcgcaacacgttacaataatggcttctacgaattctcaacaagacacgcgcttaacgagaatcgcctctgcaatccgagtcatccccgactttcctaagccaggaattttgtttcaggacataatcacgctgcttcttgatacaaatgctttcacagacaccattgacttgtttgttgaaacgtacatagatcacaacatcaatgttgt

SEQ ID NO: 239720 - DNA, 393 bp, Glycine max
gactgcaactttgcacactgtgaggcatcaaattccaattaaggttacgcttaaaataaccaatcaacatgggagtcctcatctttgtcgcccgcacatccggcatcaaaaggcgcgccaagcaacattccggtcacatcgaagactccgccgagtccaccttccatctccaacggaagctcgtacaagccgctctcgccgttaaatcctccggtggacttcactcctctttctcacccgtgtcccctacctccacatgtgttcgacgtgacatcgggatccttcgtattcgatggaggtggtagtagtgctatagcaactgcacttgcaggtggcgcagccgcatctgacgatgcaccagctgctgacaaaaatgaacaaaacgtggatgaa

SEQ ID NO: 239721 - DNA, 409 bp, Glycine max
gatacctaaaaattgtaccgatatggcttcacttgtgtgtctccttttttccttgcatttcatggttatcatgtcaggttccttaccagcaaatagtgaagtgtttacaaaagagtctcctatgtctctatccacaaaacccgtggaaagactcacccaactccacttttatttccataacaacaaaatgggggaacacccgactgctatgaaaattgttgagcctcctaaggcgtccatttctggttttgggactatttacatgatggatgaccctctaaccgaaggaccaagtccaacttcaaagcttgttggaagatgtcagggaatatatgctgaggcttcgcaacatgaacctgcgatactcatggtaacgaatttgttcttcactgagggcatttacaatggg

SEQ ID NO: 239722 - DNA, 379 bp, Glycine max
gatggaatggttagagaaaagagaggcccatatagtgatccacagcatccttacttttatgaagaagaggatgtgtggatggcacctggcttcattaaccagttttatgaagtccctgattactggaaagtatatgtgcatgaagttgatcaagaaagagaaatgtggttaaactctttttataaagctcctcttaggttacccatgccagctgagctagagcactggtggtcaaaagaggagaatcataagattcctgaatttgtccttattaacaaggaaccggagcctgatcctgaagatccttcaaagcttatatatactgaggatcctctcatcctccatacaccaactggaaatattatcaattatgtcgagg

SEQ ID NO: 239723 - DNA, 405 bp, Glycine max
gacaccgcaaactctctctgtaaagtgcaaagcctctattttttcttgtgaatttgaaggacgatgagttccacagaggtcgcagccacaacgaagaagggtggaagagggaaacccaagaccacaaagtccgtttcccgttcctccaaagccggccttcagttccccgtcggccgcgtcgctcgctacctcaaggccggtcgctatgcccagcgcgttggttccggttcccctgtttacctatctgcggttctcgaataccttgccgctgaggttttggagcttgccggcaacgctgcgagggacaacaagaagacgaggatcgttcctaggcacattcaacttgcggtgaggaacgatgaggagttgagcaagctgatggggtctgtgaccattgccaatggt

SEQ ID NO: 239724 - DNA, 401 bp, Glycine max
gctctaccgcattagcactcgtctttggttctggtttatagatctctgtgaagtcgctttataacactcaacctaagatgcagaacgaggaaggacagatcaccgagctttacattcctaggaagtgctctgccacaaaccgattgattaccgccaaggaccatgcttcggttcaggttaacattgggcatgtggatgagaatggcgtctacaatggccatttctccacttttgctctctgcggcttcatacgtgctcagggtgatgctgacagtgccctagatcgcttgtggcagaagaagaaagttgaagttaagcaacagtagacacccatgatagtttgttactttgctatgtattaatttctacgcttgctagagatattttgagtacatgattgt

SEQ ID NO: 239725 - DNA, 376 bp, Glycine max
ggaggtaaaagtggaggagcgagttctggaggaagaggtcaaggtagtgccccgattttacgaggtgttcgtttctgaaatttgtggcacagcaagtgagcgatggggagagcttcaagggataagagggatatctattaccggaaagcaaaagaagaaggttggcgagctcgaagtgcgtttaaactccttcagatacacgaggaattcaacctttttgatggagtgaagcgtgttgtagatttatgtgctgccccaggtagctggagtcaggttttgagtcgtaaattgtatctcccagccaagcttgcacctgatgcaaaggatgaaaatcttcctcttattgtagctattgatttgcaaccaatggctccaa

SEQ ID NO: 239726 - DNA, 352 bp, Glycine max
ggatgcagatgcagcctatcatggcagcctactaccccaacaacggcaccactgatcacattcaacagtacctggatgagaacaagtccttgatcctgaagattgttgaaagccagaattctggcaagctgagcgagtgtgcagagaaccaatcaaggctgcagagaaatctcatgtacctagctgcaatagctgattctcaaccccaaccatctccaatgcctggtcagtatccttctagtggacttatgcagcagggagcacactacatgcaggctcagcaggctcagcagatgtcacaacaacagctaatggcttcgcgctcctcactcttgtactcccaacagccttt

SEQ ID NO: 239727 - DNA, 391 bp, Glycine max
gacctgatgcagatgcagcctatcatggcagcctactaccccaacaacgtcaccactgatcacattcaacagtacctggatgagaacaagtccttgatcctgaagattgttgaaagccagaattctggcaagctgagcgagtgtgcagagaaccaatcaaggctgcagagaaatctcatgtacctagctgcaatagctgattctcaaccccaaccatctccaatgcctggtcagtatccttctagtggacttatgcagcagggagcacactacatgcaggctcagcaggctcagcagatgtcacaacaacagctaatggcttcgcgctcctcactcttgtactcccaacagcctttctcagtgcttcaacagcagcaaggcatgcacagcc

SEQ ID NO: 239728 - DNA, 364 bp, Glycine max
gacttctcttcacacctttgttcactcttcttctcttgcggctagggttttagcgcagcttcttctagatttaaggaagatgggtaaggaaaaggttcacatcagtattgtggtcattggccatgtcgactctgggaaatccactaccactggtcacctgatttacaagcttggaggcattgacaagcgtgttattgagaggtttgagaaggaagctgctgagatgaacaagaggtctttcaagtatgcctgggtgctggacaaacttaaggctgagcgtgaaagaggaatcaccattgatattgctttgtggaagtttgaaacaacaaagtattattgcacagttattgatgcgcctggacat

SEQ ID NO: 239729 - DNA, 404 bp, Glycine max
gggcaagtgataagagtaatagaacaaccactcaccccctctccgatctaatggccaccgtaatcgacggcaaagccgttgcgcaaatcatccgatctgaaatcgccgacgaggtgcgcctgctctctcaaaaatacggcaaggttccgggactagcagttgtgatagtagggaacagaaaggattcacaaagctacgtgggaatgaagagaaaggcatgcgccgaattgggaatcaaatccttcgatgtggaccttcccgaacaagtctcccaagctgaactaataaaacaagttcacgagttgaatgttaaccctgatgtacatggtatattggttcagcttccgttgcccaagcacataaatgaagagaaagttctgactgaaatcagccttgagaaagat

SEQ ID NO: 239730 - DNA, 407 bp, Glycine max
gacggcactcgttttcgttctcgttctggtttatagatctttgcgaaggaggtttacggcgctcaaccaaagatgcagaacgaggaaggacagatcactgagctttacattcctaggaagtgctccgccacaaacagattgattaccgctaaggaccatgcttcggttcagatcaacattgggcatgtggatgagaatggcgtctacaatggccatttctccacttttgccctctgcggattcatccgtgctcagggtgatgctgacagtgctctagaccgcttgtggcagaagaagaaagttgaagttaagcaacagtagacacccatgatagtttgttacttcgttatgtattaatttctactcttgctagagatatttgagtactatgattgtccttttgagca

SEQ ID NO: 239731 - DNA, 393 bp, Glycine max
gacaacacaacgcaacacaacgcgcactctctcttttctctcttaacacaaaaaccctatcgttcttcgcggtttcgccgattctcgccatgccgaaagccaaatccgacgccaaagccgccgatagccggttgaagcgcaagggcgctggtgctggaaggaagcaatcgaagaaagctgctaaggatcctaacaagccaaagagacctccaagcgctttcttcgttttcatgtccgagttcagagagcagtttaagaaggagcatcctaacaacaaatccgtcgctgttgtcggtaaagctggtggtgacaaatggaaatcgctgtctgatgctgaaaaggcccccttcgttgccacggccgaaaagaagaaacaagagtatgagaaaacta

SEQ ID NO: 239732 - DNA, 403 bp, Glycine max
gaagaagaatgatgatgacctctggtgaagctgtcaagtacaagagttccttggacgcattcacacagatcctcaagaatgagggcgccaagtccttgttcaagggtgccggtgctaacatcctccgtgccgttgctggtgctggtgtgcttgctggttacgacaagttgcaggttcttgtgttcggcaagaagtatggttctggtggtgcttaatttcagtgctgagtcagtgttattattattgttttttagatggcgatgataaaaaccgttctgagtttcaagagttttttagactaatggctgccgcaaattttgtttaataaattttctagatgggatattgtcccaaaaaccgtttttaaatttcatcatgatggaaattttacatttgagaatga

SEQ ID NO: 239733 - DNA, 389 bp, Glycine max
gaactcaaactgcttcattgcataattgcagataagatcaacccttctaccttcagattcgcgggaagatggcatcacttcatgcgaatgtgacatcagttgtttacaacagtggcaaccgtgtttctcaatcgaaatttgcaagctcttccttcttgtctgggttcgatgttgttggtcgtgcttcaagtgcttggaagaaggaacttgtcccatcttccatttccttggtgcctagagccaccctaacatttgatcccccaactaccaattcagacataaccaagcaggagaagcacactcttgaccctgcttctccagattttcttcctcttccttcatttgaacagtgctttccaaagagcaccaaagaacacagggaagtcact

SEQ ID NO: 239734 - DNA, 275 bp, Glycine max
gacagcaaaacaattttcaaactcaattaccattccataacctaaatctcctctttgtttccgagtcagagagcaatggcacgtaccaagcaaaccgctcgcaagtccaccggcggaaaggcgccgaggaagcaattggcgactaaagccgctcgcaagtcagctccggccaccggcggagtgaagaagccccaccggctcatggcccgaacggtggctctgaaggagattataaagtaccagaagagcaatgaacttctgatccgaaaactccc

SEQ ID NO: 239735 - DNA, 378 bp, Glycine max
  unsure (1)..(378): unsure at all n locations
ggccgttttcttcttcatcatagtcgtggccgtgtcgcagcanaaccaaaccacatattaacttgtttgctctaagtcatggctctgatcttgcacgcaaccaaagcaaacaagaatgctttcaagactctgattgcggcagagtacagtggcgtccaagtggaattggcccctaatttcgagatgggtgtctctaatagaactcctgaattccttaaaatgaatcccataggaaaggttcctgtcttggaaacgcccgatggtccagtctttgagagcaatgccattgctcgttacgttgctcgactcaagggtgacaacgctttgttctcatcttctgccattgataatgcccacattgaccagtggattgacttt

SEQ ID NO: 239736 - DNA, 394 bp, Glycine max
actcaccacttcaaaacactcataacacaaagcacaaagcaaagctcatccttgagttaaaaaatggcagcagcttcttccatggctctctcatccccatccttggctggcaaggccgtgaagctgggcccatcagccccagaagtgggaagggtgagcatgaggaagaccgtcaccaagcaggtctcctcaggaagcccatggtacggcccagaccgagtcaagtacttgggcccattctctggcgagcccccgtcctacctaaccggtgagttcccaggcgactacggctgggacactgctgggctttccgcagacccagaaaccttcgccaagaaccgtgaactcgaagtgatccactccaggtgggccatgctcggagccttgggctgcg

SEQ ID NO: 239737 - DNA, 382 bp, Glycine max
ggtaatccttacgctctctcactcacaaacgcacactgaattcaaaaacatcgaaagagagaggcatggccgagcaaaccttcgggatgatcaagccagatggcgttcaaagaggccttattggcgagattattagcagatttgagaggaagggtttttacttgaaagggttgaaactcgttactgtggaccgtccttttgctgagaagcactatgctgatttgtctgcaaagcctttctttagtggtttggtggattacattgtctctggccctgttgttgccatgatctgggaaggtaagaatgttgttacaaactggcgaaagattatcggagccacagacccagctcaatctgagcctggaactattcctggtgactt

SEQ ID NO: 239738 - DNA, 389 bp, Glycine max
gccgcagcaagtgccattttattttgccctacctcctcgattcgagggtttcaacaatggtgctgttccttccctacgaatccggttcaggctacagcctgttcgacgttcacggcgtcgatgaaatcggacagaataccgaatcggttcggaactccgtttcagacctcatcaagttcggcaaagtcgttaagcttcggtccttcaagtctttcacttccgctctcgatgctctcaaacagtgcaacgccgtctccgaaggcatattaactgatgagctgaggactgtcgtggagagcaacttgcctaaagtgaatgaaggtaagaagtctaagttcagtttacgtgtgtccgatcctaagattggttcccagatatctgaagtgact

SEQ ID NO: 239739 - DNA, 392 bp, Glycine max
tggggtgctctgctcgtgcctctagggttatcatttctccatttccattttctctctcacttttcaagaatcgtaagctatgggaaagtcttacccaactgtgagtgctgattaccagaaggccgttgagaaggcgaacaagaagctcagaggcttcatcgctgagaagagatgcgctcctctaatgctccgtttggcatggcactctgctggaacctttgacaagggcacgaagaccggtggacccttcggaaccatcaagcaccctgccgaactggctcacagcgctaacaacggtcttgacatcgctgttaggcttttggaaccactcaaggcggagttccctattctgagctacgccgatttctaccagttggctggcgttgttgccg

SEQ ID NO: 239740 - DNA, 392 bp, Glycine max
ggtgtgtagtataggattctcttctttattccttttgtaatttcattcattcttaatctttgtgaaaaataatgttcatcgagaattttaaggttgagtgtcctaatgtgaagtacaccgagactgagattcagtccgtgtacaactacgaaaccaccgaacttgttcacgagaacaggaatggcacctatcagtggattgtcaaacccaaatctgtcaaatacgaatttaaaaccaacatccatgttcctaaattaagggtaatgcttgtgggttggggtggaaacaacggctcaaccctcaccggtggtgttattgctaaccgagagggcatttcatgggctacaaaggacaagatttaacaagccaattaatttggctccctcaaccaa

SEQ ID NO: 239741 - DNA, 376 bp, Glycine max
  unsure (1)..(376): unsure at all n locations
gacacagaccaatattcattcatttagattcatcaaaagcttataacaacaattaaacatgagtgcagccagcagagcttggattgtggcatcaagcattggagcagtggaggcattgaaggatcaattgggggtgtgcaggtggaaccatgcattgaggtcactgcagcagcatgccaagagcaacattagatcctacactcaggccaaaaccttgtcttctgctacttctgctgctgtctccaataaggtcaagaggaccaaggaggagtccatgaggaaagtcatggacttgagctgttggggtcncaatacttcaaggttttagtgtgtggactattctaattgcattcatcattgtgctgcaaggtttatg

SEQ ID NO: 239742 - DNA, 375 bp, Glycine max
gactttccattctcttcaaacctaacgcagcatcgctattctcttcattccatggctttgcccaaccagcaaaccgtggattaccctagtttcaaactcgttatcgtcggcgatggtggcacaggaaagacaacctttgtgaaaatgcatctcaccggagaattcgagaagaaatatgagccaaccatcggtgtggaggttcacccattggattttttcacaaactgtggaaagattcgattttactgctgggatactgctggacaggagaaatttggtggcctcagagatggatactatatccatggacaatgtgctattatcatgtttgatgttactgcccggcttacatacaaaaatgttcccacctggctc

SEQ ID NO: 239743 - DNA, 380 bp, Glycine max
gacactcattccatttttacctttctctctcgctcgcaaacgcaaataataaaaaacaaggttttagccatggcatcgaagcggatcttgaaggaactcaaggatctccaaaaggatcctcctacctcatgcagcgccggtcctgttgctgaagacatgtttcactggcaagcaacaattatgggtcctccagacagtccttatgctggaggtgttttcctagtcactaatcaattccccccaaattatccctttaagccacccaaagttgcattcaggacgaaggtatttcacccaaatataaatagcaatgggagcaattgtcctgacatattgaaagagcaatggagacctgcgctaactatttcaaaggtgttgct

SEQ ID NO: 239744 - DNA, 390 bp, Glycine max
ggagggttacacgccgtcgtcactgtttttgtgtgtcgcttcttcgtaagtgcagctgcaatggtgaagggacgccaaggagagggtgtcagactctacgtgaggggtacaatccttggatacaaaaggtccaagtcaaaccagtatccaaatacatccctgatccaaattgagggtgtgaatgccaaagaagaagtagcatggtatgctggcaagaaaatggcctatatctacaaggctaaggtgaagaagaatggaagccattaccgctgcatatgtggcaaggttacaaggcctcatggtaacagtggtattgtccgtgcaaaattcaagtcgaaacttccacccaaatcaatgggagcccgactaagagtattcatgtatccaagc

SEQ ID NO: 239745 - DNA, 328 bp, Glycine max
  unsure (1)..(328): unsure at all n locations
gattgcttctaacgtgagatctcagattgcaattgcctcttctcttctcccagaatcggtgtaggttacatgtttaanggttttgttttcatttaagtcactaatccgatatcatgaagctcgatacgactagtctcgaatcgtttcccacactgattgcacctcaaaacgacgtcgccggagaactctccgccgctccgttctttgaccttccgaattccaatgacttcgatgggttcttgaaagacgctattcagatggtgaagcccgcgaagggtactacaactcttgcttttatatttaaagagggtgttatggtagctgctga

SEQ ID NO: 239746 - DNA, 366 bp, Glycine max
  unsure (1)..(366): unsure at all n locations
gagaagaaccagatctctctttctcaaatcaccaagaatagttgaaaatggggctgtctttcacgaagctgttcagccggctctttgcgaagaaggagatgcgtattcttatggtgggtctcgacgccgccggtaagaccaccattctctacaaactcaagctaggagagatcgtcacaaccattcccaccattgggtttaatgttgaaactgtggaatacaagaacatcagcttcactgtctgggatgttggtggccaggacaagatccgtcctctgtggagacactacttccaaaatacccaagggcttaactttgtggttgatagcaatgaccgggatcgtgtggttgaagctanggatgagc

SEQ ID NO: 239747 - DNA, 372 bp, Glycine max
taatttgggaattattgctcccatcgccattggcttcattgtcggcgctaacattttgttgggtggggccttctctggagcggccatgaaccccgctgtgacatttgggcctgctgtcgtgagctggacctggaccaaccactggatctactgggccgggcctctcatcggtggtggaatcgctggccttgtttacgaggttgtctttatcagccacacccacgagcagcttcccaccactgactactatagggggggaaatgaaaataaaaaagaataatattgtgtattattgaatttctctggaatcttcttctgtgtacggttttccttccttgtgttttcttcctaattcactttcgagggttgtac

SEQ ID NO: 239748 - DNA, 378 bp, Glycine max
agaagggcagaaaaacaagatttgtaacacaaactgtcctttttattaggcttttacccccaaaaaaaaaaaaaaaaaaaaaaaaaaaaaaaaaaaaaacaaaaaaaaaaaaaaaaaaaaaaaaaaaaaaaaaaaaaaagaaaaaaaaaaaaaaaaaaaaaaaaaaaaaaaaaaagaaaaaaaaaaaatagaggaaaataaaaaacatgatgaaaaaagatgacaaaaaaaaaaaaaaaaaagggggagccaaagggggtaaaactaatagaggggggggaagggaataaaaaccccctaaaaagggcacccaaaaaaaaattcgggggggggtttttaaaaaaacgggggggggaaaaaccgtgggtttccaaaata

SEQ ID NO: 239749 - DNA, 376 bp, Glycine max
agaaggggaagtgagtgagtagtgagaatggagtttcaagggttaccggaaggttgcattgctagtatactctctcgcactacgccggcggacgtgtgtaggttttccgtcgtatcaaagattttccgttcggccgctgaatcggacgctgtgtggaaacgttttctcccttccgattaccattccatcatttcccagtctccttcgcctctcaactatccttccaagaaggagctctatctcgctctctcggatcgccctatcatcatcgatcagggtaaaaagagctttcaattggagaaaaagagtgggaagaagtgttacatgcttgctgctagagctctcagcattatttggggtgacactgagcaatact

SEQ ID NO: 239750 - DNA, 379 bp, Glycine max
gaatctttccactttgacattgccgacgcctccagataaacaaccttaactttcccacaacaccacccatcattctttttctctctctagatttcatttagttgttgctgtcttcttctgtttgtgtgtgccaacacagagcgaaaaacatggctctgaaccaatcaaaagccgtgttgttgagggtgagtttggtggtggtggcgctcttcatagcagggtacatagtgggtccccctctctactggcatttcgttgaaggtttggctgcggtcaaccactcttcttctacttgtgccccctgcatctgcgattgctcttcacaacccattctttctattccacaaggactgagcaacacttccttcggagattgtgc

SEQ ID NO: 239751 - DNA, 371 bp, Glycine max
gatcactcacactagtctctgtgaaaagcgacacgacacaacacaacacaagctttattctttttcttcgcttcttctgtacagcacccaagattgaagatgatagaccttgcgcgcgtgcagaaggagcttgtggaatgcagcaaggacgcggagggatcgggcatcaaagtcagccccaaaaacgacaaccttgttctcttgatcggcaccattcctggccccgtcggaactccatatgaagggggcattttccagattgatatcacattgcctgatgggtacccgtttgaaccccccaagatgcagtttaaaaccaaagtttggcatcctaatatcagcagccaaagtggagctatttgcctggatat

SEQ ID NO: 239752 - DNA, 342 bp, Glycine max
gagcctcaccagaagcacaacgaggagaagcagaaggagcaaaagcaatggcgccgaagaagccgacaaccacgacaaggaaccctgatttggttagggggattggcaagtattccaggtcgcagatgtaccacaagaggggcatctggaccatcaaggccaaaaacagtggcgttttgccccgccacgattccaagcccaagcccgacgccacggctcataagccgctcaagttctaacccgcggacgatgtttacaagcccctcgtcaacaagcacaagcccaaacccgcgaaactcagggctagcattactccagcgactgtgttgatcctgcttgctg

SEQ ID NO: 239753 - DNA, 321 bp, Glycine max
gaaccatcttcgtttttcagcatttctactctccaaacactcgaattcgcattctcttcactctttccccaatccatggccaagggagagaagaaaccggcggagaagaagcccgcggagaacgctccggcggtgaaaacaaaagccgagaagaagatcccaaaggaacccgcctcgggcgagaagaaggagaagaagagaaacaagaagagcgtggagacgtacaagatctacatattcaacgtgctgaagcaagtgcaccctgacatcgggatctccagcaaagccatggggatcatgaacagcttcatcaacgacatc

SEQ ID NO: 239754 - DNA, 355 bp, Glycine max
ggcattctattcattcaagattcagcaagtgcgttttggaagcagagaccgagatacttcgagatggcccgtacaaagcaaactgctcgtaagtcaactggaggaaaagctcccaggaagcagcttgcaaccaaggctgcacgtaagtctgcaccaacaactggtggtgtgaagaagcctcatcgttatcgccctggaactgttgctcttcgtgagattaggaaataccagaagagcactgagctcctaatcaggaagcttcctttccagaggttggttcgtgaaattgcccaggatttcaagactgatctgcgtttccagagccatgctgtgcctgcattgcaagaggctgctg

SEQ ID NO: 239755 - DNA, 375 bp, Glycine max
ggcagcgcttgatttgaggccaggcaagccccactcaaccaccacacctctcctcgttcacgctacccctttctgctcttcttctacctttcaagttttaaaagtataaagatggcagagacattcctatttacctcagagtcggtgaacgagggacaccctgacaagctctgcgaccaaatctccgatgctgtcctcgacgcttgcctcgagcaggacccagacagcaaagttgcctgcgaaacatgcaccaaaaccaacttggtcatggtcttcggagaaatcacgaccaaggccaacgttgactacgagaagatagtgcgtgacacctgcaggaacatcggcttcgtctcaaatgatgtgggactggatgcc

SEQ ID NO: 239756 - DNA, 360 bp, Glycine max
ggctacaaaaacattgaaagaaatagaaaaagcaaaactggtttctcgcatttcctccgaaacagaccgtttcgctcgtttctcggatctgcaatggaagccccacccaaaggcgctgctggaagaagaggtgacaggaagaagtccgtttccaaatccatcaaagctggcctccaattccccgtcagccgcgtcgccaggtactttaaaaaaggccgttactctcgccgccttggcaccggggctcccatttacctcgccgccgttctcgaaaatctcgccgcagaattgttggagctggccgggaacgctgcacgtgacaacaggaagaataggattaaccctaggcacgtgttgctg

SEQ ID NO: 239757 - DNA, 245 bp, Glycine max
  unsure (1)..(245): unsure at all n locations
gagattcgtcttcagtttcagcctttctctcccactcactcactcacaggtaagcaatggcgggaaaaggagggaaggggcttcttgcagcgaaaaccaccgcggcgaataaggacaaagacaaggacaagaagagacctatttctcgctcttcccgtgctggaatccagtttcctgtgggacgttatccataggcagctganacanagggtcnnaagcaatggacgtgttggggcaacagctgc

SEQ ID NO: 239758 - DNA, 342 bp, Glycine max
gatccttcgtccagctagcaccacattcacctgaggcttccaaagcaatggcttcccttgcagcatccactgctgctgcttcccttggcatgtcagaaatgcttggaaaccccatcaacttcagtggtgccacaaggccagctccatctgcttctagtcctgcctccttcaagactgtggctcttttctccaaaaagaaggctacaccaacacctccaaaaaaagctgctgctgctgctcctgccaatgatgagcttgccaagtggtatggtcctgacagaaggatcttcttgcctgagggtctcttggaccgatccgaaatccagagtacttgaccggaga

SEQ ID NO: 239759 - DNA, 372 bp, Glycine max
gacccccaaaccctgctgcataggaagaaaccctagcctctcaccctccctgcgacacgatgcagatcttcgtgaaaaccctaacgggtaagacgatcacccttgaggtggagtcttctgacaccatcgacaacgtgaaggccaagatccaggacaaggaaggcatccctccggaccagcagcgcctcatcttcgccggaaagcagctggaggacggccgcaccctcgccgactacaacatccagaaggagtccaccctccacctcgtcctcggtctccgcggtggcgccaagaagcgcaagaagaagacctacaccaagcccaagaagaatccagcacaagcacaagaacgtcaagctcggcattctccag

SEQ ID NO: 239760 - DNA, 329 bp, Glycine max
gattcaccacaaccctctctctatattccattgccacccagttttgaatatatttttattccttctttgtttcttcactttcttccatacacataaccatgtcttctcagactgttgtcctcaaagttggtatgtcatgtcaagggtgtgctggagcagtgaacagggttttgggaaaaatggaaggtgttgagtcatttgacattgatctgaaggagcagaaggtgacagtgaaaggaaatgtggagccagatgaagttctgcaagccgtttccaaatctgggaagaagactgcaatctggggtggataagcaccacaatctaaaaac

SEQ ID NO: 239761 - DNA, 356 bp, Glycine max
ggttctagtgtgtgattgtttgttgttgtaacccgttcttcttcttttgttgttctgtgtttgtgtttgttttttctctcacctgaaaatgtcttgctgcggtggtaactgtggttgcggaagctcctgcaagtgcggcaacggctgcggaggctgcaagatgtacccagacttgagctacactgagtcaacaccaccgagaccttggtcatgggagtggcacctgttaaagctcaatttgagggtgctgaaatgggtgtgcccgctgagaacgatggctgcaaatgtggaccaaactgctcctgcaacccctgcacttgcaagtgaggtgttgggagagcaagcttcaagcagag

SEQ ID NO: 239762 - DNA, 354 bp, Glycine max
  unsure (1)..(354): unsure at all n locations
ggttttacaatttacatcacatttcgttgcgcctctgttctctgtcactgctgcgtctctcgtaaccatgcctaagcaaatccacgagattaaggatttccttctcactgctagaaggaaggacgcanggtcggtgaagatcaagaggagcagagatgtggttaagttcaaggtcagatgctcgaagtacctctacacactttgtgtgttttgaccagagaaagctgataaattgaagcaatctcttcctccaggtttgagtgttcaagacctgtaaaggtacagggcgagagaccaagaagaagcaattcattgattcgtctgaacttcgtttctctgtagttgaaacttgag

SEQ ID NO: 239763 - DNA, 294 bp, Glycine max
gattcatcacatacaacactctctccaaagttcaaattaagactgagaggtgagaaagagagaattcatatgggtgccggtctagttgcgttcctcttaatggttcttgtgcaattggtctatgcagtgatgaacattacttcaaagcttgcaatagaatctggaatgagccctcttgtccttgttgcttatcgacaactctttgctactgtgtccattgctccctttgcttattggctcgagtggaatacgcttcccaggattacacagcgtcttatgattcagataataatt

SEQ ID NO: 239764 - DNA, 375 bp, Glycine max
ggaaattctaagagcttgttccgtcgtcccccaagtgctgcagagccgcattttgcttgcaattcagaaactttgtgcgtagaggggacgaaacaatacaatggcttacgctgcaatgaagcctactaaggccggcttggaggagcctcaggagcagatccataagattaggatcaccctttcctctaagaacgtcaagaatctcgagaaagtgtgcgccgaccttgttcgtggtgccaaggacaagcgcctcacggtgaaagggacctgttaaggatgcaacctaagtatcttacaatcacaacaggaaatccccgtgtggtgaaggcaccaacacatgggacagatttgagctgcgtgtgcacaagagaatta

SEQ ID NO: 239765 - DNA, 364 bp, Glycine max
  unsure (1)..(364): unsure at all n locations
gatgccgaaaagtagtaccaagatggcttcagttgtgtatctcctctttggcttccatctcattgttatcatgtcaagttccttacccgcaactagtgaagtgtttgcaaaacagtatccatccacagaacccgtggaagaaaaactcacccaactccacttctatttccataacaacataacgggggaacacccaactgctatgaaaactgttttgcctcctaaggggtccattcatggttttggggctacttacatgatggatgaccctctaactgaaggaccaagtccaacttcaaagcttgtgggaagatctcagggaatatacgctttggcttcacaacatgagcctgngttgctcatg

SEQ ID NO: 239766 - DNA, 378 bp, Glycine max
gacactaaacaagttaaaagaagagcatcactgaactaacaaagcaaccctatgtcgaaggtggtttgtgtcaccggagccagcggcgccatcggatcatgggtggtcctactcctcctccagcgtggttacaccgtccatgccaccgtccaagatatcaaggatgaaaatgagacgaaacatttggaggaaatggaaggagcaaagagtcatctccatttttttgaaatggatcttcttgacatcgactccattgccgctgccataaagggttgttccggcgtaatccaccttgcatgtcctaacatcattggtcaagtcgaagatcccgagaaacagatattggaaccggcgataaaaggaaccgttaatgtgttg

SEQ ID NO: 239767 - DNA, 350 bp, Glycine max
gactccactcacaactgaaaccaaaactgaaaaaaaaaacaaacaataccataacatggcttcttccaccatcacctcctccttcctaacatcacccccttcatctctcttcaacaaatcatcatccccttccttccatgccacccctactctccgccccctcgcgccacgcgcctccatgtccgcctcagcgccgccctacgacttcggatcgttccggttcgatccgattacagagtcgattgtgtcgcgcgagatgattctcaagtacatgatcgacatggtcacccacgccaacaccgacgtcgtcatcgttggcgcgggctccgcgggtctctcgtgcacctacg

SEQ ID NO: 239768 - DNA, 370 bp, Glycine max
gagacaagggtttcttccgggttcacgtttcacaatcactttttgcgcttctctcactcactcactcttcttcttcctcttcgtgtggttttctttctcgaactcgaacgaagatgcgtgagattcttcacatccagggagggcaatgcgggaaccagatcggagccaagttctgggaggtggtgtgcgcggagcacgggatcgattcaacggggaggtaccaaggggacaacgagttgcaactcgagcgagtcaacgtctactacaatgaagcgagttgcggaaggttcgtgcctagggcggtgctcatggatctggagccagggaccatggacagcgtcagatctggtccctacggtcagattttccg

SEQ ID NO: 239769 - DNA, 378 bp, Glycine max
ggagacaccattctgattttgtccatccaaaccttaaaaagattcagtgaagaacaacgttaatggcatctcttggtgtgcaagcagttcatcctcctccattaacatccacctccgacacacctcctctttttgatggcaccaccaggttgtacatcagttattcttgcccctatgcacaacgtgtatggatcgctcggaacttcaagggactaaaagacaagatcaatttggtccctataaaccttcaagacatgccagcttggtataaggagaaagtctaccctgaaaataaggtgccatccttggagcacaatggcaaggtgttgggagaaagtcttgatttgatcaaatatgtagattaaaactttgaaggga

SEQ ID NO: 239770 - DNA, 349 bp, Glycine max
gggcatagcaaaatcgtttctccaatttaatcaccattgtacaacccaattcccttcgtcgttttcgattaagagagcaatggcacgtaccaagcaaaccgctcgcaagtccaccggaggaaacgctccgaggaagcaattggcaaccaaagccgctcgcaagtcagccccggcgaccggcggagtgaagaatccccaccgcttcaggccaagaacggtggctctgagggagattcgaaagtaccagaaaagcaccgaacttctgatccgaaaactcccattccagaggctcgtcagagaaatcgctcatgatttcaaaaccgatctccgcattcagagcagcgccgtt

SEQ ID NO: 239771 - DNA, 355 bp, Glycine max
ggaaactgcggaagcattccttgggaagaacattaatgatgctgtggtcactgtcccagcttacttcaatgatgctcacacgcaggccaccaaagatgctggtgtcattgctggtctcactgttgctagaattattaatgaacctactgctgctgccattgcgtatggattggacaagaaaggtggcgagaagaacattcttgtttttgaccttgggggtggaacatttgatgtcagtatcttgacaattgataatggtgtttttgaggttcttgctacaaatggagatactcatcttggatgtgaggactttgatcacagaataatggaatacttcattaagttgatcaataaa

SEQ ID NO: 239772 - DNA, 378 bp, Glycine max
  unsure (1)..(378): unsure at all n locations
gatgccgaaaagtagtaccaagatggcttcagctgtgtatctcctctttggcttccatctcattgttatcatgtcaagttccttacccgcaactagtgaagtgtttgcaaaacagtatccatccacagaacccgtggaagaaaaactcacccaactccacttctatttccataacaacataacgggggaacacccaactgctatgaaaactgttttgcctcctaaggggtccattcatggttttggggctacttacatgatggacgaccctctaactgaaggaccaagtccaacttcaaagcttgtgggaagatctcanggaatatacgctttggcttcacaacatgagcctgggttgcccatggtgacaaattttct

SEQ ID NO: 239773 - DNA, 165 bp, Glycine max
ctttccaaaacgtgaatagtttaaagaagggagttctttatttgtacttctaaatccaactgtttagttaaggggtgtttatctcttgtagagcttttagtttgatttagagttttcttgttgaaatctggttaagtttgtatcaatataattggcttatcattc

SEQ ID NO: 239774 - DNA, 378 bp, Glycine max
ggacattgctaaaccttaaaccctaatttttacaatccgagggtgaagagtttgatgggtcagcgaagaacgacaacaacatcaatcagtgctcctcaagcaaggaagacgctgacatgaataacaaccaccttcgctttgaagaggctgtcgacgagagttccaacctcgaccaatccatgcgcgacatcgaagaatccgatgataaaaccagcgccgactattacttcgattcctactctcattttggaattcacgaagagatgttgaaggacactgtgagaaccaagacatatcaaaatgttatttatcagaacaagtttttattcaagaataaagtagttcttgatgttggtgctgggactgggattttatcac

SEQ ID NO: 239775 - DNA, 355 bp, Glycine max
ggttttagagtggtggagtgtgcagaagagcgtcgcagtcgcaaccctaatcagaagaagcgcagcttcaagcgagtgacagccaccagccatgggtcgtatgcacagccgcggtaagggtatatcctcttctgctttgccctacaaaaggacacctcctagctggctcaagatctcttcgcaagatgtcgaagaaaatatctgcaagtttgcgaagaaaggtttgaccccgtctcagattggtgtcattctcagagattctcacggtattgctcaggtcaatagcgtcactggcagcaaaatccttcgcatcctcaaagctcacggacttgcgcctgaaattccagaggacctg

SEQ ID NO: 239776 - DNA, 383 bp, Glycine max
gattcacaacttcaatccctcttttgctttaccaaattccattttccaattcaaaaccctaactccgttcgaagcaccaaatcgtgatggcaccaaaggcagagaagaagccagcagagaagaagcctgtggaggagaagaaatcgacggtgggagacaaggctccggcggagaagaagccaaaggccggaaagaagcttccgaaggagggaggcgccggcggagaaggtaagaagaagaagagaaacaagaagagcgtggagacatacaagatctacatcttcaaggttctgaagcaggttcaccctgacattggtatctcaagcaaggccatgggaatcatgaacagcttcatcaacgacatcttcgagaagcttgcccag

SEQ ID NO: 239777 - DNA, 345 bp, Glycine max
gagggcgaggaagccacatagagacacaatacagagtgagttgttgctccttcgccacaactctctgccaacatgggtatctccagagattctatgcacaagaggcgtgccactggtggcaagaagaaagcctggaggaaaaagagaaagtatgagcttggtcgccagcctgctaacactaagctgtcaagcaacaagacagtcaagaggattcgggttagaggtggaaaatgtgaaatggacggcattgagattggatactggaaaattactcctggggaagtgaagctgtaactcgcaagactcgtgtactagatgtggtttacaatgcctcaaacaatgagc

SEQ ID NO: 239778 - DNA, 360 bp, Glycine max
ggatttaaccatgtatattgcactttgcagcatagagtttgactgcgatgatgatttgtttgctactgctggagtttcccggcgcatcaaagtttttgacttttctgctgttgtgaatgaacctacagatgctcactgtcctgttgtggagatgtctacacgttcaaaacttaattgcttgagttggaataaatatgctaagaatcaaatagctagtagtgattatgaaggaattgtgactgtttgggatgtaaccactcgaaagagtttaatggaatatgaagagcatgaaaagcgtgcatggagtgttgatttttcaagaacagatccctctatgcttgtatctggtagcgatgactg

SEQ ID NO: 239779 - DNA, 354 bp, Glycine max
  unsure (1)..(354): unsure at all n locations
gattatcatagtagatattcattccccttatctttctctcttctctctccccgcccaaaccctaactccctaccctattccgctttctctcatccatcatgaaaggaggaaagtccaagaccgaatctaagagagccgatgccaaacttgctgtgaataagaagggcgccgccaccaagactaggaaacccgccggaaaggggaaggcagcgaaagatcctaacaagccaaagaggcctccaagtgctttcttcgttttcatggaggaattcaggaaggtgttcaacaaggaacatcncgacaacaaagcagtgtctgctgtgggcaaagctgctggagcanaatggaagacga

SEQ ID NO: 239780 - DNA, 373 bp, Glycine max
ggcgaaacagagagtgatttcagtgagtgatcggtgttcacttgatctcatcataatcgtcagcgtcaattgaagaagatgccgatcagaaacatcgccgtcggaaggcctgaagaggcgactcaccccgacacgttgaaagcggctttggctgagttcatctcaaccttcatcttcgtgttcgccggctcaggctccggcatcgcctacaacaagctcaccgacaacggcgctgccacccctgccgggctcatctccgcctccatcgcccatgcattcgccctcttcgtcgccgtctccgtcggagccaacatctccggcggccacgtcaaccccgccgtcaacttcggcgccttcgtcggcggcaacatca

SEQ ID NO: 239781 - DNA, 349 bp, Glycine max
  unsure (1)..(349): unsure at all n locations
cggggatggtgaggacggtgaataataacaagctgcgattggattatggagtggcattgcttggttggtanggatgactgtgttcattgctgtgttgtctgaatatgtggtggatacaattgaggatgcatcagattcgtggggtttgtctgtgagctttctcagcataatcttgctaccaatagttggaaatgcagctgaacatgcaggagcaatcatatttgctttcaagaacaagctggacatttcattgggtgttgcattgggttcagcaactcagattgccatgtttgtggtcccattatgtgtaatcgttgcttggataatgggtatcgatatggacctgaac

SEQ ID NO: 239782 - DNA, 380 bp, Glycine max
gattcaccacaaccctctctctatattccattgccacccagttttgaatatatttttattccttctttgtttcttcactttcttccatacacataaccatgtcttctcagactgttgtcctcaaagttggtatgtcatgtcaagggtgtgctggagcagtgaacagggttttgggaaaaatggaaggtgttgagtcatttgacattgatctgaacgagcagaaggtgacagtgaaaaggaaatgtggagccaagaatgaagttctgcaaagccttgttccaaatctgggaaagaagactgcattctggggtggataaagcaccacaatctagaaaacaagccttttagaaagtgcacctgttgcctcagaaaacaagcct

SEQ ID NO: 239783 - DNA, 356 bp, Glycine max
gaacagcgaaacagagagtgatttcagtgagtgatcggtgttcacttgatctcatcataatcgtcagcgtcaattgaagaagatgccgatcagaaacatcgccgtcggaaggcctgaagaggcgactcaccccgacacgttgaaggcggctttggctgagttcatctcaaccttcatcttcgtgtccgccggctcaggctccggtatcgcctacaacaagctcagcgacaacggcgctgccacccctgccggccgcatctccgcctccatcgctcatgcattcgccctcttcgtcgccgtcgccgtcggcgccaatatctctgggggcaacgttaaccccgctgtcaacctcggcg

SEQ ID NO: 239784 - DNA, 351 bp, Glycine max
gagagagaaggctccatttataaaacatcgtgtgcgtactcgctcttcacctaggtttcggtcccatcaacttcagggatggtgcaaacgtccacttatcgcaagtctcagagctatgctactagttccaactaactacgggttgttaagatccctgatggcgaattggtgtactataacatctagttgagagcacgtggacgtaactgccctgtcagtggtaagaagatccaatggattctatacttaagtcctgctgaattcaagaggtctagattgccgatgaatcgcatgacagtagatcgatcctatcgatgtctgttatcctggggagctgttacagagttgatt

SEQ ID NO: 239785 - DNA, 353 bp, Glycine max
gacagcaaaacaattttcaaactcaattaccattccataacctaaatctcctctttgtttccgagtcagagagcaatggcacgtaccaagcaaaccgctcgcaagtccaccggcggaaaggcgccgaggaagcaattggcgactaaagccgctcgcaagtcagctccggccaccggcggagtgaagaagccccaccgcttcaggcccggaacggtggctctgaaggagaataaaaagttacagaagagcactgaacttctgatccgaaaactcccattccagaggctcgtcagagaaatcgctcaggatttcaaaacagatcttcgtttccagagcagcgctgtttctgcgct

SEQ ID NO: 239786 - DNA, 370 bp, Glycine max
  unsure (1)..(370): unsure at all n locations
ggtacacagcctcaacaaccctaacgcgtgcatagcaaagagagacgcacccatggggcgaaaacccgcgaggtgttatangcaaattaagaacaaaccataccccaagtcacggttttgccgtggtgttcctgatcccaagatcaggatttacgatgttggtatgaagaaaaagggtgttgatgagtttcctttctgtgtccatctggttagttgggacaaggaaaacgtttctagtgaagccctggaagctgctcctaatgcttgcaacaagtacatggccaaatttgctggaaaggatgcattccacttgagagtcagggtgcacccattccatgttcttacgatcaacaagatgctttcgtgtgct

SEQ ID NO: 239787 - DNA, 379 bp, Glycine max
ggaggaacttaatggtaccagagtaaagtattgcggaagaaaagaaaaacgaaatccctcgctttgagaaatgggtgtagtactcttccggtgggttctgccactgactctgttgctcacttgcgcgttaggtttccaatcggacgagcttctcctcgacgaccaagagttcggcatcgagggaggacgagcctccttcgattccgattcgcacccatctcccacctccaccttgaggaagagcttttctgactcgtcctccgactccaagatccacttccctctccaacacgctttcggcgactccgatttctccgacgccggcaacttctccgctcgccttaagacgtggagccactgcgtccagacgctgacgaag

SEQ ID NO: 239788 - DNA, 378 bp, Glycine max
gaaaacaaacaacacagtttttcttgtctctatattcttccggccaccgcagatggcggcggagcacgacagctgctgctcgcgctgtgtcaccttcctaataaccataggcctcacagcgctcttcctatggctgagtctccgcgttgacgaaccaaaatgctacctcgactacatttacgttcctgccctcaacaaaaccctaaattccaattccactcacaacaaaaacaccacaatactcttcgctctcaagctcaccaacgggaacaatgacaaaggcatccaatacgacgacgttctcctctccttcagagtcttcgagagcgtcaacctcacgcgcccactcggcaacgccaccgtgcaaaggttctacca

SEQ ID NO: 239789 - DNA, 384 bp, Glycine max
  unsure (1)..(384): unsure at all n locations
ggttgacaaaggaaacgtgtagtacgagggccaatttccaaaaaccttttgtctcgcaacctcacctcttcctccttcaatctctttcggaatttcccaaaatccttagtgggaggaagagatggttctgactcagaagattcacgaagctttcaaaggcaccgtcgagaggatcactggcccccgaaccgtttccgccttcaaagaaaaaggagttctcagtgtctccgagttcgtcaccggcggcgataatctcgttggcaaatgccccaactggtcctgggaatccgggtgatcaggcaagaggaagccatacttgnncactgagaaacagttcttgattactagaaatgtgccttgtcttcggagagctgcatctgttga

SEQ ID NO: 239790 - DNA, 115 bp, Glycine max
gggtgaaccaatcgtatgttattggtacatccacaaaggtggatatctctgatgtcaatgttgataaatttgatgacaagtactttgccaaggaagctaagaaaaagaaaacaaa

SEQ ID NO: 239791 - DNA, 242 bp, Glycine max
gctcttcatcgtagcgccagactgagaggaagggagagggagattctttgtttgctaccttctctcggaaaaatggttacgttcaggtttcaccagtaccaagtggttgggagggctcttcccacggaagcagatcagcacccgaagatctaccgaatgaagctctgggccaccaacgaggttcgcgcgaggtggaggttctggtattttctgaagaaactgaagaaggtgaagaagagcaa

SEQ ID NO: 239792 - DNA, 342 bp, Glycine max
ggcagttcaattccaatatattccattctctctgtgtatttccctacctctcccttcaagatgcagatcttcgtcaagaccctcaccggcaagaccatcacccttgaggtggaaagctctgacaccatcgacaacgtcaaggccaagatccaggacaaggaaggaatccccccggaccagcaacgtctcattttcgccggaaagcaacttgaggacggccgtacccttgctgactacaacattcagaaggagagtactcttcacctcgtcctccgtctccgtggtggcatgcagatcttcgttaagacactcaccggcaagaccataaccctagaggttgaa

SEQ ID NO: 239793 - DNA, 308 bp, Glycine max
gacaacacagaacaaaaacaaagaaaaaaaaaaacccttagccaacacaaccatcatggccacctctgctattcagcaatcagcattcactggtcaaactgctctgaagcagctcaatgagttcgtccgcaagaccggtggcgccggcaaaggtcgcactaacatgcgccgcaccgtcaagagtgctcctcagagcatttggtatggccctgaccgtcccaagtacttgggtccattctcggagcagattccatcatacctgaccggagaattccctggtgactacggatgggacactgctggattat

SEQ ID NO: 239794 - DNA, 370 bp, Glycine max
gcatatcagaagctcagacctagggatttcggccgtttgctccccaaaaaggaaagaagcagattctgtcctttgaaatcaacaagaaaagatgtcaggtgaagaggtagctgttgcagttgaggtacctgctacttcaattccaggtgagccaatggacatcatgactgctctacagcttgtgctgagaaaatctctggcctatggtggtcttgcacgaggtcttcatgaaggtgccaaggtgatcgagaagcatgctgcacagctctgtgttctagcagaagattgtgaccaacctgattatgtgaaactggtgaaagctctttgtgcagagcacaatgttagtcttttgacagttccaagtgcaaag

SEQ ID NO: 239795 - DNA, 512 bp, Glycine max
  unsure (1)..(512): unsure at all n locations
ggagggagggagggtgcgagggcgcgtgggnaagggggaaacgttaaacgtgaagtgcggtcaggaattaccgggtcgacgcacgcgtccgcccacgcgtccgcccacgcgtccgcccacgcgtccgcggctgcgagaagacgacagaagggacccaatttctctttggattgagaaaactactgagaaggagatctctgatgatgaggatgaggaagagaagaaggatgaggagggtaaggtggaggatgttgacgaagcagaaaaaagaaaagaaagaaaaaaaaaaaagcggccgctctagaggatccaagcttacgtacgcgtgcatgcgacgtcatagctcttcgatagtgtcaccgaaattcaattcactggccgtcgttttacaacgtcgtgactgggaaaaccctggcgttacccaacttaatcgccttgcancacatccccctttcgccagctggcgtaatgacgaagaggcccgcaccgatgggccgtcccaagagttgcgc

SEQ ID NO: 239796 - DNA, 351 bp, Glycine max
ggaacctgatcgatctctttaccagttgccacactacaccgagattccccctaaacccgtttgcgttgttgtttgcgaagaaatggcgactaagaggagcgtgggaacgttgaaggagggtgatttgaaagggaagagggtgttcgtgagggtcgatctgaacgtgcctttggatgacaaccttaacatcaccgatgacactagagtccgtgctgctgttcccaccatcaagtacttaactggtcatggaaccaaagtgatcctttctagccacttgggacgtcctaaaggtgtaacacctaaatacagtttgaagcctcttgtgccaaggctgtcgcaacttctcggaat

SEQ ID NO: 239797 - DNA, 370 bp, Glycine max
ggcactgcaactttgctctctgtgaggcttcaatttccaattagggtttcgcttagagtaaccaattaccatgggagtcttcacctttgtcgttcgcaaatccggcgccgaatggagcgccaagcaacattccggcgacatcgaggcctccgccgactccacctacgatctccaaaggaagctcgtgcaagccgctctcgccgttgattcctccggtggagtccagtcctccttctctcccgtgtctcctacctccgctgtgttccaggtgatagtgggtggtgctgtattcgttggagggtgcggtggtgctgttgcagctgcacctgcaggtggtgctgctgcagctgatggtgccccggctgctgag

SEQ ID NO: 239798 - DNA, 351 bp, Glycine max
gccgctgagctccctttctcctcggtccacagagacaaaatgtaagacaggtgccaacagttcatcacgaaagaaaggactagctgagccgagatcactaactaaaacgaatttaatactaatcgaaaatactaatagaatagaaatagaactgtcttttcatatagatatcccttcaacacaacataagtcatcgaaaggatctcgaacgaccaccaacgcacgaaagccgggatctttcagaaaatggattcccattcgaagggtgcataaccgcatggattagctcacactaacccgtcaatttgggatccaattcggttccttaagaggtatcgggaaggaattttg

SEQ ID NO: 239799 - DNA, 360 bp, Glycine max
ggtgcctggccatccggtttcccagatctgctccttcctcaccccacaggctgatactagactgtaactttcagaagtcagttgaagagcatgggtcgtggagttagcagtggtggtggtcaaagttccttgggttatctttttggcagtggagaggcccctgccgcaaaaccggcaacaaacaatgccccagcccaacctgaagtgcaggctgtaaataatgcgcctccttcaaaagcatctcctcctactaaaacaatagaccctaacaaggctgctggtataaacagtcattctactgatggccagaacaccggcaacttcatcacggaccgaccctcaaccaaggtccatgctgcc

SEQ ID NO: 239800 - DNA, 313 bp, Glycine max
gaggcgcggcgggatcagcacaagattgcaaaatgaagttcaacattgcaaatcccaccactgggtgccagaagaagctggaaatcgatgacgacctgaagcttcgagcattttgggacaagaggatctcccaggaggttcttggtgatgctctgggtgaggagtttaaaggatatgttttcaaaatcaccggtgggtgtgacaaacaaggattccctatgaagcagggagtgctgacccctggtcgtgttcgacttttgctccatagaggaactccttgtttccctggatatggaaggcgcaatggagagcg

SEQ ID NO: 239801 - DNA, 314 bp, Glycine max
ggttcatccactaatctgattatggtggcttctacaaccctgatgctgtttgctggaaggtttggattggctccatcagcaaacaggaaagccactgcagggctaaagctggaggtgatggactcaggcttgcagactggtgaccctgctggcttcacccttgctgacaccttggcctgtggatctgttggccacatcattggggttggggttgttcttggtctcaagaacattggtgccctgtaaaaagcaactatataagtttagtgcttgatgcatctgtaatcaatgttagtatgtacttcattttcaca

SEQ ID NO: 239802 - DNA, 387 bp, Glycine max
gggtcgtgtgttgttgtatactataatagcagaatcgtgagtaacagcagagcagaacaccgataaatcgctatgactgctcagacccaagaggagcttcttgcggccgaccttgagcaacaaaagatccatgatgatgagcctgtagttgaggatgatgatgaggatgacgaagatgacgacgatgaggatgacgacaatgttgaagaaggtgatgcatctggtaggtccaagcagaccagaagcgaaaagaagagtcgcaaggcaatgctcaaacttggaatgaaacctgtcacaggtgtcagtcgtgtgactgttaagaagagcaaaaatatcctgtttgttatatcaaaaccagatgttttcaggagcccgacttctgacaca

SEQ ID NO: 239803 - DNA, 365 bp, Glycine max
gatgccgaaaagtagtaccaagatggcttcagttgtgtatctcctctttggcttccatctcattgttatcatgtcaagttccttacccgcaactagtgaagtgtttgcaaaacagtatccatccacagaacccgtggaagaaaaactcacccaactccacttctatttccataacaacataacgggggaacacccaactgctatgaaaactgttttgcctcctaaggggtccattcatggttttggggctacttacatgatggatgaccctctaactgaaggaccaagtccaacttcaaagcttgtgggaagatctcagggaatatacgctttggcttcacaacatgagcctgggttgctcatgg

SEQ ID NO: 239804 - DNA, 373 bp, Glycine max
ggcccttctagctttttcccagtccaagcagcctccaattcgtgccactctcttcaaaatggccgttaccttctcaaatctccacacagaatcaggtctcaagtccctcgacgacttcctctctgggaaggtctacgtttctggggatcagttcacaaaggacgacatcaaagtgtatggtgctgttttggagaagccaggtgactcttttcccaatgctgccaagtggtacgaggttgtctcatctcagcttgctgcaagcttccccggcaatgctcaaggggtgagattcagtggcaaagcttctgctccggcggaggctgctcctgcgaaaccggatgcttctgctgctgaagatgatgatgaccttgat

SEQ ID NO: 239805 - DNA, 375 bp, Glycine max
gaccctagctcgcgttcttcgttcgtcttttacatcaggatggagtctcaggtgaagcacgcacttgttgtcaaagtaatgggtcgtactggatccagaggacaggtgacccaggttagagtgaagtttctggatgatcagaaccgtcacatcatgaggaatgttaaaggaccagtgagagaaggagacattctcaccctactcgagtctgaaagggaagctagaaggttgcgctaagagggtccttctttcttgatctttatggtagttagtcggtgctaaaggttatagcaccctatcttgtcttggatctattttcattcgaattatggcttgagttttgctgttttgagtctaagcttcaaggttgaagta

SEQ ID NO: 239806 - DNA, 321 bp, Glycine max
ggtgtatcaatcggccacacagaaatgggcagtgcttctctgattccagtttcctggttgccttggcggccactttctcctttcaagggaacggtgaaaaccttggtcgcaaaaccatggctgaagaagattcagcaagcaagacccctcatttccgtggttaacaaggctgcctctctatcttcccccgtgacagcacccagcgtcggcgttcggtttcgggtggagagtttggggccgcaagcgggttcgaggaagagggctaagagaaagggtagaggaatatccgcagggcaaagggcaagttgtgggtttgggatg

SEQ ID NO: 239807 - DNA, 226 bp, Glycine max
gagaggcaaagcaaataagcagtaatagatctgactctgattttcagaaagcaaaatgcctggtttcaacggcgatgaaactgctccgttcttcggcttcctgggcgcggcgggcgccctagtagtctcctgtatgggagcggcgtacggcacggccaagagcggggtccgcgttgcgtcgatgggcgtcaagagaccggagctggtcatgaaatccatcggcccg

SEQ ID NO: 239808 - DNA, 294 bp, Glycine max
gagcctcagcgggtgcagtacgaggagaagcattaggtgcaaattcattggcgccgaagaagccgagaaccacgacaaggaaccctgatttggttaggtggattggcaagtattcgacgtcgcagatgtaccacaagaggggcatctgggccatcatggccaaaaaccgtggcgttttgccccgccacgattgcaaacccaatcccgaggccccggttcagaggccggccaagttctacccctgcgacgatggttagaagcccctcgtcgacaagcacaatcgcaaatccgcga

SEQ ID NO: 239809 - DNA, 358 bp, Glycine max
ggggcatagcaaaatcgtttctccaatttaatcaccattgtacaacccaattcccttcgtcgttttcgattaagagagcaatggcacgtaccaagcaaaccgctcgcaagtccaccggaggaaaggctccgaggaagcaattggcaaccaaagccgctcgcaagtcagccccggcgaccggcggagtgaagaagccccaccgcttcaggccaggaacggtggctctgagggagattcgaaagtaccagaagagcaccgaacttctgatccgaaaactcccattccagaggctcgtcagagaaatcgctcaggatttcaaaaccgatctccgctttcagagcagcgccgtttcggctct

SEQ ID NO: 239810 - DNA, 274 bp, Glycine max
  unsure (1)..(274): unsure at all n locations
tggggcgcaggtagagagagcgagagaacacgaacatatcggaaccacagctgcggtaacagaagaacaatcacagaatgggtcgagtgagaacgaagacggtgaagaagtcctctcagcatgtgatatagcgtcactactcgcgcatgaccctggacttccacacgatcaagaagcttctggaggaagtggcgataatcccgtcnaagaggctaaggaaacaggatcgcggggttctcgacgcacctgatgaagcgcatccacaatggccctg

SEQ ID NO: 239811 - DNA, 268 bp, Glycine max
gatccacacctctctctctctctcagaatttctatctatctcttgtttcaatttcaacaacggttactcctttttcgttttgagtttcaatcaagccatcatcatgtctaccgcatcgcaacccaaggccaagaaaacggcgtcgtccaagaagcccctctcccagcctcccttcgccgtgatgatagcagaggcgattgggagtctgaaagagagaaccggttcgagccaatacgcgataaccaaatacatccaagggaagcacaag

SEQ ID NO: 239812 - DNA, 281 bp, Glycine max
gaagtaacttaaggtttcaaacctaggaagttggaagtcatggcagcaacattgatggcagcaacaagttctggcactcttaaagcaactcctttcctaggccaaggcaagggtgccaatgccaatgctcttagggatgttgtttccatgggaactgggaagtacaccagtggcaatgatttgtggtatggaccagacagagtgaaatacttgggacccttttcagctcagaccccttcatacgtgagaggagaattcccaggggattatggatgggacac

SEQ ID NO: 239813 - DNA, 255 bp, Glycine max
  unsure (1)..(255): unsure at all n locations
gctagtggcagtgaccaaactccatttctcactcgccgtcgtctcttccgtctagggtttctcctcttcacaaaaatggttgccgcaaagaaaactaagaagacccatgagagcatcaacaacaggctcgctctcgtcatgaagagtggcaaattcaccctcggttacaagaccgttctcaaatctcgtangagctccaaagggaaattgattatcattgctaacaactgcccccctttgaggaagtcanagatt

SEQ ID NO: 239814 - DNA, 349 bp, Glycine max
  unsure (1)..(349): unsure at all n locations
ggcagaggtgtattttctcacttctcagcactcagcagcgatatcagttgaagaaacagaaacaaacaaaagaggcagaagatgttgtgggtggacaaatatcgtcccaaaaccctcgaccaggttatggtccacaccgacatcgctcgcaatctcaagaaattggtaacggaacaggattgcccccatttactcttctatggcccatctggctccggcaagaaaaccctaatcatggctcttctccgccaaatgttcggacctggtgccgaaaaggtgaaggtggataataggacctggaaagtggatgctgggagtagatctcttgatttagagctgancacattat

SEQ ID NO: 239815 - DNA, 354 bp, Glycine max
ggctctgctcgtgcctctagggttatcatttctccatttccattttctctctcacttttcaagaatcgtaagctatgggaaagtcttacccaactgtgagtgctgattaccagaaggccgttgagaaggcgaagaagaagctcagaggcttcatcgctgagaagagatgcgctcctctaatgctccgtttggcatggcactctgctggaacctttgacaagggcacgaagaccggtggacccttcggaaccatcaagcaccctgccgaactggctcacagcgctaacaacggtcttgacatcgctgttaggcttttggagccactcaaggcggagttccctattttgagctacg

SEQ ID NO: 239816 - DNA, 375 bp, Glycine max
aacgtagcaacggtataataattcagtatgatgataatgctgcagttgtcattgatcaagaaggaaatccaaaaggaactcgaatcttttgtgcaatcgcccgggaattgagacagttaaatttcactaaaatagtttcattagcacccgaggtattataagacgaaactgtgctatggatacattatttttttgtgaaatagattaattaatctattttatctaacatatatcccttttgtagtaattattagaatttgtagtaattattataagtattagaagcagcaattcttatttatttcagattaatacttgataacctaaacaatatatctatatatagaatatagatagatatatatataatagaac

SEQ ID NO: 239817 - DNA, 318 bp, Glycine max
acggttttgcgcagttgtcgcagctcatcctccgtaacctccgagctctgcaccgaataacgaagccatggggaagacacatggaatgggatctgctcgcaagctcaagtcccaccgcaggaggcaaaggtgggctgacaagtcatacaagaaatcacatcttggaaatgaatggaagaaaccttttgctggttcatcccatgccaagggaattgtccttgaagagagagggattgaggctaagcagcccaactctgccagtcgtaagtttgccacggttcaacttatcaggaatgggaagagagatgccgcttttgt

SEQ ID NO: 239818 - DNA, 344 bp, Glycine max
gacatctttcactcgttctctgaaattttaattgacttttctcccctcataaaaaaaacctaccaatggctcccgcaaaggcagagaagaagcccgcggagaagaagccggcagagaagaagatatcgaaggaaggaggaagcgagaagaagaagaagagaacaaagaagagcgttgagacctacaagatctacatcttcaaggtgttgaagcaagtgcaccccgacatcgggatctccagcaaggctatggggatcatgaacagtttcataaacgacatcttcgagaagctcgcccaggagtcatcgcgtctcgctaggtagaacaagaagcccaccattact

SEQ ID NO: 239819 - DNA, 305 bp, Glycine max
ggaccaatcacaattctctgtgaactttctagaatctcgttcttcctttgccttctccttcttcttcaaccctttttctttctcattctttcacactttcattctctaaaaagatctaagtccctttggtcttcatcttctgttctgatccatgtatggcttctaaacgcatcttgaaggagctcaaggatttgcagaaggatcctcctagctcatgcactgcatgccctgtggctgaggacatgtttcactggcaagccataatcatgggacctgctgagtacccatatgcaggtggtgttttc

SEQ ID NO: 239820 - DNA, 350 bp, Glycine max
gactcaccacttcaaaacactcataacacaaagcacaaagcaaagctcatccttgagttaaaaaatggcagcagcttcttccatggctctctcatccccatccttggctggcaaggccgtgaagctgggcccatcagccccagaagtgggaagggtgagcatgaggaagaccgtcaccaagcaggtctcctcaggaagcccatggtacggcccagaccgagtcaagtacttgggcccattctctggcgagcccccgtcctacctaaccggtgagttcccaggcgactacggctgggacactgctgggctttccgcagacccagaaaccttcgccaagaaccgtgaactcg

SEQ ID NO: 239821 - DNA, 359 bp, Glycine max
ggggatgcaagcagagattttttcttacgcaggcagtggacacagacaccatgtcacttattaaccagctctttaacagaggcgttttcggcactcgatgcaaaacatgcctgaacctggcaatttcacgaattaagctgctgcaaaacaagagagatatccaactgaaacaaatgtgcaaggagattagccaattcttgcaggctggccaagaggcaattgctagaattagggtggagcatatcatacgagaacaaaatacatgggctgcatatgaaatattggagttgttctgtgaatttgttctagcacgtgtacctataattgagaaccagagggagtgccccacagaattgcga

SEQ ID NO: 239822 - DNA, 329 bp, Glycine max
  unsure (1)..(329): unsure at all n locations
gacccttaacctctctgctgcgtttgcttctcctccacccatccacaaacgaacacacactttgattgagaatggggcgtgttcgcacaaagacagtgaagaagtcctcgcggcaagtgatcgagaggtactactctcgcatgacgctggacttccacacgaacaagaaggttctggaagaggtggccatcattccctccaagaggctccgcaacaagatcgcgggattctccagccacctcatgaagcggatccagaagggtcccgtacgtggaatctccctcaagctgcangaggaggagcgcgagcgccgcatggacttcngtccc

SEQ ID NO: 239823 - DNA, 379 bp, Glycine max
  unsure (1)..(379): unsure at all n locations
gggttctagtgtgtgattgtttgttgttgtaactcgttcttcttcttttgttgttctgtgtttgtgtttgttttttctctcacctgaaaatgtcttgctgcggtggtaactgtggttgcggaagctcctgcaagtgcggcaacggctgcggaggctgcaagatgtacccagacttgagctacactgagtcaaccaccaccgagaccttggtcatgggagtggcacctgttaaggctcaatttgagggtgctgaaatgggtgtgcccgctgagaacgatggctgcaaatgtggaccaaactgctcctgcaacccctgcacttgcaagtgaggtgttgggagagcaagcttcaagcagagatagcccttaattangaataa

SEQ ID NO: 239824 - DNA, 382 bp, Glycine max
  unsure (1)..(382): unsure at all n locations
aggggaatctgaaattgcaatgcttcacccggcggcactgatagcatcgtgtccttatccttatccttatcctgggcggcatgagttaccctcagcctcagcgtcagcgacagccagagtcgctgttccaatgccaaatctgagaggcaaagcggttgttggtgttggttccagaatgataaggtgcatggctaaccccagaagagttcaaatggtggccaagcaaattaggagagagctttctcatatgcttctcaccgataaagtcttgcagtatgctgttcttcncgaagcctccttaggagccgaccgttacctctcttctctcaccaccatcaccgacgtccaagtctccgccgacttgcaggttgttaaggtgtat

SEQ ID NO: 239825 - DNA, 321 bp, Glycine max
ggatacagtgtgggcataaaattttcgaagttgaagcgagaacttgccatttcaagggttttagggttagggttttctcaaattgcaaggacatgggtttcaaccttcaaccatatgagattcaatccatgctcaaggaaggccataagcacctttctggcctcgacgaagcggttctcaagaacatcgacgcttgcaaacaactttccactattactcgaacttccctgcgtcccaatggaatgaataagatggttatgaatcacttggacaagctttttgtcacgaacgatgctgggacaattgtgaatgaacttgaag

SEQ ID NO: 239826 - DNA, 278 bp, Glycine max
gttcgcttcttttcctaacctaaaccctactcattctccatacctcaacgaagaggttaaagagacggcaacactttgctgtccgccttgaccgagcagagcttcgtcttggccctcgattttgccctaaagtactctcagtcacaacagacaccgtcgtcgtcgtcgtcgtcatcaatggcaccgaagcagaccaaggctgagaagaggatcgcttacgatgcgaagctgtgcgacctaatggaggagtacggccagatcctcgttgtgaactccga

SEQ ID NO: 239827 - DNA, 311 bp, Glycine max
gagatttctgagagaaaggaaagggtgtgagaagagaatggagagtaaagaggaagatgttaacgttggagcaaacaagttctcagaaaggcaaccaattggtacagcagctcagggtggtggtgacaaggactacaaggaggcacccccaactcccttggttgaacctggttgagcccaaatcaaggtccttccaacaagctggaattgctgagtttgtggcaacgttcttgttcctctacattaccatcttaactgtcatgggtgtcaacaggtcaccctccaagtgtgcctccgttggcattcaaggc

SEQ ID NO: 239828 - DNA, 266 bp, Glycine max
gaaatcaagagaattctagagaagattgtgcagccaagcaggaaagattggagtaccaggcttgatgatgctctctgggcacatcggactgcctacaaagcacccataggaatgtctccttatcgggttgtctttggaaaggcatgtcatcttccagtggaaatttagcacagagcatactgggcagtgaagacgtgcaacttctctaggggtgaggttggcgaggaaagggagttgcaactgagtgagttagatgaaatccgcct

SEQ ID NO: 239829 - DNA, 361 bp, Glycine max
gggtttctagtgtgtgattgtttgttgttgttactcgttcctcctcctttggtggcctggggttggggttggtttttcccccaactgaaaatgtcctgctgccgtggtaactgtggttgcggaagctcctgcaagtgcggcaacggctgccgaggctgcaagatgtacccagacttgagctacactgagtcaaccaccaacgagaccttggtcatgggagtggcacctgttaaggcgcaatttgagggtgctgaaatgggtgtgcccgctgagaacgatggctgcaaatgtggaccaaactgctcctgggaaacctgtacattcaaatgaggtgtttggagagcaaacttttagcacagat

SEQ ID NO: 239830 - DNA, 282 bp, Glycine max
gagagccggcttcttcctctgcgcaggaattaggaatattcgacaggtagagtttcttcaatggctcctaaagttgataagaagaatgatccaaaggcccaggccttgaagactgctaaggcagttaagtcaggtgctacctttaagaagaaggtaaagaagatccgaacttctgtcactttccacaggccgaagaccttgaagaaggacagggaccccaagtaccctcgcattagcgccccgccgaggaacaagcttgatcattatcagatcctgaaatac

SEQ ID NO: 239831 - DNA, 219 bp, Glycine max
gagtgcagcatcggagagaaataatggaaaactggtgtcgctgaaactgcataagcgccgctccgcaagcgtgctcaagtgcggcagaggaaaggtttggcttgaccccaatgaagtcatcgaaatcgccatgggcaattctcggcaatacatcatgaagttggttaaggatgggtttatcatcatgaagccaatcaagattcactcgcgctcacgtgc

SEQ ID NO: 239832 - DNA, 250 bp, Glycine max
gattcacaactttacccactcttcattctagcaattcgaattcccaatccaaaaccctaataccttcaaagaacctagtagtgaatcagtgatggcacctaaggcagagaagaagccagcggagaagaagccggtggaggagaagaagtcgacggtgggagacaaggctccggcggagaagaagccgaaggccggaaagaagcttccgaaggagggaggagccggcggagaaagggggaagaagaaaaag

SEQ ID NO: 239833 - DNA, 319 bp, Glycine max
  unsure (1)..(319): unsure at all n locations
gattagcaaaagcaagaagaactagtctaagcagaaatggcctcttcagtgatggcatctgtggccctcaaacctgcccctttcactgttgagaagtcctcagttagaggccttccctccctctcaaggaactcctcttcattcagagttgtggccagtggtggcaagaagatcaagactgacaagccttatggaattaatggtggcatggctttgagggaaggggttgatgcatctggcagggaaaggaagggaaagggcgtttaagagtttgtanacaaataccgtgctaatgtcgatggttacagtcctatctacg

SEQ ID NO: 239834 - DNA, 333 bp, Glycine max
gacaacacaacgcaacacaacgcgcactctcgcttttctctctgatcacagctaccctatcgttcttcgcggtttcgccgattctcgccatggcgaaagccatatccgacgccgaaggcgccgatagacggttgaaacgcaaaggcgctggtgctggaaggaagcaatcgacgaaagctgctaaggattctaacaagccagagagacctccaagcactttcttcggtttcatgtccgaattcatagagcagtttaagatggagcatccgaacaacacagccgtcgctgttgtcggtaaagctggttggtagatatggaaatcgctgtctgatg

SEQ ID NO: 239835 - DNA, 293 bp, Glycine max
gacgtctctcagcacagagcgcggcatgctcacccgagaccggtaccagcaatcgggatccatcccattgtcggacgtacatccacacataccaaaacaacagcacccatatccagagaaatctatcctacgcccttggaccaactttatcacttccgtcatcggcgaactggcaacatcttcaatgccgttctacgcaagagattgtccatgaccagggctcacaagccttcattgtccttgtcaacggtgcgtaaatctaccacagggaaagaacatatcagtgctctcat

SEQ ID NO: 239836 - DNA, 349 bp, Glycine max
ggttttacaatttacatcacatttcgttgcgcctctgttctctgtcactgctgcgtctctcgtaaccatgcctaagcaaatccacgagattaaggatttccttctcactgctagaaggaaggacgcagggtcggtgaagatcaagaggagcagagatgtggttaagttcaaggtcagatgctcgaagtacctctacacactttgtgtgtttgacccagagaaagctgataaattgaagcaatctcttcctccaggtttgagtgttcaagacctgtaaaggtacagggcgagagaccaagaagaagcaattcattgattcttctgaacttcgtttctctgtagttgaaac

SEQ ID NO: 239837 - DNA, 303 bp, Glycine max
gtgttctgctacatttgaggagtttctttctgttctgatttttatgtatgatgtctaaatcaacattttgttgtggagcaaaacactttaacttttttttttaaaacttacaatgaatgttattttctgcaacaactgggaagaaaaaaaaaaaaaaagacaaataaaaaaaaaaaaaaaaaacaaaaaaaaaaaaaaaaaaaagagaaaaaagacaaaaaaaagaaaaaagaaaccaccaaataaaaaatataaacgaaaaaaaggcgccgcttaagaagttaccagctagaggcgcctcaa

SEQ ID NO: 239838 - DNA, 375 bp, Glycine max
gacagcgaaacagagagtgatttcagtgagtgatcggtgttcacttgatctcatcataatcgtcagcgtcaattgaagaagatgccgatcagaaacatcgccgtcggaaggcctgaagaggcgactcaccccgacacgttgaaggcggctttggctgagttcatctcaaccttcatcttcgtgttcgccggctcaggctccggcatcgcctacaacaagctcaccgacaacggcgctgccacccctgccggcctcatctccgcctccatcgcccatgcattcgccctcttcgtcgccgtctccgtcggcgccaacatctccggcggccacgtcaaccccgccgtcaccttcggcgccttcgtcggcgggaacatc

SEQ ID NO: 239839 - DNA, 385 bp, Glycine max
ggaatcacagtggtgccttatcgctgtggttatcatcttcttcttcctctttcttagatctcttctttctctacgccgcacgccgaaaccatggccggaaaaggagagggtcctgctatcggaatcgatctcggaaccacctactcttgcgtcggtgtgtggcaacatgaccgcgttgaaatcatcgccaacgaccaagggaacagaaccacgccgtcttacgtcggattcactgacaccgagcgtctcatcggtgatgcggccaagaatcaagtcgccatgaaccccatcaacaccgtcttcgatgccaagaggttgattggtcgtagattcagtgattcctctgttcagagtgatatcaaattgtggcctttcaaggtcgttc

SEQ ID NO: 239840 - DNA, 381 bp, Glycine max
ggggttttggtgtttgttgttgaatcgtgaaaatgttcagaaaccagtacgacacggacgtgaccacatggagccctgcggggaggctgttccaggtggagtacgctatggaggcggtgaagcagggctcggcggcgatagggctccgatcgaagacccacgtggtcctcgcatgcgtcaacaaggccaactccgaactctcctcgcaccagaagaagatcttcaaggtcgacaatcacatcggcgtcgccatcgctggcctcaccgccgatggccgcgtcctctcccgctacatgagatccgaatgcatcaactataattacacctacgagtcgccgcttcccgtcggcagactagtcgttcagctcgccgataaggctc

SEQ ID NO: 239841 - DNA, 322 bp, Glycine max
gattcacaacttcaatccctcttttgctttaccaaattccattttccaattcaaaaccctaactccgttcgaagcaccaaatcgtgatggcaccaaaggcagagaagaagccagcagagaagaagcctgtggaggagaagaaatcgacggtgggagacaaggctccggcggagaagaagccaaaggccggaaagaagcttccgaaggagggaggcgccggcggagaaggtaagaagaagaagagaaacaagaagagcgtggagacatacaagatctacatcttcaaggttctgaagcaggttcaccctgacattggtatctc

SEQ ID NO: 239842 - DNA, 331 bp, Glycine max
gccctttcttctgcatcactttccattctcttcaacctaacgcagcatcgctatactcttcattccatggctttgcccaatcagcaaaccgtggattaccctagtttcaaactcgttatcgtcggtgatggtggcacaggaaagacaacctttgtgaaaaggcatctcaccggagaattcgagaagaaatatgagccaaccatcggtgtggaggttcacccattggattttttcacaaactgtggaaagattcgattctactgctgggatactgctggacaggagaagtttggtggcctcagagatggatactatatccatgggcaatgtg

SEQ ID NO: 239843 - DNA, 292 bp, Glycine max
gatccatttctcgcaacaatgcttaacctctctcattccccatttcctcacctccttcaaccgctgctaaattctatggttccgaaatggacgctggcggaaagatcaagaagggcgccggaggtataaagggcggcggcccaaagaagaagccggtttcaaggtccgtcaaagccggtctccaattccccgtcggaagaattggccgttatttgaagaaaggaaggtacgctcagcgtgtccgtaccggtgctcccgtatacttggctgcagttctcgaatacctagctgc

SEQ ID NO: 239844 - DNA, 339 bp, Glycine max
gaccctcttgtttgctaatattctcattcttctgtctctgcttcttctccttctgaactaagagatggggttgtctttcaccaagctttttagccggctctttgctaagaaagagatgcgtattctcatggtaggtcttgatgctgctggtaagactaccatcttgtacaagctcaagctgggagaaattgtcacaaccattcccacaattggattcaatgtggagactgtggaatataagaatattagctttactgtatgggatgtgggtggcaagataagatccgtccctttaggagacactacttccaaaacactcaggggctaatcgttgttgtg

SEQ ID NO: 239845 - DNA, 230 bp, Glycine max
ggcgtacacagcctcaacaaccctaacgcgtgcagagcagagagagacgcagccatggggcgaagacccgcgaggtgttataggcaaattaagaacaaaccataccccaggtcacggttttgccgtggtgttcctgatcccaagatcaggatttacgatgttggtatgaagaagaacggtgttgatgagtttccattctgtgtcgcatctggctagttgggagaaggaac

SEQ ID NO: 239846 - DNA, 165 bp, Glycine max; identical to SEQ ID NO: 239773

SEQ ID NO: 239847 - DNA, 351 bp, Glycine max
gactcaccacttcaaaacactcataacacaaagcacaaagcaaagctcatccttgagttaaaaaatggcagcagcttcttccatggctctctcatccccatccttggctggcaaggccgtgaagctgggcccatcagccccagaagtgggaagggtgagcatgaggaagaccgtcaccaagcaggtctcctcaggaagcccatggtacggcccagaccgagtcaagtacttgggcccattctctggcgagcccccgtcctacctaaccggtgagttcccaggcgactaccggtgggacactgctggggcttccgcagacccagaaaccttcggcaaagaaccgtgaactcg

SEQ ID NO: 239848 - DNA, 269 bp, Glycine max
gggtggagtgtgcacaagagactcacagtctcaaccctacttagatcatttgcagcatcaagctcgtgacaggcaccacccatgggtcctgtgcacagccgcggtaacggtatctcgtcttctgctttgccctacaaaaggacacctcctagctggctcaagatctctgcgcaagatgtcgatgaccatatctgcaagtttgcgaacacaagtttgtcgccctctcagattgctgtcattctcacagattcccaccgtattgctcaggt

SEQ ID NO: 239849 - DNA, 271 bp, Glycine max
gagggttacacgccgtcgtcgctgtttttgtgtgtcgcttcttcgtaggtgcagctgcaatggtgaacggacgccaaggagaacgtgtcagactctacgtgaggggtacagtccttggatacaaaaggtccaagtcaaaccagtatccagatacatccctgatccaaattgagggtgtgaatgccagagaagaagtagcatggtatgctggcaagacagatggctatatctacaacgcgaaggtgaagaagaatggaagccattaccgctg

SEQ ID NO: 239850 - DNA, 384 bp, Glycine max
ggagagtcagattcgcacgcattgcttcgcctcacaacagcagctgcagcagcaatggctcccaaacgaggtggaaaggctccggctcttgccgctaagaagaagcctgagaaggtcacgaatccgttgttcgagaagcgtccgaagcagttcggaatcggaggggcgttgcctccgaagagagacttgactaggttcgtgaagtggccaaagaatgttcaaattcagaggaagaagaggattctgaagcagaggttgaaggttcccccagctttgaaccagtttaccaaaactcttgacaaaaacctagcaacaagtctgttcaagttgcttctgaagtacaggcccgaggacaaagctgaaaagaaggagaggctcttgaaa

SEQ ID NO: 239851 - DNA, 223 bp, Glycine max
gtccctgacatgggcaaaagacagctcatgaatcttcttcctcttggtgccatttcactccccactgctggaatgcttattcccgacacctacttctttgtccctccaggttcaggttcttcagctggcggtactgttgccaacgatgccgttgggaatgatctaattgcccagaattggctcacggcacatcgacctcgtcaccgaccccttccgcacggat

SEQ ID NO: 239852 - DNA, 341 bp, Glycine max
gacaacacaacgcaacacaacgcgcactctctcttttctctcttaacacaaaaaccctatcgttcttcgcggtttcgccgattctcgccatgccgaaagccaaatccgacgccaaagccgccgatagccggttgaagcgcaagggcgctggtgctggaaggaagcaatcgacgaaagctgctaaagatcctaacaagccaaagacacgtccaagcgctttcttcgttttcatgtcggagttcagagagcagtttaagaaggagcatcctaacaacaaatccgtcgctgttgtcggtaacactggtggtgaccaatggaaatcgctgtctgatgctgaaaag

SEQ ID NO: 239853 - DNA, 182 bp, Glycine max
gatcatagcgatccagagagtgggttcaatcagtgatcggggttcacttgctccttcgtaaagtcctcgtcatcagcataatcatcactccttggttggagacgatgctgatgacagacgtcgccatcggaacgcctgaagacgctactcatcccgacacctctgaacgtggggttggctga

SEQ ID NO: 239854 - DNA, 268 bp, Glycine max
ggcagtttcaaattttcttttccttcactttcccgagaaaaaaataacacttttcactttcttcactacgttctcacttcgatatggctcgtacgaagcaaaccgctcgcaagtccaccggtggcaaggcgccacgtaagcagctcgccaccaaggccgctcggaagtccgctccggcgaccggaggagtgaagaagccccaccgcttcaggccgggaaccgtggcgctgagggaaatcagagagtgccagaagaggaccgagcttcg

SEQ ID NO: 239855 - DNA, 358 bp, Glycine max
ggaacggaaaagcactggcgcagctaccctgaggcttctcttctcttctcttctctgtcgtgagtcaccatggtgagggttagtgtgctgaacgatgctctgaagagcatgtacaatgctgagaaaaggggaaagcgccaagtcatgattaggccatcctccaaagtcattatcaaattccttttggtgatgcaaaagcacggatacatcggagagtttgagtatgttgatgaccacagggctggtaaaatcgtggttgaattgaacggtagactgaacaagtgtggggttattagtccccgttttgatgtgggcgtcaaagagattgaaggttggactgctaggcttctcccctcaa

SEQ ID NO: 239856 - DNA, 336 bp, Glycine max
ggaaagcaagcattatcagaagcagaaagaaagaataagaggttgcagcaacaatggcagccatggctgcgcttcagagctcaatggtcggtctctccctctcctccaactctttcttaggccaacgcctttctcccatcaccctcccctctcttcttccgggtaagtcaacagagaagcaatgtcctattgtaatgaggcttaaacgatgggaacggaaggagtgtaaaccaaacagccttcctatcttgcacaaaatgcatgttaaacttggagatacggtgcaagtcatatctggacgtgaaaggggtaaagttggggagattactaaaatct

SEQ ID NO: 239857 - DNA, 160 bp, Glycine max
taaacccctgttctatggtttccagatcaaccatactctcaccagtactggtgcgagtaaaaataccctcttctttaacttctgttattattctgatggagtgcaactccttcataagtatttcgagaataccaccacgattttttccatcaaatcccca

SEQ ID NO: 239858 - DNA, 309 bp, Glycine max
gatccaactctctaaacaacacattaacctttctcattccccatctcctcaccttattcagccactgctaatttctagggttccgaaatggacgctggcggaaagatcaagaagggcgccggaggaagaaagggcggcggccctaagaagaagccggtttcaaggtccgtcaaggccggtctccaattccccgtcggaagaattggccgttatttgaagaaaggaaggtacgcccagcgtgtcggtaccggtgctcccgtttacttggccgcagttctccagtagctagctgctgaggtgcctgagttg

SEQ ID NO: 239859 - DNA, 381 bp, Glycine max
gttcttaaatgaaaggccccaacctaggcctggaaaaggggtcaccaatacctgccaagtctgtgagcgcagcctccttgattccttcaacttctgctctcttggttgtaaggtatatttaaatggaattcctaatcttaactacatcttagttgtaacaaaatatgatgaatagatttcctaattttttaagaaatgttgtatgtcctttgtaaattgtaactacctcctacttttttgctgtataaagtatgtaacattatagttgtactttttatgcctgctttgaaaaagtaagaaaaaaatgatgatgagaacagttggatacgaatgaataatgatctcttgaacttttgaattttcttctcagattgttggaac

SEQ ID NO: 239860 - DNA, 329 bp, Glycine max
gctctaccgcattaccacccgtcttgggtccgggttaatagatctctgtgaagtcgctttataacactcaacctaagatgcagaacgaggaaggacagttcaccgggctttacattcctaggaagtgctctgccacaaaccgattgattaccgctagggaccatgcttcggttcaggttaacattgggcatgtggatgagaatggcgtctacaatggccatttctccacttttgctctctgcggcttcatacgtgctcagggtgatgccgacagtgccccatatcgcttgtggcaaaacaagaaagttgaagttaagcaacagtaaaca

SEQ ID NO: 239861 - DNA, 340 bp, Glycine max
gatcatcaaatcaaaaaccctaattcccaaattccctcatttttcaagtttcaaccaagaaaagcagcaacaatgtccggtccccgaaaaggttggaaagggttaagaaaaggaagaacaaacaaggctcccaaagtgccccgccacaatatccacggaatcacgaaacccgcgattccgagaatggcgacaacaaggtgcctgaagaagatcaaccggttgatctaccaacagaccaggggcctgctcaagatctttctcgagaacgtcattcgcgatgccgtgacctacacggagcacgccaggagaaagacagtgaccgccatggatgtcctttacc

SEQ ID NO: 239862 - DNA, 475 bp, Glycine max
  unsure (1)..(475): unsure at all n locations
gtgagcagtcagcggctaggttacggtcaggagtccccgggtcgacccaagcgtcagacggctgcgagaagacgacagaaggggtggagcctgcggcttaatttgacaacacggggaaacttaccaggtccagacatagtaaggattgacagactgagagctctttcttgattctatgggtggtggtgcatggccgttcttagttggtggagcgatttgtctggttaattccgttaacgaacgagacctcagcctgctaaatagctatgtggaggcaaccctccacggccagcttcttagagggactatggccgcttaggccacggaagtttgaggcaataacaggtctgtgatgcccttagatgttctgggccgcacgcgcgctacactgatgtattcaacgagtctatagccttggccgacaggtccgggtaatctttgaaatttcatcgtgtatggggatagatttttgccn

SEQ ID NO: 239863 - DNA, 268 bp, Glycine max
gaaaccacaagtaaaagaaagaagctttcttgagttgagttaacagcatggagagggaggaagatgttaaggttggagcacagaaattctcacagaggcaagcattggggacaggagctcacggtgacaaggactacaaggaggcaccaccagcacccttgtttgagccaagggagttaaagtcatggtctttttacagagctgggattgcagagtttgtggccacattcttgttcctctacatcactgtcctgaccgtcatgggtgt

SEQ ID NO: 239864 - DNA, 472 bp, Glycine max
aggatggtaacgtgtagcggccactgaccgggcaggaattcccggatcgacccacgcgtacgtacggctgcgagaagacgacagaaggggacagctagcgtccggtggggtgcgattcgtgagctgcacctctctctctcgataatcagaggcaacttatttgctttggaattgatggaggccaaattttttcgctttctcaagattgtgggtgttggatacaaagccagagctgaagctgcagggcgtctattgtatctcaaattgggatacagtcatgaggtggaactagccgtccctcctgctgtccgagttttctgcttcaaaaacaatgtaatttgctgtactggaatagacaaacaaagggtgcaccagtttgctgctactgttcggacttgtaagccacctgaagtttacaaaggcaagggcataatgtatgttgatgaagtgatcaagaaaaaacaacgaaaga

SEQ ID NO: 239865 - DNA, 324 bp, Glycine max
ggaagtcgccgtttgttttcttttcgttcgcatcttctctctctctcagaaagatgaaggtggtcgccgcgtatttgctcgccgtcctcggtggcaacaacagccgctccgccgatgtcatcaaggaaatccttggctccgttggagtagaagcagatgacgataggattgaatcgtttttgtctgaagttaagggtaaggatatagttgagcttattgctgccggtagggaaaagttggccacggttccttctggtggtggtggtgccgttgccgtcgccgcagctcctgggggacgtgctgctgctgcgtgctcctgctgct

SEQ ID NO: 239866 - DNA, 368 bp, Glycine max
ggcacttcaattgcaatcaaattagttcattctctttgcgcagttccctacctctcctttcaagatgcagatcttcgtcaagaccctcaccggaaagaccatcacccttgaggtggaaagctctgacaccatcgacaacgtcaaggccaagatccaggacaaggaaggaattcccccggatcagcaacgtctcatcttcgccggaaagcagctcgaggacggccgtaccctcgccgactacaacatccagaaggagtcaaaccttcaccttgtccttcgtctccgtggtggcatgcagatcttcgtcaagactctcactggcaaaaccataaccccaaagggtcaaagctctgacaccatttacaacg

SEQ ID NO: 239867 - DNA, 383 bp, Glycine max
gacacgcaactatttctgactacgttttgctctacgcctctccctctctctcaaaaatcgttctcttcgattttagggttttgttttgctgctgcctccgttccccccttctcataaacaacgcgttttctcttctgcttcgtatctattctttgcttttggttttggttgattcaaggccttcacagcattcgttgcggcattttaatcgatttatccaagcaggactgaatgaactaatggagtctaaaggtgggaaaaagaagtctagtagtagtagtagtaaatcattgttctacgaagctcccctcggatacagcattgaagacgttagaccaaacggtggaatcaagaaattcagatctgctgcttactccaactgc

SEQ ID NO: 239868 - DNA, 365 bp, Glycine max
gatacctaaaaattgtaccgatatggcttcacttgtgtgtctccttttttccttgcatttcatggttatcatgtcaggttccttaccagcaaatagtgaagtgtttacaaaagagtctcctatgtctctatccacaaaacccgtggaaagactcacccaactccacttttatttccataacaacaaaatgggggaacacccgactgctatgaaaattgttgagcctcctaaggcgtccatttctggttttgggactatttacatgatggatgaccctctaaccgaaggaccaagtccaacttcaaagcttgttggaagatgtcagggaatatatgctgaggcttcgcaacatgaacctgcgatac

SEQ ID NO: 239869 - DNA, 293 bp, Glycine max
ggagagtcagattcgcacgcattgcttcgcctcacaacagcagctgcagcagcaatggctcccaaacgaggcggaaaggctccggctcttgccgctaagaagaagcctgagaaggtcacgaatccgttgttcgagaagcgtccgaagcagttcggaatcggaggggcgttgcctccgaagagagacttgactaggttcgtgaagtggccaaagaatgttcaaattcagaggaagaagaggattctgaagcagacgttgaaggttcccccagctttgaaccagtttaccaaaac

SEQ ID NO: 239870 - DNA, 305 bp, Glycine max
attgggcatgtggatgagaatggcgtctacaatggccatttctccacttttgctctctgcggcttcatacgtgcgcagggtgatgctgacagtgccctagatcgcttgtggcagaagaacaaagttgaagttaagcaacagtagacacccatgatagtttgttactttgctacgtattaatttctacgcatgctagagcatatttgagtactatgactgtcgtcttgagcaaatactcattctaaattttcgttggtatttggtaccgccagctaaatttgcttttttgacagtttgccactgcg

SEQ ID NO: 239871 - DNA, 477 bp, Glycine max
  unsure (1)..(477): unsure at all n locations
ttgcgatgcancggccaggtaacggtcaggagttcccgggtcgacccacgcgtccgcccacgcgtccgtacggctgcgagaagacgacagaagggtaatttgggaattattgctcccatcgccattggtttcattgtcggcgctaacattttgttgggtggggccttctctggagcggccatgaaccccgctgtgacatttgggcctgctgtcgtgagctggacctggaccaaccactggatctactgggccgggcctctcatcggtggtggaatcgctggccttgtttacgaggttgtctttatcagccacacccacgagcagcttcccaccactgactactagagggggggaaatgaaaagcacaanccaaaacacacaaaacaaaaaaagcgggcgctctagaggatccaagcttacgtacgcgtgcatgcgacgtcataactcttcctaaagggtcacctaatttcaattccc

SEQ ID NO: 239872 - DNA, 368 bp, Glycine max
gagtgcaaaactcacaacacatctaaacaaaaaatcaagaacaatggcttatgctaggcttgctcctatggctgtcttcttgcttgccacttccaccataatgttcccaacgaagatagaagcagcagattgtaatggtgcatgttcacctttcgagatgccaccgtgccgctcacgtgattgtcgttgtgtccctataggactagttgctggtttctgcatacatccaactggactttcatctgttgcgaagatgatcgacgaacatcccaacttaagtcaatctgatgatgaatgcatgaagaaaggaagtggcaatttttgcgctcgttaccctaataattatatcgattatggatggtgttttg

SEQ ID NO: 239873 - DNA, 350 bp, Glycine max
ggctgccgctctctgagaaaaacagatagtgtgggagagagaagagcggaagagaaaatgacgaccaggttcaagaagaacaggaagaagagaggtcacgtcagcgccggacacggccgtatcggaaagcaccgcaagcatcccggaggtcgcggtaacgccggtggcatgcatcaccaccgtatcctcttcgacaagtaccatcctggtttcttcgggaaggtaggcatgcgctacttccacaaacttcgcaacaaattctacaatccgatcatcaacatcgacaagctgtggtccctcctcccccaggaggccaaagacaaggccaccgccgacaaggcacccttgct

SEQ ID NO: 239874 - DNA, 273 bp, Glycine max
taatttgggaattattgctcccatcgccattggtttcattgtcggcgctaacattttgttgggtggggccttctctggagcggccatgatccccgctgtgacatttgggcctgctgtcgtgagctggacctggaccaaccactggatctactgggccgggcctctcatcggtggtggaatcgctggccttgtttacgaggttgtctttatcagccacacccacgagcagcttcccaccactgactactacagggggggagatgaatatgtgtt

SEQ ID NO: 239875 - DNA, 271 bp, Glycine max
ggggggagtttcttcttggatcttaccctcttgtttgctaatattctcattcttctgtctctgcttcttctccttctgaactaagagatggggttgtctttcaccaagctttttaacccgctctttgctaagaaagagatgcgtattctcatggtaggtcttgatgctgctggtaagactaccatcttgtacaagctcaagctgggagaaattgtcacaaccattcccacaattggattcaatgtggaaactgtggaatatacgaattatt

SEQ ID NO: 239876 - DNA, 354 bp, Glycine max
gagtgccagacgcagtgactaaaccaaacctctcactcgccgtcgtagggtttctcctttcgtttagcaacaacaacaatggttgcagccaagagaaccaggaagacccatgagagcatcaacaacaggctcgctcttgtcatgaagagtggaaaattcaccctcggttacaagacggttctcaaatcacttaggagctccaaagggaaattgattatcattgctaacaactgcccccctttgaggaaatcagagattgaatactatgctatgttggccaaggttggagttcatcattacaatgggaacaatgtggatttgggcacggcaagtggaaaatattacagagtgtgc

SEQ ID NO: 239877 - DNA, 389 bp, Glycine max
gataccatagaagaagcacaaagagaagcattagcactaggagcagcaacaactagtctcagctgaaatggccgcttcagtgatggcatctgtggccctcaaacctgcccctttcactgttgagaagtcctcagtgagaggccttccctctctctcaaggaactcttcttcattcagagttgtggccagtggcaagaagatcaagactgacaaaccttatggaattaatggtggcatggctttgagggatggaactgatgcatctggcaggaaaggaaagggaaagggtgtttaccagtttgtagacaaatacggtgctaatgtcgatggttacagtcctatctacgacaccaaggactggtctccaaccggtgatgtctacgctggcg

SEQ ID NO: 239878 - DNA, 288 bp, Glycine max
ggtgtactatcattgcaacatcatggaaaaatggtgtaactgtgacgtcacaaacaccgcacaacaagcgtgctcaaatgctgcacaagtaaggtttaggataagtctagtgtgatccccgagatctccatgaacacttcacggcaaaatctcaggaaattagctagagattggtttatgatcaggatatcaaccagaattcaatcacgatcaactcctcctcagatgcacgaaggataaaggaagggccgacgaacgggttatagtccagttaagggtaccatggag

SEQ ID NO: 239879 - DNA, 331 bp, Glycine max
ggttctagtgtgtgattgtttgttgttgtaactcgttcttcttcttttgttgttctgtgtttgtgtttgttttttctctcacctgaaaatgtcttgctgcggtggtaactgtggttgcggaagctcctgcaagtgcggcaacggctgcggaggctgcaagatgtacccagacttgagctacactgagtcaaccaccaccgagaccttggtcatgggagtggcacctgttaaggctcaatttgagggtgctgaaatgggtgtgcccgctgagaacgatggctgcaaatgtggaccaaactgctcctgcaacccctgcacttgcaagtgaagt

SEQ ID NO: 239880 - DNA, 379 bp, Glycine max
ggagaaaggggtgcattctgttctgtgtttcggggttacgctttgcgagtgagaattgataaacaaatcgttagggttttttggttgtgcgagtgagagtgagagagaacaatggaagacataacagagggagtgaacaacatcaacatctctgattcgtataagaaaaatcgcattcaggtctctaacaccaagaagcccctcttcttctacgtcaatctggccaagagatatatgcaacagcatgatgaggtcgagctctcagctctaggaatggctattgccacagtagtaactgttgctgaaattttgaaacacaccagacttgccgttgacaagaacatcaggacatcaactgttgacataaaggatgactcta

SEQ ID NO: 239881 - DNA, 262 bp, Glycine max
gaagtttaggcccgagcggtttgtggaggaggatgtgagcataatggggtctgatttgaggttggcacctttcgggtctggaagaagagtgtgccctgggaaggcccttggtttggcctcggttcatctttggctcgctcagttgcttcaaaattttcattgggtttcatctgatggtgtttctgtggagttggatgagtttcttaagctttctatggagactaagaacccactgtcttgcaaggctgtgcctagggtttcc

SEQ ID NO: 239882 - DNA, 205 bp, Glycine max
gattgtagaactgaacaagggtttctctttctctttctctgtctgcttcttcactttctctcgtttcaatcgaaaaaaatcatgggcagaaaattcttcgtcggtggcaactggaaatgcaatgggaccactgaggaggtgaagaagattgttactactttaaatgaagctaaagtccctggagaagatgttgtacaagttgttg

SEQ ID NO: 239883 - DNA, 395 bp, Glycine max
gtgctgctgcaagaagacgaaagagagggacagcacagttctcatactttggagaatcccaacccttagttaacacaactatcattgccacctctgctattcagtaatcagcattcactggtcaaactgctctgaagcagctcaatgagttcgtccgcatgaccggtggcgcctgcaaaggtcgcactaacattcgccccaccgtcaatagtgctcctcagagcatctggtatggacctgaccgtcccaagtacttgggtccattctcggaccagattccaacagacctgaccgcggaattccctggttactaccgattggacactgccgggttatcagctgaccctgaaaccttctccaggaaccgggagctggaggtgattcacagcagattg

SEQ ID NO: 239884 - DNA, 304 bp, Glycine max
gtctcctcctttgtggtgtcgagctgagaataccagttgctccagtagccggcactaaacaacatggcggacaatgcagtcaccatccgaaccaggaagtttatgacaaacaggcttctctccagaaagcagttcgtcgttgatgtccttcatccagtgagggctaatgtttccaaggctgaactgaaggagaagctgggaagaatgtatgacgtgaaagacaccaacactgtatttgtcctcaagttccgaactcattttggtggtggcaagtctactgggtttggtttgatcgacgattcag

SEQ ID NO: 239885 - DNA, 378 bp, Glycine max
ccacatcacgacatcacatcgcagagaagaacagagagggatccatccatcaattccaatggccgatcagctcaccgacgaacagatctccgagttcaaggaagccttcagcctcttcgacaaggacggggatggttgtattaccaccaaggaacttgggaccgtgatgcggtcacttggccagaacccaactgaggcagagctgcaggacatgataaatgaggttgatgctgatgggaatggtaccattgatttcccagaattcctgaatctcatggctcgcaagatgaaagacactgattcagaggatgagctgaaggatgctttccgcgtgtttgacaaggatcagaatggcttcatctctgcagcggaactccg

SEQ ID NO: 239886 - DNA, 285 bp, Glycine max
gattcaccacaaccctctctctatattccattgccacccagttttgaatatatttttattccttctttgtttcttcactttcttccatacacataaccatgtcttctcagactgttgtcctcaaagttggtatgtcatgtcaagggtgtgctggagcagtgaacagggttttgggaaaaatggaacgtgttgagtcatttgacattgatctgaatgaacagaaggtgacagtgaaatgaaatgttgagccagatgaagttctgcaagccgtttccacatctggga

SEQ ID NO: 239887 - DNA, 238 bp, Glycine max
gattttcatttggagagacagagtagtgagtagtgagagggcgaagcgatgaatgccccagatcgttacgagcgtttcgtcgtccctgaaggcaccaaaaaggtttcttatgagagggacacgaagatcatcaatgcggcgtccttcaccatcgagagagaggagcacactatcgggaacatcctccgcatgcagctgcacaaagagcccaatgtcttgtttgccagatacaagcttc

SEQ ID NO: 239888 - DNA, 456 bp, Glycine max
aactggtacgccacacgtaccggacaggaattcccggctcgacccacgcgtcacgtacagccgccagaagacgacagaaggggaatgcattggatggatgcccgggctttgatacggattgccgcattcagatgcgaagcgccatggggagataccctccgtcatccatggctctccgctccggaaatcgtgtccttgctccgctgctagtctgcgctcatggacctcaatgcctagcgatctgaatctccatacgttcataacgaagggacttcgattggaataaatatgccaagaatcgcggtacgctactagaggatacagactgacttgcgcctgcatgcgatgtcatcactcttctaaagtgtcacccaaattcaattcactggcccgtcgtctttacactgtcggccttgcgaaaaccccgttcctcccccaactttaccggcttgccag

SEQ ID NO: 239889 - DNA, 351 bp, Glycine max
gactccttttctccttcaaaacttgaattaccttcaaccataccttgtttttcaagcctctaaaggtaagatactttggaataaccatgaatgacgaacatggaaccactccaacaatggtgtcaccaccttcacctcatagctcatgtgcgtccactgatcccagccaggaggacaacaacaacaacaacgataataacaaagatggtgacaacaacaacgacgatgataacaacaataataacgatgacaacgacaacaacaacaacgaccccaacaacaacaaccctgaagctccttccttggttctagtagggtgccctcactgccttatgtatctgatgatctctg

SEQ ID NO: 239890 - DNA, 251 bp, Glycine max
gactctgctgttttccaaaaccctaatttctcgaaaggtagggttttgcagagcctcgtcctcctctcacggtttcttctttttatcttctcacctttcttcttccactgctctaatctaagatgggcaagtcaagcaagaaatcagctctcaaggtcgacgctgttccagctgtggttccgccatccaagtctgccaagaagggaggcaagagacaagctcaagatgaaattgagaagcaattgagtgcc

SEQ ID NO: 239891 - DNA, 253 bp, Glycine max
ggactatcagctgacccggaaaccttcgccaggaaccgggagctggaggtgattcacagcagatgggccatgcttggtgcacttggctgcaccttcccagagatccttgagaagaatggtgtgaaattcggcgaggccgtgtggttcaaggctggttcacagatcttctcggagggaggacttgactacttgcgcaacccaaacctgatccatgctcaaagccatccttgccatctgggctgttcaggttgtg

SEQ ID NO: 239892 - DNA, 258 bp, Glycine max
acttgatatcacattctgccacagtgcttaacatgcggattggataagcccctctatctgcagatcttagattcagacttttaaatgcgaattagccccatgtttacttgtttgcataacaagaggaatggctgtgttgatctaaatccttgccccacacatacataacctaaaggagaaagaactacaaggaggacttgaattttctacgaaagtgactctcacaattcgcgggaccctctcaagaattcaggctaa

SEQ ID NO: 239893 - DNA, 320 bp, Glycine max
actacagagagggatacctaaaaattgtaccgatatggcttcacttgtgtgtctccttttttccttgcatttcatggttatcatgtcaggttccttaccagcaaatagtgaagtgtttacaaaagagtctcctatgtctctatccacaaaacccgtggaaagactcacccaactccacttttatttccataacaacaaaatgggggaacacccgactgctatgaaaattgttgagcctcctaaggcgtccatttctggttttgggactatttacatgatggatgaccctctaaccgaatgaccaagtccaacttcaaagc

SEQ ID NO: 239894 - DNA, 350 bp, Glycine max
  unsure (1)..(350): unsure at all n locations
ggggttattggacacattcttcagcgactgcgtttttggatcggaacctcttctgcggcgtagcaatgggacactccaacgtttggaactctcacccaaaaaactacggtcctggttctcgcacttgccgtgtgtgtgggaatccacatggactgatcaggaagtatggccttatgtgctgcaggcagtgcttccgtagcaatgccaaggaaattggcttcatcaagtatcgctaaaagagcagttgtcaactacggaccaatattgtgttctggcactangatgttttgaggatgttatgtttgaagaaacttgagactttcttttttcatctaattaattatcagacg

SEQ ID NO: 239895 - DNA, 313 bp, Glycine max
ggcattctattcattcaagattcagcaagtgcgttttggaagcagagaccgaaatacttcgagatggcccgtacaaagcaaactgctcgtaagtcaactggaggaaaagctcccaggaagcagcttgcaaccaaggctgcacgtaagtctgcaccaacaactggtggtgtgaagaagcctcatcgttatcgccctggaactgttgctcttcgtgagattaggaaataccacaagatcactgagctcctaatcaggaagcttcctttccagatgttgggtcgtgaaattgccccacgatttcaacactgatctg

SEQ ID NO: 239896 - DNA, 376 bp, Glycine max
tagaatcccattccagagccaaggtaggttaaacactcttcttcatcgtcgtcgcaatgggacgtgtgatccgtgcgcagcgtaagggagcaggctcggtcttcaagtcccacacgcaccaccgcaagggccctgcccgcttccggagcctggatttcggagagcgcaacggctacctgaagggtgtcgtcactgacgtcatccacgatcctggccgtggcgcgcctctcgctaaggtcgccttccgccacccgttccgctacaagaagcagaacgagctcttcatcgccgccgagggtctctacaccggccagttcatctactgcggcaagaaggccaccctcgttgtcggcaatgtgttgcctcttcgatccat

SEQ ID NO: 239897 - DNA, 269 bp, Glycine max
gatttcaattcattttgaattgaaaccgcggagagtttgcagctgcatcatcgatcatcgtcacctcatggacggacacgattcacaagacccgaagcagagccctgctgacatgactgcctttgtgcaaaatcttctccagcagatgcaaaataggttccagacaatgtccgactccattgttacaaagattgatgatatgggaagtcgcatagctgagttggaacaacgcatcaatgacctaagagcagagatgcggagtggagtcc

SEQ ID NO: 239898 - DNA, 240 bp, Glycine max
gctccgatctaatggccaccgtaatcgacggcaaaaccgttgcgcaaatcatccgatctgaaatcgccaacgaggtgcgcctgctctctcaaaaatatcgcaaggttccgggactatcagttgtgatagtacggaacagaaaggattcacgcgactacctgggaatgaagagaggagcatgcgccgaattgggaatcatatccgtcgatgtggaccttcccgaacaactctcccaagctg

SEQ ID NO: 239899 - DNA, 272 bp, Glycine max
gaaagtgccttcattcgggactttcactagccgcagcagcctcaggaggagaataaggatgtctcacaggaagttcgagcacccaaggcacgggtcactgggatttctccccaggaagcgtgctgctcgtcacaggggaaaagtgaaggcattccccaaggatgacccatccaaggcacccaagctcactgcattcttgggttacaaggctggtatgactcacattgttagagaggtcgagaagccaggatcaaggcttcacaagaaggaaa

SEQ ID NO: 239900 - DNA, 255 bp, Glycine max
gatttctgcgtggcgtctccggtgagggaaaagtagtagaagagaagatgtcgaccgtaccaggacagctcatctgggagatcgtgaagaagaacaactcctttttggtgaaagagttcggaaggggcactcagagcgtgcagttcagcagagagcccagcaatctctacaacctcaacactttcacgtactccggtttggcgagccagatcacggtcgctgtgcaacctgctggtagagaccactccgtgtttg

SEQ ID NO: 239901 - DNA, 382 bp, Glycine max
ggccgttgcctctgcctctcacccgcagggtttagagaaaatttaacaattagggttgcttctcctttgccgacccatggctcccaaagctgatagttcaaagaaggctgatccaaaggcacaggccttgaaaactgccaaggcagttaagtccggtgctaactttaagaagaagaccaagaagatccgaacatctgttaccttccatcgaccaaggactttgaaaaaggataggagccccaaatatccacgcattagtgctccacccaggaacaagcttgatcactatcagatattgaagtttcctctcacgactgagtctgcaatgaagaagattgaagacaacaacactttggttttcattgttgacttgcgggccgac

SEQ ID NO: 239902 - DNA, 381 bp, Glycine max
gagtgccagacgcagtgactaaaccaaacctctcactcgccgtcgtagggtttctcctttcgtttagcaacaacaacaatggttgcagccaagaaaaccaagaagacccatgagagcatcaacaacaggctcgctcttgtcatgaagagtggaaaattcaccctcggttacaagacggttctcaaatcacttaggagctccaaagggaaattgattatcattgctaacaactgcccccctttgaggaaatcagagattgaatactatgctatgttggccaaggttggagttcatcattacaatgggaacaatgtggatttgggcactgcatgtgggaaaaatatacagagtgtgctgccttagcattattgatcctggtga

SEQ ID NO: 239903 - DNA, 315 bp, Glycine max
ggatacctaaaaattgtaccgatatggcttcacttgtgtgtctccttttttccttgcatttcatggttatcatgtcaggttccttaccagcaaatagtgaagtgtttacaaaagagtctcctatgtctctatccacaaaacccgtggaaagactcacccaactccacttttatttccataacaacaaaatgggggaacacccgactgctatgaaaattgttgagcctcctaaggcgtccatttctggttttgggactatttacatgatggatgaccctctaaccgaaggaccaagtccaacttcaaagcttgttg

SEQ ID NO: 239904 - DNA, 229 bp, Glycine max
ggtcaagggatgctgtgttggtcccaagaagagggtcattacattgcgtcaatccctccttaagcagacttctcgtgttgctcttgaggagatcaaactcaagtttatcgatacctcttcaaagtttgggcatggtcgcttccagaccacacaggagaagcagaagttctttggacgcctcaaagcataattaggttaattggatggaaatgctggaatccaattgggt

SEQ ID NO: 239905 - DNA, 369 bp, Glycine max
ggtgctctgctcgtgcctctagggttatcatttctccatttccattttctctctcacttttcaagaatcgtaagctatgggaaagtcttacccaactgtgagtgctgattaccagaaggccgttgagaaggcgaagaagaagctcagaggcttcatcgctgagaagagatgcgctcctctaatgctccgtttggcatggcactctgctggaacctttgacaagggcacgaagaccggtggacccttcggaaccatcaagcaccctgccgaactggctcacaacgctaacaacggtcttgacatcgctgttaggcttttggagccactcaaggcggagttcctattttgaactaacccgatttctaccag

SEQ ID NO: 239906 - DNA, 298 bp, Glycine max
ggactcactcttgttttcgcttcgctactcatcatcctaagtaccaggaagaaacaaacaatgtttctcaaagtccagctgcactggaatgtcatcatcgctgctgaaaatctgcaaccggaaggtctgatgcttcatagggcaatcattgtccgccttctgagtgactttgctgtgaagaaggccaccaaagatctgggatactttcttgcagtgaccacactggagaaaataggggaaggaaaggtcagacaacatactggggatgtgctcctccctgtggtttttaatgccatca

SEQ ID NO: 239907 - DNA, 314 bp, Glycine max
ggctcttccttgagcatccagcagcaacaaacaagaggggtttgccttgtgccgtttggtttggtttccggaacaaaaaaaaaaatggtgtcaggttctggaatctgcgcaaagcgggtggtggtggacgcgcgccaccacatgctgggtcgtctagcctccatcgtggcgaaggagcttctgaacggccaaaaattggtggtcgttcccggtgaaaaaatttccacctcggccggcttgttaaggcagagaatgaattacttaaggtcccttcgcaaaccctatgacccaaaaccttccaatggcccattcaa

SEQ ID NO: 239908 - DNA, 285 bp, Glycine max
atccagctctcgcaacagtgcataccctctcgcattccgtatttcctcccctccttcattcaccgctaactatcgacggttccaacatggacactggccgaagaattaagaatggatcccgacgtagaaaaggacgaggtccaaagaagaagccggtttcaacgtctgtcaaaaccagtctccaagtcaccatctgaagaattggccgtaagttgactaaaagaaggtacgctcagcgtgtcggtaccggtgctcccgtatacttcgctgcagttctcgaatacc

SEQ ID NO: 239909 - DNA, 319 bp, Glycine max
aagggttttgccctgttgttgcggctcatcctccgtaacctccgagctctgcaccgaagaacgaagccatggggaagacacatggaatgggatctgctcgcaagctcaagtcccaccgcaggaggcaaaggtgggctgacaagtcatacaagaaatcacatcttggaaatgaatggaagaaaccttttgctggttcatcccatgccaagggaattgtccttgaaaagataggtattgaggctaagcagcccaactctgccattcgtaattgtgccagggttcaacttatcaggaatgggaagaagattgccgcttttgt

SEQ ID NO: 239910 - DNA, 339 bp, Glycine max
gaaagtatataacttcttctaggtgtccggaaatcgttcctatcatcacttctcaaatctcgaaccctctcgtccgtgccgatcactaggtcacacttcatcaatggcgggtagaggcaaaaccctaggatccagcgccgctaagaaggccacctcaaggagcagcaaagccggcctccaattccccgtcggtcgtatcgccaggttcctcaaggccggaaagtacgccgagcgcgtcggcgccggagcccccgtctacctcgccgccgttctcgaatatctcgctgctgaggttttggaattggctggaaacgctgcgagagataacaagaagactcg

SEQ ID NO: 239911 - DNA, 375 bp, Glycine max
gacacaaactttattacagttgttgtattgtaattaagcaagaatattaggcaatggagtcttctagaacttcaactactcttgctctttttttaaccatcaatttgcttttctttgtcatggcaagtggctgctacacttgcacacagcctaagccaaaccctatcccattcccttaccctaaccctagtcctgccgcgaagagctgccccagggacgcacttaagctcggagtgtgcgcaaacgtgcttaatggaccaattggtgctattgtagggtcaccaccggaccacccatgttgctcagtgctagaagggcttcttgatcttgaagttgcggtttgcctctgcactgccatcaaaggcaacattcttg

SEQ ID NO: 239912 - DNA, 360 bp, Glycine max
gtccgtcacttttctcagctgctgttcctgcgcgtgaacaagcctcaggtaagccaaagccatggttaagcataacaatgttatccccaacggacacttccgtaagcactggcagaactatgtgaagacctggttcaatcagccagcacggaagacaagaagacggttggctcgtcagaagaaagctgtgaagattttccccagacctacagctggacctcttagacccattgtacatggtcaaactttgaaatacaacatgaaagtgagagctggaaggggattttcccttgaagaactcaaggcatcagggattcccaaaaagcttgcaccaacaattggtattgctgttgattatcg

SEQ ID NO: 239913 - DNA, 248 bp, Glycine max
ggagagaaactagtgactgacttttcgagaaaggaaaaaaaaagagtttccggcattattccatcatgaacgctcttcccattcttctcttcttcctcttcgtttcggcattagtttatgcgaagaaaactggcgatgtgacggagttgcaaattggcgtgaagcataaaccagcatcatgtgaagttctggcacacaaaggtgacagagtcagagtacactatcggggaaaactcactgatggaact

SEQ ID NO: 239914 - DNA, 377 bp, Glycine max
gtacaaatctgaggatgaagagcacaaaaagaaggttgaggccaagaatgctttggaaaactatgcatacaacatgaggaacactgtgaatgatgacaaaattggtgagaaacttgatcctactgacaagaagacgattgacgacgcagttgaacaagctatccagtggctacacagcaaccagctcgcagaagcagatgaatttgatgacaaaatgacagaattggtaagcatctgcaatcctatcattgccaagatgtaccaaggtggtgctggtcctgacatgggtggtgctggtgctgggggaaacgacgatgatctatgcgctccttctggtggaagtggtgctggccccaagattgaggaactggactaaa

SEQ ID NO: 239915 - DNA, 317 bp, Glycine max
gacagacagacacacactcggttctgccttcacaaaaaaattatcgagatcccctttttctcctaagaaaagccatggctaagggtcccggtctctactctgacatcggcaagaaagccagggatctgctgttcaaggactaccacagtgaccagaagttcaccatcaccacctactcacccactggagttgctataacagcatcaggaaccaggaaaagtgaactgtttgtggctgatgtcaacacccagttgaagaacaaaaacatcactactgatatcaaagttgatacagattctaaatcccttccccttttt

SEQ ID NO: 239916 - DNA, 232 bp, Glycine max
gagaatagagagctcctccaattagggtttttgtgatctgcagctacgatgggtaagggaacggggagtttcggtaagaggaggaacaagacccacaccctctgtgtgaggtgtggccgccgcagcttccacctccagaagagtcgttgctctgcgtgcgcttaccccgctgcgcgcaccaggaaatataactggagcgtgaaggccattaggagaaagaccaccggaactg

SEQ ID NO: 239917 - DNA, 302 bp, Glycine max
ggggaagaagaacttagctacaagctaaggaaggatcaaagagaatggctcaagcaatggcatcaatgactagcttacgtggttcctctcaggctgtgttggaaggtagccttggctccacacgcttgaatgtggggagtggaagcagggtggcctcagtcacacgtgcagggttcacagttagagcacagcaacaacaagtgaatggtggtgaggtacaaagtagccgtagggcagtgctttcacttgttgctgctggtttgaccactggctcttttgttcaagctgtgcttgctgatgcc

SEQ ID NO: 239918 - DNA, 368 bp, Glycine max
  unsure (1)..(368): unsure at all n locations
ggcgcctctgcttgcaagagtgaaaaccttctcttacccttctctcaagtttcaagagatttcatcatggctccaaagaaggacaaggctccaccaccttcctccaagcccgccaaatctggcggtggcaagcagaagaagaagaagtggagcaagggaaagcaaaaggagaaggtgaacaatatggtgctgtttgatcagggcacctatgacaagctcctttctgaagctcccaaatacaagctcatcactccttccattctctctgatcgtttgaggattaatggatcacttgcaaggaanggctatagagaattgatggcaagaggttctatcangatggtgtctgcccatgcaagtcagcaaat

SEQ ID NO: 239919 - DNA, 375 bp, Glycine max
gactcaccacttcaaaacactcataacacacagcacaaagcaaagctcatccttgagttaaaaaatggcagcagcttcttccatggctctctcatccccatccttggctggcaaggccgtgaagctgggcccatcagccccagaagtgggaagggtgagcatgaggaagaccgtcaccaagcaggtctcctcaggaagcccatggtacggcccagaccgagtcaagtacttgggcccattctctggagagcccccgtcctacctaaccggtgagttcccaggcgactatcgctgggacactgctgggctttccgcagacccagaaaccttcgccaagaaccgtgaactcgaagtgatccactccaggtgggccat

SEQ ID NO: 239920 - DNA, 379 bp, Glycine max
gactacaaatcagttttttacttgaattttcttcatccttctctgttctcctagaacttgattacttgaacattccctatgacagatgacgtggttcttctggatttctggccaagtccatttgggatgagggtcaggattgcacttgctgaaaagggtatcgaatatgagtacaaagaagaggacttgaggaacaagagtcctcttctcttacaaatgaatccggttcataagaagattccggttcccatccacaatggcaaacccatttccgaatccctcattgctgttcagtacattgacgaggtttggcatgacagaaatcccttgttgccttcagacccttaccagagagctcacgctaaattctgggctgatt

SEQ ID NO: 239921 - DNA, 372 bp, Glycine max
  unsure (1)..(372): unsure at all n locations
ggaaaatctagtttcttacaaggctctactctactgcttcaccttctgctctagaaaattcagtggtgatacatggcttcggctactctctctgtagccaaaccagcccttcaggcaaatgggaaaggcttctctgaattctctggcctccgcagctcatcaggcttccttcccttttctagaaaatcttcagaggatttccattctgtcattgccttccagacctatgcagttggaagcagtggaggatacaagaagggtgtgacagaagcaaaactgaaggttgccataaacggatttggaaggattggaaggaacttcttgangtgctggcacggtcgcaaagactcccctcttgatgtcattgccatc

SEQ ID NO: 239922 - DNA, 311 bp, Glycine max
gagttcggtggagggagggagccgtagcagcggaagctctagcttgggtagcgaatcacaatggcgagaggattaaagaagcatctgaagaggcttaatgccccaaagcattggatgcttgacaaactgggtggtgcatttgctcctaagccctcatctggaccacacaaatcgagggaatgcctgccactcatactcattttgcgaaaccggctgaagtatgctctaacataccgtgaagtcattgctattctgatgcagcgacatgtccttgttgatggcaaagtcaggactgacaaaacataccctgc

SEQ ID NO: 239923 - DNA, 282 bp, Glycine max
gactcaccacttcaaaacactcataacacaaagcacaaagcaaagctcatccttgagttaaaaaatggcagcagcttcttccatggctctctcatccccatccttggctggcaaggccgtgaagctgggcccatcagccccagaagtgggaagggtgagcatgaggaagaccgtcaccaagcaggtctcctcaggaagcccatggtacggcccagaccgagtcaagtacttgggcccattctctggcgagcccccgtcctacctaaccggtgagttcccagg

SEQ ID NO: 239924 - DNA, 341 bp, Glycine max
gatgccgaaaagtagtaccaagatggcttcagttgtgtatctcctctttggcttccatctcattgttatcatgtcaagttccttacccgcaactagtgaagtgtttgcaaaacagtatccatccacagaacccgtggaagaaaaactcacccaactccacttctatttccataacaacataacgggggaacacccaactgctatgaaaactgttttgcctcctaaggggtccattcatggttttggggctacttacatgatggatgaccctctaactgaaggaccaagtccaacttcaaagcttgtgggaagaaatttcctttgcccaaaagtgggggggg

SEQ ID NO: 239925 - DNA, 246 bp, Glycine max
ggtctcatctcacgccacccaaagttgtctttcgacctttctctctcaaaacctttgcttttgcgttggctatatatatataaaactaacttccccaaaacccaatcatatatcatttcatttcttttttctcgtccatccgtaaccatgtctcagactgttgtcctcaaagttggtatgtcatgtgaaggatgtgttggagcagtgaagagagttttaggaaaattggatggtgtggaatcatat

SEQ ID NO: 239926 - DNA, 259 bp, Glycine max
gacttatctaaaagtagatggtccagattactaccacataaatggacaaatagaataactgaatatcgtatagctcaaaataaagatttaaccaaatgcaattcatatgaaaaaagccaattaattctttacaaagaacaacaagtaaacgcattataccaaataattagacaacaatatatatacgatcttttatcctataattttatcaattatgcagataagaaagactcatatatttatggatatagatccctat

SEQ ID NO: 239927 - DNA, 304 bp, Glycine max
ggcccattcaccgaggcaatgcagatagagttactgagtttccgagattaccagttgactcattgattcaacatgggaagatgctaagagagttaacgacgtatcacctcatgaatgcgtaaacgtctaagcttaagagttcaagcgttatggaactacggaacttcatgaatggagtgatattgtcaaaatttcaggatttagcgacttagcatcatgagatgcagaatggtacgacagtatggctgcctcaatggctcgaaatatcaagttgacatgtggtcgtggcgttcgagatgatcaa

SEQ ID NO: 239928 - DNA, 345 bp, Glycine max
ggtctacagacattatgtacatgtcctttttaggcaccttagccatgagggagatattttggaagacccagctaatgagcctacaaaggacatgtacataatgtctgtagaccctgatgactcacctgatcaaccagaacatgtgcaaattgggatagagtcagggcttcctgtttcagtgaatgggacgaggctttcatcaacatctttacttgctgagctcagtgagattggtggactgcatggaattggcagggtcgacatgggtcaaaatcggcttgtaggtatgaatagccgtggagtgtaccacactccaggaggaaccattctggggtttttttttgg

SEQ ID NO: 239929 - DNA, 374 bp, Glycine max
ggcttcgcctcattttctggctaaccaaccctgacactccttcttctccgcttcctcttcgatcatcgcttcagaatgccgccgaagttcgacccctcccagatcgtcgacgtcttcgtacgcgtcaccggcggtgaggtcggcgcggcgagttccctcgccccgaagatcggtcccctcggtctctcccccaagaagatcggagaagatatcgccaaggaaaccgccaaggactggaagggcctccgcgtcaccgtcaagctcagcgtgcagaaccgtcaggccaatgtcacggtggtcccatccgccgccgcgctcgtcatcaaggccctcaaggagcccgagcgtgaccgcaagaaaacgaagaacatcaa

SEQ ID NO: 239930 - DNA, 309 bp, Glycine max
gaaacacaccacaccttcaaaccctaaccctagaagaagaaaaaaaccacaaccaccaccatctagggtttttctttttctcatggctagtttgtcaactaggattttcttcatcatgtcccttgtgtgcctggctctcggtccaatggcacaaggggaaatgacatgtggccaggttgtgagcaacctgaccccatgcatctcccatgtggtgtatggtggaaccaatgttcctgaacagtgtcgcactgggataagagatctctatggcatggctcagaccaaacctataccgccaagctgtttgca

SEQ ID NO: 239931 - DNA, 313 bp, Glycine max
gacaacacagaacaaaaacaaagaaaaaaaaaaacccttagccaacacaaccatcatggccacctctgctattcagcaatcagcattcactggtcaaactgctctgaagcagctcaatgagttcgtccgcaagaccggtggcgccggcaaaggtcgcactaacatgcgccgcaccgtcaagagtgctcctcagagcatttggtatggccctgaccgtcccaagtacttgggtccattctcggagcagattccatcatacctgaccggagaattccctggtgactacggatgggacactgctggattatcagcc

SEQ ID NO: 239932 - DNA, 307 bp, Glycine max
ggtgctctgctcgtgcctctagggttatcatttctccatttccattttctctctcacttttcaagaatcgtaagctatgggaaagtcttacccaactgtgagtgctgattaccagaaggccgttgagaacgcgaagaagaagctcagaggcttcatcgctgagaagagatgcgctcctctaatgctccgtttggcatggcactctgctggaacctttgacaagggcacgaagaccggtggacccttcggaaccatcaagcaccctgccgaactggctcacagcgctaacaacggtcttgacatcgct

SEQ ID NO: 239933 - DNA, 259 bp, Glycine max
gacagcacagcactctttgcaacacaacaaaaaaagacaacacagagagaagcgtcttaataaacgctcttctctgaaaaacctgatttcttctcttcttctcttctctttcgtttcgatcttcgatctctgaaaatgagagagtgcatttcaatccacatcggtcaggccggtattcaggtcggaaacgcctgctgggagctctactgcctcgaacacggcattcagcctgatgggcagatgccaagtgataagactg

SEQ ID NO: 239934 - DNA, 362 bp, Glycine max
ggatttaaccatgtatattgcactttgcagcatagagtttgactgcgatgatgatttgtttgctactgctggagtttcccggcgcatcaaagtttttgacttttctgctgttgtgaatgaacctacagatgctcactgtcctgttgtggagatgtctacacgttcaaaacttaattgcttgagttggaataaatatgctaagaatcaaatagctagtagtgattatgaaggaattgtgactgtttgggatgtaaccactcgaaagagtttaatggaatatgaagagcatgaaaagcgtgcatggagtgttgatttttcaagaacagatccctctatgcttgtatctggtagcgatgactgta

SEQ ID NO: 239935 - DNA, 316 bp, Glycine max
ggcgtacacagcctcaacaaccctaacgcgtgcagagcagagagagacgcagccatggggcgaagacccgcgaggtgttataggcaaattaagaacaaaccataccccaagtcacggttttgccgtggtgttcctgatcccaagatcaggatttacgatgttggtatgaagaagaagggtgttgatgagtttcctttctgtgtccatctggttagttgggagaaggaaaacgtttctagtgaggccctggaagctgctcgtattgcttgcaacaagtacatggccaaatttgctggaaaggatgctttccaccctt

SEQ ID NO: 239936 - DNA, 290 bp, Glycine max
ggcagttcaattccaatatattccattctctctgtgtatttccctacctctcccttcaagatgcagatcttcgtcaagaccctcaccggcaagaccatcacccttgaggtggaaagctctgacaccatcgacaacgtcaaggccaagatccaggacaaggaaggaatccccccggaccagcaacgtctcattttcgcccggaaagcaacttgaggacggccgtacccttgctgactacaacattcagaaggagagtactcttcacctcgtcctccgtctccgtggtggcc

SEQ ID NO: 239937 - DNA, 305 bp, Glycine max
gagggttacacgccgtcgtcgctgtttttgtgtgtcgcttcttcgtaagtgcagctgcaatggtgaagggacgccaatgagaacgtgtcagactctacgtgaggggtacaatccttggatacaaaaggtccaagtcaaaccagtatccaaatacatccctgatccaaattgagggtgtgaatgccaaagaagaagtagcatggtatgctggcaagaaaatggcctatatctacaaggctaaggtgaagaagaatggaagccattaccgctgcatatggggcaaggttacaaggcctcatggtaac

SEQ ID NO: 239938 - DNA, 303 bp, Glycine max
ggttgttgttttcagtgtactggaagaatcactcccttatccatttccacaccacaccatggcctcaagcaacgctctctcttcagcctccattctacgctctcccaaccgccagtctctgacccgaggagcgaaccatactggaagagtaaattaccggaaaccgaataaccgtttctccgtgaaagcctccgccaaagagattgcctttgaccagcattcccgctctgctatgcaggccggcattgacaagctcgccgacgctgttgggctcactcttgggcccagagggaggaatgttgt

SEQ ID NO: 239939 - DNA, 302 bp, Glycine max
gatgccgaaaagtagtaccaagatggcttcagttgtgtatctcctctttggcttccatctcattgttatcatgtcaagttccttacccgcaactagtgaagtgtttgcaaaacagtatccatccacagaacccgtggaagaaaaactcacccaactccacttctatttccataacaacataacgggggaacacccaactgctatgaaaactgttttgcctcctaaggggtccattcatggttttggggctacttacatgatggatgaccctctaactgaaggaccaagtccaacttcaaagc

SEQ ID NO: 239940 - DNA, 307 bp, Glycine max
ggtttttgtttcccatagcatagaagaagcagaaagagaagcattagcaaaagcaagaagaactagtctaagcagaaatggcctcttcagtgatggcatctgtggccctcaaacctgcccctttcactgttgagaagtcctcagttagaggccttccctccctctcaaggaactcctcttcattcagagttgtggccagtggtggcaagaagatcaagactgacaagccttatggaattaatggtggcatggctttgagggaaggagttgatgcatctggcaggaaaggaaagggaaagggcgttta

SEQ ID NO: 239941 - DNA, 236 bp, Glycine max
  unsure (1)..(236): unsure at all n locations
aatagattcaatctcagcctcgaacaaataaaggatatctctgatcgctctcaagaatttgtggataagctttttgaagaatcaaagaagcttgaagactatgcatcacaggctgaccaaatgcaattgaagagcattgatgagtttaagaaagcatacgaggaacaatcaaaatctgatacagagaaacttattgccaatatgactagtttagtttcagatcacattcnggcgaa

SEQ ID NO: 239942 - DNA, 320 bp, Glycine max
tacgccaaagccctctcttatttccagacgcggcggcttcttcttccgtttttgtctatcggcgtgaacaatggcgacttacgctgcgatgaagcccacaaagcccggcctggaggagccccaggagcagatccacaagataaggatcaccctttcctccaagcacgtcaaaaacctcgagaaggtttgtgcggacttggttcgcggtgcaaaggacaagcgcctcagggttaagggacctgtcaggatgcccactaaggttcttctcatcactaccaggaagtccccttgtggtgaaggtaccaacacatgggacagat

SEQ ID NO: 239943 - DNA, 304 bp, Glycine max
ggggttctcctacagattcttcagcaactgcgattttggatcggaacctcttctgcggcgtagcaatgggacactccaacgtttggaattctcacccaaaaaactacggtcctggttctcgcacttgccgagtgtgtgggaatccacatggattgatcaggaagtatggccttatgtgctgcaggcagtgcttccgtagcaatgccaaggaaattggcttcatcaagtatcgctaaaagagctgttgtcacctacggaccaatattatgttctggcactaggatgttttgaagatgttatgttt

SEQ ID NO: 239944 - DNA, 293 bp, Glycine max
ggtagaatagagagctcctccaattagggtttttgtgatctgcagctacgatgggtaagggaacggggagtttcggtaagaggaggaacaagacccacaccctctgtgtgaggtgtggccgccgcagcttccacctccagaagagtcgttgctctgcgtgcgcttaccccgctgcgcgcaccaggaaatataactggagcgtgaaggccattaggagaaagaccaccggaactggaaggatgaggtacttgcgtaacgtgcctcgcagattcaagagcggcttcagagagggt

SEQ ID NO: 239945 - DNA, 288 bp, Glycine max
gactcatacaatagagaccagcttttgcttctttgtgaacatggagatgaggaaatcatgtggcttcttcttcttgctcctcctccttgtctttgcttcccaggtggtggtgcagacggagggaagagtgtgtgagtcacaaagccacgggttccatggtttgtgtaatagagaccacaactgtgctttggtctgcaggaacgaaggtttctccggtggcaggtgcaaaggcttccgccgccgctgcttttgcaccaggatttgttgagatctcatcaaacactactc

SEQ ID NO: 239946 - DNA, 300 bp, Glycine max
  unsure (1)..(300): unsure at all n locations
ggttccatttctcaacaacttctgctacttcctactccaaccgcacttctgctccgcaattatcatgggcaaggtcaagatcggaatcaacggatttggaagaattggccgtttggttgccagagtcgctctgcaaagagacgatgtggagctcgttgccgttaacgaccctttcattaccaccgattacatgacatacatgtttaaatacgacagtgttcacggacactggaagcatcacgatgtcaccgttaaggacgagaagacccttctcttcggtgacangccagtcactgtttt

SEQ ID NO: 239947 - DNA, 335 bp, Glycine max
gacaatcgaacgggaaaaggcgtcttcataaacgccgcccaaaacttctcatacccttttattcattccattcgtttctagggttttcttttctttgccgagaaaatgagagagtgcatttcgatccacattggccaggccggtatccaggttggaaacgcctgctgggaactctattgccttgaacacggcattcagcccgatggacagatgccgagtgacaagaccgttggcggaggagacgacgccttcaacacatttttcagcgagaccggcgccggaaagcacgtgccccgcgctgtcttcgtggatcttgaacccaccgtgatcgacga

SEQ ID NO: 239948 - DNA, 375 bp, Glycine max
gggagtttcaacattcaacaatggtacctcaagctttgtcagtgcctgcgagttccagcttggctatcgcttctcgcaccagaagtccctcccacctcgtattttctcaaagaaacccgtgctcgatagcttcttccttgccaaacccatatggccattcatcggaagttgggttatcaagtaaaagccgtggctttcctttaaaacatgatgagaaaaatatccatggtgctagtacaagttatggtgcaattgaagccaaggggaatctgccgataactccagcagtgatgactcctggaggacctcttgatctcacatccggttttgttcaggaatcgtataatcttcataggtcagccagtcaattcacaa

SEQ ID NO: 239949 - DNA, 349 bp, Glycine max
ccaggcgtcaggagaagaagacagaagggggaaaaaccgtgtttcactcggatcgcgcattcacaaataaggttgaagagggccctgccggaagaagataaataccgtctttcattttccggcgatctcttttttcttccatcaccgttttccggctatccctaatccttaacagaaatgacgacatcaaggcgccttgcggacaggaaggtggagaagtttgagaaaaacatcaccaaaagaggatttgtgccagacacaaccactaaaaaggggaaagactaccctgttggcccagtgctgctcggtttcttcgtctttgttgtcattggatcatctctcttccaga

SEQ ID NO: 239950 - DNA, 290 bp, Glycine max
gacagctgcaataacaatggctgcctcactagatgctgcagctaccttcatgcgacccaccagcgttcgaatatcctctcgcatcctcatatctacacaatgcatttctaaagcatttggcatgtcacctgctgcaactaacctcacttgctcccttcagcctgatttccaagaacttgctcaagtgtgtgtccacgctaccaaaattgcaagattcgcccttgccacctctgctctcgttgtttctggatcaagtgcacaaagtgttccaatcaggccaaccctcaacc

SEQ ID NO: 239951 - DNA, 90 bp, Glycine max
gccattagataaaattcctcaatatgaaagagacattctaacgactattaaaccagaattactacaatcactaaaaggtggactaactag

SEQ ID NO: 239952 - DNA, 305 bp, Glycine max
gggaatcgttgctatttctcacagttgcactggagtagcagcaagagcttgtggtttagtgggactagaacccactagggttgcagaaatcctcaaagatcggcctttgtggtttcaggattgccgagctgttgatgttctcaatgtgctgcccacagcaaatggtggaaccattgagctgctttatatgcagctatatgcaccaaccacattggctcctgctcgagacttctggttgttgcgctacacttctgttttagaagatggcagcttagtgatctgtgagaggtcacttaaaaatactc

SEQ ID NO: 239953 - DNA, 377 bp, Glycine max
gatccatttctcgcaacaatgcttaacctctctcattccccatttcctcacctccttcaaccgctgctaaattctagggttccgaaatggacgctggcggaaagatcaagaagggcgccggaggtagaaagggcggcggcccaaagaagaagccggtttcaaggtccgtcaaagccggtctccaattccccgtcggaagaattggccgttatttgaagaaaggaaggtacgctcagcgtgtcggtaccggtgctcccgtatacttggctgcagttctcgaatacctagctgccgaggtgcttgagttggctaagaatgccgcacgtgacaacaagaagaacaggattattccaagacacgtgcttttggcagtgagg

SEQ ID NO: 239954 - DNA, 372 bp, Glycine max
ggtcttctccgcccccactcacccaccctccatacacactctctctgagtcggtcgagttgaatcggtgtgagtcagtgaccgagtcgaaccatgtcggacgaagaacaccatttcgaatccaaggccgatgctggagcctccaagacctatcctcaacaagccggaaccatccgcaaaaacggttacatcgtcatcaagggtcgtccctgcaaggttgttgaagtttctacttccaagactggtaagcacggtcatgccaagtgtcactttgttgggattgatattttcactgccaagaagcttgaagatattgtgccctcttctcacaactgtgatgttccccatgtgaatcgtactgattaccagttga

SEQ ID NO: 239955 - DNA, 314 bp, Glycine max
gagcctcagcagaagcagaacgaggagaagcagaaggagcaaaagcaatggcgccgaagaagccgagaaccacgacaaggaaccctgatttggttagggggattggcaagtattcgaggtcgcagatgtaccacaagaggggcatctgggccatcaaggccaaaaacggtggcgttttgccccgccacgatcccaagcccaagcccgaggccccggcccagaagccgcccaagttctactccgcggacgatgttaagaagcccctcgtcaacaagcacaagcccaaacccgcgaaactcagggggggccccttt

SEQ ID NO: 239956 - DNA, 353 bp, Glycine max
  unsure (1)..(353): unsure at all n locations
gatcccaatcagaaaaagttagggtttgtaactttgtcttttgcttgcgaatctgaatcgaatgataatcaatcaatcatcatgtcgtcggcgaagaagatcacactgaagagttcggacggcgaggctttcgaggtggacgaggcggtggcgctggagtctcagacgataaagcacatgatcgaggacgactgcgccgacagcggcatccctctgccgaacgtgacgagcaagatcctggcgaaggtgatcgagtactgcaagaagcacgtcnagggcgcgaatccccgaagacagaccctcccgaggacgattctcaaaaaaaggggccccccccctgtgggggggggggg

SEQ ID NO: 239957 - DNA, 285 bp, Glycine max
ggcctccattcgggactgtaactagccgcagcacgaggagcagcctcaggaggagaaggatgtctcacaggaagttcgagcacccaaggcacggttcactgggatttcttcccaggaagcgtgctgctcgtcacaggggaaaagtgaaggcattccccaaggatgacccatccaaggcacccaagctcactgcattcttgggttacaaggccggtatgactcacattgttagagaggtcgagaagccaggatcaaagcttcacaagaaggaaacttgtgagcctg

SEQ ID NO: 239958 - DNA, 295 bp, Glycine max
ggctcttggctgatatttcctgataagtggacagacgcttaaacagagaaactaacacagatttgcatgcatggggaaaataacgcacattgtagtaattcccagtgcagggtacagccacttcgttcccgttatccacttctcaaagagacttgttgagcttcacccagaaattcacgtcacatgcatcattcccattctggggtctctcccaagtgctgcaaaacccattctccaaacccttccacaaaacatcaacacggttttccttccaccggtgaaccctaatgaccta

SEQ ID NO: 239959 - DNA, 303 bp, Glycine max
tattttagggaggaatttatttcattgctacaaatatggattatttaaaagaataagacatgtatttggatatttcccttcaacttaacaaaaattgaatttttttccatacacgcacgaatagttgaagggaactctccgaagaaaaaatggattatgggagtaacaaaaaaacctgacttgaatgatcctgtattaagagctaaattggctaagggaatgggtcataattattatggagaacctacatggcccaacgatcttttatatatttttccagtagtaattctaggtactattgcc

SEQ ID NO: 239960 - DNA, 344 bp, Glycine max
ggtggttcttgtttgcgagatagaagcgtaagcagcggctaccctaacctcgtcttcctctctactaatttcagctatggccgacgaagctgtggttgttccagatcccacccagatcgatgtcaagctctttaaccgctggagcttcgaggatattgaggttactgacatttcactggttgattacattggagttgcggcatccaagcacgccacatatgttcctcacaccgccggaaggcactccgtgaagcggttcaggaaggcgcagtgccccattgttgagaggctcaccaactctctcatgatgcacggtagaaacaatggcaagaaactcttggctg

SEQ ID NO: 239961 - DNA, 374 bp, Glycine max
gatcgaagaacagcactctggttgccgtgccaccatcttctccaaagttatcatattcgaagagaaaaaaggagtgactgtccaggttgggcaattagggacggaaaaggagaaacacgaaaatgtttttccacatagtactggagcgaaatatgcagcttcatccacgctactttggtcgtaaccttcgcgataatctcgtttccaagcttatgaaagacgtggaaggcacttgcagtggccgacatggatttgtggtggcagttacagggatagagaacatagggaaagggctaattcgtgatggaacagggtttgtgacatttccagttaagtaccaatgtgttgtcttcagaccgtttaagggagagatc

SEQ ID NO: 239962 - DNA, 360 bp, Glycine max
ggcagttcaattccaatatattccattctctctgtgtatttccctacctctcccttcaagatgcagatcttcgtcaagaccctcaccggcaagaccatcacccttgaggtggaaagctctgacaccatcgacaacgtcaaggccaagatccaggacaaggaaggaatccccccggaccagcaacgtctcattttcgccggaaagcaacttgaggacggccgtacccttgctgactacaacattcagaaggagagtactcttcacctcgtcctccgtctccgtggtggcatgcagatcttcgttaagacactcaccggcaagaacataaccctagaggttgaaagctcccgacacatcgat

SEQ ID NO: 239963 - DNA, 376 bp, Glycine max
gggggtggcccccaattcgttccttcaggaagaaccttgcaagcagcagcagtgcttctaagccacctcctgagtctcaggctgagcagcacaacaaggttgctggtaaaaaacctgttgacaactatgctaataataaaggtttgtttgtcaagatcaacatggatggtgttcctatagggagaaaagtggacctcaatgcctatgacagctatgaaaatctctcttccgccgtggacgagctattcagaggtcttcttgctgctcaaagagattcctctgctggtggagttcacaacaagcatgaggaagagaaagcaattacggcgttattggatggaagtggagagtatactcttgtttatgaggataatga

SEQ ID NO: 239964 - DNA, 375 bp, Glycine max
gatcgcatttcatagcactcaccctcattaccaacacgaaagcatagccaaaaccttttttcgaagtctctgattttcctaatggctccggcaaaggcagagaagaagccggcggagaagaagccagcggcggagaaggcaccggcggagaagaagccgaaggcggagaagaagatctcgaaggaaggagggagcgagaagaagaagaagcgcacgaagaagagcgtggagacctacaagatctacatcttcaaggtcctcaagcaggttcaccccgacattggtatttccagcaaggccatgggcatcatgaacagcttcatcaacgacatcttcgagaagctcgcccaggaagcgtcgcgtttggctcgctac

SEQ ID NO: 239965 - DNA, 360 bp, Glycine max
ggagggttattggacacattcttcagcgactgcgtttttggatcggaacctcttctgcggcgtagcaatgggacactccaacgtttggaactctcacccaaaaaactacggtcctggttctcgcacttgccgtgtgtgtgggaatccacatggactgatcaggaagtatggccttatgtgctgcatgcagtgcttccgtagcaatgccaaggaaattggcttcatcaagagcagttgtcaactacggaccaatattgtgttctggcactaagatgttttgaggatgttatgtttgaagaaacttgagactttcttttttcatctaattaattatcagacgtaatttgtggtactaagaat

SEQ ID NO: 239966 - DNA, 286 bp, Glycine max
gggtcgacacaagcgtccgcccagacgttcgacagctgcgaaaagaccacagaatggggaaacactcccctttggcgctgttgttgttgccgcagcaccgaacaacttcccctgttaatcgcgtttcgtttgtgcaatgttttaaaagattgctgacgctgaagacattcaacctcctggtgttgataaaggaactggaatggtcaacgctggttttgcacgtgatgatgctcctaaggccgtgttccccagcattaatgggaaaccacgccatactggtgtaatg

SEQ ID NO: 239967 - DNA, 316 bp, Glycine max
gaagttgcgtgtgatgaaccataaccatgtcagacgatgaacaccacttcgactcaaaagctgacgctggagcatcaaacacatttccccaacatgctggaaccatccgcataaacggttacattgtcaacataaacatgccatgcaatgttgtcgatgtttcaacttccaagactggctagcatggatacgcaaagtgtcacattgttgcaattgacatcttcactgggaaaaaacttgaggataatgtcacatcttcccataactgtgatgttccccatgttaatcgcattgaataccaactcattgacatctc

SEQ ID NO: 239968 - DNA, 373 bp, Glycine max
  unsure (1)..(373): unsure at all n locations
gatccacacctctctctctctctcagaatttctatctatctcttgtttcaatttcaacaacggttactcctttttcgttttgagtttcaatcaagccatcatcatgtctaccgcatcgcaacccaaggccaagaaaacggcgtcgtccaagaagcccctctcccaccctcccttcgccgtgatgatagcagaggcgattgcgagtctgaaagagagaaccggttcgagccaatacgcgataaccaaatacatcgaagggaagcacaaggagttgcctgcaacctacaagaagcttgtcctcgttcatctcaagaaatctgttgctgctggcaagcttgttaaggtgaanaactcctttaagctcgcaccgact

SEQ ID NO: 239969 - DNA, 381 bp, Glycine max
gaccggattgcaaccatgtcgaggagaaaggttagagagccaaaggaggaaaacgtgactctgggcccagctgttagagatggtgaacatgtttttggagtcgctcgcatctttgcctccttcaatgacaccttcattcatgtcactgatctgtctgggagggaaacacttgtccgcatcactggcgggatgaaggttaaagctgacagagatgaatcatctccatatgctgctatgcttgctgcgcaggatgttgctgctagatgcaaggaactgggcataactgctcttcatatcaagctccgtgccacaggtggaaacaagacagagacaccaggtcctggtgctcaatcagctcttcgagcccttgcccgttcagga

SEQ ID NO: 239970 - DNA, 356 bp, Glycine max
ggcacttcaattgcaatcaaattagttcattctctttgcgcagttccctacctctcctttcaagatgcagatcttcgtcaagaccctcaccggaaagaccatcacccttgaggtggaaagctctgacaccatcgacaacgtcaaggccaagatccaggacaaggaaggaattcccccggatcagcaacgtctcatcttcgccggaaagcagctcgaggacggccgtaccctcgccgactacaacatccagaaggagtcaacccttcaccttgtccttcgtctccgtggtggcatgcagatcttcgtcaagactctcactggcaaaaccataaccctagaggtcgaaagctctgaca

SEQ ID NO: 239971 - DNA, 315 bp, Glycine max
gacagagaagggtttcttccgggttcacgtttcacaatcactttttgcgcttctctcactcactcactcatcttcttcctcttcgtgtggttttctttctcgaactcgaacgaagatgcgtgagattcttcacatcgagagatggcaatgcgggaaggagatctgcaccaaattctgggacgtggtgtgcgcggggcaagggatcgattcaacggagaggtagcacagggacaacgagttggaaatcgagcgagtcaacatctacgacaatgaagcgaattgcggaaggttcgtgcctacggtggtgctcatgga

SEQ ID NO: 239972 - DNA, 389 bp, Glycine max
  unsure (1)..(389): unsure at all n locations
gatcgcatttcatagcactcaccctcattaccaacacgaaagcatagccaaaaccttttttcgaagtctctgattttcctaatggctccggcaaaggcagagaagaagccggcggagaagaagccagcggcggagaaggcaccggcggagaagaagccgaaggcggagaagaagatctcgaaggaaggagggagcgagaagaagaagaagcgcacgaagaagagcgtggagacctacaagatctacatcttcaaggtcctcaagcaggttcaccccgacattggtatttccagcaaggccatgggcatcatgaacagcttcatcaacgacatcttcgagaagctcgcncaggaagcgtcgcgtttggctcgctacaacaagaagcccac

SEQ ID NO: 239973 - DNA, 346 bp, Glycine max
gcatcaaatcaaaaaccctaattcccaaattctctcatttttcaagtttcaaccaagaaaagcagcaacaatgtcgggtcgcggaaagggtgggaagggtttaggaaagggaggagcaaagaggcatcgcaaggtgctccgcgacaatatccagggaatcacgaagcccgcgattcggagactggcgagaagaggtggcgtgaagagaatcagtggtttgatctacgaagagaccaggggcgtgctcaagatctttctcgagaacgtgattcgcgatgccgtgacgtacacggagcacgctaggagaaagacagtgacggccatggatgtcgtttacgctctcaag

SEQ ID NO: 239974 - DNA, 339 bp, Glycine max
ggaaacagagagtgatttcagtgagtgatcggtgttcacttgatctcaacaaaatcctcagcgtcaattgaagaagatgccgattagaaacatccccgtccgaaaggctgaagaagcgaatcaacccgacacgttgaaagccgctttggctgaattcaactcaaccttcaacctcctgttcgccggctcaagctccgggaacggcctacaacaagctcaccgacaacggcgctgccaaccctgccggcctcatctccgcctccatcgcccatgcattcgccctcttcgtcgccgtctccgtcggcgccaacatctccggcggccacgtcaaccccgccg

SEQ ID NO: 239975 - DNA, 352 bp, Glycine max
gaggcgcggcgggatcagcacaagattgcaaaatgaagttcaacattgcaaatcccaccactgggtgccagaagaagctggaaatcgatgacgacctgaagcttcgagcattttgggacaagaggatctcccaggaggttcttggtgatgctctgggtgaggagtttaaaggatatgttttcaaaatcaccggtgggtgtgacaaacaaggattccctatgaagcagggagtgctgacccctggtcgtgttcgacttttgctccatagaggaactccttgtttccgtggatatggaaggcgcaatggagagcgtagaaggaagtctgttcgtggttgcattgtcagtccaga

SEQ ID NO: 239976 - DNA, 386 bp, Glycine max
ggatcctttgtattctattcttcaagattcaggtactgcgtttcggaagcagacacagatggctcgtacgaagcaaaccgctcgtaagtccacaggaggaaaggctcctaggaagcagcttgcaaccaaggctgcacgtaagtctgcaccaactactggtggtgtgaagaagccccaccgttatcgtcctggtaccgttgctcttcgtgagattaggaaataccagaagagtaccgagcttttgatccggaagctccccttccagaggctggttcgtgaaattgctcaggacttcaagactgatctgcgtttccagagccacgccgtgcttgcattgcaagaagctgctgaggcataccttgttgggctctttgaggacactaacc

SEQ ID NO: 239977 - DNA, 377 bp, Glycine max
gacatctttcactcgttctctgaaattttaattgacttttctcccctcataaaaaaaacctaccaatggctcccgcaaaggcagagaagaagcccgcggagaagaagccggcagagaaggccccagcggagaagaagccgaaggcggagaagaagatatcgaaggaaggaggaagcgagaagaagaagaagagaacaaagaagagcgttgagacctacaagatctacatcttcaaggtgttgaagcaagtgcaccccgacatcgggatctccagcaaggctacggggatcatgaacagtttcataaacgacatcttcgagaagctcgcccaggagtcatcgcgtctcgctaggtacaacaagaagcccaccattact

SEQ ID NO: 239978 - DNA, 377 bp, Glycine max
  unsure (1)..(377): unsure at all n locations
gggttcttcttagccgtagttttctctcacagccgcagacagagatggaagctgtgtgtggaagtgtttgggtcacatcctctcttccacgctcacccaagtccactctctctctattccgctctactcatcaacacctaacagcatttccttcacaatcccatcttttcttatatcaccctcctccctatgctaatgctaaaaccctccgcgccagaacctcctccaaacccgccattttccttccccacttaattgcttctctggaacaagttgaccagacttacataatggtcaagcccgacggcgtgcaacgtggcctcgtgggagaaattacttctaggtttgagaaganagggtttaagtcaactggcttg

SEQ ID NO: 239979 - DNA, 374 bp, Glycine max
gacccccaaaccctgctgcataggaagaaaccctagcctctcaccctccctgcgacacgatgcagatcttcgtgaaaaccctaacgggtaagacgatcacccttgaggtggagtcttctgacaccatcgacaacgtgaaggccaagatccaggacaaggaaggcatccctccggaccagcagcgcctcatcttcgccggaaagcagctggaggacggccgcaccctcgccgactacaacatccagaaggagtccaccctccacctcgtcctccgtctccgcggtggcgccaagaagcgcaagaagaagacctgcaccaagcccaagaagatcaaacacaagcacaagaaggtcaagctcggcattctccagttc

SEQ ID NO: 239980 - DNA, 363 bp, Glycine max
ggaacctttgcattctatacattcaagattcagcaagtgcgttttggaagcagagaccgaaatacttcgagatggcccgtacaaagcaaactgctcgtaagtcaactggaggaaaagctcccaggaagcagcttgcaaccaaggctgcacgtaagtctgcaccaacaactggtggtgtgaagaagcctcatcgttatcgccctggaactgttgctcttcgtgagattaggaaataccagaagagcactgagctcctaatcaggaagcttcctttccagaggttggttcgtgaaattgcccaggatttcaagactgatctgcgtttccagagccatgctgtgcttgcattgcaagaggctgctg

SEQ ID NO: 239981 - DNA, 339 bp, Glycine max
caaggctgcccagaagaagaagtgaatcgtgcgggctggttcatcaggggatgttggttacaataaatgttggtttcttttctgtactcttgtgtcttcttttctaggtagcttgtttttcggacaaagtttgaagtctccaccatcatctcgcaactgttgttcccagaactgggttcttgatcgacggtggcaaaattgcttttatttatctgtgttttaatgtgttgtgtttgtcggaacccctgattacatttttgttaagcgcagcgagtttcaggactttgctgcgttgtgttgctttggtttattaaatgtcaactttctatttgtagtgtt

SEQ ID NO: 239982 - DNA, 366 bp, Glycine max
gaaggcaagtttcacttcacaactcctcaacacaagaactacagtagtagtagtagcttcacttcactcacaacacagcaatgcccactggcttctctctcatctttgcggcatcacttttccttttgcttctcgattgttgctctgggagttttgttggggtctgctatggaagaagtgctgatgacctccctacacctgacaaggtggcacagttggttcaacttcataaaatcaaatatgtcacgatttatgattctaatatacaggttctgaaggcctttgcaaacactggaattgagcttatgattggggttccaaattcggacttgctttcagtctctcagttccaatctaatgcagact

SEQ ID NO: 239983 - DNA, 383 bp, Glycine max
  unsure (1)..(383): unsure at all n locations
gagccacaccacaagctccttatcgtgtttgcattgcagagagagagagaatggcgaccacacccggtttgtgtggcagtgtgttgttgagcacctcgttcctgaggaagcacgcaatggcatcagtgaacatgagaatgctgaacgctaatgctggtgtttttggcttaaagggagggcgtgganggcgtgtgagtgcgatggcaagttacaatgtgaagctgataaccccagaaggagaacaagaatttgaatgcccagatgatgttttcattcttgaaaaggctgaggaatttggcattgaccttccctactcatgcaaggctggtgcttgctcttcctgtgccggcaaagttgtttctggcaaagtcgnacaatctgat

SEQ ID NO: 239984 - DNA, 385 bp, Glycine max
gactcaccacttcaaaacactcataacacaaagcacaaagcaaagctcatccttgagttaaaaaatggcagcagcttcttccatggctctctcatccccatccttggctggcaaggccgtgaagctgggcccatcagccccagaagtgggaagggtgagcatgaggaagaccgtcaccaagcaggtctcctcaggaagcccatggtacggcccagaccgagtcaagtacttgggcccattctctggcgagcccccgtcctacctaaccggtgagttcccaggcgactacggctgggacactgctgggctttccgcagacccagaaaccttcgccaagaaccgtgaactcgaagtgattcactccaggtgggccatgctcggagcc

SEQ ID NO: 239985 - DNA, 383 bp, Glycine max
gatagggtttttgtcgttgcgactaagagttgctgcttcttccgccactcagcacttcgctccctctgtgcttcaccaaccatggccgaaatcgaagctaccgttccagatccctctcaaatcgacgtcaaacttttcaaccgctggagcttcgacgacgttgaggttactgatatgtctctggctgattacattggagtgtccccgtcaaagcatgctacatatgttcctcacactgctggtaggtactcagtgaagaggttcaggaaggcgcagtgccccattgttgagagactcaccaactctctcatgatgcacggaaggaacaatggaaagaagctcatggctgtcaggattatcaagcatgcaatggaaattattca

SEQ ID NO: 239986 - DNA, 383 bp, Glycine max
ggctgacaagccaatcctttgtgtaggtgctcaaccctagtaagccgcaatggtgaagtactcaagggagcctgacaatccaactaagtcttgcaaggctagaggcgccgaccttagggttcattttaagaacacaagggaaactgcctttgcaatcaggaagttgcccttggtcaaggctaaaaggtacttggaagatgttcttgcccacaagcaggcaattccattcagacgtttttgtcgaggtgttggaaggacagcccaggctaagaatagacactctaatggccaaggacggtggcctgtcaagtcagcaaaattcattcctgatttgctcaaaaatgctgagagcaatgctgaagtgaaaggtttggatgttgatg

SEQ ID NO: 239987 - DNA, 380 bp, Glycine max
gatagcaaaatcgcttctccaatttaatcaccattgtacaacccaattcccttcgtcgttttcgattaagagagcaatggcacgtaccaagcaaaccgctcgcaagtccaccggaggaaaggctccgaggaagcaattggcaaccaaagccgctcgcaagtcagccccggcgaccggcggagtgaagaagccccaccgcttcaggccaggaacggtggctctgagggagattcgaaagtaccagaagagcaccgaacttctgatccgaaaactcccattccagaggctcgtcagagaaatcgctcaggatttcaaaaccgacctccgctttcagagcagcgccgtttcggctcttcaggaagccgcggaggcttatctcg

SEQ ID NO: 239988 - DNA, 249 bp, Glycine max
taatggggagggaaaaagattccacggttctcgagttcggtgcgtcgatgctagcattctcttctgcaactttcgcggggagcttcattcaccatggatgtccgtgccgaggatgctttgttgtttgaaccgtcagtgtttcgcatctctaggaaaactggtaatggaaagcgtcccggaaggggtgcgaaatgcgtttggaaatgtcttgcgcttggtcatcatactcccacggaagccatcgaacga

SEQ ID NO: 239989 - DNA, 314 bp, Glycine max
ggagcgaacaagatattaaggtttttgagtgcggtgcggcgatgctagcactctcttctgcagctttcgccgacagcttcattcaccatggctggacaaaccgagaaggcttttttgaaacaaccaatagtgtttctcaggctcgaataaaactgggaagggaaagcgacccggaaagggtgggaaccgcttttggaaatccaatgggcttggatttaagactcccacggaagccaaccaaggaatctacattgacaagaagtgcgccttcactggcaatgtctccaaccgtggccgtatcttggctggaacat

SEQ ID NO: 239990 - DNA, 145 bp, Glycine max
gtctttaattcttcgtcaaaaaaaaaaaaaaaaaaaaaaaaaaaaaaaaaaaaaaaaaaaaaaaaaaaaaaaaaaaaaaaaaaaaaaaaataaaaaaaaaaaaaaaaaaaaaaaaaaaaaaaaaaaaaaaaaaaggcaactaaaa

SEQ ID NO: 239991 - DNA, 338 bp, Glycine max
ggtggtattttggcagcgacacgtatcttcatcaagaatcgcagaagcagtttccggtgcatcgcatcgtcttccaaaatgaacgacgcagatgtcgcgaagcaaatccagcagatggtgcgtttcatccgccaggaagctgatgagaaagccaacgagatctctgtatctgccgaagaggaattcaatatcgagaagctgcagttggttgaagccgaaaagaagaagatcaggcaagaatacgaacgcaatgagcgccaagtcgaaattcgcaagaagattgagtactcactgcagctgaatgcttctcggattaaagttcttcaagctcaagatga

SEQ ID NO: 239992 - DNA, 313 bp, Glycine max
  unsure (1)..(313): unsure at all n locations
catctgagaactgccaaaagagcaaaatcttttttattgcatggtctccttcggtagcccgcattcgccctaagatgctatatgcaacatccaaggacaggttcagaagggagctgcagggcatccattatgagattcaggcaacagacccaaccgagatggatcttgaagtcctcagagagcgtgcaaactgagcacctacacaagagggttgtgtctaggtgatgtagttaagatatctgaggcctcanggaatgatgttgactgataccctttagttgttctactatgatctctgtctgtttcgcgacat

SEQ ID NO: 239993 - DNA, 306 bp, Glycine max
atggcaaggtcatgagcttactaggccatgagtctcgctaatggaaatctcttttgacaaaaaaaaaaaaaaaaaaaaaaaaaaaaaaaaaaaaaaaaaaaaaaaaagtaaaaaaaaaaaaaaaaaaaaaaaaaaaaaaaacggccgctcaaaaagattcaaacttaaataagcctgaaaggaaagttaaaacccctcaaaaatgttaactaaattcaattcaatggccgttcttttaaaaagtccttaatgggaaaaacctggcgttaaccaaattaaaccccttgtaagaaaatccccttttcc

SEQ ID NO: 239994 - DNA, 385 bp, Glycine max
gatatttctaactcccaacacttccatatcttatcttctcctcctccatctttgaggttctcacggaaacttctgaagatggctggcatagcattcggaagcttcaatgattctttcagtttggcctccatcaaggcctacattgctgagttcatctcaacccttctctttgtttttgctggtgttggttcagccatagcctatgctaagttgacatcagatgcagctcttgatccaactgggttggtagctgttgccatttgccatggttttgctctcttcgttgctgtttctgttggagccaacatttctggtggccatgtcaaccctgctgtgaccttcgggttggctcttgggggccacatcaccatcctcactggtctct

SEQ ID NO: 239995 - DNA, 355 bp, Glycine max
gagtgtgtgcgactttccattcgggcacagcgccaatctctgcagcgccttcgatctagagcacatgacaaagataccaaccaaagctggcattgataggcaatacagtactcgtaaaggtgccagtctgcgaaagcagattaagaagatggaagttagtcagcacaccatatttgatctgtgaattttgtgggaagtatgctgtgacgaggaacgctgtatgaatatggggatgcaaggactgtggtaaactgaaagcaggctgtgcttagacattgactaccgcatgtgctgtgacagtaccgagcaccatcacgacgttgagggagcagactgagagttgagcattttgttg

SEQ ID NO: 239996 - DNA, 366 bp, Glycine max
  unsure (1)..(366): unsure at all n locations
gaatcctctgttgtttctcagccgcctcggctagggttcggaaacgaagaagggttctgttttcttttcgcgatgagggccaagtggaagaagaagcgtatgaggaggctgaagaggaagcgccgaaagatgagacagagatccaagtagtgcgttaaacctagtttgtttccgttgcttttacaattgcttatgttgtcaaataggacacccagttgttagtggcactggtctctcctttttgatgttttgatacattttgttggattttatttcgtcttatgttcttagctgaaaacaatgctgttactgcgtttgcgaatcaacaggatatcttgtttgcatttctgtntctctctttgctac

SEQ ID NO: 239997 - DNA, 373 bp, Glycine max
  unsure (1)..(373): unsure at all n locations
gacaacacagaacaaaaacaaagaaaaaaaaaaacccttagccaacacaaccatcatggccacctctgctattcagcaatcagcattcactggtcaaactgctctgaagcagctcaatgagttcgtccgcaagaccggtggcgccggcaaaggtcgcactaacatgcgccgcaccgtcaagagtgctcctcagagcatttggtatggccctgaccgtcccaagtacttgggtccattctcggagcagattccatcatacctgaccggagaattccctggtgactacggatgggacactgctggattatcagctgnaccggaaaccttcgccaggaaccgggagctggaggtgattcacagcagatgggcaatg

SEQ ID NO: 239998 - DNA, 298 bp, Glycine max
ggggctatggagcactatacttggtttcggctttccctattattataggtatttcagttgttctgattttgttttacaattccctccagtaggaaattgcattccactcaaattcagtgtataatgttacactatattgaaatgagttagtatatcgcaatgttcacctaacatcaaaaaaaaaaaaaaaaaaaaaaaaaaaaaaaaaaaaaaaaaaaaaaaaaaaaaaaaaaaaaaaaaaaaaaaaaaaaaaaaaaaaacctaataacctttcaaaacaattcaacacccctcaatg

SEQ ID NO: 239999 - DNA, 383 bp, Glycine max
ggtgctgttccaagtcccatagcagcgatgggaatcgatcttaatgctgggggtaagagcaaaaagaccaaaagaacagcaccaaaatccaatgacatctacctcaaattacttgtcaagctttatcggttccttgttcgaaggactggcagcaatttcaatgctgttatactcaagcgcttgttcatgagcaaggttaacaagcctccaatttctttgtcaaggttaattaagtatacaaaggggaaggaggataaaattgctgtaatagtggggactgtaactgatgatatcagagtatatgaagttccagcattgaaaattacagcactcaagtttactgagagagcacgtgcaagaatagaaaacgctggtggtgaatg

SEQ ID NO: 240000 - DNA, 381 bp, Glycine max
  unsure (1)..(381): unsure at all n locations
gactcttgtctccccagcattcatattaatatcatgccctccttctgcatccaaaccttcattttgtagtgggtgggggtttctcatttctctgccgttccatggatcgggaaggaggatccaacggcggatcttgctactactccgttctcgggattcgtanggacgcctccttctctgatattcgcactgcctaccgcaaactcgctatgaggtggcacccggacaagtgggctcagaatcctgcaaccgctggcgaagccaagcggcggtttcagcaaatccaagaagcctactcagttctctccgatcagtctaaaggtcaatgtacgatgcggggctctacgattctttggaggaagaagaccaagacttttgtga

SEQ ID NO: 240001 - DNA, 376 bp, Glycine max
ggcagcagcacctttaaacgccgaaggttcatccaatctccgaaggccttcaccggattgcaaccatgtcgaggagaaaggttagagagccaaaggaggaaaacgtgactctgggcccagctgttagagatggtgaacatgtttttggagtcgctcgcatctttgcctccttcaatgacaccttcattcatgtcactgatctgtctgggagggaaacacttgtccgcatcactggcgggatgaaggttaaagctgacagagatgaatcatctccatatgctgctatgcttgctgcgcaggatgttgctgctagatgcaaggaactgggcataactgctcttcatatcaagctccgtgccacaggtggaaacaagac

SEQ ID NO: 240002 - DNA, 379 bp, Glycine max
  unsure (1)..(379): unsure at all n locations
gatgccgaaaagtagtaccaagatggcttcagttgtgtatctcctctttggcttccatctcattgttatcatgtcaagttccttacccgcaactagtgaagtgtttgcaaaacagtatccatccacagaacccgtggaagaaaaactcacccaactccacttctatttccataacaacataacgggggaacacccaactgctatgaaaactgttttgcctcctaaggggtccattcatggttttggggctacttacatgatggatgaccctctaactgaaggaccaagtccaacttcaaagcttgtgggaagatctcanggaatatacgctttggcttcacaacatgagcctgggttgctcatggtgacaaattttctc

SEQ ID NO: 240003 - DNA, 374 bp, Glycine max
gaaggtggttgtggaagaagagatggaggaagcaaagggagtagtgaagcacgtgctcctagctaagttcaaggacgacgtcactccagagcggattgaagagctcatcaaggactatgccaatctggtcaatctcatcccacccatgaagtcattccattggggcaaggatgtaagtgctgaaaacctgcatcaaggcttcactcatgtctttgaatcaacctttgagagtccagaaggcgttgcagagtatgtagctcatcctgcccatgttgaatatgcaaatttgttcctttcctgcttggagaaagtcattgtgattgactataagcctaccgttgttaagctttgattggagaagtaaagcctcgttc

SEQ ID NO: 240004 - DNA, 383 bp, Glycine max
  unsure (1)..(383): unsure at all n locations
gaactcacacttcaactttttcataacacaaagcacaaagcaaagctcatccttgagttaaaaaatggcagcagcttcttccatggctctctcatccccatccttggctggcaaggccgtgaagctgggcccatcagccccagaagtgggaagggtgagcatgaggaagaccgtcaccaagcaggtctcctcangaagcccatggtacgggccagaccgagtcaagtacttgggcccattctctggcgagccccgtcctaactaaccggtgagttccaggcgactacggctgggacactgctgggctttccgcagacccagaaaccttcgccaagaaacgtgaactcgaagtgattcactccaggtgggccatgctcggagcc

SEQ ID NO: 240005 - DNA, 338 bp, Glycine max
gacaacacagaacaaaaacaaagaaaaaaaaaaacccttggccaacacaaccatcatggccacctctgctattcagcaatcagcattcactggtcaaactgctctgaagcagctcaatgagttcgtccgcaagaccggtggcgccggcaaaggtcgcactaacatgcgccgcaccgtcaagagtgctcctcagagcatttggtatggccctgaccgtcccaagtacttgggtccattctcggagcagattccatcatacctgaccggagaattccctggtgactacggatgggacactgctggattatcagctgacccggaaaccttcgccaggaacc

SEQ ID NO: 240006 - DNA, 328 bp, Glycine max
  unsure (1)..(328): unsure at all n locations
ggccacggcattctccggccccattgtcaccgtgaaggtgtttgaagacaacgtgttggtgagggagcttgttgagacgaaaggcgaaggaagagtattggttgttgatggaggaggaagcttgaggtgtgcattgatgggagggaatttggtacagattgcatataacatggggtgggctgggattgtggtgaatggttgcgttagagatgtggatgatatcaatgcgtgtaatattggcgtcaaagccttggcttctcatccactcagatccaacaaaaagcgcactggtgaaaagaatgtccctgtttangttggtggaacattt

SEQ ID NO: 240007 - DNA, 325 bp, Glycine max
gacatagctgagagagaaaggaaaggttaactaagaagcaatacttcaatggccacccttgttgttcataaccaaacttcttctgctcaagatgctgaggctctccaacaggctttcaaaggatggggggctgatgacaaggccattatagcaatactgggtcacagaaatgttcatcagaggcaagaaatcagaaaagcttatgaggagatttaccaagaggatctcatcaaacgccttgagtccgagatctctggtgactttgagagagctatgtaccggtggatgttgcagcctgcggatcgtgatgctgttttggtgaatg

SEQ ID NO: 240008 - DNA, 332 bp, Glycine max
ggtccttctctctctctccctctttctcgtcactagctctgtgcattcttctctcgctctctgccttccatcacactcgggatttcctttcccaagatagtagaagatggcagacactgaggatattcaacctcttgtttgtgacaatggaacaggaatggttaaggctggatttgctggagatgatgccccacgtgctgtgtttcccagcattgtaggtcgtcctcgtcacactggtgtgatggttggcatgggccaaaaagatgcatatgttggtgatgaggcacaatctaagaggggtattttgactctcaagtatcccaatgaccatg

SEQ ID NO: 240009 - DNA, 402 bp, Glycine max
gccgctctctgagaaaaacagatagtgtgggagagagaagagcggaagagaaaatgacgaccaggttcaagaagaacacgaagaagagaggtcacgtcagcgccggacacggccgtatcggaaagcaccgcaagcatcccggaggtcgcggtaacgccggtggcatgcatcaccaccgtatcctcttcgacaagtaccatcctggtttcttcgggaaggtaggcatgcgctacttccacaaacttcgcaacaaattctacaatccgatcatcaacatcgacaagctgtggtccctcctcccccaggaggccaaagacaatgccaccgccgacaaaggcaccttgctcgatgtcaaccaatttcgggttaccttaaaggttttgggtaacaggggtttttccc

SEQ ID NO: 240010 - DNA, 320 bp, Glycine max
ctatagaaacaatgaaagtggacgaatggtgctaaatcaaacctttacaattgaacctatgctgactattggcagcatcaatcctgtgatgtggaatgacgactggacagttgtaacggaagatggaagcctttcagcacagtttgaacacaccattctgataacacctgacggggctgagattatgactcaatgctgaaagatgcaacacttgttatttatggataaaaccacatcgagaaacttcattatttaaatgcaactgatttaattacttctaaaaaaaaaaaaaaagacaaaaaaaaaaaagcggccgctct

SEQ ID NO: 240011 - DNA, 323 bp, Glycine max
gtcgacccgacgcgtcagcccacgcatccgtagaagacgacagaagggggcacccagagaggaggaagctttgagagagagagagggaggagggagagtgttgacgctccatcaagatgggtatttctagggattccatgcacaagaggcgtgccactggtggcaagaagaaggcatggagaaagaagagaaagtatgagcttgggcgtcaggccgcaaacaccaagttatcaagcaacaaaactatccggaggattcgtgttcgaggtggcaatgttaaatggagggcattgaggttggataccggcaattactcatggggt

SEQ ID NO: 240012 - DNA, 318 bp, Glycine max
ggcgtcagaactacgctgaagaatatcatcaccatcaaagtgtttcgttggaaggggaatttggcagatcattggaagaaaatggcgggtggtggaaaggtttcgttcaaagtcacactcacctccgatccaaaattacccttcaaagtgtttagcgttccagaggctgcgccttttactgccgttctcaaattcgccgccgaagaattcaaagtcccgccccagaccagcgctatcatcaccaatgatggtgttggcataaatccccagcagagcgcaggcaatgtcttccttaaacatggttcaaaattgcgcctg

SEQ ID NO: 240013 - DNA, 295 bp, Glycine max
ggagtgaaaccctagctagccacaatgcagatattcgtgaaaaccctaacggggaagacgataaccctagaggtagagtcttcggacacgatcgacaatgtgaaggcgaagattcaggacaaggagggcatcccgccggattagcaacgcctgatcttcgccggaaagcagctggaggacgggcgcacccttgccgactacaacatccagaaggagtccaccctccacctcgtcctccgcctccgcggcggcgccaagaagcgcaagaagaagacctacaccaagcccaagaaga

SEQ ID NO: 240014 - DNA, 317 bp, Glycine max
ggcgcctgatttctcagttctctcacacactcattcggtgctccgaatctcagattctagggttagggttcccaatttctccaccgatcagaaaatgagttcaactggtggttctaccaagggcggaaggggcaagcccaaagcctccaaatccgtttcaagatcgcagaaagctggtctccaattccccgttggaagaatcgctcgattccttaaggctgggaaatacgccgagcgtgttggtgctggtgctcctgtgtacctctctgcagtgctcgaatatctcgctgctgaggttttggaattggctgggaatg

SEQ ID NO: 240015 - DNA, 355 bp, Glycine max
ggaatcgtcttttacttctcagcagcttcggctagggttcagaaacgaaaaagggttcggtgttctgttcgcgatgagagccaagtggaagaagaagcgtatgaggaggttgaagaggaagcgccgaaagatgagacagagatccaagtagtgcgttaaacctagtttgtttctgttgcttttacaattgcttatgttgtcgaatgggacacccagttgttagtggcactggtttctcctttttgatgtttgatacattttgttggattcaagtagtttatgttcgtcttatgttattagctcaaaacaatgttgttactgcttttgctaatcaacatgatttcctaattggcac

SEQ ID NO: 240016 - DNA, 307 bp, Glycine max
gacacaaaaaatttctagagcgagaaagtgagaggagagagaaagtagctgatcctccatggcctccaccaaggaacgcgaaaactttgtctacaccgccaagctcgccgaacaagccgaacgctatgaagaaatggtggaagcaatgaagaatgtggcgaagctgaacgtggaattgacggtcgaggagcggaaccttctgtcggtagggtacaagaacgtggtgggtgctcgtagggcttcgtggaggattctatcgtcgattgaacagaaagaagaagctaaagggaacgatgtgagtgtgaag

SEQ ID NO: 240017 - DNA, 351 bp, Glycine max
ttacaggacaaacgtgaagaagcctgatactgacttcgaattttacaagtgatgatgttgtagcttttagattggtgtgtgctcgcgaagttaatatacagtgcagggtacatttctagagggatcaccacgatcatgagaaatgaagcaatgtttctgtttcttgttggcctttcatcttttgtaatttagattatttaatttactaaatatattaattgtggcagcttaatgttgagtacgtactgcatgtctgatttcaaaagtaatatggatgacttgcttctgccttcattttgccttgatgctaaaaacaagatgacttaagtctataaaatgagtatgttttta

SEQ ID NO: 240018 - DNA, 353 bp, Glycine max
gatttcactcccaaacaaacaaagaagaagttagatttgaaattgaaagagaaacaaacttgggatataagaagaatggctagtggaggaggctatggagacgcgaaccagaaggtagattacgtgttcaaagtggtgctaattggtgattcagccgtggggaagtcgcagatacttgcacgcttcgcgagaaacgagttcagtttggattcaaaggccacaatcggcgtcgagttccaaacgcgcactttggtcattcagcacaagagcgtaaaggctcagatctgggacactgccggccaagaacgatacagagcagttacaagtgcatactacaggggtgctgttggggc

SEQ ID NO: 240019 - DNA, 322 bp, Glycine max
ggcgagagaagttattaaggtttttgagtgcggcggtccaaacactcttctctgcagcttttgcctacaactcccttcaccatggctgaacaaaccgagaaagcttttctgaagcaaccaaaagtgtttctcagcacaaagaagactgggaagggaaagagacctggaaaaggtgggaaccgcttttggaagtccattgggcttggatttaagactcccagggaagccatcgaaggaacctatattgacaagaagtgccccttcactggcaatgtttccatccgtggccgtatcttggctggaacatgtcacagtgctaaga

SEQ ID NO: 240020 - DNA, 316 bp, Glycine max
gatatcagaagctcagacctagggatttcggccgtttgctccccaaaaagggaagaagcagattctgtcctttgaaatcaacaagaaaagatgtcaggtgaagaggtagctgttgcagttgaggtacctgctacttcaattccaggtgagccaatggacatcatgactgctctacagcttgtgctgagaaaatctctggcctatggtggtcttgcacgaggtcttcatgaaggtgccaaggtgatcgagaagcatgctgcacagctctgtgttctagcagaagattgtgaccaacctgattatgtgaaactggtga

SEQ ID NO: 240021 - DNA, 329 bp, Glycine max
gagagttgcatcgactgaaacccctaggaaaaaccccagtttctctctttcactagttccgttcaagttctaaccaagcactcacagtacttttgcttctctcgaggatgtctctacgagtgctgaaccctaacgccgaagtgctgaacaaatcggcggcacttcacatgaacatcaatgccgccaagggtttgcaagatgtcctcaaaaccaacctcggtcccaaaggaaccatcaaaatgctcgttggtggtgctggtgatatcaagcttaccaaagatggcaacactctcttgaaagagatgcaaatccaaaacccgacggcgatt

SEQ ID NO: 240022 - DNA, 329 bp, Glycine max
gactccactcacaactgaaaccaaaactgaaaaaaaaaacaaacaataccataacatggcttcttccaccatcacctcctccttcctaacatcacccccttcatctctcttcaacaaatcatcatccccttccttccatgccacccctactctccgccccctcgcgccacgcgcctccatgtccgcctcagcgccgccctacgacttcggatcgttccggttcgatccgattagagagtcgattgtgtcgcgcgagatgacccgcaggtacatgatcgacatggtcacccacgccgacaccgacgtcgtcatcgttggcgcgggctccg

SEQ ID NO: 240023 - DNA, 344 bp, Glycine max
gatatacctctctcatttcccaacgcagcagcagcggcagcttcatctgtttttctgcatcggcgtgaacaatggcgacgtacgctgcgatgaagcccaataagcctggcttggaggagtcccaagaacagatccacaagataaggatcaccctttcctccaagcacgtcaaaaatctcgagaaggtttgtggggacttggttcgtggtgcaaaggataagaggctcaaggttaagggacctgtcaggatgcccactaaggttcttcacatcactaccaggaagtccccctgtggtgaaggtaccaacacatgggacagatttgaacttcgtgtgcacaagaag

SEQ ID NO: 240024 - DNA, 333 bp, Glycine max
gatcccaatcagaaaaagttagggtttgtaactttgtcttttgcttgcgaatctgaatcgaataataatcaatcaatcatcatgtcgtcggcgaagaagatcacactgaagagttcggacggcgaggctttcgaggtggacgaggcggtggcgctggagtctcagacgataaagcacatgatcgaggacgactgcgccgacagcggcatccctctgccgaacgtgacgagcaagatcctggcgaaggtgatcgagtactgcaagaagcacgtcgaggccgcgaatcccgaagacaaaccctccgaggacgatctcaaagcctgggacgccgat

SEQ ID NO: 240025 - DNA, 347 bp, Glycine max
gggggactcatacaatagagaccagcttttgcttctttgtgaacatggagatgaggaaatcatgtggcttcttcttcttgctcctcctccttgtctttgcttcccaggtggtggtgcagacggagggaagagtgtgtgagtcacaaagccacgggttccatggtttgtgtaatagagaccacaactgtgctttggtctgcaggaacgaaggtttctccggtggcaggtgcaaaggcttccgccgccgctgcttttgcaccaggatttgttgagatctcatcaaacactactcttgccatgcaaattaataaatcatagctaggccaaataaattgcatctactcttt

SEQ ID NO: 240026 - DNA, 355 bp, Glycine max
gatcacatttaggatcaaaacaacaaattttcagactcaacaagcttcgaaccaaatcttattgagaaaatgtctggtcatggaaagggtggaaagggtttgggaaagggatgtgccaagaggcacatgaaggttcttcgtgacaacatccagggcatcacgaaacctgcgattcgtacgttaacgataagaggtggcgtgaaaaggatcagtggtttgatctacaatgaaaccatatgagttctgaagatattcttggagaacgtgattcgcgatgctgtgacctacactgaccacgctaggaggaagacggttactgctatggatgttgtttatgctcataagaggcaaggaa

SEQ ID NO: 240027 - DNA, 205 bp, Glycine max
ggaccgcgttcttttctacggagcctcgaccaagaagaatcgcagagagaagagggtcagagtgagaaagagagagagagagagagaaactgagagaaattcgcaaaccctaatttcggaaagatcggcgatggctgcctccaaggatcgcgagaacttcgtctacatcgccaagctcgccgaacaggccgagcgatacgaagag

SEQ ID NO: 240028 - DNA, 316 bp, Glycine max
gaaaatacggaacttgaaaccctcccaatataaaccctcgcttccttgtgtactctctcactttccattctcttcaaacctaacgcagcatcgctattctcttcattccatggctttgcccaaccagcaaaccgtggattaccctagtttcaaactcgttatcgtcggcgatggtggcacaggaaagacaacctttgtgaaaaagcatctcaccggaattcgagaagaaatatgagccaaccatcggtgtggaggttcacccattggattttttcacaaactgtggaaagattcgattttactgctgggatactgc

SEQ ID NO: 240029 - DNA, 317 bp, Glycine max
gacacataatagcacgcaattttcatttttctctctcccttagtcaaagggattcatcgttcttcttcccacgttatttagaaaagcaagatggtgaagatttgctgcattggtgctgggtatgtggggggtcctactatggcagtcattgcacttaagtgcccatccattgaagtcgctgttgttgatatctctaaatcccgcattgcagcctggaacatcgaccagcttcctatctatgaacctggccttgatggtgttgtgaagcaatgccgtggcaagaacctcttcttcagcactgaagttgaaaagcatgt

SEQ ID NO: 240030 - DNA, 343 bp, Glycine max
gacagcgaaacagagagtgatttcagtgagtgatcggtgttcacttgatctcatcataatcgtcagcgtcaattgaagaagatgccgatcagaaacatcgccgtcggaaggcctgaagaggcgactcaccccgacacgttgaaggcggctttggctgagttcatctcaaccttcatcttcgtgttcgccggctcaggctccggcatcgcctacaacaagctcaccgacaacggcgctgccacccctgccggcctcatctccgcctccatcgcccatgcattcgccctcttcgtcgccgtctccgtcggcgccaacatctccggcggccacgtcaaccccgccg

SEQ ID NO: 240031 - DNA, 342 bp, Glycine max
gatccaactctctaaacaacacattaacctttctcattccccatctcctcaccttattcagccactgctaatttctagggttccgaaatggacgctggcggaaagatcaagaagggcgccggaggaagaaagggcggcggccctaagaagaagccggtttcaaggtccgtcaaggccggtctccaattccccgtcggaagaattggccgttatttgaagaaaggaaggtacgcccagcgtgtcggtaccggtgctcccgtttacttggccgcagttctcgagtacctagctgctgaagtgcttgagttggctgggaatgctgcacgtgacaacaagaagaac

SEQ ID NO: 240032 - DNA, 336 bp, Glycine max
gagggttacacgccgtcgtcgctgtttttgtgtgtcgcttcttcgtaggtgcagctgcaatggtgaagggacgccaaggagaacgtgtcagactctacgtgaggggtacaatccttggatacaaaaggtccaagtcaaaccagtatccaaatacatccctgatccaaattgacggtgtgaatgccaaagaagaagtagcatggtatgctggcaagaaaatggcctatatctacaaagctaatgtgaagaagaatggaagccattaccgctgcatatggggcaaggttacaaggcctcatggtaacagtggtattgtccgtgcaaaattcaagtcga

SEQ ID NO: 240033 - DNA, 318 bp, Glycine max; identical to SEQ ID NO: 239438

SEQ ID NO: 240034 - DNA, 277 bp, Glycine max
ggtcaatactttctcgtattttcccctcttcttcccctctctcgtgttatccgctttagttttctcgggaaaatcatggtgaaaggtccaggtctctactctgacatcggcaagagagctcgcgatcttctgttcaaggattatcagaatgaccacaagttcaccatcaccacttacacttccactggagtggaaatcacttcaactggagtcaggaaaggtgaaatatatttggccgatgtcagcactaaggtgaagaacaagaacatcacaactg

SEQ ID NO: 240035 - DNA, 330 bp, Glycine max
ggcagcgcttgatttgaggccaggcaagccccactcaaccaccacacctctcctcgttcacgctacccctttctgctcttcttctacctttcaagttttaaaagtataaagatggcagagacattcctatttacctcagagtcggtgaacgagggacaccctgacaagctctgcgaccaaatctccgatgctgtcctcgacgcttgcctcgagcaggacccagacagcaaagttgcctgcgaaacatgcaccaaaaccaacttggtcatggtcttcggagaaatcacgaccaaggccaacgttgactacgagaagatagtgcgtgacacc

SEQ ID NO: 240036 - DNA, 306 bp, Glycine max
attcccaccattgggtccaccttggagacggtggaggataggaccattagtttcactgtctgggaggttggtggccaggataggattcgtcccttgtggaggcactgcttcgaaaatacacagggtcgcatttttgttgttcacagcaatgacagggagagatttgttaaggccagagatgagttgcacaggattttgattgaggatgaactgggatatgctgtatcgcttgtatttgcgaacagtcactatcttcccagtgcaatgaatgcggcccaaattactgagaacctgggatcccagtct

SEQ ID NO: 240037 - DNA, 332 bp, Glycine max
ggttctcctacagattcttcagcaactgcgattttggatcggaacctcttctgcggcgtagcaatgggacactccaacgtttggaattctcacccaaaaaactacggtcctggttctcgcacttgccgagtgtgtgggaatccacatggattgatcaggaagtatggccttatgtgctgcaggcagtgcttccgtagcaatgccaaggaaattggcttcatcaagtatcgctaaaagagctgttgtcacctacggaccaatattatgttctggcactaggatgttttgaagatgttatgtttgaagaaacttgagacttgtttttttcatct

SEQ ID NO: 240038 - DNA, 387 bp, Glycine max
  unsure (1)..(387): unsure at all n locations
ggcttcgtctcagatcattctgcgcaggtaagacagagagaaagaactgacctcagcggcggcggcggcggcaacagaagaacaaccaccaccacacacaatgggtcgcgtgagaacaaaaacggtgaagaaatcctcccgccaggtgattgagcgttactactcgcgcatgaccctcgacttccacacaaacaaaaagcttctcgaagaagtggccatcatcccttccaagaggctgcggaacaagatcgcgggtttctccacgcatctcatgaagcgcatccagaagggtcccgttcgcggcatctccctcaagctccaggaggangagcgcgagcgccgcatggacttcgtccccgacgtctccgccatcaacaccgaccacat

SEQ ID NO: 240039 - DNA, 341 bp, Glycine max
gatccaactctctaaacaacacattaacctttctcattccccatctcctcaccttattcagccactgctaatttctagggttccgaaatggacgctggcggaaagatcaagaagggcgccggaggaagaaagggcggcggccctaagaagaagccggtttcaaggtccgtcaaggccggtctccaattccccgtcggaagaattggccgttatttgaagaaaggaacgtacgcccagcgtgtcggtaccggtgctcccgtttacttggccgcagttctcgagtacctagctgctgaggtgcttgagttggctgggaatgctgcacgtgacaacaagaagaa

SEQ ID NO: 240040 - DNA, 335 bp, Glycine max
gagagtggtggggtgtgcagaagagcgtcgcagttgtaaccctaatcagaagaagcgcagcttcaagcgagtgacagccaccagccatgggtcgtatgcacagccgcggtaagggtatatcctcttctgctttgccctacaaaaggacacctcctagctggctcaagatctcttcgcaagatgtcgaagaaaatatctgcaagtttgcgaagaaaggtttgaccccgtctcagattggtgtcattctcagagattctcacggtattgctcaggtcaatagcgtcactggcagcaaaatccttcgcatcctcaaagctcacggacttgcgcctgag

SEQ ID NO: 240041 - DNA, 333 bp, Glycine max
gatctcgtggaagtgtaagcaagcaaaaccctagcggcgcctgctttctttgttcgtgttttgcatcaggatggagtctcaggtgaagcacgcacttgttgtcaaagttatgggtcgtactggatccagaggacaagtgacccaggttagagtgaagtttttggatgatcagaaccgtcacatcatgaggaatgtgaaaggacctgtgagagaaggagacattctcaccctactcgagtctgaaagggaagcaagaagattgcgctagatggtctcttttttttggcttgcctccaaattcgaacaaaagcaatatttttcttgatatttaag

SEQ ID NO: 240042 - DNA, 309 bp, Glycine max
ggactgagagcaattgcatcaacaacaaattgaaaggatgtcgatcttcgagtacaacggaagcgccgtggtggctatggtcggcaagaactgcttcgccattgccagcgaccgaaggctcggcgttcagctccaaaccatagccacggatttccaacgcatttccaagattcacgacaagctcttcatcgctctctctggcctcgccaccgatgctcaaacattgtatcagcgtcttgttttccggcacaaactgtatcagcttcgtgaagagagggatatgaaaccagagacctttgccaacttaat

SEQ ID NO: 240043 - DNA, 329 bp, Glycine max
aacaaagaagagcgttgagacctacaagatctacatcttcaaggtgttgaagcaagtgcaccccgacatcgggatctccagcaaggctatggggatcatgaacagtttcataaacgacatcttcgagaagctcgcccaggagtcatcgcgtctcgctaggtacaacaagaagcccaccattacttccagggagatccaaacggcggtgcgtttggtcctccctggggagttggccaagcatgccgtttctgaaggcaccaaggccgtcaccaaattcaccagctcttgattggtttcgtgtgtttatgtcagggttttctgttagcccg

SEQ ID NO: 240044 - DNA, 328 bp, Glycine max
gaacatttgtctctcatctttcaatttcaatcaacggttatacccttttctatttgagcatcatcatgtccaccgcagcgcagcccaaggccaagaaaacggcgtcgtccaagaagcccctctcccatcctaccttcgccgcgatgatagcggaggcgatagcgagtctgaaggagagaaccggttcgagccaatacgcgataaccaaattcatcgaaggcaagcacaaggagttgcctccaacctacaagaagcttgttctcgttcatctcaagaagtctgttgctgctggcaagctcgttaaggtcaaaaactctttcaagctcgc

SEQ ID NO: 240045 - DNA, 318 bp, Glycine max
gatagggtttttgtcgttgcgactaagagttgctgcttcttccgccactcagcacttcgctccctctgtgcttcaccaaccatggccgaaatcgaagctaccgttccagatccctctcaaatcgacgtcaaacttttcaaccgctggagcttcgacgacgttgaggttactgatatgtctctggctgattacattggagtgtccccgtcaaagcatgctacatatgttcctcacactgctggtaggtactcagtgaagaggttcaggaaggcgcagtgccccattgttgagagactcaccaactctctcatgatgcac

SEQ ID NO: 240046 - DNA, 360 bp, Glycine max
ggaagggagaattaggtttttagggtttacaccgagcagcgacacctccctcccgcagtagccatggttctcaaaactgaactatgccgattcagtggtgccaagatctaccccggaaagggcatcagatttgttcgtggtgattctcaagttttcctgtttgccaactcaaaatgtaagcggtatttccacaaccgcctgaagccctcaaagctcacctggactgctatgtacagaaagcaacacaaaaaggacattgctcaagaagctgtgaagaagaggagacgcgctgccaaaaagccttactctaggtccattgttggtgccactctggaagttatccagaaaaagagagctgag

SEQ ID NO: 240047 - DNA, 283 bp, Glycine max
  unsure (1)..(283): unsure at all n locations
taatttgggaattattgctcccatcgccattggtttcattgtcggcgctaacattttgttgggtggggccttctctggagcggccatgaaccccgctgtgacatttgggcctgctgtcgtgagctggacctggaccaaccactggatctactgggccgggcctctcatcggtggtggaatcgctggccttgtttacgaggttgtctttatcagccacacccacgagcagcttcccaccactgactactagagggggggagatgaaaataannnanannaaaaa

SEQ ID NO: 240048 - DNA, 281 bp, Glycine max
gaacagccaaaggacttgcccacgttcattctgttggtggtcccaaatttacacatggaaatattaagtcctcaaatgtcctcctcaaccaagataatgatggctgcatttctgattttggccttgctccccttatgaatgttcctgctaccccttctagaactgcaggttatcgtgctcctgaggtgattgaagcccgtaaacactctcataaatccgatgtgtatagctttggtgtcctccttcttgagatgcttaccgggaaagctcctctccaatct

SEQ ID NO: 240049 - DNA, 305 bp, Glycine max
gaacagcgaaacagagagtgatttcagtgagtgatcggtgttcacttgatctcatcataatcgtcagcgtcaattgaagaagatgccgatcagaaacatcgccgtcggaaggcctgaagaggcgactcaccccgacacgttgaaggcggctttggctgagttcatctcaaccttcatcttcgtgttcgccggctcaggctccggcatcgcctacaacaagctcaccgacaacggcgctgccacccctgccggcctcatctccgcccccatcgcccatgcattcgccctcttcgtcgccgtctccg

SEQ ID NO: 240050 - DNA, 336 bp, Glycine max
ggcagtttcaaattttcttttccttcactttcccgagaaaaaaataacacttttcactttcttcactacgttctcacttcgatatggctcgtacgaagcaaaccgctcgcaagtccaccggtggcaaggcgccacgtaagcagctcgccaccaaggccgctcggaagtccgctccggcgaccggaggagtgaagaagccccaccgcttcaggccgggaaccgtggcgctgagggaaatcagaaagtaccagaagagcaccgagcttctcatcaggaagcttccatttcagaggctcgtgagagaaatcgcgcacgatttcaagaccgatttgcgtt

SEQ ID NO: 240051 - DNA, 309 bp, Glycine max
ggggcttatgaaaaccaaggttgggtccggcccttttagggtttcgtctgagttataaaatacctaattcattgtcctctgtgccgttttcttcttcatcatagtcgtggccgtgtcgcagcaaaaccaaaccacatattaacttgtttgctctaagtcatggctctgatcttgcacgcaaccaaagcaaacaagaatgctttcaagactctgattgcggcagagtacagtggcgtccaagtggaattggcccctaatttcgagatgggtgtctctaatagaactcctgaattccttaaaatgaatccc

SEQ ID NO: 240052 - DNA, 492 bp, Glycine max
  unsure (1)..(492): unsure at all n locations
agggcgaggcaacgtctgaagctcanaggccaataccggtcaggacttcccggctcgacccacgcgtcagcggctgcgagaagacgacagaaggggtaaaacagcagtagccacagatactattctcaatcaacagggacaaaatgtaatatgtgtttatgtagctattggtcaaaaagcatcttctgtggctcaagtggtgaataccttacaagaaagaggagcaatggaatacactattgtagtagctgaaacagcggattctccagctacattacaatacctcgccccttatacaggagcagctctggctgaatattttatgtaccgtgaacgtcacactttaatcatttatgacgatctctccaaacaagcacaggcttatcgccaaatgtctcttctattacgaagaccacctggtcgcgaagcttatccaagggatgttttttaattacattcacgttctttgggaaaaagcgctaaattaatttc

SEQ ID NO: 240053 - DNA, 319 bp, Glycine max
gaaccaagtttgcttgcgtgtatattcattttagcatcaaggttgaatctcagagaaaaagaaacatcgacaagcatgtctggaagaggaaagggaggcaagggtctcggaaagggaagagccaaacgacaccgtaaggttctgagggataacattcagggaatcaccaagcccgcgattcgccgtctggccagacgtggtggcgtcaagcgtatcagtggtcttatctatgaagaaactcgcggtgttctcaagatctttctagagaacgtcattcgcgacgctgtcacctaaactgaacaagctcggcgcaagaacg

SEQ ID NO: 240054 - DNA, 349 bp, Glycine max
gagcatagaagaagcagaaagagaagcattagcaaaagcaagaagaactagtctaagcagaaatggcctcttcagtgatggcatctgtggccctcaaacctgcccctttcactgttgagaagtcctcagttagaggccttccctccctctcaaggaactcctcttcattcagagttgtggccagtggtggcaagaagatcaagactgataagccttatggaattaatggtggcatggctttgagggaaggagttgatgcatctggcaggaaaggaaagggaaagggcgtttacaagtttgtagacaaatacggtgctaatgtcaatggttacagtcctatctacgacac

SEQ ID NO: 240055 - DNA, 347 bp, Glycine max
gacttcacaactcaaactgcttcattgcataattgcagataagatcaacccttctaccttcagattcgcgggaagatggcatcacttcatgctaatgtgacatcagttgtttacaacagtggcaaccgtgtttctcaatcgaaatttgcaagctcttccttcttgtctgggttcgatgttgttggtcgtgcttcaagtgcttggaagaaggaacttgtcccatcttccatttccttggtgcctagagccaccctaacatttgatcccccaactaccaattcagacataaccaagcaaaagaagcacactcttgaccctgcttctccagattttcttcctcgtccttc

SEQ ID NO: 240056 - DNA, 265 bp, Glycine max
gatagcgaaacagagagtggtttcagtgagtgatcggtgttcacttgatccttcataagtcgtcatcatcatcatcatcatcaccgttgattgaagaagatgccgatcagaaacatcgccatcggaaggcctgaagaggctactcaccccgacacgttgaaggcggggttggctgagttcatctccaccttgatcttcgtgttcgccggttcaggttccggcatcgcctacaacaagctcaccgacaacggcgccgccactcccg

SEQ ID NO: 240057 - DNA, 335 bp, Glycine max
ggcacttcaattgcaatcaaattagttcattctctttgcgcagttccctacctctcctttcaagatgcagatcttcgtcaagaccctcaccggaaagaccatcacccttgaggtggaaagctctgacaccatcgacaacgtcaaggccaagatccaggacaaggaaggaattcccccggatcagcaacgtctcatcttcgccggaaagcagctcgaggacggccgtaccctcgccgactacaacatccagaaggagtcaacccttcaccttgtccttcgtctccgtggtggcatgcagatcttcgtcaagactctcactgggcaaaacataaccc

SEQ ID NO: 240058 - DNA, 331 bp, Glycine max
gatgagcagcaagctatggcggaagaaccgaaagttccaccaccttctgatcctccgttaccgtttgatcctagtcggatgattggtatcatcaagagggaggccttgatcaaagacttagctgcggtataccatgctgaatgccttgcatactgtcaagagcttttgggacttcaaactaaatgggaagaggttttcaggtggttgatgcataactcatttagggcgcaaaagatgcaccatctgaggatatacctttttcttgctgctggtgtgtacctgttagtatcagagcacatatttaatgtagtatcgatgtacttttcaaatg

SEQ ID NO: 240059 - DNA, 334 bp, Glycine max
ggaacacttcaacatctcttaataaagattagaaatcgacatatggggggagcaaagagttactcttgttttgcagtaatagctgtggccttggttttgctacttctgaatgtggctgtggtttgcaatggaggcaagacaagcacattcattaggaaagttgagaaaactggggacatgccccttcatagtgatgtatttgttgccccttctggctataatgctcctcagcaggttcatataacacaaggtgaccaagtgggaagggccatgatcgtgtcatgggtgactgtggacgaaccaggaaagagtctagtgcattactggagtgacg

SEQ ID NO: 240060 - DNA, 357 bp, Glycine max
tggttatcatctgcccaatttatatatacagttaaatttgtataaaaataactttttgaaaatattttttttctgtattaacttctatactagtttataaaattagtacttttaataaattaataaggtaatttttttaagggttaaatgttttttctccctaataatttttaaaatttagttttaatctctatgaattttttaactttttagtccctaataaatttatgtttgattaacacacttaatttatttttggtccctaataacattttgaaaaataaaatataataaagtgatttagatagtactatagagaccaagaataaaagaataaacattattagagaccaattt

SEQ ID NO: 240061 - DNA, 353 bp, Glycine max
gacacaccatccgttctagtctcaacttctgctcttccaactcctacaacgcttttctctgcactcatgggcaaggtcaagatcggaatcaacggatttggaagaattggccgtttggttgccagagtcgctctgcaaagagacgatgttgaactcgttgccgttaacgaccctttcattaccaccgattacatgacatacatgtttaaatacgacagtgttcacggacactggaagcatcacgatgtcaccgttaaggacgagaagacccttctcttcggtgacaaggcagtcactgtttttggacacagaaaccctgaagagatccatgggggtcaactggagctgacatc

SEQ ID NO: 240062 - DNA, 383 bp, Glycine max
  unsure (1)..(383): unsure at all n locations
gatccctgctttccttttttgacttagatacttcttatgcaactatagtgaggctaagagttggtgcataattaatcaaaatgttggccatattccacaaagcttttgctcatccacctgaagagctgaacagtcctgcatcttacaaaggttccaagaagcctaaggttcctgaggaaactctcaaagatttcctttcccaccatcctcacaacacttgctccatgagctttggtgaagctgctgtgctagcttatgttcgtcctgatcaatccttctctcgtcatcaaaggttgttttgtgggattgataacatatactgtctcttcttggggagcttgaacaatttgtcnctactcaacaagcaatatggattgtcaaag

SEQ ID NO: 240063 - DNA, 222 bp, Glycine max
gacagcgaaacaaagagtgatttcagtgagtgatcggtgttcacttgatctcatcataatcgtcagcgtcaattgaagaagatgccgatcagaaacatcgccgtcggaaggcctgaagaggcgactcaccccgacacgttgaaggcggctttggctgagttcatctcaaccttcatcttcgtgttcgccggctcaagctccggcatcgcctacaacaagctc

SEQ ID NO: 240064 - DNA, 359 bp, Glycine max
  unsure (1)..(359): unsure at all n locations
gacacaaactttattacagttgttgtattgtaattaagcaagaatattaggcaatggagtcttctagaacttcaactactcttgctctttttttaaccatcaatttgcttttctttgtcatggcaagtggctgctacacttgtacacagcctaagccaaaccctatcccattcccttaccctaaccctagtcctgccgcgaagagctgccccagggacgcacttaagctcggagtgtgcgcaaacgtgcttaatggaccaattggtgctattgtanggtcaccaccggaccacccatgttgctcagtgctagaagggcttcttgatcttgaagttgcggtttgcctctgcactgccatc

SEQ ID NO: 240065 - DNA, 361 bp, Glycine max
gactgcgagagtgtgggagccataaaactgctgcttctcgacccacttttgaagttcaaaacttaaaccctagttctctctctttctttctcctgcatcttcaaccatgtcagcaatgctgcaacctcagatcattctgctcaaggaatgcacggacacttcgcaagggaagccacagctggtgagcaacatcaatgcctgcaccgccgtcgccgatgtcgtccggaccatcctcggacctcgcggcatggacaagctcatccacgacggacaaggaaccgtcaccatctctaacgacggctgcaacatcatgaagctcctcgacatcgtccaacccgctgcaaaaatcctcgccgacatc

SEQ ID NO: 240066 - DNA, 382 bp, Glycine max
gacacactcatttttcttttcactcaaatcatggatttcttgcaagcacaagaaaatcagatacttgtgggtgtggccgtggccgttgtagccattgggcttggtgcagtatatctctattcatccaagaagaccaaaggttgcttggacccagagaactttaaggcattcaaacttgttaagcgtgcacagctgagccataatgttgcaaagttcacatttgcactcccaacacctacatctgttttgggtcttccaattgggcaacacataagttgcaggggtaaagatgctcaaggtgaagaggttatcaaaccatatactcctactactttggattccgatgttggacattttgaactagttattaagatgtacccac

SEQ ID NO: 240067 - DNA, 322 bp, Glycine max
gggatgatgaattgagcaaggcaagatttgagttccgatggatggaccagtttgctttgtcattggatccgatgacagccacgtccttccatgacgaaaccctaccggcagatggtgcgaaagtggcccatttctgctcaatgtgtggccctaaattctgctctatgaagattacagaggatgtgaggaagtatgctgcggaacatggctatggaactgatgaagctttgcagcgtgggatggatgctatgagtgctgaatttcaagctgccaagaagaccatcagtggggagcaacatggtgaagctggtggagagattta

SEQ ID NO: 240068 - DNA, 371 bp, Glycine max
gagtgagagagagagaaggcaagatgtcgaagagaggacgcggtggttcggcggggaacaagttccggatgtcgctgggtctgccggtggcggcgacggtgaactgcgccgacaatacgggggcgaagaacctctacatcatatcggtgaaagggatcaaagggcgtttgaaccgtctcccctcggcttgcgttggcgacatggtgatggccaccgtgaagaaggggaaacccgatctgaggaagaaggttttgccagctgtcattgttcgccagcgcaagccatggcgccgaaaggacggcgtctacatgtatttcgaagataatgctggtgttattgtcaatcccaaaggagaaatgaaaagttctgct

SEQ ID NO: 240069 - DNA, 377 bp, Glycine max
caacataggtcatcgaaaggatctcgaagacccaccaacgcacgaaagccgggatctttcagaaaatggattcctattcgaagggtgcataaccgcatggataagctcacactaacccgtcaatttgggatccaattcggttccttaggaggtatcgggaaggaattttggaatgtaataatatcgattcatacagatacagaagaaagggttctctattgattcaaacgctctacctacgagatagggatagagaaagaggaaaaaaccgaggatttcacatagtacttttggtcgaaaaatcgatctgatttttttcgtacttttcgctcaatgatgaaatgggtcagattctacagggacaaaccttgtgggag

SEQ ID NO: 240070 - DNA, 270 bp, Glycine max
gggccttcattcgggactttcactagccgcatcagcctcaggacgagaatcaggatgtctcacaagaagttcgatcacccaacgcacgggtcactgggatttctccccagaaagcttgctgcacgtcacaagggaaacgtgaatgcattccccaaggatgacccatccaacgcatccaagctcactgcattcctgggttacaacgctcgtatgactcacattgttagagatgtcgataagccaggatcaaagcttcacaacaacgaaaca

SEQ ID NO: 240071 - DNA, 344 bp, Glycine max
gaacggacgattggccatgttctctatgtttggcttccttgttcataccattgtcaccggaaagggtccattggagaacctcgccgatcaccttgctgaccctgtcaacaacaacccctgggcctatgccaccaacttcgtccccggaaagtgagcgtcaaagaacgaaatgacttttgagagtttttagctttgtgtttggtgaagtacttcagataatgtgaattatcttgtgtaaccaaatccaacttaatgttacttgctttttacaacactgtagcagcgcattaagcgcaaaaagctgccgctctaaacgatccaatcttacgtacacgtgcatgcga

SEQ ID NO: 240072 - DNA, 356 bp, Glycine max
gacaacacaacacaacgcgcactctctctttttctctctgttttttgttctctcttcgcttaaaccctatcgttcttctcgttttcgccgattctcgccatgccgaaagctaaatccgacgccaaagccgccgatagcaggttgaagcggaagggcgctggtgctgggaggaagcaatcgaggaaagctgctaaggaccctaacaagccgaagagacctccaagcgctttcttcgttttcatgtccgagttcagagagcagttcaagaaggagcatcctaacaacaaatccgtcgctgttgtcggcaaagctggtggtgaaaaatggaaatcgctatctgatgctgaaaaaggccc

SEQ ID NO: 240073 - DNA, 361 bp, Glycine max
gagcgaaacagagagtgatttcagtgagtgatcggtgttcacttgatctcatcataatcgtcagcgtcaattgaagaagatgccgatcagaaacatcgccgtcggaaggcctgaagaggcgactcaccccgacacgttgaaggcggctttggctgagttcatctcaaccttcatcttcgtgttcgccggctcaggctccggcatcgcctacaacaagctcaccgacaacggcgctgccacccctgccggcctcatctccgcctccattcgccatgcattcgccctcttcgtcgccgtctccgtcggcgccaacatctccggcggccacgtcaaccccgccgtcaccttcggcgccttcgtc

SEQ ID NO: 240074 - DNA, 394 bp, Glycine max
gagaaaccaaaaggctctctcacgcagtcgcagtgagtgaaaaggaaaaccctaattgcggtattctcagtgccttcgagagaaagaaaaaatggcagataatcttgttctccgtggcaccatgcgcgcccacaccgacgttgtgacggcgattgccactcccatcgacaactccgacatgatcgtcaccgcctcacgcgacaaatccatcatcctctggcatcttaccaaggaagacaagacttacggtgtcccccgccgccgcctcaccggccattctcattttgtccaggacgtcgtcctctcttctgacggccagtttgccctatccggctcctgagacggcgagctccgcctctgggaccttgctgctggcacctccgctcgccgcttt

SEQ ID NO: 240075 - DNA, 346 bp, Glycine max
gaacagccacaacactttccacttgtctccgaattagttatcttgagaaacattattcccattgctatatattatggctagcatgaaggttacatgggtggttgtgatcatgtgcatggccgtggtgggtgcaccgatgatggcgcaagccatgacatgcaatgatgtgacggtgaacatggcacagtgcctatcctacctgatgcacggaggaacaccttcaacactttgctgcagcggagtcaagaacattcttggctctgctgtcaccaccgttgacaaacaaactgtgtgcaactgtctcaaggcggatgctgctaggtacaacatcaatgcacagtatgct

SEQ ID NO: 240076 - DNA, 358 bp, Glycine max
  unsure (1)..(358): unsure at all n locations
agcccaggcgtcagacggctgcgaaaggacaagataagggggagtacaacttcagagtttagaagaataccccctcttttgctgcatcagaggagttgtaaattaagagcatggctgcacaagctcttgtatcagcatcttctcttaccttctcagcggacgctgcaagacaaagtcttggaccaagatcactctaatctccatttggcttctcgagaaaagtctcctttcttgttaaggcagctgctacctcccctgtcaagcagggatcagacagacctttgtggtttgcatcaaagcanagtcgttcttacttggatggcagccttccgggtgactatggatttgacccactggg

SEQ ID NO: 240077 - DNA, 350 bp, Glycine max
ggagcataactctttgtttcccacttgacccctaaattcgtgcccattcccacaactgcacattcttctttctatatattccaaatcccttttccgatttccaccaaaatctaaaccgaaattcccaattacccttcccaattttcaccaaaacctaatactcccacaccaatcttcgatcatggacgccgattcacaacctcaacaactcgaagagagaacagaggagcaagaactgaagtacctggaattcgtgcaattcgcgaccatacaggctctgatgcgctgcgccatcctctactcatacgccaaggagcgcgcgggtcctctgaagcccggtgtcgacaccg

SEQ ID NO: 240078 - DNA, 297 bp, Glycine max
ggggttattggacacattcttcagcgactgcgtttttggatcggaacctcttctgcggcgtagcaatgggacactccaacgtttggaactctcacccaaaaaaactaccgtcctggttctcgcacttgccgtgtgtgtgggaatccacatggactgatcaggaagtatggccttatgtgctgcacgcagtgcttccgtaacaatgcgaacggaattggcttcatcaagtatcgctaaaagagcagttgtcaactacggaccagtattgtgttctggcactaagatgttttgaggatg

SEQ ID NO: 240079 - DNA, 395 bp, Glycine max
ggtcctaaatcctcattccagccacacgcttcagaagacatggcctcattgggtgggttacaaaatgtgagcggcatcaattttcttatcaaagagggtccaaaagtcaatgcaaagttcgagctgaagccgccaccatatccactgaatggtttggagccggtgatgagccagcagacacttgagtttcactgggggaagcaccacaagacttatgtggaaaatctgaaaaaacaagttgttgggacagagcttgatgggaagtcactagaagagattattgtcacatcatacaataagggtgacattcttccagctttcaacaatgcagcacaggtatggaaccatgacttcttctgggagtgcatgaaaccaggtggacgtggaaaccatcc

SEQ ID NO: 240080 - DNA, 473 bp, Glycine max
ctcccgaggcgctttcaccggcaaggtaccggtcaggaattcccgggtcgacccacgcgtcagacggctgcgagaagacgacagaagggacatctaatccatggatatttgaacccgagtatccaggaaaaagcaaaatctttgatggaagaacagggaattcttttaaacagcctgctataatgggaaaaccttatattttgaaattaattcatcaagttgatgataaaatacatggacgttccagtggacattatgcacttgttacacaacaaccacttagaggaagggccaagcagggaggacaacgggtaggcgaaatggaggtttgggccttggaaggatttggtgttgctcatattttacaagagatgcctacttataaatctgatcatattaaaactcgccaagaagtactcgggactacgatcattggaggaacaatacctaaacctacagatgctccagaatct

SEQ ID NO: 240081 - DNA, 374 bp, Glycine max
gatgccgaaaagtagtaccaagatggcttcagttgtgtatctcctctttggcttccatctcattgttatcatgtcaagttccttacccgcaactagtgaagtgtttgcaaaacagtatccatccacagaacccgtggaagaaaaactcacccaactccacttctatttccataacaacataacgggggaacacccaactgctatgaaaactgttttgcctcctaaggggtccattcatggttttggggctacttacatgatggatgaccctctaactgaaggaccaagtccaacttcaaagcttgtgggaagatctcagggaatatacgctttggcttcacaacatgagcctgggttgctcatggtgacaaatt

SEQ ID NO: 240082 - DNA, 386 bp, Glycine max
gatcaacatttgtctctcatctttcaatttcaatcaacggttatacccttttctatttgagcatcatcatgtccaccgcagcgcagcccaaggccaagaaaacggcgtcgtccaagaagcccctctcccatcctaccttcgccgcgatgatagcggaggcgatagcgagtctgaaggagagaaccggttcgagccaatacgcgataaccaaattcatcgaaggcaagcacaaggagttgcctccaacctacaagaagcttgttctcgttcatctcaagaagtctgttgctgctggcaagctcgttaaggtcaaaaactctttcaagctcgcaccgactaagtctgctcctgttaaagccgctgctgctcccaagaagcccacaaag

SEQ ID NO: 240083 - DNA, 355 bp, Glycine max
ggaatcgtcttttacttctcagcagcttcggctagggttcagaaacgaaaaagggttcggtgttctgttcgcgatgagagccaagtggaagaagaagcgtatgaggaggttgaagaggaagcgccgaaagatgagacagagatccaagtagtgcgttaaacctagtttgtttctgttgcttttacaattgcttatgttgtcgaatgggacacccagttgttagtggcactggtttctcctttttgatgtttgatacattttgttggattcaagtagtttatgttcgtcttatgttattagctcaaaacaatgttgttactgcttttgctaatcaacatgatctcctatttgcacc

SEQ ID NO: 240084 - DNA, 374 bp, Glycine max
ggatcaaacacagagagcgcagtccaaccctcaaaatgcattcattcggctacagagccaacgcgttgctaacctttgccgtaaccattctggcgcttatgtgcgctatggcttctgtatccgacaacttcaacacccccactccctctgcacaagtccaggttctgaacatcaactggtttcagaaacaacccaatggcaacgacgaggtcagcatgacgatgaatatttccgcagacttgcagtcccttttcacatggaacacaaaacaggttttcgtttttctagctgctgagtatgaaactcctaagaattccttgaatcagatatccctatgggatggtatcattccctctaaagagcatgcaaagttt

SEQ ID NO: 240085 - DNA, 343 bp, Glycine max
gcgagctagagaagttattatggtttttgactgcggcggtccaaacactcttctctgcagcgtttgcctaaatctcgcttcaacatggctgaacacatcgggaaagcttttctgaagcaaccacaagtgtttctcagcactccgaatactgggaatggacagagatctggaaaaggtgggaaccgcttttgaaattccaatgggcatggatttatcactcccattgaagtcatctatcgaatctatattgacaagagttgccccttcactggcaatgtatccatccgtggccgtaacttggctggaacatgtcacactgctaagatgaaccggactattattg

SEQ ID NO: 240086 - DNA, 333 bp, Glycine max
ggttactctcgtggtggtgacggtggtgatggaggctggagaaactagggcttgatgtcgttgattagggtttatgattatgctcagtaattttagttgtgtttgagtttgagtatctttatggttttgtgtcaccgtggttcttgtttttgaccaatatatctggttgtttatagtcgatttaatgaaatgataatcagaaattggagtaaaaaaaaaaaaaaaaaaaaaaaaaaaaaaaaaaaaaaataaaaaaaaaaaaaatcaccaaaataaaaaaagaaaaaaataaaaaaaaaggggccgctcaaaaggttccaaccttacttaccc

SEQ ID NO: 240087 - DNA, 366 bp, Glycine max
gaaggcatttcattagcagcgttaaagaagagagaagaaaaatgcgaaagttcgatccatggcccgttttcttcaagcgcgagtggaaacgcaactggcccttcctcgttggattcgcagtcaccggagctctaatcaccaaactttcccttggccttaccgaggaagatgctaagaattccaaattcgttaaggcgcacaaaaggtgatttctgaatcgtgacatctgcctggctttgcactttatgttaggtttgtcaagattactttgcttgtcttgattttatggattgtaataacagaagagagatgctctagatagtctctttaagtctgtatcccatgttcttattttcagttttgggt

SEQ ID NO: 240088 - DNA, 376 bp, Glycine max
ggagactgtgagcacttagcagagaggaagaaagatgatcatccctgttcgttgtttcacctgcggaaaggtcattggaaacaaatgggatacctatttagaccttctgcagtcagattacagtgaaggagatgccctggatgctttgggactggttcgatattgctgtacgcgcatgcttatgacccatgtcgatctcattgagaagttattgaattacaacactctggacaagtctgatcccagttaagaaggccttagggagcaaaggatgaccaagatgtttcagttgaattccatgctatctggccaatgaacaatcttttttccttttctgaattgttttgctacaagctggtcatggttgtgtgctggt

SEQ ID NO: 240089 - DNA, 383 bp, Glycine max
gaacttgtgacaggaagtgctaagcaatcaaaggatcaaccagctgctcacaacaatggtagcaaatgcaaatcaagtggaaagtcccatcagtctgagtctcaggccaaggggatgaagatgtctgcaccacccaaagaagaggatgagagtggagaagaagaagaagaagatgatgaacagggtgcaacatgtggtgcttgcggtgataattatggcactgatgaattctggatctgttgtgatatgtgtgaaagatggttccatggtaaatgtgttaaaattactcctgctaaggctgagcacatcaagcaatacaagtgccctagctgcagtaacaagagggttagagtttgaaagctctaaacctttggatcaatcac

SEQ ID NO: 240090 - DNA, 328 bp, Glycine max
ggccacataacacacattgaaactaaactccaacaagttcctaccatagtctgaggaaagtgagtgagagaaagagatcgcagacacagagcagaatggcttctacccaatgtttcttgcaccaccatgctcttaccacccctgccagtgccagatccccatcactacgcatcttggttagcaccaagcctaaccagcttgtttgcaaggcacagaaacaacaaacaccacatgaggatattgatgtcagcccaatctctcgccgtttagctctaactgtgctcattggtgctgctgccgttggctccaaagtccaacctgctgatgc

SEQ ID NO: 240091 - DNA, 368 bp, Glycine max
gaaaaacgccacttcctcacgcatttcctcgttttcttcttcttcccttttctctcttctctctctttctccggcgacgatctcagattccggtcactcctctcgccggcgatcccttattcctccgtcctccgtcgagtcctttccgattcgaatcgttcccagccttgtgccaccatgaatcccgaatacgattatttgttcaagcttttgctgattggagattctggtgtaggcaagtcatgtcttctcctgaggtttgctgatgattcataccttgacagctatatcagtaccattggagtggactttaaaatccgcactgtggagcaggatgggaagactattaaacttcaaatttgggacac

SEQ ID NO: 240092 - DNA, 319 bp, Glycine max
gagcgaaacagagagtgatttcagtgagtgatcggtgttcacttgatctcatcataatcgtcagcgtcaattgaagaagatgccgatcagaaacatcgccgtcggaaggcctgaagaggcgactcaccccgacacgttgaaggcggctttggctgagttcatctcaaccttcatcttcgtgttcgccggctcaggctccggcatcgcctacaacaagctcaccgacaacggcgctgccacccctgccggcctcatctccgcctccatcgcccatgcattcgccctcttcgtcgccgtctccgtcggggccaaacatctc

SEQ ID NO: 240093 - DNA, 392 bp, Glycine max
gatagtagatattcattccccttatctttctctcttctctctccccgcccaaaccctaactccctaccctattccgctttctctcatccatcatgaaaggaggaaagtccaagaccgaatctaagagagccgatgccaaacttgctgtgaataagaagggcgccgccaccaagactaggaaacccgccggaaaggggaaggcagcgaaagatcctaacgagccaaagaggcctccaagtgctttcttcgttttcatggaggaattcaggaatgtgttcaacaaggaacatcccgacaacaaagcagtgtctgctgtgggcaaagctgctggagcaaaatggaagacgatgtctgatgctgaacaagcaccttatgtggcaaagtctgagaaa

SEQ ID NO: 240094 - DNA, 392 bp, Glycine max
  unsure (1)..(392): unsure at all n locations
ggcctctagtgcccccgtctcttcctcctctctccgcatcgctgcgttttccgaatcgaaaggtacgcaagtaacaatggtggaggccaagggtaggaaagaggaggtcgtcactcgagagttcaccatcaacctccacaaacgcttgcatggctgcacattcaagaagaaggctcctaaagcaattaaggagataaggaagtttgctcagaaagcgatggggacgaatgatgtgagagtggatgtgaagctgaacaaggctgtgtggagccaggggattcggagcgtcccgaggaggattanggttcgcattgcccganagaggaacgacgatgaggatgcaaaggaagagctatattcccttgttactgttgtcgaaatccccaaagatg

SEQ ID NO: 240095 - DNA, 380 bp, Glycine max
gatccaaattcaagttcgcaccaaattttcctcccaaaatgtcaggccgtggaaaaggtgggaagggtttgggaaagggaggagctaagaggcacagaaaggttcttcgtgacaacattcaaggaatcacgaaacctgcgattcgtaggttagcgagaagaggtggcgtgaagaggatcagtggtttgatttacgaggaaaccagaggagttctgaagatattcttggagaacgtgattcgcgatgctgtaacctacactgagcacgctaggaggaaaactgttactgctatggatgtcgtttatgctctcaagagacagggaaggaccctctatggctttggaggctaaagaatagaatctttaagtttaatgactgtg

SEQ ID NO: 240096 - DNA, 388 bp, Glycine max
gattcgcttcttttcctaacctaaaccctactcattctccatacctcaacgaagaggttaaagagacggcaacactttgctgtccgccttgaccgagcagagcttcgtcttggccctcgattttgccctaaagtactctcagtcacaacagacaccgtcgtcgtcgtcgtcgtcatcaatggcaccgaagcagaccaaggctgagaagaagatcgcttacgatgcgaagctgtgcgacctaatggaggagtacggccagatcctcgttgtgaactccgataacgtgggatcgaaccagctccagaacattcgcaagggtctccgtggcgactccgtcgtcctcatggggaagaacaccatgatgaagcgctcagtcaggatgcacgct

SEQ ID NO: 240097 - DNA, 287 bp, Glycine max
ggcccttcgccgccgcagcatccgaattcctttgctcgctggagtggaccgatggaacactgctcatacactgatcagagtaagtcaacatttactctcgtagatgacgatcagacttttgcaaacgctgtaagattcaccttatctcaagacccaagattgtcattttgtggctacagcattccacagccttcagataatcgtgttaatatcatagtctagacaacaagcgatccatcacgcgaggtgttatacgatgcatttcacgatctgatgcttatgtgcca

SEQ ID NO: 240098 - DNA, 342 bp, Glycine max
gcagctgcgaaaacctagtgcaccgtaagggttgtgaagcaggcagagaagagccatggtgcacgtttctttctaccgaaactatgggaaaacgttcaagaagcctcgtcgtccctacgagaaggagcgtttggacgccgagttgaagctggtcggtgagtacgggcttcgctgcaagagggagttatggagggtccagtacgccctgagccgcatccgtaacaacgccagaaacctattgacccttgatgagaagaaccctcgccgtatcttcgagggtgaagcccttctccgaagaagttccgttacggactcctcgacgagacacagaacaaggctgga

SEQ ID NO: 240099 - DNA, 346 bp, Glycine max
gatgccgaaaagtagtaccaagatggcttcagttgtgtatctcctctttggcttccatctcattgttatcatgtcaagttccttacccgcaactagtgaagtgtttgcaaaacagtatccatccacagaacccgtggaagaaaaactcacccaactccacttctatttccataacaacataacgggggaacacccaactgctatgaaaactgttttgcctcctaaggggtccattcatggttttggggctacttacatgatggatgaccctctaactgaaggaccaagtccaacttcaaagcttgtgggaagatctcagggaatatacgctttggcttcacaacat

SEQ ID NO: 240100 - DNA, 355 bp, Glycine max
gtgtagtataggattctcttctttattccttttgtaatttcattcattcttaatctttgtgataaaatcatgttcatccataattttaaggttaaatgtcctaaagtgaagtacaccgatactgatcattcagtccgtgtataactactaaaccaccgagacttgttcacgagtaacacgaatggcaccgtatcagtggattagtcaaattaaatctgtcagatacgaatttaaaacgaacatccatgttcctaaattaagggtaatgcatgtcggttggggtggtaacaacggctcagtactcaccagtagtgttagtgcgaaccgagagggcatttcatgggctacaaaggac

SEQ ID NO: 240101 - DNA, 380 bp, Glycine max
gacaacacaacgcaacacaacgcgcactctctcttttctctcctaacacaaaaaccctatcgttcttcgcggtttcgccgattctcgccatgccgaaagccaaatccgacgccaaagccgccgatagccggttgaagcgcaagggcgctggtgctggaaggaagcaatcgaagaaagctgctaaggatcctaacaagccaaagagacctccaagcgctttcttcgttttcatgtccgagttcagagagcagtttaagaaggagcatcctaacaacaaatccgtcgctgttgtcggtaaagctggtggtgacaaatggaaatcgctgtctgatgctgaaaagggccccttcgttgccacggccgaaaagaagaaacaagag

SEQ ID NO: 240102 - DNA, 395 bp, Glycine max
ggcctacgcagagagaaattgagtttctgagataaccacttttctctttgattcatcaatggcaaccgcgaggaccgtgaaggatgtttcgcctcacgatttcgtgaaggcttacgcctcccatctcaagcgttccggcaagatggagcttcctgagtggactgatattgtaaaaacagcaaaatttaaggaattggctccatatgatcctgactggtattatgttacggctgcctcaatggcaagaaagatttatttgagaggcggtcttggtgttggggctttccagaggatctatggtggaagcaagagaaatggaagccgtcccccacatttctgcaagagcagtggggctattgcaagacacattctgcaacaattgcaaaacatgagca

SEQ ID NO: 240103 - DNA, 387 bp, Glycine max
gaaggtttggttattacggttttcgctcaccggtgtgcagtcgagcccccgaagaaaaagcgaaaatgccgtcgcacaagacattcagaatcaagaagaagttggcgaagaagatgaggcagaacaggcctatcccctactggatccgcatgaggaccgacaacaccatcaggtacaacgcgaagcgccgtcactggcgtcgcaccaagcttggattctgaggtgcttgctttgcctcggttctgtttatccaattaattagtgttttattttcttgagccaaaaacaatgctttggagattttaatattttgcattttgttccaagactatattgtgtaaggaacttattgtagttcagactaatggtggtgttggtcaccttttt

SEQ ID NO: 240104 - DNA, 275 bp, Glycine max
gaagactgtctctaaggaggaagcgtctgccatcaaggctgctgggaaagcatggtatcacactatggtgtcagattctgattatacagaattcgacaacttttctaagtggttgggtgtttcacagtaaacttcatgatttattttttcgtattagaattttgttttttatgctcatcagaactaaatatccttatctttggtttttttgttttgccggttaaggttgtcatcataattatgcagacaatgtggaaattttgtttgttggattt

SEQ ID NO: 240105 - DNA, 352 bp, Glycine max
ggcagcgcttgagaccaagccccactcaaccaccacaccactctctctgctcttcttctacctttcaagtttttaaagtattaagatggcagagacattcctatttacctcagagtcagtgaacgagggacaccctgacaagctctgcgaccaaatctccgatgctgtcctcgacgcttgccttgaacaggacccagacagcaaggttgcctgcgaaacatgcaccaagaccaacttggtcatggtcttcggagagatcaccaccaaggccaacgttgactacgagaagatcgtgcgtgacacctgcaggaacatcggcttcgtctcaaacgatgtgggacttgatgctgac

SEQ ID NO: 240106 - DNA, 323 bp, Glycine max
gaaatagagaaaacacaaaaagttctgttctttttcccacccaattcagttttctcaaatggctcgtacgaagcaaacggctcgcaagtccaccggcggcaaggcgccacgtaagcagctggccaccaaggcggctcgtaagtctgctccggctaccggcggcgtgaagaagccgcacagattccgtccgggaaccgtagcgctccgcgagatccggaagtaccagaagagcacggaacttctgatccggaagctcccgttccagcgattggtccgtgagatcgcgcaggacttcaagaccgaccttcgatttcagagctccg

SEQ ID NO: 240107 - DNA, 342 bp, Glycine max
ggcagccaaagaaaagaaaatcctcaattttctgagcagccaaacactctctctctgtctctcgaaaattctcagtttgcagagaaaatctgaatcatgtcgtggcaagcgtatgtcgacgatcaccttctgtgtgacatcgaaggtaaccacctcactcacgctgctatcatcggccaagacggcagcgtttgggctcagagtaccgacttccctcagttcaaacctgaggagataactgccatcatgaatgactttaatgagcctggattacttgctccaactggattgtatctcggtggcaccaaatatatggtcatccagggtgaaaccggtgctgtc

SEQ ID NO: 240108 - DNA, 305 bp, Glycine max
tacaactgcgagaacacgatcctacggtatctaaacaacacacactaagttctgttccttttcccacccaattcaattttcgcaattggctcataacgatacatactgatcacaggtcgaccttcggcatagcgttatatcagcagctttccactaaagcggatcgtaagtcttgctccagctaccggccgctttaagaagcctcacagattctgtcccagaaccgtagcgctccgatagatccaggatctacagactagcacggaacttcagattcttaatctcccgttccatcgattggtccc

SEQ ID NO: 240109 - DNA, 392 bp, Glycine max
gtctcaagccacttcagagaaaatggcggtacctctgctctcgaagaagatcgtgaagaagagggtgaagaagttcaagaggcctcagagtgacaggaaaatttccgtcaagacaaactggcgtagaccaaagggtatagattcccgtgttaggagaaagttcaagggatgcactttgatgccaaacatcggttatggttctgacaagaagacccgccactatctccctaatggttttaagaaatttgttgttcacaatgtgaaggacttggaactgctcatgatgcacaacaggacttactgtgctgagattgctcacaatatatccacaagaaagagaaaagatatagttgagagagctgcgcaacttgatgttgttgtgacaaaccaaa

SEQ ID NO: 240110 - DNA, 203 bp, Glycine max
gattgttgttgctattatcatccgcagctgcttttattcgcaccgcaaacagtgagccatggccgtcggaaagaacaagcgcatctccaaggggaaaaagggtggcaagaaaaaggaaccgattccctttgcaaaaaaggattggaagaaaattaagcgccctccggtttcaaatgtgaaatgtttggaaaaacctcgtctct

SEQ ID NO: 240111 - DNA, 350 bp, Glycine max
gacagcactgcactcttcgcaacacaacaaaaaaagacaacccagagagcgcgtcttaataaacgctcttctctgaaaacccccatttcttttcttctttcttcttctctttcgcttcttcgatcttcgatcttcgtcgctgaaaatgagagagtgcatttcaatccacatcggccaggccgggattcaggttggaaacgcctgctgggagctttacgggcctcgaacacggcattcagcctgatgggcagatgccaattgacaagaccgttggtggaggtgatgatgctttcaacaccttcttcagtgaaactggggcaggaaagcatgtgccccgtgcgatttttgta

SEQ ID NO: 240112 - DNA, 359 bp, Glycine max
gagcactcactgcgctaaccccttctctctctctctctgctcggttctccgatcgccgtcttcgccttgcccattcctgatcaatatgtctagaagatatgatagccgtacaacaatcttctcccccgaaggacgtctttaccaagtggagtatgcaatggaggccattgggaatgctggaactgcaatagggatcttgtcaaaagatggggtagttctggttggtgaaaagaaggtcacatccaagctgctgcaaacctcaacctccactgagaaaatgtacaagattgatgatcatgttgcatgtgctgtggctggaattatgtctgatgccaacatcttaatcaatactgctagag

SEQ ID NO: 240113 - DNA, 354 bp, Glycine max
ggagcaaaaccctaatccctatttttcttcctcagtagtgtcatttacgcttctcttctctgcagcaactatgcctaaccctaaggtcttcttcaacatgacaatcggcggtcaatctgctggccgcatcttaatgaacctctacgccaacttaattcccggaaccgccgagaacttccgcgcgctttgcaccggcgagaagggcgtagggcggagcggcaagcccctccactacaagggctcgtccttccaccgcgtgatcccgattttcatgtgtcagggtggcgacttcaccgccggaaacggaaccggcggcgagtcgatttatggcgccaatttcgccgacgagaactt

SEQ ID NO: 240114 - DNA, 320 bp, Glycine max
ggatcaaccctgccgacagtataatccatgtggttgccaaacggcttgtggaaagcagtgtccttgtcttcaaaatggaacctgctgtgagaagtactgtggacgccccaagagctgcaagaatcgatttcgtggctgtcattgtgctaagagtcaatgcagaagccgtcaatgtccatgttttgctgcagatagggaatgtgatccagatgtttgtaggaattgttgggtcagttgtggcgatggtacacttgggattcctagccaaagaggggacaattatgaatgtagaaacatgaagcttcttctcaaacaacagc

SEQ ID NO: 240115 - DNA, 281 bp, Glycine max
gagagtgatccttctacactaactaaagccgagcagcgagagagagaaaccctagcaaaaatgccggctggtcacggtttgagatcccgcaccagagattccttctctcgtcccttcaggaagaagggtaccatcgccctcaccacatacctcagaacctaccacgtcggcgattatgtcgacgtcaaggttaacggcgccgtccacaagggaatgcctcacaagttctaccatggccgcaccggtcgcgtctggaatgtcaccaaacgtgctgttggggt

SEQ ID NO: 240116 - DNA, 375 bp, Glycine max
gatcgttgcttaacactgttcactcactcaaccgttcctttatcttttggattcccttctcattcactttcactttcactccttagcctggttataggagctagggtttatcgagggtttcgttccttcctctctgcaacaacaatggcgaaacctgggcgaggtcgtcgctctccctccggttccgtttccggctcctcctctcgctcctcttccccctccgactctcgttcctcctctcgctcgcgctccctttctcggtcccgtcctccctcgcgctccagatcctcttccccctcctcctcctcttcctcccgaagctcccgcagccgcagccctcccccgcagaggcgccgaagtcctgctgacgcaact

SEQ ID NO: 240117 - DNA, 347 bp, Glycine max
ggccgaaaagtagtaccaagatggcttcagttgtgtatctcctctttggcttccatctcattgttatcatgtcaagttccttacccgcaactagtgaagtgtttgcaaaacagtatccatccacagaacccgtggaagaaaaactcacccaactccacttctatttccataacaacataacgggggaacacccaactgctatgaaaactgttttgcctcctaaggggtccattcatggttttggggctacttacatgatggatgaccctctaactgaaggaccaagtccaacttcaaagcttgtgggaagatctcagggaatatacgctttggcttcacaacatgag

SEQ ID NO: 240118 - DNA, 390 bp, Glycine max
gacccccaaaccctgctgcataggaagaaaccctagcctctcaccctccctgcgacacgatgcagatcttcgtgaaaaccctaacgggtaagacgatcacccttgaggtggagtcttctgacaccatcgacaacgtgaaggccaagatccaggacaaggaacgcatccctccggaccaacagcgcctcatcttcgccggaaagcagctggaggacgggcgcaccctcgccgactacaacatccagaaggagtccaccctccacctcgtcctccgtctccgcggtggcgccaagaagcgcaagaagaagacctacaccaagcccaagaagatcaaacacaagcacaagaaggtcaagctcggcattctccagttccacaaggtccacgatt

SEQ ID NO: 240119 - DNA, 363 bp, Glycine max; identical to SEQ ID NO: 236029

SEQ ID NO: 240120 - DNA, 374 bp, Glycine max
ggcgggttaatatgcagcgataacggttgaaatagaagtttgaataacagtgttttggtgaagctgagaacacaaaggtttagatcacctctgaaattctgctatggcctcaaccagatcactcattccttgtctgttcattcaactgtgcttcgatcttctaccccgctcattcgctcaatcccccgccaccatgtctgccgaaggttacaccatttatggtcgagtgaagatccccagtgtgggaacatcagattatattcttcctggaaaaatttcaaatgtcaaactcatactcaatggtggtcacagagttacttttctgaggcctgatggatatttcgcattccacaatgttcctgccgggacacatc

SEQ ID NO: 240121 - DNA, 362 bp, Glycine max
gattttgcttcatcgtattccacccacctcggaggcctaagccaaagcagatcctgcggacattgtaagtaaatcttatgaagatggagatgataactaatgttaccgagtatgaggcaattgcaaaggaaaaattgccaaagatggtttatgactactatgcatcaggggcagaggatcagtggactttgaaggagaaccgaaatgcattctcaaggattctgttccggccgcgtattcttgttgatgtgagcaagatagacttgactgcaactgtattgggcttcaaaatatcaatgcctatcatgattgctccaacagccatgcaaaagatggctcaccctgaaggagaattagctact

SEQ ID NO: 240122 - DNA, 365 bp, Glycine max
gactcaccacttcaaaacactcataacacaaagcacaaagcaaagctcatccttgagttaaaaaatggcagcagcttcttccatggctctctcatccccatccttggctggcaaggccgtgaagctgggcccatcagccccagaagtgggaagggtgagcatgaggaagaccgtcaccaagcaggtctcctcaggaagcccatggtacggcccagaccgagtcaagtacttgggcccattctctggcgagcccccgtcctacctaaccggtgagttcccaggcgactacggctgggacactgctgggctttccgcagacccagaaaccttcgccaagaaccgtgaactcgaagtgatccactcca

SEQ ID NO: 240123 - DNA, 378 bp, Glycine max
tactcaccacttcaaaacactcataacacaaagcacaaagcaaagctcatccttgagttaaaaaatggcagcagcttcttccatggctctctcatccccatccttggctggcaaggccgtgaagctgggcccatcagccccagaagtgggaagggtgagcatgaggaagaccgtcaccaagcaggtctcctcaggaagcccatggtacggcccagaccgagtcaagtacttgggcccattctctggcgagcccccgtcctacctaaccggtgagttcccaggcgactacggctgggacactgctgggctttccgcagacccagaaaccttcgccaagaaccgtgaactcgaagtgatccactccaggtgggccatgct

SEQ ID NO: 240124 - DNA, 389 bp, Glycine max
gatacctaaaaattgtaccgatatggcttcacttgtgtgtctccttttttccttgcatttcatggttatcatgtcaggttccttaccagcaaatagtgaagtgtttacaaaagagtctcctatgtctctatccacaaaacccgtggaaagactcacccaactccacttttatttccataacaacaaaatgggggaacacccgactgctatgaaaattgttgagcctcctaaggcgtccatttctggttttgggactatttacatgatggatgaccctctaaccgaaggaccaagtccaacttcaaagcttgttggaagatgtcagggaatatatgctgaggcttcgcaacatgaacctgcgatactcatggtaacgaatttgttcttca

SEQ ID NO: 240125 - DNA, 349 bp, Glycine max
gggcatagcaaaatcgtttctccaatttaatcaccattgtacaacccaattcccttcgtcgttttcgattaagagagcaatggcacgtaccaagcaaaccgctcgcaagtccaccggaggaaaggctccgaggaagcaattggcaaccaaagccgctcgcaagtcagccccggcgaccggcggagtgaagaagccccaccgcttcaggccaggaacggtggctctgagggagattcgaaagtaccagaagagcaccgaacttctgatccgaaaactcccattccagaggctcgtcagagaaatcgctcaggatttcaaaaccgatctccgctttcagagcagcgccgtt

SEQ ID NO: 240126 - DNA, 304 bp, Glycine max
gactcaccacttcaaaacactcataacacaaagcacaaagcaaagctcatccttgagttaaaaaatggcagcagcttcttccatggctctctcatccccatccttggctggcaaggccgtgaagctgggcccatcagccccagaagtgggaagggtgagcatgaggaagaccgtcaccaagcaggtctcctcaggaagcccatggtacggcccaggccgagtcaagtacttgggcccattctctggcgagcccccgtcctacctaaccggtgagttcccaggcgactacggctgggacactgct

SEQ ID NO: 240127 - DNA, 360 bp, Glycine max; identical to SEQ ID NO: 238703

SEQ ID NO: 240128 - DNA, 378 bp, Glycine max
gactcaccacttcaaaacactcataacacaaagcacaaagcaaagctcatccttgagttaaaaaatggcagcagcttcttccatggctctctcatccccatccttggctggcaaggccgtgaagctgggcccatcagccccagaagtgggaagggtgagcatgaggaagaccgtcaccaagcaggtctcctcaggaagcccatggtacggcccagaccgagtcaagtacttgggcccattctctggcgagcccccgtcctacctaaccggtgagttcccaggcgactacggctgggacactgctgggctttccgcaggcccagaaaccttcgccaagaaccgtgaactcgaagtgatccactccaggtgggccatgct

SEQ ID NO: 240129 - DNA, 379 bp, Glycine max
gcagcagcatttgaactctactatcgttttctccgttctttctcaaagccgcactcaactttctaaaaccaaatcggtttgaatcctcatttcccgcctctcactggaaagcagcaaaatcacctttctctactatctatctgttccttttgtacgctgagtgggtagaagtcatggtaaggctcactgctgacttgatttggaaaagccctcatttcttcaacacgattaaagagcgtgagttagatctcagaggcaagaagatagctgtaattgaaaacttgggtgctactgaggaccaatttgacacaatagacttatctgacaatgagattgttaaacttgaaaatgtaccatatcttaaccggttgggcacaat

SEQ ID NO: 240130 - DNA, 370 bp, Glycine max
gagggtttttgtcgttgcgactaagagttgctgcttcttccgccactcagcacttcgctccctctgtgcttcaccaaccatggccgaaatcgaagctaccgttccagatccctctcaaatcgacgtcaaacttttcaaccgctggagcttcgacgacgttgaggttactgatatgtctctggctgattacattggagtgtccccgtcaaagcatgctacatatgttcctcacactgctggtaggtactcagtgaagaggttcaggaaggcgcagtgccccattgttgagagactcaccaactctctcatgatgcacggaaggaacaatggaaagaagctcatggctgtcaggattatcaagcatgcaatg

SEQ ID NO: 240131 - DNA, 371 bp, Glycine max
gaggttttctgagttattgttaccatttgctcccagcactgagcttaaccgagcttcacaaagatgaatcgggaaaaattgatgaatatggccggttcggttagaactgggggaaagggcaccgtgagaagaaagaagaaggctgtccacaagacaacaaccacagatgacaaaaggcttcagagcaccctgaagagaataggggtgaatgccatcccggctattgaggaggtcaatatctttaaggatgacgtagttatccagtttctaaatcccaaagttcaagcatccattgctgctaatacttgggttgtcagtggttctccacaaacaaagaagttgcaggatatactccctagcattatccacca

SEQ ID NO: 240132 - DNA, 357 bp, Glycine max
ggaaacagagagtgatttcagtgagtgatcggtgttcacttgatctcatcataatcgtcagcgtcaattgaagaagatgccgatcagaaacatcgccgtcggaaggcctgaagaggcgactcaccccgacacgttgaaggcggctttggctgagttcatctcaaccttcatcttcgtgttcgccggctcaggctccggcatcgcctacaacaagctcaccgacaacggcgctgccacccctgccggcctcatctccgcctccatcgcccatgcattcgccctcttcgtcgccgtctccgtcggcgccaacatctccggcggccacgtcaaccccgccgtcaccttcggcgccttcgt

SEQ ID NO: 240133 - DNA, 368 bp, Glycine max
ggtctattaactcttttttgttgttgtggtgtttcatttgtgaaactaacaacaacacaaggccatcatcatggcagctgcttccccaatggcaagccaactcaagtccaccttcactaggactcttgtagctcccaagggcctctctgcctcttcaccacttcacctcgtgccttctagaaggcaatttagcttcactgttaaggccatccaatcagagaagccaacctatcaagtgattcagccaatcaacggtgacccattcattggaagcctggaaaccccagttacatccagccctttgatcgcatggtacttgtccaacctgcccgcatacagaaccgcagtgagcccactactaagaggga

SEQ ID NO: 240134 - DNA, 366 bp, Glycine max
gacaacacaacgcaacacaacgcgcactctctcttttctctcttaacacaaaaaccctatcgttcttcgcggtttcgccgattctcgccatgccgaaagccaaatccgacgccaaagccgccgatagccggttgaagcgcaagggcgctggtgctggaaggaagcaatcgaagaaagctgctaaggatcctaacaagccaaagagacctccaagcgctttcttcgttttcatgtccgagttcagagagcagtttaagaaggagcatcctaacaacaaatccgtcgctgttgtcggtaaagctggtggtgacaaatggaaatcgctgtctgatgctgaaaaggcccccttcgttgccacgggcgaaa

SEQ ID NO: 240135 - DNA, 411 bp, Glycine max
gcgcccttcttcttgcttgttgccagttgagtctcagcctccttcttcaccggctcttccttctcagataatatcagctcaatgtggcatggagatgacatgtaagggttgattcttcccttagccgttgctctgcttcaacattgcggaagcagaataagcgccgcagctatggtgaagtactccagagaaaccgacaatcccagcacgtcctgcaacgccagaggcgctgacctcagagttcattttaagaacactagggagactgcctttgccatcaggaagttgccccttgttaaagctaaacgatacttagaggatgttttggaccacaaacaggctattcctttccgacgcttttgtggtggtgttgggacgacggcacatgctaagaacagacactccaatggg

SEQ ID NO: 240136 - DNA, 380 bp, Glycine max
gacaacacaacgcaacacaacgcgcactctctcttttctctcttaacacaaaaaccctatcgttcttcgcggtttcgccgattctcgccatgccgaaagccaaatccgacgccaaagccgccgatagccggttgaagcgcaagggcgctggtgctggaaggaagcaatcgaagaaagctgctaaggatcctaacaagccaaagagacctccaagcgctttcttcgttttcatgtccgagttcagagagcagtttaagaaggagcatcctaacaacaaatccgtcgctgttgtcggtaaagccggtggtgacaaatggaaatcgctgtctgatgctgaaaaggcccccttcgttgccacggccgaaaagaagaaacaagag

SEQ ID NO: 240137 - DNA, 377 bp, Glycine max
ggtaataaccggagaaaaatcaagcaccgagtcctcttctctctgtggtcgccgcgactacgcttcttcgaaactcgaggcgcgtgaaaaaagaccttctggatctggatctcgaacgccatggcgttttggagatctctcgtagcgttctctgcggctcttctgcttctcatccatggcgctcactgcttctacctccccggcgtcgctccacaggacttcctgaagggagatcaattgcaagtgaaagtaaataaattaacatcaacaaagacccagcttccatattcatattattcacttccctactgtgccccatcaaaaatacaggatagtgcagaaaatcttggggaagtacttcgtggtgaccgcattga

SEQ ID NO: 240138 - DNA, 373 bp, Glycine max
ggtaataaccggagaaaaatcaagcaccgagtcctcttctctctgtggtcgccgcgactacgcttcttcgaaactcaaggcgcgtgaaaaaagaccttctggatctggatctcgaacgccatggcgttttggagatctctcgtagcgttctctgcggctcttctgcttctcatccatggcgctcactgcttctacctccccggcgtcgctccagaggacttcctgaagggagatcaattgcaagtgaaactagataaattaacatcaacacagatccagcttccatattcatattattcacttccctactgtgccccatcaaaaatagaggatagtgcacaatatcttggggaagtacttcgtggtgaccgca

SEQ ID NO: 240139 - DNA, 377 bp, Glycine max
ggcgcattgaacgaaaattagggtttgtagtgtagcaggaagaagcagcaatggcgccgaagataacacgtaaggttagcagaaaccctgaattgataaggggaatcggaaagtactcgaggtcgcagatgtaccacaagaggggcatttgggctatcaaggccaaaaacggtggcgttttacctcgccacgaccctaaacccaagcctgaagctcctgctgaaaaaccacccaaattttaccctgctgatgatatcaagaagccccttgtcaacaagcacaaaccgaaaccagctaagctcaaggctagcattactcccgggacagtgttgattcttcttgccggtagatttaagggaaagagggtagtctttttg

SEQ ID NO: 240140 - DNA, 350 bp, Glycine max
ggttttgcatttgtcttctttaacttgtcactctctctctctctctaatggcttcattttccatcacctcctcgcctcccacccttcacaaagccactatcaccgacccttcttcttcttcttcccacgccttccctcaccgttctcccttcgttttacgcatgccccaccaaccccatcgccctcaaactcctcttgttttgcccaagattcaatctttgcgcaacgaaactagagctattccagttaccaaagacctgtgggataattcaattctgaaaagtgaaatcccagtccttgttatattctatgcaaattggtgcggcccgtgcaggatggttcaccggata

SEQ ID NO: 240141 - DNA, 378 bp, Glycine max
gacagaaaagaaaaaggaaaccctagctggataggtcaaacatcatcatgtcggacgaagagcaccatttcgagtccaaggcagacgccggtgcctccaaaacctaccctcagcaagccggtaccattcgcaagaacggctacatcgtcatcaaaggacgcccctgcaaggttgtggaagtttcgacttccaaaactggaaagcacggtcacgccaagtgccactttgttggaattgatattttcactgccaagaaacttgaggatattgtgccctcttctcacaactgtgatgttcctcatgtgaatcgtactgattaccagctcattgatattgctgaggatggatttttgagtctgcttactgaaaatgggaaca

SEQ ID NO: 240142 - DNA, 337 bp, Glycine max
gatcccaatcagaaaaagttagggtttgtaactttgtcttttgcttgcgaatctgaatcgaataataatcaatcaatcatcatgtcgtcggcgaagaagatcacactgaagagttcggacggcgaggctttcgaggtggacgaggcggtggcgctggagtctcagacgataaagcacatgatcgaggacgactgcgccgacagcggcatccctctgccgaacgtgacgagcaagatcctggcgaaggtgatcgagtactgcaagaagcacgtcgaggccgcgaatcccgaagacaaaccctccgaggacgatctcaaagcctgggacgccgatttcg

SEQ ID NO: 240143 - DNA, 398 bp, Glycine max
  unsure (1)..(398): unsure at all n locations
gaaaatcacaatccctaattccccaaaattttctctgaagaagaagcaacaatgtctggtcgcggaaagggaggcaagggtttgggaaagggtggagcgaagaggcatcgcaaggtgctccgcgacaacatccagggaatcacgaaacccgcgattcggaggctagccagaagaggcggcgtgaaaagaatcagcggcttgatctacgaggaaaccaggggtgtgctcaagatcttcctcgagaacgtcattcgcgacgccgtcacctacaccgagcacgctaggagaaagaccgtcacggccatggacgtcgtttacgcgctcaagaggcanggaagaaccctctacggtttcggaggctganggcttgggctttttctgggcctggaattgttcct

SEQ ID NO: 240144 - DNA, 359 bp, Glycine max
gaagtatataacttcttctaggtgtccggaaatcgttcctatcatcacttctcaaatctcgaaccctctcgttcgtgccgatcactaggtcacacttcatcaatggcgggtagaggcaaaaccctaggatccagcgccgctaagaaggccacctcaaggagcagcaaagccggcctccaattccccgtcggtcgtatcgccaggttcctcaaggccggaaagtacgccgagcgcgtcggcgccggagcccccgtcgacctcgccgccgttctcgaatatctcgctgctgaggttttggaattggctggaaacgctgcgagagataacaagaagactcgaattgttccacgccacatcca

SEQ ID NO: 240145 - DNA, 389 bp, Glycine max
  unsure (1)..(389): unsure at all n locations
ggccattgaaagaaactgttgaatcgcgtcgattaaggttttgagatttctaggctttcatctcagacagtgaaaaaatgatagatataagtacacttaatgctgcacagattactgtgctgggatctgccttttgtgctatgctttccatgcatttcacgtcgcagttactgtctcagcatctcttttattggaagaatccgaaagagcaaaaggctattatcattatcatcctcatggctccaatctatgcagctgtctcctttgtgggtctcttggatatcagaggaagcaaggagtttttcacctttttggagtcagttaaagaatgttatgaagctttggtcattgccaagtttttggctttgatgtanagttaccttaacata

SEQ ID NO: 240146 - DNA, 397 bp, Glycine max
ggcacctccgtagggtttggttattagggttttcgctcacccgtgtgcagtcgagcctcccgaagaaaaagcgaaaatgccgtcgcacaagacattcagaatcaagaagaagttggcgaagaagatgaggcagaacaggcccatcccctactggatccgcatgaggaccgacaacaccatcaggtacaacgcgaagcgccgtcactggcgtcgcaccaagcttggattctgaggtgcttgctttgcctcgattcagtttatccaattaattagtgttttattttcttgagccaaaaacaatgctttggagtttttaatattttgcattttattccaagactatattgtgtaaggaatttattgtagtacgtttgacgtgggtccatttgcagaaaaa

SEQ ID NO: 240147 - DNA, 389 bp, Glycine max
ggtgctctgctcgtgcctctagggttatcatttctccatttccattttctctctcacttttcaagaatcgtaagctatgggaaagtcttacccaactgtgagtgctgattaccagaaggccgttgagaaggcgaagaagaagctcagaggcttcatcgctgagaagagatgcgctcctctaatgctccgtttggcatggcactctgctggaacctttgacaagggcacgaagaccggtggacccttcggaaccatcaagcaccctgccgaactggctcacagcgctaacaacggtcttgacatcgctgttaggcttttggagccactcaaggcggagttccctattttgagctacgccgatttctaccagttggctggcgttgttgccg

SEQ ID NO: 240148 - DNA, 364 bp, Glycine max
  unsure (1)..(364): unsure at all n locations
gaatcctctgttacctctcagcagcttaggctagggttcagaaacgaaaaagggttcggtgttcagttcgcgatgggagccaagtggaagaagaagcgtatgaggaggttgaagaggaagcgccgaaagatgagacagagatccaagtagtgcgttaatccaagtagttgatttccgttgcttttataattatgttgtcaaattgggcacccagttgttagaggcactggtttctcctttttgatgttttgatacatttttgtttggtttaattcgtcttatgttattagctgaaaacaatgctgttactgcgtttgcgaatcaacatgatctcttatacgaaaaanattttcaacaatttaat

SEQ ID NO: 240149 - DNA, 311 bp, Glycine max
  unsure (1)..(311): unsure at all n locations
gacttctcttcacacctttgttcactcttcttctcttgcggctagggttttagcgcagcttcttctagatttaaggaagatgggtaaggaaaaggttcacatcagtattgtggtcattggccatgtcgactctgggaaatccactaccactggtcacctgatttacaagcttggaggcattgacaagcgtgttattgagaggtttgagaaggaagctgctgagatgaacaagaggtctttcaagtatgcctgggtgctggacaaacttaaggctgagcgtgaaagaggaatcancattgatattgctttgt

SEQ ID NO: 240150 - DNA, 371 bp, Glycine max
gttcacacaaactttattacagttgttgtattgtaattaagcaagaatattaggcaatggagtcttctagaacttcaactactcttgctctttttttaaccatcaatttgcttttctttgtcatggcaagtggctgctacacttgcacacagcctaagccaaaccctatcccattcccttaccctaaccctagtcctgccgcgaagagctgccccagggacgcacttaagctcggagtgtgcgcaaacgtgcttaatggaccaattggtgctattggagggtcaccaccggaccacccatgttgctcagtgctagaagggcttcttgatcttgaagttgcggtttgcctctgcactgccatcaaagccaac

SEQ ID NO: 240151 - DNA, 390 bp, Glycine max
gagaagggagaattaggtttttagggtttacaccgagcagcgacacctccctcccgcagtagccatggttctcaaaactgaactatgccgattcagtggtgccaagatctaccccggaaagggcatcagatttgttcgtggtgattctcaggttttcctgtttgccaactcaaaatgtaagcggtatttccacaaccgcctgaagccctcaaagctcacctggactgctatgtacagaaagcaacacaaaaaggacattgctcaagaagctgtgaagaagaggagacgcgctgccaaaaagccttactctaggtccattgttggtgccactctggaagttatccagaaaaagagagctgagaagccagaagttcgagatgcagctaggga

SEQ ID NO: 240152 - DNA, 388 bp, Glycine max
gactcaccacttcaaaacactcataacacaaagcacaaagcaaagctcatccttgagttaaaaaatggcagcagcttcttccatggctctctcatccccatccttggctggtaaggccgtgaagctgggcccatcagccccagaagtgggaagggtgagcatgaggaagaccgtcaccaagcatgtctcctcaggaagcccatggtacggcccagaccgagtcaagtacttgggcccattctctggcgagcccccgtcctacctaaccggtgagttcccaggcgactacggctgggacactgctgggctttccgcagacccagaaaccttcgccaagaaccgtgaactcgaagtgatccactccaggtgggccatgctcggagccttg

SEQ ID NO: 240153 - DNA, 340 bp, Glycine max
gaaagtggacagaagagagcgtcctagtcgcaaccctaataagaagaaccacagcttcaagcgagtgacatccaccagccatgggtcgtatgcacagccgcggtaagggtatatcctcttctgctttgccctacaaaaggacaccccctagctggctcaagatctcttcgcaagatgtggaagaaaatatctgcaagtttgcgaagaagggtttgaccccgtctcagattggtgtcattcttcgagattctcacggtattgctcaggtcaacagcgtcactggcagcaaaatccttcgcatcctcaaagctcacgggcttgcgcctgaaattccagagga

SEQ ID NO: 240154 - DNA, 422 bp, Glycine max
cccgggtggccccacgcgtcagaataatatactagttaattaaacagcattcattaatcattacgaaacataaaccctgaacatggagatgaggaaatcatgtggcttcttcttcttgctcctcctccttgtctttgcttcccaggtggtggtgcagacggagggaagagtgtgtgagtcacaaagccacgggttccatggtttgtgtaatagagaccacaactgtgctttggtctgcaggaacgaaggtttctccggtggcaggtgcaaaggcttccgccgccgctgcttttgcaccaggatttgttgagatctcatcaaacactactcttgccatgcaaattaataaatcatagctaggccaaataaattgcatctactctttatccatttgggagctagctaccacaaccaactcatac

SEQ ID NO: 240155 - DNA, 376 bp, Glycine max
ggagcgaagaagatattagggtttttgagtgcggtgcggcgatcctagcactctcttctgcagctttcgccgacagcttcattcaccatggctgagcaaaccgagaaggcttttttgaaacaaccaaaagtgtttctcagctcgaagaaaactgggaagggaaagagacccggaaagggtgggaaccgcttttggaaatccattgggcttggatttaagactcccagggaagccatcgaaggaacctacattgacaagaagtgccccttcactggcaatgtttccatccgtggccgtatcttggctggaacatgtcacagtgctaagatgaacaggactattattgttacgacgaattatctccattttatcaaga

SEQ ID NO: 240156 - DNA, 288 bp, Glycine max
aggaagactgtctctaaggaggaagcgtctgccatcaaggctgctgggaaagcatggtatcacactatggtgtcagattctgattatacagaattcgacaacttttctaagtggttgggtgtttcacagtaaacttcatgatttatttttttcgtattagaattttgttttttatgctcatcagaactaaatatccttatctttggtttttttgttttgcgggttaaggttgtcatcataattatgcagacaatgtggaaattttgtttgttggattttagtgcaaat

SEQ ID NO: 240157 - DNA, 373 bp, Glycine max
ggagcttttctttctttctctgctctcttttcttttaggtttccactctcacacactctccctcttctccttctctgcaataatctctcttctcttcttcactctctcaactcctgccaaacccccatttccgcagttcttaaatttggagtctgatgtctccgccattgctggttaccgaagatgaagggcagtgccatgcctcgatggtagcatctgcatcttcaccatccctgaactgtttctccctaaatgaggccggatttaaagaatgcaattacctgggattgtcagattgctcttcggtggacagttctactgtcccgaatttgtctgatgagaaaaaggagaatctgaatttgaaggctactga

SEQ ID NO: 240158 - DNA, 391 bp, Glycine max
gagtgcctccattcgggactgtaactagccgcagcacgaggagcagcctcaggaggagaaggatgtctcacaggaagttcgagcacccaaggcacggttcactgggatttcttcccacgaagcgtgctgctcgtcacaggggaaaagtgaaggcattccccaaggatgacccatccatggcacccaagctcactgcattcatgggttacaaggccggtatgactcacattgttagagaggtcgagaagccaggatcaaagcttcacaagaaggaaacttgtgagcctgttacaattattgagactcctccaatggttactgttggtgttgtgggttatgtgaaaactccacgtggtctccgaacattgaacactgtctgggctcagcattt

SEQ ID NO: 240159 - DNA, 401 bp, Glycine max
gacacaccgtttgttctattcttaactcaacttctgctacccactctcttcttccaagtccaaccacgcttttctctacagtcatgggcaaggtcaagatcggaatcaacggatttggaagaattggccgtttggttgccagagtcgctctgcaaagagacgatgtggagctcgttgccgttaacgaccctttcattaccaccgattacatgacatacatgtttaaatacgacagtgttcacggacactggaagcatcacgatgtcaccgttaaggacgagaagacccttctcttcggtgacaagccagtcactgtttttggacacaggaaccctgaagagatcccatgggggtcaactggagctgatatcattgttgagtccaccggagttttcaccgat

SEQ ID NO: 240160 - DNA, 328 bp, Glycine max
gttccaatgagaacccaactataattgcagggactgtttttgatgaaaatccagaagaagcagtagaccttgataccgtcattaaagcagcgctgaaagacagtaacaagctcagcagtggaactttcaacactgtttacaaggcagtcatgccttctggggtggtcatatctgttaggagactgaagtctgtagacaagacaataatccactaacagaacaagatgatctatagaacttgaaagactgagcaaagtttgccatgataatctaatgcgtcacattgtctatgtcacttatgaagatgttgctcatcgcctgcatcaat

SEQ ID NO: 240161 - DNA, 430 bp, Glycine max
  unsure (1)..(430): unsure at all n locations
ttacgattgcaaaaagacaacaaaaggttacggttgcaaaaaaacaacaaaaggttacggttgcaaaaaaacaacagaaggggaacacaatggcaactaatttaaccccttcccaaccaaccaaaccctcacttttttgaaattacttgcatagatagataatcatggctatgatgaaacgtgctgcttcctctgcgcttcgctctcttattgcctcatcctccaccttcaccagaaaccttcatgcctcaggtgaaaagaagaagattgtgggggtgttctacaaagggaatgaatatgctaaattgaatccaaattttgttggatgtgttgaangtgcattgggaatacgtgagtggctggaatcacagggtcatcagtacattgtcactgatgacaaagaaggacctgattctgaacttgagaaaca

SEQ ID NO: 240162 - DNA, 407 bp, Glycine max
ggttttccacattcatattttccttgcgtttccctttcattttccctcactttctcgctcgccaaacgcccctctctctcctccaatggccgaccagctcaccgacgaccagatcgccgagttcaaggaggccttcagcctcttcgacaaggacggcgatggttgtattactactaaggaacttgggactgtgatgcggtcactagggcaaaacccaactgaggcagaactgcaggatatgattaatgaggttgatgctgatggcaatggaaccatcgacttcccagagttcctcaacctgatggctcgcaagatgaaagacaccgactccgaggaggagcttaaggaggctttccgtgtgttcgacaaggatcagaatggtttcatctctgcagctgagctccgcc

SEQ ID NO: 240163 - DNA, 393 bp, Glycine max
ggtcgtcgaagcgcgagcaagcatcccaaaaccctagctcgcgttctgcattcgtcttttacatcaggatggagtctcaagtgaagcacgcacttgttgtcaaagttaagggtcgtactggatccagaggacaagtaacccaagttacagtgaaatttttggatgatcagaaccgtcacatcatgacgaatgtgaaaagacctgtgcgagaaggagacattctcaacctactcgagtctgaaagggaagcaagaagattgcgctagatggtttcttttggcttggctccaaattctaacaagacagtggtgatttgttgattttaatggtacatggtggatgtcaaaggttttagcaccctatcctaatgtccgtctttgggccaattttaat

SEQ ID NO: 240164 - DNA, 335 bp, Glycine max
gagacattgtgctttcaacttggctccgctctttggtttgctcaaccgatctccgcaacaatggtgaacgttccgaagacaaagaagacctactgcaagagcaaggagttcaggaagcacacgctccataaggtcacccaatacaagaagggcaaggacagcatcgccgctcagggaaaacgccgttatgaccgcaaacagtccggttacggtgggcagaccaagcccgttttccacaaaaaggcgaaaaccaccaagaaaattgtgttgaggctccagtgccaaggatgcaagcatgtctcgcagcacgctatcaagaggtgcaagcactttga

SEQ ID NO: 240165 - DNA, 392 bp, Glycine max
ggcgtacacagcctcaacaaccctaacgcgtgcagagcagagagagacgcagccatggggcgaagacccgcgaggtgttataggcaaattaagaacaaaccataccccaagtcacggttttgccgtggtgttcctgatcccaagatcaggatttacgatgttggtatgaagaagaagggtgttgatgagtttcctttctgtgtccatctggttagttgggagaaggaaaacgtttctagtgaggccctggaagctactcgtattgcttgcaacaagtacatggccaaatttgctggaaaggatgctttccacttgagagtcagggtgcacccattccatgttcttaggatcaacaagatgctttcgtgtgccggagctgataggctccaaac

SEQ ID NO: 240166 - DNA, 388 bp, Glycine max
gattgaggacggtgcagacgcagatgtggagaacagaaacgatgaaataactggagagcctattgacaccgatgataatgaagaggaacaaccactgaagcggcctcgatagacatcgatatatatgactaagtatgatcgtgctagaattttgggcacccgtgctcttcacatcagtatgaatgcacctgtcatggactacttggagggggaaactgacccactcgatattgctatgaaggagcttcgaaagcggaaaataccctttacaattcggcgctacttgcctgatagaagctatgaagattggggagttgatgaactgattgtgtgagactcctggaaaaagcaactgggttgtgactgatgattgaactgacaagtgtgg

SEQ ID NO: 240167 - DNA, 376 bp, Glycine max
ggcccttctagctttttcccagtccaagcagcctccaattcgtgccactctcttcaaaatggccgttaccttctcaaatctccacacagaatcaggtctcaagtccctcgacgacttcctctctgggaaggtctacgtttctggggatcagttcacaaaggacgacatcaaagtgtatggtgctgttttggagaagccaggtgactcttttcccaatgctgccaagtggtacgaggttgtctcatctcagcttgctgcaagcttccccggcaatgctcaaggggtgagattcagtggcaaagcttctgctccagcggaggctgctcctgcgagaccggatgcttctgctgctgaagatgatgatgaccttgatctc

SEQ ID NO: 240168 - DNA, 381 bp, Glycine max
ggcaaagtgtttcttgtagcattcagtgaagcactagctaaggtattgggagctctcgttgtttcggagttagggaccttacgcagccatgggcactgctacgaatgccgccgccgccccatcacgccagctctcccagaaggaagctgacatccagatgatgttggccgccgacgtccacctcggcaccaagaactgcgacttccaaatggaacgttacatcttcaagcgccgcaacgacgggatttacattattaaccttgggaagacgtgggagaagcttcagctagcagctagggttatagttgcaattgagaacccccaggatatcattgttcaatctgcaaggccttatgggcaaagagcggttctgaagtttgc

SEQ ID NO: 240169 - DNA, 372 bp, Glycine max
ggactctgatgcgaacgtaaccaggctctggttttgcggttagggtagctctttctactcaaaacaaaacaaaacatcaatttctgtttcagttcgcggagatcaatatttgtcgctgaggtcgatcgtcgataaaaggcaatgtttttgtgggattggttttatgggattctagcgtcgcttggcctgtggcagaaggaggccaagatcttattcttgggcctcgataacgctggcaaaaccaccttgcttcacatgctcaaagatgagagattagtccagcatcagcctacccaatatcctacatcagaggagttgagtattgggaaggtcaagtttaaagcttttgatctcgggggtcatcagattgct

SEQ ID NO: 240170 - DNA, 397 bp, Glycine max
gagtggcagacgcagacgccgtgactagacactcatctcactcgcgccatcttagggtttctccttttgtttcgcaacatggttgccgctaagaaaactaagaagacccatgagagcatcaacaacaggctcgctcttgtcatgaagagtggcaaattcaccctcggttacaagaccgttctcaaatctcttaggaactccaaaggaaaattgattatcattgctaacaactgccccccctttgagaaagtcagagattgaatactatgctatgttggcaaaggttggagctcatcattacaatgggaacaatgtggatttgggcaccgcatgtggaaaatattacagagtgtgctgccttagcattattgatcctggtgattctgatatcatcaag

SEQ ID NO: 240171 - DNA, 354 bp, Glycine max
ggaacctttgcattctattcattcaagattcagcaagtgcgttttggaagcagagaccgaaatacttcgagatggcccgtacaaagcaaactgctcgtaagtcaactggaggaaaagctcccaggaagcagcttgcaaccaaggctgcacgtaagtctgcaccaacaactggtggtgtgaagaagcctcatcgttatcgccctggaactgttgctcttcgtgagattaggaaataccagaagagcactgagctcctaatcaggaagcttcctttccagaagttggttcgtgaaattgcccaggatttcaagactgatctgcgtttccagagccatgctgtgctcgcattgcaag

SEQ ID NO: 240172 - DNA, 390 bp, Glycine max
gataatagaaggttgtggggttagggctttagagtgtcttttcttctttttcttcttcttcttcttcgttgaatcgcgattgttctgttgtgcgactgaaagaagagagatcgaaaatggcgttggctttcgacgagttcggaaggcctttcataatcctgaaggaacaggagcagaagagcagacttcgaggtttggacgctcagaaagccaacatctccgccggcaaagccgtcgctcgcatcctccgaacctccctcggccccaaaggcatggacaagatgctccagagccccgacggcgacgtcactatcacgaacgacggtgccacgatccttgaccagatggacgtggacaaccaaatcgcgaagctgatggtggagctctcgc

SEQ ID NO: 240173 - DNA, 406 bp, Glycine max
gaggggggctagtgacagtaaccaacctcgatttctcactcgccgtcgtctcttccgtctagggtttctcctcttcacaaaaatggttgccgcaaaaaaaactaagaagacccatgagagcatcaacaacaggctcgctctcgtcatgaagagtggcaaattcaccctcggttacaaaaccgttctcaaatctcttaggagctccaaagggaaattgattatcattgctaacaactgcccccctttgaggaagtcagagattgaatactatgctatgttggcaaaggttggggttcatcattacaatgggaacaatgtggatttgggcactgcatgtggcaaatattacagagtgtgctgccttagcattattgatcctggtgattcggatatcatcaagacactg

SEQ ID NO: 240174 - DNA, 358 bp, Glycine max
gggcagcgcttgagaccaagccccactcaaccaccacaccactctctctgctcttcttctacctttcaagtttttaaagtattaagatggcagagacattcctatttacctcagagtcagtgaacgagggacaccctgacaagctctgcgaccaaatctccgatgctgtcctcgacgcttgccttgaacaggacccagacagcaaggttgcctgcgaaacatgcaccaagaccaacttggtcatggtcttcggagagatcaccaccaaggccaacgttgactacgagaagatcgtgcgtgacacctgcaggaacatcggcttcgtctcaaacgatgtgggacttgatgctgacaactg

SEQ ID NO: 240175 - DNA, 370 bp, Glycine max
gggtcctcaaatcaacacactcccttataattgcagcgtcgacaaaaaccctaactcctaaactttttttcttcccttcacctcttcagcagtcgttacagagactccataacccgagaatgcctttcaagaggtgcgttgagattggaaggggtgctcagatcaactatggcaaagagtatgggaggctcgtggttattgtcgatgtcattgaccagaatagggctcttgttgatgctcctgacatggtgaggtcccaagtgaacttcaagaggctagcactcactgacatcaagatcgatattaagaggatccccaagaagaaggatctcattcaagccatggaagctgctgatgttaagaacagatg

SEQ ID NO: 240176 - DNA, 396 bp, Glycine max
ggcagatatctgtaatttgtgtctgctcactcgctcgtctccgccacttctgaatctattgaatcaacaatcatgtcggacgaagagcaccatttcgagtccaaggccgacgccggagcctccaaaacctaacctcagcaagccggtaccatccgcaagaacgggtacatcgtcatcaaaggccgcccctgcaaggttgtggaagtttcgacttccaaaactggaaagcacggtcacgctaagtgtcactttgttggaattgatattttcactgccaagaaacttgaggatattgtgccctcttctcacaactgtgatgttcctcatgtgaatcgtactgattaccagctcattgatattgctgaggatggatttttgagtctgcatactgaaaat

SEQ ID NO: 240177 - DNA, 396 bp, Glycine max
gactcactcatacaatagagaccagcttttgcttctttgtgaacatggagatgaggaaatcatgtggcttcttcttcttgctcctcctccttgtctttgcttcccaggtggtggtgcagacggagggaagagtgtgtgagtcacaaagccacgggttccatggtttgtgtaatagagaccacaactgtgctttggtctgcaggaacgaaggtttctccggtggcaggtgcaaaggcttccgccgccgctgcttttgcaccaggatttgttgagatctcatcaaacactactcttgccatgcaaattaataaatcatagctaggccaaataaattgcatctactcgttatccatttgggagctagctatcacaatcaactcatacttggtcaatgga

SEQ ID NO: 240178 - DNA, 364 bp, Glycine max
gacatcacatcacatcgcagagagagagagatccatcgatcaattaatttccaatggccgatcagctcaccgacgaacagatctctgagttcaaggaagcctttagcctcttcgacaaggacggcgatggttgtattaccaccaaggaacttgggactgtgatgcggtcgcttgggcagaacccaactgaggctgagctgcaggacatgataaatgaggttgatgctgatgggaatggtaccattgatttcccagaattcctcaatctcatggcgcgcaagatgaaagacactgattcagaggaagagctgaaggaggctttccgtgtgtttgacaaggatcagaatggtttcatctctgccgc

SEQ ID NO: 240179 - DNA, 262 bp, Glycine max
ggtctctagggtttttgatcgttgttgttctaaagcactcatccacacattctccgtcgccacgacaacaatggctccaaaaaaaggtgcgaaaggtggacttgtagcagcaaacaagaaggttcaggaaaaagtaacgaaccctttgttcgagaagcgtccgaagcagttcgggatctgaggcgcgctgccgccgaagcgggacctgactcgcgtcgataagtggccgaagaacgcccatatccaacgcaagaatcacatc

SEQ ID NO: 240180 - DNA, 367 bp, Glycine max
tccgtttttacgttatttcgcactgtattgtacaattcctttatttgtgggatttatttctcacacgataattcattaaattatagaatggatttttacctatgcctagatctcggataaatgaaaattttattgataaaaccttttcaattgtagccaatatcttattacgaataattccgacaacttcgggagaataaagggcattcacttattacagagatggtgcgatttgattctatttttttagcgatatcggtaaaaagtggaaaaaatccacgcttgctgaacgtgaaatttgtaaatatcaacgattaattccttctgtcgtgtatcctcgattaatgcagcctcatatgcttaaact

SEQ ID NO: 240181 - DNA, 400 bp, Glycine max
  unsure (1)..(400): unsure at all n locations
ggagagggcgaggaagccacatagagacacaatacagagtgagttgttgctccttcgccacaactctctgccaacatgggtatctccagagattctatgcacaagaggcgtgccactggtggcaagaagaaggcctggaggaaaaagagaaagtatgagcttggtcgccagcctgctaacactaagctgtcaagcaacaagacagtcaggaggatccgtgttagaggtggaaatgtgaaatggagggcattgagattggatactggaaattactcctggggaagtgaagctgtaactcgcaagactcgtgtactagatgtggtttacaatgcctcaaacaatgagcttgtgcgtactcagactcttgtcanaagtgctatcgttcaggttgatgctgctc

SEQ ID NO: 240182 - DNA, 399 bp, Glycine max
gacacaactaactaagaaagtcttccatagccccccaaaaatgaagagcaccatcttctttgctctctttctcttttgtgccttcaccacctcatacctaccttcagccatcgctgatttcgtgctcgataatgaaggtaaccctcttgaaaatggtggcacatattatatcttgtcagacataacagcatttggtggaataagagcagccccaatgggaaatgaaagatgccctctcactgtggtgcaatctcgcaatgagctcgacaaagggattggaacaatcatctcgtcgccatatcgaatccgttttatcgccgaaggccatcctttgagccttaagttcgattcaattgcagttataatgctgtgtgttgggattcctaacgaatggtccgt

SEQ ID NO: 240183 - DNA, 344 bp, Glycine max
ggatcccttgtattctattcttcgggattcacatggctcgtttcaagcacaacgctcttaagtccacaagaggatacgctctctacgaagcagcttgcaaccgaagctgcacgtatttctgcaacagctactggtggtgtgaagaccccccaccgttatcatcctgttaacgttgctcttcgtgtgattaagctgtacctgaagattaccgaccttttgatgcggaatctctccttccagtagctggttcttgaaattgctcatgacgtcacgactgatatgcgtttctagagtcacgccgtgcttgcattacaaggaactgctgtggctttccttgttaggct

SEQ ID NO: 240184 - DNA, 379 bp, Glycine max
gactgcaactttgctctctgtgaggcttcaatttccaattagggtttcgcttagagtaaccaattaccatgggagtcttcacctttgtcgttcgcaaatccggcgccgaatggagcgccaagcaacattccggcgacatcgaggcctccgccgactccacctacgatctccaaaggaagctcgtgcaagccgctctcgccgttgattcctccggtggagtccagtcctccttctctcccgtgtctcctacctccgctgtgttccaggtgatagtgggtggtgctgtattcgttggaagtggcggtggtgctgttgcagctgcacctgcatgtggtgctgctgcagctgatgctgcaccggctgctgagaaaaaagaaga

SEQ ID NO: 240185 - DNA, 400 bp, Glycine max
gagggtttttgtcgttgcgactaagagttgctgcttcttccgccactcagcacttcgctccctctgtgcttcaccaaccatggccgaaatcgaagctaccgttccagatccctctcaaatcgacgtcaaacttttcaaccgctggaacttcgacgacgttgaggttactgatatgtctctggctgattacattggagtgtccccgtcaaagcatgctacatatgttcctcacactgctggtaggtactcagtgaagaggttcaggaaggcgcagtgccccattgttgagagactcaccaactctctcatgatgcacggaaggaacaatggaaagaagctcatggctgtcaggattatcaagcatgcaatggagattattcacttgctcactgacctgaac

SEQ ID NO: 240186 - DNA, 375 bp, Glycine max
  unsure (1)..(375): unsure at all n locations
gagtgttagtgttcctcaagccaccgtaccgtgttgcctctctgcaatctacagccaaaatgcctttcaagaggtacgttgagatcgggagggttgcccaaatcaactacggcaaggaatatggcaggctcgtcgtcattgtcgacgtcattgatcagaacagagctcttgtcgatgcccctgatatggtgaggtcccaagtcaatttcaaaaggctttccctaaccgatatcaagattgacattaagagggtccccaagaagaaagatcntgtcaaagccatggaagatgctgatgttaagaccaagtgggagaagagttcatggggcaggaaactcattgtcaggaagagaaggggatccctcaatgattttg

SEQ ID NO: 240187 - DNA, 318 bp, Glycine max
gagaacgaaccagagaatgatttcagtgagtgatcggtgttcacttgatctcatcataatcgtcaacgtcaattgaagaagatgccgatgataaacatccacgtcggcaggcctgaaaaggcgactcaccccgacacgttgaacgcggctttggccgaattcatcccaaccttcatcttcgtattcgccggctcatgctccggcatcgcctaaaagaagctcaccgaaaaccgcgctgccaaccttgcctgcctcatcacaggctccatcggacatgcattcgccatcttcgtcgacgtcgacgtctgagccaagatc

SEQ ID NO: 240188 - DNA, 365 bp, Glycine max
gaacagcgaaacagagagtgatttcagtgagtgatcggtgttcacttgatctcatcataatcggcagcgtcaattgaagaagatgccgatcagaagcatcgccgtcggaaggcctgaagaggcgactcaccccgacacgttgaaggcggctttggctgaattcatctcaagcttcatcttcgtgttcgccggctcaagctccggcatcgcctacaacaagctcaccgacaacggtgctgccacccctggcggactcatctcggcctccatcgcccatgcattcgcccacttcggcgccgtctccgtcggggccaagatcatccggggccacgtctatgccgccgtcaccttcggcgccttcgtcg

SEQ ID NO: 240189 - DNA, 370 bp, Glycine max
gacttcgcgcaaccccagacctcatgcccaacatggcatgctaagtagggtttttgtgcttggcaaaagaaagagaagacaagatggagtctcgttccgggatctgcgctaagcgcgatggtggtggacgcccagcaccacatgctgggtcagctcacctcgattgtggcaaaagagctgctgaacggacaaaaactggtggtcgtacgacacgaacagatttgcatctccggtggtctggtgatgcagaaaatgaaatacatgacgttcctcatcaaacgcatgaacactaagccatcccacaggcccatcgagatccgcgcagtctccaagatcttctggcgcaccgttcgtggaatgataccacaca

SEQ ID NO: 240190 - DNA, 401 bp, Glycine max
  unsure (1)..(401): unsure at all n locations
gatctgcgcctgatttctcagttctcacactcattccgtgctctaaatctcaaattctagggttagggttcccaatttctccgccaatcagaagatgagttccaccggtggttctaccaagggcggaaggggcaagcccaaagcctccaaatccgtttcaagatcgcagaaagctggtctccaattccccgttggaagaatcgctcgattccttaaggctgggaaatacgctgagcgtgttggtgctggtgctcctgtgtacctctctgcagtgctcgagtatctcgctgctgaggttttggaattggctgggaatgctgctanggataacaagaagaatcgtattgttcctaagcacattcagcttgctgtgaggaacgatgaggagctgagcaagcttt

SEQ ID NO: 240191 - DNA, 409 bp, Glycine max
ggaggaaaagaaagaaatagaaaaagaagaaaaaaacacagcgtcctagatttcctcttctctgcttcggaagaaagagaaaacaaacaaaacaatggcgttcgcttctttcctcggcagagtcctcttcgcttctgtcttcatactctctgcttaccaacaatttaatgaatatggagttgatgggggacctgctacaaaagcactcagacctaagtttgatgcctttacacatcgggtgcattctcaagtgggctttcaaattccagagattaatctgaaatttttaattgctggggctattgctctgaagggtcttggaggggttcttttcatatttggcagctcttttggagctttgcttctgctcctgcaccagctgattgctactccaatccattatgatttt

SEQ ID NO: 240192 - DNA, 348 bp, Glycine max
  unsure (1)..(348): unsure at all n locations
gatccttcaccctcttggcttgtgaatcagcaccacattcacctgagctttttgtgaggattccaaagcatggcttcccttgcagcatccactgctgctgcttcccttggcatgtcagaaatgcttggaaaccccatcaacctcagtggtgccacaaggccagctccatctgcctctagccctgcctccttcaagactgtggctcttttctccaaaaagaacgctgcacctccaaaaaaagctgcagctgctgctcctgccaatgatgagcttgccaagtggtatggtcctgacagaaggatcttcttgcctgngggtctcttggaccgatctgagatcccagagtac

SEQ ID NO: 240193 - DNA, 347 bp, Glycine max
gacagcaaaacaattttcaaactcaattaccattccataacctaaatctcctctttgtttccgagtcagagagcaatggcacgtaccaagcaaaccgctcgcaagtccaccggcggaaaggcgccgaggaagcaattggcgactaaagccgctcgcaagtcagctccggccaccggcggagtgaagaagccccagcgcttcaggcccggaacggtggctctgagggagatcagaaagtaccagaagagcactgaacttctgatccgaaaactcccattccagaggctcgtcagagaaatcgctcaggatttcaaaacagatcttcgtttccagagcagcgctgtttc

SEQ ID NO: 240194 - DNA, 350 bp, Glycine max
gagagtggtggagtgtgcaaaagagcgtcgtagtcgcaaccctaatcagaagaagcgcagcttcaagcgagtgacagccaccagccatgggtcgtatgcacagccgcggtaagggtatatcctcttctgctttgccctacaaaaggacacctcctagctggctcaagatctcttcgcaagatgtcgaagaaaatatctgcaagtttgcgaagaaaggtttgaccccgtctcagattggtgtcattctcagagattctcacggtattgctcaggtcaatagcgtcactggcagcaaaatccttcgcatcctcaaagctcacggacttgcgcctgaaattccagaggacctg

SEQ ID NO: 240195 - DNA, 379 bp, Glycine max
ggtctcgtggaagtgtaagcaagcaaaaccctagcggcgcctgctttctttgttcgtgttttgcatcaggatggagtctcaggtgaagcacgcacttgttgtcaaagttatgggtcgtactggatccagaggacaagtgacccaggttagagtgaagtttttggatgatcagaaccgtcacatcatgaggaatgtgaaaggacctgtgagagaaggagacattctcaccctactcgagtctgaaagggaagcaagaagattgcgctagatggtctcttttttttggcttgcctccaaattcgaacaaaagcaatatttttcttgatatttatggtagttagtccgtgctaaaggggttatagcaccctatcttattgtt

SEQ ID NO: 240196 - DNA, 309 bp, Glycine max
gggtcccactaaccttgaccaagatgataagcgcgtggacttcaacataatttcaggtacatccatggcatgccctcacgcaagcggtatatcagctttgatcaagtcatttcatccagattggagcccagctgcaattcggtctgcgcttatgaccacagcttatacaacttacaacaacggtaaaaaattgctagacagtgccacaaatggcccgtcaacgccgtttgaggtccgtgctggacatgtgaaccctgttgctgcgcttaatccaagtcttgtctatgatttagcactggatgattatct

SEQ ID NO: 240197 - DNA, 370 bp, Glycine max
gatgtcatagtattatcattcattctcatctttctctcttctctctccacccaaaccctaactcccgaccctgttcccctctcgtatccgtcatgaaaggaggaaagtccaagaccgaatctaagagagccgatcccaaacttgctgtgaataagaagggagccgccaccaaggctaggaaacccgccggcaaggggaaggcagcgaaagaccctaacaagccaaagaggcctccaagtgctttcttcgttttcatggaggagttcaggaaggtattcaacaaagaacatcctgaaaacaaagcagtgtctgctgtgggcaaagctgctggagcaaaatggaagaccatgtctgatgctgaaaaagcacc

SEQ ID NO: 240198 - DNA, 242 bp, Glycine max
gagggttttgtgctgttgtcgctgctcatcctccataacctccgagctctacaccgaggagcgaagccatggggaagacacatggaatgggagctgctcgcaagctcaagtctcaccgcacgacggcggatgtgggctgagaagtcatacaggaagtgccatcgtgggaaggacggcgggaaagggtttgccggttcatcccatgccaagggaattgtggttgaaaagataggtattgaagc

SEQ ID NO: 240199 - DNA, 376 bp, Glycine max
ggaaaattgattaggtcacgcgcttcttccggaattagtcggtgtaatttacatttatccattttttgaaccttcccttcccaccccagaactttcaaatttcaacaaaatcgcagacatggcttctgcggtgcccgcgacggggcgagagttgtcgaatcctccattggacggcatcaccaatcttcgattctccaatcacagcgatcatctccttgtgtcctcatgggacaagagcgtgaggttgtatgatgccagtgccaatgtcttgagaggagagtttatgcacgctggtcccgtcctcgattgctgcttccacgatgattcctccggcttcagtgtcgccgccgacaacactgttagacggcttgtcctc

SEQ ID NO: 240200 - DNA, 373 bp, Glycine max
acctgatgcagatgcagcccatgatggcagccgagtaccccaacaacgtcaccactgatcacattcagcagtatctggatgagaacaagtccttagttctgaagattgttgaaagccagaattctggcaagctgaacgagtgtgccgagaaccaagcaaggcttcagagaaatctcatgtacttagctgcaatagctgattctcagccccaaccacccaccatgtctggtcagtaccctccgagtgggatgatgcagcagggagcacagtacatgcaggctcaacaacaggcacagcagatgacaccacaacaactaatggcagcacgctcatctcttttgtacgcacagcagccgtactcagcacttcaaca

SEQ ID NO: 240201 - DNA, 363 bp, Glycine max
ggagaagagaagagtgggggaggagagatgagtaagtggcctttcacaatatctcagtggcaggaactggaacatcaagctttaatttacaaatacatggtggctggtcttcctgtgcctcctgatctagtcattcccattcagaacagcttccactccatttcccaaaccttcttgcaccatccctctaccaccatgagttattgttccttctatgggaagaaggtggacccggagccaggacgatgcacgaggactgatgggaaaaagtggaagtgctccaaggaaggctacccagactccaagtactgtgagcgacacgatgcaccgtggccgcaaacgttaaagaaaacctgtgggatc

SEQ ID NO: 240202 - DNA, 306 bp, Glycine max
ggctccgccatttttcgtagctgctgttcttgcgcgtgaacaagcctcaggtaagccaaaaccatggttaagcataacaatgttatcccaaacggacacttccgtaagcactggcagaactatgtgaagacttggttcaatcagccagcacggaagacaaggagacgattggctcgtcagaagaaagctgtgaagatattccccagacctacggctggacctctcaggcccattgtacatggtcaaactttgaaatacaacatgaaagtgagacgtggaaggggattttctcttgaagaactcaag

SEQ ID NO: 240203 - DNA, 312 bp, Glycine max
ggttttcactcggatcgcgcattcacaaataaggttgaagaggtcactgccggaagaagggagcaacaccatctttcattttccggcgatctcttgtttcttccatcatcaccgttttccggcgatccctaatcctcgcaaacagaaatgacgacatcaaggcgccttgcggacaggaacgtggagaagtttgagaagaacatcacaaaaagaggatttgtgccagacactaccactaagaacggaaaagactaccctgttggcccaatgctgctcggtttcttcgtcgttgttgtcattcgatcatctctc

SEQ ID NO: 240204 - DNA, 304 bp, Glycine max
gacagcaaaacaattttcaaactcaattaccattccataacctaaatctcctctttgtttccgagtcagagagcaatggcacgtaccaagcaaaccgctcgcaagtccaccggcggaaaggcgccgaggaagcaattggcgactaaagccgctcgcaagtcagctccgggcaccggcggagtgaagaagccccaccgcttcaggcccggaacggtggctctgagggagatcagaaagtaccagaagagcactgaacttctgatccgaaaactcccagtccagaggctcgtcagggaaatcgctc

SEQ ID NO: 240205 - DNA, 293 bp, Glycine max
ggatccccccctctctctctctcatcactacctctgcatttttctctcgctctctgcggtgcagcgggctcgccatttcccttcccaagatagtagaagatggcagacgctgaggatggtggagctcgtgtttgtgagagtggaagaggagtggttgaggcgggttgtgctggacgaggtggccgacgtgctgtgtttcccagcagtgtaggtcgtcgtcgtcacactggtgtgatggttggcatgggccagaaggagtcaggggttggtgaggagggacagtgcgggagggg

SEQ ID NO: 240206 - DNA, 398 bp, Glycine max
gggggttcctgaggtttgttgtcgtttgagaggattcgatcggcgaatcttgttttcgacctcaaattgaattcaacagtgaattgctggaaggaaaagggaacgaaccaaaaaatgggagacacaaaccacgcgtccaccgtcgatgacgatttgctcctcaaaaacttcttcgccgaagttagcgaagttgaaagggataacgaagtgcttaggattctctcttgttttaagttgaatccttttgagtatctaaacttatcatttgattcatcaattgatgatgtgaaaaagcagtaccgcaagttatcattgatggttcaccctgacaaatgtaagcatccgcaagcaaaggaggcttttggagcattagcgaaagctcaacagttattactgga

SEQ ID NO: 240207 - DNA, 380 bp, Glycine max
gattattatcatagtagatattcattccccttatctttctctcttctctctccccgcccaaaccctaactccctaccctattccgctttctctcatccatcatgaaaggaggaaagtccaagaccgaatctaagagagccgatgccaaacttgctgtgaataagaagggcaccgccaccaagactaggaaacccgccggaaaggggaaggcagcgaaagatcctaacaagccagagaggcctccaagtgctttcttcgttttcatggaggaattcaggaaggtgttcaacaaggaacatcccgacaacaaagcagtgtctgctgtgggcaaagctgctggagcaaaatggaagacgatgtctgatgctgaaaaagcacct

SEQ ID NO: 240208 - DNA, 240 bp, Glycine max
ggctgcttccaggaaaagactacaacactgacttgactccttcatgcatgctccacgcggctcggggggatatagctcagttggtagagctccgctcttgcaattgggtcgttgcgattacaggttggatgtctaagtgtccaggcagtgatgatgatatcgtgtacctgaaccggtggctcactttttctaagtaatgggaaagacgaccgaaacatgccactgaaatactctactgag

SEQ ID NO: 240209 - DNA, 244 bp, Glycine max
ggaaaacagagagtgatttcagtgagtgatcggtgttcacttgatctcatcataatcgtcagcgtcaggtgaagaagatgccgatgagaaacatcgccgtcggaaggcctgaagaggcgactcagcccgagacgttgaaggcggctttggctcggttcatctcgggcttgagcggcgggtgcgccggctcaggctccggcatcgcctagaacaagctcagcgacaacggcgctgccacccctgc

SEQ ID NO: 240210 - DNA, 274 bp, Glycine max
gacactcactcgttcactcttcttcgtctcaaacctcttcgttccttcgattcagtccatgtcttccaaaatggccaaagacccagttcgcgttctcgtcactggagccgcagggcggattggagaggctcttgtccgtatgagtggtaggggagtggtgctgggtccggaggagccggtgatcctccacatgcttgacattcctccagcaggagagtcgttgaatggggttaaaatggaattggtggatgctgcaggggctcgtcgtagaggg

SEQ ID NO: 240211 - DNA, 242 bp, Glycine max
gacaacatcatcatcaacaacaagcagatcaatctctgtctctctctcaaccataatagtcatgggtttgaaggaggattttgagcagtatgctgaggaggcaaagactttgccaccggctcagtcaagcgaagacttgcttatccgtgtaggagtgtacaaacaggccaccgttggacctgtcaacacgggccgtcctggaatgttcaacatgagcgacagagctaagtgggatgcatgga

SEQ ID NO: 240212 - DNA, 378 bp, Glycine max
ggcgcatcccatacagactctgcgcgctgtggtgcctgtgtgtgtgtgcgagagatagagacatcgatccctgacgcttccactctttctttggcggcggcgtcgttttcccaacgcattacccatttcatcactcagtctcaagttcggggcacttcaatctgattcactatggccaatggtccagcagcgttttctgagattgggaaaagggcaaaagaccttttaaacaaggattacaacctcgatcaacagtttagcctctcaattccaaactccactggattggggcttatagctacacgattgaagaatgatcaactttttgttggtgacataagtacactctacaagagtggaaatactacagtggatgtg

SEQ ID NO: 240213 - DNA, 392 bp, Glycine max
ggcacccacagaggaggaagctttgagagagagagagggaggagggagagtgttgacgctccatcaagatgggtatttctagggattccatgcacaagaggcgtgccactggtggcaagaagaaggcatggagaaagaagagaaagtatgagcttgggcgtcaggccgcaaacaccaagttatcaagcaacaaaactatccggaggattcgtgttcgaggtggcaatgttaaatggagggcattgaggttggataccggcaattactcatggggtagtgaagcagttactcgcaagactcgtattctagatgttgtttacaatgcctcaaacaatgagcttgtgcgaactcagaccctggtcaagaatgctattgttcatgttgatgctgct

SEQ ID NO: 240214 - DNA, 264 bp, Glycine max
gacacaccgtttgttctattcttaactcaacttctgctacccactctcttcttcgaggtccaaccacgcttttctctacagtcatgggcaaggtcaagatcgggatcaacggatgtgggagaagtgggcgtttggttgccagagtggctcggcacagagacgatgtggcgcgcgttgccgttaacgaccctttcattaccaccgaggacatgacatacatgtttaaatacgacagtgttcaggggcactgggagcatcacgagg

SEQ ID NO: 240215 - DNA, 243 bp, Glycine max
gatccacatcctccacaacacaactccactcttagctgccattggtttttcttcttccagttcgcttcctttctaagcttttttcgattacccatttggagattctgtcctaatggctctggcggcggcgggagtttcctccgtgtccgggtgtgtctggcggggggagtgttggggatgggcggaggaaggcaagttgctcggtgtctctcagctttgggaatgtgaaacttggaagcagaa

SEQ ID NO: 240216 - DNA, 332 bp, Glycine max
gagaacctctctcacacaatagcaaagaagggaagactaaaactaaaaccccactctctttttccgagtcttccagtgaaagaaaggcagcgatggaagaagacttcgacatccccggcggcgaggaaatggatctcggcgaagacgaggtcggcgaggagagggacatcggctctggcggcctcaagaagaagctcctcaaggaaggtcaaggctgggaaacccccgaagtcggtgacgaagtccaagttcattacacggggactttgctcgacgggaacaagttcgattcgagccgcgacagggaggtgcgcttcagcttcacgctcgga

SEQ ID NO: 240217 - DNA, 398 bp, Glycine max
ggtcactcaccacttcaaaacactcataacacaaagcacaaagcaaagctcatccttgagttaaaaaatggcagcagcttcttccatggctctctcatccccatccttggctggcaaggccgtgaagctgggcccatcagccccagaagtgggaagggtgagcatgaggaagaccgtcaccaagcaggtctcctcaggaagcccatggtacggcccagaccgagtcaagtacttgggcccattctctggcgagcccccgtcctacctaaccggtgagttcccatgcgactacggctgggacactgctgggctttccgcagacccagaaaccttcgccaagaaccgtgaactcgaagtgatccactccaggtgggccatgctcggagccttgggctgcg

SEQ ID NO: 240218 - DNA, 354 bp, Glycine max
gacacaccatccgttctagtctcaacttctgctcttccaactcctacaacgcttttctctgcactcatgggcaaggtcaagatcggaatcaacggatttggaagaattggccgtttggttgccagagtcgctctgcaaagagacgatgttgaactcgttgccgttaacgaccctttcattaccaccgattacatgacatacatgtttaaatacgacagtgttcacggacactggaagcatcacgatgtcaccgttaaggacgagaagacccttctcttcggtgacaaggcagtcactgtttttggacacagaaaccctgaagagatcccatgggggtcaactggagctgacatc

SEQ ID NO: 240219 - DNA, 232 bp, Glycine max
ggatccaaattcaagttcgcaccaaattttcctcccaaaatgtcaggccgtggaaaaggtgggaagggtttgggaaagggaggagctaagaggcacagaaaggttcttcgggagaacagtcaacggagcacgaaacctgcgattcgtaggttagcgagaagaggtggcgtgaagaggatcagtggtttgatttacgaggaaaccagaggagttctgaagatagtcgtgggga

SEQ ID NO: 240220 - DNA, 141 bp, Glycine max
gaggtttttagggtttacaccgagcagccacacctcccgcagcagccatggttctcaaaactgaactatgccgattcaatggtgccaagatctacccaggaaagggcatcagatttgttcggtggggggtctcaagttttc

SEQ ID NO: 240221 - DNA, 330 bp, Glycine max
ggcccgaactccttcgacgaccgtcttccccaatcgcctgcgtctctctctgaattgacaagcttaaagacaaagtcttaaatggctggtccaaggattgcccatgctaccttgaaaggtccgagtgtggttaaggagatgataagtggaataacacttggcttagctgctggtagcgtgtggaagatgcaccactggaatgaacagaggaaaaccaggaccttctacgatttactggaaaagggtgagatcagtgttgttgcagaggaacagtgaaagtgttcgtgttttgttgcctatgctctccagttagaggctttttttcccatg

SEQ ID NO: 240222 - DNA, 266 bp, Glycine max
ggcgtacacagcctcaacaaccctaacgcgtgcagagcagagagagactcagccatggggcgaagacccgcgaggtgttataggcggattaagaacagaccataggccaagtcacggttttgccgtggtgttcctgatcccaagatcaggatttacgatgttggtatgaacaacaagggtgttgatgactttcctttctgtgtccatctggttagttgggagaacgaaaacgtttctagtgaggccctggaagctgctcgtattgc

SEQ ID NO: 240223 - DNA, 410 bp, Glycine max
ggatagatacctaaatccctaattctcctctcctcgcactccaccacgacctccacggcttctccacacctcgcaccctcgcactcgcagtctctctctctcatgctctcgccaccacaaaaatggtgcttccttgaaacttggtgaaacctagtttcatttttctaccattcttatattgattttgtgttggaagcagctcgaattttgtgtcttgatagagtagctatagtatccgattatgagagtaaaagtggtgactattctaatccatggagactttgcaccgtgacccaagtggaggaattgaaaatcttgatctgcgtgtttccaatttgggccaccaggatcatttttgctgcagtctatgcccagatgtcaacattgtttatggagcaaagaacaatgat

SEQ ID NO: 240224 - DNA, 368 bp, Glycine max
gtcatatttcacttacaaaacaccctctcctaccttctctcttatcacttccaaccatgactgcaactgatattgctcgaacagcggtcggcatcataggaaacatcatctcgggcgctttgttcctgtccccagcgcccacttttgtcgaaatatgcaagaagggatcagtggagcagtactcggcagcaccatacctagcaacgctggtgaactgcatggtttggaccctgtacggtctacccatggtgcacccaaatagcattttggtggtaaccattaacggctctgggtgcatcattgagcttatctttgtgacactcttcttgatctactctggtgggaaaaagaggctcaaggtcctcctg

SEQ ID NO: 240225 - DNA, 342 bp, Glycine max
ggacgaaattctccactgagagacatagaaaaccgagaaaaagaaaaaaagacaatatgtatgtggtgaagagagatgggaggcaagagacggtgcattttgataaaatcaccgcgcgtctcaagaaacttagttacggtttaagcaccgaacactgtgaccctgttctggtgtctcagaaagtgtgcgctggcgtctacaaaggcgtcaccactagccagctcgatgagttggcggcggaaaccgccgcggctatgaccgccaaccaccctgactatgcttctttggctgcgaggattgccgtttcaaatctgcacaagaatacgaggaagtcattttcgg

SEQ ID NO: 240226 - DNA, 272 bp, Glycine max
gaggtttttagggtttacaccgagcagccacacctcccgcagcagccatggttctcaaaactgaactatgccgattcagtggtgccaagatctacccaggaaagggcatcagatttgttcgtggtgattctcaggttttcctgtttgcaaactcaaaatgtaagaggtatttccacaatcgcctgaagccttcaaagctcacctggactgcaatgtacagaaagcaacacaaaaaggacattgctcaagaagctgtgaggaacaggagacgt

SEQ ID NO: 240227 - DNA, 245 bp, Glycine max
gaacgaaacagagagtgatttcactgagtgatcggtgtgcacttgatcgcaacagaatcgtcagcgtcaattgaagaagatgccgatcagagagagcgccgtcggaacgcctcaagcagcgaggcatcccgacacgttcagggccgcggtggctgagttcatcgcaaccttcaacgtcgtgttcgccggcgcatgctccggtatcgcctacaacagtctcaccgagaagggcgctgccacccctg

SEQ ID NO: 240228 - DNA, 254 bp, Glycine max
ggcgagattgaatcgtaagcagcggctaccctaatcctctcctcttcctctctactaatttcagctatggccgacgaagctgtggttgttccagatcccacccagatcgatgtcaagctctttaaccgctggagcttcgacgatattgagattactgacatttctctggctgattatatcggagtggcgacatccaagcacgccacgtatgtgcctcacaccgccggcaggtactcggtgaagcggttcatgaa

SEQ ID NO: 240229 - DNA, 384 bp, Glycine max
  unsure (1)..(384): unsure at all n locations
gaccaagttagtttaatttgagtgtatattcagagagaaaaacgaagaaaacatcgtgaagcatgtctggaagaggaaagggagggaagggtctaggaaagggaggagcgaaacggcaccgtaaggttctgagggataacattcagggaatcacgaagcccgtgattcggcgtctggcgcgacgtggtggcgtgaagcgtatcagtggtctcatctatgaagaaactcgcggtgttctcaagatcttcctcgagaacgtcattcgcgacgctgtcacctatactgagcacgctcgccgcaagaccgtcactgctatggacgttgtttacgctctcaagaggcanggcatgaccctctatggtttcggtggttagagatttgggg

SEQ ID NO: 240230 - DNA, 381 bp, Glycine max
ggttgaaaaggttaatgtttttgttggaggggttattaaggagcatagggtgaatagggagaagggtgactgtgtgaaggatgaaggagctgacgattttgttgatgttttgcttgatttggagaatgaaaacaggctcagtgaagctgacatgattgctgttctttgggaaatgatattcacgggaactgacacggtatcaattctgctacagtggattctggctcgcatggttctccaccctgaaatccaagcaaatgcacagcgcgaaatacacttcgtttgcggatcctccaggctcgtatccgaagcagacattccgaacctgcgctaccttcagtgcatagtaaaagaaaccctccgttttgcaccaccaagccc

SEQ ID NO: 240231 - DNA, 281 bp, Glycine max
gaaaaccaaacctctcactcgccgtcgtagggtttctcctttcgtttagcaacaacaacaatggttgcagccaagaaaaccaagaagacccatgagagcatcaacaacaggctcgctcttgtcatgaagagtggaaaattcaccctcggttacaagacggttctcaaatcacttacgagctccaatgggaaattgattatcattgctaacaactgcccccctttgaggaaatcagagattgaatactatgctatgttggccaacgttggagttcatcatta

SEQ ID NO: 240232 - DNA, 260 bp, Glycine max
caccaaaggcagagaagaagccagcagagaagaagcctgtggaggagaagaaatcgacggtgggagacaaggctccggcggagaagaagccaaaggccggaaagaagcttccgaaggagggaggcgccggcggagaacgtaagaagaagaagagagagaggaagagcgtggagacatacaagatctacatcttcaaggttctgaagcaggttcaccctgacattggtatctcaagcaaggccatgggaatcatgaacagc

SEQ ID NO: 240233 - DNA, 331 bp, Glycine max
gagggtttttgagtgcggtgcggcgatcctagcactctcttctgcagctttcgccgacagcttcattcaccatggctgcgcaaaccgagaaggcttttttgaaacaaccaaaagtgtttctcagctcgaagaaaactgggaagggaaagagacccggaaagggtgggaaccgcttttgggaatccattgggcttggatttaagactcccagggaagccatcgaaggaacctacattgacaagaagtgccccttcactggcaatgtttccatccgtggccgtagcttggctgggacatgtcacagtgcgaggagtgagaggactattagtgt

SEQ ID NO: 240234 - DNA, 374 bp, Glycine max
gagagttgcatcgactgaaacccctaggaaaaaccccagtttctctctttcactagttccgttcaagttctaaccaagcactcacagtacttttgcttctctcgaagatgtctctacgagtgctgaaccctaacgccgaagtgctgaacaaatcggcggcacttcacatgaacatcaatgccgccaagggtttgcaagatgtcctcaaaaccaacctcggtcccaaaggaaccatcaaaatgctcgttggtggtgctggtgatatcaagcttaccaaagatggcaacactctcttgaaagagatgcaaatccaaaacccgacggcgattatgattgctagaacggctgtggcgcaggatgatgctagtggtgat

SEQ ID NO: 240235 - DNA, 364 bp, Glycine max
gatgacattgagaacaggatacaacagatgaaagaggtgacaagccagacattatcacaccttgaagaggagaatgaatctactcttgctcagatggctgaactcaagaaaattttgtatgcgacgttcaatgactcgatcaatcttgacgaggattagtaactttcttcttgtcgatagatttctagttgttgttttcatgttaagatgaacgaatggacatttggcacttttgagtcagattgtctcatatgatctgattttatgatgtatgttaccttgcttgatcctctttcacaccctggtcacagtgactgctttctttggcttcatgtgtagaatacagcttcactttattgtgtcc

SEQ ID NO: 240236 - DNA, 398 bp, Glycine max
  unsure (1)..(398): unsure at all n locations
ggtgtgaaattgttgagtctcttgtcttagtctaataaacaacacggacgcagagccttcgatccagaaaccatgactaagagaacgaagaaggcaggcattgtcggaaaatatggtacccgatatggtgctagtttgcggaagcagattaagaagatggaagttagtcagcatagcaaattcttttgtgaattttgtgggaagtatgctgtgaagaggaaggctgtgggaatatggggatgcaaggattgtggtaaagtgaaagctggcggtgcctacactttgaatactgcaagtgctgtcactgtgcgcagcaccatccggaggttgagggaacanaccgagggttgagctttttggttgatgttagattttgagcaaattaactggagaaatga

SEQ ID NO: 240237 - DNA, 373 bp, Glycine max
gaggggtgatgaatattaagttagaataaaggatccgaacgtttggggggggttttgagaagggttttacattttattcgttctccggtgaaacagaaacagagagagagagtgagaaaaaacgaaacgatggagggaggagtctcctacgcgcgcatgcctcgtgtcaaaatccgcgagctgaaggacgactacgccaagttcgagctccgcgacaccgacgcgagtatagccaacgcgctgcggcgcgtgatgatcgcggaggtgccgacggtcgccatcgacctcgtggagatcgaggtcaactcgtcggtgctcaacgacgagttcatcgcgcacaagctcggcctcattcccctcacgagcgagcgcg

SEQ ID NO: 240238 - DNA, 298 bp, Glycine max
gctaaacattaacaccttgggttggctgtagctcacagctcgctctcctcgccgtttctctcaacgctagtttcaagtctccttgtgacaatggtgagggttagtgtgttgaatgatgctctgaagagcatgtacaacgccgagaaacgggggaagcgccaagtcatgattaggccgtcctcgaaggtcataataaaattcctcttggtgatgcagaagcatgggtacattggtgagttcgagtatgttgatgaccacagggctgggaaaatcgtggttgaattgaatggcaggctga

SEQ ID NO: 240239 - DNA, 392 bp, Glycine max
gactcaccacttcaaaacactcataacacaaagcacaaagcaaagctcatccttgagttaaaaaatggcagcagcttcttccatggctctctcatccccatccttggctggcaaggccgtgaagctgggcccatcagccccagaagtgggaagggtgagcatgaggaagaccgtcaccaagcaggtctcctcaggaagcccatggtacggcccagaccgagtcaagtacttgggcccattctctggcgagcccccgtcctacctaaccggtgagttcccaggcgactacggctgggacactgctgggctttccgcagacccagaaaccttcgccaagaaccgtgaactcgaagtgatccactccaggtgggccatgctcggagccttgggct

SEQ ID NO: 240240 - DNA, 265 bp, Glycine max
atcctttttggtaatttatttctatttaattattgattatattggataacttttcaatctaaaaaaaaaaaaaaaaaaaaaaaaaaaaaaaaaaaaaaaaaaagaacaaaaagaaaaaaaataaaaaaaaaaaaaaaaaaaaaataaaaaaactagcaaaaaaagcaaataaaagataaacacatggcacttcaaaaaaaacgtagaagaatgaaaaaataaatggtaatagacaactaagcctccatgaagaacatcgcgactg

SEQ ID NO: 240241 - DNA, 373 bp, Glycine max
ggttctagtgtatgtgattgttgtgactcgttcttcttcgtcattagcttcttcttatgttgtctgtgtgtctgttttttctctcatctgaaaatgtcttgctgcggtggtaactgtggttgcggaagcgcctgcaagtgcggcaacggctgccgaggctgcaagatgtacccatacttgagctacaccgagtcaacgatgacctagaccttggtcatgggagtggcatcagttaaggctcaattcgagagtgctgaaatgggtgttcccgctgagaacgatcgctgcaaatgtggagctaactgcacctgcaacccctgcacttgcaactgaggtgttggagagctaaagcttcaatcagaaatggccctta

SEQ ID NO: 240242 - DNA, 302 bp, Glycine max
  unsure (1)..(302): unsure at all n locations
accattgcacatggtggtgtgcttccaaacattaaccctgttttgttgcctaagaagacggagagggctgccaaggagcctaagtctccatccaaggctactaaatctcctaagaaggcctagattatcctttttttttttttttttttaaatctagtgttgtatatcggtgcttagatgcttttggtgtaacaggaaatttgatgtgtttcttaaacattgtaattcttgtcccattgtgttgcttgtangagtgagtttgctttattaatgaaaagtggaaacctcttgttttcaatcgg

SEQ ID NO: 240243 - DNA, 291 bp, Glycine max
gaggtttctctctcccgtatacatcttgaacctaccgcgtttccgtgacagagacatcgcagtggcgatgaggcctacgccgtgttagcggcagatgcaaatcaatccataccccaactcccgtttctgccgtggtcttcctgatcctaatatcagaatctaagatgttggtattagtatgaaaagtgttggtgattatcccttctgcgttcatctggatatcttggactaggaaaatgtttcaagtgcagctgtggcagctgctacaactgcaagcaccagctatatggc

SEQ ID NO: 240244 - DNA, 381 bp, Glycine max
ggacattgctaaaccttaaaccctaatttttacaatccgagggtgaagagtttgatgggtcagcgaaagaacgacaacaacatcaatcagtgctcctcaagcaaggaagacgctgacatgaataacaaccaccttcgctttgaagaggctgtcgacgagagttccaacctcgaccaatccatgtgcgacatcgaagaatccgatgataaaaccagcgccgactattacttcgattcctactctcattttggaattcacgaagagatgttgaaggacactgtgagaaccaagacatatcaaaatgttatttatcagaacaagtttttattcaagaataaagtagttcttgatgttggtgctgggactgggattttatcacta

SEQ ID NO: 240245 - DNA, 376 bp, Glycine max
gaccacttcaaaacactcataacacaaagcacaaagcaaagctcatccttgagttaaaaaatggcagcagcttcttccatggctctctcatccccatccttggctggcaaggccgtgaagctgggcccatcagccccagaagtgggaagggtgagcatgaggaagaccgtcaccaagcaggtctcctcaggaagcccatggtacggcccagaccgagtcaagtacttgggcccattctctggcgagcccccgtcctacctaaccggtgagttcccaggcgactacggctgggacactgctgggctttccgcagacccagaaaccttcgccaagaaccgtgaactcgaagtgatccactccaggtgggccatgctcg

SEQ ID NO: 240246 - DNA, 372 bp, Glycine max
gacggacgagggtttcgtttcgggtttgacgttgttcacaatcactttctgcgcttcactcactcccttcgtgcggttttctttctttgtcgaactcgtgcgaaaatgcgtgagattcttcacatacagggagggcaatgcggaaaccagatcggagcgaagttctgggaggtggcgtgcgcggagcacgggatcgattccacggggaggtaccagggggacaacgagttgcaactcgagcgagtcaacgtctattacaatgaagcgagttgcggaaggttcgtgccgagggcggtgctcatggatctagagccagggaccatggacagcgtcagatctggtccctacggtcagattttccgacctgataac

SEQ ID NO: 240247 - DNA, 399 bp, Glycine max
gagcctcagcagaagcagaacgaggagaagcagaaggagcaaaagcaatggcgccgaagaagccgagaaccacgacaaggaaccctgatttggttagggggattggcaagtattcgaggtcgcagatgtaccacaagaggggcatctgggccatcaaggccaaaaacggtggcgttttgccccgccacgatcccaagcccaagcccgaggccccggcccagaagccgcccaagttctaccccgcggacgatgttaagaagcccctcgtcaacaagcacaagcccaaacccgcgaaactcagggctagcattactccagggactgtgttgatcctgcttgctgggaggttcaagggaaagagggttgttttcctgaagcagctcccatctggattgcttc

SEQ ID NO: 240248 - DNA, 365 bp, Glycine max
gatacctaaaaattgtaccgatatggcttcacttgtgtgtctccttttttccttgcatttcatggttatcatgtcaggttccttaccagcaaatagtgaagtgtttacaaaagagtctcctatgtctctatccacaaaacccgtggaaagactcacccaactccacttttatctccataacaacaaaatgggggaacacccgactgctatgaaaattgttgagcctcctaaggcgtccatttctggttttgggactatttacatgatggatgaccctctaaccgaaggaccaagtccaacttcaaagcttgttggaagatgtcagggaatatatgctgaggcctcgcaacatgaacctgcgatac

SEQ ID NO: 240249 - DNA, 360 bp, Glycine max
ggatttagaattaaaataaaatagtgagggaattgattgatactatactagtgagaaaagaaagggaagtcctccgcgccgccactcctcccatctctctgctctaaacgacaccgttttagtcttctcctcaagtcatggccacactcaagagcctctgcttcagaggaactgcctttcccgtttgcccctccaatgtcaccaacaatagaaactccaggagctcatattggaggcctgcacaagcagccgtgaagcccaatttccatctcccaatgcgcagttttgagttaaaaaataggacttctccagaggacataaaggctctgagattgataactgccattaaaactccatacc

SEQ ID NO: 240250 - DNA, 386 bp, Glycine max
gactttagtttcgcaaagttgattctttctctctttatctttctttccccaatttgtgagtgttactgttgaatcgattggattggcattaggttgatctgaaatacgcaattgacatggcgagcgcgatggtagaggacgcgaacttcgaagatgaccaactagccaatatgaccaccgacgacatcgtcagagcttctcgtcttctcgacaacgagattcgcatcctcaaggaagagttgcagaggaccaatttggaattggaatcgtacaaggacaagatcaaggagaatcaggagaagattaagctcaataagcagttgccctacctcgttggcaacattgttgagatattggaaatgaacccggaagacgaagctgaagaa

SEQ ID NO: 240251 - DNA, 400 bp, Glycine max
ggtctcgctctgcacaaaccctaacaccaaaaccagaagcgaaatcgcaatcgcaatccagcgaatatgaaggtcgtcgctgcatacttgctcgcagtgttgggagggaatccttccccttctgccgatgacatcaaacacatcctcggcgcagttggagctgaggctgagaatgagttgattgagttgctcttgactgaagtcaagggaaaagacttcaatgagctaattgctagtggaagtgaaaagatgtctgcagtgtctggtggcggtgcagcggttgccgttgctgctgcaccagctggaggtgctgctgcacctgctgccgaagcaaaggaagaaaagaaagtagaagagaaggaggagtctgatgatgatatgggtttcagtttgttcgact

SEQ ID NO: 240252 - DNA, 376 bp, Glycine max
ataactaataggtagagacaacgccgtttgagtcgcgtctgataataaaaatacacagtgagctctcgcttctagccctagggcgctgctcccgattttctctcttcggattgagtgaattgtgaaatgggttggaaagctgctgagaaactcattaggcactggaaagttgtcagaggggataatgttatgataataaggggcaaagataagggcgagactgggactattaagcgtgtcattcgctctcagaatcgtgtcattgttgagggtaaaaatctggtgaaaaagcacatcaagcaagggcaaggtcatgaagggggcatctttacagttgaagctccaatccatgcctccaatgtgcaagttcttgacc

SEQ ID NO: 240253 - DNA, 378 bp, Glycine max
gacaactcaaactgcttcattgcataattgcagataagatcaacccttctaccttcagattcgcgggaagatggcatcacttcatgccaatgtgacatcagttgtttacaacagtggcaaccgtgtttctcaatcgaaatttgcaagctcttccttcttgtctgggttcgatgttgttggtcgtgcttcaagtgcttggaagaaggaacttgtcccatcttccatttccttggtgcctagagccaccctaacatttgatcccccaactaccaattcagacataaccaagcaagagaagcacactcttgaccctgcttctccagattttcttcctcttccttcatttgaacagtgctttccaaagagcatcaaagaaca

SEQ ID NO: 240254 - DNA, 399 bp, Glycine max
ggttctagtgtgtgattgtttgttgttgtaactcgttcttcttcttttgttgttctgtgtttgtgtttgttttttctctcacctgaaaatgtcttgctgcggtggtaactgtggttgcggaagctcctgcaagtgcggcaacggctgcggaggctgcaagatgtacccagacttgagctacactgagtcaaccaccaccgagaccttggtcatgggagtggcacctgttaaggctcaatttgagggtgctgaaatgggtgtgcccgctgagaacgatggctgcaaatgtggaccaaactgctcctgcaacccctgcacttgcaagtgaggtgttgggagagcaagcttcaagcagagatagcccttaattaagaataatgataaactattaatgtgtag

SEQ ID NO: 240255 - DNA, 381 bp, Glycine max
ggcagccaaagaaaagaaaatcctcaattttctgagcagccaaacactctctctctgtctctcgaaaattctcagtttgcagagaaaatctgaatcatgtcgtggcaagcgtatgtcgacgatcaccttctgtgtgacatcgaaggtaaccacctcactcacgctgctatcatcggccaagacggcagcgtttgggctcagagtaccgacttccctcagttcaaacctgaggagataactgccatcatgaatgactttaatgagcctggatcacttgctccaactggattgtatctcggtggcaccaaatatatggtcatccagggtgaacccggtgctgtcattcgagggaagaagggtcctggtggtgttactgtgaaa

SEQ ID NO: 240256 - DNA, 308 bp, Glycine max
gatcaccatgacggtcgccagcaccaagagactcttcaagatcacgctctctctcctccgcctcggcttcaactcctccaaatgcaaaacggcagccaagatggccgtggccaggatcaagctgctgagggacaagcgagaggtggtcgtgaggcagatgcgtcgcgacattgctcttcttctccagtctggtcaagacgccaccgctcgcatcagggttgagcatgtcatgagagagcaaaatgttttggctgcaaatgagttcattgaactcttctgtgaattagtggtggccaggctcgcaatca

SEQ ID NO: 240257 - DNA, 397 bp, Glycine max
agggattgttgctgtcatcatccgcagctgctgttattcgcatcgcagactaacagtgagccatggccgtcggaaagaacaagcgcatctccaaacgcaaaaagggtggcacgtaagaacgcagctgatcccttttccaagaacgactggtatgacattaaagccccttccctttttcaactgaaaaatgttggcaaaaccctcgtctctcgtactcacggtaccaagactgcttctgaaagacctacccatagactgtttgaggtctccctggctgatcctcaacgggatcacgatcaagcattcacgaacactaagttgagagctgaacatgtgcaatggaagaatgtcctgaccaatttctggggaatggatttcacaactgacaagctgacgt

SEQ ID NO: 240258 - DNA, 403 bp, Glycine max
gatgccgaaaagtagtaccaagatggcttcagttgtgtatctcctctttggcttccatctcattgttatcatgtcaagttccttacccgcaactagtgaagtgtttgcaaaacagtatccatccacagaacccgtggaagaaaaactcacccaactccacttctatttccataacaacataacgggggaacacccaactgctatgaaaactgttttgcctcctaaggggtccattcatggttttggggctacttacatgatggatgaccctctaactgaaggaccaagtccaacttcaaagcttgtgggaagatctcagggaatatacgctttggcttcacaacatgagcctgggttgctcatggtgacaaattttctcttcactttgggcatttacaatggc

SEQ ID NO: 240259 - DNA, 367 bp, Glycine max
ggccgaaaagtagtaccaagatggcttcagttgtgtatctcctctttggcttccatctcattgttatcatgtcaagttccttacccgcaactagtgaagtgtttgcaaaacagtatccatccacagaacccgtggaagaaaaactcacccaactccacttctatttccataacaacataacgggggaacacccaactgctatgaaaactgttttgcctcctaaggggtccattcatggttttggggctacttacatgatggatgaccctctaactgaaggaccaagtccaacttcaaagcttgtgggaagatctcagggaatatacgctttggcttcacaacatgagcctgggttgctcatggtgac

SEQ ID NO: 240260 - DNA, 313 bp, Glycine max
gaattccccattcccaaaatttctcattctccctttcctctccgaaccctcgatcactctcacgcgctcctatattcgctcctccaccgtcgctctctcgaacaaccacaacaccatcttcatcacatggcaaacgcagcatctggtatggcagtccatgatgactgcaagttgaggtttttggagctgaaggcaaaaaggacacaccgtttcatagtttttaagattgaagagcagcagaagcaagtcattgtggagaagcttggtgagcctgcccaaggctatgaagatttcactgccagccttcctgctg

SEQ ID NO: 240261 - DNA, 361 bp, Glycine max
gattgtaaagcattcttcgcctttctctctcttctttttactctctctctgtctctctctacgctttctcgttcgagatccctcaagggatccactaactgaaggagaaatggggttgacattcaccaagcttttcagccggcttttcgccaagaaggaaatgcgaattctgatggtgggtctcgatgcagctggtaagaccgccatcctgtacaagctcaaacttggagagatcgttaccacaattcccaccattgggttcaatgtggagactgtggaatacaagaacattagtttcactgtctgggatgttggtggccaggacaagattcgtcccttgtggaggcactacttccaaaac

SEQ ID NO: 240262 - DNA, 368 bp, Glycine max
gaaggcctgagattcggttctttacttgttgggttgttctgatcttctctcatagcaatcaaatcacactcccatcttctcatctcgtaaaccctaaaccccgttttcagtgacatcgagatcgatcgaacatggatgaggagtacgatgtgatcgtgttgggcacgggtctcaaggagtgcattctcagcggtcttctctccgtcgatggcctcaaggttctgcacatggacaggaatgactattacggaggagaatccacttcgctcaatcttattcagctttggaagagattcaggggagatgacaagcctcctccacatttgggagctagcagggactataacatcgatatgaaccctaagttt

SEQ ID NO: 240263 - DNA, 351 bp, Glycine max
  unsure (1)..(351): unsure at all n locations
gaaaaacanactccgaaagaaacagtcagaatcagaatcagaagaagcgagcaaagatgtcgggtcgtggaaagggacgcaacggtttgggtaagggaggagccaagaggcacatgaaggtgctccgcgataacatccagggaatcacaaaacccgccattcgccgtttggctcgcagaggcggcgtcaagagaatcagtggcctcatctatgaagaaacccgcggcgtccttaagatcttcctcgagaacgttattcgcgacgctgttacctacaccgagcatgctaggaggaagactgttaccgctatggatgttgtttatgctctcaagaagcaaggcaagactctct

SEQ ID NO: 240264 - DNA, 111 bp, Glycine max
gggacaaaaggattgatcgcgaaaaagatttcttgttcttattagaagatcgtgattggatccacatatgtttggtaaaaagaaagaaaaatattcttctttgagaataat

SEQ ID NO: 240265 - DNA, 325 bp, Glycine max
cgggatattgaaaaggcgcccaagcaagtttgttctttcgccgccgtcgctcaaaactcgcaaaccacaatgcctaagcagatccacgagattaaggatttccttctgacggcacggaggaaggatgcgaggtcggtgaaaatcaagaggagcaaggatgtcgttaagtttaaggttcgatgctccaagtatttgtacacgctttgtgtccttgatcctgagaaagccgataaattgaagcaatctcttcctcccggtttgagtgttcaagacctgtagaagtgctgagtgccgcagcgtgcgtttgtttatccttttgttgcct

SEQ ID NO: 240266 - DNA, 402 bp, Glycine max
  unsure (1)..(402): unsure at all n locations
ggcgtacgcagcttcatccctaacgcgtgcatagcagagtcagagacagagacgcagccatggggcggagacctgcgaggtgttataggcaaattaagaacaagccataccccaagtcacgtttctgccgtggtgttcctgatcccaagatcaggatttatgatgttggtatgaagaagaagggtgttgatgagtttcctttctgtgtccatctggttagttgggagaaggaaaatgtttcaagtgaggccctggaagctgctcgcattgcttgcaacaagtacatggccaaatttgctggaaaggatgctttccacttgagagtcagggtgcacccattccatgttcttaggatcaacaagatgctttcgtgtgctggtgctgataggctccanactggaa

SEQ ID NO: 240267 - DNA, 356 bp, Glycine max
gacagaaaagaaaaaggaaaccctagctggataggtcaaacatcatcatgtcggacgaagagcaccatttcgagtccaaggcagacgccggtgcctccaaaacctaccctcagcaagccggtaccattcgcaagaacggctacatcgtcatcaaaggacgcccctgcaaggttgtggaagtttcgacttccaaaactggaaagcacggtcacgccaagtgccactttgttggaattgatattttcactgccaagaaacttgaggatattgtgccctcttctcacaactgtgatgttcctcatgtgaatcgtactgattaccagctcattgatattgctgaggatggatttttgagt

SEQ ID NO: 240268 - DNA, 384 bp, Glycine max
gatccatttctcgcaacaacgcttaacctctctcattccccatttcctcacctccttcaaccgctgctaaattctagggttccgaaatggacgctggcggaaagatcaagaagggcgccggaggtagaaagggcggcggcccaaagaagaagccggtttcaaggtccgtcaaagccggtctccaattccccgtcggaagaattggccgttatttgaagaaaggaaggtacgctcagcgtgtcggtaccggtgctcccgtatacttggctgcagttctcgaatacctagctgccgaggtgcttgagttggctgggaatgccgcacgtgacaacaagaagaacaggattattccaagacacgtgcttttggcagtgaggaacgatg

SEQ ID NO: 240269 - DNA, 370 bp, Glycine max
ggcactgcaactttgctctctgtgaggcttcaatttctaattagggtttcgcttagagtaaccaataaccatgggagtcttcacctttgtcgtccgcaaatccggcagcgaatggagcgccaagcaacattccggcgacatcgaggcctccgccgattccaccttcgatctccaacggaagctcgtgcaggccgctctcgccgttgattcctccggtggagttcagtcctctttctctcccgtgtctcctacctccgctgtgttccaagtgataatgggtggtgcagtattcgttggaagtggtggtgctgttgcaactgcaactgcaagtggtgctgccgcagctgatgctgccccagctgctgagaaa

SEQ ID NO: 240270 - DNA, 342 bp, Glycine max
gacacaccatccgttctagtctcaacttctgctcttccaactcctacaacgcttttctctgcactcatgggcaaggtcaagatcggaatcaacggatttggaagaattggccgtttggttgccagagtcgctctgcaaagagacgatgttgaactcgttgccgttaacgaccctttcattaccaccgattacatgacatacatgtttaaatacgacagtgttcacggacactggaagcatcacgatgtcaccgttaaggacgagaagacccttctcttcggtgacaaggcagtcactgtttttggacacagaaaccctgaagagatccatgggggtcaactg

SEQ ID NO: 240271 - DNA, 398 bp, Glycine max
ggcgtacacagcctcaacaaccctaacgcgtgcagagcagagagagacgcagccatggggcgaagacccgcgaggtgttataggcaaattaagaacaaaccataccccaagtcacggttttgccgtggtgttcctgatcccaagatcaggatttacgatgttggtatgaagaagaagggtgttgatgagtttcctttctgtgtccatctggttagttgggagaaggaaaacgtttctagtgaggccctggaagctgctcgtattgcttgcaacaagtacatggccaaatttgctggaaaggatgctttccattgagagtcagggtgcacccattccatgttcttaggatcaacaagatgctttcgtgtgctggagctgataggctccgaactggaatg

SEQ ID NO: 240272 - DNA, 383 bp, Glycine max
gactcactcatacaatagagaccagcttttgcttctttgtgaacatggagatgaggaaatcatgtggcttcttcttcttgctcctcctccttgtctttgcttcccaggtggtggtgcagacggagggaagagtgtgtgagtcacaaagccacgggttccatggtttgtgtaatagagaccacaactgtgctttggtctgcaggaacgaaggtttctccggtggcaggtgcaaaggcttccgccgccgctgcttttgcaccaggatttgttgagatctcatcaaacactactcttgccatgcaaattaataaatcatagctaggccaaataaattgcatctactctttatccatttgggagctagcttacacaaacaactcata

SEQ ID NO: 240273 - DNA, 404 bp, Glycine max
  unsure (1)..(404): unsure at all n locations
gcagccactctgtgagagaaagagatagtgtggtagagagagaggagcggaggagagaaaatgacgacgaggttcaagaagaacaggaagaagagaggccacgtcagcgccggtcacggtcgtatcgggaagcaccgcaagcatcccggtggtcggggtaacgccggtggcatgcaccaccaccgcatcctcttcgacaagtaccatcccggtttcttcggaaaggtgggtatgcgctacttccacaaactccgcaacaaattctactgccccatcgtcaacattgataagctatggtccctcctaccccaggaggccaaggacaaggccaccgccgacaaggcgccattgctcgnatgtcaccagttcggttactttaaggttttgggtaaaagggttttgcc

SEQ ID NO: 240274 - DNA, 420 bp, Glycine max
ccaacccttcaatagggtggcaaaaaaacaaaaaaggggaaccaaaaatttgtaccgaaagggcttaacttgggggccccctttttccctgtgcatttcagggttataaggttaggttccttacaaccaataattgaatgtttaacaaaaaagtccccaacgtccctatccacaatacccgtggaaagactcacccaactcaacttttatttccataacaacataatgggggaacacccgactgctatgaaaattgttgagcctcctaaggcgtccatttctggttttgggactatttacatgatggatgaacctctaaccgaaggaccaagtccaacttcaaagcttgttggaagatgtcagggaatatatgctgaggcttcgcaacactgaactgcgatactcatggtaacgaatttg

SEQ ID NO: 240275 - DNA, 351 bp, Glycine max
  unsure (1)..(351): unsure at all n locations
aggggcaagagggtatagcgaaagacgttgaggttgctgaacgtggctccttccctgggaatgactaccacgaccctccatcagcatcactcattgatgctgacgagctcacaaagtggtccttttacagggctcttattgccgagttcattgccactttgctcttcctctacattactgtgctcacagttatagggtacaagcaccagacggatcatgctgatgcgtgtggtggggttggcattcttggcattgcatgggcctttggtggcatgattctcatccttgtctactgcactgctgggatttcatgangtcacattaacccagcantgacatttgggctgtttt

SEQ ID NO: 240276 - DNA, 355 bp, Glycine max
  unsure (1)..(355): unsure at all n locations
ggcgcctctgcgtgcaagagtgaaaaccttctcttacccttctctcaagtttcaagagatttcatcatggctccaaagaatgacaatgctccaccaccttcctccaagcccgccaaatctggcggtggcaagcagaagaagaagaagtggagcaagggaaagcaaaatgagaatgtgaacaatatggtgctgtttgatcanggcacctatgacaagctcctttctgaagctcccaaatacaagctcatcactccttccattctctctgatcgtttgaggattaatggatcacttgcaaggaaggctataagagaattgatggcaagaggttctatcacgatggtgtctgcccatg

SEQ ID NO: 240277 - DNA, 355 bp, Glycine max; identical to SEQ ID NO: 240276
  unsure (1)..(355): unsure at all n locations

SEQ ID NO: 240278 - DNA, 351 bp, Glycine max
gctctgcattcattcagcgttcatctcaatctagatttgtgtgcggtgcgtctccggtgaagagaagaagatggcgaccgtaccaggacagctcatatgggaggtcgtaaagaagaacaactctttcttggtgaaagagttcggaaggggcactcagagcgtgcagttcagcagagagcccaacaatctctacaacctcaacactttcaagtactccggtttggcgaacaagaaaactgtcactgttcaacctgcgggtaaagaccagtctgtgttgctggcaacaaccaagacaaagaagcaaaacaagcctgctgctttgcttcacaaatctgtcatgaaaaaggagtt

SEQ ID NO: 240279 - DNA, 368 bp, Glycine max
  unsure (1)..(368): unsure at all n locations
gatanggttgttgtcgttgcgactaacagttgctgcttcttccgccactcagcacttcgctccctctgtgcttcaccaagcatggccgatatcgaagctaccgttccagatccctctcaaatcgacgtcaaacttttcaaccgctggagcttcgacgacgttgaggttactgatatgtctctggctgattacattggagtgtccccgtcaaagcatgctacatatgttcctcacactgctggtacgtactcagtgaagaggttcacgaaggcgcagtgccccattgttgagagactcaccaactctctcatgatgcacggaaggaacaatggaaagaagctcatggctgtcacgattatcacgcatgc

SEQ ID NO: 240280 - DNA, 372 bp, Glycine max
tggatgcgattggcaacatgcttgtgaagtttcctcctctactcacttacagtctgaacaagaagattagaccagtggtcatattcttgatgaccaaagctggagtcagtgagaaagatatcgccaaggttgtagctcttggacctgagctgttgggatgcaatatagcacataagcttgatctaaatgtaaaatattttttgtctcttggcatacgtcttcggcaattgggtgagatgattgctgattttccaatgctgctcagatacaatccagatgtccttcgtcccaaatatatttatttgcgaaaaacaatggtccggcctttgcaagatcttactgagtttccaaggtttttcagctattctcctg

SEQ ID NO: 240281 - DNA, 344 bp, Glycine max
gattgttgtcgtttcgttcctcactgtcactgactcactcttgttttcgcttcgctactcatcatcctaataagtaccatcaagaaacaaacaatgtttctcaaagtccagctgcactggaatgtcatcatcgctgctgaaaatctgcaaacggaaggtctgatgcttcataaggcaatcattgtccgccttctgagtgactttgctgtgaataatgccaccaaagatctgggatactttcttgcagtgaccacactggagaaaatacgggaaggaaacgtcacacaacatactggggatgtgctcttccctgtggtttttaatgccatcatcttcaagttttt

SEQ ID NO: 240282 - DNA, 387 bp, Glycine max
  unsure (1)..(387): unsure at all n locations
ggtaatataagattctcttctttaatccttttgtaatttcaatcattcttaatctttgtgaaaaataatgttcatcgagaattttaaggttgagtgtcctaatgtgaagtacaccgagactgagattcagtccgtgtacaactacgaaaccaccgaacttgttcacgagaacaggaatggcacctatcagtggattgtcaaacccaaatctgtcaaatacgaatttaaaaccaacatccatgttcctaaattaggggtaatgcttgtgggttggggtggaaacaacggctcaaccctcaccggtggtgttattgctaaccganagggcatttcatgggctacaaaggacaagattcaacaagccaattactttgggtcccctcacca

SEQ ID NO: 240283 - DNA, 375 bp, Glycine max
gacatacacacccacatcgaccatcttctctcttccctttcagatcacacgcacacagttacgctcttcaaatctatctcttctcagcgattcttgcttcaagttccagaaatgggtgtggctcaaaacattcccgatgcggaggagggaaccttggagattggcatggaatacagaactgtttctggagttgctgggccattggtcattcttgataaagttaagggacccaagtttcaagagattgttaacattcgcttaggagatggtactactcggcgtggacaagtgctagaagttgatggtgaaaaggctgttgttcaagtctttgacggtacatctgggattgacaataaatttacaactgtgcaattt

SEQ ID NO: 240284 - DNA, 368 bp, Glycine max
gatataacactgtcactcttacaatctcagctcatagcattcttcttcttccaacgagaatcagtctttgtgttccaaatggctcgtacgaagcaaacagcaagaaagtccaccggaggaaaagctccaaggaagcagctcgccaccaaggcagcacgtaagtccgctccggcgacgggcggcgtgaagaagccccaccgtttcaggccggggacagtggctctgagggagattcggaagtaccagaagagcacggagcttctcataaggaagcttcctttccagaggctcgtaagggaaatcgctcaggacttcaagaccgatctacgcttccagagcagtgctgtctccgctcttcaaggaagcgc

SEQ ID NO: 240285 - DNA, 368 bp, Glycine max
  unsure (1)..(368): unsure at all n locations
ggcacttcaattgcaatcaaattagttcattctctttgcgcagttccctacctctcctttcaagatgcagatcttcgtcaagaccctcaccggaaagaccatcacccttgaggtggaaagctctgacaccatcgacaacgtcaaggccaagatccaggacaaggaaggaattcccccggatcagcaacgtctcatcttcgccggaaagcagctcgaggacggccgtaccctcgccgactacaacatccagaaggagtcaacccttcaccttgtccttcgtctccgtggtggcatgcagatcttcgtcaagactctcactggcaaaaccataaccctagaggtcgaaagctctgacnacattgacaacg

SEQ ID NO: 240286 - DNA, 365 bp, Glycine max
gatagcaaaatcgtttctccaatttaatcaccattgtacaacccaattcccttcgtcgttttcgattaagagagcaatggcacgtaccaagcaaaccgctcgcaagtccaccggaggaaaggctccgaggaagcaattggcaaccaaagccgctcgcaagtcagccccggcgaccggcggagtgaagaagccccaccgcttcatgccaggaacggtggctctgagggagattcgaaagtaccagaagagcaccgaacttctgatccgaaaactcccattccagaggctcgtcagagaaatcgctcaggatttcaaaaccgatctccgctttcagagcagcgccgtttcggctcttcaggaagccg

SEQ ID NO: 240287 - DNA, 363 bp, Glycine max
ggtagtataggattctcttctttattccttttgtaatttcattcattcttaatctttgtgaaaaataatgttcatcgagaattttaaggttgagtgtcctaatgtgaagtacaccgagagtgagattcagtccgtgtacaactacgaaaccaccgaacttgttcacgagaacaggaatggcacctatcagtggattgtcaagcccaaatctgtcaaatacgagtttaaaaccaacatccatgttcctaaattaggggtaatgcttgtgggttggggtggaaagaacggctcaaccctcaccggtggtgttattgctaatcgagagggcatttcatgggctacaaaggacaagattcaacaagc

SEQ ID NO: 240288 - DNA, 340 bp, Glycine max
  unsure (1)..(340): unsure at all n locations
gattcaaacgcacactctctctcaccaaagccttcctagaacganaaaaaaaaggagagcaattttccctcaccaaagaagaagaagcaaacaatggccgatcaacttaccgatgaacagatctccgagttcaaggaagccttcagcttgttcgacaaggacggcgatggttgcatcacaaccaaggagcttggaactgttatgcgttcattggggcaaaacccaactgaggcagagctccaggacatgatcaatgaagtggatgctgatgggaatggtaccattgacttccctgagttcctaaatctcatggccaggaagatgaaggacactgattctg

SEQ ID NO: 240289 - DNA, 345 bp, Glycine max
cgggggctccgccatttttcgtagctgctgttcttgcgcgtgaacaagcctcaggtaagccaaaaccatggttaagcataacaatgttatcccaaacggtcacttccgtaagcactggcagaactatgtgaagacttggttcaatcagccagcacggaagacaaggagacgattggctcgtcagaagaaagctgtgaagatattccccagacctacggctggacctctcaagcccattgtacatggtcaaactttgaaatacaacatgaaagtgatacgtggaacgggattttctcttgaagaactcaacgctgcacggattcgcaaaaagcttgcaccaaccat

SEQ ID NO: 240290 - DNA, 361 bp, Glycine max
gagctgcgaaaacctagtgcaccgtaagggttgtgaagcatgcagagaagagccatggtgcacgtttctttctaccgaaactatgggaaaacgttcaagaagcctcgtcgtccctacgagaaggagcgtttggacgccgagttgaagctggtcggtgagtacgggcttcgctgcaagagggagttatggagggtccagtacgccctgagccgcatccgtaacaacgccagaaacctattgacccttgatgagaagaaccctcgccgtatcttcgagggtgaagcccttctccgaagaatgttccgttacggactcctcgacgagacacagaacaagctggattatgtgttggctctcaacg

SEQ ID NO: 240291 - DNA, 368 bp, Glycine max
gacacaaactttattacagttgttgtattgtaattaagcaagaatattaggcaatggagtcttctagaacttcaactactcttgctctttttttaaccatcaatttgcttttctttgtcatggcaagtggctgctacacttgcacacagcctaagccaaaccctatcccattcccttaccctaaccctagtcctgccgcgaagagctgccccagggacgcacttaagctcggagtgtgcgcaaacgtgcttaatggaccaattggtgctattgtagggtcaccaccggaccacccatgttgctcagtgctagaagggcttcttgatcttgaagttgcggtttgcctctgcactgccatcaaagccaac

SEQ ID NO: 240292 - DNA, 383 bp, Glycine max
ggtgctcactcatctatctattataaccaaacactcttcttcatattcttcttcttcttcttgttcttgttctatctgtgacgagcatcatggcctcgagagcagtgctattgttggccatgtgtgtgcttccggccatggttgtggccattcgcccagcaaagaaccctttttgcgtgaagggtcgcgtctactgtgacccttgccgtgctggttttgagacctcagcaaccacctacattgccggtgctgagattatgttgcaatgcaagagcagggttagcaacgaggttgtgtacaccaagaaggggtacactgactcaactggagcatatacaatgtacgtggacgaggatcacgcagattaaatatgcagtgccaag

SEQ ID NO: 240293 - DNA, 340 bp, Glycine max
gacacgcaactatttctgactacgttttgctctacgcctctccctctctctcaaaaatcgttctcttcgattttagggttttgttttgctgctgcctccgttccccccttctcataaacaacgcgttttctcttctgcttcgtatctattctttgcttttggttttggttgattcaaggccttcacagcattcgttgcggcattttaatcgatttatccaagcaggactgaatgaactaatggagtctaaaggtgggaaaaagaagtctagtagtagtagtagtaaatcattgttctacgaagctcccctcggatacagcattgaagacgttagaccaaa

SEQ ID NO: 240294 - DNA, 352 bp, Glycine max
ggcccaaaatattttcatagcattttcagaggaaaatggcgggtacggtttcgacttgtttcttcttcgtgtttcttctttctctccttcttccttttcagatctccgctgaggaatcctcggagaaggagttcgtactcacattggatcactctaactttcacgacactgtcagcaagcacgatttcatcgtcgtcgagttctacgccccatggtgtggtcactgtaagaagcttgctccggagtatgagaaagctgcttctatcttgagtagtcatgatcctcctattgttttggctaaagtagatgccaatgaggagaagaacaaagaccttgcatcacaatatgatgt

SEQ ID NO: 240295 - DNA, 354 bp, Glycine max
gcattctattcattcaagattcagcaagtgcgttttggaagcagagaccgaaatacttcgagacggcccgtacaaagcaaactgctcgtaagtcaactggaggaaaagctcccaggaagcagcttgcaaccaaggctgcacgtaagtctgcaccaacaactggtggtgtgaagaagcctcatcgttatcgccctggaactgttgctcttcgtgagattaggaaataccagaagagcactgagctcctaatcaggaagcttcctttccagaggttggttcgtgaaattgcccaggatttcaagactgatctgcgtttccagagccatgctgtgcttgcattgcaagaggctgctg

SEQ ID NO: 240296 - DNA, 373 bp, Glycine max
gacacgttcacattcaggaatcgttttcttcagaaatttgccatcgttgagagaagcgtgagagccttagtcgttcaagatgagagctaagtggaagaagaagcgcatgaggaggttgaagaggaagcgccgaaagatgagacaaagatctaagtaggtgcttgagcaggagttgagatgagctttccatctgctaccagcctcatgacattttaggctgttatggctcttatgatcttgaggtctagtcgctaggggagcttcgctcttgacttagtttgctttactggtcctggtcctggtccaagactattgagtgtgggttaagttgtgatgtttagtgttttgtggtatctaattatgtactggtttt

SEQ ID NO: 240297 - DNA, 365 bp, Glycine max
  unsure (1)..(365): unsure at all n locations
gtctccacacaatttctctctcctctctctctctacaaatccttctttctttcttctcttcgctgctcactgtagccatggctttcagagtangaggagcgggagggggaaatgcctcttctggcatgggtgttgctgagcatagtgtaaacaccttcctggaattgcagaggaagaaagttcatcgctatgtgatttttaaaattgatgagaaaaagaaagaggttatcgttgaaaaaactggaggccctgctgagagctatgatgatttcactgcatccttgcctgaaaatgattgccgatacgctgtctttgactttgattttgtgacatctgagaactgccaaaagagcaaaatctttttt

SEQ ID NO: 240298 - DNA, 363 bp, Glycine max
gaaggttttgcgctgttgttgctgctcatcctccgtaacctccgagctctgcaccgaagaacgaagccatggggaagacacatggaatgggatctgctcgcaagctcaagtcccaccgcaggaggcaaaggtgggctgacaagtcatacaagaaatcacatcttggaaatgaatggaagaaaccttttgctggttcatcccatgccaagggaattgtccttgaaaagataggtattgaggctaagcagcccaactctgccattcgtaagtgtgccagggttcaacttatcaagaatgggaagaagattgccgcttttgtccctaatgacggttgcttgaactacattgaagagaatgacgaag

SEQ ID NO: 240299 - DNA, 359 bp, Glycine max
gaggcgaggtagtgagatagtgatacaacacagagtgcgttgttgctcattcgtcacaactcacagccaacatgggtaacgccagagattcgatgcacaagaagcgtgtcaatgatggcaagaagatggcatggaggacgacgacatggtatgagcatggtctccagcctgctaacactaagcagtctagcggtaagacattcaggaggatcctggttagaagtggaaatgtgaactggagggcactcatattggattctggaaattactcctggggaactgaagctgtaactcgcaagactcgtatactagatgtggtttacaatgcctcaaactcctatcttgtgcgtactcagaca

SEQ ID NO: 240300 - DNA, 359 bp, Glycine max
gactctgttgttttccaaaaccctaatttatcgaaaggtagggttttgcagagcctcctcctccgttaccagtttcttcttctttatcctctctcctttcttcttccattcctctaacctaagatgggcaagtcaagcaagaaatcagctatcaaggttgacgctgctccagctgtggttccgccatccaagtctgccaagaatggaggcaagcgacaagctcaagatgaaattgagaagcaagtgagtgccaaaaaacagaagatagaggaggttgctcagaagcaaaagaatgaggccaaggtgcaaaagaatgaagccaaggtgcaaaagaagaaggaaagtagttcagatgattc

SEQ ID NO: 240301 - DNA, 375 bp, Glycine max
gatccaaagcttcttcagttattcatctgcttactaaaatttcttccattcttagctttgttcaatcaaagttttttaagatggcccagagaaatgttactgctaattcttcttttgaaaggactagcttgccttccctagatcaaaagttggccatggccaagcgctgctctcatgagggtgtgatggcaggagcaaaagcagctgttgttgctactattgctactgccataccaactctggctagtgtaaggatgcttccttgggcaagagccaatctcaatcactctgctcaagctctcataatttccacagtggcgggagcagcatatttcatagtagctgacaagactgtcttggcaactgctagaaaga

SEQ ID NO: 240302 - DNA, 375 bp, Glycine max
ggagagagagagagaaatggagaagacaggagtgttatcggcgaaggaggcattcgagaagcttgaaaaggtgggagaagggacatatgggaaggtgtacagagcaagagagaaggcaactgggaagatcgtggctctgaagaagactcgtctccacgaggacgaagaaggtgtccctcccaccactctccgtgaggtttccattctgcgaatgctctctcgcgatccccatgtcgttaggttaatggatgtcaaacaaggtcagaacaaggaagggaagacagtgctctacttggtatttgagtacatggacaccgatctcaagaaattcatacgctctttccgtcaatctggggaaaccaatcctccccatat

SEQ ID NO: 240303 - DNA, 370 bp, Glycine max
gaattttgaaaataaagaggaaagcttgaagcataagagagagatgtcatcatcttcagacctggacaggcaaatagagcagttgaagaggtgtgagcctcttaaggagtctgaagtgaaggtgctctgcctcaaagccatggaaatcctcgtcgaagagagcaacgttcaaagggtcgacgctcctgtcatcatatgtggtgatattcacggtcagttttatgacatgaatgagcttttcaaagtatgatgggattgccccaaaactaagtagttattcctgggggattttgttgatagagggttttactcggttgaaacgtttctgcatctgctcgctcttaaggtgaggtatccagattcgataaca

SEQ ID NO: 240304 - DNA, 356 bp, Glycine max
  unsure (1)..(356): unsure at all n locations
ggctccgccatttttcgtagctgctgttcttgcgcgtgaacaagcctcaggtaagccaaaaccatggttaagcataacaatgttatcccaaacggacacttccgtaagcactggcagaactatgtgaagacttggttcaatcagccagcacggaagacaaggagacgattggctcgtcagaagaaagctgtgaagatattccccagacctacggctggacctctcaggcccattgtacatggtcaaactttgaaatacaacatgagagtgagaggtggaaggggattttctcttgaagaactcaaggcagcanggattcccaaaaagcttgcaccaaacataggtattgctgttga

SEQ ID NO: 240305 - DNA, 450 bp, Glycine max
  unsure (1)..(450): unsure at all n locations
gtacgtccagaattcacggcgaccacgcgtcaagccaccctccgcccaaccctcccaacggcgccaaaaaaacacaaaaagggaaaattcctaaaaaaaaggaaaaaaggttttaaaaatgaagagcaaaaaagaaagatttaacgtttgagcaactaagttcccagaaaggcaaccaattggtacagcagctcaaggtgacaangactacaaagaaccacccccagcacctttgtttgagcctggtgagctaaagtcatggtccttctacagagctggaattgctgagtttgtggccactttcttgttcctctacattaccatcttaactgtcatgggtgtcaacaggtcaccctccaagtgtgcctctgttggcattcaaggcattgcttgggcctttggtggcatgatctttgcccttgtctactgcactgctggaatttcaagggg

SEQ ID NO: 240306 - DNA, 360 bp, Glycine max
ggcagcgcttgagaccaagccccactcaaccaccacaccactctctctgctcttcttctacctttcaagtttttaaagtattaagatggcagagacattcctatttacctcagagtcagtgaacgagggacaccctgacaagctctgcgaccaaatctccgatgctgtcctcgacgcttgccttgaacaggacccagacagcaaggttgcctgcgaaacatgcaccaagaccaacttggtcatggtcttcggagagatcaccaccaaggccaacgttgactacgagaagatcgtgcgtgacacctgcaggaacatcggcttcgtctcaaacgatgtgggacttgatgctgacaactgcaa

SEQ ID NO: 240307 - DNA, 347 bp, Glycine max
gaaggtttttgaatgctgtgctgttatcctaccattctcttctgcaactttcgccgtcagcttcattcaccaaggttgtccttcacgatagcgcatttttcctacaacgattattgtatctcagctcgaatatttctgagatcggaaagagatgcgaaaggggtgagaaccgcttttggtaatacactcgtcttggatttaagactcccagggaatccatctcacgaagatacattcacaagaagtgacccttcactgaaattgctcctaactgtggacgtatctagccttgaacatatcatagtgctaacatgtccaagtgtattaatgatcagaagaattatcgc

SEQ ID NO: 240308 - DNA, 331 bp, Glycine max
  unsure (1)..(331): unsure at all n locations
gccaccagtacagaaaacgcagttctcaccatttccctctcgattgtgagacttgttgttgttaactgaacttttctgagcaagaatgtctgggcgtggaaagggaggcaagggtttgggaaagggaggagcgaaacgacaccgtaaggtgctgcgcgataacattcagggaatcaccaagcccgcgattcggcgtttggctcgtangggtggcgtgaagcgtatcagtggtctcatctacgaagagacacgtggcgtgctcaagatctttttggagaacgtgattcgtgacgccgttacctacactgagcatgctaggagaaagaccgtt

SEQ ID NO: 240309 - DNA, 357 bp, Glycine max
gacacaaactttattacagttgttgtattgtaattaagcaagaatattaggcaatggagtcttctagaacttcaactactcttgctctttttttaaccatcaatttgcttttctttgtcatggcaagtggctgctacacttgcacacagcctaagccaaaccctatcccattcccttaccctaaccctagtcctgccgcgaagagctgccccagggacgcacttaagctcggagtgtgcgcaaacgtgcttaatggaccaattggtgctattgtagggtcaccaccggaccacccatgttgctcagtgctagaagggcttcttgatcttgaagttgcggtttgcctctgcactgcca

SEQ ID NO: 240310 - DNA, 371 bp, Glycine max
ggttgtcaagcctgccgagaaaaccctagttcgcttgcagtcacacaggaggccaatcctattcatagctcgagatgggtgaagaagtgaaggtagttgttccagaatcagtgttgaagaagcgcaagagggaggaggaatgggcgttggccaagaagcaagaactcgatgctgccaagaagaagagagccgagagccgcaaactcatctacaacagagctaagcagtacgctaaggagtacgatcaccaggagaaggaattgattcggttgaaacgcgaggccaagctgaaaggtggtttctatgtggatccagaggctaagctgttgtttaatattcgcattcgtggtaataatgccatggaacccaaa

SEQ ID NO: 240311 - DNA, 194 bp, Glycine max
aattgagtatcaaggagttaaagaatttaagacaaaataccaaattaaagtagatcaattttttttcattcccgaggaagtgcatattttaccagaatcttcttccataatggtacggaacaatagtatcgttgaagtagatacactaatcactttaaatataagaagtcgagtaaggggattggtccgattgg

SEQ ID NO: 240312 - DNA, 385 bp, Glycine max
ggagcaaaaccctaatccctatttttcttcctcagtagtgtcatttacgcttctcttctctgcagcaactatgcctaaccctaaggtcttcttcgacatgaccatcggcggtcaatctgctggccgcatcgtgatggagctctacgccgacgtcactccccgcaccgccgagaacttccgcgcgctttgcaccggcgagaagggcgtagggcggagcggcaagcccctccactacaagggctcgtccttccaccgcgtgatcccgagtttcatgtgtcagggtggcgacttcaccgccggaaacggaaccggcggcgagtcgatttatggcgccaagttcgccgacgagaacttcgtgaagaagcacaccggtcccggcatcctc

SEQ ID NO: 240313 - DNA, 394 bp, Glycine max
agacgggtgccaaaaaaagaaaaaaggggacatcagtcagtcattacgtattattcgtctacagtagtgtcaattacgcttctcctctctgtaacatgtacgaatacttataaggtcttcttagaaataaccttcagcgggtaatcagccagccgaatcattatagatccaggttcctacataactcaccacaccgtcaaaaatgtccacttgatttgcaggatctaaaaagtcgtagggcagataggcattttgatcaatacatgggctcggtcctcgatcacgtgatccagattttcatgtgtcacagtagcaacttcaccgtaggaaagatacctcgtagcgaatatatttaaggctccatgttcaccgacgagaacttcttaaaaatcca

SEQ ID NO: 240314 - DNA, 363 bp, Glycine max
gacaactccataacacaaggcagaaagcaagctcatcctagagttttaaaaatggcagcagcctcctccatggctctctcttccccatccttggctggcaaggccgtgaagctgggcccatcagcccccgaagtcgggagggtcagcatgaggaagaccgtcaccaagcaggcctcctccggaagcccatggtacggcccagaccgcgtcaagtacttgggcccattctctggcgagcccccgtcctacctcactggcgagttcccaggtgactacggctgggacactgctgggctttcggccgacccagaaaccttcgccagaaaccgtgagctcgaagtgattcactccaggtgggccatg

SEQ ID NO: 240315 - DNA, 376 bp, Glycine max
gggactcactcttcacactcactcacactgaatggcttctgaaggcgaccatcaccaccaccaccaccaccatcaagatcacgatcatcatcatcatgatcatgatcaccatcatcatcacgatggagagggagagaccaactcatgggtaggtaaggatgggaaggtgtaccatagccacgatggtctggcgccgcattctcacgaacccatttactcccccggctacttcaccagaagagctccaccgcttctcaacagaaacttcaacgaaagagccttcaccgtcggaatcggtggacccgtcggtactggcaaaacagctctcatgttggccctttgtgaactcttgcgcgaaaactacagtctcgcagct

SEQ ID NO: 240316 - DNA, 238 bp, Glycine max
gacattcatattttcctttcgtttcctttcattttccctcactttctcgctccccaaacgcccctctctctcctccaatggccgaccagctcaccgacgaccagatcgccgagttcaaggaggccttcagcctcttcgacaaggacggcgatggttgcactactaccaaggaacttgggactgttatgaggtcacttggtcaaaacccaactgaggcagaactgcaggatatgataaa

SEQ ID NO: 240317 - DNA, 359 bp, Glycine max
gacagactacagtaatattttatttgcactactactactactttatttaagcagaagcaggcgagtgaggaagagcgaagagtgaagagaatggctcccaagggtttaacctttctggctgtgttaatatgcgtttcagcactgtcactgagtccttctgttgcgggggaagggcaaaataatggccttgttatgaacttctacaaggaatcatgccctcaggctgaagacatcatcacagaacaagtcaagcttctctacaagcgccacaagaacactgctttctcctggctcaggaacatcttccatgactgtgctgttcagagttgtgatgcttcactgttgctggactccacaag

SEQ ID NO: 240318 - DNA, 387 bp, Glycine max
gccgctcaaacgcaaaggaccagaagcctaagcctcaaacatggcaaaagggttaaagaaacacctgaaaaggctaaatgctccaaaacattggatgcttgacaagcttggtggtgcctttgcacccaagccatcatctggaccccacaagtcccgggagtgtcttcctctgatcctcatcctacgaaacaggctaaagtatgctctaacatatagagaagttattgccatcttgatgcagcgccatgttcttgttgatggcaaggttaggacagacaagacataccctgctggtttcatggatgttgtttctattcccaaaacaaatgaaaatttccgtctactgtatgacacaaaaggtcgattccgtctccactctgtaaagga

SEQ ID NO: 240319 - DNA, 336 bp, Glycine max
atcacgacatcacatcgcagagaagaacagagagagatccatccatcaattccaatggccgatcagctcaccgacgaacagatctccgagttcaaggaagccttcagcctcttcgacaaggacggggatggttgtagtaccaccaaggaacttgggaccgtgatgcggtcacttggccagaacccaactgaggcagagctgcaggacatgataaatgaggttgatgctgatgggaatgggaccattgatttcccagaattcccgaatctcatggctcgcaagatgaaagacactgattcagaggaggagctgaaggaggctttccgcgtgtttgac

SEQ ID NO: 240320 - DNA, 105 bp, Glycine max
gaagaaagctgctagcagagggaagttctacacttttttgtttggattgatcgagtgtactttttcttttcgagattggcttggtgtgcagtggaaagagggtgc

SEQ ID NO: 240321 - DNA, 408 bp, Glycine max
ggctattgctaagagtaccaaacaatttttgttcattcagagctttactcactcctttgcacgtctcaatctgagtcttcacttcatcgtttttgggattctctctctcaataatggcagcacgctttcaatctgcagctgtactatgctggtgttccctatagggaaagatgaaattgaagtctaagaaaggatggaaatctattgtaccacttcatttgaaaggaaaatccgcaagccgtttttctttatttcgcaaagtcaattctgctggctatggacctggcaaaacaccagtttatctgaatgtgtatgacttgacacccatgaatggttatgtgtattgggctggtcttggtatctatcactctggtgtagaagttcatggtgtagaatacgcgtttggag

SEQ ID NO: 240322 - DNA, 374 bp, Glycine max
gactcagccgctgcgaggcgaacagagagacccgaagccagatttcaagatgaagttcaacattgcgaatcccaccactggttgtcagaagaagctggagatcgatgatgacctgaagctacgagcattttgggacaagaggatctcacaagaggttgttggtgatgctctgggtgaggaattcaaaggctatgtcttcaaaattactggaggttgcgacaagcaaggatttccaatgaagcaaggagtgttgacccctggtcgtgttcgcctcttgctgcatagaggaactccttgtttccgtggttatggaaggcgcaatggagagcgtaggaggaagtctgttcgtgggtgcattgtcagccctgacctct

SEQ ID NO: 240323 - DNA, 386 bp, Glycine max
agagacgacagaaggggaaaacagagagtgatttcagtgagtgatcggtgttcacttgatctcatcataatcgtcagcgtcaattgaagaagatgccgatcagaaacatcgccgtcggaaggcctgaagaggcgactcaccccgacacgttgaaggcggctttggctgagttcatctcaaccttcatcttcgtgttcgccggctcaggctccggcatcgcctacaacaagctcaccgacaacggcgctgccacccctgccggcctcatctccgcctccatcgcccatgcattcgccctcttcgtcgccgtctccgtcggcgccaacatctccggcggccacgtcaaccccgccgtcaccttcggcgccttcgtcggcggcaacatc

SEQ ID NO: 240324 - DNA, 376 bp, Glycine max
gataacacaacgcaacacaacgcgcactctctcttttctctcttaacacaaaaaccctatcgttcttcgcggtttcgccgattctcgccatgccgaaagccaaatccgacgccaaagccgccgatagccggttgaagcgcaagggcgctggtgctggaaggaagcaatcgaagaaagctgctaaggatcctaacaagccaaagagacctccaagcgctttcttcgttttcatgtccgagttcagagagcagtttaagaaggagcatcctaacaacaaatccgtcgctgttgtcggtaaagctggtggtgacaaatggaaatcgctgtctgatgctgaaaaggcccccttcgttgccaccgcccgaaaagaagaaac

SEQ ID NO: 240325 - DNA, 367 bp, Glycine max
agggaaagtagacacagccatgtccactactggtactgttctggcttccactccaacacaaaggctattatgcaaagtggcattggttactggtggagcgtctggaattggagaaagcattgtgcgcctcttccatatccatggtgctaaaatatgtatagctgatgtgcaagacaaccttggaaagcacgtctgtcagtctcttggtgatgaagcaaatgttgtttttgtccattgtgatgttacagtagaggatgatgtttcccatgcagtggacttcactgtgggtaaatttggcacccttcacatcatagtcaacaatgccggaatttctggatcaccttgttccgatatccgcaatgcagac

SEQ ID NO: 240326 - DNA, 366 bp, Glycine max
  unsure (1)..(366): unsure at all n locations
ggaaaagaggcgaaggtagctcatgacatgttccttgaaggaaaaaaaacgcagttgaaagattgaagctcgagatgtcggggaaaggcgcaaagggtttgataactgctaagaacccttcttcctctaaggacaaagacaagaaaaaacccatttctcgctcctcaagagccggtcttcagttccctgttggacgcattcatcgtcttctgaagtcaagggtgacagcacatggaagagttggggcaacagctgcagtttattctgctgccatcctggagtatttaactgcagaggtgttggagttggccggcaatgcgagcanagatctgaaggtgaagcgtattacccctagacatctacagc

SEQ ID NO: 240327 - DNA, 386 bp, Glycine max
  unsure (1)..(386): unsure at all n locations
gacttctcttcacacctttgttcactcttcttctcttgcggctagggttttagcgcagcttcttctagatttaaggaagatgggtaaggaaaaggttcacatcagtattgtggtcattggccatgtcgactctgggaaatccactaccactggtcacctgatttacaagcttggaggcattgacaagcgtgttattgagaggtttgagaaggaagctgctgagatgaacaagaggtctttcaagtatgcctgggtgctggacaaacttaaggctgagcgtgaaagaggaatcaccattgatattgctttgtggaagtttgaaacaacaaagtattattgcacagttattgatgcgcctggacatanggatttcattatagaatatg

SEQ ID NO: 240328 - DNA, 372 bp, Glycine max
gagggttttatctcattaacgtttcttctcttcactctgcccgctgcatcaatggcttcagagaagaaactttcgaacccaatgagggagataaaagtgcagaagctcgtcctcaatatctctgttggcgagagtggagatcgtctcaccagagcctccaaggtgttggaacaacttagtggccaaaccccagtgttttccaaagcaaggtacactgttcgttcctttgggattagaagatatgagaagattgcatgctatgtcactgtcagaggtgacaaggcaatgcaacttttggagagtggtttgaaggtgaaggaatatgaacttctcagaaggaacttcagtgatactggttgcttcggctttggt

SEQ ID NO: 240329 - DNA, 358 bp, Glycine max
ggcggcttggtttgttctacttgttcttacactgggattaggacgagacgtttctacactaacaataatacctttccctctttctcctttaccttcccccaccaacctcaatcattctctttccctaaacctctcagactcatgtctcagcctttgaccaccaactctgctgatggtgattcctccgtcgccgcacctcccatcctcttcgattatcatcttatcgaccaaaaacttctccaaaacatagtctacgatgctcttgtctggagcaccctcaactgcctccttgttggtgacaaatcagttcagagatcaggaacagttcctggtgttggcctggtgcatctcccgcttt

SEQ ID NO: 240330 - DNA, 363 bp, Glycine max
gcttcagctacatagctccatcactgcagcattagggtttatcatctgcttcaatggggaagggaacagggagcttcggtaagaggaggaacaagacccacactctctgtgtgaggtgtggccgccgcagcttccacctccagaagagtcgctgcgccgcttgtgctttccccgctgcacgcacgcggaaatataactggagcgtcaaggcaattcgcagaaagaccaccggaactggcaggatgagatacttgcgtaacgtgcctcgccgtttcaagagtggcttcagagaaggtaccgaagctgcaccaaggaagaagggagcagctaccactgcatagacctttcaaagatcgttctcgt

SEQ ID NO: 240331 - DNA, 381 bp, Glycine max
  unsure (1)..(381): unsure at all n locations
gacgttcacattcaggaatcgttttcttcagaaaatttgccatcgttgagggaagcgcgagagccttcgttgttcaagatgagagctaagtggaagaagaagcgcatgaggaggttgaagaggaagcgccgaaagatgagacaaagatctaagtaggtgcttgaacaaggagtggagatgatgtgcttttccatctgctaccagcttcatgacattttatgctgtcatggctcttatgatgatcttgaggtctagtggcgaggggagcttccatcttgactttagtttagctttactggtctaaagattgctgttttagtgtgggttaagttatgatattgagagttttgtngtatctaattatgtactggtacgttttgt

SEQ ID NO: 240332 - DNA, 329 bp, Glycine max
gacacagcctcaacagccctaacgcgtgcagagcagagagagacgcagccatggggcgaagacccgcgaggtgttataggcaaattaagaacaaaccataccccaagtcacggttttgccgtggtgttcctgatcccaagatcaggatttacgatgttggtatgaacaagaagggtgttgatgagtttcctttctgtgtccatctggttagttgggagaaggaaaacgtttctagtgatgccctggaagctgctcgtattgcttgcaacaagtacatggccaaatttgctggaaaggatgctttccacttgagagtcatggtgcaccca

SEQ ID NO: 240333 - DNA, 245 bp, Glycine max
ggaaagatttgatcagctggaaagcaaaagagaaaacagaaaaaaaaaaaaaaaaaaaaaaaaaaaaaaaaaagaagaacaaaaaagataaaaacaaaaaaacgaaaaaaaaaaaaaaacaaaacacaacaaaagcggccgcccaaaaggatccaaccttacgtccccttacaagcaacgtcaaagcccttcaaaaggggcaccaaaattcaatccacgggccgccgattaacaactccccaacg

SEQ ID NO: 240334 - DNA, 350 bp, Glycine max; identical to SEQ ID NO: 240194

SEQ ID NO: 240335 - DNA, 373 bp, Glycine max
ggctgaagattgaagaacagtcgtcggctcctcgctcgcccttcgctgctgcgccatcaccgtgctcttctcaaagcgattttaaccgaaccgcgttctttttttcttcagaaatcgagcataaggatttgaggattgaagtattgaacaccaaatcctttatacttgttgggcaagaagggagggaaaaaggagatacacaaaaatgtttttccacatagtgctggagcgaaatatgcagctgcatccacgctactttggtcgcaatcttcgtgataatctcgtttccaagctaatgaaagatgtggaaggcacttgcagcggccgacatggatttgtggtggcagttacagggatagaacacatatggaaa

SEQ ID NO: 240336 - DNA, 370 bp, Glycine max
gaccacaccgccgctcgttattcacactgtgctgtgcttatttggcgtagcttaagagattagcaatagaaagtgaaagaaaatgagtcgaggaagtgcaactgctgcgaagggcaagaagaagggtgcgacattcaccattgactgcgccaagccagtggaggacaagatcatggacatcgcgtctctcgagaagttccttcaagagaggattaaggttggtggcaaggccggtgctctcgccgacaccatcaccgtcacacgtgagaagaccaaaatcatagttacttcagacagcaacttctccaaacggtatctcaagtacttgactaagaagtacttgaagaagcacaatgtgcgggactggctc

SEQ ID NO: 240337 - DNA, 365 bp, Glycine max
ggaactcataatattcatcactagaagtgttggatgcatttctatttctaactaattattgtgcttattattattgttgagaaagaaaagaatggcaaagttaataaaattctttgagttgaacacaggggccaagattccttctgttgggttaggcacttggcaagctgagcctggtgttgtagccaaagctgtcaccacagccattctggttggatacaggcatattgattgtgctcaagcgtataacaatcaagcagagattggttctgctcttaagaagctttttgatgatggtgtggtgaagcgtgaggacttatggatcacctccaaactctggtgttcagatcgtgcttcagaagatg

SEQ ID NO: 240338 - DNA, 325 bp, Glycine max
gatccacacctctctctctctctcagaatttctatctatctcttgtttcaatttcaacaacggttactcctttttcgttttgagtttcaatcaagccatcatcatgtctaccgcatcgcaacccaagggcaagaaaacggcgtcgtccaagaagcccctctcccaacctcccttcgccgtgatgatagcagaggcgattgcgagtctgaaagagagaaccggttcgagccaatacgcgataaccaaatacatcgaagggaagcacaaggagttgcctgcaacctacaagaagcttgtcctcgttcatctcaagaaatctgttgct

SEQ ID NO: 240339 - DNA, 399 bp, Glycine max
agcccacgcgtccgcccacgcgtccgagacgacagaaggggagggttttgcgctgttgttgctgctcatcctccgtaacctccgagctctgcaccgaagaacgaagccatggggaagacacatggaatgggatctgctcgcaagctcaagtcccaccgcaggaggcaaaggtgggctgacaagtcatacaagaaatcacatcttggaaatgaatggaagaaaccttttgctggttcatcccatgccaagggaattgtccttgaaaagataggtattgaggctaagcagcccaactctgccattcgtaagtgtgccagggttcaacttatcaagaatgggaagaagattgccgcttttgtccctaatgacggttgcttgaactacattgaagagaatgac

SEQ ID NO: 240340 - DNA, 242 bp, Glycine max
gaataatacaaaagaaaataatagaagaaaaatttttgaataataattaaaaaattccttcatatttttagagataggagacaaaatttacatggatatagtaagtcttgcttgggctgctttaatggtagttttttcattttctctttccctcgtagtatggggaagaagtggactatagggatactcaaaattgagttaagggatcaaagtacccattttgttttctacttgggtttttc

SEQ ID NO: 240341 - DNA, 355 bp, Glycine max
  unsure (1)..(355): unsure at all n locations
ggttgtgtgagtgaagaagcagagggagtagcggcattaaaaatgcagatcttcgtgaaaactctgacagggaagactataaccctcgaggtcgagagcagcgacaccatcgacaatgtcaaggccaagattcaagacaaggaaggcattcctccggatcagcagcgtttgattttcgccggaaagcagcttgaagatggaaggaccctggccgattacaacatccagaaggaatcaacccttcatctcgtcctcaggcttcgtggtggcatcattgagccttccctcatggctttggctcgcaaatacaaccaggacaagatgatttgccgcaagtgctnatgccgtctgcatc

SEQ ID NO: 240342 - DNA, 380 bp, Glycine max
gagggttacacgccgtcgtcgctgtttttgtgtgtcgcttcttcgtaggtgcagctgcaatggtgaagggactccaaggagaacgtgtcagactctacgtgaggggtacaatccttggatacaaaaggtccaagtcaaaccagtatccaaatacatccctgatccaaattgatggtgtgaatgccaaagaagaagtatcatggtatgctggcaataaaatggcctatatctacaaggctaacgtgaacaagaatggaagccattaccgctgcatatggggcaaggttacaaggcctcatggtaacagtggtattgtccgtgcaaaattcaagtcgaaccttccacccaaatcaatgggagcccgagtaagagtattcatg

SEQ ID NO: 240343 - DNA, 378 bp, Glycine max
ggttcactttcttccaacctctaacctacctctttttcttctctctcaacaacttcaccttcttcctcctcgatcatgtctcacttcaagggcaagtaccatgatgagcttatcgccaatgctgcgtacattggcactcctggaaagggtattcttgctgctgatgagtcaacagggacaattggcaagcgtttggccagcatcagtgtagagaacattgaatccaacaggcgagctcttagggagctgcttttcactgctcctggtgttcttcaatatctcagtggtgtcatcctctttgaggaaaccctctaccagagcacagctgcaggcaagccctttgtgaatgtcttgaaggaagctggtgtgcttcctggc

SEQ ID NO: 240344 - DNA, 369 bp, Glycine max
gatgtcatagtattatcattcagtctcatctttctctcttctctctccacccaaaccctaactcccgaccctgttcccctctcgtatccgtcatgaaaggaggaaagtccaagaccgaatctaagagagccgatcccaaacttgctgtgaataagaagggagccgccaccaaggctaggaaacccgccggcaaggggaaggcagcgaaagaccctaacaagccaaagaggcctccaagtgctttcttcgttttcatggaggagttcaggaaggtattcaacaaagaacatcctgaaaacaaagcagtgtctgctgtgggcaaagctgctggagcaaaatggaagaccatgtctgatgctgaaaaagcac

SEQ ID NO: 240345 - DNA, 468 bp, Glycine max
tcaacttttcagcggctaggtaccggtcaggaattcccgggtcgacccacgcgtccgtacggctgcgagaagacgacagaagggtaatttgggaattattgctcccatcgccattggtttcattgtcggcgctaacattttgttgggtggggccttctctggagcggccatgaaccccgctgtgacatttgggcctgctgtcgtgagctggacctgtaccaaccactggatctactgggccgggcctctcatcggtggtggaatcgctggccttgtttacgaggttgtctttatcagccacacccacgagcagcttcccatcactgactactatacggggggaaatgaaagaaagtaatcaacaaaaaaaaacgcggccgctctacaggatccacgcttacgtacgcgtgcatgcgacgtcatagctcttcgacagtgtcacctaaattcaattcactggccgtcgtt

SEQ ID NO: 240346 - DNA, 378 bp, Glycine max
gatacctaaaaattgtaccgatatggcttcacttgtgtgtctccttttttccttgcatttcatggttatcatgtcaggttccttaccagcaaatagtgaagtgtttacaaaagagtctcctatgtctctatccacaaaacccgtggaaagactcacccaactccacttttatttccataacaacaaaatgggggaacacccgactgctatgaaaattgttgagcctcctaaggcgtccatttctggttttgggactatttacatgatggatgaccctctaaccgaaggaccaagtccaacttcaaagcttgttggaagatgtcagggaatatatgctgaggcttcgcaacatgaacctgcgatactcatggtaacgaa

SEQ ID NO: 240347 - DNA, 388 bp, Glycine max
gttgttgggtttctgttcaaatcatgagacaaaccttttggtctatgagtacatgcccaatggaagtttaggtgaggttcttcatggaaaaaaggggggtcatttgcattgggacaccaggtataaaattgcggtggaggctgccaaggggctttgctatctgcaccatgattgttcgccactcattgtccatcgtgatgtgaagtcaaacaacatccttcttgattcaaatcatgaagcccatgttgctgattttgggcttgctaagttcctgcaagattctgggacatctgaatgcatgtctgctattgctggttcatatggatacatagctccagagtatgcctacacattgaaagttgatgagaaaagcgatgtgtacagtttt

SEQ ID NO: 240348 - DNA, 398 bp, Glycine max
  unsure (1)..(398): unsure at all n locations
ggcaatcagcaaccaaaatgactcaagcccagattcaaccagttaaacttggaacccaaggctttgaggtttcaaaattgggattcggatgtatgggccttactggagcgtacaatgaccctctccaagaacaggatggcatatctgttatcaagtatgcgttcagtaagggaatcacattttttgatactgcggatgtttatggagccaatgctaatgaacttttggttggaaaggctttgaagcagctgcccagagaaaagattcagatagccacaaaatttggtattgcttcacgaggttttcctgatatgaagatcganggttcgcctgaatatgtgcgatcatgctgtgaagctagcttgaagcgtcttgatgttgaatacattgatctctat

SEQ ID NO: 240349 - DNA, 400 bp, Glycine max
gattgttggcttgtgctctgctcgtgcctctagggttatcatatctccatttccatttcctctctctcagtttccaagaatcttaagctatgggaaagtcttacccaaccgtgagcgctgattaccagaaggccgttgagaaggcgaagaagaagctcagaggcttcatcgctgagaagagatgcgctcctctaatgctccgtttggcatggcactctgctggaacttacgacgtgagctcgaagaccggtggtcccttcggaaccataaagcacccctccgaactcgctcacggcgctaacaacggtcttgacatcgctgttaggcttttggagccactcaaagcggagtttcctattttgagctacgccgatttctaccagttggctggcgttgttgc

SEQ ID NO: 240350 - DNA, 404 bp, Glycine max
ggtccaaaatcctcactcgagccacacgcctcagtagaccatggcctcattgggtgggttacaaaatctaagcggcatcaattttcttatcaaaaaagagggtccaaaagtcaatgcgaagttcgagctgaagccgccaccatatccactgaatggtttggagccggtgatgagccagcagacacttgagtttcattgggggaaacaccacaagacatatgtggaaaatctgaaaaaacacattgttgggacagagcttgatgggaaatcactagaagagattatactgacatcatataataagggtgacattcatccagctttcagcaatgcagcacaggtatggaaccatgacttcttctgggagtgcatgaaaccaggtggaggtggaaagccatccgggg

SEQ ID NO: 240351 - DNA, 339 bp, Glycine max
ggtgaatcagcaccacattcacctgagctttttgtgaggattccaaagcatggcttcccttgcagcatccactgctgctgcttcccttggcatgtcagaaatgcttggaaaccctatcaacctcagtggtgccacaaggccagctccatctgcctctagccctgcctccttcaagactgtggctcttttctccaaaaagaaggctgcacctccaaaaaaagctgcagctgctgctcctgccaatgatgagcttgccaagtggcatggtcctgacagaaggatcttcttgcctgagggtctcttggaccgatctgagatcccagagtacttgaccggaga

SEQ ID NO: 240352 - DNA, 359 bp, Glycine max
ggtagttccaccgagtagcaacaatgtcgaagcgaggtcgcggaggatcggcgggaaacaagttccgcatgtcgctgggtctgccggtggcggcgacggtgaactgcgccgacaacaccggcgcgaagaacctctacatcatatcagtgaaggggatcaagggtaggctgaaccggttgccgtcagcttgcgtcggagacatggttatggccaccgtcaagaagggaaagcccgatctccgtaagaaggtgctgcccgccgtcatcgtccgctagcgcaagccttggcgccgaaaggacggtgtttacatgtacttcgaagataatgctggtgttatcgtgaatcccaagggtgaaatg

SEQ ID NO: 240353 - DNA, 335 bp, Glycine max
aacaaagaacagcgttgggacccacaagatctacatcttcagggtgttgcagcaagtgcaccccgacatcgggatctccagcaaggctatggggatcatgaacagtttcatatacgacatcttcgagaaactcgcccaatagtcatcgcgtctcgctaggtacaacaagaagcccaccattacttccagggagatccaaacggcggtgcgtttggtcctccctgcggagttggccaggcatgccgtttctgaaggcaccaaggccgtcaccaaattcagcagctcttgattggcttcgtgtgtttatgtcacggttttctgtgagcccgatttaa

SEQ ID NO: 240354 - DNA, 337 bp, Glycine max
gactcaccacttcaaaacactcataacacaaagcacaaagcaaagctcatccttgagttaaaaaatggcagcagcttcttccatggctctctcatccccatccttggctggcaaggccgtgaagctgggcccatcagccccagaagtgggaagggtgagcatgaggaagaccgtcaccaagcaggtctcctcaggaagcccatggtacggcccagaccgagtcaagtacttgggcccattctctggcgagcccccgtcctacctaaccggtgagttcccaggcgactacggctgggacactgctgggctttccgcagacccagaaaccttcgccaag

SEQ ID NO: 240355 - DNA, 368 bp, Glycine max
gatagcatcagcccatcaactagcaaaaaggagtttgtgtaagggaagaagatggtgtcaggttctggaatctgcgcaaagcgagtggtggtgggacgctcgccaccacatgttgggtcggctagcgtccatcgtggcgaaagagcttctgaatgggcagaaggttgcggtggtgcgctgcgaagagatttgcatctccggcggtctggtgaggcagaagatgaaatacttgagattcctccgcaaacgcatgaacaccaaaccctcccatggccctatccacttccgcgccccagccaagatcttctggcgcaccgttcgtggaatgataccacacaagacaaagcgtggggaagctgctcttgctc

SEQ ID NO: 240356 - DNA, 357 bp, Glycine max
taatttgggaattattgctcccatcgccattggtttcattgtcggcgctaacattttgttgggtggggccttctccggagcggccatgaaccccgctgtgacatttgggcctgctgtcgtgagctggacctggaccaaccactggatctactgggccgggcctctcatcggtggtggaatcgctggccttgtttacgaggttgtctttatcagccacacccacgagcagcttcccaccactgactactagagggggggaaatgaaaataaaaaaaaaaaattgtgtattattgaatttctctggaatcttcttctgtgtatggttttccttccttgtgttttcttcctaattcactt

SEQ ID NO: 240357 - DNA, 365 bp, Glycine max
gcttctgaatcgtcttttacttctcagcagcttcggctagggttcagaaacgaaaaagggttcggtgttctgttcgcgatgagagccaagtggaagaagaagcgtatgaggaggttgaagaggaagcgccgaaagatgagacagagatccaagtagtgcgttaaacctagtttgtttctgttgcttttacaattgcttatgttgtcgaatgggacacccagttgttagtggcactggtttctcctttttgatgtttgatacattttgttggattcaagtagtttatgttcgtcttatgttattagctcaaaacaatgttgttactgcttttgctaatcaacatgatctcctatttgcatctctgc

SEQ ID NO: 240358 - DNA, 293 bp, Glycine max
gacagcaaaacaattttcaaactcaattaccattccataacctaaatctcctctttgtttccgagtcagagagcaatggcacgtaccaagcaaaccgctcgcaagtccaccggcggaaaggcgccgaggaagcaattggcgactaaagccgctcgcaagtcagctccggccaccggcggagtgaagaagccccaccgcttcaggcccggaacggtggctctgagggagatcagaaagtaccagaagagcactgaacttctgatccgaaaactcccattccagaggctcgtcag

SEQ ID NO: 240359 - DNA, 383 bp, Glycine max
ggatccccccctctctctctcatcactacctctgcatttttctctcgctctctgccttccatcaccctcgccatttcccttcccaagatagtagaagatggcagacgctgaggatattcaacctcttgtttgtgacaatggaacaggaatggttaaggctggttttgctggagatgatgccccacgtgctgtgtttcccagcattgtaggtcgtcctcgtcacactggtgtgatggttggcatgggccaaaaagatgcatatgttggtgatgaggcacagtctaagaggggtattttgactctcaagtaccccattgaacacggaattgtgagcaattgggatgatatggaaaagatttggcatcataccttctataatgagc

SEQ ID NO: 240360 - DNA, 373 bp, Glycine max
gggagttcatagttccaataccatatgtcaaacaagtaaagctgtcaaaagctggtgggaggcttgtaattgcctctgatggcatacgggatgctctatcatcagaaatggctgcaaaattttgccgtggtttgcctgctgaacttgctgctatgcaggttgtcaaggaagcactaagaacgagagggttaaaggacgatacaacttgcatagtagttgacattatcccacctgataatgaattgccaccaacacctccccccccaaaacggaacaagctgagagatcttctttccttcaggaagaggtcccgtgattctgccagtaagctgtcaaaaaagctttcagctataaatatagtggaagaactgtt

SEQ ID NO: 240361 - DNA, 379 bp, Glycine max
gacgttcacattcaggaatcgttttcttcagaaaatttgccatcgttgagggaagcgcgagagccttcgttgttcaagatgagagctaagtggaagaagaagcgcatgaggaggttgaagaggaagcgccgaaagatgagacaaagatctaagtaggtgcttgaacaaggagtggagatgatgtgcttttccatctgctaccagcttcatgacattttatgctgtcatggctcttatgatgatcttgaggtctagtggcgaggggagcttccatcttgactttagtttagctttactggtctaaagattgctgttttagtgtgggttaagttatgatattgagagttttgtgttatctaattatgttctggtacgtttt

SEQ ID NO: 240362 - DNA, 354 bp, Glycine max
ggaacctttgcattctattcattcaagattcagcaagtgcgttttggaagcagagaccgaaatacttcgagatggcccgtacaaagcaaactgctcgtaagtcaactggaggaaaagctcccaggaagcagcttgcaaccaaggctgcacgtaagtctgcaccaacaactggtggtgtgaagaagcctcatcgttatcgccctggaactgttgctcttcgtgagattaggaaataccagaagagcactgagctcctaatcaggaagcttcctttccagaggttggttcgtgaaattgcccaggatttcaagactgatctgcgtttccagagccatgctgtgcttgcattgcaag

SEQ ID NO: 240363 - DNA, 404 bp, Glycine max
gacttcacaactcaaactgcttcattgcataattgcagataagatcaacccttctaccttcagattcgcgggaagatggcatcacttcatgctaatgtgacatcagttgtttacaacagtggcaaccgtgtttctcaatcgaaatttgcaagctcttccttcttgtctgggttcgatgttgttggtcgtgcttcaagtgcttggaagaaggaacttgtcccatcttccatttccttggtgcctagagccaccctaacatttgatcccccaactaccaattcagacataaccaagcaaaagaagcacactcttgaccctgcttctccagattttcttcctcttccttcatttgaacagtgctttccaaagagcaccaaagaacacagggaagtcactcatgaaga

SEQ ID NO: 240364 - DNA, 401 bp, Glycine max
ggtgtttgcattgcagagagagagagaatggcgaccacacccggtttgtgtggcagtgtgttgttgagcacctcgttcctgaggaagcaggcaatggcatcagtgaacatgagaatgctgaaggctaatgctggtgtttttggcttaaagggagggcgtggagggcgtgtgagtgcgatggcaagttacaatgtgaagctgataaccccagaaggagaacaagaatttgaatgcccagatgatgttttcattcttgaaaaggctgaggaatttggcattgaccttccctactcatgcaaggctggtgcttgctcttcctgtgccggcaaagttgtttctggcaaagtcgaccaatctgatggtagttaccttgatgatacccaaatcggtaacggatttgt

SEQ ID NO: 240365 - DNA, 384 bp, Glycine max
gccgaaaagtagtaccaagatggcttcagttgtgtatctcctctttggcttccatctcattgttatcatgtcaagttccttacccgcaactagtgaagtgtttgcaaaacagtatccatccacagaacccgtggaagaaaaactcacccaactccacttctatttccataacaacataacgggggaacacccaactgctatgaaaactgttttgcctcctaaggggtccattcatggttttggggctacttacatgatggatgaccctctaactgaaggaccaagtccaacttcaaagcttgtgggaagatctcagggaatatacgctttggcttcacaacatgagcctgggttgctcatggtgacaaattttctcttcacttt

SEQ ID NO: 240366 - DNA, 382 bp, Glycine max
ggccgaaaagtagtaccaagatggcttcagttgtgtatctcctctttggcttccatctcattgttatcatgtcaagttccttacccgcaactagtgaagtgtttgcaaaacagtatccatccacagaacccgtggaagaaaaactcacccaactccacttctatttccataacaacataacgggggaacacccaactgctatgaaaactgttttgcctcctaaggggtccattcatggttttggggctacttacatgatggatgaccctctaactgaaggaccaagtccaacttcaaagcttgtgggaagatctcagggaatatacgctttggcttcacaacatgagcctgggttgctcatggtgacaaattttctcttcac

SEQ ID NO: 240367 - DNA, 376 bp, Glycine max
gattgttggcttgtgctctgctcgtgcctctagggttatcatatctccatttccatttcctctctctcagtttccaagaatcttaagctatgggaaagtcttacccaaccgtgagcgctgattaccagaaggccgttgagaaggcgaagaagaagctcagaggcttcatcgctgagaagagatgcgctcctctaatgctccgtttggcatggcactctgctggaacttacgacgtgagctcgaagaccggtggtcccttcggaaccataaagcacccctccgaactcgctcacggcgctaacaacggtcttgacatcgctgttaggcttttggagccactcaaagcggagtttcctattttgagctacgccgattt

SEQ ID NO: 240368 - DNA, 361 bp, Glycine max
ggtcgtcgtttatctctcctcgttcgcatcttcaccctttccctgtctctcagaaagatgaaggtggtcgctgcgtatctgctcgccgtcctcggtggcaacaacaccccctccaccgatgacatcaaggaaatcctcggctccgttggaatagaggcagatgaagataggattgaatcgttcttgtctgaagttaagggtaaggatatagttgagctaattgctgccggtaaggaaaagctggcctcggtgccttctggtggcggtggtgccgttgccgtcgccgctgctcctggtggaggtggcggtggtgctgctccggctgctgaggtaaagaaagatgaaaaggtggaggagaaag

SEQ ID NO: 240369 - DNA, 400 bp, Glycine max
ggattctgattctgtccatccaaatcgtacaaatattcagtgaagatcaacctcaatggcatctcttggcgtgcgaccagttcttccccctccattaacttccatctccgacccacctcctcttttcgatggcaccaccaggttgtacatcagttattcttgcccctatgcacaacgtgtgtggatcgctatgaactacaaggggctacaagataagatcaatttggtccctatgaaccttcacgacaggccagcttggtataaggagaaagtctaccctgaaaataaggtgccatccttggcgcagaatggcaaagtgttgggagacagtcttgatttgatcaaatatgtagatgcaaactttgaagggacacctttgtttcacagtgatcctgccaag

SEQ ID NO: 240370 - DNA, 401 bp, Glycine max
gaccgcctctttcgtaaagcagagtccgcatacgcagtttgcattcgtttgaactctgttctgttgcctccacaaaccaaaccaggcccaagtagtacagtgaaaacgaaattgaagtatagctaggtgaaaggaagtagtcaagtacaagagaatggcgaagtcattgagatcaaagagggagaagaggctgagggctattcggagggagattgttgaacctttctatgacaagaaagaagctgctaagctcgctgcccaagaggccgcccttgccgcacctaagctggaggttccttcgaaaccaaatactgccatggaagcgtccacttccactaacaacaccaacattgatgtggagatggctgatggcagtcaaagcatggcttccttaaagcctg

SEQ ID NO: 240371 - DNA, 400 bp, Glycine max
gaatcggagacaaagctagctcgaacgaacgaagtacagtagtgtgctacgaaaaatgtggcggtgcatcgcacgtggtctccgtggacctgcttccaccagatccacctccaatcactcacttggatctcaactttctagattcttctctagtggggcgaactcctcgtacaccgtggtggatcatacttatgatgctgttgtcgtacgagctggtggcgcgggattgagagctgctattggactttcagaacacgggttcaatactgcttgtattaccaagctcttcccaactcgttcacacactgttgcagctcaaggtggtataaatgctgctttgggaaatatgactgaagatgactggaggtggcacatgtatgacactgtcaagggaagtgat

SEQ ID NO: 240372 - DNA, 385 bp, Glycine max
gactctcatcacattattctatatcaattttggttaagagtcttgaaaaagcaagagaaaaaaaaataccaaccatggcaaccatttctgatcaacctagagggtcctactcctatggaacctcatatggagcaccctatggaaccacgtatgagaccaacaccagcattaacaacccaccttcacgccaaacagtgaagttcataactgctgccactattggcatcacactcttgctcctgtctgggttgaccctcacaggcactgtcataggtttgatcattgcaacccctcttcttgttatcttcagccccatccttgtccctgctgcgtttgtgctgttcctagttgcttctggctttttgttctctgggggctgtggtgt

SEQ ID NO: 240373 - DNA, 341 bp, Glycine max
gaagtgaatgggaaggaagttgtcatgtcaaatgtagaggagtatcttggagtgcttgatgtttagatacatcaagccagggacattcaaaacatttgcatataccacaagcatgatgtttatgctaagatttgtctgaccagtaatcctgagacaactgtgtctaccaaatccatcactggaggacgaaagaaccctgtgttcaacgagaatcttcgtattgatgttacgactgttgatgcttctctcaagtgttagatatggatgcctaccagggtgaagaactatcatgaatagcagttgcttggttgtgctttggtaaccttgtctgaagtactagt

SEQ ID NO: 240374 - DNA, 388 bp, Glycine max
gacatataacactgtcactcttacaatctcagctcatagcattcttcttcttccaacgagaatcagtctttgtgttccaaatggctcgtacgaagcaaacagcaagaaagtccaccggaggaaaagctccaaggaagcagctcgccaccaaggcagcacgtaagtccgctccggcgacgggcggcgtgaagaagccccaccgtttcaggccggggacagtggctctgagggagattcggaagtaccagaagagcacggagcttctcataaggaagcttcctttccagaggctcgtaagggaaatcgctcaggacttcaagaccgatctacgcttccagagcagtgctgtctccgctcttcaggaagccgctgaggcctacctcgttgg

SEQ ID NO: 240375 - DNA, 356 bp, Glycine max
ggcaacaaggcttaacctctctcattcccgatttcgtcacctccttcaaccgctgcgaaattctagggttccgaaatggacgctggcggaaagatcaagaagggcgccggaggtagaaagggcggcggcccagagaagaagccggtttcaaggtccgtcaaagccggtctccaattcgccgtcggaagaattggccgttatttgaagaaaggaaggtacgctcagcgtgtcggtaccggtgctcccgtatacttggctgcagttctcgaatacctagctgccgaggtgcttgagttggccgggaatgccgcacgtgacaacaggaagaacaggattattccaatacacgtgctttt

SEQ ID NO: 240376 - DNA, 190 bp, Glycine max
  unsure (1)..(190): unsure at all n locations
gaatagcacagttaccccttattgatctagaaatacaaactgaaaaggagattgaattgaggctgctgccctcacttgatacactgaaggtgaaagataagaaggatcgaggaaccttaacagtaaaggtcatgtattatcagtttaacaaggaagagcagctggttgcactagaggcgaaaaanannna

SEQ ID NO: 240377 - DNA, 396 bp, Glycine max
ggcagttcaattccaatatattccattctctctgtgtatttccctacctctcccttcaagatgcagatcttcgtcaagaccctcaccggcaagaccttcacccttgaggtggaaagctctgacaccatcgacaacgtcaaggccaagatccaggacaaggaaggaatccccccggaccagcaacgtctcattttcgccggaaagcaacttgaggacggccgtacccttgctgactacaacattcagaaggagagtactcttcacctcgtcctccgtctccgtggtggcatgcagatcttcgttaagacactcaccggcaagaccataaccctagaggttgaaagctccgacaccatcgataacgtcaaggccaagatccaggacaaggagggtatc

SEQ ID NO: 240378 - DNA, 379 bp, Glycine max
gaataagatttgtgagagaaagggagaaagggtgtgagaatggagagcaaagaggaagatgtaagggttggagcaactaagttctcagaaaggcaaccaattggtacagcagctcagggtgacaaggactacaaagaaccacccccagcacctttgtttgagcctggtgagctaaagtcatggtccttctacagagctggaattgctgagtttgtggccactttcttgttcctctacattaccatcttaactgtcatgggtgtcaacaggtcaccctccaagtgtgcctctgttggcattcaaggcattgcttgggcctttggtggcatgatctttgcccttgtctactgcactgctggaatttcaaggggacacatca

SEQ ID NO: 240379 - DNA, 402 bp, Glycine max
gaccgtaatccttacgctctctcactcacaaacgcacactgaattcaaaaacatcgaaagagagaggcatggccgagcaaaccttcatcatgatcaagccagatggcgttcaaagaggccttattggcgagattattagcagatttgagaggaagggtttttacttgaaagggttgaaactcgttactgtggaccgtccttttgctgagaagcactatgctgatttgtctgcaaagcctttctttagtggtttggtggattacattgtctctggccctgttgttgccatgatctgggagggtaagaatgttgttacaactggccgaaagattatcggagccacaaacccagctcaatctgagcctggaactattcgtggtgactttgctattgacattggaa

SEQ ID NO: 240380 - DNA, 385 bp, Glycine max
gactcgccgctttgtgctgctgttgcaacacttaaggctgggcctttttttgaggttttcagcgcttctttctcacaatggatcttcataatgatattgatttgctgaatcctccaactgagttggataagacaaagcagaaactcaagcgtcttgttcagtcaccaaactctttcttcatggatgttaaatgccatggatgcttcaacataacaactgtgtttagccactctcaaactgttatggagtgcggaaactgccagactgttttgtgccaaccaacagggggaccgactatgttaaccgatggttgctcatttaggaatatgggacattgactggtttgttaaccagacgttgccttgtcaaataattgacattttcg

SEQ ID NO: 240381 - DNA, 381 bp, Glycine max
ggctcttggctgatatttcctgataagtggacagacgcttaaacagagaaactaacacagatttgcatgcatggggaaaataacgcacattgtagtaattcccagtgcagggtacagccacttcgttcccgttatccacttctcaaagagacttgttgagcttcacccagaaattcacgtcacatgcatcattcccattctggggtctctcccaagtgctgcaaaacccattctccaaacccttccacaaaacatcaacacggttttccttccaccggtgaaccctaatgacctaccacaaggtgttcccgtagttgtccaaattcagctagcaatggctcactccatgccctccatccaccacaccctcaagtccataac

SEQ ID NO: 240382 - DNA, 384 bp, Glycine max
gatctcaccatcactctcgctcttgcaattagtcctcttccaacaatccgcacctaaactctagggttctgacatggacactggtggaaagatcaagaagggcgccggaggaagaaagggcggcggcccaaagaagaagccggtttcaaggtccgtcaaggccggtctccaattccccgtcggaagaattggccgttatttgaagaaaggaaggtacgcccagcgtgtcggtaccggtgctcccgtttacttggccgcagttctcgagtacctagctgctgaggtgcttgagttggctgggaatgctgcacgtgacaacaagaagaacaggattattccgagacatgtgctattggctgtgaggaacgatgaggagttggggaa

SEQ ID NO: 240383 - DNA, 362 bp, Glycine max
gacggaaagcatgatataggagccaacattttttgtgctaagtgcaaaccacgccagaatttcattatttccattaactcccgattcggcttaaattggaacaccaccaattttcgtgggaaccaacaaaacaaaaaaagggtccaattttttgaaaattattaccatcattcatattcatcaacgacccctcttctgtgcccacttccaaatcttctcctctcgctatgggttgcggctcctcccttccagataggggctcaaggcagttgggtcgacccaattcagagaatggtggagggcaggacgccaagaatctgagggtcaagcttgttctcttaggtgattccggtgttggtaaa

SEQ ID NO: 240384 - DNA, 348 bp, Glycine max
gagggtttttgtcgtcgctactaagagttgctgcttcttcagccactccgcacctcgcagcctctgtgccctcaacaaccatggctgaaatcgaaactaccgttccagatcccacccaaatcgacgtcaaactcttcaatcgctggagcttcgaggatgttgaggttaatgatatgtctctggctgattacattggagtgtccccatcaaagcatgctacatatgttcctcacactgctggtaggtactcagtgaagaggttcaggaaagcgcagtgccccattgttgagaggctcaccaactctctgatgatgcacgggaagaacaatggaaagaagctcatggctg

SEQ ID NO: 240385 - DNA, 106 bp, Glycine max
gaattggattgagtcttggtatggaaacttaccaagtgagaactttcaaattcagagaaaccctggaattcacaaagggcaatcctgagccaaatcctgttttcct

SEQ ID NO: 240386 - DNA, 364 bp, Glycine max; identical to SEQ ID NO: 239728

SEQ ID NO: 240387 - DNA, 382 bp, Glycine max
ggcagcgccccaagttccaggtttcagcgagcattctacaatggctactataccagttaatcccaagcctttcttgaacaatttgactgggaagcctgtaattgtgaaactgaagtggggaatggagtacaagggctatctcgtttccgttgattcctatatgaacttgcagctggccaacaccgaggagtacattgagggacaatttactggaaatttgggagagattttaatcagatgtaacaatgttctctaccttcgaggagtaccggaggatgaggaaatcgaagatgctgctgaagactagagagtgatagaagctgctaatggctatgacataaacagaactcgaatttctactggttttgtatcctcacataaa

SEQ ID NO: 240388 - DNA, 374 bp, Glycine max
gaaggaacggagggaagaatataatgggatctggaagtggaaaacacactggagagttcttcaggagaagggatgcatggaggaagcatccgatgctcaccaatcagctccgccacgccacccctggccttgggatcgccgtcgtcgccttcgattgattgctcttgcaggtgaaagccggggatcaccactaaacgtttggacggacgcactccattccatcatcacttaataagcttgctagcatgttctcgcagcctttaatgtttaaatttcagaccgtgttcgcttctttggcactcactatgttgtcgtgtatgcctacattttatgccttcaatttgcattcacaatgaaactcaatttacgttaat

SEQ ID NO: 240389 - DNA, 377 bp, Glycine max
gatagcattttcagaggaaaatggcgggtacggtttcgacttgtttcttcttcgtgtttcttctttctctccttcttccttttcagatgtccgctgaggaatcctcggagaaggagttcgtactcacattggatcactctaactttcacgacactgtcagcaagcacgatttcatcgtcgtcgagttctacgcaccatggtgtggtcactgcaagaagcttgctccggagtatgagaaagctgcttctatcttgagtagtcatgatcctcctattgttttggctaaagtagatgccaatgatgagaagaacatggaccttgcatcacaatatgatgttaaaggattcccaacaattaatattctgacaaatggggga

SEQ ID NO: 240390 - DNA, 341 bp, Glycine max
ggaagtaagggatcgagcctcggaggagggaatcgcagcgaagtccactatgccgaagcaaattcacgagattaaggacttcctcctcactgctaggaggaaggatgcacgctctgtgaaaatcaagcggagcaaggatgtggtgaagttcaaggtccgttgctccaagtacctttacaccctctgtgtgtttgattctgagaaggctgataagttgaagcaatcacttcctccaggtttaagcgtgcaggatgtgtgattcttactgctgtatgaagatcaggtttttctctggattttggggattcatagttagtaaaatggttcagagaattttcgta

SEQ ID NO: 240391 - DNA, 364 bp, Glycine max
  unsure (1)..(364): unsure at all n locations
gacctaaaaattgtaccgatatggcttcacttgtgtgtctccttttttccttgcatttcatggttatcatgtcaggttccttaccagcaaatagtgaagtgtttacaaaagagtctcctatgtctctatccacaaaacccgtggaaagactcacccaactccacttttatttccataacaacaaaatgggggaacacccgactgctatgaaaattgttgagcctcctaaggcgtccatttctggttttgggactatttacatgatggatgaccctctaaccgaaggaccaagttcaacttcanagcttgttggaagatgtcagggaatatatgctgaggcttcgcaacatgaacctgcgatact

SEQ ID NO: 240392 - DNA, 356 bp, Glycine max
gagagaaccttcagaaaccctaatttctcaaaatcttcagaggacacacagcacaaccaacacctccacagcctctcctacctcccggagccatggccgccgccgactcctccgccgctccatcgcaccagttgtcgcagagggagacggacatccagatgatgctcgccgccgacgttcacctcggcaccaaaaactgcgactttcagatggaacgctacgtcttcaagcgcagaaccgatggtatttacataattaaccttggcaagacatgggagaagctccagctcgctgctaggattattgttgccattgagaacccacaggatatcattgttcagtctgccaggccttat

SEQ ID NO: 240393 - DNA, 360 bp, Glycine max
  unsure (1)..(360): unsure at all n locations
ggaccganacagagagtgctatcagtgattgatctgtattcacttgatctcatcacaagcgtcagcgtcgattgaagaagatgtcgatcagaaccatctccgtcggcatgcctgaataagccactcagaccgatacgttgaaggccgccttgacttaattcaactcatcattcatctgcatgttcgccggcgcacgcgccggcatcacctacaacaagctcaccgaggacggcgctgccatgcctgccggatttagcactgcatctatcacacatgcattcgccctcttcgtctccgtctccgtcggcgccaatatcgccggcagctacatcaagccctccgtcaccgtccgcgccttcg

SEQ ID NO: 240394 - DNA, 359 bp, Glycine max; identical to SEQ ID NO: 235719

SEQ ID NO: 240395 - DNA, 378 bp, Glycine max
  unsure (1)..(378): unsure at all n locations
gaaaaacagagcataggaaatagctttcctcggttataaccttcaaggtggaaagaaaaacccacccactatcccaattccaataaataccttcctctctatattttcgcacaataccctctcacccttcaacgatgagttactacaatcagcagcaaccacccgtcggtgttcctcctccccaaggttacccaccgccggattcttacggaaaggacgcgtaccctccgccagggtacccgccgcaaggaggataccctccgcaagcgtatccagcacaagggtacccntcaccctacgcgcctcctcagtacgctcagcctccgccgcaacaacaccagaattcatctggcccaagttgcttagaaggatgtttgg

SEQ ID NO: 240396 - DNA, 383 bp, Glycine max
atgggatttccagacgcggcggcttcttcttccgtttttgtctatcggcgtgaacaatggcgacttacgctgcgatgaagcccacaaagcccggcttggaggagccccaggagcagatccacaagataaggatcaccctttcctccaagcacgtcaaaaacctcgagaaggtttgtgcggacttggttcgcggtgcaaaggacaagcgcctcagggttaagggacctgtcaggatgcccactaaggttcttctcatcactaccaggaagtccccttgtggtgaaggtaccaacacatgggacagatttgaacttcgtgtgcacaagagagtgattgacctctacagttccccagatgtagttaagcagattacctctatcacg

SEQ ID NO: 240397 - DNA, 402 bp, Glycine max
  unsure (1)..(402): unsure at all n locations
ggatatgaacggtgaaccggatcccccttcgaagtgaattatattgcagcgaatcacacacactctgaacaacgcccaccatgcaggccagtgataggtttaacatcaattctcagctcgagcatctccaagccaaatatgttggaactggccatgctgatttgaacagatttgagtgggcagtgaacattcaacgtgatagctatgcatcatatattgggcactaccctttactgggattctttgctattgctgaaaatgaatctattggaagagaacgctacagctttatgcagaaaatgctcctgccttgtggtttgcctcncgaaagagaagaagattaagaattgccatctggattgcanatggatcacacagtacagttaatatagcctatgacag

SEQ ID NO: 240398 - DNA, 436 bp, Glycine max
gtcaaaacggtggcaaaagacaaccgaaaggggatacgggttgagaacctgattaccattctaggtgagttacattgcagcgaatcacacacactctgaacaacggccaccatgcaggataatgataagtttaacatcaattctcagctcgagcatctctaagccagttatgttggaactggccatgctgatttgaacagatttgagtgagcagtaaacattcaacgtgatagctatgcatcatatagtgggcaataccctttactgggattcgttgctaatgctgaaaatgaatctaatggaagataacgctacagctttatgcagaaaatgcacctgccttgtggtttgcctcgcgaatgagaagaagagtaagaattgccatctcgattgcatatggattacacagtacagttaatatagcctaggacagttt

SEQ ID NO: 240399 - DNA, 178 bp, Glycine max
atacgaggttctctacatggttgatgctaatgatgagtatgctgttggccagcttaaggaatttgagggaaagaacttggtcactgctgcgaacgaaggcctaaaagttgatgatagcgatgacgaaaaaacaagagaaaattcaaattcagaaaaagccgccgcgctagaggatcca

SEQ ID NO: 240400 - DNA, 308 bp, Glycine max
ggaacggaaaagcactggcgcagctaccctgaggcttctcttctcttctcttctctgtcgtgagtcaccatggtgagggttagtgtgctgaacgatgctctgaagagcatgtacaatgctgagaaaaggggaaagcgccaagtcatgattaggccatcctccagagtcattagcaaagtccttttggtgatgcaaaagcacggatagagtcgggagtttgagtatgttgatgggcacagggctggtaaaatcgtggttggattgaacggtagactgaacaagtgtgggggtattagtcggcgttttga

SEQ ID NO: 240401 - DNA, 183 bp, Glycine max
gagtgcagcatcgtagagaaataagggaaaaatggtgtcgctgaaactgcagaagcgcctctccgcaagcgtgctcaagtgctggagaggaaacgtttggcttgaccccaatggagtcaacgaaatctccatggccaattctcggcaaaacatcaggaagttggttaaggatgggtttagcat

SEQ ID NO: 240402 - DNA, 371 bp, Glycine max
gactgcaactttgctctctgtgaggcttcaatttctaattagggtttcgcttagagtaaccaataaccatgggagtcttcacccttgtcgtccgcaaatccggcagcgaatggagcgccaagcaacattccggcgacatcgaggcctccgccgattccaccttcgatctccaacggaagctcgtgcaagccgctctcgccgttgattcctccggtggagttcagtcctctttctctcccgtgtctcctacctccgctgtgttccaggtgatagtgggtggtgcagtattcgttggaggtggtggtgctgttgcagctgcacctgcaggtggtgctgccgcagctgatgctgccccagctgctgagaaaaag

SEQ ID NO: 240403 - DNA, 376 bp, Glycine max
gattgtggtgaatgtttgagtgcagaaggtaaaaaagaaaatggtggtgaagattcgattggcaaggctcgggtgccggaaccacccattctatcgtgtggttgttacggatagcaaaacaacaagagatggcaagcaacttgaagttttaggtttctacaatcccgtcgcaggcaaggatgatgacaaaagaatgagcctcaaactggagagaatcaagtattggctttccgttggagctaagccttcagagcctgttgagcatcttctatttagagcaggtttaggacaatctcatcaattccctgttgctgctctaaatggacatatcctcaaccaagaccaaccaaccattgctgctgatcacaatggtata

SEQ ID NO: 240404 - DNA, 365 bp, Glycine max
gatgccgaaaagtagtaccaagatggcttcagttgtgtatctcctctttggcttccatctcattgttatcatgtcaagttccttacccgcaactagtgaagtgtttgcaaaacagtatccatccacagaacccgtggaagaaaaactcacccaactccacttctatttccataacaacataacgggggaacacccaactgctatgaaaactgttttgcctcctaaggggtccattcatggttttggggctacttacatgatggatgaccctctaactgaaggaccaagtccaacttcaaagcttgtgggaagatctcaaggaatatacgctttggcttcacaacatgagcctgggttgctcatgg

SEQ ID NO: 240405 - DNA, 350 bp, Glycine max
gggctttcccttcatacaaaacctacaaggcacggacttgagatttctaagaccctctctctctcgtacttcatcggaaccgaaacccttcgccgcaaaaaatgcctcccaaatctgccaaatccaaggaagctccagctgagcgacccatcctcggtcgattctcttctcacctcaaaattggcattgttggcttgccaaatgttggaaagtctactctctttaatactctcaccaagttggcaatacctgctgagaacttccccttttgcaccattgagcctaatgaggcacgggtcaatgtacccgatgaacggttcgagtggctttgccaattattcaagccaaaa

SEQ ID NO: 240406 - DNA, 228 bp, Glycine max
gcttgttggagatgcacctgcatagtctagtgcttaattaggttgctgaagagtgaagaatgagacagcctggttcgaaggggaaaagcctaaggatatagcaaaggatcctatatgtataagataaatgttgcttttttaccttcggtagtgatatctgaagtcgagtttggcagcctatatatgaatatatgatctatgtgggtctttagtggagaaggggggggg

SEQ ID NO: 240407 - DNA, 356 bp, Glycine max
ggtcttgcaggcgaagagatggccaccgttccagggcagctcgtgtgggagatcgtcaagaaaaacaattccttcttgggcaagcagtttggaaggggcacccagagcgtcgaattcagcagagagagcaacaatctctacaacctcaattcgttcaagtactctggtttggcaaacacgagaactgttactgttcagcctgagggcaaagatcaggctgtgttgttgggtacaaccaagacaaagaagcagaacgagcccgctgcattgctccacagatctgtggataacaaggagttcaggaggatgggaggagctgttgaaaaccaggtggccaaaaattactacagggctga

SEQ ID NO: 240408 - DNA, 413 bp, Glycine max
gcaagttgatgggtagaaacagcggatttattgcaatgtatgctacacttgcaagtcgagacgtggactgttgcttaattccagagtcacccttttaccttgaaggtcctggtggactctatgaatatatagagaaaagactcagagaaaatgggcacatggttatcgtcattgctgaaggagcaggacaagaacttgtttctgagagcgtgcagtcaatgagcagacagggtgcttctggaaataagctttttcgggatgttggcctatggatatcccaagggattagggatcattttgctgcacagaagaggctgccgagaactctcagatacgaagagtgaacttagatgattcgagctagtccaagcaatgcttctgacagggtgtgctgcacaggtcttgctcaaagt

SEQ ID NO: 240409 - DNA, 343 bp, Glycine max
gaccgcattagcactcgtctttggttctggtttatagatctctgtgaagtcgctttataacactcaacctaagatgcagaacgaggaaggacagatcaccgagctttacattcctaggaagtgctctgccacaaaccgattgattaccgctaaggaccatgcttcggttcaggttaacattgggcatgtggatgagaatggcgtctacaatggccatttctccacttttgctctctgcggcttcatacgtgctcagggtgatgctgacagtgccctagatcgcttgtggcagaagaagaaagttgaagttaagcaacagtagacacccatgatagtttgttac

SEQ ID NO: 240410 - DNA, 321 bp, Glycine max
cggtttcaaggtccgtcaaggccggtctccaattccccgtcggaagaattggccgttatttgaagaaaggaaggtacgcccagcgtgtcggtaccggtgctcccgtttacttggccgcagttctcgagtacctagctgctgaggtgcttgagttggctgggaatgctgcacgtgacaacaagaagaacaggattattccgagacatgtgctattggctgtgaggaacgatgaggagttggggaaattgcttgctggtgtcaccattgctcatggtggtgttcttccgaacattaaccctgttttgttgcctaagaagactg

SEQ ID NO: 240411 - DNA, 314 bp, Glycine max
ggttctagtgtgtgattgtttgttgttgtaactcgttcttcttcttttgttgttctgtgtttgtgtttgttttttctctcacctgaaaatgtcttgctgcggtggtaactgtggttgcggaagctcctgcaagtgcggcaacggctgcggaggctgcaagatgtacccagacttgagctacactgagtcaaccaccaccgagaccttggtcatgggagtggcacctgttaaggctcaatttgagggtgctgaaatgggtgtgcccgctgagaacgatggctgcaaatgtggaccaaactgctcctgaaaccctg

SEQ ID NO: 240412 - DNA, 279 bp, Glycine max
tgaagccgaagatgagggtgaggatggtgaggacggtgaagaagaacaagctgtgattggattatggagtggcattgcttggttggtagggatgactgtgttcagtgctgtgttgtctgaatatgcggtggatagaggtgaggatgcatcagattcgtgcggtttgtctgtgagctttctcagcataagcgtgctagcaatagttgggaatgcagctgggcatgcaggagcaatcatatttgcgtgcaggaacaagctggacatttcagtgggtgttgc

SEQ ID NO: 240413 - DNA, 328 bp, Glycine max
aatgagggttgtccctcacgtggaaaaaaaaaaaagagaggagggaaaaaaaaagcggcccacgcgtccgcccacgcgtccggagacacaaaacaagcccgctgcattgctccacaaatctgtgatgaagaaggagttcaggaggatgggaaaagctgttgaaaagcagggggccaaaaattactacaggcctgatcgcaagaaggctgcccttgcaaggttgagtggtgttcagaggaagcctcaaagtgtccaaggtctggggtcaggaacaggaatagacagggcgtgagagtcgcggggagagagtgaaagggaattgagaaag

SEQ ID NO: 240414 - DNA, 370 bp, Glycine max
ggctcttggctgatatttcctgataagtggacagacgcttaaacagagaaactaacacagatttgcatgcatggggaaaataacgcacattgtagtaattcccagtgcagggtacagccacttcgttcccgttatccacttctcaaagagacttgttgagcttcacccagaaattcacgtcacatgcatcattcccattctggggtctctcccaagtgctgcaaaacccattctccaaacccttccacaaaacatcaacacggttttccttccaccggtgaaccctaatgacctaccacaaggtgttcccgtagttgtccaaattcagctagcaatggctcactccatgccctccatccaccaaaccctc

SEQ ID NO: 240415 - DNA, 255 bp, Glycine max
ggattagggtttgtcattagcacttcgtcttttcacactgccgctgcaacaatggcttcagggaagaaactttcgaacccaatgagggagagaaaagtgcagaagctcgttctcaatatctctgttcgcgagagtggagatggtctcaccagagccgccaaagtgttgggacaacttagtatggaaaccccagtgttgtccaaaggaggaggcactgttcgttcctttgcgattagggggaatgggaagattgca

SEQ ID NO: 240416 - DNA, 201 bp, Glycine max
ggtgtctgctcactcgctcttctccgccacttctgaatctattggatcaacaatcatgtcggacgaagagcaccatttcgagtccaaggccgacgccggagcctccaaaacctaccctcagcaagccggtaccatccgcaagaacggctacatcgtcatcaaaggccggggctggcagagttgtggaagtttcgacgtcca

SEQ ID NO: 240417 - DNA, 305 bp, Glycine max
tgtaaaaaaaaaaaaaaaaaaaaaaaaaaaaaaaaaaaaaataaaaaaaaaaaaaaaaaaaaaaataataaaaaaaaaaaaaaattaaaaaaaaaaaaaaaaaaaaaaaaaaaaaaccggccgcccaaaaggttcaagccttacttacccttgcatgcaacttcaaaccccttcaaaattgtcaccaaatttaaattcacgggccttcttttaaaaacttcttgacgggaaaaaccctggctttaccaaattaaaccgctttgcacaaaatccccttttcccaaacgggcttaataccaaaaagg

SEQ ID NO: 240418 - DNA, 348 bp, Glycine max
  unsure (1)..(348): unsure at all n locations
gatttgcgctaacaacaactaacgtgcaagttccaaggcggagaaaacaataatggccaccaacgaggagagggatatggagaacaagaagagtgaggaagaactgaagcatctcgggtttgtgaagattgcggcaatgaaagccttagtgtgtgtgtcgaatctctacggcttcgcaaagcaaaactcgggacttttgagatctgctgttggaaccgtggaagacactgtaaccaccgttctgggtcncgtctaccacaaattcaacgctgttcccaaccacatcctcctttttgtcgacaacaaggtggatgaagctgctcacaaattcgatgagcatgcaccttc

SEQ ID NO: 240419 - DNA, 359 bp, Glycine max
gacatatgcagtgtggggaaggagtaaacaaacgttggagtcagaaatgaaagagcaaaggaaaaaccatgctgctcactgtcttgtcctaccttatccagcccaaggacacatcaatcctatgcttcagttctccaagcgtttggtgcagagaggagtgaaggtaacacttgtaactgttgtgtccaattggaagaacatgagaaagagaaacttcacttccagtggggttgagagcatctcagatggctatgatgatggaaggcttgcagcagcagagagtcgtgaggcttacatagagaccttttggagggttggatcacaaacttttgctgagcttgttcagaagcttgcagggt

SEQ ID NO: 240420 - DNA, 142 bp, Glycine max
gacagcgaaacagagagtgatttcagtgagtgatcggtgttcacgtgatctcatcataagcgtcagcgtcaattgaagaagatgccgatcagaaagatcggcgtcggaaggcctgaagaagggactcaacccgacacgttga

SEQ ID NO: 240421 - DNA, 347 bp, Glycine max
gacaacacaacgcaacacaacgcgcactctctcttttctctcctaacacaaaaaccctatcgttcttcgcggtttcgccgattctcgccatgccgaaagccaaatccgacgccaaagccgccgatagccggttgaagcgcaagggcgctggtgctggaaggaagcaatcgaagaaagctgctaaggatcctaacaagccaaagagacctccaagcgctttcttcgttttcatgtccgagttcagagagcagtttaagaaggagcatcctaacaacaaatccgtcgctgttgtcggtaaagctggtggtgacaaatggaaatcgctgtctgatgctgaaaaagccccc

SEQ ID NO: 240422 - DNA, 344 bp, Glycine max
gatttgcgtgttttcatcattgtcgttctgaacggaaaagcactggcgcagctaccctgaggcttctcttctcttctcttctctgtcgtgagtcaccatggtgagggttagtgtgctgaacgatgctctgaagagcatgtacaatgctgagaaaaggggaaagcgccaagtcatgattaggccatcctccaaagtcattatcaaattccttttggtgatgcaaaagcacggatacatcggagagtttgagtatgttgatgaccacagggctggtaaaatcgtggttgaattgaacggtagactgaacaagtgtggggttattagtccccgttctgatgtgggcg

SEQ ID NO: 240423 - DNA, 373 bp, Glycine max
  unsure (1)..(373): unsure at all n locations
ggcgcctgatttctcagttctctcacacactcattcggtgctccgaatctcagattctagggttagggttcccaatttctccaccgatcagaaaatgagttcaactggtggttctaccaagggcggaaggggcaagcccaaagcctccaaatccgtttcaagatcgcagaaagctggtctccaattccccgttggaagaatcgctcgattccttaaggctgggaaatacgccgagcgtgttggtgctggtgctcctgtgtacctctctgcagtgctcgaatatctcgctgctgaggttttggaattggctgggaatgctgctanggataacaagaagaatcgtattgttcctaagcacattcagcttgctgtg

SEQ ID NO: 240424 - DNA, 358 bp, Glycine max
  unsure (1)..(358): unsure at all n locations
gacacatgcccatcatcaaagtttcttcctttctctgctctttgtcttctctgacacatttggggccttgttgagtgtgtttttgcaagagggtatggcgaaggacgttgaggttgctgagcgtggctccttctctgggaaggactaccaggacgctccagcagcaccactcattgatgctgaggagctcacaaagtggtccttttacagggctcttagtgctgagttcaggtgcactttgctcttcctctacattactgtgctcacagttatagggtacaagcaggagacngatcatgctgatgcgtgtggtggggttggcattcttggcattgcatgggcctttggtggcatgatg

SEQ ID NO: 240425 - DNA, 245 bp, Glycine max
gaagagaagctgaatgaggttgaagccgtttgcaacccaatcattagtgctgtgtatcagagatctggaggagccccaggcggtggtggtgcatcaggcgaggaagacgacgacgattctcacgatgagctctagattagtcggagtctgtgagatttttatgatagctgcgaattaagaagtcccctgcgcttgctttggtggtggcgatgatgggatacggtggggaattacttgtactttac

SEQ ID NO: 240426 - DNA, 369 bp, Glycine max
gatcactgtcttgtccgttttctaaatctcattcttcacctgcaactatttggattgctgatttttgttaataccatatttactgatattggcgcatttctttgagaaagttactaattcctagatagaggcaaaaatgttgggaattttcaaggagaagttggttaaagcacccaaagagctgaacagtccagcttcgttgaattcatggactaagcctaagctaagtcacgaaatccttcaggatttcatgtcctgcaattcctccaaggctttctcaatgtgctttgggaatgaagcctttgtagcctattcgccttcaaacaagccctccattcatcaagggttgtttagtgggttggataacat

SEQ ID NO: 240427 - DNA, 280 bp, Glycine max
ggtagcattcagtgaaacactagcgagggtattgggagctctcgttgtttcggagttagggaccttacgcagccatggcgactgctacgaatgccgccgccgccccaccacgccagctctcccagatggaagctgacatccagatgatgttggccgccgacgtccacctcggcagcaacaactgcgacttccaaatggagcgtggcagcgtgaagcgccggatgcgacgggatttacattagtaaccttgggaagacgtgggaggggcttcagctagcag

SEQ ID NO: 240428 - DNA, 372 bp, Glycine max
  unsure (1)..(372): unsure at all n locations
gatgccgaaaagtagtaccaagatggcttcagttgtgtatctcctctttggcttccatctcattgttatcatgtcaagttccttacccgcaactagtgaagtgtttgcaaaacagtatccatccacagaacccgtggaagaaaaactcacccaactccacttctatttccataacaacataacgggggaacacccaactgctatgaaaactgttttgcctcctaaggggtccattcatggttttggggctacttacatgatggatgaccctctaactgaaggaccaagtccaacttcaaagcttgtgggaagatctcaaggaatatacgctttggcttcacancatgagcctgggttgctcatggtgacaaa

SEQ ID NO: 240429 - DNA, 363 bp, Glycine max
  unsure (1)..(363): unsure at all n locations
gaccgcgcaccacactgagaggaagagggagtgagagagagtgttcttcgtttgctaccttctcccagaaatggttacgttcaggtttcaccagtaccaggtggtcgggagggctctcccaacggaagcagatcagcatccgaagatctaccgaatgaagctctgggccaccaacgaggttcgcgccaagtctaagttctggtattttttgaggaagctgaagaaggtgaagaagagcaatggtcaagttcttgctatcaacgagatttttgagaagaacccaaccaagattaagaactacgggatatggttgcggtatcagagtanggcttggttacacancatgtacaaggagtaccgcga

SEQ ID NO: 240430 - DNA, 367 bp, Glycine max
tatcaaccgaggcagagacagatcagccagcaattgaactaaaacctggaattgaccttctaggacctgttgatgagatattttttgatatctatgacagatatgaaccggtcaatgaacccactttggacaactgctttgtatcaacaagttatgatgctactactcactttgagtcgaccgtggatgatgttctcaacatgtatacattgataactggaaaggttattgacctgagtgtggatcttagtgctgctagtgctgcagaagagtaaagaaaactcggtgatgtccttccttcatgatttgttgctgatgggatccgtaatggacttgataatgaatgttataaacgtttataataaat

SEQ ID NO: 240431 - DNA, 338 bp, Glycine max
  unsure (1)..(338): unsure at all n locations
gaaaccgagaagaagaagatggagatgtatcagatctggagcaggagaatagcgttgggagcgttcgcgtttgttctgcttttccgatcggcctcagcagacgacgtcgttgtgctctctgaagataacttcgagaaggaagttggtcaggacagaggagctctcgttgagttctaggctccttggtgtggacactgcgagaggcgtgctccagaatatgaaaagcttgggagcagcttcaagaaagccagatctgttttaatcggcaaggttgactgtgatgaggacaanagtttgtgcagcaaatgatgagtctctgggtacccaacaattcagtg

SEQ ID NO: 240432 - DNA, 239 bp, Glycine max
ctgatctagttcatggcctattagaagtagaaggcgctctggtgggatcctcacgtacagaaaaagattgcagtcagtttgataaggatcgagtgacattgcttcttcggtccgaaccaaggaatcccttaaatatgattcaaaatggatggtattctatcgttgagtagagatttctctatgagaaatatgaatcgcggttttgaggagggggggggagtggtcggggcacaacaggt

SEQ ID NO: 240433 - DNA, 133 bp, Glycine max
gactcactcatacaatagagaccagcttttgcgtctttgtgaacatggagatgatgaaatcatgtggcttcctcttcgtgctcctcctccttgtcgttgcttcccaggtggtggtgcaaatggagggaagagt

SEQ ID NO: 240434 - DNA, 354 bp, Glycine max
gaaacacagagggagagagagtgagagaagcagtaattcatcacaatgggtaaggttcacggatctctcgcacgtgcggggaaagtgagaggacaaactcccaaagtggcgaagcaagacaagaagaagaagccacgcggacgtgctcacaagagaatgcagtacaaccgccgattcgtcaccgccgtggtgggattcggaaagaagcgtggacgaaactcgtcagagaagtgacggaggcgtttggaagatgatgggttttcttaggttgcgaaatgtatcacctcgtggtagttgagtgatgaactcaagacggtcggagttgggattaagcgtcaatgaacgagttttttg

SEQ ID NO: 240435 - DNA, 382 bp, Glycine max
  unsure (1)..(382): unsure at all n locations
gctcttttccctttctttcattgtttgttttgtttgcactctcctctccccttaacagtaactcaacaatcaagaggatcagatccataggagaagttttatctgtccatcaccaaaaccgcgactactgatcagtcaatcccatcaatcaaatcaaatcatcagaaagaaaagaaaggaaagaaaagaagaaaaaaaaaagggaatcaacaaaaagaggaacaacagcaatatcaaacatgtcctcctcatccacttccttttcaccggaccaacaacacctctctccctccgaccagctctgctatgtccattgcaacttctgtgacactgtcctcgcggtgagtgtntccttgcacagcttgttcaagaatgtcactgt

SEQ ID NO: 240436 - DNA, 326 bp, Glycine max
  unsure (1)..(326): unsure at all n locations
gatgccgaaaagtagtaccaagatggcttcagttgtgtatctcctctttggcttccatctcattgttatcatgtcaagttccttacccgcaactagtgaagtgtttgcaaaacagtatccatccacagaacccgtggaagaaaaactcacccaactccacttctatttccataacaacataacgggggaacacccaactgctatgaaaactgttttgcctcctaaggggtccattcatggttttggggctacttacatgatggatgaccctctaactgaaggaccaagtccaacttcaaagcttgtgggaagatctcanggaatat

SEQ ID NO: 240437 - DNA, 339 bp, Glycine max
gaggatcgttccgaggcacattcaactggcggctaggagctacaaggagttgtgcacgctgatgggatctgtgaccactgccaacggtggtgttctgcctaacattcaccacgatctttgttgcccaatcaaggtctctggcaacgggaagaccgacattggatctgccattcaggagttttacatttaacgctcttgttttcgtatgtagttggttgccttatatactatgattaggattgacattggctgatgtataatcgcttaacatttggtaatagttaattgttttctaacattgttcctgcatagctcacagttacttgagtttctcgtgaa

SEQ ID NO: 240438 - DNA, 293 bp, Glycine max
gcctgagcaaaaccctaatccctatttttcttcctcagtagtgtcatttacgcttctcttctctgcagcagctatgcctaaccctaaggtcttcttcgacatgaccatcggcggtcaatctgctggccgcatcgtgatggacgtctacgccgacgtcagtccccggaccgccgagaacttccgcgcgctttgcaccggcgagaagggcgtaaggcggagcggcaagcccctccactacaagggggtcgtccttcgaccgcgtgattccgagtttcatgtgtcagggtggcgac

SEQ ID NO: 240439 - DNA, 357 bp, Glycine max
gactgcaactttgctctctgtgaggcttcaatttccaattagggtttcgcttagagtaaccaattaccatgggagtcttcacctttgtcgttcgcaaatccggcgccgaatggagcgccaagcaacattccggcgacatcgaggcctccgccgactccacgtacgatctccaaaggaagctcgtgcaagccgctctcgccgttgattcggccggtggagtccagtcctcggtcgcgcgcgtgtctcctacctccgctgtgtgcgaagtgagagtgggtggtgctgtagtcggtagaagtggcggtggggcggttgcgagtggggccgggagggtggtgctgctgcagctgatgctgc

SEQ ID NO: 240440 - DNA, 354 bp, Glycine max
gacactcactctttgactcttcttcgtctcaaatctcttcgttccttcgattcgttccatttcttccaaaatggccaaagacgcagttcgcgttctcgtcactggagctgcagggcaaattgggtatgctcttgtccctatgattgctaggggagtgatgttgggtcctgaccagcccgtgatcctccacatgcttgacattcctccggcagcagagtcattgaatggggttaaaatggaattggtggatgctgcagtccctcgtcgtaaaggtgttgttgccagaactgatgtggttgaggcatgcactgggggcaagagtgccgtgatggttggtggattcccaagaaaaga

SEQ ID NO: 240441 - DNA, 377 bp, Glycine max
  unsure (1)..(377): unsure at all n locations
ggtgtgtgcgttcctaacattattgtttcctaccaagttctctgtctggggagttcttagcaccaccaccagcttctgcagtagctttaagctacgaaagattttccttgaccatggggcaaaagcatttagtgacggtgttctgtttatgggctttaacatgttcccttcttccatctttctcctttggaattctgagaattggtttgaagaagagacctctagatcttgatagtattaatgctgctagaaaggcaagagaaggtctaagatctgtaagaccaatgatgggtgcacatgatcagtttattggtaagtcaaaaggtgaagatatagtacctttgaaaganttatttggacgctcaatattttggtga

SEQ ID NO: 240442 - DNA, 355 bp, Glycine max
  unsure (1)..(355): unsure at all n locations
gcttccctcgccgctttgtgctgctgctgctgcaaaacctagggttgagccttttgctcaggttttcagcgcttctttcttacaatggttctacagaacgatattgatttgctgaatcctccagctgagttggagaagagaaagcacaagctcaagcgtcttgtgcagtcaccaaactctttcttcatggatgttaagtgccagggctgcttcaacataacaactgtgtttagccactctcagactgttgtggtttgcggaaactgccagactgtgttgtgccaaccaacaggcggacgggcaaggttaaccgaanggtgctcttttangaagaagggagattgaatggtttgtt

SEQ ID NO: 240443 - DNA, 324 bp, Glycine max
ggttgtgtgagtgaagaagcagagggagtagcggcattaaaaatgcagatcttcgtgaaaactctgacagggaagactataaccctcgaggtcgagagcagcgacaccatcgacaatgtcaaggccaagattcaagacaaggaaggcattcctccggatcagcagcgtttgattttcgccggaaagcagcttgaagatggaaggaccctggccgattacaacatccagaaggaatcaacccttcatctcgtcctcaggcttcgtggtggcatcattgagccttccctcatggctttggctcgcaaatacaaccaggacaagatg

SEQ ID NO: 240444 - DNA, 388 bp, Glycine max
gcagatagatctgcttcttgttgttggaaagaaaccctagcaagcggaacaatggcagacgttgaggtcgatgtggcggctgcagcagcagcagggcagccgaagaagagaacgttcaagaagttcagtttcaggggcgtggatctcgatgcgcttctggacatgtccaccgatgaactcgtgaagatgttcagtgctcgcgcacgtagaaggttccagagaggcctcaccagaaagcccatggccttgatcaagaagcttcgcaaagcgaaaagagaagctccaccaggtgagaagccagaacctgtccgcacccacctccgcaacatgattattgtgcctgagatgattggtagcattattggagtgtacaatggcaagaccttta

SEQ ID NO: 240445 - DNA, 322 bp, Glycine max
gattgttggcctgtgctctgctcgtgcctctagggttatcatatctccatttccatttcctctctctcagtttccaagaatcttaagctatgggaaagtcttacccaaccgtgagcgctgattaccagaaggccgttgagaaggcgaagaagaagctcagaggcttcatcgctgagaagagatgcgctcctctaatgctccgtttggcatggcactctgctggaacttacgacgtgagctcgaagaccggtggtcccttcggaaccatagagcacccctccgaactcgctcacggcgctaacaacggtcttgacatcgctgt

SEQ ID NO: 240446 - DNA, 364 bp, Glycine max
gagagccggcttcttcctctgcgcaggaattaggaatattcgacaggtagagtttcttcaatggctcctaaagttgataagaagaatgatccaaaggcccaggccttgaagactgctaaggcagttaagtcaggtgctacctttaagaagaaggtaaagaagatccgaacttctgtcactttccacaggccgaagaccttgaagaaggacaggaaccccaagtaccctcgcattagcgccccgccgaggaacaagcttgatcattatcagatcctgaaataccccctcaccactgagtctgccatgaagaagattgaggacaacaacactttggttttcaatgtcgacctgcgtgccgacaaga

SEQ ID NO: 240447 - DNA, 333 bp, Glycine max
gatccatttctcgcaacaacgcttaacctctctcattccccatttcctcacctccttcaaccgctgctaaattctagggttccgaaatggacgctggcggaaagatcaagaacggcgccggaggtagaaagggcggcggcccaaagaagaagccggtttcaaggtccgtcaaagccggtctccaattccccgtcggaagaattggccgttatttgaagaaaggaacgtacgctcagcgtgtcggtaccggtgctcccgtatacttggctgcagttctcgaatacctagctgccgaggtgcttgacttggctgggaatgccgcacgtgacaaca

SEQ ID NO: 240448 - DNA, 397 bp, Glycine max
attgacttcccaatccaagaaggctgggttccttacacagtcaaccagtaattcaaccatttgtggagcataggtctttaatgcatcaaatgtataacccatttgctcccgagaggctgaggctcctatatttccaccaattgcttctacttcccttacaatgtcaagtgtggaggagcctaagccaaaggaatgtgatagtaaaatgttaacttcaccgtctgctagtcctttcactaaatttaccaatgcctcatgtagcattggctccaaatttggtgcaaaagacctcctggttgagttgctgtggattgtttgaagttctgtcaagttcaaatagataatttcagaaatacaagatacaagcgtcaagcgtgagtatctcaaatgatgggtc

SEQ ID NO: 240449 - DNA, 393 bp, Glycine max
gggccgcacttactcttgttctcaagggattcgattttctctgcactcacttctagggtttcctccgcgctatcagcaatcatggccgacgaaacaccaaatgagatgaaggaggaggttccagaaattgttccttttgatcctaccaagaagaagaagaagaagaagattacaattgtagatcctgctgatgaccctgtggagaaattggctgagaagacagaaaacctctcagtttctgagggggttgagactgcatttgctggtttgaaaaagaagaagaagaagcctgttgaaatgagtaacttgaatgatgagagtggagatgcaaatgaagatttggatgatcaccctgaagatgatgaaggagaagtggttgctcccgaggctcgc

SEQ ID NO: 240450 - DNA, 385 bp, Glycine max
gatcatagtagatattcattccccttatctttctctcttccctctccccgcccaaaccctaactccctaccctattccgctttctctcatccatcatgaaaggaggaaagtccaagaccgaatctaagagagccgatgccaaacttgctgtgaataagaagggcgccgccaccaagactaggaaacccgccggaaaggggaaggcagcgaaagatcctaacaagccaaagaggcctccaagtgctttcttcgttttcatggaggaattcaggaaggtgttcaacaaggaacatcccgacaacaaagcagtgtctgctgtgggcaaagctgctggagcaaaatggaagacgatgtctgatgctgaaaaagcaccttatgtggcaaa

SEQ ID NO: 240451 - DNA, 376 bp, Glycine max
gacacttactagtagtaagcatggagtcctcaaagatctatgcttacctcttcctctgcatgatctttctctcttccgccactcccattctcggttgtggctactgtggcaaaccccccaaaaagcacaagcctggtaaaacaccaaagacacccaaaacacccgttgttaagccaccagtcaccatccctcccattaatgttcctcccgttgttcttccaccaatagtgaagcccccaggtattctccctccaattccaattattaacccaccaaccacaccagggaagggagggaacactccatgcccaccaccaaagtctcctgcgcaggctacgtgccccattgacacgctcaaacttggtgcctgtgtgga

SEQ ID NO: 240452 - DNA, 329 bp, Glycine max
gagagtggtggggtgtgcagaagagcgtcgcagttgtaaccctaatcagaagaagcgcagcttcaagcgagtgacagccaccagccatgggtcgtatgcacagccgcggtaagggtatatcctcttctgctttgccctacaaaaggagagctcctagctggctcaagatctcttcgcaagatgtcgaagaaaatatctgcaagtttgcgaagaaaggtttgaccccgtctcagattggggtcattctcagagattctcacggtattgctcaggtcaatagcgtcactggcagcaagatccttcgcatcctcagagctcacggacttgcg

SEQ ID NO: 240453 - DNA, 335 bp, Glycine max
gagggtttttgtcgtcgctactaagagttgctgcttcttcagccactccgcacctcgcagcctctgtgccctcaacaaccatggctgaaatcgaaactaccgttccagatcccacccaaatcgacgtcaaactcttcaatcgctggagcttcgaggatgttgaggttaatgagatgtctctggctgattacattggagtgtccccatcaaagcatgctacatatgttcctcacactgctggtaggtactcagtgaagaggttcaggaaagcgcagtgccccattgttgagaggctcaccaactctctgatgatgcacgggaagaacaagggaaag

SEQ ID NO: 240454 - DNA, 280 bp, Glycine max
  unsure (1)..(280): unsure at all n locations
ggtgtgtagtataggattctcttctttattccttttgtaatttcattcattcttaatctttgtgaaaaataatgttcatcgagaattttaaggttgagtgtcctaatgtgaagtacaccgagactgagattcagtccgtgtacaactacgaaaccaccgaacttgttcacgagaacaggaatggcacctatcagtggattgtcaaacccaaatctgtcaaatacgaatttaaaaccaacatccatgttcctaaattangggtaatgcttgtgggttgggg

SEQ ID NO: 240455 - DNA, 332 bp, Glycine max
  unsure (1)..(332): unsure at all n locations
ggccattgttgctgtcatcatccgcagctgctgttattcgcaccgcaaacaaacagtgagccatggccgtcggaaagaacaagcgcatctccaaagggaaaaagggtggcaagaagaaggcagctgatccctttgccaagaaggattggtatgacattaaggccccttctctttttcaagtgaaaaatgttggcaaaaccctcgtctctcgtacgcagggtaccaagattgcttctgaaggacttaaacatanagtgtntgaggtctccttggctgatcttcaaggggatgaggatcatgcattcaagaagattagggtgagagctgaagat

SEQ ID NO: 240456 - DNA, 356 bp, Glycine max
ggtcgtgaacgtgtacaattccacaaccactttatttactctccttctctcctctcccttgagcagattaaaatcatgggtccgatgctgctgagccaactcgccaccggtctaagcgttctcgccggagcggttcttgtgaaatcggttatggaccagaagcccatggcaggcccattcactcgctgccccacgtgcaacggaaccggtcgagtcacgtgcctctgttcgcgttggtccgacggcgatgtcggatgctccacatgctccgggtcgggtcggatggcctgcagcagttgcggcggctccgggaccggtcgtcccttgccggccaaaatcgcgattcgcccaccgaa

SEQ ID NO: 240457 - DNA, 374 bp, Glycine max
atcaagagaagcactcaattgaagaagcttatgaatgcttactgtgaccgacagtcggtggatttcaactccattgcttttctgtttgatggacgccgcctccgagctgagcagactccagatgagttggaaatggaggacggggacgagattgatgccatgcttcaccagacaggaggttctgttgtctgaaggatgtgattacctttgctcctcattataagtaggaattagttaacttagagctatgtatggcataagatacatattttattatctgctattatatacagcttttgccggtggattttggaggcattgtgcttcctcttcaatatgatgattatgaatggattgtcatatttctgctttac

SEQ ID NO: 240458 - DNA, 373 bp, Glycine max
gaaaatcctctcgtctatagtctattgcactctgacagacactatcagatttcagaggcggaggcggaggctggagctgcctcaactcaagtcctcaactatctgaatctgaactcatccactcactcgttagcgctgctagaacgaaaactgagtaatggaaagtggagggaactcccttccatcagggtcagatggtgtgaagagaaaggtttcatatttctatgatccagaggttggaaactattattatgggcagggacacccaatgaaacctcataggattcgaatgacacatgctcttttagcccactatggattgcttcaacacatgcaggtcctgaagcctacggctgctaaagatagggacctt

SEQ ID NO: 240459 - DNA, 353 bp, Glycine max
ggtcctaaatcctcattccagccacacgcttcagaagacatggcctcattgggtgggttacaaaatgtgagcggcatcaattttcttatcaaagagggtccaaaagtcaatgcaaagttcgagctgaagccgccaccatatccactgaatggtttggagccggtgatgagccagcagacacttgagtttcactgggggaagcaccacaagacttatgtggaaaatctgaaaaaacaagttgttgggacagagcttgatgggaaagtcaactagaagagaatattggcacatcatacaataagggtgacattcttccagctttcaacaatgcagcacaggtatggaaccatgac

SEQ ID NO: 240460 - DNA, 392 bp, Glycine max
gagaacagaaaaataaattgaagattgagagaagatacaaaacagaagagagatgggcgtgacgaaggaacaagttgaattatccttgaaggccaaactgaacccttctcaccttgaagtggttgatatatctggagggtgcggtgcaagttttgtggtagagattgtatccgaacagtttgaaggcaaaaggctacttgagaggcatcgaatggtgaatgctgccttagaggaggaaatgaaacaaattcatgctctctctattaagaaagctgttaccccagagcagtggaaacaacagcaagaatccaaccaatcaaatcctgctgcctagagcatatgttttagttataaaataagaaatccatacagtgtgttgctgactgttgaca

SEQ ID NO: 240461 - DNA, 335 bp, Glycine max
gggtggagagcaagagctataagtgtgggaagtgattggaaattgttggaacccaccctatcaacaaggagaagctgttttcgttcgtcgccactaacactaatcgtttcttcaatgccttacgagaaggaactcgccgctgcaaagaaagcagtcactctcgctgctcgtctctgccagaaagttcagaaggctcttctgcaatccgatgtgcactcaaagtcagacaaaagtcctgtcacagtggctgattatggttcacaagcattggtcagctttatacttgagagagaacttccttctgaatcattttcattagtagctgaggaggattc

SEQ ID NO: 240462 - DNA, 321 bp, Glycine max
gaagactgtctctaaggaggaagcgtctgccatcaaggctgctgggaaagcatggtatcacactatggtgtcagattctgattatacagaattcgacaacttttctaagtggttgggtgtttcacagtaaacttcatgatttattttttcgtattagaattttgttttttatgctcatcagaactaaatatccttatctttggtttttttgttttgcgggttaaggttgtcatcataattacgcagacaatgtggaaattttgtttgttggattttagtgcaaattctggttcttatattaaaaacagcatctcttttatt

SEQ ID NO: 240463 - DNA, 283 bp, Glycine max
ggcacttcaattgcaatcaaattagttcattctctttgcgcagttccctacctctcctttcaagatgcagatcttcgtcaagaccctcaccggaaagaccatcacccttgaggtggaaagctctgacaccatcgacaacgtcaaggccaagatccaggacaaggaaggaattcccccggatcagcaacgtctcatcttcgccggaaagcatctcgaggacggccgttacctcgccgactacaacatccaagaaagagtcaacccttcaccttgtccttcgtct

SEQ ID NO: 240464 - DNA, 387 bp, Glycine max
gaagcactaaggagtagcgagtattggctgatacttgcaccctcttaacaataacatgagacagagaaagggttgacggaaaggaaaaccaaatcaaacccaacccaccttgtccgatctgccaccaggtgtggttgttgtgatttgaatggaggcaagtggaggtggcggtggcggtgcttcaccgtctgcaccagtgaagcaatatctgcacgatttctcgaagctgtttcagtactatctggataaatccactccacattccacgtacagatggattgggacttttgtgatagcatccatctacgtattacgcgttgtttatgtgcaggggttttacattgtctcttatggcctcggaatctaccttctgaatctcttgattgg

SEQ ID NO: 240465 - DNA, 356 bp, Glycine max
gactctgttacggtgcaacctagcagcctccaaatccaatggcttcagagaagaaactttcgaacccaatgagggagataaaagtgcagaagctcgtcctcaatatctctgttggcgagagtggagatcgtctcaccagagccgccaaggtgttggaacaacttagtggccaaaccccagtgttttccaaagcaaggtacactgttcgttcctttgggattagaagaaatgagaagattgcatgctatgtcactgtcagaggtgacaaggcaatgcaacttttggagagtggtttgaaggtgaaggaatatgaacttctcagaaggaacttcagtgataacggttgccttgggctt

SEQ ID NO: 240466 - DNA, 302 bp, Glycine max; identical to SEQ ID NO: 239939

SEQ ID NO: 240467 - DNA, 337 bp, Glycine max
ggcttccgctgccattgaaagaagctgttgaatcgcgtcgaataaggttctgaaatttttaagctttcatctcagacagggtgtaataagaaatgatagatataagtactctcaatgctgcacagattactgtgctgggatccgcgttttgtgttatgctttccatgcatttcacgacgcagttaatgtctcagcatctcttctattggaagaatccgaaagagcaaaaggctattatcattatcatccttatggctcctatctatgcagctgtctcctttgtgggtctcttggatatcagaggaagcaaggagtttttcacctttttagagtcagt

SEQ ID NO: 240468 - DNA, 379 bp, Glycine max
ggtgctctgctcgtgcctctagggttatcatttctccatttccattttctctctcacttttcaagaatcgtaagctatgggaaagtcttacccaactgtgagtgctgattaccagaaggccgttgagaaggcgaggaagaagctcagaggcttcatcgctgagaagagatgcgctcctctaatgctccgtttggcatggcactctgctggaacctttgacaagggcacgaagaccggtggacccttcggaaccatcaagcaccctgccgaactggctcacagcgctaacaacggtcttgacatcgctgttaggcttttggagccactcaaggcggagttccctattttgagctacgccgatttctaccagttggctggg

SEQ ID NO: 240469 - DNA, 379 bp, Glycine max
gatgccgaaaagtagtaccaagatggcttcagttgtgtatctcctctttggcttccatctcattgttatcatgtcaagttccttacccgcaactagtgaagtgtttgcaaaacagtatccatccacagaacccgtggaagaaaaactcacccaactccacttctatttccataacaacataacgggggaacacccaactgctatgaaaactgttttgcctcctaaggggtccattcatggttttggggctacttacatgatggatgaccctctaactgaaggaccaagtccaacttcaaagcttgtgggaagatctcagggaatatacgctttggcttcacaacatgagcctgggttgctcatggtgacaaattttctc

SEQ ID NO: 240470 - DNA, 387 bp, Glycine max
gactgtggttgaaaatcgaatcctttctctctctctctctctaggcaataaagtgaaacgcatcagagaaattcaattcaatggatgcaaatcgcgagcaaattgtggacgttgggtcggtggtggaagccgtttctgctgacgacggtgacgctcctctctacagcctcgaaagtctctgcatgcgttgcggtgaaaacgggacttcaagatttttattgactttaattcctaactttagaaagattttgttgtcagcttttgaatgtccacactgtggtgagaggaacaatgaagtacagtttgctggtgaaattcaaccacgtggttgttgttactctttggagatcccatcatgcgaacaaaagatgctaaatcgacaagtgg

SEQ ID NO: 240471 - DNA, 130 bp, Glycine max
caataaaaattaaattaatagtacagatgttatcattaatttatattaataatatgattctttatatatattaagaaattttttggtttatatatagaaattgtttatattcttaatactaagaataccg

SEQ ID NO: 240472 - DNA, 328 bp, Glycine max
actcaccacttcaaaacactcataacacaaagcacaaagcaaagctcatccttgagttaaaaaatggcagcagcttcttccatggctctctcatccccatccttggctggcaaggccgtgaagctgggcccatcagccccagaagtgggaagggtgagcatgaggaagaccgtcaccaagcaggtctcctcaggaagcccatggtacggcccagaccgagtcaagtacttgggcccattctctggcgagcccccgtcctacctaaccggtgagttcccaggcgactacggctgggacactgctgggctttccgcagacccagaaacct

SEQ ID NO: 240473 - DNA, 352 bp, Glycine max
ggagcagaaagctaaaggctaaagcctagaaccttcttcctttacacctcgctggaaccagcgatggatcctcagcctgagccagtcagctacatatgcggagattgtggaatggagaatacgctgaagcccggtgacgttatacagtgccgtgagtgcggttaccgtattctttacaagaagcgcactcgtcgcattgtccagtacgaggcacgctgaagaaaactgctataacgtttgcaagtaatttccatgaagaaattgttactacatctgtgttgtgtgatattgaagaactacttttaattctacagtagattgctttttgggtgatgtttatgcaaagattaaa

SEQ ID NO: 240474 - DNA, 373 bp, Glycine max
ggcccctcttctaattcttctctcaaaaggactgaacgaaaaaaccttagggttcctctgttcttcttcgccccccaaaaaattttctggctcagagaaattcaaccgttctcgccattgccgaagctccaactcctcgcatttccaactcttcacccaaaaccctttttgttggaacagagtttcagagagagacccttcacaacatggcaaaaacgaggccaggcagaaaagacttggattcctacaccatcagaggcaccaacaagatcgtaagagctggggactgtgtgctgatgcgcccctctgatacgagcaagccaccgtacgtggcgcgcgtggagaagatcgaacaggatagtaggaacaacgt

SEQ ID NO: 240475 - DNA, 373 bp, Glycine max
gatagtctgaggaaagtgagtgagagaaagagatcgcagacacagagcagaatggcttctacccaatgtttcttgcaccaccatgctcttaccacccctgccagtgccagatccccatcactacgcatcttggttagcaccaagcctaaccagcttgtttgcaaggcacagaaacaacaaacaccacaagaggatattgatgtcagcccaatctctcgccgtttagctctaactgtgctcattggtgctgctgctgttggctccaaagtccaacctgctgatgcagcctatggtgaagctgccaatgtgtttggaaagccaaagacagacacagatttcctgccatacaatggagatggattcaaactatcta

SEQ ID NO: 240476 - DNA, 365 bp, Glycine max
gacctgatgcagatgcagcctatcatggcagcctactaccccaacaacgtcaccactgatcacattcaacagtacctggatgagaacaagtccttgatcctgaagattgttgaaagccagaattctggcaagctgagcgagtgtgcagagaaccaatcaaggctgcagagaaatctcatgtacctagctgcaatagctgattctcaaccccaaccatctccaatgcctggtcagtatccttctagtggacttatgcagcagggagcacactacatgcaggctcagcaggctcagcagatgtcacaacaacagctaatggcttcgcgctcctcactcttgtactcccaacagcctttctcagtgct

SEQ ID NO: 240477 - DNA, 388 bp, Glycine max
gagagaaagagagagaaagatgtcgaagcgtggtcgtggtggttcggcggggaacaagttccgcatgtcgctgggtcttccagtggcggcgacggtgaactgcgccgacaacacgggggcgaagaacctctacatcatttcggtgaaagggatcaaaggccgtttgaaccgtcttccctcggcctgcgttggcgacatggtgatggccaccgtgaagaagggaaaacccgatctgaggaagaaggtcttgccagctgtcatcgttcgccagcgcaagccatggcgccgaaaggacggcgtctacatgtacttcgaagataatgctggtgttattgtcaatcccaagggagaaatgaaaggttctgctatcactggtcccattggaaaa

SEQ ID NO: 240478 - DNA, 385 bp, Glycine max
gtctcctacagattcttcagcaactgcgattttggatcggaacctcttctgcggcgtagcaatgggacactccaacgtttggaattctcacccaaaaaactacggtcctggttctcgcacttgccgagtgtgtgggaatccacatggattgatcaggaagtatggccttatgtgctgcaggcagtgcttccgtagcaatgccaaggaaattggcttcatcaagtatcgctaaaagagctgttgtcacctacggaccaatattatgttctggcactaggatgttttgaagatgttatgtttgaagaaacttgagacttgtttttttcatctattttattatcagacataatgtgtggaacgaagaatacttttatataaattgttt

SEQ ID NO: 240479 - DNA, 271 bp, Glycine max
ggttctagtgtgtgattgtttgttgttgtaactcgttcttcttcttttgttgttctgtgtttgtgtttgttttttctctcacctgaaaatgtcttgctgcggtggtaactgtggttgcggaagctcctgcaagtgcggcaacggctgcggaggctgcaagatgtacccagacttgagctacactgagtcaaccaccaccgagaccttggtcatgggagtggcacctgttaaggctcaatttgagggtgctgaaatgggtgtgcccgctgag

SEQ ID NO: 240480 - DNA, 358 bp, Glycine max
ggccgttttcttcttcatcatagtcgtggccgtgtcgcagcaaaaccaaaccacatattaacttgtttgctctaagtcatggctctgatcttgcacgcaaccaaagcaaacaagaatgctttcaagactctgattgcggcagagtacagtggcgtccaagtggaattggcccctaatttcgagatgggtgtctctaatagaactcctgaattccttaaaatgaatcccataggaaaggttcctgtcttggaaacgcccgatggtccagtctttgagagcaatgccattgctcgttacgttgctcgactcaagggtgacaacgctttgttctcatcttctgccaatgataatgcccaca

SEQ ID NO: 240481 - DNA, 354 bp, Glycine max
gagtgccattcccttcacaccattctcacaaaacaactttcaaactctgagaaagaatggctgccaacacattgatgagtactgctatctcagccttcccatctctcctttcttcctcaaaatccagatttgccaccgcagttcctctttctagctttggtgtcaccaatgcctcttcttctcgcttttctatgagtgctgactggatgccaggccagcctagacctccttaccttgatggttcagcacctggtgactttggattcgaccctcttcgtcttggtgaagtaccagagaatcttgagaggttcaaagagtcagaactcattcactgcagatgggccatgcttgctg

SEQ ID NO: 240482 - DNA, 375 bp, Glycine max
  unsure (1)..(375): unsure at all n locations
ggaaggctcgttgatataaaagggagtccttatcttctcatattgtttaggttttcttagtcagacttaccccttgctaccaacactgagcttaaccgagcttcgcaaagatgaatcgggaaaagttaatgaagatggctggttcggttagaactggaggaaagggtactgtgagaagaaagaagaaggctgtccacaagacaacaaccacagatgacaaaaggcttcagagcaccctgaagagaatangggtgaatgccatccctgctattgaagaggtcaatatctttaaggatgacgtagttatccagtttctaaatcccagagttcaagcatccattgctgctaatacttgggttgtcagtggttcaccgc

SEQ ID NO: 240483 - DNA, 256 bp, Glycine max
ggcgtacacagcctcaacaaccctaacgcgtgcagagcagagagagacgcagccatggggcgaagacccgcgaggtgttataggcaaattaagaacaaaccataccccaagtcacggttttgccgtggtgttcctgatcccaagatcaagatttacgatgttggtatgaagaagaaaggtgttgatgaatttcctttccgtgtccatctgggtaatttggaaaaagaaaacgtttccaatgaaggcctggaaactg

SEQ ID NO: 240484 - DNA, 339 bp, Glycine max
gaaccattcaaacgcacactctctctcaccaaagccttcctagaacgaaaaaaaaaagaagagcaattttccctcaccaaagaagaagaagcaaacaatggccgatcaacttaccgatgaacagatctccgagttcaaggaagccttcagcttgttcgacaaggacggcgatggttgcatcacaaccaaggagcttggaactgttatgcgttcattggggcaaaacccaactgaggcagagctccaggacatgatcaatgaagtggatgctgatgggaatggtaacattgacttccctgagttcctaaatctcatggccaggaagatgaaggacactga

SEQ ID NO: 240485 - DNA, 319 bp, Glycine max
gagcttgacctcaccgacaagggtctcggcgtccgctcaaagaggtttgctttgctggtggaagacctcaaggtgaaggttgcaaatgttgaaagtggaggagagttcaccatctccagtgctgaagagatcatcaaggccctctaaacccttgaatcctcttgtttgctcttttgccgtctttaatgtgtggtgtgactcttttgatgcctgaacatactagaatcctttcccttttcatagatgtaattgtgttatgtgctctggaaaggaccatgatatggtgcatattatggaaataaataagatttcttgctac

SEQ ID NO: 240486 - DNA, 409 bp, Glycine max
aagacgacagaagggggcaggtagagagagcgagagaacaagaacataagggaaccacagcggcggtaacagaagaacaagcagagaatgggtcgagtgagaacgaagacggtgaagaaatcctctcggcaggtgatagagcgtcactactcgcgcatgaccctggacttccacacgaacaagaagcttctggaggaagtggcgataatcccgtcgaagaggctaaggaacaagatcgcggggttctcgacgcacctgatgaagcgcatccagaagggccctgtgcgcggcatctccctcaagctccaggaggaggagcgcgagcgccgcatggacttcgtccccgacgtctccgccatcaacaccgaccacatcgaggtcgacaaggaaaccctcgacatgctccact

SEQ ID NO: 240487 - DNA, 347 bp, Glycine max
ggtgctctgctcgtgcctctagggttatcatttctccatttccattttctctctcacttttcaagaatcgtaagctatgggaaagtcttacccaactgtgagtgctgattaccagaaggccgttgagaaggcgaagaagaagctcagaggcttcatcgctgagaagagatgcgctcctctaatgctccgtttggcatggcactctgctggaacctttgacaagggcacgaagaccggtggacccttcggaaccatcaagcaccctgccgaactggctcacagcgctaacaacggtcttgacatcgctgttaggcttttggagccactcaaggcggggttccctattt

SEQ ID NO: 240488 - DNA, 337 bp, Glycine max
acttcacaaaatatatatatgtatgtttaggtagaaagataccttggatatgcatgtatgtagcaaaaagatacctcaccaaaatatatatatgtatgtttaggtagaaagataccttggatatgcatgtatatagcaaaaatacctcacaaaacatatatatgcatgtttaggtagcaagataccttggatatgcatgtatatagcaaaaatacctcacaaaacatatatatgtatgtttaggtagcaagataccttggatatgcatgtatatagcaaaaatacctcacaaaaataaacacatgtttaggtagcaaaatatctcatgaaaagaaaa

SEQ ID NO: 240489 - DNA, 382 bp, Glycine max
agacacaggctgctcaacagttcaggatgccagatatgggatctgtaacggcaaaacaagaagatgctgctgctgcagcagcgcaacctgaagaagaggaggaggttgatgaaactggtgtcgagccccatgacattgatttggtgatgacacaggcaggagtgtcaagaagcaaggctgtcaaggctctcaagactcacaacggggacattgttggagccatcatggaactcactgcttaattggggtttatgttctatttgtttgttttttgggaatgatattagaactagtgccgtttctatgttaaaccgaatcaacataaccgttatatgtttgggatttgggttttaccctttacatcataattttgttgcgttct

SEQ ID NO: 240490 - DNA, 385 bp, Glycine max
ggtggaacaaccttgtaacaatggcttcctcagttacttcctcttttcgcatcagcaatttgaagtcggtttttgttggtgagactaataaactcagagtttcaagtgttcctggtgctcatgttggtttcaatagaaagactgtagaatgtaaggaatcacgaattgggaagcaaccaattcctgtgccatccaatgtcacagtcaaattggaaggacaagatatacaagtgaaaggtcctttgggtgaacttgcattaacttatcctcgagaagtgttggttgagagggaagagtcagggactctaagggttaaaaaggcagttgaaaccagaagggccaatcaaatgcatgggctttttacgacacttacagacaacctggt

SEQ ID NO: 240491 - DNA, 328 bp, Glycine max
gaagcaaaaccctaatccctctttcttcctcttcctcagtagtgcgattttcgattctcttctctgcaactatgcctaaccctaaggtcttcttcgacatgaccatcggcggtcaacctgccggccgcatcgtgatggagctctacgccgacgtgactccgagcaccgccgataacttccgcgcgctctgcaccggccataagggcgccgggcggagcggcaagcccctccactacaaaagctcgtccttccaccgcgtgatcccgaacttcatgtgccagggcggctacttcaccgccggaaacggcaccggaagcgagtcgatcta

SEQ ID NO: 240492 - DNA, 476 bp, Glycine max
  unsure (1)..(476): unsure at all n locations
ngcctagcgtaacgctgctaggtaccggtcaggaattcccgggccgacccacgcgtcagacggctgcgagaagacgacagaagggagctgaaggaggttgaagccgtttgcaacccaatcattagtgctgtgtatcagagatctggaggagccccaggcggtggtggtgcatcaggcgaagaagacgaggacgattctcacgatgagctctagattagtcggagtctgttaaatttttatgatagctgggaattaagaagtcccctgcgcttgcttttttggtggcgatgataagatactttgtgaaattacttgtactttacttttttgcttagttttacgacgaaacttcttcagctgttaanagaaaagganaaaccgttgacgataagcggccgctctanaggatccaagcttacgttcgcgtgcatgcgacgtcatagctcttctatagtgtcacctaagttcaattcacg

SEQ ID NO: 240493 - DNA, 367 bp, Glycine max
gacagcactgcactcttcgcaacacaacaaaaaaagacaacccagagagcgcgtcttaataaacgctcttctctgaaaacccccatttcttttcttctttcttcttctctttcgcttcttcgatcttcgatcttcgtcgctgaaaatgagagagtgcatttcaatccacatcggccaggccgggattcaggttggaaacgcctgctgggagctttactgcctcgaacacggcattcagcctgatgggcagatgccaagtgacaagaccgttggtggaggtgatgatgctttcaacaccttcttcagtgaaactggggcaagaaagcacgtgccccgtgcgatttttgtagatcttgagcccactgtg

SEQ ID NO: 240494 - DNA, 389 bp, Glycine max
  unsure (1)..(389): unsure at all n locations
gacttcacaactcaaactgcttcattgcataattgcagataagatcaacccttctaccttcagattcgcgggaagatggcatcacttcatgctaatgtgacatcagttgtttacaacagtggcaaccgtgtttctcaatcgaaatttgcaagctcttccttcttgtctgggttcgatgttgttggtcgtgcttcaagtgcttggaagaaggaacttgtcccatcttccatttccttggtgcctagagccaccctaacatttgatcccccaactaccaattcagacataaccaagcaaaagaagcacactcttgaccctgcttctccagattttcttcctcttccttcatttgaacagtgctttccaaagagcaccanagaacacaggga

SEQ ID NO: 240495 - DNA, 403 bp, Glycine max
gatgtcatagtattatcattcattctcatctttctctcttctctctccaccaaaaccctaactcccgaccctgttcccctctcgtatccgtcatgataagaggaaagtccaagaccgaatctaagagagccgatcccaaacttgctgtgaataagaatggagccgccaccaacgctatgaaacccgccggcaatgggaaggcagcgaaagaccctaacaagccaaagaggcctccaagtgctttcttcgttttcatggaggagttcaagaaggtattcaacaaagaacatcctgaaaacaaagcagtgtctgctgtgggcaaagctgctggagcaaaatggaagaccatgtctgatgctgaaaaagcaccttatgtggcaaagtctgagaaaaggaaagtgga

SEQ ID NO: 240496 - DNA, 375 bp, Glycine max
  unsure (1)..(375): unsure at all n locations
aaaatcggtccggaaagatcctaaccccttcttaaggggccatcaaggagcaacgcggtccttccttcaattcgcaatctgcaattctcccatcgcaattgctggaaagagctattacgaatatatttcaacggtcaaagggtgcatcggacaagcagatanagagggcgtataagnagctagcattgaagtacatcctgataagaacccggcaatgaagaagctaataagaaatttgctgagattagcaatgcgtatgaagtgttgtcggatagcgagaagaggaatatttacgataggtatggtgaggaatgtttgaagcaacatgctgctagtggaggcagaggtggtggaatgaacttccaagatattttt

SEQ ID NO: 240497 - DNA, 405 bp, Glycine max
tggggtggttcttgtttgcgagatacaagcgtaagcagcggctaccctaacctcgtcttcctctctactaatttcagctatggccgacgaagctgtggttgttccagatcccacccagatcgatgtcaagctctttaaccgctggagcttcgaggatattgatgttactgacatttcactggctgattacattggagttgcggcatccaagcacgccacatatgttcctcacaccgccggaaggtactccgtgaatcggttcaggaaggcgcagtgccccattgttgagaggctcaccaactctctcatgatgcacggtagaaacaatggcaagaaactcttggctgttaggatcatcaagcatgctatggacattattcatttgttgactgaccagaaccccat

SEQ ID NO: 240498 - DNA, 339 bp, Glycine max
gagggtttcaaagtggacagaagagagcgtcctagtcgcaaccctaataagaagaaccacagcttcaagcgagtgacatccaccagccatgggtcgtatgcacagccgcggtaagggtatatcctcttctgctttgccctacaaaaggacaccccctagctggctcaagatctcttcgcaagatgtggaagaaaatatctgcaagtttgcgaagaagggtttgaccccgtctcagattggtgtcattcttcgagattctcacggtattgctcaggtcaacagcgtcactggcagcaaaatccttcgcatcctcaaagctcacgggcttgcgcctgaaat

SEQ ID NO: 240499 - DNA, 371 bp, Glycine max
ggtgtgtgtagtataggattctcttctttattccttttgtaatttcattcattcttaatctttgtgaaaaataatgttcatcgagaattttaaggttgagtgtcctaatgtgaagtacaccgagactgagattcagtccgtgtacaactacgaaaccaccgaacttgttcacgagaacaggaatggcacctatcagtggattgtcaaacccaaatctgtcaaatacgaatttaaaaccaacatccatgttcctaaattaggggtaatgcttgtgggttggggtggaaacaacggctcaaccctcaccggtggtgttattgctaaccgagagggcatttcatgggctacaaaggacaagattcaacaagcca

SEQ ID NO: 240500 - DNA, 404 bp, Glycine max
gacaactcaaactgcttcattgcataattgcagatcagatcaacccttctaccttcagattcgcgggaagatggcatcacttcatgctaatgtgacatcagttgtttacaacagtggcaaccgtgtttcgcaatcgaaatttgcaagctcttccttcttgtctgggttcgatgttgttggtcgtgcctcaagtgcttggaagaaggaacttgtcccatcttccatttccttggtgcctagagccaccctaacatttgatcccccaactaccaattcagacataaccaagcaaaagaagcacactcttgaccctgcttcgccagattttcttcctcttccctcatttgaacagtgctttccatagagcaccatagcacacagggaagtcactcatgacgaaactg

SEQ ID NO: 240501 - DNA, 358 bp, Glycine max
  unsure (1)..(358): unsure at all n locations
gaccttcgaattttcttttccttcactttcccgagaaaaaaaaacactctttcactttcttgactacggtctcacttcgacatggctcgtactaagcaaactgctcgcaagtccaccggcggcaaggcgccacgtaagcagttggcgaccaaggccgcccggaagtccgctcccgcgaccggaggagtgaagaagccccaccgcttcaggccgggaaccgtggcgctgagggaaatcagaaagtatcagaagagcaccgagcttctcatcaggaagcttccgtttcagagactcgtgagggaaatcgcgcaggacttcaagaccgatttgcgttttcagagtancgccgtttctgcgc

SEQ ID NO: 240502 - DNA, 361 bp, Glycine max
gacttcacaactcaaactgcttcattgcataattgcagataagatcaacccttctaccttcagattcgcgggaagatggcatcacttcatgctaatgtgacatcagttgtttacaacagtggcaaccgtgtttctcaatcgaaatttgcaagctcttccttcttgtctgggttcgatgttgttggtcgtgcttcaagtgcttggaagaaggaacttgtcccatcttccatttccttggtgcctagagccaccctaacatttgatcccccaactaccaattcagacataaccaagcaaaagaagcacactcttgaccctgcttctccagattttcttcctcttccttcatttgaacagtgct

SEQ ID NO: 240503 - DNA, 361 bp, Glycine max
  unsure (1)..(361): unsure at all n locations
gagggttttgcgctgttgttgctgctcatcctccgtaacctccgagctctgcaccgaagaacgaagccatggggaagacacatggaatgggatctgctcgcaagctcaagtcccaccgcaggaggcaaaggtgggctgacaagtcatacaagaaatcacatcttggaaatgaatggaagaaaccttttgctggttcatcccatgccaagggaattgtccttgaaaagataggtattgaggctaagcagcccaactctgccattcgtaagtgtgccagggttcaacttatcaagaatgggaagaagattgccgcttttgtcnctaatgacggttgcttgaactacattgaagagaatgacga

SEQ ID NO: 240504 - DNA, 367 bp, Glycine max
gaacagccacaacactttccacttgtctccgaattagttatcttgagaaacattattcccattgctatatattatggctagcatgaaggttacatgggtggttgtgatcatgtgcatggccgtggtgggtgcaccgatgatggcgcaagccatgacatgcaatgatgtgacggtgaacatggcacagtgcctatcctacctgatgcatggaggaacaccttcaacactttgctgcagcggagtcaagaacattcttggctctgctgtcaccaccgttgacaaacaaactgtgtgcaactgtctcaaggcggatgctgctaggtacaacatcaatgaccagtatgctcaggcactccctggtttctgc

SEQ ID NO: 240505 - DNA, 264 bp, Glycine max
  unsure (1)..(264): unsure at all n locations
gatcgcacaacattattctttcgcaccttgcagaatcagttttctctctcaatcgtctttcatggctcgtaccaagcaaaccgctcgcaaatccaccggtgggaaggctcctangaagcaactcgccaccaangctgcaagaaaatctgcacctaccaccggtggagtcaagaagcctcatcgctatcgtcctggaactgttgctcttcgtgagatccgaaaataccaaaagagcacagagcttctgatccgcaagctcccctt

SEQ ID NO: 240506 - DNA, 57 bp, Glycine max
  unsure (1)..(57): unsure at all n locations
gagacctcaggtcangcggggctacccgctgagtttaagcatatcaataagcgaagc

SEQ ID NO: 240507 - DNA, 406 bp, Glycine max
  unsure (1)..(406): unsure at all n locations
ccgggccgacccacgantcaacgggcgcgagaggacgacagaaggggagggttttgcgctgttgttgctgctcatcctccgtaacctccgagctctgcaccgaagaacgaagccatggggaagacacatggaatgggatctgctcgcaagctcaagtcccaccgcaggaggcaaaggtgggctgacaagtcatacaagaaatcacatcttggaaatgaatggaagaaaccttttgctggttcatcccatgccaagggaattgtccttgaaaagataggtattgaggctaagcagcccaactctgccattcgtaagtgtgccagggttcaacttatcaagaatgggaagaagattgccgcttttgtccctaatgaccgttgcttgaactacattgaagagaatgacg

SEQ ID NO: 240508 - DNA, 230 bp, Glycine max
ggttctagtgtgtgattgtttgttgttgtaactcgttcttcttcttttgttgttctgtgtttgtgtttgttttttctctcacctgaaaatgtcttgctgcggtggtaactgtggttgcggaagctcctgcaagtgcggcaacggctgcggaggctgcaagatgtacccagacttgagctacactgagtcaaccaccaccgagaccttggtcatgggagtggcacctgtta

SEQ ID NO: 240509 - DNA, 306 bp, Glycine max
ggagaagagggtcagagtgagaaagagagagagagagagagaaactgagagaaattcgcaaaccctaatttcggaaagatcggcgatggctgcctccaaggatcgcgagaacttcgtctacatcgccaagctcgccgaacaggccgagcgatacgaagagatggtggaatcaatgaagaacgttgcgaatctcgacgttgaactgactgtggaggagcggaatttactttctgttgggtacaagaatgtgattggtgctcggagagcatcgtggaggatcctgtcttcgattgagcaagatgaaca

SEQ ID NO: 240510 - DNA, 386 bp, Glycine max
ggatcaaacacagagagcgcagtccaaccctcaaaatgcattcattcggctacagagccaacgcgttgctaacctttgccgtaaccattctggcgcttatgtgcgctatggcttctgtatccgacaacttcaacacccccactccctctgcacaagtccaggttctgaacatcaactggtttcagaaacaacccaatggcaacgacgaggtcagcatgacgatgaatatttccgcagacttgcagtcccttttcacatggaacacaaaacaggttttcgtttttctagccgctgagtatgaaactcctaagaattccttgaatcagatatccctatgggatggtatcattccctctaaagagcatgcaaagttttggattccatac

SEQ ID NO: 240511 - DNA, 382 bp, Glycine max
  unsure (1)..(382): unsure at all n locations
gattgtgtgagtgaagaagcagagggagtagcggcattaaaaatgcagatcttcgtgaaaactctgacagggaagactataaccctcgaggtcgagagcagcgacaccatcgacaatgtcaaggccaagattcaagacaaggaaggcattcctccggatcagcagcgtttgattttcgccggaaagcagcttgaagatggaaggaccctggccgattacaacatccagaaggaatcaacccttcatctcgtcctcaggcttcgtggtggcatcattgagccttccctcatggctttggctcgcaaatacaaccaggacaagatgatttgccgcaagtgctatgcccgtctgcatcctanggctgtgaactgccgcaagaaaa

SEQ ID NO: 240512 - DNA, 103 bp, Glycine max
gtgttcggattgcggcgacgtgagcggttcgctgcccgcgacgttgtgagaagtccactgaaccttatcatttagaagaagaaagaagaagcagcagcagcgg

SEQ ID NO: 240513 - DNA, 376 bp, Glycine max
ctatattactttaaaaatacagaacaaaatagtgttttgggtgactgcacctttatggttaaaaataagattaaaatatgtttttaatttttatggatataaataaattttatttcagtttttttaaaaaaaaaaaaaaaaaaaaaaaaaaaaaaaaaaaaaaaaaaaaaaaaaaaaaaaaaaaaaaaaaaaaaaaaaaaaaaaaaaaacaaaaaaaaaaaaaaaaaaaaaaaaaaaaaaaaagggcccccccaaagatttaaatttaaatttccgtttcagggaaattcaaaccctttcaaattggtccccaaaatcaaattaaagggcccgcgttttaaaattttcgcccgggaaaaaccagggcttttccaaa

SEQ ID NO: 240514 - DNA, 349 bp, Glycine max
ggttgtttgttgttgcattttgcacttgcaaaattttggttgcagaggcagagagaggaggcaacgccacaccgcaccactctcactctgcaacacccgaatctcgtttcacctaaacgacctcgtttttgcgttcttttcccttttcttcttctgatttaggtttcagagagaagaagaaggagcagcaatggactctcgcacgtataatcctcgcaccgtcgaagaggtttttaaggatttcaagggccgaagagctggtctcatcaaagccctaaccaccgatgttgaagatttctacaaccaatgtgatcctgagaaggagaatttgtgcttgtatggctttccc

SEQ ID NO: 240515 - DNA, 357 bp, Glycine max
  unsure (1)..(357): unsure at all n locations
ggaacttctcacgttcatttctacacatccctagctctgtcgttccgtcgttgacgatggcgtttcgggtgcgaagccctgacctccgctctctctttcttctctctctcttgtccatcgcttccgccaatgtcttcttcgaagagcgtttcgatgacgggtgggaaaatcgatgggttaaatcagattggaaaaaagatgagaacgtggctggggagtgngaacacacctctggtcaatggaatggagacgctaatgacaaaggtattcanaccagtgaggattacagattctatgctatttcagctgagtaccctgaattcagcaacaagggtaagacactagtccttcaatttt

SEQ ID NO: 240516 - DNA, 339 bp, Glycine max
ggcgagagaagttattagggtttttgagtgcggcggtccaaacactcttctctgcagcttttgcctacaactcccttcaccatggctgaacaaaccgagaaagcttttctgaagcaaccaaaagtgtttctcagcacaaagaagactgggaagggaaagagacctggaaaaggtgggaaccgcttttggaagtccattgggcttggatttaagactcccagggaagccatcgaaggaacctatattgacaagaagtgccccttcactggcaatgtttccatccgtggccgtatcttggctggaacatgtcacagtgctaagatgaacaggactattatt

SEQ ID NO: 240517 - DNA, 370 bp, Glycine max
ggtgctctgctcgtgcctctagggttatcatttctccatttccattttctctctcacttttcaagaatcgtaagctataggaaagtcttacccaactgtgagtgctgattaccagaaggccgttgagaaggcgaagaagaagctcagaggcttcatcgctgagaagagatgcgctcctctaatgctccgtttggcatggcactctgctggaacctttgacaagggcacgaagaccggtggacccttcggaaccatcaagcaccctgccgaactggctcacagcgctaacaacggtcttgacatcgctgttacgcttttggagccactcaaggcggagttccctattttgagctacgccgatttctaccag

SEQ ID NO: 240518 - DNA, 393 bp, Glycine max
ggcagtcacctcagagacatcatttctctctctaactttctctctcctctccgctccggcgagtaagaaaaatgcagcatttcgtggatttgcaagagaattcggagttgggtgagtcgaattcatggctttcagcgaaagagcagtccggtgcggcacccaacaccaatttggatcgcgtcctcttcaacgacctcgtcgagattgtccctctcgttcagtcactcatcgatcgtaaagcaagccgttcattcacgcggcgtggttccatgatctacaccaagacacccacaagagaatcattgtccaaaagaacaacagattcaaaaagtaggaatgttgcccaatctattcttgccaaaaagaaaagggaacatggagaaaaagaacaag

SEQ ID NO: 240519 - DNA, 286 bp, Glycine max
ggcagtccatacctcacaccacatctatccaaacaatcaataacaatggcttatgcaaggcatgctcctacggatgtcttcctgcttgccacttccatcaaactgttcccaacgaacatagatacagcagattgtattggttcatgtacatctttctatataccaccgtgcctctcacgtgattgtcgttctgtctctatatgactaattactggtttctgcatacatccatctggacttacatccgtcgctaacatcatcgattaacatccctccttatgtcaat

SEQ ID NO: 240520 - DNA, 382 bp, Glycine max
ggcccaaattttttcatagcattttcagaggaacaatggcgggtagggtttcgacgtgcttcttcttcgtgtttgctctttctctccttcttccttttcagatctccgctgaggaatcatcggagaaagagttcgtactcacattggatcactctaactttcacgacactgtcagcaagcacgatttcatcgtcgtcgagttctacgctccatggtgtggccactgtaagaagcttgctcccgagtatgagaaagctgcttctatcttgagtagtcatgatcctccggttgttttggctaaaattgatgccaatgaggagaagaacaaagaccttgcatctcaatatgatgttaggggatacccaacaattaagattctgag

SEQ ID NO: 240521 - DNA, 390 bp, Glycine max
  unsure (1)..(390): unsure at all n locations
gacatttctgcgtggcgtctccggtgagggaaaagtagtagaagagaagatgtcgaccgtaccaggacagctcatctgggagatcgtgaagaagaacaactcctttttggtgaaagagttcggaaggggcactcagagcgtgcagttcagcagagagcccaacaatctctacaacctcaacactttcaagtactccggtttggcgaaccagaaaactgtcactgttcaacctgctggtaaagaccagtccgtgttgctcgcaacaaccaagacaaagaagcaaaacaagcctgctgctttgcttcacaaatctgtcatgaaaaaggagttccgtaggatggcaaaggctgtgcaaaatcaggtancagataactactacaggcctgatct

SEQ ID NO: 240522 - DNA, 405 bp, Glycine max
ggcagcagcaactttaaacgccgaagaaagttcatccaatctccgaagcccttcaccgcattgcaaccatgtcgagaagaaaggttagagagccaaaggaagaaaacgtgactctgggcccagctgttagagatggcgaacatgtctttggcgtcgctcgcatctttgcctccttcaatgataccttcattcatgtcactgatctgtccgggagggaaacacttgtccgcatcacaggtggaatgaaggttaaggctgacagagatgaatcgtctccctatgctgctatgcttgctgcacaggacgttgctgccagatgcaaggaactgggcataactgctcttcacatcaagctccgtgcgacgggtggaaacaagacaaaaacacctggtcctggtgctcaat

SEQ ID NO: 240523 - DNA, 401 bp, Glycine max
  unsure (1)..(401): unsure at all n locations
ggttctttcgccgccgtcgctcacaactcgcaaaccacaatgcctaagcagatccacgagattaaggatttccttctgacggcacggaggaaggatgcgaggtcggtgaaaatcaagaggagcagggatgtcgttaagtttaaggttcgatgctccaagtatttgtacacgctttgtgtctttgatcctgagaaagccgataaattgaagcaatctcttccccccggtttgagtgttcaagacctgtagaggtgctgagtgcggcagcgtgcgtttgtttatctttttgttgcctcatgctctagattttgtggcttgcttttatattttggtaattgttatgaggatatgcttgttttttatttgctatganaatgcganagttttattttgagcacaat

SEQ ID NO: 240524 - DNA, 354 bp, Glycine max
gggaagaagaaaaagaggaacaagaagagcgtggagacgtacaagatatacatattcaaggtactgaagcaggtccaccctgacattggtatctcaagcaaggccgtgggaatcatgaacagcttcatcaacgacatcttcgagaagcttgctcaggaatcttccagacttgcccgctacaacaagaagcccaccatcacttcaagggaaatccagaccgcggtcaggcttgtgcttcccggtgaattggccaagcacgccgtttctgaaggtaccaaggccgtcaccaagttcaccagctcatgaaccgactattaattggattttgtttctggttgcacacacaaatctgtt

SEQ ID NO: 240525 - DNA, 333 bp, Glycine max
gaccacgcgtcagacgacagatgggggataaacaaatcgttacggttttttggttgtgcgagtgagagtgagagagagcaatggaagacatagcagagggagtgaataacatcatcatctctgattcgtatcagagtaatcgcattcatgtctctaacaccaagaagcccctcctcttctatgttaatctggccaagagatatatgcaacatcatcatgaggtctagctctcaactctaagaatggctattgccacagtagtaactgttgctgaaattttgaaaaacaacagacttgccgttcaaaagaatatcaggacatctactgttcaca

SEQ ID NO: 240526 - DNA, 363 bp, Glycine max
ggaacctttgcattctattcattcaagattcagcaagtgcgttttggaagcagagaccgaaatacttcgagatggcccgtacaaagcaaactgcccgtaagtcaactggaggaaaagctcccaggaagcagcttgcaaccaaggctgcacgtaagtctgcaccaacaactggtggtgtgaagaagcctcatcgttatcgccctggaactgttgctcttcgtgagattaggaaataccagaagagcactgagctcctaatcaggaagcttcctttccagaggttggttcgtgaaattgcccaggatttcaagactgatctgcgtttccagagccatgctgtgcttgcattgcaagaggctgctg

SEQ ID NO: 240527 - DNA, 376 bp, Glycine max
gattatttgacgagttatccctaaacaaatgctctgcaattgcaaattcagaggatgtcgatcttcgagtacaacggaagcgccgtggtggctagggtcggcaagaactgcttcgccattgccagcgaccgaaggctcggcgttcagctccaaactatagccacagattttcaacgcatttccaagattcacgacaagctcttcatcgctctctcgggcctcgccaccgatgctcaaacattgtatcagcgtcgtgttttccggcacaaactgtagcaactgcatgcacagagggatatgatgccagagagctttgccaatttagtcgctgctctgctctatgagaaaaagtttgatccatatttttgccaacctg

SEQ ID NO: 240528 - DNA, 355 bp, Glycine max
gacaccactaaaatatctctctattattctcgttttcaatatgcagatcttcgtcaaaaccctaaccggtaaaacgattacgctagaggtcgagtcctccgacacaatcgataacgtgaaagctaaaatccaagacaaggaaggcattccaccggatcagcagcgtttgatcttcgccggtaaacaactcgaagacggcagaactctcgccgattacaatatccagaaagaatcgacgctccacctcgtcctccgccttcgcggtggcatgcaaatcttcgtcaaaaccctaaccggtaaaacgattacgctagaggtcgagtcctctgacaccatcgataacgtgaaagctaag

SEQ ID NO: 240529 - DNA, 369 bp, Glycine max
gacacaaactttattacagttgttgtattgtaattaagcaagaatattaggcaatggagtcttctagaacttcaactactcttgctctttttttaaccatcaatttgcttttctttgtcatggcaagtggccgctacacttgcacacagcctaagccaaaccctatcccattcccttaccctaaccctagtcctgccgcgaagagctgccccagggacgcacttaagctcggagtgtgcgcaaacgtgcttaatggaccaattggtgctattgtagggtcaccaccggaccacccatgttgctcagtgctagaagggcttcttgatcttgaagttgcggtttgcctctgcactgccatcaaaggcaaca

SEQ ID NO: 240530 - DNA, 347 bp, Glycine max
gatcgcatttcatagcactcaccctcattaccaacacgaaagcatagccaaaaccttttttcgaagtctctgattttcctaatggctccggcaaaggcagagaagaagccggcggagaagaagccagcggcggagaaggcaccggcggagaagaagccgaaggcggagaagaagatctcgaaggaaggagggagcgagaagaagaagaagcgcacgaagaagagcgtggagacctacaagatctacatcttcaaggtcctcaagcaggttcaccccgacattggtatttccagcaaggccatgggcatcatgaacagcttcatcaacgacatcttcgagaagctcgc

SEQ ID NO: 240531 - DNA, 404 bp, Glycine max
gacaacacaacacaaacacacagagttagaggagaaatcatcatggcatcagcagcatctgggtttgtgttgtcacttaatgttgcagctgccaccacaaactcaagggtggtcatgttcaacacaaagaacaacgcttctaggcttgttgtaagggcttcagatgagcctgcagcggcggcacccgccaccgccacacccccagctgaagctgaagctaaaccaaagccaccacctattggccccaagagaggtgctaaggtgaagattcttaggaaggaatcttactggtacaaaggcactggttcagtggttgctgttgatcaggaccccaacactcgctaccctgttgtggttcgattcaacaaagtcaactatgccaatgtatcaacaaacaactatgc

SEQ ID NO: 240532 - DNA, 401 bp, Glycine max
ggcagcgcttgatttgaggccaggcaagccccactcaaccaccacacctctcctcgttcacgctacccctttctgctcttcttctacctttcaagttttaaaagtataaagatggcagagacattcctatttacctcagagtcggtgaacgagggacaccctgacaagctctgcgaccaaatctccgatgctgtcctcgacgcttgcctcgagcaggacccagacagcaaagttgcctgcgaaacatgcaccaaaaccaacttggtcatggtcttcggagaaatcacgaccaaggccaacgttgactacgagaagatagtgcgtgacacctgcaggaacatcggcttcgtctcaaatgatgtgggactggatgccgacaactgcaaggtcctcgtcaacat

SEQ ID NO: 240533 - DNA, 363 bp, Glycine max
gatttttgagttgcggcacaaagcattcactgtgtcggaaaaagaagaagagaaaaaagatgagcgacggaggaaaacgacaaggtggaagagcgttgccgccgccgccaagaggccctccgcctcctcccccctctcgccctcgcctcgaacccgtcgatcgcgaaaagacatgtccgttactgctgcgagtgttcactaagattgggagtcaccattccatggaagactttgccgtcagaggcaaagagcccaaagacgaggttcagatttacacctggaaggacgctactctccgagaactcaccgatcttgtcaaagaagttgctccggctgcaaggagaagaaacgccaaactctcct

SEQ ID NO: 240534 - DNA, 319 bp, Glycine max
gagggacccaaattttaagaacttggctttgcgtccttcaaagtgaggtctctaagtttcactttctttgcataaggcaacctcgtttctctgtgactctgagtatcgtatcgtgttattagtatttctaattctctcttatcacgtccattgaatatgtctccgtcgttggatcttcctcccaatggtggcttcagttttgatcgaagccgaagaaacgcaatgcttcataacaatggcctcaaagccccaacctttctcaaaaatggcatcactagtgtcggtttagttctccaagatggtgtcaatcctggtgctg

SEQ ID NO: 240535 - DNA, 373 bp, Glycine max
ggcttctatggacgaaagagaaaatagagttaaaaaggttactactcagattttgcagagcctggagctgagctgagaaaacccccaaccccaacctcaaccttaacctctcctcactttcttttcaaccagaactatgattaagctttttaaagtaaaggaaaaacagagagaactggcagaaaatgcgagtggcggaccacccgttaagaagcaaagtgccggcgagttgcgtcttcacaaagatataagcgagctgaatctaccaaaatcatgtaccatgcaattccccaatggcaaagatgacctgatgaactttgaagtttcaattcgacctgatgatggatattacttaggtggcacatttttgttt

SEQ ID NO: 240536 - DNA, 361 bp, Glycine max
ggaacttctcacgttcatttctacacatccctagctctgtcgttccgtcgttgacgatggcgtttcgggtgcgaagccctgacctccgctctctctttcttctctctctcttgtccatcgcttccgccaatgtcttcttcgaagagcgtttcgatgacgggtgggaaaatcgatgggttaaatcagattggaaaaaagatgagaacgtggctggggagtggaaccacacctctggtcaatggaatggagacgctaatgacaaaggtattcaaaccagtgaggattacagattctatgctatttcagctgagtaccctgaattcagcaacaagggtatgacactagtctttcaattttctgt

SEQ ID NO: 240537 - DNA, 340 bp, Glycine max
  unsure (1)..(340): unsure at all n locations
agaaggggaaagggtttttgttttgtttccttgggtgctgcatgcactttcactcgaagaaccttgaagcgagtctgggccacagcaaccagcgacaacaactcaatcagctagggttgctttgccttgcatcctgttggaggatttcctgttcangaaaagatggtactaaaaattgtggatctcgttcagacacagttacaaagccaactgaagcaatgagagctgctatggcaagtgctgaagttgatgacgatgttctaggctatgattcaactgcttttcgcttagaaacagagatggcaaagacaatgggcaaagaaactgctccttttggtcc

SEQ ID NO: 240538 - DNA, 400 bp, Glycine max
ggcagccaaagaaaagaaaatcctcaattttctgagcagccaaacactctctctctgtctctcgaaaattctcagtttgcagagaaaatctgaatcatgtcgtggcaagcgtatgtcgacgatcaccttctgtgtgacatcgaaggtaaccacctcactcacgctgctatcatcggccaagacggcagcgtttgggctcagagtaccgacttccctcagttcaaacctgaggagataactgccatcatgaatgactttaatgagcctggatcacttgctccaactggattgtatctcggtggcaccaaatatatggtcatccagggtgaacccggtgctgtcattcgagggaagaagggtcctggtggtgttactgtgaagaagaccggtgcggccttga

SEQ ID NO: 240539 - DNA, 394 bp, Glycine max
ggaaaccgcggagagtttgctgctacatcgatcatcatcacctcatggacggacacgatccacaagacccaaagcagagccctgctgacatgactgcctttgtgcaaaatcttcttcagcagatgcaaaataggttccagacaatgtccgactccattgttacaaagattgatgatatgggaagtcgcataaatgagttggaacaaagcatcaatgacctgagagcagagatgggagtggagtcctctccatcacctgcagcccctgctaagctaacggaggagataaccaaagaagaaggttcagcttaagtggcattctgatttcagttgctcattattcatgcattgtattgcacaaggattgatattctgcatctacttttgtctgctgt

SEQ ID NO: 240540 - DNA, 399 bp, Glycine max
gagggtttttgtcgtcgctactaagagttgctgcttcttcagccactccgcacctcgcagcctctgtgccctcaacaaccatggctgaaatcgaaactaccgttccagatcccacccaaatcgacgtcaaactcttcaatcgctggagcttcgaggatgttgaggttaatgatatgtctctggctgattacattggagtgtccccatcaaagcatgctacatatgttcctcacactgctggtaggtactcagtgaagaggttcaggaaagcgcagtgccccattgttgagaggctcaccaactctctgatgatgcacgggaggaacaatggaaagaagctcatggctgtcaggattatcaagcatgccatggagatcatccacttgctcactgacctga

SEQ ID NO: 240541 - DNA, 393 bp, Glycine max
ggaggttttagcctaggaaccgtgttcatctactctgagccgcatcacttcccggaatcgtgcatccctacgttcaatatgtcgctggtggcaaacgaggatttcaagcacatacttcgtgttttgaacacgaacgtagatgggaagcagaagataatgttcgctcttacctcaatcaaatgtattgggaggcgatttgctaacatttgctgcaagaaggctgatgttgacatgaacaaaagagctggtgaactgagtgctgctgagttggatagtgtgatgactgtggttgccaacccccggcaattcaagattccggactggtttttgaacagaaagaaggactataaggatggcaagtattctcacgtggtgtcaaatgcactggatatg

SEQ ID NO: 240542 - DNA, 350 bp, Glycine max
gacgttcacattcaggaatcgttttcttcagaaaatttgccatcgttgagggaagcgcgagagccttcgttgttcaagatgagagctaagtggaagaagaagcgcatgaggaggttgaagaggaagcgccgaaagatgagacaaagatctaagtaggtgcttgaacaacgagtggagatgatgtgcttttccatctgctaccagcttcatgacattttatgctgtcatggctcttatgatgatcttgaggtctagtggccaggggagcttccatcttgactttagtttagctttactggtctaaagattgctgttttagtgtgggttaagttatgatattgagagttttg

SEQ ID NO: 240543 - DNA, 317 bp, Glycine max
aggggcgtgttttcatcattgtcgttctgaacggaaaagcactggcgcagctaccctgaagcttctcttctcgtctcttctctgtcgtgagtcaccatggtgagggttagtgtgctgaacgatgctctgaagagcatgtacaatgctgagaatatgggaaagcgccaagtcatgattaagtcatcctccacagtcattatcaaattccttttggtgatgcaaaagcacggatacatccggagaatttgagtacgttgatgaccacagggctggtaaaatcctggttgaattgaacggttcactgaacaactgttggg

SEQ ID NO: 240544 - DNA, 304 bp, Glycine max
ggtgctctgctcgtgcctctagggttatcatttctccatttccattttctctctcacttttcaagaatcgtaagctatgggaaagtcttacccaactgtgagtgctgattaccagaatgccgttgagaaggcgaagaagaagctcacaggcttcatcgctgagaacagatgcgctcctctaatggctccgtttggcatggcactctgctggaacctttgacaagggcacgaagaccggtggacccttcggaaccatcaagcaccctgccgaactggctcacagcgctaacaacggtcttgacat

SEQ ID NO: 240545 - DNA, 393 bp, Glycine max
gatgtcatagtattatcattcattctcatctttctctcttctctctccacccaaaccctaactcccgaccctgttcccctctcggatccgtcatgaaaggaggaaagtccaggaccgaatctaagagagccgatcccaaacttgctgtgaataataagggagccgccaccagagctaggaaacccgccggcaaggggaaggcagcgaaagaccctaacaagccaaagaggcctccaagtgcgttcttcgttttcatggaggagttcaggaacgtattcaacaaagaacatcctgaaaacaaagcagtgtctgctgtgggcaaagctgctggagcaaaatggaagaccatgtctgaagctgaataagcaccttatgtggcaaagtctgagaaaa

SEQ ID NO: 240546 - DNA, 380 bp, Glycine max
gagggtttggttattagggttttcgctcaccggtgtgcagtcgagcccccgaagaaaaagcgaaaatgccgtcgcacaagacattcagaatcaagaagaagttggcgaagaagatgaggcagaacaggcctatcccctactggatccgcatgaggaccgacaacaccatcaggtacaacgcgaagcgccgtcactggcgtcgcaccaagcttggattctgaggtgcttgctttgcctcggttctgtttatccaattaattagtgttttattttcttgagccaaaaacaatgctttggagattttaatattttgcattttgttccaagactatattgtgtaaggaacttattgtacttcagactaatggtggtgttggtca

SEQ ID NO: 240547 - DNA, 392 bp, Glycine max
gacttgaatcacagtggtgccttatcgctgtggttatcatcttcttcttcctctttctcagatctcttctttctctacgccgcacgccgaaaccatggccggaaaaggagagggtcctgctatcggaatcgatctcggaaccacctactcttgcgtcggtgtgtggcaacatgaccgcgttgaaatcatcgccaacgaccaagggaacagaaccacgccgtcttacgtcggattcactgacaccgagcgtctcatcggtgatgcggccaagaatcaagtcgccatgaaccccatcaacaccgtcttcgatgccaagaggttgattggtcgtagattcagtgattcctctgttcagagtgatatcaaattgtggcctttcaaagtcattcctg

SEQ ID NO: 240548 - DNA, 378 bp, Glycine max
gactcgcagattcaaacgtttccgaggtgaggctgaggcatctctctctgctttctacaatgggagctgggcgtggagtctccatctcacttgatggggtgagggacaagaaccttatgcagctcaaaaagctcaatctcgctcttttccccgttcgttacaatgacaaatactatgtcgatgcactcgcttccggtgaatttaccacactagcttactatagtgatatttgtgttggagcaattgcatgccggctggataagaatgaacgtggggggcaagttcgggtttacatcatgacgttaggtgttttggcaccttaccctggacttggtaatggaacaaaattattgaattcatgttcttgatcctttctcc

SEQ ID NO: 240549 - DNA, 392 bp, Glycine max
gacacttactagtagtaagcatggagtcctcaaagatctatgcttacctcttcctctgcatgatctttctctcttccgccactcacattctcggttgtggctactgtggcaaactccccaagaagcacaagcctggtaaaacaccaaagacacccagaacacccgttgttaagccaccagtcaccatccctcccattaatgttcctcccgttgttcttccaccaatagtgaagcccccatgtattctccctccaattccaattattaacccaccaaccacaccagggaagggagggaacactccatgcccaccaccaaaatctcctgcgcaggctacgtgccccattgacacgctcaaacttggtgcctgtctggatcgtcttggaaggttg

SEQ ID NO: 240550 - DNA, 313 bp, Glycine max
tgggacacagaccaatattcagtcatttagattcatcagaagcttataacaacaattaaacatgagtgcagccagcacagcttggattgtggcatcaagcattggagcactggaggcattgaaggatcaattgggggtgtgcaggtggaaccatgcattgaggtcactgcagcagcatgccaagatcaacattagatcctacactcaggccaaaagcttgtcttctgctacttctgctgctgtccccaataacgtcaagaggaccaatgaggagtccatgagggaaagtcatggacttgagccgtcagggtcc

SEQ ID NO: 240551 - DNA, 394 bp, Glycine max
gacactgtttttttcagatttcagttttctataatagagagttctattatagaaatttcgattgtaaaatacaataaaattggattcgatactaaacataaaatagatatctatatagatagataatttgagacaaaatcaattaacatatggaaaaggtactctacgggggattttttgtcttttcctagagtccgattcctattccttcttgtttgtgtcgaaatacaaatattctaaaaatatcaataaaataatcttttttaaccccttcctgaaaaatcctacatcttagtttctattttttccaacttagaatatttctgccatataatattttattgcatataatacgtagtgaacaagttatacgagagggggttggggaatttga

SEQ ID NO: 240552 - DNA, 391 bp, Glycine max
ggttctagtgtgtgattgtttgttgttgtaactcgttcttcttcttttgttgttctgtgtttgtgtttgttttttctctcacctgaaaatgtcttgctgcggtggtaactgtggttgcggaagctcctgcaagtgcggcaacggctgcggaggctgcaagatgtacccagacttgagctacactgagtcaaccaccaccgagaccttggtcatgggagtggcacctgttaaggctcaatttgagggtgctgaaatgggtgtgcccgctgagaacgatggctgcaaatgtggaccaaactgctcctgcaacccctgcacttgcaagtgaggtgttgggagagcaagcttcaagcagagatagcccttaattaggaataatgataaactatta

SEQ ID NO: 240553 - DNA, 155 bp, Glycine max
ggatagcgaaacagagagtggtttcagtgagtgatcggtgttcacttgatccttcataagtcgtcatcatcatcatcatcatcaccgttgattgaagaagatgccgatcagaaacatcgccatcggaaggcctgaagaggctactcaccccgaca

SEQ ID NO: 240554 - DNA, 350 bp, Glycine max
gattatcatagtagatattcattccccttatctttctctcttctctctccccgcccaaaccctaactccctatcctattccgctttctctcatccatcatgaaacgaggaaagtccaagatctgaatctaacagagccgatgccaaacctgccgtgaataagaagggcgccgccatcacgactaggaaacccgccggaaaggggaatgcatcgaaagattctaacaagccaaagacgcctccaagtgctttcttcgttttcatggaggaaatcatgaacgtgttcaacaaggaacatcccgacagcaaaacagtgtctgctgttggcaaaactgctggagcaaaatggaa

SEQ ID NO: 240555 - DNA, 476 bp, Glycine max
gctagttgcagggcccggtccagaataccgggtcgacgcacgcgtccgacggctgcgagaagacgacagaagacgaatcgaaaatgccgtcgcacaagacattcagaatcaagaagaagttggcgaagaagatgaggcagaacaggcccattccctactggatccgcatgaggaccgataacaccatcaggtacaacgcgaagcgccgtcactggcgtcgcaccaagcttggattctgaggtgtatgctctgcctaggttcaatttatccaattaattagtgttttattttcttgaggcaaaaacaatgttttgagtttttaatattttccatttgttcgaagactatattgtgtaaggaacttattgtagttcatactaaaagaaaaaaaatgcgaaaaaaaaaaaaagcggccgctctacaggatccaagcttacgtacgcgttcatgcgacgtcatagctcttcaatagtgtc

SEQ ID NO: 240556 - DNA, 382 bp, Glycine max
gaactcaaactgcttcattgcataattgcagataagatcaacccttctaccttcagattcgcgggaagatggcatcacttcatgctaatgtgacatcagttgtttacaacagtggcaaccgtgtttctcaatcgaaatttgcaagctcttccttcttgtctgggttcgatgttgttggtcgtgcttcaagtgcttggaagaaggaacttgtcccatcttccatttccttggtgcctagagccaccctaacatttgatcccccaactaccaattcagacataaccaagcaaaagaagcacactcttgaccctgcttctccagattttcttcctcttccttcatttgaacagtgctttccaaagagcaccagagaacacaggga

SEQ ID NO: 240557 - DNA, 384 bp, Glycine max
gatctcaagccacttcagagaaaatggcggtacctctgctctcgaagaagatcgtgaagaagagggtgaagaagttcaagaggcctcagagtgacaggaaaatttccgtcaagacaaactggcgtagaccaaagggtatagattcccgtgttaggagaaagttcaagggatgcactttgatgccaaacatcggttatggttctgacaagaagacccgccactatctccctaatggttttaagaaatttgttgttcacaatgtgaaggacttggaactgctcatgatgcacaacaggacttactgtgctgagattgctcacaatatatccacaagaaagagaaaagatatagttgagaaagctgcgcaacttgatgttgttgtga

SEQ ID NO: 240558 - DNA, 378 bp, Glycine max
ggattcatctctctcattgcactgcattgcaccactcactcaccaatgggactcagacccatcgacaacgctcttccaacaaccccagagagacctaacttacaacccaaagtcgctcttgcaacccaaaagcaacaagaccgtgctggcgtcaatggcgaaaacatagttccattgccctcatctggggatgccactgttgactatgtctcctccgagaaccttaagcccttgtcggaccctgaagttaagattcagagcttggttgaagatttggattcgaaaaattggacgaaggtttgtgagtcgctgaatgatgttaggcgcgtcacgatgtgacactcgtctcatctgttccccagtttgggaaaaattgtg

SEQ ID NO: 240559 - DNA, 229 bp, Glycine max
gaacttttaagttattattattattatgaacactattgtgttaacaatgctgccattttttctcttcctgttagtttggcttcctagggttacctgtggctggacggctgcacatgccacattctatggtggtgcacatgcttcagggaccatggggggagcatgccgttacgggaacttgtatcagcaagggtatggaaccagtacagcaccattaaccgctgcactt

SEQ ID NO: 240560 - DNA, 317 bp, Glycine max
gaatcctctgttgtttctcagccgcctcggctagggttcggaaacgaagaagggttctgttttcttttcgcgatgagggccaagtggaagaagaagcgtatgaggaggctgaagaggaagcgccgaaagatgagacagagatccaagtagtgcgttaaacctagtttgtttccgttgcttttacaattgcttatgttgtcaaatacgacacccagttgttaatggcactggtctctcctttttgatgttttgatacattttgttggattttatttcgtcgtatgttcttagctgaaaacaatgctgttactgcgttt

SEQ ID NO: 240561 - DNA, 359 bp, Glycine max
ggtgcaaaggaggaagaggaaaaagaggattggagggtcgccacgtttagcaacaaccaaaccctctctactctttcttcttctcttcgctagggttttagcttcttcctcttcacttcgttcttctggcctctacaatgagcaacgacaaggacaccttcaacgtcgctgatctcacttccgctctcaacgaggacaatagagcagaccttgtcaatgctctcaagagcaagatacagagtttggctggacagcattctgatattctagagtctctgtcgcccaatgtcaggaagcgtgtggaggttcttagaaagatccacggtcaacattatgaattagaggcaaaattttttgag

SEQ ID NO: 240562 - DNA, 291 bp, Glycine max
ggttctagtgtgtgattgtttgttgttgtaactcgttcttcttcttttgttgttctgtgtttgtgtttgttttttctctcacctgaaaatgtcttgctgcggtggtaactgtggttgcggaagctcctgcaagtgcggcaacggctgctgaggctgcaagatgtacccagacttgagctacactgagtcaaccaccaccgagaccttggtcatgggagtggcacctgttaaggctcaatttgacggtgctgaaataggtgtgcccgctgagaacgattgctgcaaatgtgg

SEQ ID NO: 240563 - DNA, 350 bp, Glycine max
gatcattagcaaatagaagagcaaagagagtgagaaaagaaggaagaagaagaagaagagatggcaaatgaactacccgtcaaagcttttggttgggctgcttcagacacttctggcacccttgccccttttcatttctccagaagggaaaatggcgtcgatgacgtcactctcaagattctcttctgcggggtttgccactctgatctccacactctcaaaaacgactggggtttcaccacctaccctgtcgttcctgggcatgaaattgttggtgttgtgacagaagttggaaacaatgtgaaaaacttcagagttgggtgataaagttggagttggtgtgatagtgg

SEQ ID NO: 240564 - DNA, 281 bp, Glycine max
gagatttctgagagaaaggaaagggtgtgagaagagaatggagagtaaagaggaagatgttaacgttggagcaaacaagttctcagaaaggcaaccaattggtacagcagctcagggtggtggtgacaaggactacaaggaggcacccccagctcctttgtttgaacctgcttagctcagatcatggtccttctacacagctggaattgctcagtttgtggcaactttcttgtacctctacattaccatctaaactgccatgggtgtcaacaggtcaccct

SEQ ID NO: 240565 - DNA, 399 bp, Glycine max
gacacttactagtagtaagcatggagtcctcaaagatctatgcttacctcttcctctgcatgatctttctctcttccgccactcccattctcggttgtggctactgtggcaaaccccccaaaaagcacaagcctggtaaaacaccaaagacacccaaaacacccgttgttaagccaccagtcaccatccctcccattaatgttcctcccgttgttcttccaccaatagtgaagcccccaggtattctccctccaattccaattattaacccaccaaccacaccagggaagggagggaacactccatgcccaccaccaaagtctcctgcgcaggctacgtgccccattgacacgctcaaacttggtgcctgtgtggatcctcttggagggttggttcaca

SEQ ID NO: 240566 - DNA, 478 bp, Glycine max
tagcgttgccctgcaggtactagtctagaatgcccgggccgacccacgcgtccgaggacgacagaagggtacggctgcgaaaagacgacagaagggtacggctgctagaagaccatagaagggtacggctgcgacaagacgacagaagggttcatggacgttgataagatccttccatctagcagcaccttaggatggcatagccttaaagttaagggcgaggttcaaacgaagaaaggcttatggtggatacctaggcacccagagacgaggaagggcgtactaagcgacgaaatgcttcggggagttgaaaataagcgtagatccggggattcccgatataggtcaacctttcgaactgctgctgaatccacgggcaggcaagagacaacctggtgaactgaaacatcttagtagccagaggaaaagaaccaaaagcgattcccgtagtaactgggaccgacatgggagcagcctg

SEQ ID NO: 240567 - DNA, 484 bp, Glycine max
ttgacgttgcccaggcaggtactagtccagaattcccgggtcgacccacgcatccgcggctgcgagaagactacagaagggtacggctgcgagaagactacagaagggcgtgagcgttatggtattagcctgcctgactgtgaaaccgactggtcaaagacagacgaaagtccgccatagtgatccgggagtcccgtgtggaagggctctcgctcaacggatcagatgtacgccggggataacaggctgatgactcccaagagctcttatcgacagagtcgtttggcacctcgatgtcgactcatcacatcctgcggttcaataatgtcgcaatggttcagttgttccccgattcaagtggtccgtgaattgggtttacaacctcgtgagacacttcggttcctatctagcgtatgtgtcacagggagaactgccatgaaccaatccctagtacgaccacgactggcttgggccaacccaatct

SEQ ID NO: 240568 - DNA, 358 bp, Glycine max
ggcagcgcttgatttgaggccaggcaagccccactcaaccaccacacctctcctcgttcacgctacccctttctgctcttcttctacctttcaagttttaaaagtataaagatggcagagacattcctatttacctcagagtcggtgaacgagggacaccctgacaagctctgcgaccaaatctccgatgctgtcctcgacgcttgcctcgagcaggacccagacagcaaagttgcctgcgaaacatgcaccaaaaccaacttggtcatggtcttcggaaaaatcaggaccaacgccaacgttgactacgagaagatagtgcgttacacctggaggaacatccggctcgtctcaaatg

SEQ ID NO: 240569 - DNA, 328 bp, Glycine max
gactcatacaatagagaccagcttttgcttctttgtgaacatggagatgaggaaatcatgtggcttcttcttcttgctcctcctccttgtctttgcttcccaggtggtggtgcagacggagggaagagtgtgtgagtcacaaagccacgggttccatggtttgtgtaatatagaccacaactgtgctttggtctgcaggaacgatggtttctccggtggcaggtgcagaggcttccgccgccgcttttgcaccaggatttgttgagatctcatcagttagttattcttgccatgcaaattaataaatcatagctaggccaaatcaatt

SEQ ID NO: 240570 - DNA, 362 bp, Glycine max
attgattttctaattctccttattttcttgtatataatgattttgtatactcattttagtttcataatctacatgtattataatttttcattttcttatgatatcgataaaaaaaatgtaataaaaaaactcataatgaggacatagaaattatatttcaataaccaaaataatagcatatagttcaaagatttataatttaaatttctattgtaaatcaaagtatgacataaaatccataacaaagtaatattagtattgtactaaacttttaatttaaatccaaaatacattataagcaaactaagggttgctagcaccagaagatcctcttgcatccaaacgtgtattacgaacacttg

SEQ ID NO: 240571 - DNA, 393 bp, Glycine max
gactcaccacttcaaaacactcataacacaaagcacaaagcaaagctcatccttgagttaaaaaatggcagcagcttcttccatggctctctcatccccatccttggctggcaaggccgtgaagctgggcccatcagccccagaagtgggaagggtgagcatgaggaagaccgtcaccaagcaggtctcctcaggaagcccatggtacggcccagaccgagtcaagtacttgggcccattctctggcgagcccccgtcctacctaaccggtgagttcccaggcgactacggctgggacactgctgggctttccgcagacccagaaaccttcgccaagaaccgtgaactcgaagtgatccactccacgtggggcatgctcggagccttgggctg

SEQ ID NO: 240572 - DNA, 374 bp, Glycine max
gggtgaaactaacaacaacacaaggccatcatcatggcagctgcttccccaatggcaagccaactcaagtccaccttcactaggactcttgtagctcccaagggcctctctgcctcttcaccacttcacctcgtgcctcctagaaggcaatttagcttcactgttaaggccatccaatcagagaagccaacctatcaagtgattcagccaatcaacggtgacccattcattggaagcctggaaaccccagttacatccagccctttgatcgcatggtacttgtccaacctgcccgcatacagaaccgcagtgagcccactactaagagggatccacgtgggcctggcccacggataccttctggtgggcccata

SEQ ID NO: 240573 - DNA, 396 bp, Glycine max
ggcgtacgcagcttcatccctaacgcgtgcatagcagagtcagagacagagacgcagccatggggcggagacctgcgacgtgttataggcaaattaagaacaagccataccccaagtcacgtttctgccgtggtgttcctgatcccaagatcacgatttatgatgttggtatgaagaacaagggtgttgatgagtttcctttctgtgtccatccggttagttgggagaaggaaaatgtttcaagttaggccctggaagctgctcgcattgcttgcaacaagtacatggccaaatttgctggaaacgatgctttccacttgagagtcagggtgcacccatttcatgttcttaggatcaacaagatgccttcgtgtgctggtgctgatacgctccaaa

SEQ ID NO: 240574 - DNA, 385 bp, Glycine max
ggtttgattagggtttgtcattagcacttcttcttttcacactgccgctgcaacaatggcttcagagaagaaactttcgaacccaatgagggagataaaagtgcagaagctcgttctcaatatctctgttggcgagagtggagatcgtctcaccagagccgccaaggtgttggaacaacttagtggccaaaccccagtgttttccaaagcaaggtacactgttcgttcctttgggattagaagaaatgagaagattgcatgctatgtcactgtcagaggtgacaaggcaatgcaacttttggagagtggtttgaaggttaaggaatatgaacttctcagaaggaatttcagtgatactggttgcttcggctttggtattcacgag

SEQ ID NO: 240575 - DNA, 255 bp, Glycine max
accgacgttctgccatttgacaagaacagggttgttctcaaatctagtactgattatagacctgaagcacaggggtatatcaatgcaagccttgtctcgacctcctcagctggaaacgtgtcccagtttatagccacgcaaggtccacttcaacatacttacgaggatttctgggaaatgatcatccaatatcactgccctgcaattatcatgcttactaggttggtggataattacaagatgacaaaatgtgga

SEQ ID NO: 240576 - DNA, 362 bp, Glycine max
gactcctttccgtcagttttggggaaaaggtcgagtttcacagcagcaatggtgtacgtcaaggctcagaaatcaaaagcctacttcaagagatagcaagtcaagttcaagagaagaagagagggaaaaaccgattaccgtgccaggattcggttgattaatcaggacaagaacaaatataacactccgaaataccgagttgttgttcgctttagcaacaacgacattgttgcacaaataagatctgctagcaatgctggcgatattgttcttgcctcagcatatgcacatgatctgccacaatatggtcctgaagtacggcttacaaattatgctgcagcttagtgcactggtctcctgtt

SEQ ID NO: 240577 - DNA, 368 bp, Glycine max
gacagcagcttccctcgcacccatgcccaatcacatcgacgagactcacgatttccttctcactgctatccagaaggacgcagagtccgttcacatcacgaggagcgagagatgtggtgacgttcaaggtcagatgcgcgaaatatctcgacacacttctgtgtctttgacccaaagaaagctgatacattgagtcagtctcatccaccaagtttcaatgttcaagacctgtcacggtacacggctatagatcaacaagaaccaattcagtgattcgtcagaacatcgtatcacagtagtcgatacttcatattcatttcagtttcctgtagttttaaatcaatactctgacaaggttcttttcatct

SEQ ID NO: 240578 - DNA, 374 bp, Glycine max
gaccgcacagaattagggttttccaattcacagagcaacacaacgaaccaacaatggcgcagcctcagccgcagtcgcagccgcagcacgggcaagcagcgctggagcaggtgcagtgcttcggtcgcaagaagaccgccgtggccgtgacctactgcaagcgcgggcgcggtctcatcaagatcaacggctgccccattgagctcgtggagccggagatcctccgcttcaaggccttcgagcctatcctcctgttgggtaagagccgcttcgccggcgtcgacatgcgcatccgcgtcaagggtggcggccacacctcccagatctacgccatccgccagagcatcgccaaagcgctcgtcgcgttctaccag

SEQ ID NO: 240579 - DNA, 269 bp, Glycine max
gatcacaacactaacacagattttgattcgattcgattcgattcagtcgaggttttaagcagcagcaagatgtctgggcgtggaaagggaggaaagggattgggaaaaggaggagcaaaacgacatcgtaaggtgctccgcgacaacattcagggaattacgaagccagcgattcgtcgtttggctcgcaggggtggcgtgaagcgtatcagcggtttgatctacgaggagactcgcggtgttctcaagatcttcctggagaatgtcat

SEQ ID NO: 240580 - DNA, 377 bp, Glycine max
gagttcaattccaatatattccattctctctgtgtatttccctacctctcccttcaagatgcagatcttcgtcaagaccctcaccggcaagaccatcacccttgaggtggaaagctctgacaccatcgacaacgtcaaggccaagatccaggacaaggaaggaatccccccggaccagcaacgtctcattttcgccggaaagcaacttgaggacggccgtacccttgctgactacaacattcagaaggagagtactcttcacctcgtcctccgtctccgtggtggcatgcagatcttcgttaagacactcaccggcaagaccataaccctagaggttgaaagctccgacaccatcgataacgtcaaggcaaagatcc

SEQ ID NO: 240581 - DNA, 396 bp, Glycine max
ggttttaggttttcttagatagagttgttaccatttgctcccagtacagagcttaaccgagcttcacaaagatgaatcgggaaaagttgatgaagatggccggttcggttagaactgggggaaagggtaccatgagaagaaagaagaaggctgtccacaagacaacaaccacagatgacaaaaggcttcagagcaccctgaagagaataggggtgaatgccatcccggctattgaggaggtcaatatctttaaggatgacgtagttatccagtttctaaatcccaaagttcaagcatccattgctgctaatacttgggttgtcagtggttctccacaaacaaagaagttgcaagatatactccctagcattatccaccaattaggaccagataact

SEQ ID NO: 240582 - DNA, 480 bp, Glycine max
  unsure (1)..(480): unsure at all n locations
ttaacgtgacgcggccagtacaggtctagaattcccgggtcgacccacgcgtccgcccacgcgtccgtacggctgcgagacgacagaaggggaagaaagctgctagcagagggaagttctacacttttttgtttggattgatcgagtgtactttttcttttcgagattggcttggtgtgcagtggaaagagggtggaaaagagtggtaagggggatggcggcgccccttacaaccacntcatctgcctccatctgacacaaaaagcggccgctctaaaagatccaagcctacgttcccctgcatgcgacgtcatagctcttctaaagtgtcacctaaattcaattcactggccgtcgttttacaacgtcgtgactgggaaaaccctggcgttacccaacttaatcgccttgcagcacatccccctttcgccagctggcgtaatagcgaagaggcccgcaccgatcgcccttcccaacatn

SEQ ID NO: 240583 - DNA, 381 bp, Glycine max
gactgcaactttgctctctgtgaggcttcaatttctaattagggtttcgcttagagtaaccaataaccatgggagtcttcacctttgtcgtccgcaaatccggcagcgaatggagcgccaagcaacattccggcgacatcgaggcctccgccgattccaccttcgatctccaacggaagctcgtgcaagccgctctcgccgttgattcctccggtggagttcagtcctctttctctcccgtgtctcctacctccgctgtgttccaggtgatagtgggtggtgcagtattcgttggaggtggtggtggtgctgttgcagctgcacctgcaggtggtgctgccgcagctgatgctgccccagctgctgagaaaaaggaagaaa

SEQ ID NO: 240584 - DNA, 309 bp, Glycine max
ggaattgattgttgtaagactttgtaattgaggtgctgcaatggcttcaagtcaggaagaggtgactcttttgggagtaattggaagcccatttgcttgcagggtgaagattgcccttaagttgaagggagttgaatacaaatatgcggaagaaaatttggccaacaagagtgatttgcttctcaaatccaacccagttcacaagaaagttccagtttttattcacaatgagaagcccatagcagagtctcttgtgattgttgagtacattgatgagacatggaagaacaaccccatcttgccttctga

SEQ ID NO: 240585 - DNA, 272 bp, Glycine max
cggggaattgattgttgtcagactttgtaactgacgtgctgcaatggcttcaagtcaggaagacgtgactcttttgggagtaattggaaacccatttgcttgcagggtgaagattgcccttaagttgaacggagttgactacaaatatgccgaataaaatttggccaacaagagtgatttgcttctcaaatccaacccagttcacaagaaagttccagtttttattcacaatgagaatcccataccagagtctcttgtgaccgttgactaca

SEQ ID NO: 240586 - DNA, 239 bp, Glycine max
gggaaattcgcaagacctttaacattaagaatgacttcacccctgaggaggaagaggaagttcgtcgggaaaaccaatgggcatttgaatggttttgttaatctcaaaaaatctgaatcaaagatctgccatgtggatttatgctatgcttgtttgtttatcaaagatctctcttgtagatttgcctatgctatatacttgtttgttttatattcaagactatttccgttgactgtgtg

SEQ ID NO: 240587 - DNA, 380 bp, Glycine max
gaagatggccggttcggttagaactggaggaaagggtactgtgagaagaaagaagaaggctgtccacaagacaacaaccacagatgacaaaaggcttcagagcaccctgaagagaataggggtgaatgccatccctgctattgaagaggtcaatatctttaaggatgacgtagttatccagtttctaaatcccaaagttcaagcatccattgctgctaatacttgggttgtcagtggttcaccgcaaacaaagaagttgcaggatatactccctagcattatccaccaattaggaccagataacttggaaaacctgaagaagctagccgagcaattccagaagcaggctcctgaaagggccgctggttcaaccacagctc

SEQ ID NO: 240588 - DNA, 417 bp, Glycine max
cagaaggggaaccacttttaaatttgagggatcaaagggtaagttgtttcagcgaaccagaagaaggggctcctcaactttaaaaagtgaagttagaattgaatgaatgaaaaagggtccgtggcaatggagacagagccaaaagggctagaagcttccctagaacatttgattgaccttcaccaccacaaatctcttgtccttgcccaccacacagacaaagccaagaaggacgcaataaggaaagccgagcacgtttctgatttgttggttgaagcggtgaatggtggggtccaagattccttcatcaaccagaagcgaattgagctcgaaattcgaactctggctaccaccatcacgaggttcatgaagcagactgatcaatggctcgctgccactcatgccctcaacactgct

SEQ ID NO: 240589 - DNA, 259 bp, Glycine max
gaatcacgcactatcagtacaacaactcactcactaagctaaacaatttcatcaagcctgccatggcttcctcgcgtgcttcctctgccattgcagctgttgccatctccacaacaggttcccagaagaatggatcactcttgggaagcacaaaagcttcttttcttaatgggaggaaactgaaggtgaacagttttacagcaccagttggaccacgatgcaggaatagattgcgcttcccaacagttcctcaacctga

SEQ ID NO: 240590 - DNA, 340 bp, Glycine max
ggactaaccctagttcattgcactgcaacttagccacttgaacgcccgtcactacgaaaccacagggaattcagagaagaggttacgatgtcggcccatgacagagaggacaaggagttggatctcacttctccggaagttgtcaccaagtacaagagcgccgcggagattgttaacagggctttgcagttagttatttcagaatgtggatcgaaggcagagattgttgacctttgccagaaaggggagtcctatattagtcagcaaactggtctcaggtacaagaacgtgacgaggacacatcgagagatgtgtttgccttcctacatgtgtgtctgtg

SEQ ID NO: 240591 - DNA, 282 bp, Glycine max
cgggccgacccacgcgtccaaccaatcgtccgacggctgcgaaagggcgaccgaacggggaacctgatcgatctcattaccagttgccacactacaccgagattccccctaaacccgtttgcgttgttgtctgcgaagacatggcgacaaccaggagcgtgggaacgttgaacgagggtgatttgaaagggaagatggtgtgcgtgagggtcgatgtgaacgtgcctttggataacaagcttaacatcaacgatgacactagagtccgtgctgatgttgcca

SEQ ID NO: 240592 - DNA, 321 bp, Glycine max
ggtgtagtggaagtactagcaagtacgtcgtatatgtggttgatcttttgctggttgtttgttttgttccttccaattgtcagatctgaatcaccggactcactcttcacactcactcacactgaatggcttctgaaggcgaccatcaccaccaccaccaccaccatcaagatcacgatcatcatcatcatgatcatgatcaccatcatcatcacgatggagagggagagaccaactcatgggtaagtaaagattggaaagtgtaccatagccacgatggtctggcgccgcattctcacgaacccatttactcccccggct

SEQ ID NO: 240593 - DNA, 387 bp, Glycine max
gactccactcacaactgaaaccaaaactgaagcggacgacctacaagatcataacatggcttcttctaccatcaactcctccttcctaacatcatgcccttcatctctcttcaacagatcatcatctccttccttccatgctaggcataatctccgcgttctcgcgccaagcccccctatgtcagcctcagctttcgcctacgagctcggatcgttccagttcgatccgattacagagtcgattgtgtcgcgcgagatgactcgcaggtacatgatcgacatggtcacccattccgacaccgacgtcgtcatcgttagcgcaggctccacgggtcactcgtgcgcctacgagctctcgaaaaacttctccatcaacatcgccattgt

SEQ ID NO: 240594 - DNA, 344 bp, Glycine max
ggagatacagaaaagaaaaaggaaaccctagctggataggtcaaacatcatcatgtcggacgaagggcaccatttcgagtccaaggcagacgccggtgcctccaaaacctaccctcagcaagccggtaccattcgcaagaacggctacatcgtcatcaaaggacgcccctgcaaggttgtggaagtttcgacttccaaaactggaaagcacggtcacgccaagtgccactttgttggaattgatattttcactgccaagaaacttgaggatattgtgccctcttctcacaactgtgatgttcctcatgtgaatcgtactgattaccagctcattgatattgctg

SEQ ID NO: 240595 - DNA, 341 bp, Glycine max
ggaaattctaagagcttgttccgtcgtcccccaagtgctgcagagccgcattttgcttgcaattcagaaactttgtgcgtataggggacgaaacaatacaatggcttacgctgcaatgaagcctactaaggccggcttggaggagcctcaggagcagatccataacattaggatcaccctttcctctaagaacgtcaagaatctcgagaaagtgttcgccgaccttgttcgtggtgccaaggacaagcgcctcacggtgaacggacctgttaggatgccaactaaagtacctaacatcaccaccaggaaatccccgttttgttaacgcaccaacacatggg

SEQ ID NO: 240596 - DNA, 257 bp, Glycine max
agaattcacatagatacatacataacacaacgtatgctgcataacaacaatatacatacaaatgagcatgttgattatatagaacgtagaaggcaacactcatttttgtttaccatgggtaacgacaccatctctcatataagagcctatataacacatgctgacatgtatgataaacgaatggttcaaacaccatttactaacctaacagactacattcgtacaaagacctttacgccatggttttgttgaacacg

SEQ ID NO: 240597 - DNA, 396 bp, Glycine max
gatttcgcttcttttcctaacctaaaccctactcattctccatacctcaacgaagaggttaaagagacggcaacactttgctgtccgccttgaccgagcagagcttcgtcttggccctcgattttgccctaaagtactctcagtcacaacagacaccgtcgtcgtcgtcgtcatcaatggcaccgaagcagaccaaggctgagaagaagatcgcttacgatgcgaagctgtgcgacctaatggaggagtacggccagatcctcgttgtgaactccgataacgtgcgatcgaaccagctccagaacattcgcaagggtctccgtggcgactccgtcgtcctcatggggaaaaacaccatgatgaagcgctcagtcaggaatccagcctgagaaaacg

SEQ ID NO: 240598 - DNA, 371 bp, Glycine max
gatatcagaagcgcagacctaggatttcggccgtttgctccccaaggaaagaagcagagtgtttcttttgaaatcagctagaaaagatgtcaggtgaagaggtagctgttgcagctgaggcacctgctgcttcaattccaggtgagccaatggacatcatgactgctctacagcttgtgctgagaaaatctctggcctatggtggtcttgcacgaggtcttcatgaaggtgctaaggtgatcgagaagcatgctgcacagctctgcgttctagcagaagattgtgaccaacctgattatgtgaaactggtgaaggctctttgtgcagagcacaatgttagccttttgacagttccaagtgcaaagaccctt

SEQ ID NO: 240599 - DNA, 387 bp, Glycine max
gacagacagacacacactcggttctgccttcacaaaaaaattatcgagatcccctttttctcctaagaaaagccatggctaagggtcccggtctctactctgacatcggcaagaaagccagggatctgctgttcaaggactaccacagtgaccagaagttcaccatcaccacctactcacccactggagttgctataacagcatcaggaaccaggaaaagtgaactgtttgtggctgatgtcaacacccagttgaagaacaaaaacatcactactgatatcaaagttgatacagattctaatctcttcacaactatcactgttaatgaatctgctcctggtctgaaagctatttttagcttcaaagttcctgaccaaaagtctggaa

SEQ ID NO: 240600 - DNA, 363 bp, Glycine max
ggtagttccaccgagtagcaacaatgtcgaagcgaggtcgcggaggatcggcgggaaacaagttccgcatgtcgctgggtctgccggtggcggcgacggtgaactgcgccgacaacaccggcgcgaagaacctctacatcatatcagtgaaggggatcaagggtaggctgaaccggttgccgtcagcttgcgtcggagacatggttatggccaccgtcaagaagggaaagcccgatctccgtaagaaggtgctgcccgccgtcatcgtccgccagcgcaagccttggcgccgaaaggacggtgtttacaagtacttccaagataatgctggtgttaccgtgaatcccaagggtgaaatgaaag

SEQ ID NO: 240601 - DNA, 393 bp, Glycine max
gatctcaatttcttttctctttgtcgcaaagagaagagatctgcctcctttttccttcccaaatcaaatctatctcttcttcaagttgaaaatggggctgtcgttcaccaagttgttcagccggctgtttgccaagaaagagatgcgtatactaatggtgggtctcgatgctgcgggtaagaccaccattctgtacaagctcaagcttggagagattgtcaccaccattcccaccattgggtttaatgtggaaactgtggaatacaagaacatcagcttcactgtctgggatgttggaggtcaggacaagatccgtcctttgtggagacattacttccaaaatacacaacgactcatttttgtggttgatagcaatgacagggaccgagttgt

SEQ ID NO: 240602 - DNA, 339 bp, Glycine max
gctagtggcagtgaccaaactccatttctcactcgccgtcgtctcttccgtctagggtttctcctcttcacaaaaatggttgccgcaaaaaaaactaagaagacccatgagagcatcaacaacaggctcgctctcgtcatgaagagtggcaaattcaccctcggttacaagaccgttctcaaatctcttaagagctccaaagggaaattgattatcattgctaacaattgcccccctttgaggaagtcagagattgaatactacgctatgttggcaaaggttggggttcatcattacaatgggaacaatgtggatttgggcaatgcatgttggaaatat

SEQ ID NO: 240603 - DNA, 339 bp, Glycine max
gatcgtaaatcaattcaaacaataggagaagaagggactagcggcgaactcaaacggcgtcgtatcgactcgttgttcatccatttgagaggcatctggtagcggaagatggataagggtaagatccaagaggtgatcgagaaccaagtcctgacggtggcgcaagccgtcgaggacaagatcgacgatgagatcgccgccctggaacgcctcgatgccgacgacatcgaagccctccgcgagcgccgcctccagcagatgaagaagatggcggagaagcgctcccgctggatctccctcggccactccgaatattccgagattccctccgagaaagac

SEQ ID NO: 240604 - DNA, 318 bp, Glycine max
gacattttcttcgttgagcagaaagctaaaggctaaagcctagaaccttcttcctttacacctcgctggaaccagcgatggatcctcagcctgagctagtcagctacatatgcggagattgtggaatggagaatacgctgaagcccggtgacgttatacagtgccgtgagtgcggttaccgtattctttacaagaagcgcactcgtcgcattgtccagtacgaggcacgctgaagaaaactgctataacgtttgcaagtaatttccatgaagaaattgttactacatctgtgttgtgtgatattgaagaactactttt

SEQ ID NO: 240605 - DNA, 325 bp, Glycine max
gactcaccacttcaaaacactcataacacaaagcacaaagcaaagctcatccttgagttaaaaaatggcagcagcttcttccatggctctctcatccccatccttggctggcaaggccgtgaagctgggcccatcagccccagaagtgggaagggtgagcatgaggaagaccgtcaccaagcaggtctcctcaggaagcccatggtacggcccagaccgagtcaagtacttgggcccattctctggcgagcccccgtcctacctaaccggtgagttcccaggcgactacggctgggacactgctgggctttccgcagacccaaga

SEQ ID NO: 240606 - DNA, 334 bp, Glycine max
gaaatttgtttgtggcactttttgtagtctaggcattgaattaaacaattggaattcaaagagatgtggttttattaaaaaaaaaaaaaaaaaaaacaaaaaaaaaaaaaaaaaaaaaaaaaaaaaaaaaaaaaaaaaaaaaaaaaaaaaaaaaaaaaaaacccaaaaaaaaaaaaaaaaaaaaaaaaaaaaaggggaaaaaaaaaattccccaagggggaaaaaacccccccccaactgtcccaaaccttaattccaaaaaaaaacacacatcccacaaaatcccccttttttccaaaacaaaccccaaacccccaaaacagttccccccccg

SEQ ID NO: 240607 - DNA, 302 bp, Glycine max
ggtgtgtagtataggattctcttctttattccttttgtaatttcattcattcttaatctttgtgaaaaataatgttcatcgagaattttaaggttgagtgtcctaatgtgaagtacaccgagactgagattcagtccgtgtacaactacgaaaccaccgaacttgttcacgagaacaggaatggcacctatcagtggattgtcaaacccaaatctgtcaaatacgaatttaaaagcaacatccatgttcctaaatttagggtaatgcctgtgggttggggtggaaacaacgggtcaaccctc

SEQ ID NO: 240608 - DNA, 274 bp, Glycine max
gaagatttgtgagagaaagggagaaagggtgtgagaatggagagcaaagaggaagatgtaagggttggagcaactaagttctcagaaaggcaatcaattggtacagcagctcaaggtgacaacgactacaaagaaccacccccagcacctttgtttgagcctggtgagctaaagtcatggtccttctacacagctggaattgctgactttgtggccactttcttgttcctctacattaccatcttaactgtcatgggtgtcaacaggtcaccct

SEQ ID NO: 240609 - DNA, 400 bp, Glycine max
gaaccaagtttgcttgcgtgtatattcattttagcatcaaggttgaatctcagagaaaaagaaacatcgacaagcatgtctggaagaggaaagggaggcaagggtctcggaaagggaggagccaaacgacaccgtaaggttctgagggataacattcagggaatcaccaagcccgcgattcgccgtctggccagacgtggtggcgtcaagcgtatcagtggtcttatctatgaagaaactcgcggtgttctcaagatctttctagagaacgtcattcgcgacgctgtcacctacactgaagacgctcgccgcaagaccgttaatgccatggacgttgtttaagcccttaataagcaggggaagatcctctacggattttgcggtaagacaattggggatt

SEQ ID NO: 240610 - DNA, 374 bp, Glycine max
ggctttagattcttttcccctagattcagccacagttggaaaaaaaaaaagttgttcgagatggcacgtacgaagcaaactgctcgtaagtccacaggaggaaaggcacctaggaagcagctcgcaaccaaggctgcacgtaagtctgcaccaactactggtggtgtgaagaagccacatcgttatcgtcctggtaccgttgctcttcgtgagattaggaaataccagaagagtaccgagcttttgatcaggaagctccccttccagaggctggttcgtgaaattgctcaggacttcaagactgatctgcgtttccagagccatgctgtgcttgcattgcaagaagctgctgaggcataccttgttggactcct

SEQ ID NO: 240611 - DNA, 406 bp, Glycine max
gagcctcagtctcaacacagaagcagaaggaggagaagcagaaagaggagacgaagcaatggcgccgaagaagccccgaaccacgtcgaggaaccctgatttggtcaggggaattggcaaatattcgaggtcgcagatgtaccacaagaggggcatctgggccatcaaggccaaaaacggcggtgttttgcccctccacgatcccaagcccaaacccgaggccccggcccagaagccgcccaagttctacccggccgatgacgtgaagaagcccctcgtcaacaagcacaagcccaagcccgcgaaactcagggctagcattactccagggactgttctgatcctgcttgctgggaggttcaagggaaagaggggttgtttcttgaagcagcttccatctggattg

SEQ ID NO: 240612 - DNA, 390 bp, Glycine max
ggcccgaactccttcgacgaccgtcttccccaatcgcctgcgtctctctctgaattgacaagcttaaagacaaagtcttaaatggctggtccaaggattgcccatgctaccttgaaaggtccgagtgtggttaaggagataataattggaataacacttggcttagctgctggtagcgtgtggaagatgcaccactggaatgaacagaggaaaaccaggaccttctacgatttactggaaaagggtgagatcagtgttgttgcagaggaacagtgaaaatgttcttgttttgttgcctatgctctccatttatacgcttttttttttcccatgctatattcaattggctcttcaactgtaaatgagccaacttactattagattgaaaag

SEQ ID NO: 240613 - DNA, 293 bp, Glycine max
gacttccagatttcaaagaaggcgtcttcataaacgcctttcttctccgtttccgtttcctcgttcgaattcgctttttgatctgcgaaaatgagagagtgcatctcgatccacattggtcaggctggtatccaagtcggaaatgcttgctgggagctctactgcctcgagcacggcatcgggcccgatgggcaaatgccaagtgacaagacagttggcggtggtgatgaagccttcaatactttcttcaacgagaactggtgctggaaaacacgtgccacgtgcagtgtttg

SEQ ID NO: 240614 - DNA, 413 bp, Glycine max
ggtgagagagcgagcgagcgagcagtttcaaagagaggatttgggattgggaaggcgagggattgcgctgcgtctcttcctcttctctttcgattcatccctcattcataatcttccaatccaacaacctcagcctcacactcacacatacacacatctgaacgcgtatcgtccctcccatggcttcaaagcgcatcctcaaggagctcaaggacttgcagaaagacccaccaacttcttgcagcgctggtccagtagctgaggacatgttccattggcaagcaacgattatgggtcctgctgatagtccttatgctggaggtgtattcctagtcactattcactttcctccggattatccttttcaaactcccaaggttgcctttaggactaaggtgtttcatccgaacatc

SEQ ID NO: 240615 - DNA, 345 bp, Glycine max
ggtggagtggaagtagtagcaagtacgtcatatatgtggttgatcttttgctggttgtttgttttgttccttccaattgtcagatctgaatcaccggactcactcttcacactcactcacactgaatggcttctgaaggcgaccatcaccaccaccaccaccatcaagatcacgatcatcatcatcatgatcatgatcaccatcatcatcacgatggagagggagagaccaactcatgggtaggtaacgatgggaacgtgtaccatagccacgatggtctggcgccgcattctcacgaacccatttactccaccggctacatcaacacaagagctccaccgcttc

SEQ ID NO: 240616 - DNA, 252 bp, Glycine max
gagttttctgttggcgcgggtgaggtagaacccttccacggtggtgactgcgcgatgggtgcctacaagtatgtttcagagctatggcgcaagaagcagtctgatgtcatgcgcttcttgcagcgggtgaggtgctgggagtatacgcagcaaccttcccttgttcgcttgacaaggtcgacccgccctgacaaagctcgtcgcttgggcttcaaagctaaccacggctatgtgatataccgtgttcgtgtt

SEQ ID NO: 240617 - DNA, 332 bp, Glycine max
ggaagaagaagaagaagatgtcgtacctgttgcctcacttgcactctggatgggccgtcgatcaagcaatcctcgccgaagaggagcgtctcgtcgtcatccgtttcggccacgactgggacgaaacctgcatgcagatggacgaggtgttggcgtcagtggcggatacgattaagaactttgcggtgatatacctggtggacataacggatgtgccggatttcaacaccatgtacgagctctacgacccttccacggtgaagttcctcttcaggaacaagcacatcatgaatgatctcagaaacggtaacaacaacatgattaactgggct

SEQ ID NO: 240618 - DNA, 317 bp, Glycine max
ggttaaacttcaccttacagtccactaaagcataacctaatcgcactccgctctccgcactccgctattgcacctccctcgacggcacctcaggcgcactcgttttcggttccgattgcattgaatcaaatctgagaaccattctcattgcccgtgtagtctgtaatcatgtcaggaaagtatatcatttctgctattcttggattatttggagttgcatgggtttgtgattattatgtttcagagaaaaagctatttggaggttctacccctggcactattacgaacaatgagtgggcagaagagactgacagaaa

SEQ ID NO: 240619 - DNA, 385 bp, Glycine max
gactcaccacttcaaaacactcataacacaaagcacaaagcaaagctcatccttgagttaaaaaatggcagcagcttcttccatggctctctcatccccatccttggctggcaaggccgtgaagctgggcccatcagccccagaagtgggaagggtgagcatgaggaagaccgtcaccaagcaggtctcctcaggaagcccatggtacggcccagaccgagtcaagtacttgggcccattctctggcgagcccccgtcctacctaaccggtgagttcccaggcgactacggctgggacactgctgggctttccgcagacccagaaaccttcgccaagaaccgtgaactcgaagtgatccactccaggtgggccatgctcggagcc

SEQ ID NO: 240620 - DNA, 395 bp, Glycine max
gaacatgccgaaaagtagtaccaagatggcttcagttgtgtatctcctctttggcttccatctcattgttatcatgtcaagttccttacccgcaactagtgaagtgtttgcaaaacagtatccatccacagaacccgtggaagaaaaactcacccaactccacttctatttccataacaacataacgggggaacacccaactgctatgaaaactgttttgcctcctaaggggtccattcatggttttggggctacttacatgatggatgaccctctaactgaaggaccaagtccaacttcaaagcttgtgggaagatctcagggaatatacgctttggcttcacaacatgagcctgggttgctcatggtgacaaattttctcttcactttgggca

SEQ ID NO: 240621 - DNA, 376 bp, Glycine max
gagagtggtggagtgtgcaaaagagcgtcgtagtcgcaaccctaatcagaagaagcgcagcttcaagcgagtgacagccaccagccatgggtcgtatgcacagccgcggtaagggtatatcctcttctgctttgccctacaaaaggacacctcctagctggctcaagatctcttcgcaagatgtcgaagaaaatatctgcaagtttgcgaagaaaggtttgaccccgtctcacattggtgtcattctcagagattctcacggtattgctcaggtcaatagcgtcactggcagcaaaatccttcgcatcctcaaagctcacggacttgcgcctgaaattccataggacctgtaccatttgattaagaaagcagtttc

SEQ ID NO: 240622 - DNA, 414 bp, Glycine max
ggagtaagatttttcttgttcctttgttggtgggtttcctttccgcttcaggttcagcttcaacttcaaattctcagtgaaaccaattcagctgagtccaaatcccaaatccgaatcaaaatccgaagtgagatttgcgatggagaggcttcagcgaatgtttgcaggtgcaggtggagcgctagggcaccctcccccagattccccaactctcgattcctccgagcaggtctacatctcctcactcgctctcctcaagatgcttaagcacggaagggctggggttcccatggaggtgatgggtttgatgcttggagaattcgtggacgagtacaccgttcgtgtggttgatgtcttcgcaatgccgcagagtggcactggtgttagtgtttacgctgttgatcacgtttttca

SEQ ID NO: 240623 - DNA, 403 bp, Glycine max
  unsure (1)..(403): unsure at all n locations
gatcccgcccaacggtatctccttatccgtgtttttttcaaaatttgagctcgtttgttgtcgtgtttgtttataacgttggtgtttctaaactcgtgtgcgctccgattcaaattccaactccgaatcaaaccctagtacaacaaaccaacgaaaccctcttcttcccaattctccgaccccatcatcctcaatggccaaccctgattcctctcttcctctctccatcaagaaggagaacatcactctcattacctctaaaatcgaggaacttaatgaatcgagatcggagcttctgggcagagttcagagtttgaaacaggatttgcanagttggacgtctaagttggatacacaagtcaaggtccatcgcgatgagctgtcagaacttaagaaaacactt

SEQ ID NO: 240624 - DNA, 250 bp, Glycine max
caaaaggggctattcttggtgctaataccatcagcagactgcatttaatcacaccgcaaacagtgaaccacggtcgtcggaaacaactaactcatctccaaagggaagacaggtcggacgaagaacgcaactgatacccttgcgacgaaggattggcatgaaattaatgccccctctgtgtttcaagtaacaaatgttggcgcaacactcgtctcacggatccacggtaccaagattgcgtcctaacgac

SEQ ID NO: 240625 - DNA, 322 bp, Glycine max
gaccgtgcgctagttctgagtattctgatcgctccctgagagagctcgtcgcggcggttgcagaagaagattgcaagatgaagttcaacatcgcgaatcccaccactggatgccagaagaagctcgagatcgacgacgatctgaaactgcgagcattttgggacaagaggatctcacaggaggtcatcggagatgcactcggtgaggaatttaagggctatgtcttcaaaattaccggaggttgtgacaaacaaggatttccaatgaagcatggagtgctgactcctggtcgtgttagacttttgcttcacaggggaactcc

SEQ ID NO: 240626 - DNA, 392 bp, Glycine max
ggcccttctagctttttcccagtccaagcagcctccaattcgtgccactctcttcaaaatggccgttaccttctcaaatctccacacagaatcagatctcaagtccctcgacgacttcctctctgggaaggtctacgtttctggggatcagttcacaaaggacgacatcaaagtgtatggtgctgttttggagaagccaggtgactcttttcccaatgctgccaagtggtacgaggttgtctcatctcagcttgctgcaagcttccccggcaatgctcaaggggtgagattcagtggcaaagcttctgctccagcggaggctgctcctgcgaaaccggatgcttctgctgctgaagatgatgatgaccttgatctctttggcgatgagactg

SEQ ID NO: 240627 - DNA, 201 bp, Glycine max
gaacgcagccaaagaaaagaaaatcctcaattttctgagcagccaaacactctctctctgtctctcgaaaattctcagtttgcagagaaaatctgaatcatgtcgtggcaagcgtatgtcgacgatcaccttcggtgtgacatcgaaggtaaccacctcactcacgctgctatcatcggccaagacggaagcgtttgggct

SEQ ID NO: 240628 - DNA, 401 bp, Glycine max
aggggacgagcacgaggaccaagagcaagaagaggaggaggaggaggaggaaatgggattctcactggcggcggcggcgagttacgactcgctgggaaacgccgcggtgaggtctaaaattaccggcggcgatggtgttgcggccaccgtgaattccggtcgcaaagggacggtgagatacagagaatgtcagaagaaccatgccgtcagcatcggcggccacgccgtcgacggatgctgcgagttcttggctgccggagaggaaggcacgctggaagccgtaatttgcgccgcctgtaactgccaccgcaacttccaccgcaaggagatcgacagcgaaaccagcccttaacagcaccgttcgcagccacagcctcagcctctgcaccctcagtaacacc

SEQ ID NO: 240629 - DNA, 396 bp, Glycine max
ggcagtttcaaattttcttttccttcactttcccgagaaaaaaataacacttttcactttcttcactacgttctcacttcgatatggctcgtacgaagcaaaccgctcgcaagtccaccggtggcaaggcgccacgtaagcagctcaccaccaaggccgctcggaagtccgctccggcgaccggaggagtgaagaagccccaccgcttcaggccgggaaccgtggcgctgagggaaatcagaaagtaccagaagagcaccgagcttctcatcaggaagcttccatttcagaggctcgtgagagaaatcgcgcaggatttcaagaccgatttgcgtttccagagcagcgctgtttccgcgcttcaggaggctgctgaggcttacctcgttgggttgt

SEQ ID NO: 240630 - DNA, 325 bp, Glycine max
  unsure (1)..(325): unsure at all n locations
gacagaaagagaaagcaatggcttctctggcaagcttagctgttgttcaaccatctactgtcaagggccttgctggaactaagctctctttcaagccctctcgccagagcttcagacccaagaatttcaggagtggtgccgttgtagcaaagtacggtgacaagagtgtgtactttgatttggaggatctangcaacactactggtcagtgggacttgtacggctccgatgcaccttcaccctacaaccctcttcagagcaagttcttcgagacattcgccgctccattcacaaagaggggattgttactaaagtttttgatcct

SEQ ID NO: 240631 - DNA, 299 bp, Glycine max
gagggtttttgtcgttgcgactaagagttgctgcttcttccgccactcagcacttcgctccctctgtgcttcagcaagcatggccgaaatcgaagctaccgttccagatcgctctcaaatcgacgtcaaacttttcaaccgctggagcttcgaggacgttgaggttactgagaggtcgctggcggagtacattggagtgtccccgtcaaggcatgggagggatgtgcgtgagactgctggtagggtactcagtgaggaggttcaggaaggcgcagtgccccattgttgagagactcagc

SEQ ID NO: 240632 - DNA, 361 bp, Glycine max
gacaccaaaatttgccaattgccatttcaatccccagtttcttcttcaacgtcctcttacgagcagatcgcaattctccttcccagtttcaaaccctaattccctcattcccatggcctcagaagagcccactgtcgcggtggaagccgctcccgaacctgccagcgccgagcctcgcccggaggagaaggaggagccgagagctgaagccagggctaagaggaccaaggagcccagacctaaagaggtttcgagaggacgcaaccctcccactcatccttcggacgaggagatgattaagggggcagttagctcgctgaaggagaagagcggttcgagccaacacgcgattgcgaagttc

SEQ ID NO: 240633 - DNA, 276 bp, Glycine max
ggagttgagttttgaaagcgtgtgcgtgggagggtccgaagttggagatagtgattctggttctgttctgttcttctttctactcacaacaacatcagaatcagaaacaacaatggccaacactaacttggaagatgttccctcgctggatggcatgactgagctccttcgtcgtctcaggtgctcttcgaaacctgacaagcgtcgtagtctcattggggcacctggatctggaaaaggcacccattcaccagtcataaaagatgagtactgctt

SEQ ID NO: 240634 - DNA, 256 bp, Glycine max
  unsure (1)..(256): unsure at all n locations
gactcaccacttcaaaacactcataacacaaagcacaaagcaaagctcatccttgagttaaaaaatggcagcagcttcgtccatggctctctcatccccatccttggctggcaaggccgtgaagctgggcccatcagccccagaagtgggaagggtgagcatgaggaagaccgtcaccaagcanggtctcctcaggaagcccatgggacggcccagaccgagtcaagtaggtgggcccattctctggcgagccccc

SEQ ID NO: 240635 - DNA, 371 bp, Glycine max
ggccaacactttctcgcattttccctcttctttctctctcacgttttccgcttcagttttctcgggaaaatcatggtgaaaggtccaggcctctactctgacattggcaagagagctcgcgatcttctgttcaaggattatcagaatgaccacaagttcaccatcaccacttacacttccaccggagtggaaatcacttcaactggagtcaggaaaggtgagatatatttggccgatgtcagcactaaggtgaagaacaagaacatcacaactgatgtcaaagtggacactaactcaaatctgcgtacaatcattactgtggatgaacctgcccctggactcaagacaatttttagctttaattttccaga

SEQ ID NO: 240636 - DNA, 481 bp, Glycine max
gcagctctcttcgccagccacgtaccagtcaggaattcccgggccgacccacgcgatccgtacggctgcgagaagcgacagaaggggtaggatgaggctggaactgccgccattaaaactgttgaacttgatgctgctattggagggcgtgcagtgcatcacagggagctccaagggcattattctgaccagtttttgtcgtactttacatcatgtattatagcactggacggtggagttgcatctgggtttaagatacctgatgaagagaagtttgccacatgtttgtatgtatgcagaggcgacaagaagatcgcctagaaacaaaaagcagcgggcgctctagaggatccacgcttacgtctgcatgcatgcgacggctacaactcttccatggtgtcacctgtattcactttaccgcgccgtcattttaccacttcctgcaccgtcaaaaccctggcctttacccacctttaaatct

SEQ ID NO: 240637 - DNA, 349 bp, Glycine max
ggtgtggtctctctctatactataggtctcgcccaatacctactctccgctcccaagagcacgcaccaccactattgcacttcttcctcgttctccctctttttcttcttcttcgctaaacccttttttctatctcactaacacaacaatgggagacgagaagaagggcaagcctgctgcttccggcgtgtggtccaccatcaagcctttcgtcaatggtggagcctccggcatgctcgccacctgcgtcattcaacccatcgatatgatcaaggtgaggattcaacttgggcaaggatcagctgcgcaggtcacttccaccatgcttaagaatgagggttttgctgcc

SEQ ID NO: 240638 - DNA, 276 bp, Glycine max
gacagcactgcactcttcgcaacacaacaaagaaagacaacccagagagcgcgtcttaataaacgctcttctctgaaaacccccatttcttttcttctttcttcttctctttcgcttcttcgatcttcgatcttcgtcgctgaagatgagagagtgcatttcaatccacatcggccacgccgggattcaggttggaaacgcctgctgggagcgttactgcctcgaacacgggattcagcctgatgggcagatgccaagtgacaagaccgttggtgg

SEQ ID NO: 240639 - DNA, 356 bp, Glycine max
ggagaggagagaggagaagagaagctaaagaaagaaaggagatgggagtggagaagcagttgttgaggtctggcaccggtccgaagccaattcccggtcagaacgtaaccgttcactgcactggtttcgggaagaacggtgacctttctcagaaattctggagcacgaaggatcctggccagaacccattcactttcaaaatcggccaaggttctgttagcaaaggatgggatgaaggtgtgcttggcatgcaaattggtgaagttgctcgtctccggtgctctccggattatgcgtatggtgctggtggctttcctgcgtggggaatacggcccaactctgtcttggaatttgaa

SEQ ID NO: 240640 - DNA, 282 bp, Glycine max
gacatcacatttcgttgcgcctttgatctctgtccccgctgcgtctctcgtaatcatgcctaagcaaatccacgagattaaggatttccttctcactgccagaaggaaggatgcgaggtcagtgaagatcaagaggagcagagatgtggttaagttcaaggtcagatgctcgaagtacctctacacactttgtgtgtgtgagccagagaaggctgatagagtgaagcaatctcttcctccaggtttgagtggttaggacctgtaaaggtactgggctagaga

SEQ ID NO: 240641 - DNA, 284 bp, Glycine max
gacaccttcgaattttcttttccttcagtttcccgagataaaaaaaacacgcttgcactttcttgactacggtctcacttcgacatggctcgtactaagcaaactgctcgcaagtccagcggcggcaaggcgccacgtaagcagttggcgacgaatgccgcggggaagtcagctcccgcgactggaggactgaagaaggcggagcgcggtcgggccggggaagcgtgggcggctgagggagggcagagggtatcagaagagcagcgagcttctggtcaggaagc

SEQ ID NO: 240642 - DNA, 379 bp, Glycine max
gattcatagctattcgcagttcccaaattcattttaatcctaattctgcacttcttgatcattcgatttttctcctcaagatgcagatattcgtaaaaactttgaccggcaagaccatcacccttgaggtggaatcctccgacaccattgacaacgtaaaagctaagattcaagacaaggaagggatcccacctgaccagcagagacttatctttgcgggtaaacaacttgaggatggtcgcacccttgccgattacaacatccaaaaggaatcaaccctccatctcgtgcttcgcctcaggggtggcatgcaaatctttgtcaagactttgaccgggaagaccatcacccttgaggtggaatcctcggacaccattga

SEQ ID NO: 240643 - DNA, 381 bp, Glycine max
ggttcaccctgacattggtatctcaagcaaggccatgggaatcatgaacagcttcatcaacgacatcttcgagaagcttgcccaggaatcttctagacttgcccgctacaacaagaagcccaccatcacttcaagggaaattcagaccgcggtcaggcttgtgctgcccggtgaattggccaagcacgccgtttcggagggtaccaaggccgtcaccaagttcactagctcttgaacaaaatatctttgcctggctcttgtttttcttcatgtgtttctgttagatctagcgacctatgcttagatttgaacagttaacttttttattattatttgtaattgaagtattgggattacgttcatcctctgtgtatggaaatg

SEQ ID NO: 240644 - DNA, 365 bp, Glycine max
gattcattcacaaatcttagttactttatcagtatcattcattgtcactacgattgttctaaaagcaattagtactcttgagaagaattaagatatcatcatcacaataacaagatgagttcaggaattagagcatggagtgtggcagctagtgttggagttgtggaggccttgaaagaccaaggcatatgcaggtggaatcatgctttaagatcagctcaacaccatctcaaaggccatgttggctcattctctcaggctaacaagctttcttctactgctatgatctccacagcactaagagatgagaaggcaaagcagtcagaggagtccttcagaactgtcatgttgttaagctgctgggg

SEQ ID NO: 240645 - DNA, 154 bp, Glycine max
ggagcaaaagcctaatccctatttttcttcctcagtagtgtcatttacgcttctcttctctgcagcagctatgcgtaaacctaaagtcttcttcgacatgaccatcagcagtcaatctgctggccgcatcgtgatggagctctacgccgacgtc

SEQ ID NO: 240646 - DNA, 272 bp, Glycine max
gtgagggacatgcgtcaaactgtggctgtcggagtcatcaagagtgttgagaagaaagaccccaccggagccaaggtcaccaaggccgctgccaagaagaagtgattgcatttgggcaattttgctagcacatgtgatcatcatcgtggtgacgcctttatagtagttttatccgtgcagagtcgtaggtgttttgtcgaagttagagttgtgagtgtcggccgagggcatgtagccgtaactttcagaactaggttcgtgatcggcggtgg

SEQ ID NO: 240647 - DNA, 233 bp, Glycine max
gacaggtgtttgcaatactagcgatagctgataagagagataccaacaagaagagaaaagaagaagagttgagattccctttgaagaaaagatggcatcccataggcaaagctatgaagctggtcaaactaagggccgaactgaggaaaacacgaaccagacgatgggcaagattggagagaaggctcaggctgcagacgagaagacccaggaaatggcccaagctgcaaagg

SEQ ID NO: 240648 - DNA, 363 bp, Glycine max
gaggggcttaatatctcccctcacttgtgcctagccttatgtcatagtattatcattcattctcagctttctctcttctctctccacccaaaccctaactcccgaccctgttcccctctcgtatccgtcatgaaaggaggaaagtccaagaccgaatctaagagagccgatcccaaacttgctgtgaataagaagggagccgccaccaaggctaggaaacccgccggcaaggggaaggcagcgaaagaccctaacaagccaaagaggcctccaagtgctttcttcgttttcatggatgagttcaggaaggtattcaacatagaacatcctgaaaacaaagcagtgtctgctgtgggcaaagct

SEQ ID NO: 240649 - DNA, 359 bp, Glycine max
atagcgaaacagagagtggtttcagtgagtgatcggtgttcacttgatccttcataagtcgtcatcatcatcatcatcatcaccgttgattgaagaagatgccgatcagaaacatcgccatcggaaggcctgaagaggctactcaccccgacacgttgaaggcggggttggctgagttcatctccaccttgatcttcgtgttcgccggttcaggttccggcatcgcctacaacaagctcaccgacaacggcgccgccactcccgccggcctcatctccgcttccatcgcccatgctttcgccctcttcgtcgccgtctccgtcggcgccaacatctccggcggccacgtcaaccccgcc

SEQ ID NO: 240650 - DNA, 216 bp, Glycine max
aattcgcggtctgacccacgcatacatacggccctagaagaggagagaaaggggaaggagagggaatgcaagacattgagtagtttcagtaagtgattggtgttcaattgatccttcataagtcatcatcagcagcagcatcatcaccgtagattgagaaatatgccgcttacacacatcgctatcgcgaaagcctgaagaggcgactcatcacca

SEQ ID NO: 240651 - DNA, 132 bp, Glycine max
ggtagcgcacagaaagaactagaactagggtttcatcgttgggagcagtaaacgacaatgatttacgacgttaactctccgcttttccgatccttcctcagccagaagggaagctcctctgataagaggaag

SEQ ID NO: 240652 - DNA, 364 bp, Glycine max
gtccgccatttttcgtagctgctgttcttgcgcgtgaacaagcctcaggtaagccaaaaccatggttaagcataacaatgttatcccaaacggacacttccgtaagcactggcagaactatgtgaagacttggttcaatcagccagcacggaagacaaggagacgattggctcgtcagaagaaagctgtgaagatattccccagacctacggctggacctctcaggcccattgtacatggtcaaactttgaaatacaacatgaaagtgagaggtggaaggggattttctcttgaagaactcaaggcatcagggattcccaaaaagcttgcaccaaccataagtattgctgttgatcatcgtcgc

SEQ ID NO: 240653 - DNA, 374 bp, Glycine max
gacagaaaacgcagttctcaccatttccctctcgattgtgagacttgttgttgttaactgaacttttctgagcaagaatgtctgggcgtggaaagggaggcaagggtttgggaaagggaggagcgaaacgacaccgtaaggtgctgcgcgataacattcagggaaccaccaagcccgcgattcggcgtttggctcgtaggggtggcgtgaagcgtatcagtggtctcatctacgaagagacacgtggcgtgctcaagatctttttggagaacgtgattcgtgaccccgttacctacactgagcatactaggagaaacaccgttaccgcaatggacgtggtttatgcccccaagagacatggaaggaccctctac

SEQ ID NO: 240654 - DNA, 377 bp, Glycine max
taatttgggaattattgctcccatcgccattggtttcattgtcggcgctaacattttgttgggtggggccttctctggagcggccatgaaccccgctgtgacatttgggcctgctgtcgtgagctggacctggaccaaccactggatctactgggccgggcctctcatcggtggtggaatcgctggccttgtttacgaggttgtctttatcagccacacccacgagcagcttcccaccactgactactagagggggggaaatgaagataaagaaataaaaaattgtgtattattgaatttctctggaatcttcttctgtgtatggttttccttccttgtgttttcttcctaattcactttcgaaggttgtacttgtt

SEQ ID NO: 240655 - DNA, 269 bp, Glycine max
gaacttggcttgttccaattccattcactcgttcattcccaggttgtgatggcagcagcaccagcagctaccttcgctattggaaccaccggttccctcggccaaagaggaagctcgcttcctcaatcaaagtcctttgggttgaaatttaactctcctaatcacttgaagagcttctgtggcctcaagggcatgtcatccgtgagatgtgaatcggaatccaccttcctccgtaacaaaaccgggtgctgctccacgggagctctttt

SEQ ID NO: 240656 - DNA, 345 bp, Glycine max
gccacaccgcaaactctctctgtaaagtgcaaagcctctattttttcttgtgaatttgaaggacgatgagttccacagaggtcgcagccacaacgaagaagggtggaagagggaaacccaagaccacaaagtccgtttcccgttcctccaaagccggccttcagttccccgtcggccgcgtcgctcgctacctcaaggccggtcgctatgcccagcgcgttggttccggttcccctgtttacctatctgcggttctcgaataccttgccgctgaggttttggagcttgccggcaacgctgcgaaggacaacaagaagacgaggatcgttcctaagcacattcaac

SEQ ID NO: 240657 - DNA, 348 bp, Glycine max
ggaattaggtttttagggtttacaccgagcagccacacctcccgcagcagccatggttctcaaaactgaactatgccgattcagtggtgccaagatctacccaggaaagggcatcagatttgttcgtggtgattctcaggttttcctgtttgcaaactcaaaatgtaagaggtatttccacaatcgcctgaagccttcaaagctcacctggactgcaatgtacagaaagcaacacaaaaaggacattgctcaagaagctgtgaggaagaggagacgtgctgccaaaaagccttactccaggtccattgttggtgcgaccttgggagtaatccaaataaagagagctga

SEQ ID NO: 240658 - DNA, 373 bp, Glycine max
ggtcttgcaggcgaagagatggccaccgttccagggcagctcgtgtgggagatcgtcaagaaaaacaattccttcttggtcaagcagtttggaaggggcacccagagcgtcgaattcagcagagagagcaacaatctctacaacctcaattcgttcaagtactctggtttggcaaacaagaaaactgttactgttcagcctgagggcaaagatcaggctgtgttgttggctacaaccaagacaaagaagcaaaacaagcccgctgcattgctccacaaatctgtgatgaagaaggagttcaggaggatggcaaaagctgttgaaaaccaggtggccaaaaattactacaggcctgatctcaagaaggctgccc

SEQ ID NO: 240659 - DNA, 277 bp, Glycine max
ggttttgcactgccattgaaggaagagcacaaactgtttcttgttcgtatactgattccgttgcacaagccaaagtgcttagcagtgtagcatcaacagttatcttagtgcattacccaatttgtagagaaagactgcaagcttgctgatacaattagtaggggattgttgaagtagtggcctataacaaatagtccaaaggacgttatgtgccgtgggtgagttgggagaagtcgtggaaggaacgcaggggcgatgggttcagcgttgtatggtg

SEQ ID NO: 240660 - DNA, 294 bp, Glycine max
  unsure (1)..(294): unsure at all n locations
gaccgtgcgctagttctgagtattctgatcgctccctgagagagctcgtcgcggcggttgcagaagaagattgcaagatgaagttcaacatcgcgaatcccaccactggatgccagaagaagctcgagatcgacgacgatctgaaactgcgagcattttgggacaagaggatctcacaggaggtcatcggagatgcactcggtgaggaatttaagggctatgtcttcaaaattaccggaggttgtgacanacaaggatttccaatgaagcagggagtgctgaatcctggtcgtg

SEQ ID NO: 240661 - DNA, 354 bp, Glycine max
gggaagcagaaagagaagcattagcaaaagcaagaagaactagtctaagcagaaatggcctcttcagtgatggcatctgtggccctcaaacctgcccctttcactgttgagaagtcctcagttagaggccttccctccctctcaaggaactcctcttcattcagagttgtggccagtggtggcaagaagatcaagactgacaagccttatggaattaatggtggcatggctttgagggaaggagttgatgcatctggcaggaagggaaagggaaagggcgtttaccagtttgtagacaaatacggtgctaatgtcgatggttacagtcctatctacgacaccaaggactggtct

SEQ ID NO: 240662 - DNA, 365 bp, Glycine max
gatataccgttgcatacttgcatagtagtaatggcgctctttgttttgtctctcttattcttcgtcattcttaatggggagttccgagagtcagcttcaagtacgtttctactccaacacatgtcctcacgttgactctattaaccgtgccgttgttagagactccgttctctctgaccacaatatggcggctgtcttactcatacttcattttcacgactgctttgctcacggatgtgatggttcaattctgattgagaatggtgcacaatcggatagacatgcatttggacatcacggggttatagggtttgaagtgatacaaagagcagaggcacaattgggaggctcttacctcggcctgg

SEQ ID NO: 240663 - DNA, 360 bp, Glycine max
gattcaccacaaccctctctctatattccattgccacccagttttgaatatatttttattccttctttgtttcttcactttcttccatacacataaccatgtcttctcagactgttgtcctcaaagttggtatgtcatgtcaagggtgtgctggagcagtgaacagggttttgggaaaaatggaaggtgttgagttatttgacattgatctgaaggagcagaacgtgacagtgaaaggaaatgtggagccacatgaagttctgcaagccgtttccaaatctgggaagaagactgcattctgggtggatgaagcagcacgatctaagagcaagcgtttagaaagtgcagctgttgcctcag

SEQ ID NO: 240664 - DNA, 354 bp, Glycine max
  unsure (1)..(354): unsure at all n locations
ggttgacctccttgcttctctcatgttacaatcctcttgccgctgagctccctttctcctcggtccacagagacaagatgtaagacaggtgccaacagttcatcacgaaagaaaggactagctgagccgagatcactaactaaaacgaatttaatactaatcgaaaatactaatagaatagaaatagaactgtcgtttcatatagatatcccgtcaacacaacatangtcatcgaaaggatctcgaagacccagcaacgcacgaaagccgggatctttcagaaaatggattcctagtcgaagggtgcataaccgcatggataagctcacactaacccgtcaatttgggatccaa

SEQ ID NO: 240665 - DNA, 323 bp, Glycine max
gaaaacgagaattagggtttgtagtgcagcaggaagaagcaataatggcgccgaagataacacgtaaggttagcagaaaccccgaattgataaggggaatcggaaagtactcgaggtctcaaatgtaccacaagaggggcatttgggctatcaaggccaaaaacagtggcgttttagctcgccacagccctaaacccaaacctgaaactcccgctgaaaaacgagccagattttacgctgctgacgatgtcaagaaaccccttgtcaacaagcacaaacccgaacgcgcgaagctcaaggcgagcattagtccgcgggacagt

SEQ ID NO: 240666 - DNA, 360 bp, Glycine max
gacccccaaaccctgctgcataggaagaaaccctagcctctcaccctccctgcgacacgatgcagatcttcgtgaaaaccctaacgggtaagacgatcacccttgaggtggagtcttctgacaccatcgacaacgtgaaggccaagatccaggacaaggaaggcatccctccggaccagcagcgcctcatcttcgccggaaagcagctggaggacggccgcaccctcgccgactacaacatccagaaggagtccaccctccacctcgtcctccgtctccgcggtggcgccaagaagcgcaagaagaagacctacaccaagcccaagaagatcaaacacaagcacaagaaggtcaagctcg

SEQ ID NO: 240667 - DNA, 349 bp, Glycine max
gaattcacttgcggctgcagtagagaagcactcttcgttcttcgactgtctacgatctgctttctctgaattgtgaaaatgtcgctcggagaaactgcttgttcatacgcagctctcatccttcatgaagatggaattagtgtaactgctgacaagatcagcaccttgttgaaaactgcaaaggttccagtagactcttattggccaaccttgtttgctaaacttgctgagaagaaaaatcttggcaatttgatagcaaatgcggcaggcggtggtgcaccagttgctgttgcagctgccccagttgctgctgctgctggtggtgctgctgccgcagctccagctgctg

SEQ ID NO: 240668 - DNA, 378 bp, Glycine max
gataccatagaagaagcacaaagagaagcattagcactaggagcagcaacaactagtctcagctgaaatggcctcttcagtgatggtatctgtggccctcaaacctgcccctttcactgttgagaagtcctcagtgagaggccttccctctctctcaaggaactcttcttcattcagagttgtggccagtggcaagaagatcaagactgacaaaccttatggaattaatggtggcatggctttgagggatggaactgatgcatctggcacgaaaggaaagggaaagggtgtttaccagtttgtacacaaatacggtgctaatgtcgatggttacagtcctatctacgacaccaaggactggtccccaaccggtgatgt

SEQ ID NO: 240669 - DNA, 393 bp, Glycine max
ggagcgtgtctctccgcagcagccttcttcgccgtttcagctcaagagccaccagcaggtaagatatggttaagcataacaacgctatccccaatgggcacttcaggaaacactggcaaaactatgtgaagacttggtttaatcaaccagcacggaagaccagaaggcgtttagctcggcagaagaaggctgtcaagattttcccaaggcctactgctggacctctcaggccaattgttcatggccagactctgaaatacaacatgaaagtcagatctgggagaggattttctctcgaagagttgaaggctgtgggaattcccaagaaacttggtccaactattgggatttctgttgatcaccggagaaagaatcgttctttggagagtctgc

SEQ ID NO: 240670 - DNA, 384 bp, Glycine max
gatcatttgtaagagaagggaaaagcgggaaaagagaaaaaacagagggttttgtttctcttttgcagttgcactcttgcgttgcaggcaggggcatctgtttcccgttctgctccgagcgatcaagtgagtgagtgagtgagtgtcatatatatatacatagtgcgttcgagaaatgcagcagcacctgatgcagatgcagcccatgatggctgcctactaccccaacaacgtcaccactgatcacattcaacagtacctggatgagaacaagtccttgattctgaagattgttgaaagccagaattctggcaagctgagcgagtgtgccgagaaccaatcaaggctgcagagaaatctcatgtacctagctgcaatagctga

SEQ ID NO: 240671 - DNA, 391 bp, Glycine max
  unsure (1)..(391): unsure at all n locations
gagcgccaatgtttttttcagaggagtttcatcttgtaatcaaaagagtttatcttatagtaagaaatcgatgtcttactccattttaaggaacaaaacaagagaacaatagcctgacaaagggtttagccataaaatcgaatccatcattgatttgagatattgataaggtgaatactcatttctcgtcaatgctaggcataatgcgggtatagggacctaaaaaagattatcttttcttcctatcttatgaactttaaggtgtatgaagtgtcatttcctatcttagattttaattttagtacgtagataaagagtccatttaacttaagttgatctangccagaagcagacctacgtcaagataatccttctttgaaacactttggta

SEQ ID NO: 240672 - DNA, 388 bp, Glycine max
gatacctaaaaattgtaccgatatggcttcacttgtgtgtctccttttttccttgcatttcatggttatcatgtcaggttccttaccagcaaatagtgaagtgtttacaaaagagtctcctatgtctctatccacaaaacccgtggaaagactcacccaactccacttttatttccataacaacaaaatgggggaacacccgactgctatgaaaattgttgagcctcctaaggcgtccatttctggttttgggactatttacatgatggatgaccctctaaccgaaggaccaagtccaacttcaaagcttgttggaagatgtcagggaatatatgctgaggcttcgcaacatgaacctgcgatactcatggtaacgaatttgttcttc

SEQ ID NO: 240673 - DNA, 419 bp, Glycine max
gacagtgttcacagacactggaagcagcacgatgtcaccgttaaggacgagaagacccttctcttcggtgacaaggcagtcactgtttttggacacagaaaccctgaagagatcccatgggggtcaactggagctgacatcattgttgagtccaccggagttttcaccgataaggacaaagctgccgcacatttgaagggtggtgccaagaaggttattatttctgcccccagtaaggatgcccccatgtttgttgttggtgttaatgagcacgagtacaagccagagcttgatactatttccaacgctagctgcacaatcaactgccttgctccactccccaaggttatcaatgacaggtttggcattgttgacggtttgatgacaacggttcattccatcactgccacccagaagac

SEQ ID NO: 240674 - DNA, 379 bp, Glycine max
taatttgggaattattgctcccatcgccattggtttcattgtcggcgctaacattttgttgggtggggccttctctggaacggccatgaaccccgctgtgacatttgggcctgctgtcgtgagctggacctggaccaaccactggatctactgggccgggcctctcatcggtggtggaatcgctggccttgtttacgaagttgtctttatcagccacacccacgagcagcttcccaccactgactactagagggggggaaatgaaaataaaaaaaaaaaaattgtgtattattgaatttctctggaatcttcttctgtgtatggttttccttccttgtgttttcttcctaattcactttcgagggttgtacttgttcct

SEQ ID NO: 240675 - DNA, 373 bp, Glycine max
gaggggttcaatgtataacgctgctgccgagccccttcgcgatcactaaggtaagtgagtcatctgtggtcgacaacggtcgccaccgccatggctatgaatgacgaggtggttaccagacagtacagcattatccgccactcacgcctccatggctgcacatttatgagtaaagctcctaacgctagtactgagatcaggaagtttgcccagtacgccatggggaccaatgatgtgatggtggatgtgcaacttgatcaactttgtctggagccaatgaatcaggactgttccaatgacgactaaggtaagaattgctcgcaggacgaatgacgatgaacatgcccatgaacagctatacactcatgtcacc

SEQ ID NO: 240676 - DNA, 419 bp, Glycine max
  unsure (1)..(419): unsure at all n locations
gacccacgcgtccaccacgccttcgttacggttccaaaaaaacaacaaaagggaaggtttcaagcccttcgtcgctgttttttgtgtgtcgcttcttcgtangtgcagctgcaatggtgaagggacgccaaggagaacgtgtcagactctacgtgaggggtacaatccttggatacaaaaggtccaagtcaaaccagtatccaaatacatccctgatccaaattgagggtgtgaatgccaaagaagaagtagcatggtatgctggcaagaaaatggcctatatctacaaggctaaggtgaagaagaatggaagccattaccgctgcatatggggcaaggttacaaggcctcatggtaacagtggtattgtccgtgcaaaattcaagtcgaaccttttcaccaaatcaatgggagcccga

SEQ ID NO: 240677 - DNA, 258 bp, Glycine max
catgctaagagggttaccattatgcccaaggatatccagcttgcacgcaggatcagaggcgagagggcttagaaacaaggttgagaggtttgggtgttaggtgcttagggttagggttctggtcttgaaggatgtgtttgggagtttggttgtaggaatcctctccatctgtgtgtttatgtggaatgtgaaatgtgaatctctttgcttttgtaattatattgtgttactatgaggagttaatgaaaatgctatggc

SEQ ID NO: 240678 - DNA, 276 bp, Glycine max
ggcgcattgaacgaagcttagggtttgtagtgtagcatgaataagcagcaatggccccgaatataagaccttaggtgagcaaaaaccctgaactgatcctgggaatcggacagtactccaagtcgcatatgtactacaataggggcatttgggctatcaaggccaaatacggtggcgttttatcgcggctcgacgctaaactcaagcccgatgcgactgctgaagaaccaatcaaattttaccctgctgatgacatcaaaaaacctcctgtcaaca

SEQ ID NO: 240679 - DNA, 395 bp, Glycine max
ggattcggcaaagttgatttcaattcaatttgatttccccctttttcttctccacgtttgtgcctgcaacctcaaataccgattagggttcatgctacactgaacttggtttcggtgttccaagttagttagaggcattgttgcttgcatagatctctgatctgaaaatgagtgcgtcgaggttcactaagtgcgtcaccgtcggcgacggtgctgtcggcaaaacctgcttgttgatttcctacaccagcaacacttttcccacagactatgtgcccaccgtttttgacaatttcagtgctaatgtggtggtggatggaagcaccgtaaacctacgattgtgggatacagctggtcacgaggattacaatagattaagacccttgagctatcga

SEQ ID NO: 240680 - DNA, 383 bp, Glycine max
ggcgtacgcagcttcatccctaacgcgtgcatagcagagtcagagacagagacgcagccatggggcggagacctgcgaggtgttataggcaaattaagaacaagccataccccaagtcacgtttctgccgtggtgttcctgatcccaagatcaggatttatgatgttggtatgaagaagaacggtgttgatgagtttcctttctgtgtccatctggttagttgggagaaggaaaatgtttcaagtgaggccctggaagctgctcgcattgcttgcaacaagtacatggccaaatttgctggaaaggatgctttccacttgagagtcagggtgcacccattccatgttcttatgatcaacaagatgctttcgtgtgctggtgct

SEQ ID NO: 240681 - DNA, 392 bp, Glycine max
gacactcactctttgactcttcttcgtctcaaatctcttcgttccttcgattcgttccatttcttccaaaatggccaaagacccagttcgcgttctcgtcactggagctgcagggcaaattgggtatgctcttgtccctatgattgctaggggagtgatgttgggtcctgaccagcccgtgatcctccacatgcttgacattcctccggcagcagagtcattgaatggggttaaaatggaattggtggatgctgcattctctcttcttaaaggtgttgttgccacaactgatgtggttgaggcatgcactggggtcaatattgccgtgatggttggtggattcccaagaaaagaaggtatggagaggaaggatgtgatgactaagaacgtct

SEQ ID NO: 240682 - DNA, 375 bp, Glycine max
ggagcgaagaagatattagggtttttgagtgcggtgcggcgatcctagcactctcttctgcagctttcgccgacagcttcattcaccatggctgagcaaaccgagaaggcttttttgaaacaaccaaaagtgtttctcagctcgaagaaaactgggaagggaaagagacccggaaagggtgggaaccgcttttggaaatccattgggcttggatttaagactcccagggaagccatcgaaggaacctacattgacaagaaatgccccttcactggcaatgtttccatccgtggccgtatcttggctggaacatgtcacagtgctaagatgaacaggactattattgttacgaggaattatctccattttatcaag

SEQ ID NO: 240683 - DNA, 365 bp, Glycine max
tgggagggttagattcgttgatgttgttctaaaacgtcgacacattctccgtcgccacaacaacaatggctccgaagaaaggtgtgaaaggttccgttgtagcagcgaataagaaggttcacgagaaggtgacgaatcctttgttcgagaagcgtccgaagcagttcgggatcggaggcgcgctgccgccgaagcgggacctgacgcggttcgtgaagtggccgaagaacgtccaaatccaacgcaagaagcgcatcctcaagcagaggctcaaggtccctcctgcactcaaccagttcaccaaaaccctagacaagaatctcgccacgaatctatttaagatgctgctcaagtacaggccggag

SEQ ID NO: 240684 - DNA, 368 bp, Glycine max
ggcatcatttcattgcactcattcaccgcacatgtccggcaaggaccgaaagaaaattaaaacggcgtttcgataactgccacaaaaaagtacaaataaaataagaaaaagaaaaccaacatacatcagtcactagtgtgttaaaagcgacacaacacaacataagctttattcttttttcttcgcttcttctgtacagcacccaagattgaagatgatagaccttgcgcgcgtgcagaatgagctcgtggaatgcagcaaggactcggacggatcgggcatcaaagtctgccccaaaagcgacaaccttgttctcttgatcggcaccattcctggccctgtcggaactccttatgaaaggggcattt

SEQ ID NO: 240685 - DNA, 410 bp, Glycine max
acgcgtccaatcgatgctacaagaccacagaaagggacacttctcataatttatgttgtgaagtttgtttactctcagaacgaatagaagatttaacgccatggatgagatattgaacaaagtggggtcttactggttctccaacaaggccatcaaggaatttaactctgtcggctatgatatcaactcactgtcaaccactattgaatgcggaaccaaatggttggtcaacaacttaaaacgaaagatgcacaaggcattaacagcagttgctaaaggagtatgatctacccataggaatctttcctctcgatgcgacatatttcgaatttaacgaacagacatgaaagcttgttgtttacattcctcaactgtgtgaagttggccacatggatacgtcagttctgcgt

SEQ ID NO: 240686 - DNA, 297 bp, Glycine max
cggggaggtttacaccgaggagacacaccttcagcagcagcagccatggttctcaaaaccgaactatgccgaatcaacggtgccaagatctacccatggaaaagcatcagatttgttcgtggtgattctcaagttttcctgtttgctaactccaaatgtgataggtatttccacaacaagttgaaaccatcaaagctcacctggactgcaatgtacagaaaacaccacacgaaggacatttctcaagaagctgtgaagaaattaacacgtgctgccaaaaagccttactccacgtcc

SEQ ID NO: 240687 - DNA, 375 bp, Glycine max
  unsure (1)..(375): unsure at all n locations
ggcagtttcaaattttcttttccttcactttcccgagaaaaaaataacacttttcactttcttcactacgttctcacttcgatatggctcgtacgaagcaaaccgctcgcaagtccaccggtggcaaggcgccacgtaagcagctcgccaccaaggccgctcggaagtccgctccggcgaccggaggagtgaagaagccccaccgcttcaggccgggaaccgtggcgctgagggaaatcagaaagtaccagaagagcaccgagcttctcatcaggaagcttccatttcagaggctcgtgagagaaatcgcgccggatttcaagaccgatttgcgtgtccagagcagcgctgtttccgcgcttcaggangctgctg

SEQ ID NO: 240688 - DNA, 370 bp, Glycine max
ggttgaatgtagaacgctgctgccgaaacccttcccgatccctaaggtaagtgagtaatccgtggttgagaatggtggagaacgcgaatggtacgaaggaggacgtggttaccacagagtacaccattaacctccacaagcgcctccatggctgcacatttaagaagaacgctcctaaagctattaagagagataacgaaatttgcccaaaaggccatggggaccaatgatgtgagggtggatctgaagttgaacacctttgtctggagccacagaatcatgactgttccaacgaagattacggtaagaattgctcgcatgacgaatgacgatcaatatgccaacgaagagctatactcgcttgtcaccg

SEQ ID NO: 240689 - DNA, 318 bp, Glycine max
ggttctagtgtgtgattgtttgttgttgtaactcgttcttcttcttttgttgttctgtgtatgtgtctgttttttctctcaactgaaaatgtcttgctgcggtggtaactgtggttgcggaagctcctgcaagtgcggcaacggatgcggaggctgcgagatgtacccagacttgagctacactgagtcaaccaccaccgagaccttggtcatgggagtggcacctgttaaggctcaatttgagggtgctgaaatgggtgtgcccgctgagaacgatgactgcatatgtggaccaaactgctcctgcataccctgcac

SEQ ID NO: 240690 - DNA, 387 bp, Glycine max
aaggaagcagaagtgaaagaagagaagaaggaaggggaagtgacggaagagaagaaggaagttgaagtgacggaagagaagaaggaagcggaagtgatagtagaagagaagaaggaagttgaagtgacggaagagaagaaggaagtggaagtgaccgaaggaaagaaagaagtggaagtgatcgaagagaagaaggaaacagaagtgacagaagaaaagaaagaagtggaagtagaagtgagggaagagaagaaggaaagtgaagtgaaagaagaagagaaaggtcgggaagtgaccgaagagaagaacgaagttgaagtgacggaagagaagaacgaagcggaagtgatagtagacgacaagaaggaagttgaagtgaccggagag

SEQ ID NO: 240691 - DNA, 401 bp, Glycine max
gagatcccgtcgtcgcaggcgcagagtagagcagcacagaagagggaaaacggcaccgccgccgtagaagaaaacaaccatggtgcacgtctccttttacaggaactatgggaagacattcaagaagccgcgtcgtccgtacgagaaggagcgtctcgacgcggagttgaagctggttggtgagtacgggcttcggtgcaagagagagctgtggagggtgcagtacgcgctcagccgcatccgcaacaacgcgcggaacctcctcaccctcgacgagaagaacccgcgccggatcttcgagggagaggcgctgctccgaaggatgttccgttacggtctcctcgatgagacacagaacaagcttgattacgtcctcgccctcaccgtcgagaactttctcg

SEQ ID NO: 240692 - DNA, 369 bp, Glycine max
gaatcatatatcatttcatttcttttttctcgtccatccgtaaccatgtctcagactgttgtcctcaaagttggtatgtcatgtgaaggatgtgttggagcagtgaagagagttttaggaaaattggatggtgtggaatcatatgacattgatttgaaggaacagaaggtggtactgaagggaaatgtccagccagacacagttcttgcgaccgtttccaaaactgggaagaagactaccttctgggaaggtgaaacagcagcatccgaaactagcacagcaactgcctagaacatttcgctctattatgtgcagaagaagtagctgcgtaaatcaaatactattttatggacctgaaataacgatggg

SEQ ID NO: 240693 - DNA, 376 bp, Glycine max
cacgggagagcgagctagagagagagagagagagagaaagagaagagagagaagcagcgattcatcacaatgggtaaggttcacggatctctcgcacgtgcgggtaaagtgagaggacaaactcccaaagtggcgaagcaagacaagaagaaaaagccacgcggacgcgctcacaagagaatgcaatacaaccgccgattcgtcaccgccgtggtgggattcggaaagaagcgtggaccaaactcctcggagaagtgagggaggcgtgttgaagatcatggtttttcttagtttgtgaaatgtatcacttgttttgatttgattgatgaactcaaacctttatgatagttcttattatggttcactgaaggagttt

SEQ ID NO: 240694 - DNA, 334 bp, Glycine max
ggctgacaagccaatcctttgtgtaggtgctcaaccctagtaagccgcaatggtgaagtactcaagggagcctgacaatccaactaagtcttgcaaggctagaggcgccgaccttagggttcattttaagaacacaagggaaactgcctttgcaatcacgaagttgcccttggtcaaggctaaaaggtacttggaacatgttcttgcccacaagcaggcaattccattcagacgtttttgtccaggtgttggaaggacagcccacgctaagaatagacactctaatggccaaggacggtcgcctgtcaagtcaacaaaattcattcctgatttg

SEQ ID NO: 240695 - DNA, 395 bp, Glycine max
gaaacatcatcatgtcggacgaagagcaccatttcgagtccaaggcagacgccggtgcctccaaaacctaccctcagcaagccggtaccattcgcaagaacggctacatcgtcatcaaaggacgcccctgcaaggttgtggaagtttcgacttccaaaactggaaagcacggtcacgccaagtgccactttgttggaattgatattttcactgccaagaaacttgaggatattgtgccctcttctcacaactgtgatgttcctcatgtgaatcgtactgattaccagctcattgatattgctgaggatggatttttgagtctgcttactgaaaatgggaacaccaaggatgacctcaagcttcccactgatgagagtctgctcactcagataaag

SEQ ID NO: 240696 - DNA, 374 bp, Glycine max
aggggactcactcatacaataaagaacagcttttgcttctttgtgaacatggagatgaggaaatcatgtggcttcttcgtcatgctcctcctccttgtctttgcttctcaagtggtggtgcagacggagggaagaatgtgtgagtcacaaagccacgggttccaagggttgtgtaaaagagaccacaaatgtgcgttgggctgcacgaaagaaagtgtctcccgtgtcacatgtacaagggttctcccccgcggggtttttgcaacaatattttttgatatctcatcaaacactactcttgccaagcaatttaataaatcatagctaggccaaataaattgcatctactctttatccatttgggagcctactac

SEQ ID NO: 240697 - DNA, 358 bp, Glycine max
gaaaaacaagaagaagaattggattcgaaaatcgtagcgtagcgttggtgcgattgaacgatacgatgggaagaggaaaattcaagagcaagcccactggtcgccgccagttctccaccccggaagatatgcttgctggaacctctaaccgtcctcgaacttttagacagaaagaagctgagcatgaagaggaagaacccgaggaagtatctggagatgaatctggagaagaatctgaagaagaaacttctaagaaaaaaggaacacaaggggttattgagattgaaaatcccaacttagtaaagccaaagaccttgaaagctagagatgttgatgttggaaaaacaacagaactttc

SEQ ID NO: 240698 - DNA, 297 bp, Glycine max
gagttctttgaggcacagaaggaggaaaagagcgtgttaccccagcagaggaaagatgaccagatgacagtggatgctgcattgttaaaagccattgagagtgtgccagacttgaagtcttatttgggtgccaagttttctctaaaggctggcgtgaaacctcatgagctagtcttctagaggaaagaacggtgttactcctgtatttgataacctgtttgtttattggtgttgatccttatagttgcactcatataacagtcttgttaacatacaaatgaagaacctaaaattttg

SEQ ID NO: 240699 - DNA, 364 bp, Glycine max; identical to SEQ ID NO: 239728

SEQ ID NO: 240700 - DNA, 385 bp, Glycine max
gattttcgcggcgcacagcagaactctgcttcatcggaatccgatcgcacgcgccgtcaccatggtgaacgttccgaaaacaaagaagacatactgcaagagtaaggagtgcaggaagcacacgctgcacaaggttacccaatacaagaagggtaaggatagcattgctgcccaaggaaaacgccgttatgatcgcaaacaatccggttatggtggacaaactaagcccgtcttccacaagaaggctaaaaccaccaagaagattgttctgaggttgcaatgccagcgttgcaagcatgtctcccaacacgctattaagaggtgcaagcactttgagattggtggtgacaagaacggcaagggaacatcactcctctagtttgag

SEQ ID NO: 240701 - DNA, 248 bp, Glycine max
ggaacttctcacgttcatttctacacatccctagctctgtcgttccgtcgttgacgatggcgtttcgggtgcgaagccctgacctccgctctctctttcttctctctctcttgtccatcgcttccgccaatgtcttcttcgaggagcgtttcgatgaccggtgggaaaatcgatgggttaaatcacattggagagcagatgagaacgtggctggggagtggaaccacacctctggtcaatggaatgga

SEQ ID NO: 240702 - DNA, 373 bp, Glycine max
gagtctcaacacagaagcagaaggaggagaagcagaaagaggagacgaagcaatggcgccgaagaagccccgaaccacgtcgaggaaccctgatttggtcaggggaattggcaaatattcgaggtcgcagatgtaccacaagaggggcatctgggccatcaaggccaaaaacggcggtgttttgcccctccacgatcccaagcccaaacccgaggccccggcccagaagccgcccaagttctacccggccgatgacgtgaagaagcccctcgtcaacaagcacaagcccaagcccgcgaaactcacggctagcattactccagggactgttctgatcctgcctgctgggaggttcaacggaaagacggttgtt

SEQ ID NO: 240703 - DNA, 313 bp, Glycine max
ggatcctttgtattctattcttcaagattcaggtactgcgtttcggaagcaggtaccaaagtagtccttcgagacacagatggctcgtacgaagcaaaccgctcgtaagtccacaggaggaaaggctcctaagaagcagcttgcaaccaaggctgcacgtaagtctgcaccaactactggtggtgtgaagaagccccaccgttatcgtcctggtaccgttgctcttcgtgagattaggaaataccagaagagtaccgagcttttgatccggaagctccccttccagaggctggttcgtgaaattgctcaggac

SEQ ID NO: 240704 - DNA, 317 bp, Glycine max
tgcgacattcaccattgactgcgccaagccagtggaggacaagatcatggacatcgcgtctctcgagaagttccttcaagagaggattaacgttggtggcaaggccggtgctctcgccgacaccatcaccgtcacacgtgagaagaccaaaatcatagttacttcagacagcaacttctccaaacggtatctcaagtacttgactaagaagtacttgaagaagcacaatgtgcgggactggctcagagtgattgcttctaacacagatagaagcatttatgaattgaggtacttcaacattgctgagaatgaaggag

SEQ ID NO: 240705 - DNA, 298 bp, Glycine max
gatggtggatttggggagggtgaagaggagttgtcatctgaagatggaggtggatatggcaacaattccaacaacaagagcaactcaaagaaggcacccgaaggtggcgcaggaggggcacaagagaatggggaagaggatgaagatgaagatggtgatgatcaagatgacgacgatgaggatgacgatgatgatgacgaagaggacgaggcacgtgaagaagacgatgaagatggtgctgaggatgaggagaatgaagatgacgaggaagatgaggaagcattgcagcccccaaaac

SEQ ID NO: 240706 - DNA, 369 bp, Glycine max
ggtacgcagcttcatccctaacgcgtgcatagcagagtcagagacagagacgcagccatggggcggagacctgcgaggtgttataggcaaattaagaacaagccataccccaagtcacgtttctgccgtggtgttcctgatcccaagatcaggatttatgatgttggtatgaagaagaagggtgttgatgagtttcctttctgtgtccatctggttagttgggagaaggaaaatgtttcaagtgaggccttggaagctgctcgcattgcttgcaacaagtacatggccaaatttgctggaaaggatgctttccacttgagagtcaaggtgcagccattccatgttcttacgattaacaagatgctttcg

SEQ ID NO: 240707 - DNA, 365 bp, Glycine max
ggtacgcaccttcatccctaacgcgtgcataccagagtcacagacagagacgcagccatggggcggagacctgcgaagtgttataggcaaattaagaacaagccataccccaagtcacgtttccgcccttgtgttcctgatcccaagattaagatttaagatgttggtatgaagaaggaaggtgttgatgaatttcctttccgtgtccatctggttaattgggagaaagaaaatgtttctaatgaggccctggaaactgctcgtattgcctgcaacaaatacatggccaaatttgctcgaaaagatactttccacattagagtcacggtgcacccattccatgttcttatgatcaacaagatgct

SEQ ID NO: 240708 - DNA, 304 bp, Glycine max
  unsure (1)..(304): unsure at all n locations
ggtttgattatggtttgtcattagcacttcatcttttcacactgccgctgcanaaatggcttcagagaagaaactttcgaacccagtgagggagataaaagtgcagaagctcgttctcaatatctctgttggcgagagttgagatcgtcacaacatatccgccaaggtgttggaacaacgtagtggccaaatcccagtgttttccaaagcatggtaaactgttcgttccattgggattagaataaatgacaagaatgcatgctaagtcactgtcacaagttaataggcaatgttacttttggag

SEQ ID NO: 240709 - DNA, 358 bp, Glycine max
gaatttaattagaatcgtttaatgtcaaaaaaaaaaaaaaaaaaaaaaaaaaaaaaaaaaaaaaaaaaaaaaaaaaaaaaaaaaaaaccaaaaaaaaacaaaaaaaaaaaaaaaaaaaaaaaaaaaaaccggccgcccaaaaggatcaaacctaacgtacccttccatgcaacttcaaaccccttcaaaagtgtcaccaaaatccaattcacgggccgtcctttaacaacctcctaacgggaaaaaccctgccgtaaccaaatttaaccaccttgaaaaaaacccccctttcccaaacacggcataaaaccaaaaaggccacaaccaatcccccttcccaaacaattcccaacccaaa

SEQ ID NO: 240710 - DNA, 290 bp, Glycine max
gattccattacagaagaagaagaagaagaaaagagaagaagcttcttcttggttaccttgacagacagagagtggagcaaacgacaaatcagcgagttggaacattttgtgtttggtggagatgcctattcggagcttggtagaagtggagccaccaagcccactgagatacttgatcggcgccgccgttatgatgatcggagttgtgttaccagtcggttacatgatgttccgtaacaagcgcgtcccctcctcttccctctactccaaacagacgaacaatgttttga

SEQ ID NO: 240711 - DNA, 385 bp, Glycine max
gtgtgagagagcgagcgagcgagcagtttcaaagagaggatttgggattgggaaggcgagggattgcgctgcgtctcttcctcttctctttcgattcatccctcattcataatcttccaatccaacaacctcagcctcacactcacacatacacacatctgaacgcgtatcgtccctcccatggcttcaaagcgcatcctcaaggagctcaaggacttgcagaaagacccatcaacttcttgcagcgctggtccagtatctgaggacatgttccattggcaagcaacgattatgggtcctgctgatagtccttatgctggacgtgtattcctagtcactattcactttcctccggattaacctttcaaacctcccaaggttgcct

SEQ ID NO: 240712 - DNA, 343 bp, Glycine max
ggaagttattagggtttttgagtgcggcggtccaaacactcttctctgcagcttttgcctacaactcccttcaccatggctgaacaaaccgagaaagcttttctgaagcaaccaaaagtgtttctcagcacaaagaagactgggaagggaaagagacctggaaaaggtgggaaccgcttttggaagtccattgggcttggatttaagactcccagggaagccatcgaaggaacctatattgacaagaagtgccccttcactggcaatgtttccatccgtggccgtatcttggctggaacatgtcacagtgccaagatgaacaagactattattgttagaagga

SEQ ID NO: 240713 - DNA, 371 bp, Glycine max
gacaacacaacacaacgcgcactctctctttttctctctgttttttgttctctcttcgcttaaaccctatcgttcttctcgttttcgccgattctcgccatgccgaaagctaaatccgacgccaaagccgccgatagcaggttgaagcggaagggcgctggtgctgggaggaagcaatcgaggaaagctgctaaggaccctaacaagccgaagagacctccaagcgctttcttcgttttcatgtccgagttcagagagcagttcaagaaggagcatcctaacaacaaatccgtcgctgttgtcggcaaagctggtggtgaaaaatggaaatcgctatctgatgctgaaaaggcccctttcgttgctactgc

SEQ ID NO: 240714 - DNA, 259 bp, Glycine max
gggttgcctgatgaggttaaaaaaagataaagatacaaaaaaaaaaaaaaaaagataaagatacaaaaaaaaaacaaaaaagataaggataaaaaaaaacaaaaaaaaaaaaaaaacttagaagaaaaaaaaaaaaaaaaaaaaaaaagggggccccccaaaagtgttaagtctaatttacctttgattgcaatttcaaaccccttcaaaagggcccccaaatttcatttctggggcctccttttaaaaacttcttaac

SEQ ID NO: 240715 - DNA, 329 bp, Glycine max
gctcgtctcgtggaagtgtaagcaagcaaaaccctagcggcgcctgctttctttgttcgtgttttgcatcaggatggagtctcaggtgaagcacgcacttgttgtcaaagttatgggtcgtactggatccagaggacaagtgacccaggttagagtgaagtttttggatgatcagaaccgtcacatcatgaggaatgtgaaaggacctgtgagagaaggagacattctcaccctactcgagtctgacagggaagcaagaagattgcgctagatggtctctttttttggcttgcctccaaattccaacaaaagcaatatttttcttgata

SEQ ID NO: 240716 - DNA, 285 bp, Glycine max
gacagctcttggctttagcaaattccaattcccaattcccaattcgaaacccttagtcctttcaaagaaccaaattgagtgatcgtgatggcaccaaaggcagagaagaagccagcggagaagaagcccgcggaggagaagaagtcgacggtgggagacaaggctccggcggagaagaagccaaaggccggaaagaagcttccgaaggagggaggcgccggcggagaagggaagaagaagaagagaaacaagaagagcgtggagacatacaagatctacatcttc

SEQ ID NO: 240717 - DNA, 322 bp, Glycine max
ggttctaaggggtgattgtttgttgttgtaactcgttcttcatcatttgttgttctgtgtttgtgtttgttttttctctcacctgaaaatgtcttgctgcggtggtaactgtggttgcggaagctcctgcaagtgcggcaactgctgccgaggctgcaagatgtacccaaacttgagctacactgagtcaaccaccaccgagaccttggtcatgggagtggcacctgttaaggctcaatttgagggtgctgaaatgggtgtgcccgctgagaacgatggctgcaaatgtggaccaaactgctcctgcaacccctgcacttgc

SEQ ID NO: 240718 - DNA, 367 bp, Glycine max
ccaggcgtcagacagctacaaaagggggacacaaaggggtctcgtggaagtgtaagcaagcaaaaccctaacggcgcctgctttcattgtacgtgttttgcagcaggatggagtcacatgtgaagcacgcacttgttgtcaaagttatgggtcgtactggatgtataagacaagtcgaacaggttagagtgaagtttttggacgatcagaagcctcacatcatgacgaatgtgaaaagacctgtgagagaaggatacattctcatcctacgcgagtctgaaaaggaagcacgaagattgcgctagatggtctctcttttttggcttgcctccaaattcgaacaaaatcaatatttttcttgatattt

SEQ ID NO: 240719 - DNA, 347 bp, Glycine max
gaagtcttatccattcatttcatccatccagcacgcgcacttcctttggagtctctgcctgaagatggcaagccttcagttaacaacaacacccttcactcttttgagacaacaaaggcagcaccccacaaagaagaagtccactgcttctcagctgaaccctcctcggccacgtcgcctcagagtgagtgtgaggtcctataaagtggtgattgagcacgatggagagtccactgaggtggaggttgaacctgacgagaccattctgtcaaaggcattggactctggcttgtctgtgcctcatgattgcaagcttggagtctgcatgacatgccctgctcgcctca

SEQ ID NO: 240720 - DNA, 351 bp, Glycine max
ggtggtcgtcgaagcgcgagcaagcatcccaaaaccctagctcgcgttctgctttcgtcttttacatcaggatggagtctcaggtgaagcacgcacttgttgtcaaagttatgggtcgtactggatccagaggacaagtaacccaggttagagtgaaatttttggatgatcagaaccgtcacatcatgaggaatgtgaaaggacctgtgcgagaaggagacattctcaccctactcgagtctgaaagggaagcaagaagattgcgctagatggtttcttttggcttgcctccaaattcgaacaaaacagtgtgattttgttgattttaatggtagttggtggatgtcaaaa

SEQ ID NO: 240721 - DNA, 342 bp, Glycine max
gattcctcaagaactagggtttgcagtcactgctctgtttcaccgagtttgggcgtttaggtcagaaccaaatcgtgttctcttccattggcaaacatggcaactcaaatgagcaagaagagaaagtttgttgcggacggagtgttctttgccgaactgaacgaggttctgacacgtgaattggcggaggacggttactccggcgtcgaagttagggttacgccgatgcgcaccgagatcatcatcagagccaccagaacccaagccgttctaggtgagaagggaaggagaattagggaacttacctcagtggtgcagaagaggttcaaattccccgaaaac

SEQ ID NO: 240722 - DNA, 408 bp, Glycine max
  unsure (1)..(408): unsure at all n locations
tcacggactcgatcccacgcagtaagtccgtatgcgatacaacgagacgacagggaagggacatcacantttcgattgcgcctctgtgtctctgtcactggctgcgtctctccgtaaccaaatgcgctaagcaaatccatcgagattaagggatttccnttctcaactggctagaagggaaggacgcaaggggtcggtgaagatcatagaggagcaagagatgtttggttaagttcaaggggtcagatgctcgnaagtacctcctacacaaactttgtgtgtttgaccccagagaaagctgataaattgaagcaatctcttcctccaggtttgagtgttcaagaccttgtaaagtacaaggcgagagaccaagaagaagcaattcattgattcctctgaacttcgttt

SEQ ID NO: 240723 - DNA, 374 bp, Glycine max
gaagcagagccgaagcggaacgcttgctagcgatcggcgagaagctgcttcagagccgcgatctgagcagctcgcgcgacttcgccatcctcgcccaggaagccgagccgctcctcgaaggctccgaccagatcctggccatcgtcgaagtcctcctcgccgccgagaagccaatcaccaacgaccacctcgattggtacgctattctccaggtcgatcgcacgtgccaggacctcgatctcatcaaaaaacagtaccgtagactcggtcttcttcttcaccccgacaagaaccctttctccctcgccgaccacgccttcaagctcgtctccgatgcctgggccgtgctttccgacccggtccagaaagcgatt

SEQ ID NO: 240724 - DNA, 305 bp, Glycine max
gaacagcgaaacagagagtgatttcagtgagtgatcggtgttcacttgatctcatcataatcgtcagcgtcaattgaagaagatgccgatcagaaacatcgccgtcggaaggcctgaagaggcgactcaccccgacacgttgaaggcggctttggctgagttcatctcaaccttcatcttcgtgttcgccggctcaggctccggcatcgcctacaacaagctcaccgacaacggcgctgccacccctgccggcctcatctccgcctccatcgcccatgcattcgccctcttcgtcgccgtctccg

SEQ ID NO: 240725 - DNA, 345 bp, Glycine max
ggaaagcagtgaccacggagagagagagagaggttttgacgcaacacactttcactgagaaaggatctctatctaccaaggagcagaataaaacccttctctctggtaagtgaataagagaatggcttcagatcggaaacttcacactttcgaggaggtggcaaagcacgaccagaccaaggattgctggctcatcatttctggcaaggtgtatgatgtcacccctttcatggaggatcatcccggaggtgatgaggttttgttatctgcaacagggaaagatgcaaccaatgattttgaagatgttggacacagtgattctgctagagatatgatggaaaaata

SEQ ID NO: 240726 - DNA, 320 bp, Glycine max
gtatactacggttaagttgggtaaccttgctccggaggcaactcaacttgatctccatcaccacttccattctcttggagctggagtgattgaagaagttcgtgtccagcgtgataaagggtttggttttgtgaggtacagtactcatgctgaagcagctctagccattcagatgggaaatgcccagtctcttctctgtggaaaacaaattaagtgctcttgggggaacaagcccactccagccggaactgcttcaaatctccttcccccaactgcagctgcatccttgcctggcctctctgcaactgattttttggtgt

SEQ ID NO: 240727 - DNA, 387 bp, Glycine max
  unsure (1)..(387): unsure at all n locations
ggttctagtgtgtgattgtttgttgttgtaactcgttcttcttcttttgttgttctgtgtttgtgtttgttttttctctcacctgaaaatgtcttgctgcggtggtaactgtggttgcggaagctcctgcaagtgcggcaacggctgcggaggctgcaagatgtacccagacttgagctacactgagtcaaccaccaccgagaccttggtcatgggagtggcacctgttaaggctcaatttgagggtgctgaaatgggtgtgcccgctgagaacgatggctgcaaatgtggaccaaactgctcctgcaacccctgcacttgcaagtgaagtgttgggagagcaagcttcaagcagagatagcccttaattangaataatgataaact

SEQ ID NO: 240728 - DNA, 323 bp, Glycine max
gagagtcagattcgcacgcattgcttcgcctcacaacagcagctgcagcagcaatggctcccaaacgaggtggaaaggctccggctcttgccgctaagaagaagcctgagaaggtcacgaatccgttgttcgagaagcgtccgaagcagttcggaatcggaggggcgttgcctccgaagagagacttgactaggttcgtgaagtggccaaagaatgttcaaattcagaggaataagaggattctgaagcagaggttgaaggttcccccagctttgaaccagtttaccaaaactcttgacaaaaacctagcaacaagtctgttc

SEQ ID NO: 240729 - DNA, 335 bp, Glycine max
ggttccatttctcaacaacttctgcgacttcctactccaaccgcacttctgctccgcaattatcatgggcaaggtcaagatcggaatcaacggatttggaagaattggccgtttggtagccagagtggctctgcagagaggcgatgttgaactcgttgccgttaacgaccctttcatcaccaccgattacatgacatacatgtttaaatacgacagtgttcatggacactggaagcatcacgatgtcaccgttaaggacgagaagacccttctcgtcggtgacaagccaatcactatttttggacacagaaatcctgaagaaatccaagggggtc

SEQ ID NO: 240730 - DNA, 374 bp, Glycine max
gattggacacattcttcagcgactgcgtttttggatcggaacctcttctgcggcgtagcaatgggacactccaacgtttggaactctcacccaaaaaactacggtcctggttctcgcacttgccgtgtgtgtgggaatccacatggactgatcaggaagtatggccttatgtgctgcaggcagtgcttccgtagcaatgccaaggaaattggcttcatcaagtatcgctaaaagagcagttgtcaactacggaccaatattgtgttctggcactaggatgttttgaggatgttatgtttgaagaaacttgagactttcttttttcatctaattaattatcagacgtaatttgtggtactaagaatacttttata

SEQ ID NO: 240731 - DNA, 320 bp, Glycine max
gacaacacagggcaacacaacgcgcactctctcttttctctcttaacacaaaaaccctatcgttcttcgcggtttcgccgattctcgccatgccgaaagccaaatccgacgccaaagccgccgatagccggttgaagcgcaagggcgctggtgctggaaggaagcaatcgaagaaagctgctaaggatcctaacaagccaaagagacctccaagcgctttcttcgttttcatgtccgagttcagagagcagtttaagaaggagcatcctaacaacaaatccgtcgctgttgtcggtaaagctggtggtgacaaatgggaa

SEQ ID NO: 240732 - DNA, 298 bp, Glycine max
gatccttcgaccagctggcaccacattcacctgaggcttccaaagcaatggcttcccttgcaacatccactgctgctgcttcccttggcatgtcagaaatgcttggaaaccccatcaacttcagtggtgccacaaggccagctccatctgcttctagtcctgcctccttcaagactgtggctcttttctccaaaaagaaagctacaccaacacctccaaaaaaagctgctgctgctgctcctgccaatgatcagcttgccaagtggtatggtcctgacagaaggatcttcttgcctga

SEQ ID NO: 240733 - DNA, 320 bp, Glycine max
gaacgggatgccgaaaagtactaccaagatggcttcagttgtgtatctcctctttggcttccatctcattgttatcatgtcaagttccttacccgcaactagtgaagtgtttgcaaaacagtatccatccacagaacccgtggaagaaaaactcacccaactccacttctatttccataacaacataacgggggaacacccaactgctatgaaaactgttttgcctcctaaggggtccattcacggttttggggctacttacatgatggatgaccctctaactgaaggaccaagtccaacttcaaagcttgtgggaagat

SEQ ID NO: 240734 - DNA, 318 bp, Glycine max
ggaacctgaaaatctagtttcttacaaggctctactctactgcttcaccttctgctctagaaaattcagtggtgatacatggcttcggctactctctctgtagccaaaccagcccttcaggcaaatgggaaaggcttctctgaattctctggcctccgcagctcatcaggcttccttcccttttctagaaaatcttcagaggatttccattctgtcattgccttccagacctatgcacttggaagcagtggaggatacaagaagggtgtgacataagcaaaactgaaggttgccataaacggatttggaacgattgga

SEQ ID NO: 240735 - DNA, 298 bp, Glycine max
ggatagagagcgcggcataacctaaacctatctttcttctctctctgtgtgtgcgcttcaacggcaaccagaagcagccatggccactgcaaggactgtgaaggatgtttcacctcatgagttcgttaaggcgtactcctctcacctcaagcgatccggcaagatggagctgccagagtggactgatattgtgaaaactgcaagatttaaggagttggctccttatgatcctgactggtactatgtcagagctgcttccatggcaagaaagatctacttgagaagaggacttggtgtt

SEQ ID NO: 240736 - DNA, 333 bp, Glycine max
gatagcaaaatcgtttctccaatttaatcaccattgtacaacccaaattcccttcgtcgttttcgattaagagagcaatggcacgtaccaagcaaaccgctcgcaagtccaccggaggaaaggctccgaggaagcaattggcaaccaaagccgctcgcaagtcagccccggcgaccggcggagtgaagaagccccaccgcttcaggccaggaacggtggctctgagggagattcgaaagtaccagaagagcaccgaacttctgatccgaaaactcgcattccagaggctcgtcagagaaatcgctcaggatttcaaaaccgatctccgctttc

SEQ ID NO: 240737 - DNA, 292 bp, Glycine max
gatgtttgcttactcagacataccccttgctagcaacactgagcttaatcgagcttcgcacacatgaatcaggaaaagttaatgaatatggacggttcggtcagaactggctgaaagggtagtgtgagaagaaagaagaaagctggccatacaacaacaaccacacatgacagacagcttgataccaacctgactagaataagggtgagtgccatccatgctagtgaataagtcggtatctttaatgatggcgtacttatccagttactaactcacacacttcatgcatcca

SEQ ID NO: 240738 - DNA, 381 bp, Glycine max
gcacctccgtagggtttggttattacggttttcgctcacccgtgtgcagtcgagcctctcgaagaaaaagcgaaaatgccgtcgcacaagacattcagaatcaagaagaagttggcgaagaagatgaggcagaacaggcgcatcccctactggattcgcatgaggaccgacaacaccatcacgtacaacgcgaagcgccgtcactggcgtcgcaccaagcttggattctgaggtgcttgctttgcctccattcagtttatccaattaattagtgttttattttcttgagccaaaaacaatgctttggagtttttaatattttgcattttattccaagactatattgtgtaaggaatttattggagtacgtttgacgtgggt

SEQ ID NO: 240739 - DNA, 314 bp, Glycine max
gactacaccagaaccataaccaccacgagtttctctatctgctttcttcacaaagagtaactcagtcttctaaaaactttctcaaaaccattattattctctaatctttcgtttcttcaattaattaattggtttcttgctatggctgtggactctgcgatttcgtccccattgggtcccccggcctgtgagaaggacgcaaaggcgttgcggttcatcgaagaaatgactcgcaacgccgacgccgtccaggagagagtcctggaggagattctcacacgcaacgcccagacagagtaccttaaacgcttcga

SEQ ID NO: 240740 - DNA, 333 bp, Glycine max
ggagagaaagagagagaaagatgtcgaagcgtggtcgtggtggttcggcggggaacaagttccgcatgtcgctgggtcttccagtggcggcgacggtgaactgcgccgacaacacgggggcgaagaacctctacatcatttcggtgaaagggatcaaaggccgtttgaaccgtcttccctcggcctgcgttggcgacatggtgatggccaccgtgaagaacggaaaacccgatctgaggaagaaggtcttgccagctgtcatcgttcgccagcgcaagccatggcgccgaaaggacggcgtctacatgtacttcgaagataatgctggtgtta

SEQ ID NO: 240741 - DNA, 365 bp, Glycine max
aggcatcttcttcaaattcctgtcctgaagatgacagcaaagtggtatctcattgtgtgtgttgtagcgatctgggccgttgatctgggttcatcatcacaccatgcccgtgccccagcaccagcaccgtcagtggagtgttcaaacctggtattgaccttatcggattgcctcaccttcgttagcaacggcagcaccgtcaccaagccacagggaacatgctgctcttccttgaaaactgtgctcaacacagcccctaagtgcctttgcgaggctttcaacagcagcgctcagttaggtttagccatcaatgtcaccaaggctgtcacgcttcccgctgcttgcaaactctctactccttctgc

SEQ ID NO: 240742 - DNA, 349 bp, Glycine max
ggatgcagatgcagcctatcatggcagcctactaccccaacaacgtcaccactgatcacattcaacagtacctggatgagaacaagtccttgatcctgaagattgttgaaagccagaattctggcaagctgagcgagtgtgcagagaaccaatcaaggctgcagagaaatctcatgtacctagctgcaatagctgattctcaaccccaaccatctccaatgcctggtcagtatccttctagtggacttatgcagcagggagcacactacatgcaggctcagcaggctcagcagatgtcacaacaacagctaatggcttcgcgctcctcactcttgtactcccaaaagcc

SEQ ID NO: 240743 - DNA, 338 bp, Glycine max
gatcctacgaacgctcctcacttgcagaattcaaagaaggcgtcttcataaacgcctttattctccgtttccgtttccttcccggaattcgatttttcatctctgaaaatgagtgagtgcatctcgatccacattggtcaggccggtatccaggtcggaaatgcttgctgggagctctactgtcttgagcacggcatcgggcccgatgggcaaatgccaagtgacaaaacagttggcggaggtgatgatgctttcaacactttcttcagtgagactggtgctggaaagcacgtgccacgtgccgtctttgtagatcttgagcccactgttattgatga

SEQ ID NO: 240744 - DNA, 376 bp, Glycine max
gatacctaaaaattgtaccgatatggcttcacttgtgtgtctccttttttccttgcatttcatggttatcatgtcaggttccttaccagcaaatagtgaagtgtttacaaaagagtctcctatgtctctatccacaaaacccgtggaaagactcacccaactccacttttatttccataacaacaaaatgggggaacacccgactgctatgaaaattgttgagcctcctaaggcgtccatttctggttttgggactatttacatgatggatgaccctctaaccgaaggaacaagtccaacttcaaagcttgttggaagatgtcagggaatatatgctgaggcttcgcaacatgaacctgcgatactcatggtaacg

SEQ ID NO: 240745 - DNA, 210 bp, Glycine max
gacccaatggatcctgtggattcatacatacacatttctcaagttgcgctcggagaggcgaaaaaggacaaacctaatgaacctgtggttctgtacatgaaagttggtgaacagaacattgttttgggaaccctttctagggaaggcatccctcacctatcattggatttggttcccgactccgattctgaactttcccacacttcaaaa

SEQ ID NO: 240746 - DNA, 315 bp, Glycine max
ggaatcagcaccacattcacctgagctttttgtgaggattccaaagcatggcttcccttgcagcatccactgctgctgcttcccttggcatgtcagaaatgcttggaaaccccatcaacctcagtggtgccacaaggccagctccatctgcctctagccctgcctccttcaagactgtggctcttttctccaaaaagaacgctgcacctccaaaaaaagctgcagctgctgctcctgccaatgatgagcttgccaagtggtatggtcctgacagaacgatcttcatgcctgatggtctcttggaccgatctgaga

SEQ ID NO: 240747 - DNA, 321 bp, Glycine max
gacgcattgcttcgcctcacaacagcagctgcagcagcaatggctcccaaacgaggtggaaaggctccggctcttgccgctaagaagaagcctgagaaggtcacgaatccgttgttcgagaagcgtccgaagcagttcggaatcggaggggcgttgcctccgaagagagacttgactaggttcgtgaagtggccaaagaatgttcaaattcagaggaagaagaggattctgaagcagaggttgaaggttcccccagctttgaaccagtttaccaaaactcttgacaaaaacctagcaacaagtctgttcaagttgcttctg

SEQ ID NO: 240748 - DNA, 322 bp, Glycine max
ggagtcagattcgcacgcattgcttcgcctcacaacagcagctgcagcagcaatggctcccaaacgaggtggaaaggctccggctcttgccgctaagaagaagcctgagaaggtcacgaatccgttgttcgagaagcgtccgaagcagttcggaatcggaggggcgttgcctccgaagagagacttgactaggttcgtgaagtggccaaagaatgttcaaattcagaggaagaagaggattctgaagcagaggttgaaggttcccccagctttgaaccagtttaccaaaactcttgacaaaaacctagcaacaagtctgttc

SEQ ID NO: 240749 - DNA, 374 bp, Glycine max
ggacctatcaagttaatttgcgtctatattcattttggcatcgaggttgaatctcatcggagagagaaaaaccataaccatgtctggaagaggaaagggaggcaagggtctcggaaagggaggagcgaaacgacaccgtaaggttctgagggataacattcagggcataacgaagcccgcaattcgccgtctcgcgagacgtggcggcgtgaagcgtatcagtggtctcatctacgaagaaactcgcggtgttctcaagatcttcctcgagaacgtcattcgcgacgctgtcacctacactgagcacgctcgccgcaagaccgtcactgccatggacgttgtttacgccctcaagaggcaaggcaagaccctct

SEQ ID NO: 240750 - DNA, 365 bp, Glycine max
aggggattcacttgcggctgcagcagagaagcactcatcattcttcgtttgtctaagatccgccttctctgaattgtaaaaatgtcgctcggagaaactgcttgttcatacgcagctctcatccttcatgaagatggaatcagtgtaactgccgacaagatcagcaccttgttggaaactgcaaaggttcaagtagatacctattggccaaccttatttgctaaacttgctgagaagaaaaatcttggcgatttgatagccaatgcagcaggcggtggtgcaccagttgctgttgcagctgcccctgttgctgcctcaggtggtggtggtgctgctgctgccgcccaactgctgaagagaaaaag

SEQ ID NO: 240751 - DNA, 340 bp, Glycine max
gaaatccaagctcgggaacagagaaggagaaagagaatggacgccattgattctgtgttcgatccgttgagagaattcgcaaaggacagcgtgaggctcgtgaagcgctgccacaaacccgatcgcaaagaattctccaaggttgccgtgcgtaccgcaattggtttcgttgtgatgggattcgtgggtttcttcgtgaagcttattttcattccaattaacaacatcattgtcggatctggttaggatgaagggtactacaatcgcctcaggaattcaggttgtcaagcaaaagtaggcagaaagagttcccacatcaatagatcattttatgccctca

SEQ ID NO: 240752 - DNA, 321 bp, Glycine max
gccaccctaacatttgatccccgaactaccaattcagacataagcaagcaaaagaagcacactcttgaccctgcttctccagattttcttcctcttccttcacttgaacagtgctttccaaagagcaccaaagaacacagggaagtcactcatgaagaaactggtcatgtgctcaaagttccctttcgtcgagttcaactgtctggggaagcaggacactttgatacctatgacactagcggtccccacaatgtaaacccaatgacaggactccgaaaattgcgctgacggtgggttgataggagggataaactgggttat

SEQ ID NO: 240753 - DNA, 341 bp, Glycine max
gggtcacaaagagatgtattgtagaactgagcaatggtttctctttctcattcgcagtctgcttcttcaatttcacgcgtttcagtcaagcatgatcatgggcagaaaattcttcgtcggtggcaattggaattgcaatgggaccactgatgaggtgaagaagattgttaatactttagatgaagctaaagtcgctgaagaagatgttgtacatgttgttgtgagccctccttttgtgtaccttccttttgtaaatagtttgctgcatcctgatttccatgtcacggcccaaaattgttgggttcgcaaatgtggcacttacactggagacgttattgctg

SEQ ID NO: 240754 - DNA, 354 bp, Glycine max
agtccaggcgtcagacggctgcgaaaggacgataaaaagggatatttctaactccgagcacttccatatcttatcttctccgcctccagctttgaggttctcacggaaacttctgaagattgctggcatagcattcggaagcttcagggattctttcagtttggcctccatcaaggcctacattgctgagttcatctcaacccttctctttgtttgttgctggtgtaggttcagccatagcctatgctaagttgatatcagatgcagctcttgatccaactgggttggtagcagttgccatttgccatggttttgctcacttcgatgctggttctgttggagccaacatttctg

SEQ ID NO: 240755 - DNA, 338 bp, Glycine max
tccgtttttacgttatttcgcactgtattgtacaattcctttatttgtgggatttatttctcacacgataattcattaaattatagaatggatttttacctatgcctagatctcggataaatgaaaattttattgataaaaccttttcaattgtagccaatatcttattacgaataattccgacaacttcgggagaaaaaagggcattcacttattacagagatggtgcgatttgattctatttttttaccgaaatcggtaaaaagtggaaaaaacccacgcttgctgaaggtgaaatttgtaaatataaaggattaattccttctgtcgtgtatcct

SEQ ID NO: 240756 - DNA, 378 bp, Glycine max
ggctgtgagtgagacaccgatagatagagagcgcggcataacctaaacctatctttcttctctctctgtgtgtgcgcttcaacggcaaccagaagcagccatggccactgcaaggactgtgaaggatgtttcacctcatgagttcgttaaggcgtactcctctcacctcaagcgatccggcaagatggagctgccagagtggactgatattgtgaaaactgcaagatttaaggagttggctccttatgatcctgactggtactatgtcagagctgcttccatggcaagaaagatctacttgagaggaggacttggtgttggtgcctttcagaggatttatggtgggagcaagaagaatggtaatccccctcctcaatt

SEQ ID NO: 240757 - DNA, 380 bp, Glycine max
  unsure (1)..(380): unsure at all n locations
gactcaccacttcaaaacactcataacacaaagcacaaagcaaagctcatccttgagttaaaaaatggcagcagcttcttccatggctctctcatccccatccttggctggcaaggccgtgaagctgggcccatcagccccagaagtgggaagggtgagcatgaggaagaccgtcaccaagcaggtctcctcaggaagcccatggtacggcccagaccgagtcaagtacttgggcccattctctggcgagcccccgtcctacctaaccggtgagttcccaggcgactacggctgggacactgctgggctttccgcnagaccagaaaccttcgccaagaaccgtgaactcgaagtgattcactcaaggtgggccatgctcg

SEQ ID NO: 240758 - DNA, 322 bp, Glycine max
ggaagtaagggatcgagcctcggaggagggaatcgcagcgaagtccactatgccgaagcaaattcacgagattaaggacttcctcctcactgctaggaggaaggatgcacgctctgtgaaaatcaagcggagcaaggatgtggtgaagttcaaggtccgttgctccaagtacctttacaccctctgtgtgtttgattctgagaaggctgataagttgaagcaatcacttcctccaggtttaagcgtgcaggatgtgtgattcttactgctgtatgaagatcaggtttttctctggattttggggattcatagttagtaaaat

SEQ ID NO: 240759 - DNA, 303 bp, Glycine max
gaaggttttgcgctgttgttgctgctcatcctccgtaacctccgagctctgcaccgaagaacgaagccatggggaagacacatggaatgggatctgctcgcaagctcaagtcccaccgcaggaggcaaaggtgggctgacaagtcatacaagaaatcacatcttggaaatgaatgggagaaaccttttgctggttcatcccatgccaagggaattgtccttgaaaagataggtattgaggctaagcagcccaactctgccattcgtaagtgtgccaaggttcaacttatcaagaatgggaaga

SEQ ID NO: 240760 - DNA, 342 bp, Glycine max
ggctgacaagccaatcctttgtgtaggtgctcaaccctagtaagccgcaatggtgaagtactcaagggagcctgacaatccaactaagtcttgcaaggctagaggcgccgaccttagggttcattttaagaacacaagggaaactgcctttgcaatcaggaagttgcccttggtcaaggctaaaaggtacttggaagatgttcttgcccacaagcaggcaattccattcagacgtttttgtcgaggtgttggaaggacagcccaggctaagaatagacactctaatggccaaggacggtggcctgtcaagtcagcaaaattcattcttgatttgctcaaaaa

SEQ ID NO: 240761 - DNA, 105 bp, Glycine max
cgggaccacttcaaaacactcataacacaaagcacaaagcaaagctcatccttgagttaaaaaatggcagcagcttcttccaagggtctctcatccccaaccttg

SEQ ID NO: 240762 - DNA, 334 bp, Glycine max
gacttcacaactcaaactgcttcattgcataattgcagataagatcaacccttctaccttcagattcgcgggaagatggcatcacttcatgctaatgtgacatcagttgtttacaacagtggcaaccgtgtttctcaatcgaaatttgcaagctcttccttcttgtctgggttcgatgttgttggtcgtgcttcaagtgcttggaagaaggaacttgtcccatcttccatttccttggtgcctagagccaccctaacatttgatcccccaactaccaattcagacataaccaagcaaaagaagcacactcttgaacctgcttctccagattttc

SEQ ID NO: 240763 - DNA, 266 bp, Glycine max
actggcaaacaattttgaatatgtcatgtatgggaagctctacaggataacagagggttcacggcgtgaaaaagcggagatgaatatttcatttggtgggcttctgatgatgctcaagggacatacctctcattgcaacaagtttgaactggatcagacgttgtatcttctgataaggaaagtctgaaaattgtatgtaaaaaataaatatgaagatgtgaagccttgttgcagcaaaaagacagcagctatttccatcttcatgt

SEQ ID NO: 240764 - DNA, 288 bp, Glycine max
gatagagaaagaagagggggacacagcgtcctagatttccgcgtcgctgcttcggaagaaagagaagacaaacaaaacaatggcgttcgcttctttcctcgggagagtcctcgtcgcttctgtctgcaggctctcggcttaccaagaatttaatgaatatggagttgatgggggacctgctacaggagcaggcagaccgaagtttgatgcctttagacatcgggtgcattctcaagtgggcgttcaaattccagagattaatctgaaatttttaattgctggggctat

SEQ ID NO: 240765 - DNA, 281 bp, Glycine max
cggggcgtacacagcctcaacaaccctaacgcgtgcagagcagacagagacgcaggcatggggcgaagacccgcgaggtgttataggcaaattaagaacaaaccatgccccaagtcacggttttgccggtgtgtgccggatcccaagatcaggatttacgatgttcggatgaagaagaagggtgttgatgagtttcctttctgtgtccatctggttagttgggagaaggaaaacgtttcgagtgaggcccgggaagctgctcgtattgcttgcaacaagta

SEQ ID NO: 240766 - DNA, 337 bp, Glycine max
gaaacagagagtgatttcagtgagtgatcggtgttcacttgatctcatcataatcgtcagcgtcaattgaagaagatgccgatcagaaacatcgccgtcggaaggcctgaagaggcgactcaccccgacacgttgaaggcggctttggctgagttcatctcaaccttcatcttcgtgttcgccggctcaggctccggcatcgcctacaacaagctcaccgacaacggcgctgccacccctgccggcctcatctccgcctccatcgcccatgcattcgccctcttcgtcgccgtctccgtcggcgccaacatctccggcggccacgtcaaccccgccg

SEQ ID NO: 240767 - DNA, 381 bp, Glycine max
ggacgaagagaaaagacagtgaattgcggtttcaattcaacccacttcatctcaggtgtttgaagttgagataaaatgagtggaacagagaaagcaggatcaggaaccacgaaaacccctgccgattttctcaaatccattcgtgggaggccggttgttgtcaagctcaattctggtgttgattacagaggtatacttgcttgtctagatggctatatgaatattgcaatggagcagacagaggaatacgtcaatggacaattgaagaacaagtatggtgacgccttcatccgaaggaataatgttccaaacattagtacctccaagaggacccctaccaaagggggcttaaaaagtaaaggaatccgaatttttgggttt

SEQ ID NO: 240768 - DNA, 347 bp, Glycine max
gacaacacaacgcaacacaacgcgcactctctcttttctctcttaacacaaaaaccctatcgttcttcgcggtttcgccgattctcgccatgccgaaagccaaatccgacgccaaagccgccgatagccggttgaagcgcaagggcgctggtgctggaaggaagcaatcgaagaaagctgctaaggatcctaacaagccaaagagacctccaagcgctttcttcgttttcatgtccgagttcagagagcagtttaagaaggagcatcctaacaacaaatccgtcgctgttgtcggtaaagctggtggtgacaaatggaaatcgctgtctgatgctgaaaaaggcccc

SEQ ID NO: 240769 - DNA, 317 bp, Glycine max
ggcggttctgcctgcaaattttcttcccctcaatcgtatattgctcaggtggtgttcctgttcccccccaagcacccctgagattcgttcgcaaaaagcttaataagaacaaaaaatagaaataatagtcttcgttagtaggtcatttcaatttcgttttcgttttcgttttctgttttgatttgatcttccaatggcgtccgatggctttaccgacaagaacaccgtgttcagaaagctcaaggcgaagtctgaaaataagatgtgtttcgattgcaatgcgaagaaccctacctgggcgtccgttacgtatggga

SEQ ID NO: 240770 - DNA, 287 bp, Glycine max
  unsure (1)..(287): unsure at all n locations
gggttttccacattcatattttccttgcgtttccctttcattttccctcacgttctcgctcgccaaacgcgcctctctctcctccaatggccgaccagctcaccgacgaccagatcgccgagttgaacganggcttcagcctcttcgacaaggacggcgatggttgtattactacgaaggaacttgggactgtgatgcggtcactaggggcagaacccaactgaggcagaactgcaggatatgagtaatgaggttgatgctgatggcaatggaaccatcgacttccc

SEQ ID NO: 240771 - DNA, 213 bp, Glycine max
  unsure (1)..(213): unsure at all n locations
cgggggtctgagagaaaccctagctagccacaatgcagagattcgtgaaaaccctaacggggaagacgatgaccctagaggtagagtcagcggacacagtcgacaatggtgaaggggaanatcgaggacaacgacggcatcccgccggaccaggagcgcctgatcggcgccggtaagcagctggacgagggccgcacgctcggggacgacaac

SEQ ID NO: 240772 - DNA, 319 bp, Glycine max
gatccaacaaccgttcacaaatctttttctaagtgtagtagaagagaggaaccgcgccaaccctctcttcttcttcttcttcaatccttttacaacatttatagtttcattcttaatcgttgggaaaaatgttcatcgagaattttaaggtagagagtcctaatgtgaagtacaccgggactgacattcagtccgtgtacaactacgaaaccaccgaacttgttcacgagaacaggaatggcacctatcagtggattgtcaaacccaaatccgtcaactaccaatttaaaaccaagcaccatgttccaaaattgggggt

SEQ ID NO: 240773 - DNA, 316 bp, Glycine max
ggctgccgctctctgagaaaaacagatagtgtgggagagagaagaacggaagagaaaatgacgaccaggttcaagaagaacaggaacaagagaggtcacgtcagcgccggacacggccgtatcggaaagcaccgcaagcatcccggaggtcgcggtaacgccggtggcatgcatcaccaccgtatcctcttcgacaagtaccatcctgggtttcttcgggaaggtaggcatgcgctacttccacaaacttcgcaacaaattctacaatccgatcatcaacatcgacaagctgtggtccctcctccccaggaggcca

SEQ ID NO: 240774 - DNA, 361 bp, Glycine max
gattcctcaagaactagggtttgcagtcactgctctgtttcaccgagtttgggcgtttagatcagaaccaaatcgtgttctcttccattggcaaacatggcaactcaaatgagcaagaagagaaagtttgttgcggacggagtgttctttgccgaactgaacgaggttctgacacgtgaattggcggaggacggttactccggcgtcgaagttagggttacgccgatgcgcaccgagatcatcatcagagccaccagaacccaagccgttctaggtgagaagggaaggagaattagggaacttacctcagtggtgcagaagaggttcaaattccccgaaaacagcgtcgagctttatgctg

SEQ ID NO: 240775 - DNA, 300 bp, Glycine max
ggatccttcgacactaactagagccgagcagcgagagagagaagccctagcagaaatgccggctggtcacggtttgagatcccgcaccagagattccttcgctcgtcgcttcaggaagaagggtagcatcggcggcagcacatacctcaggaacctaccacgtcggcgagtatgtcggcatcagcgttaacggcgccgtccacaagggaatgcgtcacaagttctagcatggccgcaccggtcgcgtctggaatgtcaccaaacgtgctgttggggtcgaagtcaacaagcgaggcggca

SEQ ID NO: 240776 - DNA, 365 bp, Glycine max
acacagaccaatattcattcatttagattcatcaaaagcttataacaacaattaaacatgagtgcagccagcagagcttggattgtggcatcaagcattggagcagtggaggcattgaaggatcaattgggggtgtgcaggtggaaccatgcattgaggtcactgcagcagcatgccaagagcaacattagatcctacactcaggccaaaaccttgtcttctgctacttctgctgctgtctccaataaggtcaagaggaccaaggaggagtccatgaggaaagtcatggacttgagctgttggggtcccaatacttcaaggttttagtgtgtggaccattccaaatgcattcatcattgtgctgc

SEQ ID NO: 240777 - DNA, 337 bp, Glycine max
gattcactcactcacttcagtgtcattttttcttattctcttcctctctctctactctgagacacaaaggaaaattataagaaattatggctggttattcaaaagcttcagctctttggatcctttttcttctctttggcttctctgtagctaaggaaattttggttggaggtaagactgatgcatggaaggtttcagcctctgaatcagattcactcaaccaatgggcagaaaagtctcgtttccaagttggagactatcttgtttggaaatatgatggtggaaaagactcagtgttgcaagtgagcaaagagaactatgtgaattgcagaatctc

SEQ ID NO: 240778 - DNA, 358 bp, Glycine max
ggtttcactcggatcgcgcattcacaaataaggttgaagaggtcactgccggaagaagggagcaacaccatctttcattttccggcgatctcttgtttcttccatcatcaccgttttccggcgatccctaatcctcgcaaacagaaatgacgacatcaaggcgccttgcggacaggaaggtggagaagtttgagaagaacatcacaaaaagaggatttgtgccagacactaccactaagaagggaaaagactaccctgttggcccagtgctgctcggtttctccgtctttgttgtcattggatcatctctcttccagataatcaggacagcaaccagtggaggcatggcttaaatgga

SEQ ID NO: 240779 - DNA, 242 bp, Glycine max
cggataagctttgctaaacatagtaatatcgacctttcgtcgtaaaaagccattttcagttgatgatgaacttaattttccataacagtctcagtgacagtccttcaaaccatacaaggctttattaactttgagaacatgatgagggtatatacaactctcaaacgcagggatttgtccgacatagacctcttccttgattagtcgattgaggaaagccttttttacctccagttgagaca

SEQ ID NO: 240780 - DNA, 266 bp, Glycine max
tgggcaccgcttgagcagacttaacaacagcacagagcgggttactgtctgttcaggctaccatctctctctctctttcttagtgcctccttgccagaagttcgaatgggtgatgaaacttgcctatgcacatctgagtcggtgaacgatggggggtctgacaagctctgtgaccagatctcggagtcggtgctcgatgcatgcttggagcacgaccctgacagcaacgttgcctgtgaaacctgcaccaataccaacatggtgat

SEQ ID NO: 240781 - DNA, 291 bp, Glycine max
ggaacgtctcacgttcagttctagacatcgcgagctctggtcgtgccgtcgtgtgcgagggggtttcgggtgcgaagccctggacctccgctctctcgttcttctcgctcgcgtgtccatcgcttccgcgagggtcggcggcggagaacgtttcgataacgggtgggaaaatcgatgggttggatcagattggcaggaagataggagctgctggggagtggaaccacacctctggtcaatggaatggggacgctggtgacaaaggtattcaaaccagtgaggattacagat

SEQ ID NO: 240782 - DNA, 336 bp, Glycine max
ggttccatttctcaacaacttctgctacttcctactccaaccgcacttctgctccgcaattatcatgggcaaggtcaagatcggaatcaacggatctggaagaattggccgtttggtagccagagtggctctgcagagagacgatgttgaactcgttgccgttaacgaccctttcatcaccaccgattacatgacatacatgtttaaatacgacagtgttcatggacactggaagcatcacgatgtcaccgttaaggacgagaagacccttctcttcggtgacaagccagtcactatttttggacacagaaaccctgaagagatcccatgggggtc

SEQ ID NO: 240783 - DNA, 287 bp, Glycine max
gagggtttggttattagggttttcgctcaccggtgtgcagtcgagcccccgaagaaaaagcgaaaatgccgtcgcacaagacattcagaatcaagaagaagttggcgaagaagatgaggcagaacaggcctatcccctactggatccgcatgaggaccgacaacaccatcaggtataacgcgaagcgccgtcactggcgtcgcaccaagcttggattctgaggtgcttgctttgcctcggttccgtttatccaattaattagtgtcttagtttcttgagccaaaaac

SEQ ID NO: 240784 - DNA, 350 bp, Glycine max
gacatttttcttttcttttctttttctctgaaagatctgtgactattattattattattattatttctgatttttgtgggaaaatggctgactgggcaccggtgttgatcggggtggtgctgttcgtgctgctccaaccggggctgcttttttcctttccgggaaacgggaagcagctagagtttgggagcatgaagaccaacggcaaggccattttcatccacactctcatcttcttcgccctctactccatcctcatcctcgccgttaaagtccacatctacaccggctgaaccggttcccgggcgggatctcacgtatcaattggttttgttactgagaaattaaag

SEQ ID NO: 240785 - DNA, 264 bp, Glycine max
ggtgtgtagtagaggattctctgtctggatgccttttgtgagttcagtcattcttaatctttgtgaaggagaatgttcatcgagaattttaagggtgacgtgcggagggggaagtacgccgagactgagattcagtgcgtatacggcgaggagaccaccgaacttgtgcacgagaacaggaatggcacctatcagtggattgtcaaacccaaatctgtcagggaggaatttaaaaccaacatccatgttcctaaattaggggta

SEQ ID NO: 240786 - DNA, 296 bp, Glycine max
aggggttagaagaaaggttctaacggaaccaaaggcaacaaaggtgcccaaaagaagaagttaatccttccggctggttcaacaagggaagttggttacaataaatgttgggttcctttccgtactcctgtgtcctcctttctaagtaacttgtttttcggacaaaatttgaaatctccaacatcatctctcaactgttgttcccaaaactgggttcttgatataacgtggcaaacatgcttttaattatctgtgttttaaaatgttttgtttgtccgaacccctgattacaattt

SEQ ID NO: 240787 - DNA, 296 bp, Glycine max
gacttctcttcacacctttgttcactcttcttctcttgcggctatggttttagcgcaacttcttctatatttaaggaacatcggtaaggaaaaggttcacagcagtattgttgtcattggccatgtccactctgggaaatccagtaccactggtcacctgatttacaagcttggaggcattgacatgcgtgttattgagacgtttgagaacgaagctgctgagatgaacacgatgtcattcaagtatgcctgggtgctggacaaacttaaggctgagcgtgaaagaggaatcacca

SEQ ID NO: 240788 - DNA, 273 bp, Glycine max
  unsure (1)..(273): unsure at all n locations
ggcgtacacagcctcaacaaccctaacgcgtgcagagcagagagagacgcagccatggggcgaagacccgcgaggtgttatangcaaattaagaacaaaccataccccaagtcacggttttgccgtggtgttcctgatcccaagatcaggatttacgatgttggtatgaagaagaagggtgttgatgagtttcctttctgtgtccatctggttagttgggagaaggaaaacgtttctaatgaggcccctgaagctgctcgtattgcttgcaac

SEQ ID NO: 240789 - DNA, 339 bp, Glycine max
ggtgctctgctcgtgcctctagggttatcatttctccatttccattttctctctcacttttcaagaatcgtaagctatgggaaagtcttacccaactgtgagtgctgattaccagaaggccgttgagaaggcgaagaagaagctcagaggcttcatcgctgagaagagatgcgctcctctaatgctccgtttggcatggcactctgctggaacctttgacaagggcacgaagaccggtgaacccttcggaaccatcaagcaccctgccgaactggctcacagcgccaacaacggtcttgacatcgctgttaagcttttggagccactcaaaggggagtt

SEQ ID NO: 240790 - DNA, 360 bp, Glycine max
gaacgcagccaagaaaagaaaatcctcacccattttcttcgtagccaaacactctgaaattctcagttatgtcgtggcaagcgtatgtggatgatcacctactgtgtgaaatcgaaggtaaccacctcactcacgccgctatcatcggccaagacggaagcgtttgggctcagagcaccaacttccctcagttcaaacctgaggaaataactgccatcaataatgactttaatgagcctggatcacttgctccaactggattgtatatcggtggcaccaaatacatggtcatccaaggtgagcctggtgctgtcattcgagggaaaaagggtcctggtggtgttactgtgaagaagaccg

SEQ ID NO: 240791 - DNA, 335 bp, Glycine max
ggtgagttgagtcagtgatgataatgatgaagatgaagtgttccatgtggatgtgggttgtccatgtggccaatgctggtgccctttaagtcctaaaatccatccgcaggactgcatattgatggctctatgaatccaaattgggtgtgaaccagtactctttgccaccaggtgacatgggatggcccttcattggcaacatgtgagtcctttcacagtgctttcaaatccagggaacctgattccgtcatctcctcctttgtctccatattttgaagaactggaatgtatactaccatcatgttatggaatccaagtatcattgtgagaacacc

SEQ ID NO: 240792 - DNA, 330 bp, Glycine max
ggaaggaagggagggaagaatagaatgggatctggaagtggaaaacacactggagggttcttcaggagaacggatgcatggaggaagcatccgatgctcaccaatcagctccgccaggccacccctggccttggcatcgccgtcgtcgccttcggtatctacctcgtcggcgaacaagtctacaataggctctatgctcccgagtctcattcgatttctcacgtgaaagccggggatcaccagtaaacgtttggacggacgcactccattccatcatcacttagtaagcttgctagcatgttctcgcagcctttaatgtttaaatttcag

SEQ ID NO: 240793 - DNA, 354 bp, Glycine max
ggccattgttgttgctattatcatccgcagctgcttttattcgcaccgcaaacagtgagccatggccgtcggaaagaacaagcgcatctccaaggggaagaagggtggcaagaagaacgcagctgatccctttgccaagaaggattggtatgacattaacgctccttctgtttttcaagtgaaaaatgttggcaaaaccctcgtctctcgtactcagggtaccaagattgcttctgaaggactcaagcatagagtgtttgaggtctccttggctgatcttcaaggggatgaggatcatgcattcaagaaaattacgttgagagctgaagatgtccaagggaaaaatgttctgac

SEQ ID NO: 240794 - DNA, 268 bp, Glycine max
  unsure (1)..(268): unsure at all n locations
gagtacagaaaacgcagttctcaccatttccctctcgattgtgagacttgttgttgttaactgaacttttctgagcaagaatgtctgggcgtggaaagggaggcaagggtttgggaaagggaggagcgaaacgacaccgtaaggtgctgcgcgataacattcagggaatcaccaagcccgcgattcggcgtttggctcgtangggtggcgtgaagcgtatcagtggtctcatctaccacgagacacgttgcgtgctcaagatcttttt

SEQ ID NO: 240795 - DNA, 334 bp, Glycine max
  unsure (1)..(334): unsure at all n locations
gaacatgccgaaaagtagtaccaagatggcttcagttgtgtatctcctctttggcttccatctcattgttatcatgtcaagttccttacccgcaactagtgaagtgtttgcaaaacagtatccatccacagaacccgtggaagaaaaactcacccaactccacttctatttccataacaacataacgggggaacacccaactgctatgaaaactgttttgcctcctaaggggtccattcatggttttggggctactttcatgnatggatgacctctaactgaaggaccaagtccaacttcaaagcttgtgggaagattcaaggaatatacgctt

SEQ ID NO: 240796 - DNA, 185 bp, Glycine max
atcatcaaatgcttttcaaaaaaaaaaaaaaaaaaaaaaaaaaaacagccgccccacaagatgatcccatcctaactcctccttgatacgacatcacacctctacaatatcgtcaactatcatctcatcagtggtcgtcttataacaacgtcattactaagaaaatcctgttattaaacataata

SEQ ID NO: 240797 - DNA, 314 bp, Glycine max
ggggaaaatttgtcaaataaattcatctaaccccaaacaaaaccctagcacacttttatcgcttagtggcagcagcagtggcggcaagcaactccatccgcaatgggaatcgatttgaaggcaggaggtaagtccaagaagaccaagcgaaccgcccccaaatccgatgatatctacctcaagcttctcgtcaagctgtaccgttttcttgttcggaggactgggagtaacttcaatgctgttgtcctcaagcgccttttcatgagcaaggtcaacaagcccccgctatccctctctagattgatccgttacac

SEQ ID NO: 240798 - DNA, 285 bp, Glycine max
gatcgtagcgccagactgagaggaagagagagggagattctttgtttgctaccttctctcggaaaaatggttacgttcaggtttcaccagtaccaggtggttgggagggctcttcccacggaagcagatcagcaccccaagatctaccgaatgaagctctgggccaccaacgaggttcgcgccaagtctaagttctggtattttttgaggaagctgaagaaggtgaagaagagcaatggtcaagttcttgctatcaacgagatttttgagaagaacccaaccaag

SEQ ID NO: 240799 - DNA, 331 bp, Glycine max
gatagctgagagagaaaggaaaggttaactaagaagcaatacttcaatggccacccttgttgttcataaccaaacttcttctgctcaagatgctgaggctctccaacaggctttcaaaggatggggggctgatgacaaggccattatagcaatactgggtcacagaaatgttcatcagaggcaagaaatcagaaaagcttatgaggagatttaccaagaggatctcatcaaacgccttgagtccgagatctctggtgactttgagagagctatgtaccggtggatgttgcagcctgcggatcgtgatgctgttttggtgaatgtggcaatc

SEQ ID NO: 240800 - DNA, 330 bp, Glycine max
gattcattccccttatctttctctcttctctctccccgcccaaaccctaactccctaccctattccgctttctctcatccatcatgaaaggaggaaagtccaagaccgaatctaagagagccgatgccaaacttgctgtgaataagaagggcgccgccaccaagactaggaaacccgccggaaaggggaaggcagcgaaagatcctaacaagccaaagaggcctccaagtgctttcttcgttttcatggaggaattcaggaaggtgttcaacaaggaacatcccgacaacaaagcagtgtctgctgtgggcaaagctgctggagcaaaat

SEQ ID NO: 240801 - DNA, 476 bp, Glycine max
  unsure (1)..(476): unsure at all n locations
ggcaacgtcctgcacacacgtacgggtaagtaattccgggcgncacccacgcgtaagcacacgcgtccgtacggctgcgagaagacgacagaagggcatatatcccttttgtagtaattattagaatttgtagtaattattataagtattagaagcagcaattcttatttatttcagattaatacctgataacctaaacaatatatctatatatagaatatagatagatatatatataatagaacgtacaagaaaaagtcaaaaatgctcaaaaaaagcggtcgctctataggatccaagcttacttacgcgtgcaagcgacgtcatagctcttctaaagtgtcacctaaattcaattcactggccgtcgttttacaaagtcttgactgggaaaaccctgcggttacccaacttaaacgcccttgaaacaaaaccccgcttttcccaaacgggggtaaataccgaaaaaaggcccc

SEQ ID NO: 240802 - DNA, 340 bp, Glycine max
gaggtttttagggtttacaccgaggagacacaccttcagcagcagcagccatggttctcaaaaccgaactatgccgattcagcggtgccaagatctacccagggaaaggcatcagatttgttcgtggtgattctcaggttttcctgtttgctaactcgaaatgtaagaggtatttccacaacaggttgaagccatcaaagctcacctggactgcaatgtacagaaagcaacacaagaaggacattgctcaagaagctgtgaagaaaagaagacgtgctgccaaaaagccttactccaggtccattgtcggtgccactttggaagttatccagaaaaagag

SEQ ID NO: 240803 - DNA, 379 bp, Glycine max
aaccaagccttcaaacggtggcaaaaagacaacagaaggggataaacaacatcggtggtctggggcatatgctaaaacagatgtcagacatggatactgtagagaacagcattagaggcaatggcgagatatccgagaaagaagagcaccaacaccataccagtaagacggagcatcgacgaggaggcatcagaaccttacccttcatccttgcaaatgaattgtgtgatagatttgcgagctctggttttcatgcaaacatgataagctacctcactcagcagctgaacatgccattggtatctgcctcagtcacgctcaccaactttaatggaacttctagcttcactcctctctttggagctctcattgctgactc

SEQ ID NO: 240804 - DNA, 271 bp, Glycine max
ggtatttcatttcatttccctccccccactcccaccgccaacgccaaacaaaccctaaatctctctcgtcttcttcttcttcttcctccttcaaccatgagagagatcctgcacgttcagggaggccaatgcggtaaccaaatcggttccaagttctgggaggtgatatgcgacgagcacggcatcgatcctaccggaaagtacaacgacgaaggcaacagcggcatccaactcgagaggatcaatgtctattacaatgaggcctctggcg

SEQ ID NO: 240805 - DNA, 311 bp, Glycine max
gtgaattaagtaaatcaatggatagtcttggtcctattgaaaataccagtctaagggaagaccctaaaattttaaccgatatagaaaaaaaaattcacagggatttggattatttagaaatggaaggttttttttctagcgatctgaatactgtttctaagaatgatgatgatcattacatgtatgagactcaatttagttttaacaataatattactagtttcattgatagttgcattgagagtttcaatttaggtgatattgacaaatacaatgatatttatttttatagttacatttttttgaagggc

SEQ ID NO: 240806 - DNA, 376 bp, Glycine max
agacgacagaaggggattgttggcttgtgctctgctcgtgcctctagggttatcatatctccatttccatttcctctctctcagtttccaagaatcttaagctatgggaaagtcttacccaaccgtgagcgctgattaccagaaggccgttgagaaggcgaagaagaagctcagaggcttcatcgctgagaagagatgcgctcctctaatgctccgtttggcatggcactctgctggaacttacgacgtgagctcgaagaccggtggtcccttcggaaccataaagcacccctccgaactcgctcacggcgctaacaacggtcttgacatcgctgttaagcttttggagccactcaaagccgaatttcctaatttg

SEQ ID NO: 240807 - DNA, 346 bp, Glycine max
ggcccaaattttttcatagcattttcagaggaacaatggcgggtagggtttcgacgtgcttcttcttcgtgtttgctctttctctccttcttccttttcagatctccgctgaggaatcatcggagaaagagttcgtactcacattggatcactctaactttcacgacactgtcagcaagcacgatttcatcgtcgtcgagttctacgctccatggtgtggccactgtaagaagcttgctcccgagtatgagaaagctgcttctatcttgagtagtcatgatcctccggttgttttggctaaaattgatgccaatgaggagaagaacaaagaccttgcatctcaata

SEQ ID NO: 240808 - DNA, 322 bp, Glycine max
gacaacacagactcacacaaagagttacaagagaaatcatcatggcatcagcagcatctgggtttgtgttgtcacttaatgttgcagctgccaccacaaactcaagggtggtcatgttcaacaccaagaacaacacttctaggtttgttgtaaaggcttcagatgagcctgcagcggcggcacccgccaccgccacacccccagctgaagctgaagctaaaccaaagccaccacctattggccccaagagaggtgctaaggtgaagattcttaggaaggaatcttactggtacaaaggcaccggttcagtggttgctgttga

SEQ ID NO: 240809 - DNA, 309 bp, Glycine max
  unsure (1)..(309): unsure at all n locations
ggtggttcttgtttgcgagatagaagcgtaagcagcggctaccctaacctcgtcttcctctctactaatttcagctatggccgacgaagctgtggttgttccagatcccacccagatcgatgtcaagctctttaaccgctggagcttcgaggatattgaggttactgacatttcactggctgattacattggagttgcggcatccaagcacgccacatatgttcctcacaccgccggaaggtactccgtgaagcggttcaagaaggcgcagtgccccattgttgaaaggctcancaactctctcatgat

SEQ ID NO: 240810 - DNA, 305 bp, Glycine max
ggcagcgcttgagaccaagccccactcaaccaccacaccactctctctgctcttcttctacctttcaagtttttaaagtattaagatggcagagacattcctatttacctcagagtcagtgaacgagggacaccctgacaagctctgcgaccaaatctccgatgctgtcctcgacgcttgccttgaacaggacccagacagcaaggttgcctgcgaaacatgcaccaagaccaacttggtcatggtcttcggagagatcaccaccaaggccaacgttgactacgagaagatcgtgcgtgacacct

SEQ ID NO: 240811 - DNA, 122 bp, Glycine max
gaagaagggttcgtagacagcccgaaagaaggtcctctcttcgtattctatagaaagacgaaatagcgtaagagaagaaagtagaaaggatttggattcgaggcttgctaggtgaagtcaac

SEQ ID NO: 240812 - DNA, 276 bp, Glycine max
gatagcaaaatcgtttctccaatttaatcaccattgtacaacccaattcccttcgtcgttttcgattaagagagcaatggcacgtaccaagcaaaccgctcgcaagtccaccggaggaaaggctccgaggaagcaattggcaaccaaagccgctcgcaagtcagccccggcgaccggcggagtgaagaagccccaccgcttcaggccaggaacggtggctctgaaggagattccaaagtaccagaagagcaccgaacttccgattcgaaaactccc

SEQ ID NO: 240813 - DNA, 318 bp, Glycine max; identical to SEQ ID NO: 239438

SEQ ID NO: 240814 - DNA, 329 bp, Glycine max
gacatctctctatcttctcaatcttcatctccaacaagtgtttctgtaaccatggcatccaccactctatcccctacaaccccttctcagctatgctcaggaaagagtgggattttcagtccctcacaggcacttcttgtgaagccagtgaagaggcagatgatggggaagagcaagggaatgagaattgcatgccaagccaccagcattcctgctgatagagtccctgacatgggcaaaagacagctcatgaatctgcttcttcttggtgccatttcactcccctctgctggaatgcttattccctacacctacttttttgtccctcc

SEQ ID NO: 240815 - DNA, 328 bp, Glycine max
gagatctgctgcttctcattgttgaaaagaaaccctagcaagtggagcaatggcagacgttgaagtcgatgtggcggcagcagcagcagcagggctgccgaagaagagaacgttcaagaagttcagttttcgaggcgtggatctcgatgcacttctcgacatgtccaccgatgaactcgtcaagatgttcagtgcccgcgctcgtagaaggttccagagaggcctcaccagaaagcccatggccttgatcaagaagctccgtaaagcgaaaagggaagctccaccaggtgagaagccagaaccagtacgcacccacctccgcaacatg

SEQ ID NO: 240816 - DNA, 336 bp, Glycine max
ggttgtgtgagtgaagaagcagagggagtagcggcattaaaaatgtagatcttcgtgaaaactctgacagggaagactataaccctcgaggtcgagagcagcgacaccatcgacaatgtcaaggccaagattcaagacaaggaaggcattcctccggatcagcagcgtttgattttcgccggaaagcagcttgaagatggaaggaccctggccgattacaacatccagaaggaatcaacccttcatctcgtcctcaggcttcgtggtggcatcattgagccttccctcatggctttggctcgcaaatacaaccatgacaagatgatttgccgcaag

SEQ ID NO: 240817 - DNA, 337 bp, Glycine max
ggcagtgtgtgctactttccattcgttcaccgccccaatctctgcagcgccttcgatctagaaaacatgactaagagaacaaagaaggctggcattgttggaaaatacggtacccgttatggtgccagtctgcgaaagcagattaagaagatggaagttagtcagcacagcaaatttttctgtgaattttgtgggaagtatgctgtgaagaggaaagctgtaggaatatggggatgcaaggactgtggtaaagtgaaagcaggcggtgcttatactttgaataccgcaagtgctgtgacggtacggagcaccatcaggaagttgaaggaacaaactg

SEQ ID NO: 240818 - DNA, 300 bp, Glycine max
gacaaacagcagcgtcttggtttgtgagagagacagaggcacagagagaaaatggtttcggggtcaggaatctgcgcgaagagggtagttgtggacgcgcggcaccacatgctggggaggctggcatcgatcgtggcgaaggaacttctgaatgggcagaaggtggtggtggtgcgctgcgaggagatttgcatctccggtgggctcgtcaggcagaagatgaagtacttgcgtttcctccgcaagcgcatgaacaccaagccctctcacggccccatccatttccgtgcacccggcaag

SEQ ID NO: 240819 - DNA, 309 bp, Glycine max
gacgttcacattcaggaatcgttttcttcagaaatttgccatcgttgagagaagcgtgagagccttagtcgttcaagatgagagctaagtggaagaagaagcgcatgaggaggttgaagaggaagcgccgaaagatgagacaaagatctaagtaggtgcttgagcaggagttgagatgagctttccatctgctaccagcctcatgacattttaggctgttatggctcttatgatcttgaggtctagtcgctaggggagcttcactcttgacttagtttgctttactggtcctggtcctggtccaagact

SEQ ID NO: 240820 - DNA, 271 bp, Glycine max
gacaccgcaaactctctctgtaaagtgcaaagcctctattttttcttgtgaatttgaaggacgatgagttccacagaggtcgcagccacaacgaagaagggtggaagagggaaacccaagaccacaaagtccgtttcccgttcctccaaagccggccttcagttccccgtcggccgcgtcgctcgctacctcaaggccggtcgctatgcccagcgcgttggttccggttcccctgtttacctatctgcggttctcgaataccttgccgctg

SEQ ID NO: 240821 - DNA, 356 bp, Glycine max
gattctcccacaacacaacaccttttccttttcccttccgttggtgccattcgtgcagcaccggatcctctcatttctccggcgataactctcccttttccggcgaattcaccgcttcctcgatatgaatcccgagtatgactatctgttcaagctccttctgattggagactctggtgttggtaaatcatgccttcttctaagatttgctgatgattcatacattgagagctacataagcaccatcggagttgattttaaaattcgcactgttgagcaggatgggaagacaattaaactacagatttgggatactgctggacaagaacgatttaagacaataactagtaactact

SEQ ID NO: 240822 - DNA, 307 bp, Glycine max
gactcatctcttacaacgaaaccctcttcatcttgttctatctgtgacgagcatcatggcctcaagagcagtgttattgttggctatgtgtgtgcttccggcgatggttgtggccattcgcccagcaaagaaccctttttgcgtgaagggtcgtgtctactgtgacccttgccgtgctggttttgagacctcagctaccacctacattgctggtgctgagattatgttgcaatgcaagagcagggttagcaacgaggttgtgtacacgaagaaggggtacaccgactcaaccggagcatacacaatg

SEQ ID NO: 240823 - DNA, 320 bp, Glycine max
gactcactcatacaatagagaccagcttttgcttctttgtgaacatggagatgaggaaatcatgtggcttcttcttcttgctcctcctccttgtctttgcttcccaagtggtggtgcagacagagggaagagtgtgtgagtcacaaagccacgggttccatggtttgtgtaatagagaccacaactgtgctttggtctgcaggaacgaaggtttctccggtggcaggtgcaaaggcttccgccgccgctgcttttgcaccaggatttgttgagatctcatcaaacactactcttgccatgcaaattaataaatcatagct

SEQ ID NO: 240824 - DNA, 301 bp, Glycine max
gatgccgaaaagtagtaccaagatggcttcagttgtgtatctcctctttggcttccatctcattgttatcatgtcaagttccttacccgcaactagtgaagtgtttgcaaaacagtatccatccacagaacccgtggaagaaaaactcacccaactccacttctatttccataacaacataacgggggaacacccaactgctatgaaaactgttttgcctcctaaggggtccattcatggttttggggctacttacatgatggatgaccctctaactgaaggaccaagtccaacttcaaag

SEQ ID NO: 240825 - DNA, 307 bp, Glycine max
gggcatagcaaaatcgtttctccaatttaatcgccattgtacaacccaattcccttcgtcgttttcgattaagagagcaatggcacgtaccaagcaaaccgctcgcaagtccaccggaggaaaggctccgaggaagcaattggcaaccaaagccgctcgcaagtcagccccggcgaccggcggagtgaagaagccccaccgcttcaggccaggaacggtggctctgagggagattcgaaagtaccagaagagcaccgaacttctgatccgaaaactcccattccagaggctcgtcagagaaatcgct

SEQ ID NO: 240826 - DNA, 335 bp, Glycine max
gacacgcattcctcgattggaagactggcctgttatgcccgtggaacgcattggtttcatgcttatgccgcatgggtttttcaattgctcgcctgctgtagatgttccacctaacccaagtgatttggatgacaaagagaatggcttgccagccaagcctattcagaatgggctaattgccaagctttgaaaggataaaaaatgaggatctgccactttacgtggttatgttcaaattattaaattttcaatactattgtttgggctggtgttcaaaccttagctggataattaagaaacgcctatattgtagaaaaaaaaaaaggtgcaagaag

SEQ ID NO: 240827 - DNA, 314 bp, Glycine max
gaattccaatatattccattctctctgtgtatttccctacctctcccttcaagatgcagatcttcgtcaagaccctcaccggcaagaccatcacccttgaggtggaaagctctgacaccatcgacaacgtcaaggccaagatccaggacaaggaaggaatccccccggaccagcaacgtctcattttcgccggaaagcaacttgaggacggccgtacccttgctgactacaacattcagaaggagagtactcttcacctcgtcctccgtctccgtggtggcatgcagatcttcgttaagacactcaccggcaag

SEQ ID NO: 240828 - DNA, 240 bp, Glycine max
gcacttcaattgcaatcaaattagttcattctctttgcgcagttccctacctctcctttcaagatgcagatcttcgtcaagaccctcaccggaaagaccatcacccttgaggtggaaagctctgacaccatcgacaacgtcaaggccaagatccaggacaaggaaggaattccccggattagcaacgtctcatcttcgccggaaagcagctcgaggacgggcggtacctcgccgactaca

SEQ ID NO: 240829 - DNA, 259 bp, Glycine max
  unsure (1)..(259): unsure at all n locations
gtctgatttccttatcgcaattaangaatacgtangagcaanggaaacaccctcgtcgaccgcaaaaaaaaaaaaaaaaaaaaaaaaaaaaaaaaaaaaaaaaaaaaaaaaaaaaaaaaaaaaaaaaaaaaaaaaaaaaaaaaaaaaagaaaaaaaaaaaaaaaaaaaaaaaaaaaaaagggccccccaaaaggatcaaacctaacttacccttgaatgcaacttaaaaccccttcaaaaatgtcaccaaaattaaatt

SEQ ID NO: 240830 - DNA, 342 bp, Glycine max
gcacaccaagtcctgctcttcttccagagcaacaacaaacaaaccctttctttctggcttcagtttttgcagtgaaaatggcggtgactttaacatcaaccctctttatggctttgctatttgctgcttcagcttttgctgctcttcagcctagagtacctgaagcttaccttcaaaatggaaactttgaggagcagccaaaccccaaaaacctccagaaaacaaagctcatggggaaatattctttgcccaaatgggaagtcaatggtctggttgagtatgtctctgggggtccccaacctggaggcatgttcttcccagtgactcatggaatccatgctg

SEQ ID NO: 240831 - DNA, 289 bp, Glycine max
ggtcaagcctgccgagaaaaccctagttcgcttgcagtcacacaagaggccaatcctattcacagctcgagatgggtgaagaagtgaaggtagttgttccagaatcagtgttgaagaagcgcaagagggaggaggaatgggcgttggccaagaagcaagaactcgatgctgccaagaagaagagagccgagagccgcaaactcatctacaacagagctaagcagtacgctaaggagtacgatcaccaggagaaggaattgattcggttgaaacgcgaggccaagctgaa

SEQ ID NO: 240832 - DNA, 298 bp, Glycine max
  unsure (1)..(298): unsure at all n locations
gctcttcacacctttgttcactcttcttctcttgcggctagggttttagcgcagcttcttctagatttaaggaagatgggtaaggaaaaggttcacatcagtattgtggtcattggccatgtcgactctgggaaatccactaccactggtcacctgatttacaagcttggaggcattgacaagcgtgttattgagaggtttgagaaggaagctgctgagatgaacaagaggtctttcaagtatgcctgngtgctggacaaacttaaggctgagcgttaaagaggaatcaccattgata

SEQ ID NO: 240833 - DNA, 310 bp, Glycine max
ggccattgttgttgctattatcatccgcagctgcttttattcgcaccgcaaacagtgagccatggccgtcggaaagaacaagcgcatctccaaggggaagaagggtggcaagaagaaggcagctgatccctttgccaagaaggattggtatgacattaaggctccttctgtttttcaagtgaaaaatgttggcaaaaccctcgtctctcgtactcagggtaccaagattgcttctgaaggactcaagcatagagtgtttgaggtctccttggctgatcttcaaggggatgaggatcatgcattcaagaag

SEQ ID NO: 240834 - DNA, 275 bp, Glycine max
gaaaatagagaaaacacaaaaagttctgttctttttcccacccaattcagttttctcaaatggctcgtacgaagcaaacggctcgcaagtccaccggcggcaaggcgccacgtaagcagctggccaccaaggcggctcgtaagtctgctccggctaccggcggcgtgaagaagccgcacagattccgtccgggaaccgtaacgctccgcgagatccggaagtaccaagaagagcacggaacttctgatcgggaagctcccgttccagcgattggt

SEQ ID NO: 240835 - DNA, 318 bp, Glycine max
gaaaaccgagtgagtgtgagcgttaactacaacgcaatggtttacataacttcgtgggatgaattcgtggagcgatccgttcagttgttccgtgccgatcctgattctacgcggtatgtgatgaagtaccggcattgtgatggcaagttggtactcaaggtcactgataataggcagtgtctgaagtataagacagaccaagcacaagaagccaagaagatggtaaaactcactaatatattctttactttgatggctcggggaccagaagtggatccatcagaagtcactgggaaagaaccactggatacacatacg

SEQ ID NO: 240836 - DNA, 307 bp, Glycine max
ggatccttctacactaactaaagccgagcagcgagagagagaaaccctagcaaaaatgccggctggtcacggtttgagatcccgcaccagagattccttctctcgtcccttcaggaagaagggtaccatcgccctcaccacatacctcagaacctaccacgtcggcgattatgtcgacgtcaaggttaacggcgccgtccacaagggaatgcctcacaagttctaccatggccgcaccggtcgcgtctggaatgtcaccaaacgtgctgttggggtcgaagtcaacaagcaagtcggcaacagaatc

SEQ ID NO: 240837 - DNA, 314 bp, Glycine max
ggcgaaacagagagtgatttcagtgagtgatcggtgttcacttgatctcatcataatcgtcagcgtcaattgaagaagatgccgatcagaaacatcgccgtcggaaggcctgaagaggcgactcaccccgacacgttgaaggcggctttggctgagttcatctcaaccttcatcttcgtgttcgccggctcaggctccggcatcgcctacaacaagctcaccgacaacggcgctgccacccctgccggcctcatctccgcctccatcgcccatgcattcgccctcgtcgtcgccgtctccgtcggcgccaacat

SEQ ID NO: 240838 - DNA, 364 bp, Glycine max
gaccgccgttctcatctctcttcccagccctcacctcaacgctgcatcttcacgtcgtctcacgaggtgcatatagtagagagggaaaatgagtcgaggaggcgcagtagcagcagcgaagggaaagaagaagggtgctacattcaccattgactgtgcaaagccagtggaagataagatcatggacattgcttctctcgaaaagtttcttcaagagaggatcaaggttggtggcaaagctggtgctcttggtgacagtatcactgttacccgcgagaagaccaagatcattgtcacctctgacagtaacttttccaaacggtatttgaagtacttgacgaagaagtacttggaagaacacaat

SEQ ID NO: 240839 - DNA, 320 bp, Glycine max
gagcgaaacagagagtggtttcagtgagtgatcggtgttcacttgatccttcataagtcgtcatcatcatcatcatcatcaccgttgattgaagaagatgccgatcagaaacatcgccatcggaaggcctgaagaggctactcaccccgacacgttgaaggcggggttggctgagttcatctccaccttgatcttcgtgttcgccggttcaggttccggcatcgcctacaacaagctcaccgacaacggcgccgccactcccgccggcctcatctccgcttccatcgcccatgctttcgccctcttcgtcgccgtctccg

SEQ ID NO: 240840 - DNA, 338 bp, Glycine max
ggccgttttcttcttcatcatagtcgtggccgtgtcgcagcaaaaccaaaccacatattaacttgtttgctctaagtcatggctctgatcttgcacgcaaccaaagcaaacaagaatgctttcaagactctgattgcggcagagtacagtggcgtccaagtggaattggcccctaatttcgagatgggtgtctctaatagaactcctgaattccttaaaatgaatcccataggaaaggttcctgtcttggaaacgcccgatggtccagtctttgagagcaatgccattgctcgttacgttgctcgactcaagggtgacaacgctttgttctcatcttc

SEQ ID NO: 240841 - DNA, 341 bp, Glycine max
gaccgtgcgctagttctgagtattctgatcgctccctgagagagctcgtcgcggcggttgcagaagaagattgcaagatgaagttcaacatcgcgaatcccaccactggatgccagaagaagctcgagatcgacgacgatctgaaactgcgagcattttgggacaagaggatctcacaggaggtcatcggagatgcactcggtgaggaatttaagggctatgtcttcaaaattaccggaggttgtgacaaacaaggatttccaatgaagcagggagtgctgactcctggtcgtgttagacttttgcttcacaggggaactccttgcttccgtggatatgga

SEQ ID NO: 240842 - DNA, 322 bp, Glycine max
gatgaaattgacttctttgggttcggcggtaccctacacttagttgttgtgttgctgtgcacccggtgagcggtgacctcttccgctttgatcttcttctgtccaggctggttacttgggtcaaagatttctggcatctctgtcatggcaactagacttcagtttgagaataattgtgaagttggagtcttctcaaaacttaccaatgcctattgtttggttgctattggaggttccgaaaacttctacagtgcatttgaggctgagttagcagatgttatccctgtggtcaagacctccattggtggcactcgtattgttg

SEQ ID NO: 240843 - DNA, 386 bp, Glycine max
  unsure (1)..(386): unsure at all n locations
aattcgccgctcgacccactcaataacggtgccaaaagaacaacagaaggggatccaaattcaatttcgcaccaaattttcctcccaaaatgtcaggccttggaaaaggtgggaagggtttgggaaagggaggagctaagaggcacagaaaggttcttcgtgacaacattcaaggaatcacgaaacctgcgattcgtaggttagcgagaagaggtggcgtgaagaggatcagtggtttgatttacgaggaaaccagaggagttctgaagatattcttggagaacgtgattcgcgatgctgtaacctacactgagcacgctaggaggaaaactgttactgctatggatgtcgtttatgctctcaagagacanggaaggaccctctat

SEQ ID NO: 240844 - DNA, 388 bp, Glycine max
gaccacaccgagtcgcagaaaaagaaaaaagcgatcatagtttcacttcggccttatccagtttagggtttcggttctctaccctatctttcacgtatcgaaaccttaaatttacgatcaggtctgagcaatctggttggtagaacctttggtcttagtgagtcaagttttatgtctgaattagacgatcaaattcctactgccttcgatccttttgctgatgcaaatgctgatgactcgggtgctgggtcaaaggagtatgtgcatattcgtgtacagcagcgaaatggtaggaaaagcctgacaaccgttcagggattgaaaaaggaattcagctataacaagatacttaaagacgtcaagaaagagttctgttgcaatggaacag

SEQ ID NO: 240845 - DNA, 151 bp, Glycine max
taccggtgccaaaagaccaccgaaaggtaccggttccagaagaccacagaaagataccggtgccaaaagaccacagaaaggtaccggtgccaaaagaccaccgaaagggtaacggttccggataccacccgaagggaattcttttcctccc

SEQ ID NO: 240846 - DNA, 333 bp, Glycine max
gacacagaacaaaaacaaagaaaaaaaaaaacccttagccaacacaaccatcatggccacctctgctattcagcaatcagcattcactggtcaaactgctctgaagcagctcaatgagttcgtccgcaagaccggtggcgccggcaaaggtcgcactaacatgcgccgcaccgtcaagagtgctcctcagagcatttggtatggccctgaccgtcccaagtacttgggtccattctcggagcagattccatcatacctgaccggagaattccctggtgactacggatgggacactgctggattatcagctgacccggaaaccttcgccaggaa

SEQ ID NO: 240847 - DNA, 283 bp, Glycine max
agggctatagctcagttaggtagagcacctcgtttacacgagcgccaatgtttttttcagaggagtttcatcttgtaatcaaaagagtttatcttatagtaagaaatcgatgtcttactccattttaaggaacaaaacaagagaacaatagcctgacaaagggtttagccataaaatcgaatccatcattgatttgagatattgataaggtgaatactcatttctcgtcaatgctaagcataatgcgggtataaggacctaaaaaagattatcttttcttcct

SEQ ID NO: 240848 - DNA, 365 bp, Glycine max
gagagtggtggagtgtgcaaaagagcgtcgtagtcgcaaccctaatcagaagaagcgcagcttcaagcgagtgacagccaccagccatgggtcgtatgcacagccgcggtaagggtatatcctcttctgctttgccctacaaaaggacacctcctagctggctcaagatctcttcgcaagatgtcgaagaaaatatctgcaagtttgcgaagaaaggtttgaccccgtctcagattggtgtcattctcagagattctcacggtattgctcaggtcaatagcgtcactggcagcaaaatccttcgcatcctcaaagctcacggacttgcgcctgaaattccagaggacctgtaccatttgattaag

SEQ ID NO: 240849 - DNA, 370 bp, Glycine max
gatgccgaaaagtagtaccaagatggcttcagttgtgtatctcctctttggcttccatctcattgttatcatgtcaagttccttacccgcaactagtgaagtgtttgcaaaacagtatccatccacagaacccgtggaagaaaaactcacccaactccacttctatttccataacaacataacgggggaacacccaactgctatgaaaactgttttgcctcctaaggggtccattcatggttttggggctacttacatgatggatgaccctctaactgaaggaccaagtccaacttcaaagcttgtgggaagatctcagggaatatacgctttggcttcacaacatgagcctgggttgctcatggtgaca

SEQ ID NO: 240850 - DNA, 342 bp, Glycine max
ggggttttctccttcttctcctccctctgcctgcagcggtgcaacctatcagcctccaaatccaatggcttcagagaagaaactgtcgaacccaatgagggagatgaaggtgcagaagctcgttctcaatatctctgttggagagagtggagatcgtctcaccagagccgccaaggtgttggaacagcttagtggccaaaccccagtgttttccaaagcaaggtacactgttcgttcctttgggattagaagaaatgagaagattgcatgctatgtcactgtcagaggtgacaaggcgatgcaacttttggagagtggtttgaaggtgaaggaatatgaact

SEQ ID NO: 240851 - DNA, 336 bp, Glycine max
ggtgccccatatcttccaccctttggctattcctaaccattgagtacaacttcacattttagaagaataccccctcttttgctgcatcagaggagttgtaaattaagagcatggctgcacaagctcttgtatcatcatcttctcttaccttctcagcggaggctgcaagacaaagtcttggaccaagatcactccaatctccatttggcttctccagaaaagcctcctttcttgttaaggcagctgctaccccccctgtcaagcaaggatcagacagacctttgtggtttgcatcaaagcaaagtctttcttacttggatggcagccttccgggtg

SEQ ID NO: 240852 - DNA, 322 bp, Glycine max
ggaacctttgcattctattcattcaagattcagcaagtgcgttttggaagcagagaccgaaatacttcgagatggcccgtacaaagcaaactgctcgtaagtcaactggaggaaaagctcccaggaagcagcttgcaaccaaggctgcacgtaagtctgcaccaacaactggtggtgtgaagaagcctcatcgttatcgccctggaactgttgctcttcgtgagattaggaaataccagaagagcactgagctcctaatcaggaagcttcctttccagaggttggttcgtgaaattgcccaggatttcaagactgatctgcg

SEQ ID NO: 240853 - DNA, 324 bp, Glycine max
gattcacacaactaactaagaaagtcttccatagccccccaaaaatgaagagcaccatcttctttgctctctttctcttttgtgccttcaccacctcatacctaccttcagccatcgctgatttcgtgctcgataatgaaggtaaccctcttgaaaatggtggcacatattatatcttgtcagacataacagcatttggtggaataagagcagccccaacgggaaatgaaagatgccctctcactgtggtgcaatctcgcaatgagctcgacaaagggattggaacaatcatctcgttcccatatcgaatccgttttatcgccg

SEQ ID NO: 240854 - DNA, 361 bp, Glycine max
gagcgaaacagagagtgatttcagtgagtgatcggtgttcacttgatctcatcataatcgtcagcgtcaattgaagaagatgccgatcagaaacatcgccgtcggaaggcctgaagaggcgactcaccccgacacgttgaaggcggctttggctgagttcatctcaaccttcatcttcgtgttcgccggctcaggctccggcatcgcctacaacaagctcaccgacaacggcgctgccacccctgccggcctcatctccgcctccatcgcccatgcattcgccctcttcgtcgccgtctccgtcggcgccaacatctccggcggccacggtcaaccccgccgtcaccttcggcgccttcgt

SEQ ID NO: 240855 - DNA, 379 bp, Glycine max
gacccccaaactctgcatcggaagaaaccctagccactctcccggcgtcacgatgcagatcttcgtgaaaaccctaacgggtaaaacgatcacgttggaggtggagtcttcggacaccatcgacaacgtgaaggccaagatccaggacaaggaaggcatccctccggaccagcagcgcctcatcttcgccgggaagcagctggaggacggccgcaccctcgccgactacaacatccagaaggagtccacgcttcacctcgtcctccgcctccgtggcggcgccaagaagcgcaagaagaagacctacaccaagcccaagaagattaagcacaagcacaagaaggtcaagctcggcattcttcagttctacaaggtcgac

SEQ ID NO: 240856 - DNA, 372 bp, Glycine max
gataacagacctaatcaatcagtcatacgaatttccagaatacaaattcacactctctttggctctggtgttgtgttgtgttgaggtacttgagaagagaaaatggtgtcgtcgcaggttgtgaatacgtacccgttgtcgagctacacgttcggcacgaaggagcccaagatggagaaggatacctccgtcgcggatcgtctcgctcgcatgaaagtcaactatatgaaggagggaatgaggaccagtgtggaaggaattttactggtacaagagcacaatcatcctcatatacttcttctgcaaattggaaacacattctgcaaactcccaggtggtcgtctcaaaccaggagagaatgaaaatgagggc

SEQ ID NO: 240857 - DNA, 321 bp, Glycine max
  unsure (1)..(321): unsure at all n locations
ggctccgccatttttcgtagctgctgttcttgcgcgtgaacaagcctcagccaaaaccatggttaagcataacaatgttatcccaaacggacacttccgtaagcactggcagaactatgtgaagacttggttcaatcagccagcacggaagacaaggagacgattggctcgtcagaagaaagctgtgaagatattccccagacctacggctggacctctcaggcccattgtacatggtcaaactttgaaatacaacatgaaagtgagaggtggaaggggattttctcttgaagaactcaaggcagcanggattcccaaaaa

SEQ ID NO: 240858 - DNA, 369 bp, Glycine max
agaccacgcgtccgagccactctgtcttctctgcagcaactatgcctaaccctaaggtcttcttcgacatgaccatcggcggtcaatctgctggccgcatcgtgatggagctctacgccgacgtcactccccgcaccgccgagaacttccgcgcgctttgcaccggcgagaagggcgtagggcggagcggcaagcccctccactacaagggctcgtccttccaccgcgtgatcccgagtttcatgtgtcagggtggcgacttcaccgccggaaacggaaccggcggcgagtcgatttatggcgccaagttcgccgacgagaacttcgtgaagaagcacaccggtcccggcatcctctccatggcgaacg

SEQ ID NO: 240859 - DNA, 222 bp, Glycine max
ggcccttctagctttttcccagtccaagcagcctccaattcgtgccactctcttcaaaatggccgttaccttctcaaatctccacacagaatcaggtctcaagtccctcgacgacttcctctctgggaaggtctacgtttctggggatcagttcacaaaggacgacatcaaagtgtatggtgctgttttggagaagccaagtgactcttttcccaatgctgc

SEQ ID NO: 240860 - DNA, 386 bp, Glycine max
gatgccgaaaagtagtaccaagatggcttcagttgtgtatctcctctttggcttccatctcattgttatcatgtcaagttccttacccgcaactagtgaagtgtttgcaaaacagtatccatccacagaacccgtggaagaaaaactcacccaactccacttctatttccataacaacataacgggggaacacccaactgctatgaaaactgttttgcctcctaaggggtccattcatggttttggggctacttacatgatggatgaccctctaactgaaggaccaagtccaacttcaaagcttgtgggaagatctcagggaatatacgctttggcttcacaacatgagcctgggttgctcatggtgacaaaatttctcttcactt

SEQ ID NO: 240861 - DNA, 261 bp, Glycine max
ggcacttgccatgcgttttacaatttacatcacatttcgttgcgcctttgatctctgtccccgctgcgtctctcgtaatcatgcctaagcaaatccacgagattaaggatttccttctcactgccagaaggaaggatgcgaggtcagtgaagatcaagaggagcagagatgtggttaagttcaaggtcagatgctccaagtacctctacacactttgtgtgtttgacccagagaaagctgataaattgaagcaatctcttc

SEQ ID NO: 240862 - DNA, 470 bp, Glycine max
gcgattctcgtagcggccaggtaccggataggaattcccggctcgacccacgcgtcagacggctgcgagaagacgacagaaggggggtcgtatttaaataagaatttcttttccttttttcttagtttctatcgaaaaaaaaaagattcgatagaaactaagaaaataaacaaattgattcgccgagaaagaggagagagagggattcgaaccctcgatagttctttgttccgaactataccggttttcaagaccggggctatcaaccactcagccatctctccaaaagctaatttatattttatctttattccactgaatagaacatgagcatataaatggataccctttatattatctatctttatattatctataaagggtaaagatatccgatgtgaatctatttgtttagttttctatcggtaagtaaaaaaggtaataatcccacaaggctttttggtaaattg

SEQ ID NO: 240863 - DNA, 303 bp, Glycine max
gagcgccaatgtttttttcagaggagtttcatcttgtaatcaaaagagtttatcttatagtaagaaatcgatgtcttactccattttaaggaacaaaacaagagaacaatagcctgacaaagggtttagccataaaatcgaatccatcattgatttgagatattgataaggtgaatactcatttctcgtcaatgctaggcataatgcgggtatagggacctaaaaaagattatcttttcttcctatcttatgaactttaaggtgtatgaagtgtcatttcctatcttagattttaattttagt

SEQ ID NO: 240864 - DNA, 315 bp, Glycine max
gctctctcaatcacttcacgcacactgtcacaggtgtagcggcgaaactgaggtcgtagaaagaatggcgaaaacgacgtcgttgttgctctttacactgctcctcttcggaaccttagctctcatccaggcgaagaaatcgaaggaggatttgaaggaagtgacccacaaggtttactttgatgttgagattaatggaaaagaagcaagtcgtattgtgatgggtctttttggaaaggctgttccaaaaactgcagaaaactttcgagctctttgcactggggaaaagggaactggtaaaagtggcaagcctct

SEQ ID NO: 240865 - DNA, 355 bp, Glycine max
ggtttaggttttcttagtcagacttaccccttgctaccaacactgagcttaaccgagcttcgcaaagatgaatcgggaaaagttaatgaagatggccggttcggttagaactggaggaaagggtactgtgagaagaaagaagaaggctgtccacaagacaacaaccacagatgacaaaaggcttcagagcaccctgaagagaataggggtgaatgccatccctgctattgaagaggtcaatatctttaaggatgacgtagttatccagtttctaaatcccaaagttcaagcatccattgctgctaatacttgggttgtcagtggttcaccgcaaacaaagaagttgcaggatata

SEQ ID NO: 240866 - DNA, 333 bp, Glycine max
gaaggatcagcagggagaattaggtttttagggtttacaccgagcagccacacctcccgcagcagccatggttctcaaaactgaactatgccgattcagtggtgccaagatctacccaggaaagggcatcagatttgttcgtggtgattctcaggttttcctgtttgcaaactcaaaatgtaagaggtatttccacaatcgcctgaagccttcaaagctcacctggactgcaatgtacagaaagcaacacaaaaaggacattgctcaagaagctgtgaggaagaggagacgtgctgccaaaaagccttactctaggtccattgttggtgcgac

SEQ ID NO: 240867 - DNA, 364 bp, Glycine max
ggaggtagccagagagtgatacaatacagagtgcgttgttgctccttcgccacaactccctgccaacatgggtatctccagagattctatgcacaagaggcgtgccactggtggcaagaagaaggcatggaggaagaagagaaagtatgagcttggtcgccagcctgctaacactaagctgtcaagcaacaagacagtcaggaggatccgggttagaggtggaaatgtgaagtggagggcactgagattggatactggaaattactcctggggaagtgaagctgtaactcgcaagactcgtatactagatgtggtttacaatgcctcaaacaacgagcttgtgcgtactcagactcttgtaaaa

SEQ ID NO: 240868 - DNA, 352 bp, Glycine max
gaaacccatctctctttcatccctccaatcttcatcctgtgaaaaccgcgaacgaatcaacaaatgggtggttgcgtgttgaagctagtagattccgttctgttcctgttcttcctcctaatagcggtggtggctcctctgatcgacgctcaaacctgtcttcctctctcttacttccccgacatcatcgtccaactcaaggaacagtacaccaatgattactgcgattaccttgtcgcagaaaatccgcacttttttgtacgccttgtttggcttgagcttctcttccaatggccccttgcactcctcaacctctacaccatgctcacttccaggccttggttcaacaaca

SEQ ID NO: 240869 - DNA, 334 bp, Glycine max
gatctggcagcagaagaacaagtagttgagaactaagaaggagaagcaaatggcttcctcaatgatctcttccccagctgttaccactgtcaaccgtgccggtgccggcatggttgctccattcactggcctcaagtccatggctggcttccccaccagaaagaccaacaatgacattacctccattgctagcaacggtggaagagtgcaatgcatgcaggtgtggccaccagttggcaagaagaagtttgagactctttcctacctgccagaccttgatgatgcacaattggcaaaggaagtagaataccttcttacgaagggatggattcct

SEQ ID NO: 240870 - DNA, 341 bp, Glycine max
ggactcgcagttgtattgttgaacaagggtttctctgtctgcttcttcactttctctcgtttcaatcgaaaccaaaacaaaaacatgggcagaaaattcttcgtcggtggcaactggaaatgcaatgggaccactgaggaggtaaagaagattgttactactttgaatgaggctaaagtccctggagaagatgtcgtagaagttgttgtgagccctccttttgtgttccttcctgttgtaaaaagtttgctgcgccctgatttccatgtttcggcacaaaactgttgggttcgcaaaggtggtgcttataccggtgaggttagtgctgaaatgcttgttaa

SEQ ID NO: 240871 - DNA, 353 bp, Glycine max
ggcagtttcaaattttcttttccttcactttcccgagaaaaaaataacacttttcactttcttcactacgttctcacttcgatatggctcgtacgaagcaaaccgctcgcaagtccaccggtggcaaggcgccacgtaagcagctcgccaccaaggccgctcggaagtccgctccggcgaccggaggagtgaagaagccccaccgcttcaggccgggaaccgtggcgctgagggaaatcagaaagtaccagaagagcaccgagcttctcatcaggaagcttccatttcagaggctcgtgagagaaatcgcgcaggatttcaagaccgatttgcgtttccagagcagcgctgtt

SEQ ID NO: 240872 - DNA, 388 bp, Glycine max
ggttctagtgtgtgattgtttgttgttgtaactcgttcttcttcttttgttgttctgtgtttgtgtttgttttttctctcacctgaaaatgtcttgctgcggtggtaactgtggttgcggaagcgcctgcaagtgcggcaacggctgcggaggctgcaagatgtacccagacttgagctacaccgagtcaaccaccaccgagaccttggtcatgggagtggcaccagttaaggctcaattcgagagtgctgaaatgggtgttcccgctgagaacgatggctgcaaatgtggagctaactgcacctgcaacccctgcacttgcaagtgaggtgttggagagctaaagcttcaagcagaaatggcccttagacataatgataaaaactat

SEQ ID NO: 240873 - DNA, 200 bp, Glycine max
gttcgcaagttaagcagttaggggcagctgtagtattagaaatgctattttttgtttcccttttctgtggtagtgatgtctgtggaagtataagtaaacgttttttttttctctggcaattttgatgataaagaaaatttagttcttcaaaaaaaaaaaaaaaaaaaaaaaaaaaaataaaaaacaaaaaaaaataaaag

SEQ ID NO: 240874 - DNA, 352 bp, Glycine max
gagccacagctctcctctcactttcacttctacgtccctggctctgttccgtctatgatcatggcgtttagggtgctaaaccctgacctccgctttcgcattcatctctctctcttgtccatcacttccgccaaggtcatcttcgaggagcgtttcgatcaccgatggggaaatcgtagggtataagtcagattggagcaaagatgacaccctggctggggagtggaaacatacctctggccaatggaatggagacgctaacgacaaaggtattcataccagtgaggattacagattctacgctatttcagctcagtaccctgaaatcagcaatcaggataagacactagtc

SEQ ID NO: 240875 - DNA, 349 bp, Glycine max
gaatgtagttcaaaaacacaacagaatgtgaaggctgtttttgatgcagccatcaaggtagttctccagcccccaaagcagaagaaaaagaagagaaagggacaaaaggcctgttccattttgtgatcttcagttcttaatatagtagtttgtggaggatgacatgactgtagtcttcatcattctatatcttatactatttccaacctagatgaaggaatcatcatgtccaactgaccgcatcaaggttcgctcataagcatcgagctatctgtctaattgtctctggctgtaggatctgtacagtcgtaatttcaatatgttcggtgtgcacacaacacttgcgtta

SEQ ID NO: 240876 - DNA, 332 bp, Glycine max
ggccattgttgttgctattatcatccgcagctgcttttattcgcaccgcaaacagtgagccatggccgtcggaaagaacaagcgcatctccaaggggaagaagggtggcaagaagaaggcagctgatccctttgccaagaaggattggtatgacattaaggctccttctgtttttcaagtgaaaaatgttggcaaaaccctcgtctctcgtactcagggtaccaagattgcttctgaaggactcaagcatagagtgtttgaggtctccttggctgatcttcaaggggatgaggatcatgcattcaagaagattaggttgagagctgaagatg

SEQ ID NO: 240877 - DNA, 343 bp, Glycine max
gagagaaagagagagaaagatgtcgaagcgtggtcgtggtggttcggcggggaacaagttccgcatgtcgctgggtcttccagtggcggcgacggtgaactgcgccgacaacacgggggcgaagaacctctacatcatttcggtgaaagggatcaaaggccgtttgaaccgtcttccctcggcctgcgttggcgacatggtgatggccaccgtgaagaagggaaaacccgatctgaggaagaaggtcttgccagctgtcatcgttcgccagcgcaagccatggcgccgaaaggacggcgtctacatgtacttcgaagatgatgctggtgttattgtcaatccc

SEQ ID NO: 240878 - DNA, 383 bp, Glycine max
caacgggattttttttttacattcctacaaacgaaacttgattttgcgtaacacaaaacaaacaacaacaaaaacacaaaaaacacaccaacaccaaccaaaaaacacaacccaaaaaaaacacaaaacaacaccaacaaccaacacacaaacacacacaaccaccacaccacaatcgggcacaccacaaccacaccacacaccaacccacacaaaaacccgccccccccaaaagacccacccccaacccccacccccaaccaaaccccaacccccccccaaacccccccccaacacccaccccgggcccccccttaaacccaaccccacccgggaaacaccccggcccatccccaacaaaacccccctccacacaaaacccc

SEQ ID NO: 240879 - DNA, 339 bp, Glycine max
  unsure (1)..(339): unsure at all n locations
ggccgaaaagtagtaccaagatggcttcagttgtgtatctcctctttggcttccatctcattgttatcatgtcaagttccttacccgcaactagtgaagtgtttgcaaaacagtatccatccacagaacccgtggaagaaaaactcacccaactccacttctatttccataacaacataacgggggaacacccaactgctatgaaaactgttttgcctcctaaggggtccattcatggttttggggctacttacatgatggatgaccctctaactgaatgaccaagtccaacttcaaagcttgtgggaagatctcanggaatatacgctttggcttcac

SEQ ID NO: 240880 - DNA, 386 bp, Glycine max
aagaaggcgtcttcataaacgcctttcttctccgtttccgtttcctcgttcgaattcgctttttgatctgcgaaaatgagagagtgcatctcgatccacattggtcaggctggtatccaggtcggaaatgcttgctgggagctctactgcctcgagcacggcatcgggcccgatgggcaaatgccaagtgacaagacagttggcggtggtgatgatgctttcaatactttcttcagcgagactggtgctggaaagcacgtgccacgtgcagtgtttgtagatcttgagcccactgttattgatgaggtgagaaccggaacttaccgccagcttttccacccagagcagctcatcagcggcaaaaaagatgccgccaacaactttgc

SEQ ID NO: 240881 - DNA, 339 bp, Glycine max
gatagtagatattcattccccttatctttctctcttctctctccccgcccaaaccctaactccctaccctattccgctttctctcatccatcatgaaaggaggaaagtccaagaccgaatctaagagagccgatgccaaacttgctgtgaataagaagggcgccgccaccaagactaggaaacccgccggaaaggggaaggcagcgaaagatcctaacaagccatttaggcctccaagtgctttcttcgttttcatggaggaattcaggaaggtgttcaacaaggaacatcccgacaacaaagcaatgtctgctgtgggcaaacctgctggagcaaaat

SEQ ID NO: 240882 - DNA, 357 bp, Glycine max
ggccagtgccattcccttcacaccattctcacaaaacaactttcaaactctgagaaagaatggctgccaacacattgatgagtactgctatctcagccttcccatctctcctttcttcctcaaaatccagatttgccaccgcagttcctctttctagctttggtgtcaccaatgcctcttcttctcgcttttctatgagtgctgactggatgccaggccagcctagacctccttaccttgatggttcagcacctggtgacttaggattcgaccctcttcgtcttggtgaagtaccagagaatcttgagaggttcaaagagtcagaactcattcactgcagatgggccatgcttgctg

SEQ ID NO: 240883 - DNA, 336 bp, Glycine max
ggaagttagtaaggtttttgagtgcagtggtccaaacactcttctctgcagcttttgcctacagctcccttcaccatggctgaacagaccgagaaagcttttctgaagcaaccaaaagtgtttctcagcacaaagaagactgggaagggaaagagacctggaaaaggtgggaaccgcttttggaagtccattgggcttggatttaagactcccagggaagccatcgaaggaacctatattgacaagaagtgccccttcactggtaatgtttccatccgtggccgtatcttggctggaacatgtcacagtgctaagatgaacatgactattattgtt

SEQ ID NO: 240884 - DNA, 337 bp, Glycine max
ggcgtacacagcctcaacaaccctaacgcgtgcagagcagagagagacgcagccatggggcgaagacccgcgaggtgttataggcaaattaagaacaaaccataccccaagtcacggttttgccgtggtgttcctgatcccaagatcaggatttacgatgttggtatgaagaagaagggtgttgatgagtttcctttctgtgtccatctggttagttgggagaaggaaaacgtttctagtgaggccctggaagctgctcgtattgcttgcaacaagtacatggccaaatttgctggaaaggatgctttccacttgagagtcaaggtgcacccattcc

SEQ ID NO: 240885 - DNA, 379 bp, Glycine max
gactcaccacttcaaaacactcataacacaaagcacaaagcaaagctcatccttgagttaaaaaatggcagcagcttcttccatggctctctcatccccatccttggctggcaaggccgtgaagctgggcccatcagccccagaagtgggaagggtgagcatgaggaagaccgtcaccaagcaggtctcctcaggaagcccatggtacggcccagaccgagtcaagtacttgggcccattctctggcgagcccccgtcctacctaaccggtgagttcccaagcgactacggctgggacactgctgggctttccgcagaaccagaaacctttcccaaagaaccgtgaactcgaagtgattcactccaggtgggccatgct

SEQ ID NO: 240886 - DNA, 303 bp, Glycine max
gactcaccacttcaaaacactcataacacaaagcacaaagcaaagctcatccttgagttaaaaaatggcagcagcttcttccatggctctctcatccccatccttggctggcaaggccgttaagctgggcccatcaaccccagaagtgggaagggtgagcatgaggaagaccgtcaccaagcaggtctcctcaagaagcccatggtacggcccagaccgagtcaagtacttgggcccattctctggcgaacccccgtcctacctaaccggtgagttcccaagcgactacggctgggacactgc

SEQ ID NO: 240887 - DNA, 391 bp, Glycine max
ggtgtagtataggattctcttctttattccttttgtaatttcattcattcttaatctttgtgaaaaataatgttcatcgagaattttaaggttgagtgtcctaatgtgaagtacaccgagactgagattcagtccgtgtacaactacgaaaccaccgaacttgttcacgagaacaggaatggcacctatcagtggattgtcaaacccaaatctgtcaaatacgaatttaaaaccaacatccatgttcctaaattaggggtaatgcttgtgggttggggtggaaacaacggctcaaccctcaccggtggtgttattgctaaccgagagggcatttcatgggctacaaaggacaagattcaacaagccaattactttggtccctcacccaaac

SEQ ID NO: 240888 - DNA, 302 bp, Glycine max
  unsure (1)..(302): unsure at all n locations
gatgtcatagtattatcattcattctcatctttctctcttctctctccacccaaaccctaactcccgaccctgttcccctctcgtatccgtcatgaaaggaggaaagtccaagaccgaatctaagagagccgatcccaaacttgctgtgaataagaagggagccgccaccaaggctaggaaacccgccggcaaggggaaggcagcgaaagaccctaacaagccaaagaggcctccaagtgctttcttcgttttcatggaggagttcaggaaggtattcaacanagaacatcctgaaaacaaa

SEQ ID NO: 240889 - DNA, 362 bp, Glycine max
gtcttcatcgtagcgccagactgagaggaagagagagggagattctttgtttgctaccttctctcggaaaaatgtttcaccagtaccaggtggttgggagggctcttcccacggaagcagatcagcaccccaagatctaccgaatgaagctctgggccaccaacgaggttcgcgccaagtccaagttctggtattttctgaggaaactgaaaaaggtgaagaagagcaatggccaagtgcttgccatcaacgagatttttgagaagaacccaaccaaaattaagaactatggtatatggttgcggtatcagagtacgactggttaccacaacatgtacaaggagtaccgtgacaccactcta

SEQ ID NO: 240890 - DNA, 317 bp, Glycine max
gagcgaaacagagagtgatttcagtgagtgatcggtgttcacttgatctcatcataatcgtcagcgtcaattgaagaagatgccgatcagaaacatcgccgtcggaaggcctgaagaggcgactcaccccgacacgttgaaggcggctttggctgagttcatctcaaccttcatcttcgggttcgccggctcaagctccggcatcgcctacaacaagctcaccgacaacggcgctgccacccctgccggtctcatctccgcctccatcgcccatgcattcgcactcttcgtcgccgtctccgtcggcgccaacatct

SEQ ID NO: 240891 - DNA, 359 bp, Glycine max
agcgaaacagagagtgatttcagtgagtgatcggtgttcacttgatctcatcataatcgtcagcgtcaattgaagaagatgccgatcagaaacatcgccgtcggaaggcctgaagaggcgactcaccccgacacgttgaaggcggctttggctgagttcatctcaaccttcatcttcgtgttcgccggctcaggctccggcatcgcctacaacaagctcaccgacaacggcgctgccacccctgccggcctcatctccgcctccatcgcccatgcattcgccctcttcgtcgccgtctccgtcggcgccaacatctccggcggccacgtcaaccccgccgtcaccttcggcgccttcgt

SEQ ID NO: 240892 - DNA, 363 bp, Glycine max
  unsure (1)..(363): unsure at all n locations
gaccgcgcaccacactgagaggaagagggagtgagagagagtgttcttcgtttgctaccttctcccagaaatggttacgttcaggtttcgccagtaccaggtggtcgggagggctctcccaacggaagcagatcagcatccgaagatctaccgaatgaagctctgggccaccaacgaggttcgcgccaagtctaagttctggtattttttgaggaagctgaagaaggtgaagaagagcaatggtcaagttcttgctatcaacgagatttttgagaagaacccaaccaagattaagaactacgggatatggttgcggtatcagagtaggactggttaccacancatgtacaaaggagtacgcga

SEQ ID NO: 240893 - DNA, 372 bp, Glycine max
gactcactcatacaatagagaccagcttttgcttctttgtgaacatggagatgaggaaatcatgtggcttcttcttcttgctcctcctccttgtctttgcttcccaggtggtggtgcatacggagggaagagtgtgtgagtcacaaagccacgggttccatggtttgtgtaatagagaccacaactgtgctttggtctgcaggaacgaaggtttctccggtggcaggtgcaaaggcttccgccgccgctgcttttgcaccaggatttgttgagatctcatcaaacactactcttgccatgcaaattaataaatcatagctatgccaaataaattgcatctactctttatccatttgggagctagctaccaca

SEQ ID NO: 240894 - DNA, 268 bp, Glycine max
gataccatagaataagcacaaagagaagcattagcactaggagcagcaacaactagtctcagctgaaatggcctcttcagtgatggcatctgtggccctcaaacctgcccctttcactgttgagaagtcctcagtgagaggccttccctctctctcaaggaactcttcttcattcagagttgtggccagtggcaacaagatcaagactgacaaaccttatggaattaatggtggcatggctttgagggatggaactgatgcatccggc

SEQ ID NO: 240895 - DNA, 327 bp, Glycine max
ggtcagcttcataataaagatgacaatgaagctggttttggtagttgttgttgaagttgcatgcttagtttctgggatcttgtcctttggatctgagacactctctgagctttctttcttagaaaatgatgtcgtctcaacaacaagaccttcctcttcatctcaacttcaacctcaacctcaacctcaacctcttatggtggacctcactctcattcatgaagctgattctaaaggagctgtctgtttggatggaacggtgcctggataccatttggatcgtggatttggatctggtgcagatagttggcttattcatttggaagg

SEQ ID NO: 240896 - DNA, 311 bp, Glycine max
cgggatccacatcctccacaacacaactccactcttaactgccattggtttttcttcatccatttctcttcccttctaagcttttttcgaataaccatttggagattctgtcctaatggctcttgctccatctaaagtttcctccttttccgggttatctcacacacccagtgttggggatgctctgaaaaaaccaacttgctcagtgactcagatctttgcgaatgttacacttggatgcataaaccttaaggtttgtgcactcaactgttcctctctcaagggtgattttcgaaaccttctaggaggtt

SEQ ID NO: 240897 - DNA, 391 bp, Glycine max; identical to SEQ ID NO: 239045

SEQ ID NO: 240898 - DNA, 395 bp, Glycine max
gactcaccacttcaaaacactcataacacaaagcacaaagcaaagctcatccttgagttaaaaaatggcagcagcttcttccatggctctctcatccccatccttggctggcaaggccgtgaagctgggcccatcagccccagaagtgggaagggtgagcatgaggaagaccgtcaccaagcaggtctcctcaggaagcccatggtacggcccagaccgagtcaagtacttgggcccattctctggcgagcccccgtcctacctaaccggtgagttcccaggcgactacggctgggacactgctgggctttccgcagacccagaaaccttcgccaagaaccgtgaactcgaagtgatccactccaggtgggccatgctcggagccttgggctgcg

SEQ ID NO: 240899 - DNA, 386 bp, Glycine max
ggaggaactggttctggacttggttcccttctgttggagcgtctctccgttgattatggcaagaaatccaagcttggtttcactgtctacccctcccctcaggtctccacctccgttgttgagccatacaacagtgtcctctccacccactctctcttggagcacaccgatgttgctgtccttttggataatgaagccatctatgacatctgtaggcgctcccttgacattgaacgtcctacctacaccaacctcaaccgtcttgtttctcatgtgatttcttcattgactacttccctgaggtttgatggggccctgaatgtggatgtgactgaattccagaacaacttggtcccatatccgagaatccatttcatgctttcctc

SEQ ID NO: 240900 - DNA, 291 bp, Glycine max
  unsure (1)..(291): unsure at all n locations
gtaaattttacagctcttagagaaattaagctgctaaaagagctcaaagatccaaacattgttgaattgattgatgcattcccacataaagggaatctgcatcttgtttttgaattcatggagacggacctagaagccgtcatacgagaccgaaatatttttctttcaccatctgatacaaaatcctacctgcaaatgacactaaaaggtcttgcttattgccacaagaaatgggttttgcatanggacatgaagccaaataatttattgataggatctaatggacagctg

SEQ ID NO: 240901 - DNA, 321 bp, Glycine max
ggcagttcaattccaatatattccattctctctgtgtatttccctacctctcccttcaagatgcagatcttcgtcaagaccctcaccggcaagaccatcacccttgaggtggaaagctctgacaccatcgacaacgtcaaggccaagatccaggacaaggaaggaatccccccggaccagcaacgtctcattttcgccggaaagcaacttgaggacggccgtacccttgctgactacaacattcagaaggagagtactcttcacctcgtcctccgtctccgtggtggcatgcagatcttcgttaagacactcaccggcaag

SEQ ID NO: 240902 - DNA, 314 bp, Glycine max
ggacacaaactttattacagttgttgtattgtaattaagcaagaatattaggcaatggagtcttctagaacttcaactactcttgctctttttttaaccatcaatttgcttttctttgtcatggcaagtggctgctacacttgcacacagcctaagccaaaccctatcccattcccttaccctaaccctagtcctgccgcgaagagctgccccagggacgcacttaagctcggagtgtgcgcaaacgtgcttaatggaccaattggtgctattgtagggtcaccaccggaccacccatgttgctcagtgctaga

SEQ ID NO: 240903 - DNA, 359 bp, Glycine max
gatgccgaaaagtaataccaagatggcttcagttgtgtatctcctctttggcttccatctcattgttatcatgtcaagttccttacccgcaactaatgaagtgtttgcaaaacagtatccatccacagaacccgtggaagaaaaactcacccaactccacttctatttccataacaacataaccggggaacacccaactgctatgaaaactgttttgcctcctaaggggtccattcatggttttggggctacttacatgatggatgaccctctaactgaaggaccaagtccaacttcaaagcttgtgggaagatctcagggaatatacgctttggcttcacaacatgagcctgggttgc

SEQ ID NO: 240904 - DNA, 393 bp, Glycine max
  unsure (1)..(393): unsure at all n locations
gacagatactctttacaattgcttgaacctctcagaagcaaatgaggattattcacagcctcgcatgtttggttctcaccttcatctccttcaatccttgtaaagcagaacaagcacaaactattttgaattccctcagcattgaccaaatcctacagaaaatatatgaatggggaaatggtgcacaagggttccaagaaggccagattcaaatttcaggccctatagtggtggcaggagtgctgtgtttcatagcttcttcaatatctagtgctggtggaattggtggtggtggacttttcttaccaatattaactattgtggctggcctagacctcaaaacagcttcaagtttgtcagctttcatggtcacagganggtcaattgcaaatg

SEQ ID NO: 240905 - DNA, 388 bp, Glycine max
ggagaaagaaagaaaagatgggaatgacaccgaaaatagctccttcgatgctctcttccgacttcgccaatttggcttccgaggctcagcgcatgctccacttcggcgccgattggctccacatggacatcatggatgggcattttgtccccaatttaactattggcgctccagttattgaaagtttgagaaagcacacaaaggcatatttggattgtcaccttatggttacaaatcctcttgattatgttgaacccttggcaaaagctggtgcttctggttttacatttcacgtagagacatcaaaagataactggaaagaacttatccaaagaatcaagtcacatggcatgattcctggtgtagcattaaagcctgggacccccgt

SEQ ID NO: 240906 - DNA, 390 bp, Glycine max
gagaatcaatctctccctttcacctttcttcatagcctaccacttttctgctttcatctactctcacttctcttcacacactgagacacacagagagagaaaaataaagggtgtgatgggtgtcttactgagtgttttctttttataatgaacaaagaactgcacaccctcttcttcaccgaagaagaagatggcaattcagcaccacaatgaccaactagagcataatgaaaatgtctcatctgtccttgatgccctttactgtgacgaaggaaagtgggaagaggaagaggaggagaaagaagaagaagaagatgaaggtgaaaatgaaagtgaagtgacaacaaacactgcaacttgtcttttccctctgctcttgttggagcaaga

SEQ ID NO: 240907 - DNA, 305 bp, Glycine max
gattcacaactttacccactcttcattctagcaattcgaattcccaatccaaaaccctaataccttcaaagaacctagtagtgaatcagtgatggcacctaaggcagagaagaagccagcggagaagaagccggtggaggagaagaagtcgacggtgggagacaaggctccggcggagaagaagccgaaggccggaaagaagcttccgaaggagggaggagccggcggagaaggggggaagaagaaaaagaggaacaagaagagcgtggagacatacaagatatacatattcaaggttctgaagc

SEQ ID NO: 240908 - DNA, 387 bp, Glycine max
gacttcacaactcaaactgcttcattgcataattgcagataagatcaacccttctaccttcagattcgcgggaagatggcatcacttcatgctaatgtgacatcagttgtttacaacagtggcaaccgtgtttctcaatcgaaatttgcaagctcttccttcttgtctgggttcgatgttgttggtcgtgcttcaagtgcttggaagaaggaacttgtcccatcttccatttccttggtgcctagagccaccctaacatttgatcccccaactaccaattcagacataaccaagcaaaagaagcacactcttgaccctgcttctccagattttcctcctcctccctcaatttgagcattgctttcaaaagagcaccaacgaacacag

SEQ ID NO: 240909 - DNA, 390 bp, Glycine max
acgcgtcaacccactcgtccgtcgggttgcttgtggtgggttcccgtgggttcattctctttgcgcagttcctttcttcatagcctaccacttttctgctttcatctactctcacttcgcttcacaaactgccatgcagagggaaactcggataccagctgcaatgtctatgccaatatctaggatcatgaaggaattcccccggatcagcaaagtctcatcttcgccggaaagcaactcgaggactgccgtaccctcgccgactacaacatccagaacgagtcaacccttcaccttgtccttcgtctccgtggtggcatgcagatcttcgtcaagactctcactggcaaaaccataagcctagaggtcgaaagctctgacaccattgac

SEQ ID NO: 240910 - DNA, 390 bp, Glycine max
  unsure (1)..(390): unsure at all n locations
ggacaaccagcaagtgagacattttttttttctcttttctcttaagccatataccactttggtcatactcataatcctttttcttcattttcactaagtccaccaacaccaagtcatggctcaaagacagatctttgctcatgtggtgattttgttgcttatggtcttagttggagccaggtttgctaaagcagaaggaggaggagaagctgctgataggattttggaactccctggtcagccaaaagtgtcatttcagcagttttctggctatgttactgttaacaaggttgctggtagagctctcttttactggctcactgaagctgcccaaaatcctctcaccaaacctttggtcatttggctcaatggaggtccangatgttcatc

SEQ ID NO: 240911 - DNA, 144 bp, Glycine max
aatgcatatcgaccaaaacaactacaacaaccaacaaggagtttagccaaaacaaaacgaagattaatgtgtgaagaaaaaaacaacgaacgaaagaaaaagtaaacatggataagattagaattttaataattatgttggatg

SEQ ID NO: 240912 - DNA, 247 bp, Glycine max
  unsure (1)..(247): unsure at all n locations
gcacttcaattgcaatcaaatgagttcattctctttgcgcagttccctacctctcctttcaagatgcagatcttcgtcaagaccctcaccggaaagaccatcaccctttaggtggaaagctctgacnacatcgacaacgtcaaggccaagattcacgacaaggaacgaattcccccgggataacaacgtctcatcgttcgcggaaagcagctcgaggacgggcggtacctcgccgactacaacatcc

SEQ ID NO: 240913 - DNA, 293 bp, Glycine max
ggagtgatccttctacactaactaaagccgagcagcgagagagagaaaccctagcaaaaatgccggctggtcacggtttgagatcccgcaccagagattccttctctcgtcccttcaggaagaagggtaccatcgccctcaccacatacctcagaacctaccacgtcggcgattatgtcgacgtcaaggttaacggcgccgtccacaagggaatgcctcacaagttctaccatggccgcaccggtcgcgtctggaatgtcaccaaacgtgctgttggggtcgaagtcaacaag

SEQ ID NO: 240914 - DNA, 348 bp, Glycine max
gacccaagcgtcagtaggtgcgagaaaacaacacaaagggagttctcttcacacctttgttcactcttcttctcttgcggctacggttttagcgcagcttcttctacatttaaggaagatgggtaacgaaaatgttcacatcagtattgtggtcattggccatgtcgactctgggaaatccactaccactggtcacctgatttacaagcttggaggcattgacaagcgtgttattgacaggtttgagaaggaagctgctgacatgaacaagaggtctttcaagtatgcctgggtgctggacaaacttaaggctgatcgtgaaagaggaatcaccattgagattgcttt

SEQ ID NO: 240915 - DNA, 326 bp, Glycine max
ggggtcaccgattgatacacccttcttcgttcctcactcaccagccacagattctctcttctctattcagtaaacggctgttttgtatacgagctgtcccggtctcagcctctacatcccaaaacatcaaaacaactggttgggctccttgtatggcttcttcctcagttggtagaagagctacatattcaacacaatctgtatcgacaaatgagccagttgtatctgtagattggctttatgataacctgaaggagccagatatcaaggtactagatgcttcgtggtacatgccggatgagcagaggaatccaattcaagaatat

SEQ ID NO: 240916 - DNA, 330 bp, Glycine max
gggacttggtcgtcaacacagtctaattaatatctttttgctccttcgcttatgaatcttcttcttcttcttcttgttcctgcaacgcactgaattcgatcaatcaatccatcttcaattgctttgtttcgatcggaggaaaatggccgatcagttatcgaagggagaggaattcgagaaaaaggctgagaagaagctcaacggttgaggcttgtttggctccaagtatgaagatgccgccgatctcttcgataaagccgccaattgcttcaagctcgccaaatcatgggacaaggctggagcgacatacctgaagttggcaagttgtca

SEQ ID NO: 240917 - DNA, 396 bp, Glycine max
tggggaatcccattttaattctcaagtccaagcttgggagacagagaaagagaaagagaatggacgccattgattctgtgttcgatccgctgagagaattcgcaacggacagcgtgaggctcgtgaggcgctgccacaaagccgatcgcaaagaattctccaaggttgccgtccgtactgcaattggtttcgtcgtgatgggattcgtcggtttcgtcgtgaagctcattttcattccaattaacaacatcatcatcggatctggttaaattaagggaactactatcgccaaagtaattcaagttgtcaagcataaggaggcagacagatttccctcatcaatagatcattctatgccaccaatcttagatccattttcacttttgtcattttcct

SEQ ID NO: 240918 - DNA, 362 bp, Glycine max
tcattgggtttcatctgatggtgtttctgtggagttggatgagtttcttaagctttctatggagatgaagaagccactgtcttgcaaggctgtgcctaaggtttctgtttacgtttatgtgtgttgttgggttgagttggtttggtttgtctgcttacgtttgtggatgttgttcccaaggctgtgcctagggtttctgtttaggtttatgtgtgttgtttggtttgtctgtttacgtttatggatgttgtttggttgagttggtttggtttgtgttaactgctaagtttagttcaagaaaagtatggtttagagcacctttttactaatcgctaagggttgttattccgtgtacggtttgt

SEQ ID NO: 240919 - DNA, 370 bp, Glycine max
ggagaccgcgaagaagaagatggagatgtatcagatctggagcaggagaatagcgttgggagcgttcgcgtttgttctgcttttcctatcggcctcagcatacgacgtcgttgtgctctctgagtataacttcgagaaggaggttggtcaggacagaggagctctcgttgagttcgatgctccttggtgtggacactgcaagaagcttgctccagaatatgaaaagcttggtagcagcttcaagagagccaaatctgttttaatcggcaaggttgactgtgatgagcacaagagtttgtgcagcatatatggagtctctgggtacccaacaattcagtggtttccaaaaagatctcttgaacccaaaaag

SEQ ID NO: 240920 - DNA, 401 bp, Glycine max
gagcaaatagaagagcaaagagagtgagaaaagaaggaagaagaagaagaagagatggcaaatgaactacccgtcaaagcttttggttgggctgcttcagacacttctggcacccttgccccttttcatttctccagaagggaaaatggcgtcgatgacgtcactctcaagattctcttctgcggggtttgccactctgatctccacactctcaaaaacgactggggtttcaccacctaccctgtcgttcctgggcatgaaattgttggtgttgtgacagaagttggaaacaatgtgaaaaacttcaaagtgggtgataaagttggagttggtgtgatagtggagtcttgcaaggaatgtgaaaattgccaacaggatctggagaattactgtccccgccc

SEQ ID NO: 240921 - DNA, 366 bp, Glycine max
ggcaaaagccctctcttacttccatacgcggcggcttcttcttccgtttttgtctatcggcgtgaacaatggcgacttacgctgcgatgaagcccacaaagcccggcttggtagagccccaagagcacattcacatgataaggataaccctttcctccaagcatgtcaagaatctcgacaaggtttgtgcggacatggttcccggtgtaaaggacatgcgccgcagggttaaaggacctgtcacgatgcacacaacagttcttctcatcacgaccaggacatccccttgtagtgaatgtagcaacatatgggacagattttaacttcgtgtgcaaattagagtgattgacctctacagtttcccac

SEQ ID NO: 240922 - DNA, 354 bp, Glycine max
ggaacgaactaaggcatcgttttcatttttgttttttgttttttgttttttgaaaaagggtcttccccgccaccaaaccctagctagcgctggaaaaatgccgagggaaatcatcactctccaggttggccaatgtgggaatcagatcggcatggagttctggaagcagctctgcctcgaacacggcatcagcaaagaaggcatcctcgaagacttcgccactcaggggggtgaccgtaaagacgtgttcttctaccaagctgatgaccagcattatataccacgggctctcctgattgacttggagccaagagtgattaatggaattcaaaataattactaaccgaatcctca

SEQ ID NO: 240923 - DNA, 331 bp, Glycine max
ggtgtagtataggattctcttctttattccttttgtaatttcattcattcttaatctttgtgaaaaataatgttcatcgagaattttaaggttgagtgtcctaatgtgaagtacaccgagactgagattcagtccgtgtacaactacgaaaccaccgaacttgttcacgagaacaggaatggcacctatcagtggattgtcaaacccaaatctgtcaaatacgaatttaaaaccaacatccatgttcctaaattaggggtaatgcttgtgggttggggtggaaacaacggctcaacactcaccggtggtgttattgctaaccgagagggca

SEQ ID NO: 240924 - DNA, 354 bp, Glycine max
gaattcattttgaattgacaccgcggagagtttgcagctgcatcatcgatcatcgtcacctcatggacggacaccattcacaagacccgaagcacagccctgctgacatgactgcctttgtgcaaaatcttctccagcagatgcaacataggttccagacaatgtccgactccattgttacaaagattgatgatatgggaagtcgcataaatgagttggaacaaagcatcaatgacctaagagcagagatgggagtggagtcctctccatcacctgcgacccctgctaagccaacagaggaaatcaccatagaagagggttcagcttaagtggcgtgttctgatttcagttgct

SEQ ID NO: 240925 - DNA, 385 bp, Glycine max
gagcaacagcagcattcactgaaagcactcagtagggtttgcggtttcagagtttgtgacgcacgcatccatggccaccaccaccaacgccgccgcagccccgccgcgccagctctcccagaaggaagccgacatccagatgatgttagccgccgacgtccacctcggcaccaaaaactgcgacttccaaatggaacgttacatcttcaagcgccgcaacgacgggatttacattattaaccttgggaagacatgggagaagcttcagttagcagctagggttattgttgcaattgagaaccctcaggatatcattgttcaatccgcaaggccttatggtcaaagagcggttctgaagtttgctcagtacactggtgctcatgct

SEQ ID NO: 240926 - DNA, 371 bp, Glycine max
gaagcaaaaccctaatccctctttcttcctcttcctcagtactgcgattttcgattctcttctctgcaactatgcctaaccctaaggtcttcttcgacatgaccatcggcggtcaacctgccggccgcatcgtgatggagctctacgccgacgtgactccgagcaccgccgagaacttccgcgcgctctgcaccggcgagaatggcgccgggcggagcggcaagccgctccactacaaaggctcgtccttccaccgcgtgatcccgaacttcatgtgccagggcggcgacttcaccgccggatacggcaccggaggcgagtcgatctacggcgccaagttcgccgacgagaacttcgtgaagaagcacact

SEQ ID NO: 240927 - DNA, 391 bp, Glycine max
gaagcaaaaccctaatccctctttcttcctcttcctcagtagtgcgattttcgattctcttctctgcaactatgcctaaccctaaggtcttcttcgacatgaccatcggcggtcaacctgccggccgcatcgtgatggagctctacgccgacgtgactccgagcaccgccgagaacttccgcgcgctctgcaccggcgagaagggcgccgggcggagcggcaagcccctccactacaaaggctcgtccttccaccgcgtgatcccgaacttcatgtgccagggcggcgacttcaccgccggaaacggcaccggaggcgagtcgatctacggcgccaagttcgccgacgagaacttcgtgaagaagcacactggtcccgggatcctctccat

SEQ ID NO: 240928 - DNA, 401 bp, Glycine max
gaggtattggtgggtgaaatcaaaaaccctagccctcactctcatcactttttttgagctatgtttcaagagagttagttagggataatagggcagggaagaataagagggatgtacaaagaacgagagcgagttggtgtttctgtttccgcttccaaatcggaggatcggaagcgaatcaacgacgttctcgataagcacttggaacgatcctctccttccacttctcgccccatcacctccgcctccaagaattccaacctccaagtggaggaatctgaaacggagagtgaagagtctgatgttagtggctctgatggggatgacacctcttggatctcgtggttctgtaatctcagagggaatgagttcttttgtgaggtggatgatgattacataca

SEQ ID NO: 240929 - DNA, 299 bp, Glycine max
gatcactagaagtgttggatgcatttctatttctaactaattattgtgcttattattattgttgagaaagaaaagaatggcaagttaataaaattctttgagttgaacacaggggccaagattccttctgttgggttaggcacttggcaagctgagcctggtgttgtagccaaagctgtcaccacagccattctggttggatacaggcatattgattgtgctcaagcgtataacaatcaagcagagattggttctgctcttaagaagctttttgatgatggtgtggtgaagcgtgagga

SEQ ID NO: 240930 - DNA, 325 bp, Glycine max
gattggacacattcttcagcgactgcgtttttggatcggaacctcttctgcggcgtagcaatgggacactccaacgtttggaactctcacccaaaaaactacggtcctggttctcgcacttgccgtgtgtgtgggaatccacatggactgatcaggaagtatggccttatgtgctgcaggcagtgcttccgtagcaatgccaaggaaattggtttcatcaagtatcgctaaaagagcagttgtcaactacggaccaatattgtgttctggcactaagatgttttgaggatgttatgtttgaagaaacttgagactttcctttttc

SEQ ID NO: 240931 - DNA, 322 bp, Glycine max
ggtctagcccgccgagaaaaccctaattcgctcgcagtcacccaagaggcgaatccttaccattgctcgagatgggtgaagaagtgaaggccgtggttccagagtctgttttgaagaagcagaagagagaggaggaatgggcgttggccaagaagcaagacctcgaggctgcgaagaagaagagagccgagagccgcaaactcatctacaacagagctaagcagtacgctaaggagtacgatcaccaggagaaggaattgattcggttgaaacgcgaggccaagctgaaaggtggattctatgtcgatccagaggctaagct

SEQ ID NO: 240932 - DNA, 383 bp, Glycine max
gacatgcccatcatcaaagtttcttcctttctctgctctttgtcttctctgacacatttggggccttgttgagtgtgtttttgcaagagggtatggcgaaggacgttgaggttgctgagcgtggctccttctctgggaaggactaccaggaccctccaccagcaccactcattgatgctgaggagctcacaaagtggtccttttacagggctcttattgctgagttcattgccactttgctcttcctctacattactgtgctcacagttatagggtacaagcaccagacggatcatgctgatgcgtgtggtggggttggcattcttggcattgcatgggcctttggtggcatgatcttcatccttgtctactgcactgctggg

SEQ ID NO: 240933 - DNA, 373 bp, Glycine max
gctcttctctcgcgtcgctccgcaccagtttcaccgcacgaatatcttgttgtttggagcgatccgagaaaaactctgtaaacatgttggtttaccaggacctccttacaggtgatgagcttctctctgactccttccgttacaaggaaattgagaatggaatgctgtgggaagttgaggggaagtgggttgttaaaggagcagttgatgtagacattggtgcaaacccttctgctgagggtggaggagaagatgagggagttgatgatgcagctgttaaggttgttgacattgttgacacattcagacttcaggagcaacccgcattcgataagaagcagtttgttaccttcatgaagaggtttatcaagaa

SEQ ID NO: 240934 - DNA, 371 bp, Glycine max
ggttgtcaagcctgccgagaaaaccctagttcgcttgcagtcacacaagaggccaatcctattcatagctcgagatgggtgaagaagtgaaggtagttgttccagaatcagtgttgaagaagcgcaagagggaggaggaatgggcgttggccaagaagcaagaactcgatgctgccaagaagaagagagccgagagccgcaaactcatctacaacagagctaagcagtacgctaaggagtacgatcaccaggagaaggaattgattcggttgaaacgcgaggccaagctgaaaggtggtttctatgtggatccagaggctaagctgttgtttattattcgcattcgtggtattaatgccatggaacccaaa

SEQ ID NO: 240935 - DNA, 392 bp, Glycine max
gagtctcagcttcacattttaaccctaggatcctttctcctctcatccacctgaagcaaaaaatgagccggccaatggaggaagataatgaggaagaggagttcaacaccgaaccgctatttgtactcatgatgagtgttaaaaataatactcaggtactgataaattgtcagaacaacaaaaagcttctgggtcgtgtaagggcttttgacaggaactgcaacatggttcttgaaaatgtcagggagatatggactgaggtgccaaagactggtaaaggaaagaaaaacgcctagccagtcaacagggatagattcatcagcaaaatgtttctccgtggagattctgtcaccattgttcttaagaaccccaaatgagattctcttatcaac

SEQ ID NO: 240936 - DNA, 382 bp, Glycine max
ggctgtgagtgagacaccgatagatagagagcgcggcatagcctagacctatctttcttctctctctgtgtgtgcgcttcaacggcaaccagaagcagccatggccactgcaaggactgtgaaggatgtttcacctcatgagttcgttaaggcgtactcctctcacctcaagcgatccggcaagatggagctgccagagtggactgatattgtgaaaactgcaagatttaaggagttggctccttatgatcctgactggtactatgtcagagctgcttccatggcaagaaagatctacttgagaggaggacttggtgttggtgcctttcagaggatttatggtgggagcaagaggaatggtagtcgccctcctcatttttgc

SEQ ID NO: 240937 - DNA, 323 bp, Glycine max
  unsure (1)..(323): unsure at all n locations
ggacggttaaagctttctcatggctactacctttaccctcgcaacgctgtcactaccgtcgtcttctcgtgtttccattggcggagctccgattcgccaccaccgttctccgaaccggatcgggttgttgccgcctctcaaatgctcctctttggagccggaaaccgccccgcctcctcccttcgactggactcgcaagttgatcgccggtgtcgccggcgtcggattcctcganacctcgtnactcacttaccttaaactcaacggcgcagacgccttttgccccgtcggcggcggcacctgctctaaaatactcgacagtg

SEQ ID NO: 240938 - DNA, 343 bp, Glycine max
gagggttttactttagacccgtcgtggagcaaaactttacattttgagaccgcaaaatgtctgaagtgaatgcgacccctgaaattcctcaaagcaacaccatctacatcaacaacctcaacgagaaaattaagattgatgagttgaagaagtctctgaacgctgttttcactcagttcgggaagatacttgaggtgttagctttcaaaaccctaaagcacaaaggtcaagcttgggtggtctttgaagatgcctcttctgcttccaacgccctaaggcaaatgcaaggtttccccttctatgataagcccatgagaatacagtatgcaaagaccaaatccga

SEQ ID NO: 240939 - DNA, 373 bp, Glycine max
ggagcgagagaagttattagggtttttgagtgcggcggtccaaacactcttctctgcagcttttgcctacaactcccttcaccatggctgaacaaaccgagaaagcttttctgaagcaaccaaaagtgtttctcagcacaaagaagactgggaagggaaagagacctggaaaaggtgggaaccgcttttggaagtccattgggcttggatttaagactcccagggaagccatcgaaggaacctatattgacaagaagtgccccttcactggcaatgtttccatccgtggccgtatcttggctggaacatgtcacagtgctaagatgaacaggactattattgttagaaggaattatctccattttatcaagaa

SEQ ID NO: 240940 - DNA, 360 bp, Glycine max
gagggttttgtgctgttgtcgctgctcatcctccataacctccgagctctacaccgaagaacgaagccatggggaagacacatggaatgggagctgctcgcaagctcaagtctcaccgcaggaggcaaaggtgggctgataagtcatacaagaaatcccatcttgggaatgaatggaagaaaccttttgccggttcatcccatgccaagggaattgtccttgaaaagataggtattgaagctaagcagcccaactctgctattcgtaagtgtgccagagttcaacttatcaagaatgggaagaaaattgcagcttttgtccctaatgatggttgcttgaactacattgaagagaatgacg

SEQ ID NO: 240941 - DNA, 334 bp, Glycine max
gactcctctcttccaagttctctctctctgtgtatattcaaatccatactatcactttcgcatcggtacttctcttttcattgtcgcgcagacacaaatcagtaccatacgaagcccgacactacgtgaattaagcatgtcgggcagaaaggaaacggttttggaccttgcaaagtttgtagacaaaggcgttcaagttaagcttactggtggcagacaagtgacagggactctgaaagggtatgatcagttgcttaaccttgtcctagatgaagctgtagagtttttaagagatcctgatgatcccctcaaaactaccgattagaccagaaat

SEQ ID NO: 240942 - DNA, 369 bp, Glycine max
caacataggtcatcgaaaggatctcgaagacccaccaacgcacgaaagccgggatctttcagaaaatggattcctattcgaagggtgcataaccgcatggataagctcacactaacccgtcaatttgggatccaattcggttccttaggaggtatcgggaaggaattttggaatgtaataatatcgattcatacagatacagaagaaagggttctctattgattcaaacgctctacctacgagatagggatagagaaagaggaaaaaaccgaggatttcacatagtacttttggtcgaaaaatcgatctgaattttttccgtactttccgctcaatgatgaaatgggtcagattctacagggacaaacc

SEQ ID NO: 240943 - DNA, 303 bp, Glycine max
gagggcgaggaagccacatagagacacaatacagagtgagttgttgctccttcgccacaactctctgccaacatgggtatctccagagattctatgcacaagaggcgtgccactggtggcaagaagaaggcctggaggaaaaagagaaagtatgagcttggccgccagcctgctaacactaagctgtcaagcaacaagacagtcaggaggatccgtgttagaggtggaaatgtgaaatggagggcattgagattggatactggaaattactcctggggaagtgaagctgttactcgcaagact

SEQ ID NO: 240944 - DNA, 394 bp, Glycine max
gaatgtagaaaacattgtcagagaagcagtcaaaaagaagtttcatcaaacatttgttacggtccctgccaccattcgtctcttcttccatgattgcttcgtgcagggctgtgatgcctcggttttggttgcatccacaaaaaacaacaaagcagagaaggatcaccctgataatctttcactagctggagatgggtttgatacagtgattaaagcaaaagaagcagtggatgcagttccattgtgcaggaacaaagtttcatgtgctgatattttagctatggcaacccgtgatgttattgcactggctggtgggcctttctacgaggtttgatttggaaaaatttgatgggctaagatctaaatcttcagatgtaaataggaggctgcctca

SEQ ID NO: 240945 - DNA, 312 bp, Glycine max
gataccatagaagaagcacattggagaagcattatcactacgagcagcaacaactactctcagctgaaatggcctcttcagtgatggcatctgtggccctcaaacctgcccctttcactgttgagaagtcctcagtgagaggccttccctctctctcaaggaactcttcttcattcagagttgtggccagtggcaagaagattaagactgacaaaccttatggcattaatggtggcatggctttgaaggaatgaactgattcatctggcaagaaaaggaaaggaaagggtgtttaccagtctgtagacaaat

SEQ ID NO: 240946 - DNA, 378 bp, Glycine max
aatgcagacatacgtcaggatggggcgtcactcttcaaagaggtcataactgaactcgctgactgaaactcgcacgcattaaggttttgcagtgatggcactgtccaaccgcgtccgatcgggaatctctctcttcaccaaatccacgttcctcacttccgagcgatccactctccaacgattcctcgttgccccttccatttccttcgcctccagaaattacgccaacgtgccggggcaaaatgaaaacacagttaacgtcacactggctttgtatggacgttcaggaaactatgcctctgctttgtatattgcatctgtgaaagctaatgcagtggcaaaggttgagtctgagcttccgcaatttgttgacgctgt

SEQ ID NO: 240947 - DNA, 267 bp, Glycine max
gcttgttggaaatgcacctgcatagtctagtgcttaattaggttgctgaagagtgaagaatgagacagcctggttcgaaggggaaaagcctaaggatatatcaaaggatcctatatgtataaattaaatgttgcttttttaccttcggtattgatatctgaattctaatttgacatcctatatatgaatatatgatcaatgtgtttctttaaaaaaaaaaaactacatcacaaaaaaaaagcggccgctctagaggatccaagctta

SEQ ID NO: 240948 - DNA, 386 bp, Glycine max
  unsure (1)..(386): unsure at all n locations
ggtccctactcagttcacagagaaagatggctgcggaaaacgttgtagagttcacagacttacccgtcaagagacctagagaagaagaagaagaagaacaaaccaatggagtctccaacgacgccgtttcaacgctacccaatgaccctcaataccctggtatctctgctgttattcccggttggttctcagaaatcagcccaatgtggcctgnggaggcgcactccttgaaggtggaaaagattttgtttcaagggaagtctgactatcagaatgtcatggtcttccagtcatcaacatatggcaaggttcttgttttggatggagtcattcagctcacagaaagggatgagtgtgcctaccaagagatgatcactcatcttcct

SEQ ID NO: 240949 - DNA, 401 bp, Glycine max
  unsure (1)..(401): unsure at all n locations
ggttccagtgtgtgattggtttgatgtttgtaactccgttccttcatccttttgttgatcggtgtatgtgtgtgttttttctctcacctgaaaatgtcttgctgcggtggtaactgtggttgcggaagctcctgcaagtgcggcaacagctgcggaagctgcaagatgtacccagacttgagctacactgagtcaaccaccatcgagaccttggtcatgggagtggcacctgttaaggctcaatttgagggtgctgaaatgggtgtgcccgctgagaacgatggctgcaaatgtggaccaaactgctcctgcaacccctgcacttgcaagtgaggtgttgggagagcaagcttcaagcagagatagcccttaattangaataatgataaactattaatgtg

SEQ ID NO: 240950 - DNA, 388 bp, Glycine max
  unsure (1)..(388): unsure at all n locations
gggagcgagagcgagaaacagaaacctatttttattttctctcttcatatcacttagactgagactggatgcttctgtatccatcatattatatgatgattattgaattgattatgcgttcagatttcacttcaggatcactttgacagtttgacttgtccggcaccaacttctggtattactattgtctgagttctcaggagttctttcacagaaggtagatgggttctagaatcccatctcataagcttagcaatggcctctacgtatcaggacggccggagcagcccaaagaaagaactccaacaatgacatcaacagccgtgccatataccggtggagacataaaaaagtctggagaattggggaagatgtttgatantcctgt

SEQ ID NO: 240951 - DNA, 351 bp, Glycine max
tgggatttccagacgcggcggcttcttcttccgtttttgtctatcggcgtgaacaatggcgacttacgctgcgatgaagcccacaaagcccggcttggaggagccccaggagcagatccacaagataaggatcaccctttcctccaagcacgtcaaaaacctcgagaaggtttgtgccgacttggttcgcggtgcaaatgacaagcgcctcacggttaagggacctgtcaggatgcccactaatgttcttctcatcacttacaggaagtccccttgtggtgaaggtaccaacacatgggacagatttgaacttcgtgtgcacaagagagtgattgacctctacagttcccc

SEQ ID NO: 240952 - DNA, 359 bp, Glycine max
gatagtattatcattcattctcatctttctctcttctctctccacccaaaccctaactcccgaccctgttcccctctcgtatccgtcatgaaaggaggaaagtccaagaccgaatctaagagagccgatcccaaacttgctgtgaataagaagggagccgccaccaaggctaggaaacccgccggcaaagggaaagcagcgaaagaccctaacaagccaaagaagcctccaagtgctttcttcgttttcatggaggagttcaggaaggtattcaacaaggaacatcccgacaacaaagcagtgtctgctgtgggcaaagctgctggagcaaaatggaagacgatgtctgatgctgaaaa

SEQ ID NO: 240953 - DNA, 159 bp, Glycine max
gaatatcaatatacgaagaaaaaaaaaaaaaaaaaaaaaaaagaaaagaaaaaaaaaaaaaaaaaaaaaaaaagcggacgcgctacacgataggatctaaccttaccttccattgcatgtcatatcacatctcttctatcatgtaacttaaattcaatt

SEQ ID NO: 240954 - DNA, 374 bp, Glycine max
  unsure (1)..(374): unsure at all n locations
ggcgtacacagcctcaacaaccctaacgcgtgcagagcagagagagacgcagccatggggcgaagacccgcgaggtgttataggcaaattaagaacaaaccataccccaagtcacggttttgccgtggtgttcctgatcccaagatcaggatttacgatgttggtatgaagaagaagggtgttgatgagtttcctttctgtgtccatctggttagttgggagaaggaaaacgtttctagtgaggccctggaagctgctcgtattgcttgcaacaagtacatggccaaatttgctggaaaggatgctttccacttgagagtcagggtgcacccattccatgttcttaggatcaacangatgctttcgtgtgctgg

SEQ ID NO: 240955 - DNA, 310 bp, Glycine max
gaattacaagcataagaaccatgtttttagtaatttataatttacaagtaacatatcggttgtctctctaaaaaaaaaaaaaaggaaaaaaaggaaaaaaaagaacaaaacaaaaaagaaaaaaagcagaccaaaagaaaagagaaaaaagagaaagaatgaaacttaacgaccagagcacaaaagcaaaaaaaaaaagggggggccccaaagggttaaaggctaagtcaccgtgccatggaaagtaaagcccctccaaaggggccccccaacgtacgtaacgggggcgcatttttaaaaaccgtggagg

SEQ ID NO: 240956 - DNA, 296 bp, Glycine max
ggtggtagtggggtaacgatacgtaataagttctatcattgaggaagtttcctgtgcatcgtctccgaaaatgaacgacgcagatgtctcaaagcaaatccagcagatggtgcagttcatccgccaggaagctgaggaaaaggccaacgagatctctgtctccgccgaagaggaattcaatatcgagaagctgcagttggtcgaagccgacaagaagaagatcaggcaagaatacgaacgcaaagagcgccaagttgaaattcgcaagaagattgagtactcgatgcaactaaatg

SEQ ID NO: 240957 - DNA, 362 bp, Glycine max
gacctaaaaattgtaccgatatggcttcacttgtgtgtctccttttttccttgcatttcatggttatcatgtcaggttccttaccagcaaatagtgaagtgtttacaaaagagtctcctatgtctctatccacaaaacccgtggaaagactcacccaactccacttttatttccataacaacaaaatgggggaacacccgactgctatgaaaattgttgagcctcctaaggcgtccatttctggttttgggactatttacatgatggatgaccctctaaccgaaggaccaagtccaacttcaaagcttgttggaagatgtcagggaatatatgctgaggcttcgcaacatgaacctgcgata

SEQ ID NO: 240958 - DNA, 375 bp, Glycine max
gattcccaaaatttctcattctccctttcctctccgaaccctcgatcactctcacgcgctcctatattcgctcctcaacggtcgctctctcgaacaaccacaacaccatcttcatcacatggcaaacgcagcatcgggtatggcagtccaggaggacggcaagttgaggtttttggagctgaaggcaaaaaggacacacggttacagagtttttaagatggaggagcaccagagccgggtcattgtggagaaccttggagagcgtgcacagcgctatgaagatttcagtgccagccttcctgctgacgagtgccgttatgctgtatatgattttgagtatctgactgaggggaatgtccctaaaagcagaatttt

SEQ ID NO: 240959 - DNA, 326 bp, Glycine max
gaaaacaaaaaccaatgagtcatggccaaaccaagaagccacaagcagacggtgaacccaccgaatgcggcgacgttttcggtgtctccaccgccgcggagcctcacgctgcgccggtggtgtccgccggtatcggttcggctgccatagatggcgaccccataaccatcggagaagctctggaagcggcggcaatatcgatcggggataaaccagtggaccaaaatgacgccgatgcgattggcgtcgcggagattagggccaccggagagaataaggtgaggtccggtggggtgggtgaaaccgcacaagaagcagctactttc

SEQ ID NO: 240960 - DNA, 343 bp, Glycine max
gactgactcactcttgttttcgcttcgctactcatcatcctaagaagtaccaggaagaaacaaacaatgtttctcaaagtccatctgcactggaatgtcatcatcgctgctgaaaatctgcaaccggaatgtctgatgcttcataaggcaatcattgtccgccttctgagtgactttgctgtgaacaaggccaccaaagatctgggatactttcttgcagtgaccacactggagaaaatatgggaaggaaaggtcagacaacatactggggatgtgcgcttccctgtggtttttaatgccatcaccttcaagtttttcaagggagagatattacatggtgttg

SEQ ID NO: 240961 - DNA, 367 bp, Glycine max
gttctttgcgagatagaagagaaagccgtcgctatcctagtctcttcttcccctctacccatttcagtttcaggatggaatctcaggtgaagcacgcccttgttgtcaaagttatgggtcgtactgggtctagggggcaggtgactcaggttagagtgaagtttttggatgatcaaaaccgacacatcatgaggaacgtgaagggacccgtgagagaaggagacattctcaccctacttgagtctgaaagagaagcaagaaggttgcgctagaggatctcttcatggtttggctcaggacttaaacaaaacatcgttgtttttgttgtagttaaaggatgtcaaatgttaattgtcatggacctgaa

SEQ ID NO: 240962 - DNA, 337 bp, Glycine max
ggaagaggatgtgagcataatggggtctgatttgcggttggcaactttcgggtctggaagaagagtgtgtcctgtgaaggcccttggtttggcctcggttcatctttggctcgctcagttgcttcaaaattttcattgggtttcagctgatggtgtttctgtggaattggatgagtttctcaagctttctatggatatgaagaagccactgtcttgcaaggctgtgcctatggtttctgtttaggtttatgtgtgtagttgggttgatgtggtttggtttgtctgtataggtttatggatgttcttcggatgagttggtttggtttgtgctatttgc

SEQ ID NO: 240963 - DNA, 258 bp, Glycine max
tacggggaactaggatccacacaacgaaaatcacttgccattcgttggttattgggggcatcccgaaatcgtccgggtcgatatatggctttcaaattaagttccgaattagtggatgctgccacatgtagtggcgatgccagacacaaaataaaagacggttacggcagctaacaagcggacgctcaagaagatccaagcttacttacgcatgcatgcgacatcatagctcttctatggtgtcacccaaagtcactt

SEQ ID NO: 240964 - DNA, 323 bp, Glycine max
aatggaagtagggtgatctattggaggctccgaacatacatccaatgaaagacctttttgttacaaaatttgaaagcaaagcaaatttccaattacaaaaatcacaaaaaaaagtcctcaattgtggtggctattctctctttggtgtttcactcaatttcgagtgtttcttagtccaatatctcttaaggtggttggccccttgcttcttgactcaaattcttcaaggtatgacaccaatcctcctttccaattccctatatggcaactcacaggcaatgaaacaaagagacaagcaataaccaaaaaaaaaagattctgac

SEQ ID NO: 240965 - DNA, 345 bp, Glycine max
  unsure (1)..(345): unsure at all n locations
aggggaattttttcaacccgttccccggaaaatttaaattgaactttcccccccccaaaaaaaaaaactaacaattggtcccccaaaaggaaaaaaaaaaccccccggaaaaaaaacccggaagaaaaaggcccaaccggaaaaaaaacccaaaggcggggaaaaaaaatatccaaaggaaggaggaaccgaaaaaaaaaaaaaaaagaacaaaaaagagctttgagacctacaagatctacatcntcaaggtgttgaagcaagtgcaccccgacatcgggatctcaaagcaagctatggggatcatgaacagtttcataaacgacatcttcgagaagctcgccc

SEQ ID NO: 240966 - DNA, 362 bp, Glycine max
gactcaccacttcaaaacactcataacacaaagcacaaagcaaagctcatccttgagttaaaaaatggcagcagcttcttccatggctctctcatccccatccttggctggcaaggccgtgaagctgggcccatcagccccagaagtgggaagggtgagcatgaggaagaccgtcaccaagcaggtctcctcaggaagcccatggtacggcccagaccgagtcaagtacttgggcccattctctggcgagcccccgtcctacctaaccggtgagttcccaggcgactacggctgggacactgctgggctttccgcagacccagaaaccttcgccaagaaccgtgaactcgaagtgattcact

SEQ ID NO: 240967 - DNA, 337 bp, Glycine max
  unsure (1)..(337): unsure at all n locations
gaacatgccgaaaagtagtaccaagatggcttcagttgtgtatctcctctttggcttccatctcattgttatcatgtcaagttccttacccgcaactagtgaagtgtttgcaaaacagtatccatccacagaacccgtggaagaaaaactcacccaactccacttctatttccataacaacataacgggggaacacccaactgctatgaaaactgttttgcctcctaaggggtccattcatggttttggggctacttacatgatggatgaccctctaactgaaggaccaagtccaacttcaaagcttgtgggaagatctcanggaatatacgctttg

SEQ ID NO: 240968 - DNA, 386 bp, Glycine max
catccaatgactatacattcattatatttttgtgtaaatagaggaaaaactcgatggaaaaatggtggtttaattctatgttgtttaataggaagttagaatacaggtgtgaattaagtaaatcaatggatagtcttggtcctattgaaaataccagtctaagggaagaccctaaaattttaaccgatatagaaaaaaaaattcacagggatttggattatttagaaatggaaggttttttttctagcgatctgaatactgtttctaagaatgatgatgatcattacatgtatgagactcaatttagttttaacaataatattactagtttcattgatagttgcattgagagtttcaatttaggtgatattgacaaatacaatgat

SEQ ID NO: 240969 - DNA, 350 bp, Glycine max
gtcatccaactctctaaacaacacattaacctttctcattccccatctcctcaccttattcagccactgctaatttctagggttccgaaatggacgctggcggaaagatcaagaagggcgccggaggaagaaagggcggcggccctaagaagaagccggtttcaaggtccgtcaaggccggtctccaattccccgtcggaagaattggccgttatttgaagaaaggaaggtacgcccagcgtgtcggtaccggtgctcccgtttacttggccgcagttctcgagtacctagctgctgaggtgcttgagttggctgggaatgctgcacgtgacaacaagaagaacaggatt

SEQ ID NO: 240970 - DNA, 356 bp, Glycine max
ggccgttgtttcatggaccagaacaacgcctcatagctcctttctcatttcacacacacaaagaaccttgagacatcatgaagattccaagttccaagcaactggttgtgggatttgcacttggaaatgaaggatatgcaacgttggagagctgaagaggatgctttactacgcgcatatgtcaaacagtatggtcctagggaatggaatctggtgtctcagcgcatgaacacacctcttaacagggatgccaagtcatgcttagaaaggtggaagaactacctcaagcccggcattaagaaaggatctcttacagaggaagagcagcgtctagtcatcaaccttcaagcaacaca

SEQ ID NO: 240971 - DNA, 389 bp, Glycine max
gacacacacttgcccatcatcaaagtttcttcctttctctgctctttgtcttctctgacacatttggggccttgttgagtgtgtttttgcaagagggtatggcgaaggacgttgaggttgctgagcgtggctccttctctgggaatgactaccatgaccctccaccagcagcactcattgatgctgaggagctcacagagtggtccttttacagggctcttattgctgagttcattgccactttgctcttcctctacattactgtgctcacacttatagggtacaagcaccagacggatcatgctgatgcgtgtggtggggttggcattcttggcattgcatgggcctttggtggcatgatcttcatccttgtccactgcactgctggg

SEQ ID NO: 240972 - DNA, 366 bp, Glycine max
gagcacaacgcaacacaacgcgcactctctcttttctctccttaacacaaaaaccctatcgttcttcgcggtttcgccgattctcgccatgccgaaagccaaatccgacgccaaagccgccgatagccggttgaagcgcaagggcgctggtgctggaaggaagcaatcgaagaaagctgctaaggatcctaacaagccaaagagacctccaagcgctttcttcgttttcatgtccgagttcagagagcagtttaagaaggagcatcctaacaacaaatccgtcgctgttgtcggtaaagctggtggtgacacatggaaatcgctgtctgatgctgaaaaggccccttcgttgccacggccgaaaag

SEQ ID NO: 240973 - DNA, 387 bp, Glycine max
  unsure (1)..(387): unsure at all n locations
ggttctagtgtgtgattgtttgttgttgtaactcgttcttcttcttttgttgttctgtgtttgtgtttgttttttctctcacctgaaaatgtcttgctgcggtggtaactgtggttgcggaagctcctgcaagtgcggcaacggctgcggaggctgcaagatgtacccagacttgagctacactgagtcaaccaccaccgagaccttggtcatgggagtggcacctgttaaggctcaatttgagggtgctgaaatgggtgtgcccgctgagaacgatggctgcaaatgtggaccaaactgctcctgcaacccctgcacttgcaagtgangtgttgggagagcaagcttcaagcagagatagcccttaattangaataaatgataact

SEQ ID NO: 240974 - DNA, 339 bp, Glycine max
gatccaaatccaccccaacacaaatcttagccgccattgatttttcctcttccatttctcttactttctcagcctttttcgattacccatttggttatttcgccctaatggctcttgctccatccaaagtttccaccttttctggtttttctcccaaacccagtgttgggggtgctcagaaaaacccaacttgctctgtttctctgagctttttgaatgagaaacttggaagcagaaaccttagggtttgtgcctcaacggtgcctctcactggggtgatttttgaaccgtttgaggaggttaagaagagcgagcttgctgttccaactgctccccaag

SEQ ID NO: 240975 - DNA, 319 bp, Glycine max
aaagggaaaatcaaccaatccaaaatggcctcccaacaatccccaatttaaaaaggctccttaacaaaagaaaaatggctcaagtttgtttgctcttggtggggcttctcacaatgttctcctctgcctatggctatggatatggtggtggctgggttaatgcacatgccaccttctatggaggaagtgatgcctcaggaacaatgggtggggcatgtggatatggcaacctctacagccaagggtatggaacaaacactgctgctttgagcactgctttgttcaaaaatggtcttagttgtggctcatgctatgaaat

SEQ ID NO: 240976 - DNA, 368 bp, Glycine max
gacactttccgtgtaaacagaacagagcaacactgaacaatggcgcaaccttcctcctcctcgaagcctgttgtccctctcctgaaggacgagctggacatcgtgatcccgacaatccgaaacctcgacttcctcgagatgtggcggcccttcttcgaaccttaccacctcatcatcgtgcaggacggagaccccaacaggaccatcaatgtccccgaaggcttcgattatgaactctacaaccgcaacgacatcaatcgcatcctcggacccaaagcctcctgcatctcgtttaaggattctgcgtgtcgctgctttggttacatggtctccaagaagaagtacatctacaccatcgatgacgactg

SEQ ID NO: 240977 - DNA, 375 bp, Glycine max
gacttgcggctgcagtagagaagcactcttcgttcttcgactgtctacgatctgctttctctgaattgtgaaaatgtcgctcggagaaactgcttgttcatacgcagctctcatccttcatgaagatggaattagtgtaactgctgacaagatcagcaccttgttgaaaactgcaaaggttccagtagactcttattggccaaccttgtttgctaaacttgctgagaagaaaaatcttggcgatttgatagcaaatgcggcaggcggtggtgcaccagttgctgttgcagctgccccagttgctgctgctgctggtggtgctgctgccgcagctccagctgctgaggagaaaaagaaggaagaaccggaagaaga

SEQ ID NO: 240978 - DNA, 385 bp, Glycine max
actcacaactccataacacaaggcagaaagcaagctcatcctagagttttaaaaatggcagcagcctcctccatggctctctcttccccatccttggctggcaaggccgtgaagctgggcccatcagcccccgaagtcgggagggtcagcatgaggaagaccgtcaccaagcaggcctcctccggaagcccatggtacggcccagaccgcgtcaagtacttgggcccattctctggcgagcccccgtcctacctcactggcgagttcccaggtgactacggctgggacactgctgggctttcggccgacccagaaaccttcgccagaaaccgtgagctcgaagtgatccactccaggtgggccatgctcggggccttgggctgcg

SEQ ID NO: 240979 - DNA, 291 bp, Glycine max
aggcggatataacccataaaggtttgcccgttctttgtacataaacccttgtgatactttcacgcagtttcagtagctcttccgcttccaagataaagtctcccgtttgtgcctcataaaaagaactagcgggttggtggatcattaccctgattttataacttaataagtatttcccttatcttgataaagattttgataatgacttctcctatattggtaaagattatccttattcccaaataaaggtaaaaaggataaatacacgtgacgggagagacagtggccaaa

SEQ ID NO: 240980 - DNA, 342 bp, Glycine max
gggaagcgaaagaggaatcagaaccgtggaatgtgagaagccccagggcacacagctactacaaaaacccgacctatttcatttcacgtgttgtctagcccgccgagaaaaccctaattcgctcgcagtcacccaagaggcgaatccttaccattgctcgagatgggtgaagaagtgaaggccgtggttccagagtctgttttgaagaagcagaagagagatgaggaatgggcgttggccaagaagcaagacctcgaggctgcgaagaagaagagagccgagagccgcaaactcatctacaacagagctaagcagtacgctaaggagtacgatcaccaggag

SEQ ID NO: 240981 - DNA, 385 bp, Glycine max
gagagtggtggagtgtgcaaaagagcgtcgtagtcgcaaccctaatcagaggaagcgcagcttcaagcgagtgacagccaccagccatgggtcgtatgcacagccgccgtaaagggtaaacctccttcggcttggcccaacaaaagggaactcctaacctggtccagatatccttcgcagatattcaagagaaaatacctgcaatttggcgagaaaagggttagaccctgtcacagatgggtgtcattcacagagattcacagggtattgcacaggtcaatagcgtcactggcagcaaaatctttcgcatcctcaaagctcacggatttgcgcctgaaattccagacgacctgtaccatttgattaagaagcagtttcaattagg

SEQ ID NO: 240982 - DNA, 261 bp, Glycine max
aggggggccaggtattgaaatactgctacaatacagattgcgttgttgctccgtcgccacaagtccctgccatgcatgggtatctccagagattctatgcacaacatgcgtgctgactggtggcaagaatagcgcatgcatgaacaagagaaagtatgagcttggtcgccagcctgctaacaatacactgtcaagcaaccagacagtcaggacgattcgggtgacaagtggaaatgtgaattgcatggcactgatattgga

SEQ ID NO: 240983 - DNA, 368 bp, Glycine max
ggtctcactctcacttttgatttttttgccctaaaaccctcgctgccgtcgtggtggccgcccaagaaaagagaatagagagcgcaaacgagtcttcatcttcgactcaccatgaagctcgtcaggtttttaatgaagttgaacaatgaaaccgtgtcaattgagctcaagaatggcactattgttcatggcaccattacaggtgttgatatcagtatgaacacacatttgaaaacagttaaactaactctgaaagggaaaaatccagtgactctggatcatctcagtgtgaggggtaacaacatccgttactacattcttcctgacagcttgaatctcgagaccctgcttgtggaagagacacctaa

SEQ ID NO: 240984 - DNA, 392 bp, Glycine max
ggctgacaagccaatcctttgtgtaggtgctcaaccctagtaagccgcaatggtgaagtactcaagggagcctgacaatccaactaagtcttgcaaggctagaggcgccgaccttagggttcattttaagaacacaagggaaactgcctttgcaatcaggaagttgcccttggtcaaggctaaaaggtacttggaatatgttcttgcccacaagcaggcaattccattcagacgtttttgtcgaggtgttggaaggacagcccaggctaagaatagacactctaatggccaatgacggtggcctgtcaagtcagcaaaattcattcttgatttgctcaaaaatgctgagagcaatgctgaagtgaaacgtttggatgttgatgcactgtaca

SEQ ID NO: 240985 - DNA, 368 bp, Glycine max
ggttgatataaacttcagacagagcgagttgttgtaaagctagccttgttgcagccatggccacccacgcggctctagcttctacaaggatccccactaacaccaagttcccatccaaggcttcacactctttcccaacccaatgcgcctcaaagagacttgaggtgacagaattctctgggctaagatccacttcatgtgtgacatatgctaacgatgctagagaatcttccttttttgatcttgtagcttcccaactcactcccaagaccaatggatcatcaactcctgtgaggggagagacagtggccaagttgaacgtggcaatcaatggtttcggacgcattggtataaacttccatcgctgc

SEQ ID NO: 240986 - DNA, 345 bp, Glycine max
  unsure (1)..(345): unsure at all n locations
gatgccgaaaagtagtaccaagatggcttcagttgtgtatctcctctttggcttccatctcattgttatcatgtcaagttccttacccgcaactagtgaagtgtttgcaaaacagtatccatccacagaacccgtggaagaaaaactcacccaactccacttctatttccataacaacataacgggggaacacccaactgctatgaaaactgttttgcctcctaaggggtccattcatggttttggggctacttacatgatggatgaccctctaactgaaggaccaagtccaacttcaaagcttgtgggaagatctcanggaatatacgctttggcttcacaaca

SEQ ID NO: 240987 - DNA, 334 bp, Glycine max
gggggagaaggacttgacattgttgtagtgatgatctgtgaacatttccggtattcaccactctccttcttatctttttcttctcctccttcaactcgttaccatctctatataccttcttcttcttcttcttccttttctgtgtcttgctctctcatggagaatcaggagacccacaacaaccaaggccgcagcaaattcgtggactttccgttcgtttcatctgcccagaacaatcttatggttgatctcgtctcaacgcttgagaatcgctttcacactcagcttcttccttgcacactcccctctgatgttcagtattatcaaagccaaa

SEQ ID NO: 240988 - DNA, 325 bp, Glycine max
gacacaaactttattacagttgttgtattgtaattaagcaagaatattaggcaatggagtcttctagaacttcaactactcttgctctttttttaaccatcaatttgcttttctttgtcatggcaagtggctgctacacttgcacacagcctaagccaaaccctatcccattcccttaccctaaccctagtcctgccgcgaagagctgccccagggacgcacttaagctcggagtgtgcgcaaacgtgcttaatggaccaattggtgctattgtagggtcaccaccggaccacccatgttgctcagtgctagaagggcttcttga

SEQ ID NO: 240989 - DNA, 367 bp, Glycine max
ggtttgttgttgtaactcgttcttcttcttttgttgttctgtgtttgtgtttgttttttctctcacctgaaaatgtcttgctgcggtggtaactgtggttgcggaagctcctgcaagtgcggcaacggctgcggaggctgcaagatgtacccagacttgagctacactgagtcaaccaccaccgagaccttggtcatgggagtggcacctgttaaggctcaatttgagggtgctgaaatgggtgtgcccgctgagaacgatggctgcaaatgtggaccaaactgctcctgcaacccctgcacttgcaagtgaggtgttgggagagcaagcttcaagcagagatacccttaattaggaataatgataa

SEQ ID NO: 240990 - DNA, 364 bp, Glycine max
agggagcattcatcacaagcctctctctatattccattgccacccagttttgaatatatttttattccttctttgtttcttcacgttcgtccatacacataaccatgtcgtctcagactgttgtcctcaaagttggtatgtcatgtcaagggtgtgctggagcagtgaacatggttttgggaaaaatggaacgtgttgagtcatttgacattgatctgaaggagcagaaggtgacagtgaaaggaaatgtggagccagatgaagttctgcaagccgtttccaaatctgggaagaagactgcattctgggtggatgaagcaccagagtctaaaaacaagcctttatacagtgcacctgttgcctc

SEQ ID NO: 240991 - DNA, 401 bp, Glycine max
ggaatagagagctcctccaattagggtttttgtgatctgcagctacgatgggtaagggaacggggagtttcggtaagaggaggaacaagacccacaccctctgtgtgaggtgtggccgccgcagcttccacctccagaagagtcgttgctctgcgtgcgcttaccccgctgcgcgcaccaggaaatataactggagcgtgaaggccattaggagaaagaccaccggaactggaaggatgaggtacttgcgtaacgtgcctcgcagattcaagagcggcttcagagaaggtaccgaagctgcacccaggaagagaagagctgctgcctctgcctaagctttgaatgaatgacagcaatttttgctgggtcagtgaattataggagttaatgtatctgtgttg

SEQ ID NO: 240992 - DNA, 370 bp, Glycine max
ggcccaaattttttcatagcattttcagaggaacaatggcgggtagggtttcgacgtgcttcttcttcgtgtttgctctttctctccttcttccttttcagatctccgctgaggaatcatcggagaaagagttcgtactcacattggatcactctaactttcacgacactgtcagcaagcacgatttcatcgtcgtcgagttctacgctccatggtgtggccactgtaagaagcttgctcccgagtatgagaaagctgcttctatcttgagtagtcatgatcctccggttgttttggctaaaattgatgccaatgaggagaagaacaaagaccttgcatctcaatatgatgttgggggatacccaacaat

SEQ ID NO: 240993 - DNA, 359 bp, Glycine max
  unsure (1)..(359): unsure at all n locations
gaaagtggacagaagagagcgtcctagtcgcaaccctaataagaagaaccacagcttcaagcgagtgacatccaccagccatgggtcgtatgcacagccgcggtaagggtatatcctcttctgctttgccctacaaaaggacaccccctagctggctcaagatctcttcgcaagatgtggaagaaaatatctgcaagtttgcgaagaagggtttgaccccgtctcagattggtgtcattcttcgagattctcacggtattactcaggtcaacagcgtcactggcagcaaaatccttcgcatcctcaaagctcacgggcttgcgcctgaaattccagangatctttaccatttgattaag

SEQ ID NO: 240994 - DNA, 347 bp, Glycine max
gaatcctcagaatcagcttcagcctttctctctaactccctcactcacactcacagttaagcaatggcggggaaaggaggaaaggggcttcttgtagcgaaaaccaccgcggctaacaaggacaaagacaaggacaagaagagacctatttctcgttcatctcgtgccggaatccagtttcctgtgggacgtatccataggcagctgaaacaaagggtccaagctaatggacgtgttggtgccactgctgccgtatacttagcctcaattcttgagtatcttactgctgaagttcttgaacttgctgggaatgcaagcaaggatctgaaggtgaaaaggataacacc

SEQ ID NO: 240995 - DNA, 348 bp, Glycine max
gaaactcgttctagtgtgtgattgtttgttgttgtaactcgttcttcttcttttgttgttctgtgtttgtgtatgttttttctctcacctgaaaatgtcttgctgcggtggtaactgtggttgcggaagctcctgcaagtgcagcaacggctgcggaggctgcaagatgtacccagacttgagttacactgagtcaaccaccaccgagaccttggtcatgggagtggcacctgttaaggctcaatttgagggtgctgaaatgggtgtgcccgctgagaacgatggctgcaaatgtggaccaaactgctcctgcaacccctgcacttgcaagtgaagtgttgggagagc

SEQ ID NO: 240996 - DNA, 370 bp, Glycine max
ggcgactgagaagtgcgacgctgctgcaaagtgcaagcggatttggtcttcttctttactcccaatcatttctctgtgcaaggataagtgtgttatctatctaataacacaagatgtcagctgggcctggacttgaatctctagtagatcagacaatttcagtcattacaaatgatggacgaaatatagtgggaatcctgaaaggttttgaccaggcaacaaatattattcttgatgagtcccatgaacgggtttattctacaaaggaacgtgtgcaacaacttgttcttggtttgtacatcatcaggggttaaaatataagtgttgttggtgaactggatgaaaaactagattccaatcaggatttgtc

SEQ ID NO: 240997 - DNA, 390 bp, Glycine max
ggtgcctggccatccggtttcccagatctgctccttcctcaccccacagaagtcagttgaagagcatgggtcgtggagttagcagtggtggtggtcaaagttccttgggttatctttttggcagtggagaggcccctgccgcaaaaccggcaacaaacaatgccccagcccaacctgaagtgcaggctgtaaataatgcgcctccttcaaaagcatctcctcctactaaaacaatagaccctaacaaggctgctggtataaacagtcattctactgatggccagaacaccggcaacttcatcacggaccgaccctcaaccaacgtccatgctgcccctggtggtggttcttctctgagttatctctttggtggacctggagaggggaaat

SEQ ID NO: 240998 - DNA, 389 bp, Glycine max
ggtgctctgctcgtgcctctacggttatcagttctccatttccattttctctctcacttttcaagaatcgtaagctatgggaaagtcttacccaactgtgagtgctgattaccagaaggccgttgagaaggcgaagaagaagctcagaggcttcatcgctgagaagagatgcgctcctctaatgctccgtttggcatggcactctgctggaacctttgacaagggcgcgaagaccggtggacccttcggaaccatcaagcaccctgccgaactggctcacagcgctaacaacggtcttgacatcgctgttaggcttttggagccactcaaggcggagttccctattttgagctacgccgaattccaccagttggccggcgttgttgccg

SEQ ID NO: 240999 - DNA, 389 bp, Glycine max
gatgccgaaaagtactaccaagatggcttcagttgtgtatctcctctttggcttccatctcattgttatcatgtcaagttccttacccgcaactagtgaagtgtttgcaaaacagtagccatccacagaacccgtggaagaaaaactcacccaactccacttctatttccataacaacataacgggggaacacccaactgctatgaaaactgttttgcctcctaaggggtccattcatggttttggggctacttacatgatggatgaccctctaactgaaggaccaagtccaacttcaaagcttgtgggaagatctcagggaatatacgctttggcttcacaacatgaacctgggttgctcatggtgacaaattttcccttcaatttgg

SEQ ID NO: 241000 - DNA, 220 bp, Glycine max
  unsure (1)..(220): unsure at all n locations
caccttcctcgttctcattctcctcgctctcggcatcctctccattcccagctcctcgcgcggcaatttgcccaaacctaacgatctcgcatccatcgctcgcaacacaatcgagacttccgacagtgacgagaggggggagcagtgggttgaagtagtgtcgtgggggcccagagcctttgtttatcacaattttctgaccaaggangaatgcgaatat

SEQ ID NO: 241001 - DNA, 343 bp, Glycine max
gattgttggcttgtgctctgctcgtgcctctagggttatcatatctccatttccatttcctctctctcagtttccaagaatcttaagctatgggaaagtcttacccaaccgtgagcgctgattaccagaaggccgttgagaaggcgaagaagaagctcagaggcttcatcgctgagaagagatgcgctcctctaatgctccgtttggcatggcactctgctggaacttacgacgtgagctcgaagaccggtggtcccttcggaaccataaagcacccctccgaactcgctcacggcgctaacaacggtcttgacatcgctgttaggcttttggagccactcaa

SEQ ID NO: 241002 - DNA, 334 bp, Glycine max
ggaatgttttttttattattgtgttgtttgtttggtttaattcttttgaaccccaatcatctaaacatgacattttcttcataatttctgaaccctggaggcttcagtttactgttgattttcgtgttatgcttctaccaatgccataagcttgaagcaggaactaaatatggctgacttgttggaatggtcaaagcaagataagaaacgaatgcttcatgtcgtctaccgtgttggtgaccttgatcgcaccatcaaattttacacagaatgtttaggaatgaagcttttgaggcaaagagatatcccagaggagaaatatgctaatgctttt

SEQ ID NO: 241003 - DNA, 280 bp, Glycine max
gagagtgatccttctacactaactaaagccgagcagcgagagagagaaaccctatcagaaatgccggctggtcacggtttgagatcccgcaccagagattccgtctctcgtcccttcaggaagaagggtaccatcgtcctcaccacatatctcagaacctaccacgtctgcgattatgtcgacatcaaggttaacggcgccatccacaaaggaatgcctcacaagttctaccatggccgcaccggtcgcgtctggaatgtcaccaaacgtgctgttgggg

SEQ ID NO: 241004 - DNA, 313 bp, Glycine max
  unsure (1)..(313): unsure at all n locations
gagggtttggttattagggttttcgctgaccggtgcgcagtcgagcctccagaagacgaatcgaaaatgccgtcgcacaagacattcagaatcaagaagaagttggcgaagaagatgaggcagaacaggcccattccctactggatccgcatgaggaccgataacaccatcaggtacaacgcgaagcgccgtcactggcgtcgcaccaagcttggattctgaggtgtatgctctgcctaggttcaatttatccaattaattagtgttttattttcttgaggcanaaacaatgttttgagtttttaatattttc

SEQ ID NO: 241005 - DNA, 349 bp, Glycine max
ggaggctgagttctgtaattgtgttttggctgtggacaatggctctgtcttctgggcttttcttgtgttcttcttcccgtgttctcccaccaccagaaacccacactttcatgaggaccaggccttcttctgctgccttgcgcaccatttccgttagctgttgcaccgtctctcagtcgtctaagccagcccgcaaaatccgtggtatcatgaaaccccgcaaagtctcccccgagatggaagacctcgtcggcgctcccgagatggctcgaacccaagtcctcaaacggatttgggcttacattaaggacaacaatcttcaggaccctacagacaaggggactataaa

SEQ ID NO: 241006 - DNA, 319 bp, Glycine max
ggttctagtgtgtgattgtttgttgttgtaactcgttcttcttcttttgttgttctgtgtttgtgtttgtttttttctctcacctgaaaatgtcttgctgcggtggtaactgtggttgcggaagctcctgcaagtgcggcaacggctgcggaggctgcaagatgtacccagacttgagctacactgagtcaaccaccaccgagaccttggtcatgggagtggcacctgttaaggctcaatttgagggtgctgaaatgggtgtgcccgctgagaacgatggctgcaaatgtggaccaaactgctcctgcaacccctgcac

SEQ ID NO: 241007 - DNA, 337 bp, Glycine max
gatggtttggttattagggttttcgctgaccggtgcgcagtcgagcctccagaagacgaatcgaaaatgccgtcgcacaagacattcagaatcaagaagaagttggcgaagaagatgaggcagaacaggcccattccctactggatccgcatgaggaccgataacaccatcaggtacaacgcgaagcgccgtcactggcgtcgcaccaagcttggattctgaggtgtatgctctgcctaggttcaatttatccaattaattagtgttttattttcttgaggcaaaaacaatgttttgagtttttaatattttccatttgttcgaagactatattgtg

SEQ ID NO: 241008 - DNA, 357 bp, Glycine max
gaatttgtggtcgacaaagaagctgcaatggtttcacagaccatacataacatgcttacttctccagggagtttcgctgagaggcagcacggcgaagttacctttcctgagatcagcaccaccattctcgagaagatttgccagtacttttattggcatctccaattcgccagtgggaaggagacggaatttcccattgaacctgaattaactctggagctaatgatggctgccaattacctccatacatagcattttgacttccccaagggtgatagttcttcggccacataatggaactattgcctagttgggcattcaaagggaaatcagcgtattagtgttgccactgaaact

SEQ ID NO: 241009 - DNA, 367 bp, Glycine max
gatcacatacaacactctctccaaagttcaaattaagactgaggggtgagaaagagagaattgatatgggtgccggtctagttgcgttcctcttaatggttcttgtgcaattggtctatgcagtgatgaacattacttcaaagcttgcaatagaatctggaatgagccctcttgtccttgttgcttatcgacaactctttgctactgtgtccattgctcactttgcttattggctcgagtggaatacgcttcccaggattacacagcgtcttatgattcagatattattttcgtccctgaccggagttacaggaaatcagatgctttattttgtggggctgaaatattcatccgctacaattgcatg

SEQ ID NO: 241010 - DNA, 313 bp, Glycine max
gaaaagaagaaaaaaaaaagggaatcaacaaaaagaggaacaacagcaatatcaaacatgtcctcctcatccacttccttttcaccggaccaacaacacctctctccctccgaccagctctgctatgtccattgcaacttctgtgacactgtcctcgcggtgagtgttccttgcaccagcttgttcaagaatgtcactgtgagatgtggtcattgcaccaaccttctctcagtcaacatgcgtggactgcttcttccaagtgccaatcagcttcaccttggccacactttcttcactcctcaaaatcttatgg

SEQ ID NO: 241011 - DNA, 356 bp, Glycine max
ggccgaaaagtagtaccaagatggcttcagttgtgtatctcctctttggcttccatctcattgttatcatgtcaagttccttacccgcaactagtgaagtgtttgcaaaacagtatccatccacagaacccgtggaagaaaaactcacccaactccacttctatttccataacaacataacgggggaacacccaactgctatgaaaactgttttgcctcctaaggggtccattcatggttttggggctacttacatgatggatgaccctctaactgaaggaccaagtccaacttcaaagcttgtgggaagatctcaaggaatatacgctttggcttcacaacatgagcctgggttg

SEQ ID NO: 241012 - DNA, 352 bp, Glycine max
agggctgaacgaaagaagatattaagggttttgagtgccgtgcggcgatcctagcactctcttctgcagctttcgccgacagcttcattcaccatggctgagcaaaccgagaaggcttttttgaaacaaccaaaagtgtttctcagctcgaagaaaactgggaagggaaagagacccggaaagggtgggaaccgcttttggaaatccattgggcttggatttaagactcccagggaagccatcgaaggaacctacattgacaagaagtgccccttcactggcaatgtttctatccgtggccgtatcttggctggaacatgtcacagtgctaagatgaacaggactattattg

SEQ ID NO: 241013 - DNA, 363 bp, Glycine max
gttcccaacaaaacactcactatcataagggaaaattgcctaaaattattacacacaaatggaagtagggtgacctattggaggctcccaacttacttccaatgaaaggcctttttgttacaaaatttgaaagcaaaacaaattgccaattacaaaattacaaaaacaaaaagtcctcaattgtggtggctattctctctttattgtttcactcaatttggagtgcttcttagtccaatagctcttatggtggttggccccttgcttcttgactcaaattcttcaagatatggcaccaatcctcctttccaattccctatatggcaactcacaagcaaggaaacaaagagacaagcaataatc

SEQ ID NO: 241014 - DNA, 331 bp, Glycine max
gagaatagagagctcctccaattagggtttttgtgatctgcagctacgatgggtaagggaacggggagtttcggtaagaggaggaacaagacccacaccctctgtgtgaggtgtggccgccgcagcttccacctccagaagagtcgttgctctgcgtgcgcttaccccgctgcgcgcaccaggaaatataactggagcgtgaaggccattacgagaaagaccaccggaactggaaggatgaggtacttgcgtaacgtgcctcgcagattcaagagcggcttcagagagggtaccgaagctgcacccatgaagagaggagctgctgcctctg

SEQ ID NO: 241015 - DNA, 345 bp, Glycine max
ggttctagtgtgtgattgtttgttgttgtaactcgttcttcttcttttgttgttctgtgtttgtgtatgttttttctctcacctgaaaatgtcttgctgcggtggtaactgtggttgcggaagctcctgcaagtgcggcaacggctgcggaggctgcaagatgtacccagacttgagctacactgagtcaaccaccaccgagaccttggtcatgggagtggcacctgttaaggctcaatttgagggtgctgaaatgggtgtgcccgctgagaacgatggctgcaaatgtggaccaaactgctcctgcaacccctgcacttgcaagtgaggtgttgggatagcaag

SEQ ID NO: 241016 - DNA, 142 bp, Glycine max
gatccaaattcaagttcgcaccaaattttcctcccaaaatgtcaggccgtggaaaaggtgggaagggtttgggaaacggacgagctaagacgcacagaaaggttcttcgtgacaacattcaaggaatcacgaaacctgcgat

SEQ ID NO: 241017 - DNA, 359 bp, Glycine max
ggattttcgttctctgcgttttctttcatcgtcgtcttcaagactgcgacgacgatccaagtgatggacactcgtcgcgatggaacgtgtagctgaatccgagcgaactctgtacccatacgtgactggatcctctgtagtcgctatcaaatacaaagatgggattctaatggccgctgacatgggaggttcgtatggatctaccctgcggtacaagagtgttgagcgtatcaagcctattggaaagcattctcttcttggtgctagcggggagataagtgactttcaggagattctgcgttaccttgatgagcttatcctatatgacaacatgtgggatgatgggaaatttctagggc

SEQ ID NO: 241018 - DNA, 291 bp, Glycine max
ggcccaggtaaaaaaaccaaaaaaccaaaaccataagggaacacagcggcggtaacagaagaacaagcagagaatgggtccagtgagaacgaagaccgtgaagaaatcctctccgcacgtgatatagcgtcactactcgcgcatgaccctggacttccacacgaacaagaaacttctggaggaaatggcgataatcccgtctaaaaggctcaagaacaagatctccgggttctcgacacacctgatgaaacgcatccacaacggccctgtgcgccgcatctccctcaagct

SEQ ID NO: 241019 - DNA, 359 bp, Glycine max
gaccaacacttgtagccacaaatccaaattatagtaatatttcatgcttctctatcactcttgtcaaattccacaaaaaccaagtactacaagggaagaagaacttagctacaagctaaggaaggatcaaagagaatggctcaagcaatggcatcaatgactagcttacgtggttcctctcaggctgtgttggaaggtagccttggctccacacgcttgaatgtggggagtggaagcagggtggcctcagtcacacgtgcagggttcacagttagagcacagcaacaacaagtgaatggtggtgaggtacaaagtagccgtacggcagtgcttccacttgttgctgctggtttgaccac

SEQ ID NO: 241020 - DNA, 293 bp, Glycine max
  unsure (1)..(293): unsure at all n locations
ggctttcagttggcgcgggtgaggtagaacccttccactgtggtgactctgcgatgggtgcctacaagtatgtttcagagctatggcgcaagaagcagtctgatgtcatgcgcttcttgcagcgggtgaagtgctgggagtataagcagcaaccttccattgttcgtttgacaaggtctacccgccctgacaaggctcgtcgcttgggcttcaaggctaagcanggctatgtgatttaccgtgttcgtgttaggaagggtggccgaaagagaccagttcccaaatgtattgtt

SEQ ID NO: 241021 - DNA, 365 bp, Glycine max
gatccacatcctccacagcacaactccactcttagctgccattggtttttcttcttccatttctcttcctttctaagcttttttcgattacccatttggagattctgtcctaatggctcttgctccttccaaagtttcctccttttccgggttttctcccaaacccagtgttggggatgctctgaaaaacccaacttgctctgtttctctgagctttgcgaatgtgaaacttggaagcagaaaccttagggtttgtgcctcaactgtgcctctctcaggggtgattttcgaacccttcgacgaggttaagaaaggtgaacttgctgttccaacggctccccaagtctcgcttgctcgtcagaact

SEQ ID NO: 241022 - DNA, 368 bp, Glycine max
ggtctcgtggaagtgtaagcaagcaaaaccctagcggcgcctgctttctttgttcgtgttttgcatcaggatggagtctcaggtgaagcacgcacttgttgtcaaagttatgggtcgtactggatccagaggacaagtgacccaggttagagtgaagtttttggatgatcagaaccgtcacatcatgaggaatgtgaaaggacctgtgagagaaggagacattctcaccctactcgagtctgaaagggaagcaagaagattgcgctagatggtctcttttttttggcttgcctccaaattcgaacaaaagcaatatttttcttgatatttatggtagttagtcggtgctaaaggggttatagcaccct

SEQ ID NO: 241023 - DNA, 361 bp, Glycine max
gaatagaaatagaactgtcttttcatatagatatcccttcaacacaacataggtcatcgaaaggatctcgaagacccaccaacgcacgaaagccgggatctttcagaaaatggattcctattcgaagggtgcataaccgcatggataagctcacactaacccgtcaatttgggatccaattcggttccttaggaggtatcgggaaggaattttggaatgtaataatatcgattcatacagatacagaagaaagggttctctattgattcaaacgctctacctacgagatagggatagagaaagaggaaaaaaccgaggatttcacatagtacttttggtcgaaaaatcgatctgatttttt

SEQ ID NO: 241024 - DNA, 400 bp, Glycine max
  unsure (1)..(400): unsure at all n locations
gacttctcttcacacctttgttcactcttcttctcttgcggctagggttttagcgcagcttcttctagatttaaggaagatgggtaaggaaaaggttcacatcagtattgtggtcattggccatgtcgactctgggaaatccactaccactggtcacctgatttacaagcttggaggcattgacaagcgtgttattgagaggtttgagaaggaagctgctgagatgaacaagaggtctttcaagtatgcctgcgtgctggacaaacttaaggctgagcgtgaaagaggaatcaccattgatattgctttgtggaagtttgaaacaacaaagtattattgcacagttattgatgcgcctggacatanggatttcattaagaatatgattactgggacatcc

SEQ ID NO: 241025 - DNA, 404 bp, Glycine max
ggacatcacatttcgttgcgcctttgatctctgtccccgctgcgtctctcgtaatcatgcctaagcaaatccacgagattaaggatttccttctcactgccagaaggaaggatgcgaggtcagtgaagatcaagaggagcagagatgtggttaagttcaaggtcagatgctccaagtacctctacacactttgtgtgtttgacccagagaaagctgataaattgaagcaatctcttcctccaggtttgagtgttcaagacctgtaaaggtactgggcgagagatcaagaagaagcaattcattgattcttctgaagtttgattctctgtagttgaagcttgagatttttgtcagttggtcttttattatagattattgctaagacatggttgtttttatctgtt

SEQ ID NO: 241026 - DNA, 322 bp, Glycine max
gacaacttcaatccctcttttgctttaccaaattccattttccaattcaaaaccctaactccgttcgaagcaccaaatcgtgatggcaccaaaggcagagaagaagccagcagagaagaagcctgtggaggagaagaaatcgacggtgggagacaaggctccggcggagaagaagccaaaggccggaaagaagcttccgaaggagggaggcgccggcggagaaggtaagaagaagaagagaaacaagaagagcgtggagacatacaagatctacatcttcaaggttctgaagcaggttcaccctgacattggtatctcaagc

SEQ ID NO: 241027 - DNA, 250 bp, Glycine max
gaagatttgtgagagaaagggagaaagggtgtgagaatggagagcaaagaggaagatgtaagggttggagcaactaagttctcagaaaggcaaccaattggtacagcagctcagggtgacaaggactacaaagaaccacccccagcacctttgtttgagcctggtgagctaaagtcatggtccttctacagagctggaattgctgagtttgtggccactttcctgttcctctacattaccatcttaactg

SEQ ID NO: 241028 - DNA, 337 bp, Glycine max
gactccatcctccgcttcgtgacttgcagcaattcccaatggcttccgtttccaagctctcaacgccaaatccacttgcttccttatcagaagcgcttcgcccccgagattctcgcttcctcaccttcaaaccttcttccatcgcttttaatcacaaaactaacctatccgcttccctccgatccattcactcgctccctcttaaaacctccttacggatcaaatgctcccaaacagatgggaatggaagtcctgcaaagaggacagtgcttcatgatctttatgagaaagaagggcagagtccatggtatgataatctctgcagacctgttacaga

SEQ ID NO: 241029 - DNA, 364 bp, Glycine max
gaggtttttagggtttacactgaggaggcacaccttcaggagcagtcatggttctcaaaaccgagctgtgccgattcagcggtgccaagatctacccagggaaaggcatcagatttgttcgtggtgattctcaggttttcctgtttgctaactcaaaatgtaagaggtatttccacaacaggttgaagccgtcaaagctcacgtggactgcaatgtaccgaaagcagcataagaaggatattgctcaagaagctgtgaagaagagaagacgtgctaccaaaaaaccttactctaggtctattgttggtgctactttagaagttatccagaaaaagagaaccgagaagccagaagttcgagatgc

SEQ ID NO: 241030 - DNA, 383 bp, Glycine max
  unsure (1)..(383): unsure at all n locations
ggtgaacaagcctcaggtaagccaaagccatggttaagcataacaatgttatccccaacggacacttccgtaagcactggcagaactatgtgaagacctggttcaatcagccagcacggaagacaagaagacggttggctcgtcagaagaaagctgtgaagattttccccagacctacagctggacctcttagacccattgtacatggtcaaactttgaaatacaacatgaaagtgagagctggaaggggattttcccttgaagaactcaaggcagcagggattcccaaaaagcttgcaccaacaattggtattgctgttgatcatcgccgcaagaaccgttctttggaaagtctgcaggctaatgtgcanaggctgaaaaca

SEQ ID NO: 241031 - DNA, 262 bp, Glycine max
gacttctcttcacacctttgttcactcttcttctcttgcggctagggttttagcgcagcttcttctagatttaaggaagatgggtaaggaaaaggttcacatcagtattgtggtcattggccatgtcgactctgggaaatccactaccactggtcacctgatttacaagcttggaggcattgacaagcgtgttattgagaggtttgagaaggaagctgctgagatgaacaagaggtctttcaagtatgcctgggtgctggac

SEQ ID NO: 241032 - DNA, 372 bp, Glycine max
gacccacagggaggcgaacagagaaactcagagacccgaaggcagatttcaagatgaagttcaacattgcgaatcccaccaccggttgtcagaagaagctggagatcgatgatgacctgaagctgcgagcattttgggacaagaggatctcacaagaggttgttggtgatgctctgggtgaggaattcaaaggttatgtcttcaaaattactggaggttgcgacaagcagggatttccaatgaagcaaggagtgttgacccctggtcgtgttcgcctcttgctgcatagaggaactccttgtttccgtggttacggaaggcgcaatggagagcgtaggaggaagtctgttcgtgggtgcattgtcaaccctg

SEQ ID NO: 241033 - DNA, 338 bp, Glycine max
gaaccattcaaacgcacactctctctcaccaaagccttcctagaacgaaaaaaaaaagaagagcaattttccctcaccaaagaagaagaagcaaacaatggccgatcaacttaccgatgaacagatctccgagttcaaggaagccttcagcttgttcgacaaggacggcgatggttgcatcacaaccaaggagcttggaactgttatgcgttcattggggcaaaacccaactgaggcagagctccaggacatgatcaatgaagtggatgctgatgggaatggtaccattgacttccctgagttcctaaatctcatggccaagaagatgaaggacactg

SEQ ID NO: 241034 - DNA, 367 bp, Glycine max
ggctcttggctgatatttcctgataagtggacagacgcttaaacagagaaactaacacagatttgcatgcatggggaaaataacgcacattgtagtaattcccagtgcagggtacagccacttcgttcccgttatccacttctcaaagagacttgttgagcttcacccagaaattcacgtcacatgcatcattcccattctggggtctctcccaagtgctgcaaaacccattctccaaacccttccacagaacatcaacacggttttccttccaccggtgaaccctaatgacctaccacaaggtgttcccgtagttgtccaaattcagctagcaatggctcactccatgccctcaattcaacaaaac

SEQ ID NO: 241035 - DNA, 375 bp, Glycine max
ggtccaaaatcctcactccagccacacgcctcagtagaccatggcctcattgggtgggttacaaaatctaagcggcatcaattttcttatcaaaaaagagggtccaaaagtcaatgcgaagttcgagctgaagccgccaccatatccactgaatggtttggagccggtgatgagccagcagacacttgagtttcattgggggaaacaccacaagacatatgtggaaaatctgaaaaaacaaattgttgggacagagcttgatgggaaatcactagaagagattatagtgacatcatataataagggtgacattcttccagctttcaacaatgcagcacaggtatggaaccatgacttcttctgggagtgcatgaa

SEQ ID NO: 241036 - DNA, 305 bp, Glycine max
  unsure (1)..(305): unsure at all n locations
gacttctcttcacacctttgttcactcttcttctcttgcggctagggttttagcgcagcttcttctagatttaaggaagatgggtaaggaaaaggttcacatcagtattgtggtcattggccatgtcgactctgggaaatccactaccactggtcacctgatttacaagcttggaggcattgacaagcgtgttattgagaggtttgagaaggaagctgctgagatgaacaagaggtctttcaagtatgcctgngtgctggacaaacttaaggctgagcctgaaagaggaatcaccattgatattg

SEQ ID NO: 241037 - DNA, 260 bp, Glycine max
  unsure (1)..(260): unsure at all n locations
gaaggcggtgttactccttctctcgttgattcggatctagagtcttttttcactcttcagttctcgttgttgttcttcgctttcctgaaactagggttttcaatttcgattcattcgttaataattaaagatgtttgggagggcaccgaagaagagcgataatacgaggtactacgagatcctcggcgtctcgaagaacgcttcgcangatgatctgaagaaggcttacaagaaagccgccatcaagaatcaccctgaca

SEQ ID NO: 241038 - DNA, 283 bp, Glycine max
gagaaaagaaagaggaaaccctatctggataggtcaaacatcatcatgtcggacgaagagcaccatttcgagtccaaagcagacaccggtgcctccaaaacctaccctcagcaagccggtaccattcgcaagaacggctacatcgtcatcaaaggacgcccctgcaaggttgtggaagtttcgacttccaaaactggaaagcactgtcacgccaagtggcacattgttggaattgacattttcactgccaagaaacttgtggatattgtgccctcttctcaca

SEQ ID NO: 241039 - DNA, 335 bp, Glycine max
gcgcattgaacgaaaattagggtttgtactgtagcaggaacgagcagcaatggcgccgaaggtaacacgcaaggttagcagaaaccccgaattgataaggggaattggaaagtactcgaggtcgcagatgtaccacaagaggggcatttgggctatcaaggccaaaaatggtggcgttttacctcgccacgatcctaaacccaaacctgaaacacccgctgaaaaaccacccaaattttaccctgctgatgatatcaagaagccccttgtcaacaagcacaaagccaaacacgctaagctcatggctaacattactccgggaacagtgttgattc

SEQ ID NO: 241040 - DNA, 366 bp, Glycine max
aagcctgccgagaaaaccctagttcgcttgcagtcacacaagaggccaatcctattcatagctcgagatgggtgaagaagtgaaggtagttgttccagaatcagtgttgaagaagcgcaagagggaggaggaatgggcgttggccaagaagcaagaactcgatgctgccaagaagaagagagccgagagccgcaaactcatctacaacagagctaagcagtacgctaaggagtacgatcaccaggagaaggaattgattcggttgaaacgcgaggccaagctgaaaggtggtttctatgtggatccagaggctaagctgttgtttaatattcgcattcgtggtattaatgccatgggacccaaatc

SEQ ID NO: 241041 - DNA, 284 bp, Glycine max
ggcagtttcaggttttcttttccttcactttcacgagaaatgaaataccacttttcagtttcttcactacgttctcacttcgatatggctcgtacgaagcaaaccgctcgcaagtccaccggtggcaaggcgccacgtaagcagctcgccaccaaggccgctcggaagtctgctccggcgaccggaggagtgaagaagccccaccgcttcaagccgggaaacgtggcgctgatggaaatcagaatgtactagacgagcaccgagcttctcatcaggaagcttcc

SEQ ID NO: 241042 - DNA, 333 bp, Glycine max
gctctctctttgccggtgccacaatccctctctctccgacgtacatttccatctttttagggtttcatttcatggactccgattcctggatttccacgcgcctctcttcctcttcacgccgccaccattatcgatctgatctgtacgcggaggagagtgaagggaacgatgatttcagggcggagtttctatgccctttctgcgccgaggattacgacgtcgtttccctctgttgccacattgacgaccaccaccctatccaagccaaaaacggggtgtgtcccatttgtgggaagaaggtgggagtggatctcgttggacattttactacac

SEQ ID NO: 241043 - DNA, 287 bp, Glycine max
gagtttcagccgcagcttgccccacagcattgcgaccattatcagctatggctgtctgtaagattagacgatctccaaaggaaacatgggtggcactatgacatccgctgatccctttgccaagagagactggtacgatatcaaggctccatcgctcttcgacgtcaagaatattggcaaaaccctcgtctctcgtacacagtgaaccataattgcatcagaacgactcaaacatccagtttttgaggtcacattggctgatctccaaggggatgaagaccactcct

SEQ ID NO: 241044 - DNA, 349 bp, Glycine max
gtacaccgactcaaccggagcatacacaatgtacgtggatgaggatcacgcagatcagatctgcagtgccaagctcgtaagcagccctcaccctcaatgcaaggaagtcaccccaggccgcgacgaagccgtcgtgattctcacccgctacaacggcattgcctccgacgataggttcgccaatgccatgggcttcatgtctcaggaggttgcttctggctgtgctgagatcctcaggcaataccaggagttcgacaatgagaattaattacgtaattaatttcagtatattattaatctacttcctaatgtctcctgatgtggagtgttatctcgacattttcatatt

SEQ ID NO: 241045 - DNA, 341 bp, Glycine max
ggcgttccgtcaccttctgtcagcgcgactctctttccttccctctttttccgaatctgaatcgaaaatggcttcggagactgatacgtttgcatttcaggccgaaattaaccagctcctcagtctaaccatcaacaccttctacagcaacaaggagatctttcttcgtgagctcatcagcaatgcctctgatgctttggacaagattcgatttgagagtcttacatacaagagcaagcttgatgctcagccagagttgttcattcacattattcctgacatgaccaacaacacattgtctatcattgacagtggtattggcatgactaaggccgatttgg

SEQ ID NO: 241046 - DNA, 344 bp, Glycine max
gaattcacttgcggctgcagcagagaagcactcatcattcttcgtttgtctaagatccgccttctctgaattgtaaaaatgtcgctcggagaaactgcttgttcatacgcagctctcatccttcatgaagatggaatcagtgtaactgccgacaagatcagcaccttgttggaaactgcaaaggttcaagtagatacctattggccaaccttatttgctaaacttgctgagaagaaaaatcttggcgatttgatagccaatgcagcaggcggtggtgcaccagttgctgttgcagctgcccctgttgctgcctcaggtggtggtggtgctgctgctgcggcccc

SEQ ID NO: 241047 - DNA, 251 bp, Glycine max
cgtcagtcggtggcaagacgacaacagggcggcatgtctgtttatggacaaaatctctatatggtctcatacaagcacctcgccgctctctatgattcatgcttgagtcaggctttctccgacggtctttctctgctattgtgtcttccaagttctattcaattgccgtcctttttcacagtcttgactgggaaacccctggcgtttcccaacttattcgccttgcaccgcatccccctttgatcagctgg

SEQ ID NO: 241048 - DNA, 347 bp, Glycine max
gacagcactgcactcttcgcaacacaacaaaaaaagacaacccagagagcgcgtcttaataaacgctcttctctgaaaacccccatttcttttcttctttcttcttctctttcgcttcttcgatcttcgatcttcgtcgctgaaaatgagagagtgcatttcaatccacatcggccaggccgggattcaggttggaaacgcctgctgggagctttactgcctcgaacacggcattcagcctgatgggcagatgccaagtgacaagaccgttggtggaggtgatgatgctttcaacaccttcttcagtgaaactggggcaagaaagcccgtgccccgtgcgatttttg

SEQ ID NO: 241049 - DNA, 378 bp, Glycine max
gatcgctctcacacctgtgattattcctcttttaacaatccacacccaaattctagggttccgaaatggacgctggcggaaagatcaagaagggcgccggaggtagaaagggcggcggcccaaagaagaagccggtttcaaggtccgtcaaagccggtctccaattccccgtcggaagaattggccgttatttgaagaaaggaaggtacgctcagcgtgtcggtaccggtgctcccgtatacttggctgcagttctcgaatacctagctgccgaggtgcttgagttggctgggaatgccgcacgttacaacaagaagaacacgattattccaagacacgtgcttttggcagttaagaaacattgagaattggggaaaa

SEQ ID NO: 241050 - DNA, 339 bp, Glycine max; identical to SEQ ID NO: 240974

SEQ ID NO: 241051 - DNA, 317 bp, Glycine max
cagggagtgagagagagagaaggcaagatgtcgaagagaggacgcggtggttcggcggggaacaagttccggatgtcgctgggtctgccggtggcggcgacggtgaactgcgccgacaatacgggggcgaagaacctctacatcatatcggtgaaagggatcaaagggcgtttgaaccgtctcccctcggcttgcgttggcgacatggtgatggccaccgtgaagaaggggaaacccgatctgaggaagaaggttttgccagctgtcattgttcgccagcgcaagccatggcgccgaaaggacggcgtctacatgta

SEQ ID NO: 241052 - DNA, 340 bp, Glycine max
gattgttggcttgtgctctgctcgtgcctctagggttatcatatctccatttccatttcctctctctcagtttccaagaatcttaagctatgggaaagtcttacccaaccgtgagtgctgattaccagaaggccgttgagaaggcgaagaagaagctcagaggcttcatcgctgagaagagatgcgctcctctaatgctccgtttggcatggcactctgctggaacttacgacgtgagctcgaagaccggtggtcccttcggaaccataaagcacccctccgaactcgctcacggcgctaacaacggtcttgacatcgctgttaggcttttggagccact

SEQ ID NO: 241053 - DNA, 352 bp, Glycine max
gacagcaaaacaattttcaaactcaattaccattccataacctaaatctcctctttgtttccgagtcagagagcaatggcacgtaccaagcaaaccgctcgcaagtccaccggcggaaaggcgccgaggaagcaattggcgactaaagccgctcgcaagtcagctccggccaccggcggagtgaagaagccccaccgcttcaggcccggaacggtggctctgagggagatcagaaagtaccagaagagcactgaacttctgatccgaaaactcccattccagaggctcgtcagagaaatcgctcaggatttcaaaacagatcttcgtttccagagcagcgctgtttctgcgc

SEQ ID NO: 241054 - DNA, 390 bp, Glycine max
ggttctgcttcttcttttcccttccacacaaatacatcacatcattgccattgctctctctctctctctctctctcgtgcggacacaatttttgatggggatatacctcagcactcccaaaacagagaaggcctctgaagatggtgagaacgacaagcttcgcttcggtttgtcttccatgcagggctggcgtgcttccatggaagatgctcatgcagctcatccatatttggacgagtctacgtcatactttggtgtttatgacggccatggaggcaaagcagtttcaaaattctgtgccaagtatctacaccagcaagtgcttaagagtgaagcttacttagctggagaattaggcacatctttacagaaatcttttctcagaatgga

SEQ ID NO: 241055 - DNA, 361 bp, Glycine max
ggggcgaggtagccagagagtgatacaatacagagtgcgttgttgctccttcgccacaactccctgccaacatgggtatctccagagattctatgcacaagaagcgtgccactggtggcaagaagaaggcatggaggaagaagagaaagtatgagcttggtcgccagcctgctaacactaagctgtcaagcaacaagacagtcaggaggatccgggttagaggtggaaatgtgaagtggagggcactgagattggatactggaaattactcctggggaagtgaagctgtaactcgcaagactcgtatactagatgtggtttacaatgcctcaaacaacgagcttgtgcgtactcagactct

SEQ ID NO: 241056 - DNA, 324 bp, Glycine max
gaacactgatataaagtgaaaatcattgtctcatcacagtagtactcacactatacggtggcggaaccagagaaaaccaaccagaccgattactcttgaggaaacaaaaatctaagatgagccgccatccttctgtcaaatgggctcagacgtctgatgtactctacttaacagttgagctgcctgatgctcaggatgttaagctcaaactggagccagaaggaaaattttacttctctgcaactgctggtgcagagaaaattccttatgaggttgacattgatctgtttgacaagattgatgtaaataatagcaaagctagtg

SEQ ID NO: 241057 - DNA, 358 bp, Glycine max
gacgacaatgacgaccaagaaaatgatgctcctgaccggggttaccaccaacaacaaccaaaattattaagaaaaaaggtatgttcaaccttgttgttagccttaccaattacataacgactcaaacgacgactcagacgacgacgaagatgaagacgacgaggacgaggaggagcaaggggaagaggaggatttgggaacagagtaccttatccgccctttagaaactgctgaggaggaggaagcatcaagtgattttgaaccagaggagaatggtgaggaggaggaagaagatgttgacgacgaggactgtgagaaggctgaggctccaccgaaaaggacagaggtcagataaaga

SEQ ID NO: 241058 - DNA, 334 bp, Glycine max
gacatcacgacatcacatcgcagagaagaacagagagagatccatccatcaattccaatggccgatcagctcaccgacgaacagatctccgagttcaaggaagccttcagcctcttcgacaaggacggggatggttgtattaccaccaaggaacttgggaccgtgatgcggtcacttggccagaacccaactgaggcagagctgcaggacatgataaatgaggttgatgctgatgggaatggtaccattgatttcccagaattcctgaatctcatggctcgcaagatgaaagacactgattcagaggaggagctgaaggaggctttccgcgtgt

SEQ ID NO: 241059 - DNA, 311 bp, Glycine max
agaaagctgcgaaagagcagaagaaggctgaggcgcgcaagtgagtttcctggaaaatgtcatgccaccaaaaatttgctccaattagtaaggtggaacggttgctcctactacacttaaaacattatgtccatttggctttatattatggtattaccacaccaagctggtaacatgtaatgcaattatattttcatattctgtggtttaaaatcgtgattatatataaacgtttttaaaaaaaaaaaaaaaaaaaaaaaaaaaaaaaaaaaaacaaaaaaaaaaaaacaaaacaaaacaaaacaagaaaa

SEQ ID NO: 241060 - DNA, 397 bp, Glycine max
gcaccgcttgagcagacttaacaacagcacaaagcgggttactgtctgttcaagctaccatctctctctctctttcttagtgccttcttgccagaagttaaaatggcccaagaaactttcctattcacatctgaatcagtgaacgaggggcaccctgacaagctctgtgaccagatctccgatgctgtgctcgatgcatgcttggagcatgaccctgacagcaaggttgcctgtgaaacctgcaccaagaccaacatggtgatggttttcggagagatcacaaccaaggccaacgtggactatgagaagattgtgcgtgacacatgcacgaacattggttttgtctctgatgatgttggtcttgatgctgacaactgcaaaggtctcgttaacattg

SEQ ID NO: 241061 - DNA, 354 bp, Glycine max
ggttccaatttgcgtgagaacgaaaaaagaaaaaaaaaaccctaacgcactcgagaccctgagatttttcatcttcgtttctcattctctttttgatcatggacgtcggggtgcggcagatcttcaacaagttcgacaagaacggcgacggaaaaatctcggtaacggagctgaaggacatgctcgcggccctcggatccaaaacgacggacgaggagttgaaacgcatgatggaggagctcgaccagaacggcgacggtttcatcgacctcaaggagttcgcggattttcactgcaatggcggtgccggaaaagacgactccaacgagctccgcgacgcgttcgatctctacg

SEQ ID NO: 241062 - DNA, 359 bp, Glycine max
ggcaccgcttgagcagacttaacaacagcacaaagcgggttactgtctgttcaagctaccatctctctctctctttcttagtgcctccttgccagaagttaaaatggcccaagaaactttcctattcacatctgaatcagtgaacgaggggcaccctgacaagctctgtgaccagatctccgatgctgtgctcgatgcatgcttggagcaggaccctgacagcaaggttgcctgtgaaacctgcaccaagaccaacatggtgatggttttcggagagatcacaaccaaggccaacgtggactatgagaagattgtgcgtgacacatgcaagaacattggttttgtctctgatgatgttg

SEQ ID NO: 241063 - DNA, 315 bp, Glycine max
gatagcaaaacttcagcaacccttttgcatctgatctaagaatcccaacctcaaatacccattttttgtcatttcatgatctaggttatagttcgtgaaaatgacgaggatgacccgtgattttggggatactatgcaaaaagatgcagtgccggcggtgtcggctgatataatatttgcttctcttcggtttcctaattacaaaatcggagttaacaatcagatcatggagacaaaggatagtccaaaagtgctatctatgaaggaggttgttgcgcgagagactgcacagctgttggaccagcagaaacgtct

SEQ ID NO: 241064 - DNA, 339 bp, Glycine max
gacggcactcgttttcgttctcgttctggtttatagatctttgcgaaggaggtttacagcgctcaaccaaagatgcagaacgaggaaggacagatcactgagctttacattcctaggaagtgctccgccacaaacagattgattaccgctaaggaccatgcttcggttcagatcaacattgggcatgtggatgagaatggcgtctacaatggccatttctccacttttgccctctgcggattcatccgtgctcagggtgatgctgacagtgctctagaccgcttgtggcagaagaagaaagttgaagttaagcaacagtagacacccatgatagtttgt

SEQ ID NO: 241065 - DNA, 331 bp, Glycine max
ggtgcctggccatccggtttcccagatctgctccttcctcaccccacagaagtcagttgaagagcatgggtcgtggagttagcagtggtggtggtcaaagttccttgggttatctttttggcagtggagaggcccctgccgcaaaaccggcaacaaacaatgccccagcccaacctgaagtgcaggctgtaaataatgcgcctccttcaaaagcatctcctcctactaaaacaatagaccctaacaaggctgctggtataaacagtcattctactgatggccagaacaccggcaacttcatcacggaccgaccctcaaccaaggtccatgc

SEQ ID NO: 241066 - DNA, 357 bp, Glycine max
gagtgccagacgcagtgactaaaccaaacctctcactcgccgtcgtagggtttctcctttcgtttagcaacaacaacaatggttgcagccaagaaaaccaagaagacccatgagagcatcaacaacaggctcgctcttgtcatgaagagtggaaaattcaccctcggttacaagacggttctcaaatcacttaggagctccaaagggaaattgattatcattgctaacaactgcccccctttgaggaaatcagagattgaatactatgctatgttggccaaggttggagttcatcattacaatgggaacaatgtggatttgggcactgcatgtggaaaatattacagagtgtgctgc

SEQ ID NO: 241067 - DNA, 292 bp, Glycine max
ggattttcatcagttgagttgagagaaggaaagggaaaatgggtaaggatctgagcgaggaacaagtgtcttccatgaaggaagccttctctctattcgacactgacggagacggtcggatcgctccgtcggagctggggatcctgatgaggtctctgggaggtaacccgacgcaggcccaactcaaagccatcgtggctgaagagaacctcacggcccccttcgacttcccccgattcctcgatctaatggccaaacacattaaacccgaacccttcgattgccaactccg

SEQ ID NO: 241068 - DNA, 363 bp, Glycine max
gatctcagtctctacctcaaaccactccagaaaaaatggcagtgcctcttctctcgaagaagatcgtgaagaagaggctgaagaagttcaagaggcctcaaagtgacaggaagatttctgtgaagacaaactggcgcagaccaaagggtatcgattcccgtgttaggagaaagttcaagggatgcactttgatgccgaacattggttatgcttcagacaagaagacccgccactatctcccgaatggtttcaagaaatttgttgttcacaatgtgaaggatttggaactgctcatgatgcacaacaggacttactgtgctgagattgccacaatataccacaggaaagaaaaagatatagtcg

SEQ ID NO: 241069 - DNA, 355 bp, Glycine max
  unsure (1)..(355): unsure at all n locations
gccgccatttttcgtagctgctgttcttgcgcgtgaacaagcctcaggtaagccaaaaccatggttaagcataacaatgttatcccaaacggacacttccgtaagcactggcagaactatgtgaagacttggttcaatcagccagcacggaagacaaggagacgattggctcgtcagaagaaagctgtgaagatattccccagacctacggctggacctctcaggcccattgtacatggtcaaactttgaaatacaacatgaaagtgagaggtggaaggggattttctcttgaagaactcaaggcagcagggattcccaaaaagcttgcancaaccataggtattgctgttgatc

SEQ ID NO: 241070 - DNA, 276 bp, Glycine max
  unsure (1)..(276): unsure at all n locations
gccgctctctgagaaaaacagatagtgtgggagagagaagagcggaagagaaaatgacgaccaggttcaagaagaacaggaagaagagaggtcacgtcagcgccggacacggccgtatcggaaagcaccgcaagcatcccggaggtcgcggtaacgccggtggcatgcatcaccaccgtatcctcttcgacaagtaccatcctggtttcttcgggaaggtangcatgcgctacttccacaaacttcgcaacaaattctacaatccgatcatcaaca

SEQ ID NO: 241071 - DNA, 347 bp, Glycine max
ggaagaagtgcccaaggaagctcgttctttcgtcgtcgtcacaagtcataactcgcaaaccacaatgcctaagcagatccacgagattaaggattttcttctgacggcgcggaggaaggatgcgaggtcggtgaaaatcaagaggagcagggatgtcgttaagtttaaggttcgatgctccaagtacttgtacacgctttgtgtcgttgaccctgagaaagccgataagttgaagcaatctcttcctcccggtttgagtgttcaagacctgtagagctgttgagtgtggcagcatgcgtttgtttctccttttgttacctgatgctctagaatttgttgcttggttt

SEQ ID NO: 241072 - DNA, 334 bp, Glycine max
ggaaacagagagtgatttcagtgagtgatcggtgttcacttgatctcatcataatcgtcagcgtcaattgaagaagatgccgatcagaaacatcgccgtcggaaggcctgaagaggcgactcaccccgacacgttgaaggcggctttggctgagttcatctcaaccttcatcttcgtgttcgccggctcaggctccggcatcgcctacaacaagctcaccgacaacggcgctgccacccctgccggcctcatctccgcctccatcgcccatgcattcgccctcttcgtcgccgtctccgtcggcgccaacatctccggcggccacgtcaacccc

SEQ ID NO: 241073 - DNA, 274 bp, Glycine max
gattgttggcttgtgctctgctcgtgcctctatggttatcatatctccatttccatttcctctctctcagtttccaagaatcttatgctatgggaaagtcttacccaaccgtgagcgctgattaccagaatgccgttgagaaggcgacgaagaagctcagaagcttcatcgctgagaagagatgcactcctctaatgctccgtttggcatggcactctgctggaacttatcgacgtgagctcgaagaccggtggtcccttcggaaccataaagc

SEQ ID NO: 241074 - DNA, 347 bp, Glycine max
gacagcactgcactcttcgcaacacaacaaaaaaagacaacccagagagcgcgtcttaataaacgctcttctctgaaaacccccatttcttttcttctttcttcttctctttcgcttcttcgatcttcgatcttcgtcgctgaaaatgagagagtgcatttcaatccacatcggccaggccgggattcaggttggaaacgcctgctgggagctttactgcctcgaacacggcattcagcctgatgggcagatgccaagtgacaagaccgttggtggaggtgatgatgctttcaacaccttcttcagtgaaactggggcatgaaagcacgtgccccgtgcgaattttg

SEQ ID NO: 241075 - DNA, 352 bp, Glycine max
agaaggcagttcttgaggcagagaaagaggaaaagagtgtgttgccccagcagaagaaagatgaccagaaaactgtggacgctgcagtgttaaaagccattgagagtgtgccagacttgaagtcctatttgggtgccaggttttctctgaaggccggggtgaaaccacatgagctagtcttctagaggaaagaggggtgttactcttgtttttgatatcgtgtttgtttattgatgctggttcttatagttgccctcttataacattcttgttagcagacaaatgaagaacctaaaattttgttagtcaaattgtgacgcgtgctctttacattttgttgaatggtgtgaat

SEQ ID NO: 241076 - DNA, 342 bp, Glycine max
ggttctagtgtgtgattgtttgttgttgtaactcgttcttcttcttttgttgttctgtgtttgtgtttgttttttctctcacctgaaaatgtcttgctgcggtggtaactgtggttgcggaagctcctgcaagtgcggcaacggctgcggaggctgcaagatgtacccagacttgagctacactgagtcaaccaccaccgagaccttggtcatgggagtggcacctgttaaggctcaatttgagggtgctgaaatgggtgtgcccgctgagaacgatggctgcaaatgtggaccaaactgctcctgcaacccctgcacttgcaagtgaggtgttgggagagc

SEQ ID NO: 241077 - DNA, 336 bp, Glycine max
gagcgccaatgtttttttcagaggagtttcatcttgtaatcaaaagagtttatcttatagtaagaaatcgatgtcttactccattttaaggaacaaaacaagagaacaatagcctgacaaagggtttagccataaaatcgaatccatcattgatttgagatattgataaggtgaatactcatttctcgtcaatgctaggcataatgcgggtatagggacctaaaaaagattatcttttcttcctatcttatgaactttaaggtgtatgaagtgtcatttcctatcttagattttaattttagtacgtagataaagagtcatttaacttaagttgat

SEQ ID NO: 241078 - DNA, 384 bp, Glycine max
gcagcagcatttgaactctactatcgttttctccgttctttctcaaagccgcactcaactttctaaaaccaaatcggtttgaatcctcatttcccgcctctcactggaaagcagcaaaatcacctttctctactatctatctgttccttttgtactctgagtgggtagaagtcatggtaaggctcactgctgacttgatttggaaaagccctcatttcttcaacacgattaaagagcgtgagttagatctcagaggcaacaagatagctgtaattgaaaacttgggtgctactgaggaccaatttgacacaatagacttatctgacaatgagattgttaaacttgaaaatgtaccatatcttaaccggttgggcacaatgctca

SEQ ID NO: 241079 - DNA, 379 bp, Glycine max
gattgttggcttgtgctctgctcgtgcctctagggttatcatatctccatttccatttcctctctctcagtttccaagaatcttaagctatgggaaagtcttacccaaccgtgagcgctgattaccagaaggccgttgagaaggcgaagaagaagctcagaggcttcatcgctgagaagagatgcgctcctctaatgctccgtttggcatggcactctgctggaacttacgacgtgagctcgaagaccggtggtcccttcggaaccataaagcacccctccgaactcgctcacggcgctaacaacggtcttgacatcgctgttatgcttttggagccactcaaagcggagttttccagtttgagctacgccgatttcta

SEQ ID NO: 241080 - DNA, 272 bp, Glycine max
ggtgctctgctcgtgcctctagggttatcatttctccatttccattttctctctcacttttcaagaatcgtaagctatgggaaagtcttacccaactgtgagtgctgattaccagaaggccgttgagaaggcgaagaagaagctcagaggcttcatcgctgagaagagatgcgctcctctaatgctccgtttggcatggcactctgctggaacctttgacaagggcacgaagaccggtggacccttcggaaccatcaagcaccctgccgaac

SEQ ID NO: 241081 - DNA, 300 bp, Glycine max
  unsure (1)..(300): unsure at all n locations
aaatgtctggtcgtggaaagggtggaaagggtttgggaaagggaagtgccaagangcacaagaaggttcttcgtgacaacatccagggcatcacgaaacctgcgattcgtangttagcgagaagaggtggcgtgaagaggatcagtggtttgatctacgaggaaaccagaggagttctgaagatattcttggagaacgtgattcgcgatgctgtgacctacactgagcacgctaggaggaagacggttactgctatggatgttgtttatgctcctaaaaagcaaggaaaggaccctctat

SEQ ID NO: 241082 - DNA, 323 bp, Glycine max
atgctgaagcctttgctgtgctgcagtatatgaaagaaaacaacattgaacctgatgtagttacttataccacactaatgaaagctttgattcgtgttgaaaagttccaaaaggttccagctgtgtatgaagaaatggtcgcatctgggtgcactcctgatcgaaaagctagagcaatgctgcggtctgctcttagatacatgaagcagacactaaaatcatagttaaattatcaagcacattctttcatgaagacagaacagaatcacatttgctcaccttacatggttataattctgaagcaagtgctttggggcagtatg

SEQ ID NO: 241083 - DNA, 370 bp, Glycine max
ggaagttcgggagatggattttctttataaggtgattgatgaaacattgcgtgtgattacattctcactagtggtctttcgggaggcaaaaactgatgttaatatcaatggatacacagttccaaaaggttggaaagtgcttgtgtggttcagatcagttcaccttgatcctgaaatatttcctgatccaaaggaatttaaccctaatagatggaataaagagcacaaggctggagaattccttccctttggaggaggaagtagattgtgtcctgggaatgatcttgccaagatggaaatagcagtttttcttcaccatttccttctgaattaccgatttgaacagcataatccctatttgccctgtgag

SEQ ID NO: 241084 - DNA, 353 bp, Glycine max
  unsure (1)..(353): unsure at all n locations
gactcacaccaaaatttgccaattgccatttcaatccccagtttcttcttcaacgtcccctnacgaagaagttccaattccccctcccaagttcaaaacctaaatccctcaatcccaagggctcaggagaggccaatggcgcggggggaaccggtcccgaaactggcaacggcgagcctcccccggaggagaaagaggagcccaaacctgaagccaaggctatgaaaaccaaggaacccaaacctaaaaaggtttccagaccacgcaaccctcccactcatccttcctacgaggagatgattaaagacgcaattacctcgctgaaggagaaaaccggttcgagccaacacgcg

SEQ ID NO: 241085 - DNA, 382 bp, Glycine max
gacacagagcaatattcattcatttagattcatcaaaagcttataacaacaattaaacatgagtgcagccagcagagcttggattgtggcatcaagcattggagcagtggaggcattgaaggatcaattgggggtgtgcaggtggaatcatgcattgaggtcactgcagcagcatgccaagagcaacattagatcctacactcaggccaaaaccttgtcgtctgctacttctgctgctgtctccaataaggtcaagaggaccaacgaggagtccatgacgaaagtcatggacttgagctgttggggtcccaatacttcaaggttttagtgtgtggactagtccaactgcattcatcattgtgctgcaaggtttatgaagatt

SEQ ID NO: 241086 - DNA, 355 bp, Glycine max
gggtgtggtagtgtggcagcgacacgtatcaacttcaataatcgcatcgcagaagcagtttccggtgcatctcatcgtctccgaaaatgaacgacgcagatgtctcgaagcaaatccagcagatggtgcggttcatccgccaggaagctgaggaaaaggccaacgagatctctgtctccgccgaagaggaattcaatatcgagaagctgcagttggtcgaagccgacaagaagaagatcaggcaagaatacgaacgcaaagagcgccaagttgaaattcgcaagaagattgagtactcaatgcagctgaatgcttctcggattaaagttcttcaagctcaagatgacgtgattag

SEQ ID NO: 241087 - DNA, 394 bp, Glycine max
ttcttttcaattataaacgatggaatcgtccatttcgatatataaaaaataatcgatttgaaaatgtcgtaaaaaatgaaatttcagaatttttttttcatacatgtcaaagtgatggaaaagaaagaatatcttttatgtatccaccaaatttatcaacttttcataaaatgatggaaaccaaattttatctcttcacaaaagataaaatttcctatgatgaattgtctaattattggagctatactaatgaagaaaaaagaaacaaattgagcaatgaatttgtaaatagggcaaaagtaatggataaggaattaatttctctggatatattagaaaaccgaattcgattgtctaatgatgaaactaaaacaaaatatttaactaaaatata

SEQ ID NO: 241088 - DNA, 325 bp, Glycine max
gattgttggcttgtgctctgctcgtgcctctagggttatcatatctccatttccatttcctctctctcagtttccaagaatcttaagctatgggaaagtcttacccaaccgtgagcgctgattaccagaaggccgttgagaaggcgaagaagaagctcagaggcttcatcgctgagaagagatgcgctcctctaatgctccgtttggcatggcactctgctggaacttacgacgtgagctcgaagaacggtggtcccttcggaaccataaagcacccctccgaactcgctcacggcgctaacaacggtctttacatcgctgttaa

SEQ ID NO: 241089 - DNA, 375 bp, Glycine max
  unsure (1)..(375): unsure at all n locations
gacacaaactttattacagttgttgtattgtaattaagcaagaatattaggcaatggagtcttctagaacttcaactactcttgctctttttttaaccatcaatttgcttttctttgtcatggcaagtggctgctacacttgcacacagcctaagccaaaccctatcccattcccttaccctaaccctagtcctgccgcgaagagctgccccagggacgcacttaagctcggagtgtgcgcaaacgtgcttaatggaccaattggtgctattgtanggtcaccaccggaccacccatgttgctcagtgctagaagggcttcttgatcttgaagttgcggtttgcctctgcactgccatcaaagccaacattcttg

SEQ ID NO: 241090 - DNA, 379 bp, Glycine max
ggtctccctcatttgttcactttctctctctaaatccctaaaccagatctcgcactcgcgctttctctctctaggattcgacaatggcggccgctccctcgcctcgcgaagagaacgtgtacatggcgaagctcgccgagcaggccgagcgctacgaagagatggtggagttcatggagaaggtctccgccgccgccgacaacgaggagctcaccgtcgaggagaggaacctcctctccgtcgcgtacaagaacgtgatcggagcgcgccgcgcctcgtggcgcatcatctcctcgatcgagcagaaggaggagagccgcggcaacgaggaccacgtctccgtcatccgcgactaccgattcaagatcgagtccgagct

SEQ ID NO: 241091 - DNA, 356 bp, Glycine max
ggagaacacaaacagcagcgtcttggtttgtgagagagacagaggcacagagagaaaatggtttcggggtcaggaatctgcgcgaagagggtagttgtggacgcgcggcaccacatgctggggaggctggcatcgatcgtggcgaaggaacttctgaatgggcagaaggtggtggtggtgcgctgcgaggagatttgcatctccggtgggctcgtcaggcagaagatgaagtacttgcgtttcctccgcaagcgcgtgaacaccaagccctctcacggccccatccatttccgtgcacccggcaagatcttctggcgcaccgttcgtgggatgatacaacacaaaacaaaccccgg

SEQ ID NO: 241092 - DNA, 390 bp, Glycine max
  unsure (1)..(390): unsure at all n locations
gatacctaaaaattgtaccgatatggcttcacttgtgtgtctccttttttccttgcatttcatggttatcatgtcaggttccttaccagcaaatagtgaagtgtttacaaaagagtctcctatgtctctatccacaaaacccgtggaaagactcacccaactccacttttatttccataacaacaaaatgggggaacacncgactgctatgaaaattgttgagcctcctaaggcgtccatttctggttttgggactatttacatgatggatgaccctctaaccgaaggaccaagtccaacttcaaagcttgttggaagatgtcagggaatatatgctgaggcttcgcaacatgaacctgcgatactcatggtaacgaatttgtccttcac

SEQ ID NO: 241093 - DNA, 220 bp, Glycine max
gaaggatcagcagggagaattaggtttttagggtttacaccgagcagccacacctcccgcagcagccatggttctcaaaactgaactatgccgattcagtggtgccaagatctacccaggaaagggcatcagatttgttcgtggtgattctcaggttttcctgtttgcaaactcaaaatgtaagaggtatttccacaatcgcctgaagccttcaaagctc

SEQ ID NO: 241094 - DNA, 366 bp, Glycine max
  unsure (1)..(366): unsure at all n locations
atctagttcatggcctattagaagtagaaggcgctctggtgggatcctcacgtacagaaaaagattgcagtcagtttgataaggatcgagtgacattgcttcttcggtccgaaccaaggaatcccttaaatatgattcaaaatggatcttattctatcgttgatcagagatttctctatgaaaaatatgaatcggagtttgaagaaggggggggagtcctcgacccacaacagatagaggaggatttttttcaatcacatcgtttgggctcctagaatatggagcccttggggctttctattttattgtattganaggcccaatgaattgggatttccctattgggccaagtcatttcgggacaag

SEQ ID NO: 241095 - DNA, 369 bp, Glycine max
gcccccattacgcacttttcatccttcgatgatacacttagttgcttccaattaagatggttctgctagagaagctctgggatgatgttgtggctggccctcaacctgagcgtggacttggtaagctcagtaaactcaccaccctcaaaactattgatgaatgagaaagtagcaagctgcagaagacgttgtcgatgccgtcgacaccaataaccccgatgactccgacgactccaacgataccgggatcggaccgtaaagctgacaacgtttggaagagcgtcttccatcctgtgagcaactccgccacaaagaccatcggtgctcagatgtttgacaatacacttctcaacactcccactgtctatg

SEQ ID NO: 241096 - DNA, 342 bp, Glycine max
gtacggtctagaatcccgggtccaaccaagcctccaaacggcggaaaaaaccaacaaaagggaaaaccaaaccaaaaattggttcattaattgttcggggtcaactgttcctcaaaaatccgtcatcatcatcatcaatcatcaacgttgattgaagaagatgccgatcagaaacatcgccatcggaaggcctgaaaaggctactcaccccgacacgttgaaggccgggttggctgagttcatctccaccttgatcttcctgttcgcccgttcaagttccggcatcgcctacaacaagctcaccgacaacggcgccgccaatcccggcggcctcaactccgc

SEQ ID NO: 241097 - DNA, 222 bp, Glycine max
gaaggctttgcatttcatttgagagagagagcgtcttacctttccattatcaaaatggctgtttccgctatcacaggagccaagctaaccctaaggataaggttggcgatacctccttcctctcccaagcgctctcgaaccgtcgcaatggccgtatccgtcgaccccaagaccgacaacaaactcaatcctaccaagtccgaagaagctttcgctgctgcc

SEQ ID NO: 241098 - DNA, 367 bp, Glycine max
  unsure (1)..(367): unsure at all n locations
gattgttggcttgtgctctgctcgtgcctctanggttatcatatctccatttccatttcctctctctcagtttccaagaatcttaagctatgggaaagtcttacccaaccgtgagcgctgattaccagaaggccgttganaaagcgaagaagaatctcaaaaggttcaacccctaaaaaaaaatgccctcctctaatgctccgtttggcatggcactctgctggaacttacgacgtgagctcgaagaccggtggtcccttcggaaccataaagcatccctccgaactcgctcacggcgctaacaacggtcttgacatcgctgttaggcttttggagccactcaaagcggagtttcctattttgagct

SEQ ID NO: 241099 - DNA, 387 bp, Glycine max
gccgctgagctccctttctcctcggtccacagagacaaaatgtaagacaggtgccaacagttcatcacgaaagaaaggactagctgagccgagatcactaactaaaacgaatttaatactaatcgaaaatactaatagaatagaaatagaactgtcttttcatatagatatcccttcaacacaacataggtcatcgaaaggatctcgaagacccaccaacgcacgaaagccgggatctttcagaaaatggattcctattcgaagggtgcataaccgcatggataagctcacactaacccgtcaatttgggatccaattcggttccttaagaggtatcgggaaggaattttggaatgtaataatatcgattcatacagatacagaaga

SEQ ID NO: 241100 - DNA, 404 bp, Glycine max
gattgttggcttgtgctctgctcgtgcctctagggttatcatatctccatttccatttcctctctctcagtttccaagaatcttaagctatgggaaagtcttacccaaccgtgagcgctgattaccagaaggccgttgagaaggcgaagaagaagctcagaggcttcatcgctgagaagagatgcgttcctctaatgctccgtttggcatggcactctgctagaacttacgacgtgagctcgaagaccggtggtcccttcggaaccataaagcacccctccgaactcgctcacggcgctaacaacggtcttgacatcgctgttaggcttttggagccactcaaagcggagtttcctattttgagctacgccgatttctaccagttggctggcgttgttgccgtt

SEQ ID NO: 241101 - DNA, 370 bp, Glycine max
  unsure (1)..(370): unsure at all n locations
ggagtgagacaccgatagatagagagcgcggcataacctaaacctatctttcttctctctctgtgtgtgcgcttcaacggcaaccagaagcagccatggccactgcaaggactgtgaaggatgtttcacctcatgagttcgttaaggcgtactcctctcacctcaagcgatccggcaagatggagctgccagagtggactgatattgtgaaaactgcaagatttaaggagttggctccttatgatcctgactggtactatgtcagagctgcttccatggcaagaaagatctacttgagaggaggacttggtgttggtgcctttcagaggatttatggtgggagcaagaggaatggtantcgccctcctca

SEQ ID NO: 241102 - DNA, 363 bp, Glycine max
  unsure (1)..(363): unsure at all n locations
agggggtccgataatttcctttcctcctcctccccccttcgtctccccccccctcctaatccctttctctccgaatcccacgtcctagatccgttgttctcttcncacagttctcactgaatcaggatccattttgataccaagttgctgttgaatatcgagtttgctctttagagatctgtttccctctagacaacggtctgtgtgacctgttattttagttgaatcgaagccgcgaccaaatcttcctgatctttgcctgaggtgatggcatcggcgggtgtagcacctgcttctggagtaagagatgtgaatgcaaattcggttgctgttgaaaggttgcctgatgagatgaatggcatg

SEQ ID NO: 241103 - DNA, 331 bp, Glycine max
gaccacgtgaaccaatatatcccaagccctatacaaccataccctaacacatacccatttgattcagtttccatggctagcctcaacgttgcatttttggctgcagtgctctgcatggttgtggctagtgcacccatggcacatgcacctatcacgtgcgggcaggtgaccaatatcctgatcaattgcatcggttacctccagaacggacgaacgccgccgtcgggatgctgcaactgagtcaataacctcaatgccaccgccaacactaacgccgaccgccagaccgcgtgcaactgcctcaagtcggtctccagcccaatctccggct

SEQ ID NO: 241104 - DNA, 367 bp, Glycine max
  unsure (1)..(367): unsure at all n locations
ggcccttctagctttttcccagtccaagcagcttccaattcgtgccactctcttcaaaatggccgttaccttctcaaatctccacacagaatcaggtctcaagtccctcgacgacttcctctctgggaaggtctacgtttctggggatcagttcacaaaggacgacatcaaagtgtatggtgctgttttggagaagccaggtgactcttttcccaatgctgccaagtggtacgaggttgtctcatctcagcttgctgcaagcttccccggcaatgctcaaggggtgagattcagtggcaaagcttctgctccagcggaggctgctcctgcgataccggatgcttctgctgctgaanatgatgatgac

SEQ ID NO: 241105 - DNA, 386 bp, Glycine max
  unsure (1)..(386): unsure at all n locations
gatagtattatcattcattctcatctttctctcttctctctccacccaaaccctaactcccgaccctgttcccctctcgtatccgtcatgaaaggaggaaagtccaagaccgaatctaagagagccgatcccaaacttgctgtgaataagaagggagccgccaccaaggctaggaaacccgccggcaaggggaaggcagcgaaagaccctaacaagccaaagaggcctccaagtgctttcttcgttttcatggaggagttcaggaaggtattcaacanagaacatcctgaaaacaaagcagtgtctgctgtgggcaaagctgctggagcaaaatggaagaccatgtctgatgctgaaaaagcaccttatgtggcaaagtctgagaa

SEQ ID NO: 241106 - DNA, 399 bp, Glycine max
gagggttttgcgctgttgttgctgctcatcctccgtaacctccgagctctgcaccgaagaacgaagccatggggaagacacatggaatgggatctgctcgcaagctcaagtcccaccgcaggaggcaaaggtgggctgacaagtcatacaagaaatcacatcttggaaatgaatggaagaaaccttttgctggttcatcccatgccaagggaattgtccttgaaaagataggtattgaggctaagcagcccaactctgccattcgtaagtgtgccagggttcaacttatcaagaatgggaagaagattgccgcttttgtccctaatgacggttgcttgaactacattgaagagaatgacgaagtcttgattgctggatttggacgaaaaggtcatgctg

SEQ ID NO: 241107 - DNA, 395 bp, Glycine max
  unsure (1)..(395): unsure at all n locations
gatccaaattcaagttcgcaccaaattttcctcccaaaatgtcaggccgtggaaaaggtgggaagggtttgggaaagggaggagctaagaggcacagaaaggttcttcgtgacaacattcaaggaatcacgaaacctgcgattcgtaggttagcgagaagaggtggcgtgaagaggatcagtggtttgatttacgaggaaaccagaggagttctgaagatattcttggagaacgtgattcgcgatgctgtaacctacactgagcacgctaggaggaaaactgttactgctatggatgtcgtttatgctctcaagagacagggaaggaccctctatggctttggaggctaaagaatagaatctttaggtttaatgactgtgttgcangataaaaca

SEQ ID NO: 241108 - DNA, 405 bp, Glycine max
gagggtttggttattagggttttcgctcaccggtgtgcagtcgagcccccgaagaaaaagcgaaaatgccgtcgcacaagacattcagaatcaagaagaagttggcgaagaagatgaggcagaacaggcctatcccctactggatccgcatgtggaccgacaacaccatcaggtacaacgcgaagcgccgtcactggcgtcgcaccaagcttggattctgaggtgcttgctttgcctcggttctgtttatccaattaattagtgttttattttcttgagccaaaaacaatgctttggagattttaatattttgcattttgttccaagactatattgtgtaaggaacttattgtagttcagactaatggtggtgttggtcacctttttttaaaagtattttgcaaa

SEQ ID NO: 241109 - DNA, 403 bp, Glycine max
  unsure (1)..(403): unsure at all n locations
tgggacagagagagaggttttgatgcaacgctgtcactgagaaaggatctctatctacgaaggagcggaataaaacccttctctctgtgattaagagaatggcttcagatcggaaacttcacacttttgaggaggtggcaaagcacaaccagaccaaggattgctggctcatcatttctggcaaggtgtatgatgtcacccctttcatggaggatcatcccggangtgatgaggttttgttatctgcaacagggaaagatgcaaccaatgactttgaagatgtggggcacagtgattctgctagagatatgatggaaaaatactacattggtgagattgatgcatcaaccgtcncactaaaacggacctacattccaactcagcaagctcagtacaatcctga

SEQ ID NO: 241110 - DNA, 334 bp, Glycine max
gaattcacttgcggctgcagtagagaagcactcttcgttcttcgactgtctacgatctgctttctctgaattgtgaaaatgtcgctcggagaaactgcttgttcatacgcagctctcatccttcatgaagatggaattagtgtaactgctgacaagatcagcaccttgttgaaaactgcaaaggttcaattagactcttattggccaaccttgtttgctaaacttgctgaaaagaaaaatcttggcgatttgataccaaatgcggaaggcggtggtgcacaatttgctgttgcagctgcccaatttgctgctgctgctggtggtgctgctgccg

SEQ ID NO: 241111 - DNA, 349 bp, Glycine max
tatgggtcttttgataagccctctgagaagaagaaggggtacttgcttcccaggcccaagatggttaactctgatcttgccaggattattaattctgacgaggttcagtctgttgtgaggcccattaagaaggatgtgaagaaggccacgctgaagaagaaccctcttaagaacctgaactctatgctgaagctgaatccttatgccaagactgctaagaggatggctcttcttgctgaagctcagcgcgttaaggccaagaaggagaagctcgacaagaagaggaagactgtctctaaggaagaagcttctgccatcaagtctgctgggaaagcatggtatcacacta

SEQ ID NO: 241112 - DNA, 399 bp, Glycine max
ggtgtgtgcgttcctaacattattgtttcctaccaagttctctgtctggggagttcttagcaccaccaccagcttctgcagtagctttaagctacgaaagattttccttgaccatggggcaaaagcatttagtgacggtgttctgtttatgggctttaacatgttcccttcttccatctttctcctttggaattctgagaattggtttgaagaagagacctctagatcttgatagtattaatgctgctagaaaggcaagagaaggtctaagatctgtaagaccaatgatgggtgcacatgatcagtttattggtaagtcaaaaggtgaagatatagtacctttgaagaattatttggacgctcaatattttggtgagattggaattggcacacccccac

SEQ ID NO: 241113 - DNA, 131 bp, Glycine max
gttcgatgttggattttcccaaacattttaagaagaaatgtgatgtgtaatgggtctgtaatgacctttgaaaataagtttggtttgtgttgaactctattgtcccattaatgttactactgtttgttaac

SEQ ID NO: 241114 - DNA, 348 bp, Glycine max
  unsure (1)..(348): unsure at all n locations
caaaaaaacaacaaaagggggcaacccttgaaacaaaccccaactcaaccaccaaaccactctctctgctcctcctctacctttcaagtttttaaagtattaagatggcagagacattcctatttacctcagagtcagtgaacgaaggacaccctgacaagctctgcgaccaaatctccgatgctgtcctcgacgcttgccttgaacaggacccagacagcaaggttgcctgcgaaacatgcaccaagaccaacttggtcatggtcttcggagagataccaccaangccaacgttgactacgagaagatcgtgcgtgacacctgcangaacatcggcttcgtctcaaa

SEQ ID NO: 241115 - DNA, 400 bp, Glycine max
  unsure (1)..(400): unsure at all n locations
aaaataaattgatacacaccacatttccccaaagtaatttattaattaataaataaatggcggcggcggcggcattgacggtgcaactcccacctaggattccgaccgccaacaacgttacccgctgctctgctttgccntctctgcctcctcgcggcaacaacactaaaaccactttgctcttatcttccctcaaccacttctcagtgtcccgaaaatcttctctgcttcagaccagagcttcttcagaggaatcatcctcagtagatgccaatgaggtgttcacagatttgaaggaaaagtgggatgctcttgaaaacaagtccacagtacttttttatggtggtggggctttagttgctgtttggctatcgtcgattcctgtgagcgccatcaactc

SEQ ID NO: 241116 - DNA, 364 bp, Glycine max
gaagttcttcagcgaccaagaccagatcgacttcatcgattccttccagaagtgtctcttcgagaacacgcacggcgtcgaggccacggaggccaacaaactcaaaatctacggcaaggatttcgcggcgtgggcaaaacccgaaaccgccgatgattccatgtgggaggacgcagaggaagccttcaccaaaagccccacactggttaggtcaaaccaagacctaaaagaagagttcgaagaagcttccaacggtggaattcagagccttgctttgggtgctttggacaacagtttcctggtgagtgaaaatgggattcacggttgtgaagaatttcgcacatgggattcatgggaagggtgc

SEQ ID NO: 241117 - DNA, 385 bp, Glycine max
gacttgttcgcgctctctctctctctgtctttgttaaccctctcggcctctgtgtgttgtgttgtgaatcgagattcaacacttcaactcggcccattgggattttcagggtacaatggcttccaacatctcgccctctgcctttgataaagaacagatatttggaatggctgaaaaggagatggaatatagggtcgaattattcaacaagatgacccagacctgtttcaataagtgtgttgacaataggtacaaggagtctgagctaaatatgggtgaaaatagttgcattgaccgctgtgtttcaaaatattggcatgtgactaatctaattggtcagctgcttggttctgggaagcctccaatgtaatccaagtgttttgta

SEQ ID NO: 241118 - DNA, 386 bp, Glycine max
  unsure (1)..(386): unsure at all n locations
gacacaattcaataccatttatcaactcactcatcaatctcgtttgttctcactaactattacttcatcatgtcgtcgagcacagttggtcaagtcatcaaatgcaaagctgcggtttcatgggaggcagggaagccacttgtgattgaagaagtagaggtggcaccaccacaagctggtgaagtgcgtttgaagatcctctacacctctctttgccacactgatgtttacttctgggaagccaagggccaaactccattgtttcctcgtatatttggtcatgaagctggagggattgtggagagcgtaggtgagggtgtgactcatctcaaaccaggggaccatgccctcncagtgtttnacggggagtgtggagaatgccctca

SEQ ID NO: 241119 - DNA, 380 bp, Glycine max
  unsure (1)..(380): unsure at all n locations
gcgtacacagcctcaacaaccctaacgcctgcagagcagagagagacgcagccatggggcgaagacccgcgaggtgttataggcaaattaagaacaaaccataccccaagtcacggttttgccgtggtgttcctgatcccaagatcaggatttacgatgttggtatgaagaagaagggtgttgatgagtttcctttctgtgtccatctggttagttgggagaaggaaaacgtttctagtgaggccctggaagctgctcgtattgcttgcaacaagtacatggccaaatttgctggaaaggatgctttccacttgagagtcanggtgcacccattccatgttcttaagatcaacaagatgctttcgtgtgctggagctgat

SEQ ID NO: 241120 - DNA, 339 bp, Glycine max
gacagcgaaacagagagtgatttcagtgagtgatcggtgttcacttgatctcatcataatcgtcagcgtcaattgaagaagatgccgatcagaaacatcgccgtcggaaggcctgaagaggcgactcaccccgacacgttgaaggcggctttggctgagttcatctcaaccttcatcttcgtgttcgccggctcaggctccggcatcgcctacaacaagctcaccgacaacggcgctgccacccctgccggcctcatctccgcctccatcgcccatgcattcgccctcttcgtcgccgtctccgtcggcgccaacatctccggcggccacgtcaacccg

SEQ ID NO: 241121 - DNA, 350 bp, Glycine max
gacagccacaacactttccacttgtctccgaattagttatcttgagaaacattattcccattgctatatattatggctagcatgaaggttacatgggtggttgtgatcatgtgcatggccgtggtgggtgcaccgatgatggcgcaagccatgacatgcaatgatgtgacggtgaacatggcacagtgcctatcctacctgatgcagggaggaacaccttcaacactctgctgtcaccaacgttgacaaacaaactgtgtgcaactggtctcaagcggatgctgccaggtaaaacatcaatgaccagtatgctcaggaattccctggtttctgcaaggtcaatgtccctt

SEQ ID NO: 241122 - DNA, 353 bp, Glycine max
gaccgttccatttctcaacaacttctgctacttcctactccaaccgcacttctgctccgcaattatcatgggcaaggtcaagatcggaatcaacggatttggaagaattggccgtttggtagccagagtggctctgcagagagacgatgttgaactcgttgccgttaacgaccctttcatcaccaccgattacatgacatacatgtttaaatacgacagtgttcacggacactggaagcatcacgatgtcaccgttaaggacgagaagacccttctcttcggtgacaagccagtcactgtttttggacacaggaaccctgaagagatccatgggggtcaactggagctgacat

SEQ ID NO: 241123 - DNA, 359 bp, Glycine max
aacttggtatatccactatatgaccattaactaaaacatgtctatggttaattaattggcgtgcttgaggaatagtcgcagccatacccaaccgaaaaagtatgttatccaagcgcatttcaagtagttgtaataaaacctgaccagttgatcctttagcttttccggcgatacgaacgtatttaagcaattgtcgttctgtaagaccataatgaaaacgcaatttttgtttttcttctaaacgaatacgatattgagattttttactggagcgcgattgatttctaagttcgcttttgactgttggccttttactagttagtcctggtaaagaccccagacgacgtatttttttgaaa

SEQ ID NO: 241124 - DNA, 336 bp, Glycine max
gacctaaaaattgtaccgatatggcttcacttgtgtgtctccttttttccttgcatttcatggttatcatgtcaggttccttaccagcaaatagtgaagtgtttacaaaagagtctcctatgtctctatccacaaaacccgtggaaagactcacccaactccacttttatttccataacaacaaaatgggggaacacccgactgctatgaaaattgttgagcctcctaaggcgtccatttctggttttgggactatttacatgatggatgaccctctaaccgaaggaccaagtccaacttcaaagcttgttggaagatgtcagggaatatatgctg

SEQ ID NO: 241125 - DNA, 374 bp, Glycine max
ggtggtggggtgtgcagaagagcgtcgcagttgtaaccctaatcagaagaagcgcagcttcaagcgagtgacagccaccagccatgggtcgtatgcacagccgcggtaagggtatatcctcttctgctttgccctacaaaaggacacctcctagctggctcaagatctcttcgcaagatgtcgaagaaaatatctgcaagtttgcgaagaaaggtttgaccccgtctcagattggtgtcattctcagagattctcacggtattgctcaggtcaatagcgtcactggcagcaaaatccttcgcatcctcaaagctcacggacttgcgcctgaaattccagaggatctgtaccatttgattaagaaggcagtttca

SEQ ID NO: 241126 - DNA, 359 bp, Glycine max
gacattcatattttcctttcgtttcctttcattttccctcactttctcgctccccaaacgcccctctctctcctccaatggccgaccagctcaccgacgaccagatcgccgagttcaaggaggccttcagcctcttcgacaaggacggcgatggttgcattactaccaaggaacttgggactgttatgaggtcacttggtcaaaacccaactgaggcagaactgcaggatatgataaacgaggttgatgctgatggcaacggaaccatcgatttcccagagttcctcaacctgatggctcgcaagatgaaagacaccgactcagaggaggagcttaaggaggctttccgtgtgtttgac

SEQ ID NO: 241127 - DNA, 378 bp, Glycine max
gatcatcatcaacaacaagcagatcaacctctctctctctctcaaccataatagtcatgggtttgaaggaggattttgagcagtatgctgagaaagcaaagactttgccaccgactcaatcaaacgaagacttgcttatcctttatggattgtacaaacaggccaccgttggacctgtcaacaccagccgtcctggaatgttcaacatgagggacagagctaaatgggatgcatggaaggctgttgaagggaaatccaaggacgaagcaatgggtgattacatcattaaggtgaaacagctgctggaagcagctggcttgcctgcttgataacattgtcatgcccttgcttctgaatctgtgctagaagttcacaaca

SEQ ID NO: 241128 - DNA, 168 bp, Glycine max
caaaaaaacaacagaaggggactcattcatacaatagagaccagcttttgcttctttgtgaacatggagatgaggaaatcatgtggcttcttcttcttgctcctcctccttgtctttgcttcccaggtggtggtgcaaacggagggaaaaatgtgtgagtcacaaagc

SEQ ID NO: 241129 - DNA, 266 bp, Glycine max
  unsure (1)..(266): unsure at all n locations
cgtgacggcttcacgttgtcacagtcatcatctcttgcggctacggttttagcgcagcttcttctagatttaaggaagatgggtaaggaaaaggttcacatcagtattgtggtcattggccatgtcgactctgggaaatccactaccactggtcacctgatttacaagcttggaggcattgacaagcgtgttattgagaggtttgagaangaagctgctgagatgaacaagaggtctttcaagtatgcctgggtgctggacaaact

SEQ ID NO: 241130 - DNA, 318 bp, Glycine max
ggttctagtgtgtgattgtttgttgttgtaactcgttcttcttcttttgttgttctgtgtttgtgtttgttttttctctcacctgaaaatgtcttgctgcggtggtaactgtggttgcggaagctcctgcaagtgcggcaacggctgcggaggctgcaagatgtacccagacttgagctacactgagtcaaccaccaccgagaccttggtcatgggagtggcacctgttaaggctcaatttgagggtgctgaaatgggtgtgcccgctgagaacgatggctgcaaatgtggaccaaactgctccttgcaaccctgcac

SEQ ID NO: 241131 - DNA, 362 bp, Glycine max
ttccgctgtcacatcaggacacacgtcgatagtgctgcgagaaacgacaaaagggggttctactgtgtgactgtttgttgttgtaactcgttcatcatcttttgttgttctgtgtttgtgtatgttttttctctcaactgaaaatgtcttgctgcggtggtaactgtggttgctgaagctcttgcaattgcggcaacggatgcggaagcatgcaagatgtacccagacttgagctatactgagtcaactagcaacgagaccttgtgtcaaggtagtggcacactgttaaggttcaatttgagggtgctgaaataggtggcccgctgagaacgatagttgcaaatgtagaccaaactgctcct

SEQ ID NO: 241132 - DNA, 378 bp, Glycine max
ggatgatgtcccaataaggagctatcctaggaagagtgatgccacgttcccctcaagagaaatgtatgtgtacggatcaatatgggatgcatcttcatgggctacagagggaggaaaatacaaagctgattataattaccaacccttctttggtagatacaaaaacttcaaaatacaaggttgtaccactgaagcttcaacctcatgccagccaccatctccctcaccaccaggctatggcagcctaagccctcagcaactttctgcaatgcaatgggtccaaaacaactacttggtctatgactattgccatgatcctggaagagaccatacacttactccagaatgctaaggttttaagctatatttggattgaaa

SEQ ID NO: 241133 - DNA, 363 bp, Glycine max
ggaacctttgcattctattcattcaagattcagcaagtgcgttttggaagcagagaccgaaatacttcgagatggcccgtacaaagcaaactgctcgtaagtcaactggaggaaaagctcccaggaagcagcttgcaaccaaggctgcacgtaagtctgcaccaacaactggtggtgtgaagaagcctcatcgttatcgccctggaactgttgctcttcgtgagattaggaaataccagaagagcactgagctcctaatcaggaagcttccttttcagaggttggttcgtgaaattgcccaggatttcaagactgatctgcgtttccagagccatgctgtgcttgcattgcaagaggctgctg

SEQ ID NO: 241134 - DNA, 382 bp, Glycine max
ggatgcacaagtttgttgagatagctagaagcaataagatgaaaatgaaagtgcttgttttgtttgttgctacagttttggtagcatatgaatgccatggctcagactaccagaagttccctctccaaatgaaaactgggtttggtgggcaatacagcaatgaggtggcatgtgccagttggaggcttggcgtggaagcaaacaacgtagtcaagtggcaaactgttcctgcagcttgcggagagtacatagctgactacgttctaggagaccaatatagatcagattccaaaacagttaaccaacaagcttatttctatgctaaatccctcaaactcaccaacaaagatgtctttgtcttggacgttgacgacactactct

SEQ ID NO: 241135 - DNA, 419 bp, Glycine max
gcgagaagacaacacaagggggcgtacgcagcttcatccctaacgcgtgcatagcagagtcagagacagagacgcagccatggggcggagacctgcgaggtgttatatgcacattaagaacaagccataccccaagtcacgtttctgccgtggtgttcctgatcccaagatcaggatttatgatgttggtatgaagaagaagggtgttgatgagtttcctttcggtgtccacctggttatttgggaaaaggaaatgtttccagttaaggcctggaaaccgctcccaatgcctggaacaagtacatgggcaaatttgctggaaaggatgctttccacttgagaatcacggtgcacccattccatgttcttatgatcaacaagatgctttcgtgtgctggtgctgataggctccaaactgg

SEQ ID NO: 241136 - DNA, 330 bp, Glycine max
agggatggctaaagatgttgaggttcaagagcaaggaggagagtactctgccaaagactaccatgaccctcctccagcacctttgttcgacccagacgagctcacacagtggtccttctatagagccctcatcgctgagttcatagcaacccttctcttcctttatgtcactgtgctcaccattattggctacaaaaggcatactgatacaacggtacgtggcaccgactgtgatggggttggcattttgggcatcccttgggcctttggtggcactatcttcaaccttgtttaatgcaacgccggtatttcaagaagacacattaaccc

SEQ ID NO: 241137 - DNA, 385 bp, Glycine max
ggcgcacccagagaggaagcttagagagagagagagagagagagagagagaggagagagtattggcgcttcatcaagatgggtatttctagggattccatgcacaagaggcgtgccactggtggcaagaaaaaggcttggagaaagaagagaaagtatgagcttgggcgtcaggcagcaaacaccaagttatcaagcaacaagacaatcaggaggattcgtgttagaggtggcaatgttaaatggagggcattgaggctggatactggcaattactcatggggtagtgaagcagttactcgcaagactcgtattctagatgttgtttacaatgcctcaaacaacgagcttgtgcgaactcagaccctggtcaagagtgctattgt

SEQ ID NO: 241138 - DNA, 383 bp, Glycine max
ggagctaaaacaaaacaaaaagaagaggggggcgaagagaagaagatggaggttagtttatcctcaacatcatgtatacccttaagctcgaagttgaagcataagcatggccttttccactctcaaattcccattcccacagcttcaaccaaaaccagaagaacaaaacctttgtccatagttaacgcctccagacaaaccttgtcctccaactggctcgtttctccacacgatttttctgcatccaccgcttccccatggcttcccagattcgaagagctcgacgccaccaacatgcttctccgtcaaagaattatttttttgggttctcaggtggatgatatgactgcagattttatcattagtcagcttttgtttttggg

SEQ ID NO: 241139 - DNA, 367 bp, Glycine max
ggtaaacagaacagagcaacactgaacaatggcgcaaccttcctcctcctcgaagcctgttgtccctctcctgaatgacgagctggacatcgtgatcccgacaatccgaaacctcgacttcctcgagatgtggcggcccttcttcgaaccttaccacctcatcatcgtgcaggacggagaccccaacaggaccatcaatgtccccgaaggcttcgattatgaactctacaaccgcaacgacatcaatcgcatcctcggacccaaagcctcctgcatctcgtttaaggattctgcgtgtcgctgctttggttacatggtctccaagaagaagtacatctacaccatcgatgacgactgcttcgttgct

SEQ ID NO: 241140 - DNA, 371 bp, Glycine max
gggggtgctggtggtgcagaaagggccattttctgaatgcgctctatctatctcttccgatctggctactaaccctaacccgcttcgaaccgtggcttcctcggcctcgcagaacctctctcgaagaaaatcttcttcttcgtcttcgttttctcaacaaacttccgggtcgacccggatcgtttaccgcgaacctcggatcccatcggaatccaattttccgatctggcagcagaactggttcatcgcattgctcttcctcatggctctcggattcttcgccctcgctctcttcctcttcatcactttcgactctgacatcgctccttcttccaccgcatccgccgcttcctccgaaggcgtcgaggtgc

SEQ ID NO: 241141 - DNA, 342 bp, Glycine max
ggcagccaagaaaagaaaatcctcagccattttcttcgtagccaaacactctgaaattctcagttatgtcgtggcaagcgtatgtggatgatcacctactgtgtgaaatcgaaggtaaccacctcactcacgccgctatcatcggccaagacggaagcgtttgggctcagagcaccaacttccctcagttcaaacctgaggaaataactgccatcaataatgactttaatgagcctggatcacttgctccaactggattgtaaatcggtggcaccaaatacatggtcatccagggtgaacctggtgctgtcaatcgagggaagaagggtcctggtggtgtta

SEQ ID NO: 241142 - DNA, 195 bp, Glycine max
gatgcatagcaattcccaattcctaattgtttaaacctaattctcatttcttcatcgttcgattcttctcctcctaaagatgcagatcttcgtgaaaactttgaccggtaagaccatcacccttgaggtggagtcctccgacaccatcgataacgtgaaagctaagattcacgacaaggaacggatcccacctga

SEQ ID NO: 241143 - DNA, 263 bp, Glycine max
gcaaaaaaacaacagaaggggaaggagctgttgccgttgttggacattctggcgaacaaggtgaaggcggtacggcggctccgggagcttctcacgacgaagttcccgccggggagttttccagtgaaggtggcgatcccggtggtccccacggtaagggtggtggtcacttttacaaatttcgtggaactgcaacctgtgaaaaattctctaaaccctttatcaatctcaacccattggcccaatgcaaataagaatattcc

SEQ ID NO: 241144 - DNA, 375 bp, Glycine max
ggaatatgaacttctcagaaggaacttcaatgatactggttgcttcggctttggtattcaggagcatattgatttgggaatcaagtatgatccttcaactggtatttatggaatggatttctttgttgttctggaacgacctggctatcgtgttggacgtcgcctaagatgcaactcccgtgttggaattcagcaccgagtcacaaaggaggatgctatgaagtggttccaggtgaagtacgagggagtgatccttaacaagtcccaggctattctttagttagattgagttcactttaggagtgtgttatcagttttgtccactatagctcgatctttctgtgatattatgttaattttaaggcaggtttttga

SEQ ID NO: 241145 - DNA, 323 bp, Glycine max
gatcgcacaacattattctttcgcaccttgcagaatcaatttcccccccaaaccgccttccagggtccttacaagccaaacggtcgcaaatccaacggtgggaaagcgcccaaggagcaactcgccaacaaggctgcaagaaaatctgcacctatcaccggtggagtcaagaaacctcaacgctatcgtcctggaactgttgctcttcgtgagatctgaaaataccaaaagagcacacagcttctgatactcaaactcccctttcagcgtcttgttcttcaaatcgcgcaagacttcatcactgatttgaggttccacaatca

SEQ ID NO: 241146 - DNA, 418 bp, Glycine max
aattcccggctcgacccacgcgtacgggaagggatggctggtctcattgctgtgtcaaatgctggggaagtggcttatgggttcaattgcaatggcatgtttaggggctgtgccactgaaaatggcttcatggaggttggaatctgggaatacgttcatttatttggttcctggttgtttcgattcaactattgaatttgtgtatcatgttggagtttagtagggtcttgctgggtgctggattgagttcattattattagtctaatagtcttgtttctaagaattagaaaacaaaaaaaattgtgaaaatatagttgtaactttgggttgtcttttccttgattaagactttttgtagaacctccaacaaaccgtttaacctttttcctcctaacaactatgacttaatttaattcc

SEQ ID NO: 241147 - DNA, 182 bp, Glycine max
ttgtgtttggcaccgccgatgggcaagctatggagttagatatggatttggtccagtggatctccactgtgaaggatggccatcaccttctcgaagaagtgcttcaacttctttgcgaatatcttacagagatccttattgaggagtcaaatgtgcagcctgtcaatagtcaagtgacggtt

SEQ ID NO: 241148 - DNA, 335 bp, Glycine max
tggggttgcaaatcaattgtatgagctttgcgaagctgtaggccctgaacctaccataacggaattggtacctgcttatgtgcagttgcttcgtgataatgaggctgaagtacgcataccggctgctggaaaagtgaccatgttttgccgggttttaaatccagatcttgcaattcatcatattcttccttgtgtgaaggaattgtcatcagattcttcacagcatgtccggtctgctttggcttcagtaataatgggaatggctccaatgttgggaaaggaatcaacaattgagcagcttcatcctactttcctttcccttttgaatgaagaat

SEQ ID NO: 241149 - DNA, 344 bp, Glycine max
ggaatatgaacttctcagaaggaacttcagtgatactggttgcttcggctttggtattcaggagcatattgatttgggaatcaagtatgatccttcaactggtatttatggaatggatttctttgttgttctggagcgacctggctatcgtgttggacgtcgccgaagatgcaagtcccgtgttggaattcagcaccgagtcacaaaggaggatgctatgaagtggttccaggtgaagtacgagggagtgatccttaacaagtcccaggctattccttagttagattgagttcactttaagaatgtgttaacaattttgtccactataactccatttttccgtg

SEQ ID NO: 241150 - DNA, 360 bp, Glycine max
ggcagtttcaaattttcttttccttcactttcccgagaaaaaaataacacttttcactttcttcactacgttctcacctcgatatggctcgtacgaagcaaaccgctcgcaagtccaccggtggcaaggcgccacgtaagcagctcgccaccaaggccgctcggaagtccgctccggcgaccggaggagtgaagaagccccaccgcttcaggccgggaaccgtggcgctgagggaaatcagaaagtaccagaagagcaccgagcttctcatcaggaagcttccatttcagaggctcgtgagagaaatcgcgcaggatttcaagaccgatttgcgtttccagagcagcgctgtttccgcgc

SEQ ID NO: 241151 - DNA, 351 bp, Glycine max
ggcagtttcaaattttcttttccttcactttcccgagaaaaaaataacacttttcactttcttcactacgttctcacctcgagatggctcgtacgaagcaaaccgctcgcaagtccaccggtggcaaggcgccacgtaagcagctcgccaccaaggccgctcggaagtccgctccggcgaccggaggagtgaagaagccccaccgcttcaggccgggaaccgtggcgctgagggaaatcagaaagtaccagaagagcaccgagcttctcatcaggaagcttccatttcagaggctcgtgagagaaatcgcgcaggatttcaagaccgatttgcgtttccagagcagcgctg

SEQ ID NO: 241152 - DNA, 314 bp, Glycine max
gggctcgtgactacgaacattgcaggaagaaagaaagaaaggcgatggacctcggaacctatgacgtgccagaaggagtggacattctgggaagatacgatgcagagtttgcaaaaatcctcgcaaaagatgctttgaaattcgttgctgaactgcaacgtgagttccggaacgatatcaagcatgcattagagcgcagaagagaggcaaagaagaagtacaatgaatggtctcttccggggtttgatcctgccaccagtgacatcagagagcaggagtgggtgtgtgcacctgttccaccagctgctgctgat

SEQ ID NO: 241153 - DNA, 369 bp, Glycine max
gagacacctttttcctcttacttcagttaacctcacaacaatcaagttttgaacggcaactgtgagaagtctgaagatcaacacaagtacctgcaaacgtacagtgaaggagctgcattcttatgagaaggaagttgatagagaagctgccaaaacagctgatatgacggaagaaggagctgacccccatgatctcaagcaacaggaaaatgtgttggcacagtctaggatgatgattcctgactgccgcaagcgccttgaggccgcgttggcagacttgataggaatactggctgagtaggaggagtcagatgagaaggccagtcttgagattgatgaagcctagaacagcatcgtagaactgaaaaa

SEQ ID NO: 241154 - DNA, 391 bp, Glycine max
aattcccggccgacccacgcgtcagggggtgaatgtttgagtgcataaggtaagcaagaaaatggtggtgaagaatcgattggcaaagctccggttgccggaaccacccatcctaccttgtggttgttacggttaccaaaccaacacgaaatggcaggcaccttgaacttttaggttccaacaatcccgtcgcaggcaaggatgatgacaaaagaatgaccctcaaactgagaagaatcaattattggctttccgttgggccaaacccttcaaagccggttgaccatcttcaatttaaagcaggtttaggacactcgcgtcaattccctgttgctgctctaaatggacataccctcatccaggaccacccagccattgctgctgatcacaa

SEQ ID NO: 241155 - DNA, 314 bp, Glycine max
taaaggggactacatggatgttgacgccttgaagaagcttaacatggacaaaaagttggtgaaaaaactagccaaagaatatcatgcctttttagcctctgaagcagtcatcaagcagattcctcgtctcttgggacctggtctcaacaaggcagggaagttccctacacttgtgactcaccaagaatctctcgactcaaaggttaatgagaccaacgccatgggcaagttccagcttaagaaagttctctgcaatggagtagctgtggggaatgttaacaaggaagaaaatccaatcctccaaaatgttaaac

SEQ ID NO: 241156 - DNA, 313 bp, Glycine max
ggccattgttgttgctattatcatccgcagctgcttttattcgcaccgcaaacagtgagccatggccgtcggaaagaacaagcgcatctccaaggggaagaagggtggcaagaagaaggcagctgatccctttgccaagaaggattggtatgacattaaggctccttctgtttttcaagtgaaaaatgttggcaaaaccctcgtctctcgtactcagggtaccaagattgcttctgaaggactcaagcatagagtgtttgaagtctccttggctgatcttcaaggggatgaagattatgcattcaagaagatt

SEQ ID NO: 241157 - DNA, 287 bp, Glycine max
gacatcgcacaacattattctttcgcaccttgcagaatcaattttctctctcaatcgtctttcatggctcgtaccaagcaaaccgctcgcaaatccaccggtgggaaggctcctaggaagcaactcgccaccaaggctgcaagaaaatctgcacctaccaccggtggagtcaagaagcctcatcgctatcgtcctggaactgttgctcttcgtgagattcgaaaataccaaaagagcacagagcttctgattcgcaagctcccctttcaacgtcttgttcgttaaat

SEQ ID NO: 241158 - DNA, 328 bp, Glycine max
ggttctattgtatgtgattgttgtgactcgttcttcttcgtcgttatcttcttcttttgttgtttgtgtgtttgttttttctctcacctgaaaatgtcttgctgcggtggtaactgtggttgcggaagcgcctgcaagtgcggcaacggctgcggaggctgcaagatgtacccagacttgagctacaccgagtcaaccaccaccgagaccttggtcatgggagtggcaccagttaaggctcaattcgagagtgctgaaatgggtgttcctgctgagaacgatggctgcaaatgtggagctaactgcacctgcaacccctgcacttgca

SEQ ID NO: 241159 - DNA, 376 bp, Glycine max
ccgacgcgtgggcggatgcgtgagcgggagagaaagggatagagaaggggattctccaattgattcaccaatgtactcaccattgcacatcgcagttctcgacgacgatatcgatggcaagtgcaatggaacgtgctaggcagtccactggcagatccgctggaaggaaggatctgaggaagcaagtggcacgcaagtcagctcgggagtcaggcgcggtgaccggcggagtgagcatcacgcaacgaatcatggcactaacggagactctgaaggagaatcggaggtacgagcttatgatcggacttctgatacgccagatgctagtcaaaaagctcgtccaagatttcgctcacgatctcagaattgatatcag

SEQ ID NO: 241160 - DNA, 352 bp, Glycine max
gaagggagtttcagttaacgtacctagttgttggtctttatatttagttattgacatcaacaaagtcatggaggaagttaatgtggttcaaaccaagaatggaactgtttcagtagcttctgcgtttgctggccataaggaagctatacagcaaagggaccacaaatttttaagaattgctgttgaagaagcgtataaaggggtagactgtgaagatgggggtccctttggtgctattatagtttgtaatgatgaaattgttgctagatgtcacaacatggttctgaagaacacagacccaactgctcatgcagaaatcactgtaaaaaaaaagcttgtgaaaagctaaacc

SEQ ID NO: 241161 - DNA, 338 bp, Glycine max
gacccacaagtcatcaaacttcaattgagtttcaaagagatcagtggtagctagtgtggtgcaattgtgttgatcaaggatggaacaaaagaagtttgtggcactattaatggtggttgtggtaatggcttcttctatgtggaaagggtccgaaggtcttagtctctgtaacatggatgaaggtggattggaggcttgcaagccctcagtgactcagccaaacccagttgatccatcccctgattgctgcaaggctttggctggtgctgacttgaaatgcctttgctcttacaagaactcatcaaagttgccctttcctggaattgattgaactcctg

SEQ ID NO: 241162 - DNA, 385 bp, Glycine max
tggggttctagtgtgtgattgtttgttgttgtaactcgttcttcttcttttgttgttctgtgtttgtgtttgttttttctctcacctgaaaatgtcttgctgcggtggtaactgtggttgcggaagctcctgcaagtgcggcaacggctgcggaggctgcaagatgtacccagacttgagctacactgagtcaaccatcaccgagaccttggtcatgggagtggcacctgttaaggctcaatttgagggtgctgaaatgggtgtgcccgctgagaacgatggctgcaaatgtggaccaaactgctcctgcaacccctgcacttgcaacttatgtgtttggagagcaagcttcaagcagagatagcccttaaataagaataatgat

SEQ ID NO: 241163 - DNA, 357 bp, Glycine max
ggggacatggaattggaagacaagttggagtgtggtggtctgttttaaaatccaacacttaatctctctcttcgcagcctaaaatcccaatggcttcactctctgttttgcgccacaaccacctcttctcgggccccctcccggcccgccccaagcccacctcctcctcctcctccaggatccgaatgtccctccgcgagaacggcccctccatcgccgtcgtgggcgtcaccggcgccgtcggccaggagttcctctccgtcctctccgaccgcgacttcccctaccgctccattcatatgctggcttccaagcgctccgctggccgccgcatcaccttcgaggacaaggactacg

SEQ ID NO: 241164 - DNA, 344 bp, Glycine max
ggcacagaattagggttttctaattcacagagcaacacagcgaaccaacaatggcgcagcctcagccgcagtcgcagccgcagcacgggcaagcagcgctggagcaggtgcagtgcttcggtcgcaagaagaccgccgtggccgtgacctactgcaagcgcgggcgcggtctcagcaagatcaaaggctgccccattgagctcgtggagccggagatcctccgcttcaatgccttcgagccgatcctcctgttgggtcagagccgcatcgccggcgtcgacatgcgcatccgcgtcaaaggtggcggccacacctctcagatctatgccatccgcctcaacatc

SEQ ID NO: 241165 - DNA, 374 bp, Glycine max
ggagtgagtgaaagaaagaagagaaggagttgaagtggttgttgtattgtagtagtgtgtaaagtcttggtgatggatagacacaaatgcaagctttgttcaaggtctttcagcaatggcagagcccttggtgggcacatgaaggctcaccttgcttctctccctctccctctccctccaaagcttcactcttgtttctcttcctctgactcagaacaagaacaatctttaagggagaatcctaagaaaaccttgaggattctggatcctgaagacagagagagcgagacagagtctaataagaacccgactcgtcaacgatccaagcgcaactggaaatctaacatgcccaagctcagcctcggacaccccga

SEQ ID NO: 241166 - DNA, 318 bp, Glycine max
ggtaaacaaaaaccatcagcaacataaaaaaaaaaaaatagaaagaaaaatgatgctcggagaacaccatcgcgggaatccgacggtcctcgtgccaccgtggccagcccacgacgatccgacggctgagatgtactccgcgttcttaacaaacgacgtcaatgctggtgagtactctccgtaccatcttcaagaagcactaacggcgctgcagcgttttctgccgtcaaacgaaacggacgcagactcggactcctcggaggcggctcagcccgacgcggcggtggacgcgtacacgtgcgaacatttcggcatgta

SEQ ID NO: 241167 - DNA, 345 bp, Glycine max
ggtaaacaaaaaccatcagcaacataaaaaaaaaaaaatagaaagaaaaatgatgctcggagaacaccatcgcgggaatccgacggtcctcgtgccaccgtggccagcccacgacgatccgacggctgagatgtactccgcgttcttaacaaacgacgtcaatgctggtgagtactctccgtaccatcttcaagaagcactaacggcgctgcagcgttttctgccgtcaaacgaaacggacgcagactcggactcctcggaggcggctcagcccgacgcggcggtggacgcgtacacgtgcgaccatttccgcatgtacgagttcaaggtccgtccattgccacg

SEQ ID NO: 241168 - DNA, 381 bp, Glycine max
gaacctgcacaagtggtggcccatagaaacatgttaccaactagagggtgtaccaggtcaacctggtctaatccgctactgtgcttccaccgttgaagaagctgttgttggtgctcagaagacaacaacaaccatcaagtggaccaaagagaagctactcgcgatcgatcccgtccaacgttgtttgtcctatgaaattgtggaaaacaacatgggatttaagtcctatgtggcaacactcaaagtgctgccaatgaatggagatgggtgcaagatagattgggggtttgtctgtgatcctgttgaagggtggagtttccaagacttgaagttataccttgagtcttctcttcagtccatggccaagaagattcagcttgc

SEQ ID NO: 241169 - DNA, 339 bp, Glycine max
ggagtgaggagactgatagaacagaagaacacattatggaagacacagtttctgcgttgaggtcgttgatggtttctcactctccgccgctggatgccttactggtgccctctgacaattatcacctgagcgaatatgtgtctgcacgagacaagcgcccccaattcatttcctgcttcactggaagtcccagcttggcacttataacaacaaaagaagcactgctgtggacggatggaccgtattttttgcaggctgagaaataacttactgctgggtggaagctaatgctaattgttgaatatcctgctgtagatatctggatggccgataatttgc

SEQ ID NO: 241170 - DNA, 311 bp, Glycine max
ggactaagaactctgaacattagccaatgcagagcactcaccccttctgctgtgcaggctgtgtgtgactcatgcccttccctccacacctgttctggaagacactcactcatcatgagtggttgtctgaacctgacttctgtgcattgtgtttgtgctggccaagcacaccgtgctatcactctccctcatgcagctcattgagccagaggggttgatgatgtataaaaggacactttgatgaggaagtgcccttgaagggttttaaagttttaagggtcgtctggataagtttatgttcaatgctgcat

SEQ ID NO: 241171 - DNA, 280 bp, Glycine max
gatgaaacccctgagtacatgcccctcagccatgtccttgcaaccaaactcggtgctcgcctcaccgaggttaggaaaaatggtacctgtgcttggctgaggccagatggcaagacacaagtaactgttgagtactacaatgacaatggtgccatggttccagttcgtgtccacactgtcctaatttccacccaacatgttgagactgtgagcaatgaccaaattgctgctgaccttaaagagcatgttatcaagcctgtcattcctgaaaagtacctgg

SEQ ID NO: 241172 - DNA, 354 bp, Glycine max
gtctttcaagtatgcctgggtgcttgataagcttaaggctgagcgtgaaagaggaatcacaattgatattgccttgtggaagtttgaaaccaccaagtactattgcacagtcattgatgcccctggacacagggatttcatcaagaacatgatcactgggacatcccaagctgactgtgctgttcttatcattgattccactactggtggttttgaagctggaatttcaaaggatggacagactcgtgaacatgctctgctttcattcacccttggtgtgaaacagatgatttgttgctgtaacaagatggatgctactacaccaaagtactccaaggccaagtatgatgaaat

SEQ ID NO: 241173 - DNA, 302 bp, Glycine max
gtcgatcaacgagatggtggcttctctgcggaatctgcagcttgggaaaatgaaatcgatgcctcaaagtagaaacgtttcggtcggatcaccgggttacggttcgccgagaggatcggtgctccgacccgggttttgcagtcttccaacaacgcccactcagcaaccggttcggtcaggggtgaactgtttcgatttttgggatcagagttgtgaagaggaaccagttatggagagggtggagtcagggaagggtataagggctaagatgtttgagaagctgagcaaggagaattctttgg

SEQ ID NO: 241174 - DNA, 308 bp, Glycine max
ggttcaattgtgtcagtgaatgttgttgtaagtcgttcgtcgtcttttgttgttctgtgtctgtgtctggatcttcacggttctgaaattctcttgctgtagtggtcactgtggtctcgtaatcatctgtatattcggcaacggctgccgatgctgcagagatgtaccctcacattagcgatactgattcgactgccatcgagacagtggtcatactagtggcatgagttactgctcaatttgacggtgctgatatggatgtaccctcatagatctatgacttctatatggacgaaactgctcctgca

SEQ ID NO: 241175 - DNA, 382 bp, Glycine max; identical to SEQ ID NO: 236163

SEQ ID NO: 241176 - DNA, 338 bp, Glycine max
gcgaggaatctacatatatacacaatacagactgagttcttgctccgtcgccacagcgctcggccaacatgggtatctccagagattctatgcatgaatgaggcgtgccactggtggcacgaaaactgcctggaggacaacgagagagtatgagcttggtcgccagcctgctaacactaagctgtcaagctacacgacagtcaggaggatccgtgttagaggtggacatgtgaaagggagggcattgagattggatatgggaatttactcctggggaagtgaatccgtatgtcgcacgaatcgtgtacgagatctggttaactacgcctcaagtattg

SEQ ID NO: 241177 - DNA, 362 bp, Glycine max
tatgatcctcatcaatcaaaacctaaagtcccaggctatcaaatggactggaatgcaggatttgcttatgcaaagaatggagtgcctattggtcctagagctaattcttattggctttacaatgtaccatggggcatgtacaaatcattgatatacataaaggaacgttatggaaacccaactgttatcttatctgaaaatggcatggatgatccgggtaatgtgactcttcccaagggtttgcatgacaccacaaggataaactattacaaaggctatttgactcaactaaagaaagcagttgatgatggagcaaatgtggttgggtactttgcatggtcattgctggataactttgaatg

SEQ ID NO: 241178 - DNA, 353 bp, Glycine max
gaagtaaagttacattggaagtgagagcgaagaagaagaagaaaccacgacacaagtccaaagtttgattccaaaatgcgatcctcaagcattcgcagcttcaccatcttcaccctctttctcattgcgatcctcccccacggacacgcaacaactccaacctccaaacttcgcctcaaacctcgctcttctcccttttcaaccgccctcgaaatcctccagaaacaactcgggtacaccttcaagagcatcgatcttcgtcgtcgcgccatgacacacgcttccttctccgaagaaaacaacatagctttcgccattctcggcgccagcgtcatcgatacctccgtctcttt

SEQ ID NO: 241179 - DNA, 346 bp, Glycine max
ggagaaacgcaatgagttcgtcgaacctcatagatcttcaacgcgaattggagaacaaagccaatgatctcagcaagcttcaaaaggaaattgcgaagaatcaccaaatgagaaagaaatacacggtccagcttggcgagaacgagctcgtccttaaggaactggatttattgaaagacgacgcaaatgttgataagttgattgggccagtacttgtgaagcaagatttggccgaggccaatgcaaatgtccgcaagagaatcgaatacatctcaactgaattgaagcgtctggatgccactgttcaagatttggaagagaagcaaaatagcaagaaagatacgat

SEQ ID NO: 241180 - DNA, 363 bp, Glycine max
ggggaaagaggaaaagaggattaaagggtcgccacgtttagcattaaccaaaccctctctactcttttttcttctccttctcttcgctagggttttagcttcttcctcttcacttcgttctttttcgcctctacaatgagcaacgacaaggacacattcaacgtcgccgatctcacttctgctctcaacgaggacaatagagcagaccttgtcaatgctcttaagagcaagatacagagtttggctggacaacactcggatattctagagtctctgtcgcccaatgtccgaaagcgtgttgaggttcttagagagatccagggccaacatgatgaattagaggctaaattttttgaagagaga

SEQ ID NO: 241181 - DNA, 300 bp, Glycine max
cgagaacacaccaataggcaagtcaccttctgcaagcgccgcaacggtttgctgaaaaaagcttatgaattatcagttctgtgtgatgctgaagttgcccttgttgtcttctcaacccgtggccgtttgtatgagtatgccaacaacagtgttagggccactattgagaggtacaagaaagcaaatgctgctgcttcaaacgcagaatccgtatctgaagctaacacacagttttaccagcaagagtcatccaaattgaaaagacaaattcgagatattcagaatctaaacaggcacatc

SEQ ID NO: 241182 - DNA, 374 bp, Glycine max
gattatcatagtagatattcattccccttatctttctctcttctctctccccgcccaaaccctaactccctaccctattccgctttctctcatccatcatgaaaggaggaaagtccaagaccgaatctaagagagccgatgccaaacttgctgtgaataagaagggcgccgccaccaagactaggaaacccgccggaaaggggaaggcagcgaaagatcctaacaagccaaagaggcctccaagtgctttcttcgttttcatggaggaattcaggaaggtgttcaacaaggaacatcccgacaacaaagcagtgtctgctgtgggcaaagctgctggagcagaatggaagacgatgtctgatgctgaaaaagca

SEQ ID NO: 241183 - DNA, 350 bp, Glycine max
gacacacattcatccattctataatttcccaatgtctgatatcaaccccaaccagccactaccaatggatgaagtggtgacctataaggagtgttggcacaaccatgctgcagcacgtggtcgtgtcatctatgatggttgtcttgagtatcttgttgatcaggacaatctcatatgtgcttgttgtggttgccaccgcaactttcatcggaagcacaccattttcaacggcatacctgaaactcaaacactagatcgagtgcaggggatgaggcctaagagaaagaagaggactactttctcgtcagagcaaaggaacaagctgatctgttttgctgagagtgtggggt

SEQ ID NO: 241184 - DNA, 372 bp, Glycine max
ggagcatgtattgtagattgtagatccatccgcatccgctagctcgcgcaggcaccagcaggtgaggttattgtgatttgaatggagggaagtggaggtggcggtgcttcaccgtctgcaccgttgaagcaatacttacaggaattctcgaagctgtttcagtactatctggataaatccactccccatcccccctacaggtggattgggactttcgtcattgcatccatctacgttttgcgtgttgtttatgtgcaggggttttacattgtctcttatggcctcggaatctacctcctcaatctcttgattggctttctctcccctttggttgatccagaactcgatccctccaacgcccctatgcttcct

SEQ ID NO: 241185 - DNA, 350 bp, Glycine max
  unsure (1)..(350): unsure at all n locations
gacccacaaactccacaagtgtcacaagtcataactcgttagagagagtttgtgtgtgtttttgtgtgtcaccttggtgcatacaacacaagatggaggaccaaaatggtagtggtaagttgagccaagggcttcgcaaggtgaagccttaccttgctatattgtcccttcagtttggctactcanggatgtatatcatcactatggtttctttcaagcatggcatgagtcattggatactctcagtgtaccgtcatgtaattgctgctattaaaataatcccttttgcacctgtccttggaagaaaaattagaccaaagatgactcctcccaacttcctgaagataatg

SEQ ID NO: 241186 - DNA, 283 bp, Glycine max
ggagcaagagtgaagagcgaagagaatggctcccaagggtttaatctttttggctgtgttatgcttctcagcactgtcactgagtcgttgtcttgcggaggataatggacttgttatgaacttctacaaggaatcatgccctcaggctgaagacatcatcaaagaacaagtcaagcttctctacaagcgccacaagaacactgctttctcctggctcagaaacatcttccatgactgtgctgttcagagttgtgatgcttcactgttgctggactccacaaga

SEQ ID NO: 241187 - DNA, 268 bp, Glycine max
gaccgcacagaattagggtttccaattcacagagcaacacaacgaaccaacaatggcgcagcctcagccgcagtcgcagccgcagcacgggcaagcagcgctggagcaggtgcagtgcttcggtcgcaagaagaccgccgtggccgtgacctactgcaagcgcgggcgcggtctcatcaagatcaacggctgccccattgagctcgtggagccggagatcctccgcttcaaggccttcgagccctacctcctgttgggtaagagccgc

SEQ ID NO: 241188 - DNA, 400 bp, Glycine max
  unsure (1)..(400): unsure at all n locations
gaaggcgtacaggtgcagtccagcagtcccagcagcccgttccaatgatgccacagcagatgctacctagggggcgtgtctatcgttatcctcctggtangggtatgccagatgtttctatgcccggggttgctggaggtatgttttctgttccatatgatgtgggtgggatgccactgcgtgatgcatcaatctcccagcaaattcctgttggggctttagcaacagctctggctaatgcttctccagagcagcagaggacgatgctgggtgagaatctctacccccttgtggaacagttagagcctgacaatgctgccaaagtgacaggcatgcttcttgagatgggacagactgaagttctgcatttgctcgagtcgccagaagccctgaaagcaaa

SEQ ID NO: 241189 - DNA, 394 bp, Glycine max
tctatagctttggagttgtagctttagagattgttagtggaaagagcaacacaaattacaggccaaaggaggagtttgtatatcttttagattgggcctatgttctccaagagcaaggaaaccttctagagctggtggatccaagtcttggttcaaagtactcctcggaagaggccatgagaatgctgcagttagcactcttgtgcaccaatccttctcccactcttagaccatctatgtcatcagtggtgagcatgcttgagggaaaaactccaattcaagcaccaataattaaacgcagtgacagtgtagaagatgtaagatttaaagcctttgagatgttatcacaagacagtcaaactcatgtctcttctgcattctcacaagatagtat

SEQ ID NO: 241190 - DNA, 384 bp, Glycine max
caggccacacgtcagtacaggtgtgagtagaggagagaaagggaaaagtgaagagggaacagaatggttcccagaggtttaatcattatggctgtgttctgcatctcatcactgtcaatgagtctctgtcgtgtcgcggataagggacgtgttatgaacttctaggcggtatcatgccctcaggttgcaggcatcattccgtatcaagtcccacttctccaggagtgcaattcgaagacagccttctcctgacgtacatacatcttcgatgacagtcgcgttcacagttatcaggcctcacagttactggactccacattcacgatcttgtctgacaaggatatagatacaagctttgagttgagaacgttcacgtacatttga

SEQ ID NO: 241191 - DNA, 377 bp, Glycine max
ggctacaaaaacattgaaagaaatagaaaaagcaaaactggtttctcgcatttcctccgaaacaaaccgtttcgctcgtttctcggatctgcaatggaagccccacccaaaggcgctgctggaagaagaggtgacaggaagaagtccgtttccaaatccatcaaagctggcctccaattccccgtcagccgcgtcgccaggtacttgaagaaaggccgttactctcgccgccttggcaccggcgctcccatttatctcgccgccgttctcgaatatctcgccgcagaagtgttggagctggccgggaacgctgcacgtgacaacaagaagaataggattaaccctaagcacgtgttgctggcggtgaggaatgatga

SEQ ID NO: 241192 - DNA, 358 bp, Glycine max
ggagcaagagtgaagagcgaagagaatggctcccaagggtttaatctttttggctgtgttatgcttctcagcactgtcactgagtcgttgtcttgcggaggataatggacttgttatgaacttctacaaggaatcatgccctcaggctgaagacatcatcaaagaacaagtcaagcttctctacaagcgccacaagaacactgctttctcctggctcagaaacatcttccatgactgtgctgttcagagttgtgatgcttcactgttgctggactccacaagaaggagcttgcctgagaaggaaacagatagaagctttgggttgagaaatttcaggtacattgagaacatcaaagaa

SEQ ID NO: 241193 - DNA, 393 bp, Glycine max
gagatacattgcacttgggaacgttcccattcagtgcactcgaatctgtttgcaataaaacgacctctctttcactaccccaagaccttcatttctctttccaccactttctcactctctctctgtattttttttgccctatctcatagggtttcctccttctctccctctcttccatgcatttttgctctcacgagttcttcatcttcgttgccctcttcttcgctgtctttgaagccttcttttgtgtggaacagagcagatttcacctcccggggttttttgaactgtgcccatgtctaaagtcttcagctttaccggaaatgatgatttttatcatgggggtcctatttatcctaacccgaaggaaccgtgtctcatcatgtctcttgg

SEQ ID NO: 241194 - DNA, 395 bp, Glycine max
  unsure (1)..(395): unsure at all n locations
gcctccgaaaaccctaacaacacaggcgcagacgcaaacgcaaacgcaaacgcaaacgcaaacgcagagcgtgatccattgacgaagatggtgcagcgtctcacctaccgcaagcggcacagctatgccaccaagtccaaccaacacagggtcgtcaaaacccctggtgggaagctcgtttatcagactaccacgaagagggcagcggaccaaagtgccccgtcactggcaagatgaatcagggaatctcacacttaaggctgcanaattcaaaaggtccacggtacccagaaaccgtaagactgtcaaccgtgcataaggtggagttttaactggaagtgccgtcagggagaggattatccgagccttcttagttgaagagcacaagattgtga

SEQ ID NO: 241195 - DNA, 309 bp, Glycine max
ggtatgcagttgttgtggttctcttcatttgcatttacgtatcagcatttgcctggtcatggggtcccctaggttggttggtgcctagtgagatctttcccttggagatccgttcggctgctcaaagtataaatgtgtcggtgaacatgtttttcactttcttgattgcacaagtcttcttgacaatgctttgccacatgaagttcggcttgttcatcttctttgcctttttcgtgttgatcatgacattcttcatctacttcgtcttgcctgaaaccaagggcattcccattgaagaaatgaaccaag

SEQ ID NO: 241196 - DNA, 162 bp, Glycine max
ggtatgcagttgttgtggttctcatcatttgcatttacatatcaccatttgcctagtcatggggtcgccaaggttggttggtgcctcatgagatcgttcacttggcaatccgtacggctgctcaaagtatagatgtctcggtgaacatggttttcactttct

SEQ ID NO: 241197 - DNA, 400 bp, Glycine max
cacgcgctttgaagcgtgctgtttggtgatccattcaaggggggaatatagcaaggtcctcacattgattcagaacaatttcagaaaatactgaagtatattagatccggtgttgaaagtggagctactcttgaaaccggaggagatagatttggcaactcgggcttctatattcagcctactgtcttctcaaatgttaatgatgacatgctgattgcgaatgaagagatctttggcccagtgcaaagcatattaaaattcaaggaccttgatgatgtgattcaaagagcaaataacacacactatggccttgcaacatgggtgttcacaaaaaacattaacacagctaatactttgactagagcattgagagctggaacagtgtgggtgaactgctttt

SEQ ID NO: 241198 - DNA, 379 bp, Glycine max
ggctagtggtactgtcttagctttgattctctgttctctgttttgttctgtttcgcgtattgtcttcatacaggaacttgaacaatgaagaatgcaaagggcaagggagcagcaagggcctcaaaagaatcactgaagcccgttgatgaccgaaaggttggaaagctgaaggcttccggtaagcctgggagaagtagtgcaccaaagaaggagaagaaggccaagaaagaccccaacatgcctaaaagaccacccagtgctttctttgtgttccttgaggagttcaggaagatctttaaggctgagaatcctaatgtgaaggctgtatcagttgttgggaaagctggacgagagaaatggaaatccttgtccagtgctg

SEQ ID NO: 241199 - DNA, 392 bp, Glycine max
gttggaattatagtgtatcgtggtctttactttggaatgtatgattccctgaaaccagtagttttggttggtgggttgcaggatagtttctttgctagtttccttttgggatggggaatcacaattggtgctggtttggcttcttatcccattgacactgttcgaagaagaatgatgatgacttctggagaagctgtgaagtacaagagctctttgcatgcattccaaacaatcgtcgcaaatgagggtgccaagtcactcttcaaaggtgctggtgcgaacatattgcgtgctgttgcaggtgctggtgtgcttgctggttatgacaagctgcagctcattttgtttggaaagaaatatggatctggcggcggctaaaaatgatgacgaca

SEQ ID NO: 241200 - DNA, 452 bp, Glycine max
actcccggctcgacccacgcgtacggggagcgacacagagagtgatttcagtgagtgatcggtgttcacttgatctcatcatagtcgtcagcgtcaattgaagaagatgccgatcagaaacatcgccgtcggaaggcctgaagaggcgactcaccccgacacgttgaaggcggctttggctgagttcatctcaaccttcatcttcgtgttcgccggctcaagctccggcatcgcctacaacaagctcaccgacaacggcgctgccacccctgccggcctcaatctcggcttcaaccgccatgcgatccgcctcctcctccccgtctccgtccgcgccaacatctccggcgggcacgttaaccccgccgtcaacttcggcgccttcgtccgcggcaacatcaccttcctccgcggcatcgtctacgtcatcgcccagctcctcggctccatcg

SEQ ID NO: 241201 - DNA, 397 bp, Glycine max
ggttctagtgtatgtgattgttgtgactcgttcttcttcgtcgttatcttcttcttttgttgtttgtgtgtttgttttttctctcacctgaaaatgtcttgctgcggtggtaactgtggttgcggaagcgcctgcaagtgcggcaacggctgcggaggctgcaagatgtacccagacttgagctacaccgagtcaaccaccaccgagaccttggtcatgggagtggcaccagttaaggctcaattcgagagtgctgaaatgggtgttcccgctgagaacgatggctgcaaatgtggagctaactgcacctgcaacccctgcacttgcaagtgaggtgttggagagctaaagcttcaagcagaaatggcccttagaaataatgataaaaactatatgt

SEQ ID NO: 241202 - DNA, 370 bp, Glycine max
ggaaacaaagcatgaacggtgctgcatttgttgtggcagagtgctgtgagtatgtggaagtcgatcccacgggaagatatggaagatatagtgaaattcttggcaaaggagcttccaagacagtctatagagcatttgatgagtatgaagggatagaagtagcatggaatcaagtaaagttttatgactttttgcagaatcctgaaaatcttgaaaggttaaacattaaaatcaacctccccagaacattgaacaccagaacatcaagaagttccaaaactcctggggtgatactaacaacagacacattaactttgtcactgaaatgtttaactctgggaacccaagacagtacagacttaaacacaaa

SEQ ID NO: 241203 - DNA, 366 bp, Glycine max
aactcaatttttttgttgataatttatgtaattctattcagtataatatcagtataatagaataaaaaaattatgaaaagatctttggttctgtatagtctttttatactatatttaaagagttacttgtaacgtaatacaaataaactcgagtatggatattgtcaggaagactatttgactttgttttttcaaccccccaataaattcgaatattatggttatgacactgtttttttcagatttcaattttctataatagagagttctattatagaaatttcgattgtaaaatacaataaaattggattcgatactaaacattaaatagatatctatacagatagataatttgaaacaaaatca

SEQ ID NO: 241204 - DNA, 391 bp, Glycine max
  unsure (1)..(391): unsure at all n locations
ggctgtagtgctgtactagtgttacgcccgagtagattaggagagccaaaaaacttttgaaacagctcactcggaagcagagcagaatagatgaatttgttatcgcaatccactgccccttctacttctctatcaccttcctgttttcttccacgccaccctcatggttccacctggttctcttctggtaccttcaaattcttgaagaaagagagtagatgtctaaggaaagctggacgtactaaaatcactgcaaagtttgagctgaagccaccaccatatcctttgagtgctttggagccaattatgagtcaggagacactcgaataccattgggggaagcatcatangacttatgtagataatctgaacaggcaaattgatggaacag

SEQ ID NO: 241205 - DNA, 395 bp, Glycine max
ggagtgggttggttttttctttggttctcctgagctgtgtttattctctttctctgcgctctcatcttcgagctccgatggcgagcctgtggcgctcggtaaccggcatgactgacaattccaccgattacgacggcgtctagttccggtcgaaccccgatcggaccggcatggctcatcacgcatggcgagtacatcatcatctggcgccgccgctggtttgtcctcaagcaaggcaagctcttctggttcaaggactctgccgtcacgcgtgcgtcacgtccactcggcttggtccccgtcgccacgtgcctcagcgtcaaacgcgccgaagacatcctcaacaagctcaacgtcttcgagctctccacgcgctgcgactacatgtacttcat

SEQ ID NO: 241206 - DNA, 395 bp, Glycine max
agggggacctacagacacaggcccaacttgaacaccctcaagcacttcggtcaaaaattgattcctgcccgcctgcttgattgggagaattttcaacaatcgtcagagatcatagatgttttgagtactattcattcagaaatccccagaggggtggttctaggagattatgtgattgaatatggggatgatgatgctagagacgagtttgaagacttccctggagatgagggcaactggtggacctcatgtattctatatttcgacaactttagaagatccagaaatagaagaaggacgagagtcagtcatacaagaagggataatcgccgtttaagttatgatacttcaaattctgatgaacgttctgtagtatctatggagtatgcagatta

SEQ ID NO: 241207 - DNA, 382 bp, Glycine max
ggttctagtgtgtgattgtttgttgttgtaactcgttcttcttcttttgttgttctgtgtttgtgtttgttttttctctcacctgaaaatgtcttgctgcggtggtaactgtggttgcggaagctcctgcaagtgcggcaacggctgcggaggctgcaagatgtacccagacttgagctacactgagtcaaccaccaccgagaccttggtcatgggagtggcacctgttaaggctcaatttgagggtgctgaaatgggtgtgcccgctgagaacgatggctgcaaatgtggaccaaactgctcctgcaacccctgcacttgcaagtgaggtgttgggagagcaagcttcaagcagagatagcccttaattaagaataatgat

SEQ ID NO: 241208 - DNA, 320 bp, Glycine max
tggggttctaatatgtgattgtatgttgttgtcactcgttcttcttcttttgatgttcagtgtatgtatttgtttttactctcatctgaaaatatcttgccacagtggtaactgtggttgcggaagctcctgcaagtgccgcaacggctgctgatgctgcaagatgtagccagacttgagctacactgaatcaacaaacagtgagaccttggtcatgggagtagtacctgttaaggctcaatttgagggtgctgaaataggtgtgcccgctgagaacgatagatgcaaatgtggagcagactgcacgtgacaatccctgc

SEQ ID NO: 241209 - DNA, 329 bp, Glycine max
  unsure (1)..(329): unsure at all n locations
ggcacctttcgggtctggaagaagagtgtgccctgggaaggcccttggtttggcctcggttcatctttggctcgctcagttgcttcaaaattttcattgggtttcatctgatggtgtttctgtggagttggatgagtttcttaagctttctatggagatgaagaagccactgtcttgcaaggctgtgcctanggtttctgtttaggtttatgtgtgttgttgggttgagttggtttggtttgtctgcttaggtttgtggatgttgttcccaaggctgtgcctaaggtttctgtttaagtttaagtgtgttggttggtttgtccggttaa

SEQ ID NO: 241210 - DNA, 376 bp, Glycine max
ggaagagaagttgatgtcaacagcagaagctcctcctccgttccaagaagcagcgcgatgcgttgtgtgcaattgcagtttcaacaccttcagaagaaggcatcactgtcgatcctgtgggagaacattgtgcaatgaacattcatcagatcaaatggctttaccacaatttggcatttactcaaatgtccgagtatgtgctgattgtttcaacaactcacggtctgggaaggatgaaccacagacttcttcagatggagtaaacagtgtgacagatacaatttctaaattagatatcaacacaaatgttgattcaaaatccataccaactgcagagaataagcttgtgttgggcattaaagagtgtaaatgtgga

SEQ ID NO: 241211 - DNA, 390 bp, Glycine max
gggtgtgcgtgagagtgaagcgagaagcgagaagcgacatggatccagacgcgttggcaaaggcattcgtggagcactactactccaccttcgacaccaaccgcaacaatctcgccaatctctaccaggaaggttccatgctctctttcgagggtcagaagatccagggctcccacaacatcgtcgccaacctcacctcccttcccttccaacagtgccagcactccatcaccaccgtcgattctcagccctcaggcgtcaacgccgccatgctcgtcttcgtcagcggcaacctccagctcgccggcgagcaacaccccctcaagttcagccaaatgttccatttgataccaacaccacagggaagctattatgtgttgaatgacatat

SEQ ID NO: 241212 - DNA, 382 bp, Glycine max
ggcagttcaattccaatatattcgattctctctgtgtatttccctacctctcccttcaagatgcagatcttcgtcaagaccctcaccggcaagaccatcacccttgaggtggaaagctctgacaccatcgacaacgtcaaggccaagatccaggacaaggaaggaatccccccggaccagcaacgtctcattttcgccggaaagcaacttgaggacggccgtacccttgctgactacaacattcagaaggagagtactcttcacctcgtcctccgtctccgtggtggcatgcagatcttcgttaagacactcaccggcaagaccataaccctagacgttgaaagcttccgacacatcgataacgtcaatgccaagattcagg

SEQ ID NO: 241213 - DNA, 425 bp, Glycine max
agcccacgcgtccgagaagaggatgatcctgagtatgctaagcagctggttgacgaaacatggggcatgcacaaggatgctgagaaggcaccatttgaggaggccgagtagacgacggaagacgaggaatcaaaggatgacccagttgacgctgatgctgatgaggaagaggaagatgctgatgaagcttgcaatgactccgatgctgaatcacagacggaagctggagaagacaccacggaagacggtgtacatgatgaactctacgaactttgcacaacggataaagagtgagcggacgtcatattccggacagtcatagctttttcagttgtattgtcgttttgtacctaattttccctagataagcacaccgtggaaaactgcacgtgaaagctggagcttttgcttcaatcatatttgac

SEQ ID NO: 241214 - DNA, 397 bp, Glycine max
gtttgatggaagtcggacgcctccgccagtttgagatcattccaatagaacaagtttaacttcattcgatggagattatgcaacacagccaattcccgtaacttcacgtacagtcaggagcctaagagataacacacgaatgatcacatctttaccagtacccccctgtacaagtcctttgccacagttaggggcaccagcacagacctgtttcccttctccgcctcaacctacctaaaccttgaagggggcaaatacccttccctcaaatccagtgacactaaatgccacattcactcctgacccttttcaagaaagtgccttccaacaagcccacacacccggtggattcccaagaagacccagtttgagttgccgattgtaaacaccccaaaaa

SEQ ID NO: 241215 - DNA, 375 bp, Glycine max
gataatggagggatacaataagaaggttatgattgtggggatggtgttgggcatggccatgattgggatggccaatggccaatactcgttttgtcgcatgcccagcgatgggttggcggcatgcaagccgagtgtgagtggggactatcctgctgatccctccactgcttgttgctcagccattgccaaggctgatcttaaatgcttctgccgcttcaaggattcgggccttctctctatgtatggtgttgatcccaacaagtgcatggaactccctgttaagtgcaaggttgtcgactctttccactgctagattcattagagggggcactaatcaatataaactacacaagggcacttaattaactatgtact

SEQ ID NO: 241216 - DNA, 491 bp, Glycine max
cgcgcccgcccaccctccacctgtcacggctggtcacgaattaccggccgagccacgcgtcagtacggctgcgagagacgacagaatgggaagaaagctgctagcagaagggaagttctacacttttttgtttggattgatcgagtgtaccttttcttttcgagattggcttggtgtgcagtggaaagacggtggaaaagagtggtaaaggggagggcggcgccccaaaaaacaacactcaacttccatcaaaaaagcggccgctctagaggatccaagcttacgtacgcgtgcatgcgacgtcatagcccttctaaagtgtcacctaaattcaattcactggccgtcgttttacaacgtcgtgactgggaaaaccctggcgttacccaacttaatcgccgtgcagcacatccccctttcgccagctggcgtaataccgaagaggccgcaccgatcgcccttcccaacagttgcgcagcctgaatggcgag

SEQ ID NO: 241217 - DNA, 399 bp, Glycine max
  unsure (1)..(399): unsure at all n locations
gcttcatcgtagcgccagactgagaggaagagagagggagattctttgtttgctaccttctctcggaaaaatggttacgttcaggtttcaccagtaccaggtggttgggagggctcttcccacggaagcagatcagcaccccaagatctaccgaatgaagctctgggccaccaacgaggttcgcgccaagtccaagttctggtattttctgaggaaactgaaaaaggtgaagaagagcaatggccaagtgcttgccatcgacgagatttttgagaagaacccaaccaaaattaagaactatggtatatggttgcggtatcagagtaggactggttaccacaacatgtacaaggagtaccgtgacaccactctaaacggtgcagttgangcaatgtacaa

SEQ ID NO: 241218 - DNA, 381 bp, Glycine max
gacacttacgagtactaagcatggagtcctcaaagatctatgcttacctcttcctctgcatgatctttctctcatccgccactcccattctcggttgtggctactgtggcagaacccccatgaagcacaagcctggtaaaacaccaaagacatccaaaacacccgttgttaagccaccagtcaccatctctcccattaatgttcctcacgttgttcttccaccactagtgaagcccccaggtattctccctccaattccaattattaacccatgaacgacaccagggaacggagggaacactccatgcccaccaccaaagtcacctgcgcaagctacgtgccccattgacacgctcatacttggtgcctgtgtggatcttc

SEQ ID NO: 241219 - DNA, 365 bp, Glycine max
ggagcaagagtgaagagcgaacacaatggctcccaagggtctaatctttttggctgtgttatgcttctcagcactgtcactgagtcgttgtcttgcggaggataatggacttgttatgaacttctacaaggaatcatgccctcaggctgaatacatcatcaaagaacaagtcaagcttctctacaagcgccacatgaacactgctttctcctggctcagacacatcttccatgactgtgctgttcatagttgtgatgcttcactgttgctggactccacaagatggagcttgtctgagaaggaaacagatagaagctttgggttgagaaatttcaggtacattgagaccatcaaagtagctttgg

SEQ ID NO: 241220 - DNA, 348 bp, Glycine max
ggatgcacaagtttgttgagatagctagaagcaataagatgaaaatgaaagtgcttgttttgtttgttgctacagttttggtagcatatgaatgccatggctcagactaccagaagttccctctccaaatgaaaactgggtttggtgggcaatacagcaatgaggtggcatgtgccagttggaggctttgcgtggaaacaaacaacgttattcaattgcaaactggtcctgcaacctgcggaaaattcatagctgaacaagttccaagaaaacaatatagattagattccaaaacagttaaccaacaagcttaattccaagctaaatccctcaaactcaccaacaaag

SEQ ID NO: 241221 - DNA, 299 bp, Glycine max
ggaataagatagctgttggaattgctcatggattggcttatctccattatgactgtgatcctcccatagtgcaccgagacatcaagccaagcaatatacttctagactctgatatggagcctcacattgctgactttggtattgccaaacttctggatcagtcttctgcttcaaatccttccatttctgttccgggtacaattggttatattgcaccagagaatgcttatacaacaacaaatagtatggagtctgatgtatagagttaccgggtagttttgcctgagctgatgaccaga

SEQ ID NO: 241222 - DNA, 396 bp, Glycine max
gtttgaattggggtcagtgtcactgggagatgcataggggaagaactggaccctagggtgcttatacctcattggacactgcttgtcgtggtctggttggcttgtgttgcaagcaccggttctcaagaagtacccggctcgcctctctgtcacttcctacacctgtttctttggactcttgcagtttctcgtcattgctttgctccttgaaagagacgcgcaggcatggcttttccactctggtggagaagctttcactattttatacgcgggagtggtggcatctggaattgccttcgctgtacaaatatggtgcattgacagacgtggtcctgtgtttgttgccgtctatcaacctgttcagacttttgttgtcgccatcatggcttccattgc

SEQ ID NO: 241223 - DNA, 348 bp, Glycine max; identical to SEQ ID NO: 236846

SEQ ID NO: 241224 - DNA, 382 bp, Glycine max
ggagtgaggagactgatagaacagaagaacacattatggaagacacagtttctgcgttgaggtcgttgatggcttctcacgcgccgccgctggatgccttactggtgcccgctgacaattatcacctgagcgaatatgtgtctgcacgagacaagcgctgccaattcatttcctgcttcactggaagtgccggcttggcacttataacaacgacagatgcactgctgtggacggatggacagtattttttgcaggctgagaaaaaacttactgctgggtggaagctaatgcgaattgttgaatatcctgctgtagatatctggatggccgataatttgccaaatcatcccattcattggggttcatccctgatgcacttcaa

SEQ ID NO: 241225 - DNA, 386 bp, Glycine max
gaaaacaaatcgtgtaaaggcaaagtacagacaaagttagttagaaattgaaagggaaagggaaacgaaaatgagtagtagggtttggtgtgtggtgatggtatcagcgttggcgttgatgttacaatggcacgaagcattcagctcctacgctggctccgcaagtgcgatcatcgacccttccaaggtcaaacaagtttcgtggaaaccgagagctttcgtttacgagggttttctgacggaattggaatgcgatcacttgatttccatcgccaaatcggagctcaagagatccgcggtggccgataatttgtccggcgagagcaagttgagcgaagtcagaacgagctccggcaatgtcattcccaagaacaaggatctgattg

SEQ ID NO: 241226 - DNA, 340 bp, Glycine max
gatactgggatggacgtagtattttttttgtcccttttgtgttgattctgttctttgtaattctaatcctaggataaaagttcctgaactcttagaagatgaatggttcaaaaaaggatataaacaagcaacttttaaaatggaagaggatatcaatgtacatgatgttgctgctgctttcaatgattctaaggaaaatcttgtgacagagagaaaagagaaacccgtgtcaatgaatgcttttgagctcatatctaggtcacaaagcttcaaccttgaaaatttgtttgataagcagcaacggtctgttaagagagaaacacattttacctcacagcgc

SEQ ID NO: 241227 - DNA, 341 bp, Glycine max
aggtagcatgcggacttcgtctgtcaatgcatatcttgttggtcgacatatgcgatgtcgtgatcgagagtgagtacagctttgctaaccattggatacaaatgtctgcactcttcacctatgaaacgcccctccattggtgaggtttcgcaaggtatattgaggattaagctatgactcctcatgaaagaacagccgatgtcatttgcatccagcaacttctctcgaactgtgagtcaaatagacgagtgtcaggttgagctatgtagcatcatcatcatgatacacagggaaatggggtgaactcagtcagatgttctggggcgattttttttttcggt

SEQ ID NO: 241228 - DNA, 376 bp, Glycine max
gaccgcgaaacgcacatttcactattcattctcgtttccctttcgactgtgattgcttgttaactgaacttttcgagcaaaatgtctggacgtggaaaggggggcaagggtttgggaaagggaagagcgaaacgacaccgtaaggtgttgcgcgataacattcaaggaatcaccaagcctgcgattcggcgtttggctcccaagggtggtttgaaacgtatcagttgtctcatctaagaagaaaaacgttgcgtgctcaagattcttctggaaaacgttattcctgacgccgttacctacactgaacacgctaagagaaagaccgttacgggaatggatgtggtttaagctctcaagagacaaagaagaaccctct

SEQ ID NO: 241229 - DNA, 395 bp, Glycine max
gcgatcctgagaaggagaatttgtgtctatatgggtttccaaatgaaacatgggaagtgaatttgcctgttgaggaagtgcctcctgaacttcctgagccagcattacgtataaactttgccaaggacggcatgcaagagaaggactggctatcactggttgcagttcacagtgactcatggctgcttgctgttgctttctattttggtgcccgctttggatttggtaagaattaaaagaaaaggctttttcagatgaataatgatctgccaacaatcctcgaacttgtgactggaagtgctaggcaatcaaaggattaaccagctgcccataacaatggtagccaatgccaatcaagtggaaagtctcgtcagtctgagtctcacgccaagggg

SEQ ID NO: 241230 - DNA, 339 bp, Glycine max
cgaggaagatagatccaaggtcgatgatctcagaggttcccctatgagcgttggtaacctcgaggaactcatcgacgagaatcatgccatcgtttcgtcctcggtggggcccgagtactatgttggtattttgtctttcgttgataaggatcagctcgaacctggatgcgctattttgatgcataacaaggttctctctgttgttgggcttcttcaagatgcagttgatccaatggtctctgttatgaaggtcgaaaaggcccctttggaatcatatgctgatattggtggtttagatgctcagataccggaaagttaagaaacagttgagcctcccct

SEQ ID NO: 241231 - DNA, 386 bp, Glycine max
gagtacaagaggatgatgcctgggagaatcattggggtcagtgtcgattcttccggaaagactgctttgaggatggcgatgcaaactagggagcagcatatcaggagggacaaggccaccagcaacatttgcactgctcaggcactgcttgcaaacatggctgccatgtatgctgtgtatcatggacctgaaggcctcaagaacattgcacaccgtgttcatggtcttgctggggcatttgctcttggaataaagaaacttggaactgtggaaattcaggaccttcccttctttgacactgtgaaggttaagacttccaatgcacacgcaattgctgatgctgctctcaaaagtggaataaatttgcgagttgttgatggaaacac

SEQ ID NO: 241232 - DNA, 271 bp, Glycine max
ggttctagtgtgtgattgtttgttgttgtaactcgttcttcttcttttgttgttctgtgtttgtgtttgttttttctctcacctgaaaatgtcttgctgcggtggtaactgtggttgcggaagctcctgcaagtgcggcaacggctgcggaggctgcaagatgtacccagacttgagctacactgagtcaaccaccaccgagaccttggtcatgggagtggcacctgttaaggctcaatttgagggtgctgaaatgggtgttgccgctgaa

SEQ ID NO: 241233 - DNA, 390 bp, Glycine max
gactagataatgtgtatgaagttgtagctagctagctagctttctattgtctaatacacctttgtctgtgttgtaaattaaggttcaagaagcaacaagtaatcactcataatacatatatataatggcggattggggtccagtggtgatagcagtggtgctgtttgtgttgcttagccctggtcttctgtttcaattgcctgagaggagcagagtggtagagtttgggaacatgcaaaccagtgcaatttctatcttggtccacacaatcatcttcttggtctcattaccatctttcttattgctattggtgtgcatatctacactggctatgctttattctattctctttttggttaaaggtttagtaaatttttatcttgttattct

SEQ ID NO: 241234 - DNA, 380 bp, Glycine max
gactctgctcttgctttagccatcactaacactcagtctctgaattggggctgagggtttcgagtaacgtttatttttcacgagtttaagatatcatgggtaaagagaaggttcacattaacattgtggtcattggccatgttgactctgggaagtcaaccaccactggccacttgatttacaagcttggaggtattgacaagcgtgttattgagaggtttgagaaagaagctgctgagatgaacaagaggtcattcaaatacgcctgggtgcttgacaagcttaaggctgagcgtgagagaggaattaccattgatattgcattatggaagtctgagaccaccaaatactactgcactgttattgatgccccaggacat

SEQ ID NO: 241235 - DNA, 263 bp, Glycine max
ggcagaaagagaagcattagcaaaagcaagaagaactagtctaagcagaaatggcctcttcagtgatggcatctgtggccctcaaacctgcccctttcactgttgagaagtcctcagttagaggccttccctccctctcaaggaactcctcttcattcagagttgtggccagtggtggcaagaagatcaagactgacaagccttatggaattaatggtggcatggctttgagggaaggagttgatgcatctggcaggaaagga

SEQ ID NO: 241236 - DNA, 398 bp, Glycine max; identical to SEQ ID NO: 236405

SEQ ID NO: 241237 - DNA, 392 bp, Glycine max
gagggtttggttattagggttttcgctgaccggtgcgcagtcgagcctccagaagacgaatcgaaaatgccgtcgcacaagacattcagaatcaagaagaagttggcgaagaagatgaggcagaacaggcccattccctactggatccgcatgaggaccgataacaccatcaggtacaacgcgaagcgccgtcactggcgtcgcaccaagcttggattctgaggtgtatgctctgcctaggttcaatttatccaattaattagtgttttattttcttgaggcaaaaacaatgttttgagtttttaatattttccatttgttcgaagactatattgtgtaaggaacttactgtagttcatactcagggcgttggtcaactccttttaaagtat

SEQ ID NO: 241238 - DNA, 260 bp, Glycine max
ggaacctttgcattctattcattcaagattcagcaagtgcgttttggaagcagagaccgaaatacttcgagatggcccgtacaaagcaaactgctcgtaagtcaactggaggaaaagctcccaggaagcagcttgcaaccaaggctgcacgtaagtctgcaccaacaactggtggtgtgaagaagcctcatcgttatcgccctggaactgttgctcttcgtgagattaggaaataccaaaagagcactgagctcctaatc

SEQ ID NO: 241239 - DNA, 308 bp, Glycine max
ggaggcaagaagttgtattttggcatccccgtggcttcaagaagagaatctcaatggaggcccaggagctgaagcgcgtgttccagatgttcgaccgcaacggcgacgggagaataacgaagaaggagctgagcgactcgctggagaacctgggcatcttcatctctgacaaggacctgagccaaatgatccagaggatcgacgtcaacggcgacggttgcgtggacatggacgagtttggggagctgtatcagaccataatggacgatcgcgacaatgaggatgacatgacggatgccttcaacgtc

SEQ ID NO: 241240 - DNA, 326 bp, Glycine max
gggggcaagcacaaggatgctgagaaggcagcatttgaggaggccgagaagaagagggaagaggaggaatcaaaggatgacccagttgactctgatgctgatgaggaagaggaagatgctgatggagctggcaatgactccgatgctgaatcaaagacggaagctggagaagacaccaaggaagagggtgtacatgatgaactctaggaagtttgcaaaacggataaagagtgagcggaagttatattccggaaagttatatctttttcagttgtagtgttttttgtttttatttttccctagataagcagaccgttggaaactgc

SEQ ID NO: 241241 - DNA, 358 bp, Glycine max
gacacaagaagtcatcttttattgtacgccaaagaaaagaaaagaaagaaatcatagtttttttgggttgtgtgtgtcttttggtggaggaatgcttgtcacctactccttttaagttcccccaaaaacacttttgtgagtgagagaaagaagaagaagaagaagaagaagaagtagcataagtgatggatagacacaaatgcaagctttgttcaaggtctttctccaatggcagagcccttggtggccacatgaaggctcaccttgctactctccctctccctccaaagcctcactcttattcctcttcctctgactcagaacaagaacaagaacaagaatctcttaattatgcttt

SEQ ID NO: 241242 - DNA, 303 bp, Glycine max
  unsure (1)..(303): unsure at all n locations
gagcggttctgggttggagacagagagagagaagttttcagtttcagaaagaaagcaaaagcaatagcaatgggttggatcggtgagactgttgattccatcaaatctcttcagatccgccangtcctcacccaggctgtgagcccaagcatgattgttacgtctgcactgataatatggaaggcattgatgtgcgttactggcagtgaatcccccgttgttgttgttctttctggaagcatggaacccggattcaagcgggggagacatctttgttcttgcacatgattaaagatccaattc

SEQ ID NO: 241243 - DNA, 372 bp, Glycine max
  unsure (1)..(372): unsure at all n locations
gttggatggggggttgtttgaacactacaccaaatttagagaatgcttggagagtgcactgaaggaattgctgggagatgaggctgctgagaccattgtcattgagcatgctaatgatggctctggcattggtgcagccctcctggcagcttctcactcccaatatttgggagtggaggagtcttaaattttattgccaaacaagggaaagacgtgtaatactagtttcattttttgcataggtggtagatcaacacattgaagcaatggtgccttgcagctggtgactgggggggcattcattattttggtttcagtgtntgtttctccctcgtttaagggaatatatcaaagatataaacttcaccttga

SEQ ID NO: 241244 - DNA, 377 bp, Glycine max
gagagaagattttcatcagttgagttgagagaaggaaagggaaaatgggtaaggatctgagcgaggaacaagtgtcttccatgaaggaagccttctctctgttcgacactgacggagacggtcggatcgctccgtcggagctggggatcctgatgaggtctctgggaggtaacccgacgcaggcccaactcaaagccatcgtggctgaagagaacctcacggcccccttcgacttcccccgattcctcgatctaatggccaaacacattaaacccgaacccttcgatcgccaactccgcgacgccttcaaggtcctcgacaaggactccaccggcttcgtcgccgtctccgagctccgccacatcctcaccaacatc

SEQ ID NO: 241245 - DNA, 402 bp, Glycine max
ggtagtatattttttttaactaaaaaaaaggcactgcgtatggatttggtttaaggtttaaggtaaatccgtggctggtttctggaacttttgcatccgaatctccgtttgttttggcagaagcacaggttctccgcgtcagccatggccgatgacttcgacttcgcggataaagttcctccttcattcgatcgcgtgggaaatgtgatcaaggattctggatccaaagggttcaatccaggattaattgtcctcctggttgttggtgggttgttgttgacattcctcattggaaattatgtgctctacagttatgcacagaagaacctccctccctagaaaaaaagaagcctgtttcaaagaagaagatgaaaaaggagagactgaagcaaggtgtctctg

SEQ ID NO: 241246 - DNA, 252 bp, Glycine max
ggttctaatgtgagattgttcgctgctgtcactcgctcatcgtcatgggttgctctgtgcattgtgctcggtttttctctcacctgaaagtgtcttgctgcggtgataactgtggttgcggaaactcctgcaattgcggtaacgggtgctgtggctatatgatgtagccacacttcatctacactgactcaaccaacaacgacattctgttcatcagagttgcatctgttaatgctcaatttgacggtgctc

SEQ ID NO: 241247 - DNA, 348 bp, Glycine max
gacggtggttgtgattttttttttttttttgtcgcagttggatgattgggtgctttgccgtatttacaacaagaagggcacgatcgagaaactgcaaccaagcagcgatgttgctcatagccgaaatatcgaatcctcggagatcgaagacaggaagccggagattctgaaaagcggaggaggttgtcttccgccgcctgtgccggtgcctgcgccgccgcaagcgacggcgaagacggattacatgtacttcgacccgtcggattcaatcccgaagctgcacacggactcgagctgttcggagcaagtggtatcgccggaattcgcgagcgaggtgcaaagcgagcc

SEQ ID NO: 241248 - DNA, 367 bp, Glycine max
gaaaccagtgaagtgatgagccaagacctcaagcgagactacgtcgtttcggaggagatcggccggggaagattcggcaccgttttccgctgctcctccgcagactccggtcactcctacgccgtcaaatccatcgacaaggtggcaataaccgccgccggagactccctcgacgcgcaatgcctattgacggagcccaagatcgttcagcttctctcccctcaccctcacatcgtaaacctccacgatctctacgaagacgaaaccaaccttcacatggttctcgacctctgttacgaatcgcagtttcaccaccgcgtcatgtccgaaccagaagccgcttcggtgatgtggcaactcatgcaag

SEQ ID NO: 241249 - DNA, 398 bp, Glycine max
gatgttgatgccattcagatcaaacctaattccaagcacatatggatcgatcgttgcacgctcagtgattttgatgatgggctcatagatatcacccgagaaagcacagacattactatttcaaggtgccacttctctcagcatgacaaagccatgctcattggggctgatcccacgcatgttggggataggtgcatgagggtgaccatacaccattgttttttcaatgggactcgacagaggcaacctcgtgttaggtttgcaaaagtgcatctgtacaataactatatcagaaactggggcatatatgctgtttgtgccagtgtggaatcccagatattctcgcaacataatacctatgaagcaggacagaagaaagtggcatttaagtaccttac

SEQ ID NO: 241250 - DNA, 393 bp, Glycine max
gacagcatatagtcacataggctattaagggtgagatatatagaaaaacaaaggagaaaagatagaaatggagaagtttccagttgttgacatggggaaccttaataatgaagagagatcagcaaccatggagataatcaaagatgcctgtgagaactggggtttctttgagttggtgaaccatgggatatccatagagttgatggacaccgtggagaggatgacaaaagagcactacaaaaagtgtatggagcaaaggttcaaagaaatggtagcaagcaaaggtttggagtctgctcaatctgaaatcaatgatttggattgggaaaacactttctttttgcgccaccttcctgcctctaacatctcagagatccctgatcttgatgaaga

SEQ ID NO: 241251 - DNA, 399 bp, Glycine max
gcagacagtatttgtatgcagtgtgtttgctgcggctttttcgggctctacaaagaatatgtcagatttgaatgtggctgatgtatattcttgggctccaacctttaaaagtttgcaagatcttgtaaatgaggaaattagagtaagattttcaagtgggagatttactatattgaatgagttggaagtagttgattcctctgtgaaggaattatatcctattatccagggcattgcagataccattgagacagaatcacttgcgaagattgttggggaattaagcagagcaacagagaagctttcacaaggactagatcttcttacaaaggaagtcgatagcttttccaagtggtccttgacggtcgtgataccttgctatctagtctgaggtcaggt

SEQ ID NO: 241252 - DNA, 401 bp, Glycine max
ggaagagtgaagagaatggctcccaagggtttaacctttctggctgtgttaatatgcgtttcagcactgtcactgagtccttctgttgcgggggaagggcaaaataatggccttgttatgaacttctacaaggagtcatgccctcaggctgaagacatcatcacagaacaagtcaagcttctctacaagcgccacaagaacactgctttctcctggctcaggaacatcttccatgactgtgctgttcagagttgtgatgcttcactgttgctggactccacaagaaggagcttgtctgagaaggaaacagatagaagctttgggttgagaaatttcaggtacattgagaccatcaaagaagctttggaaagagaatgccctggagttgtttcatgtgctga

SEQ ID NO: 241253 - DNA, 366 bp, Glycine max
ggcatcgaacagagagagagagaatggcagcacttggtgggaatcgtgatgtgacaggaagccagaacagcgttgagatcgatgctctagctcgctttgctgttgaagaacacaacaaaaaacagaatgcccttttggagtttgaaaaggtggtaactgcgaaacagcaagtggtttctggtaccttgtacaccatcactttggaggcaaaagatggtgggcaaaagaaggtttatgaagccaaagtttgggagaagtcatggttgaacttcaaggaggtgcaagagttcaagcttgttggagatgcacctgcatagtctagtgcttaattaggttgctgaagagtgaagaatgagacagcctggt

SEQ ID NO: 241254 - DNA, 310 bp, Glycine max
gaagaaggaagattacgacaagtgcaacaagaccaacccaatcaaaaagtttgaaaacggtgacactgaattcaagtttgatcgatcaggaccattctacttcattagtggaaaagatgggaactgtgaaaagggtcaaaaattaatcgttgttgttttgaccccaagaacaccaccaacaccaaaaacaccaccgtttccaaaaacttcaccttcaccttcaccttcacaatctccaaaggcaaacccaccaaccgtatcgccgccgttaccgtcaccgtcaccatcggttcattcaaaatccctatct

SEQ ID NO: 241255 - DNA, 342 bp, Glycine max
ggaaaaccgggtgcagcagcactctttgtgaaggtcagcatggatggtgctccctatctgaggaaggtagatctaagaaattatacaatgtaccaggaactgtcttctgcccttgagaaaatgttcagctgtttcactctaggtcaatgtggttcccatggagctccaggaagagaaatgttgagtgagagcaagctgaaggacctcctgcatggttcagaatatgtactcacttatgaagataaagatggtgactgggtgcttgtcggagatgtaccatgggatatgttcattgacacatgcaaaagactgaaaatcatgaagggttctgatgccattggc

SEQ ID NO: 241256 - DNA, 335 bp, Glycine max
gacataatagtgcattgcactcacatcgcatccccttgcttgcttatttcattactcatccccagttcccgattttgcttaaccttcaattccaatcgaattgaacgtcagaggtccttgcaatggcagggaattcttctgatgtactgtcgccgaagcaacctcccttgccatctcccttgcgtttctccaaattctttcagtctaacatgagaattttgattacgggaggagctggattcattggttctcacctagtcgatagattgatggaaaatgaaaaaaatgaggtcattgttgctgataactacttcactggattaaaggacaacctc

SEQ ID NO: 241257 - DNA, 330 bp, Glycine max
gatcccgacattaatttttgtacacacacacagattcccctctttcgaatttcgatactttgatcagatccacaacacttcttcatccatgacgcttggttcttcaggatccagtgtcgtggttccaaggaacttcagattgctggaggagcttgagaagggagaaaaaggaataggagatggcacagttagttatggaatggatgatggtgatgacatttacatgcgctcttggactggaaccattattggtccctataatactgtacatgaaggaagaatttatcaattgaagctgttttgtgataaagactaccctgaaaagccccg

SEQ ID NO: 241258 - DNA, 354 bp, Glycine max
gacagaaatatcattttgcgaggcaatcccattctcatcttccatttccaccatcaatactattttcttgtcgttgagaagcttcgcgaacgaaagcaaagaaccctagaccgtcacagaaccattccatagccatgtctggtgcttggccctctttctcaggattgggaacctgtcgtcctccgcaagaaggctcccaccgccgccgccaagaaggacgagaaagccgtcaacgccgcccgccgctctggcgccgaaatcgaaaccctaaaaaagtataatgctgggacaaacaaagcagcatctagcggcacttcattgaacactaagaggctggatgatgatacggagagt

SEQ ID NO: 241259 - DNA, 331 bp, Glycine max
gacatcgcacatcaattattctttcgcaccttcgaaaatcaattttctgtcttctctgcgtcttcttcctctatcaatcgttttccatggctcgtaccatgcatatcgctcgcaaatccaccggtggaaaggctcctatgaagcaactcgccaccaaggctgcaaggaaatctgcaccgataaccggtggagtcaagaatcctcatcgctatcgccctggaactgttgctcttcatgagattcgaatatatccgcagagcatagagcttctgatccgcaagctccccttccagcgtcttgttcgtgaaattgcgcaagacttcataaccga

SEQ ID NO: 241260 - DNA, 402 bp, Glycine max
  unsure (1)..(402): unsure at all n locations
ggcagttcaattccaatatattccattctctctgtgtatttccctacctctcccttcaagatgcagatcttcgtcaagaccctcaccggcaagaccatcacccttgaggtggaaagctctgacaccatcgacaacgtcaaggccaagatccaggacaaggaaggaatccccccggaccagcaacgtctcattttcgccggaaagcaacttgaggacggccgtacccttgctgactacaacattcagaaggagagtactcttcacctcgtcctccgtctccgtggtggcatgcagatcttcgttaagacactcaccggcaagaccataaccctagaggttganagctcccgacacatcgataacgtcaaggccaagatccaggacanagagggtatccccccg

SEQ ID NO: 241261 - DNA, 308 bp, Glycine max
ggcggcacttgggaggaggcactgtggcagaagtcctaggagtgtaaaacagagacgcaaaatgaagacgatcttgtcgtctgagaccatgaatattcccgacggcgtgagcatcaaggttcacgctaaggttatcgaggttgagggccctcgtggaaaactcgtgcgagacttccaccatctgaacttggacttccaacttattaccgacgatggcggtaaaaggaagctcaagattgattcttggtttggttctcgtaaaacctccgccgccatccgcaccgccctcagccacgttgagaatttga

SEQ ID NO: 241262 - DNA, 367 bp, Glycine max
  unsure (1)..(367): unsure at all n locations
ggaaaaaatggcgatgctcaagagatgctgtagtagatcagaagtattgcgaacggcacatgaaccgaggacgccatcgttcaagaaagcctgtggaaggccaatcaggccatgccctcaccaccactaacacacctaatgcttcctcaaactcaaccgtggtgcccggcaaccacaacaacaacacctttgcacacatcaatgtgcaccaccctcttcctcctcattcctctccagccaataccatcaataggatgtttatgagtaataataaagagaacaacaacacgagtgagaggacgaaggatggccttgcccttcccatgctacctcctactcttgagcccgaaacanaagacaacaacaa

SEQ ID NO: 241263 - DNA, 235 bp, Glycine max
gaagttaaggagagtgctttggtgtggcatcatcaagatgcagaccctgattttggttcttgccaagccaaagaattgttggattacttggaaagtgtgcctggcaaagaaacaacagctgtttacaaaagccagcataatgtttaagttaagccacaaggaattaaccaaggtttgggtagccgaaaaagttcttatgaccatggttaaaggtgccaatccaccaaaatttgtg

SEQ ID NO: 241264 - DNA, 202 bp, Glycine max
gattctacaatcaatcaatggcaatggcttcatcaatccctaatgcgccttctgcgttcaattctcaaagctacgttggtctcaggtcgccactgaggaccttcaacttttcttctcctcaaggtggcaaaaatcctcgctcccaacgccttttcgacgtcagagcctccgaatccgagttccaagccgccgttgtccccgg

SEQ ID NO: 241265 - DNA, 156 bp, Glycine max
gaatccaatatccatcacatgggaatgtggttctctcacatctcctatatgcgcgcctctctgctttacatctcacagctacgttggtctcacagcgccactgaggagcttcaacttttcttctcctcaaactgccaaaattcctcgctcccaaag

SEQ ID NO: 241266 - DNA, 374 bp, Glycine max
aattcaaagtttgccttgtctatagaacctgaaaacaaggaacttcaatcctatgctacccatgtatctaaccttagaaataaaggcttgcccacgattccaactacgctgaaagtggaaaaggcttgcaatccattccttcgcacatggagcatagaaatccggcaaaaactaaatattgcagccacggcagatgatgcagaagccctgggtgttatccggcaagcaaaggataatttttagaattttttaattaaaatttaaaattctaaagatacttattctgtatagattaggttaatgaatccatcaaatggaataatatttacttggtgatatcgtaatataatttttcaattttccttgggttcaat

SEQ ID NO: 241267 - DNA, 388 bp, Glycine max
gatcctaaataagcatcttaattcatagtctcttggtccttccttccttcttctgctcaataagtgtgtgccactctaattaattaccacccccttctagacatagttcttctccctctgttctctattctctacactgtgaaaccaagatgaaggtagcatttgcagctgttctacttatatgccttgtcctcagctcctccttgttcgaggtgtcaatggctggttctgctttctgttcctccaagtgctcgaagaggtgttctagagctgggatgaaggacaggtgcatgaagttctgcgggatttgctgcagcaagtgcaactgttgtgcatctgggacttatgggaacaagcatgagtgcccttgctacagagacatgaagaa

SEQ ID NO: 241268 - DNA, 388 bp, Glycine max
gtaggcaactattgatcaaatcaagtcctggggaagtcatcaagccaggtcaatataaagcattaaatgatgagggaatgccacaacacaataggccattcatgaagggtcgcctttacatccaatttaatgttgatttccccgactcagggtttctttcccctgaccaatgccagttattggaaaaggtgttgcctcagaagagcagcaagcacgtctcagatatggagctggatgattgtgaggagaccactttgcatgatgtcaactttaaggaggagatgagacgaaagcagcaacagcaacaccgcgaggcatacgacgaagatgatgattaaccatcctggtcaccgagtgcaatgtgctcaacagtagtgcaatttatggt

SEQ ID NO: 241269 - DNA, 405 bp, Glycine max
  unsure (1)..(405): unsure at all n locations
gatctctctgaactgaattaaactacatagaaaaataaaaccaaacctttcttcctactactcccattcccacatttcgacaacatggacgaggacttcgacatgccgacggcggaggcaatgggcgaggacttcgacttcgccggcgccaccggcggcgacctcgacggcagcagcagcaaccccatcttgaaggtcggcgaggagaaggagattggaaaagagggtttgaagaagaaactacttaaagaaggtgaaggatgggacactcctgaagttggtgacgaagttcaagttcactatactgggacgttgcttgatggcactaagtttgattccaacanagataggggaactcctttcagtttcacgcttggacaagggcaagttattaaaggatgggat

SEQ ID NO: 241270 - DNA, 389 bp, Glycine max
cctcagaagccatggtcgtaaatctctctccctctccctctccacctttacattccagttccataatcagattggcaaattcaaagtcacccatttcagaaccatggttgagactcaaaacccacttcccaaaaccactcctttccccaacaagtgtgaacttcacttgcaacaagaatcaatttttgcacggtaaaaacaggaacaggttggatttcaggacttggtctattgctggttttgattatggaaactttgaagggcctcagtctgtgcttgaggctgctgcagtgttgacagcaatcattgttgtgcatgagagtggccacttccttgctgcttctctccaaggaatccatgtgagtaagtttgctgttgggtttgggcca

SEQ ID NO: 241271 - DNA, 323 bp, Glycine max
ggaatcagcaccacattcacctgagctttttgtgaggattccaaagcatggcttcccttgcagcatccactgctgctgcttcccttggcatgtcagaaatgcttggaaaccccatcaacctcagtggtgccacaaggccagctccatctgcctctagccctgcctccttcaagactgtggctcttttctccaaaaagaaggctgcacctccaaaaaaagctgcagctgctgctcctgccaatgatgagcttgccaagtggtatggtcctgacagaaggatcttcttgcctgaaggtctcttggaccgatctgagatcccagag

SEQ ID NO: 241272 - DNA, 359 bp, Glycine max
  unsure (1)..(359): unsure at all n locations
gacttcattttggactaaactagaaagtgatcgaacagcatgttcaagcttttggttagtagagcagctagggtttcaactccacacaaccacaatgcctttgcttctttcgctttctctaggtatgctcattcattaccatttgcaactgtagaagcagaagagatatcaggctttanggctgctgaagttttgaacctggtgcaaggtaaatgggtaggatcttcaaattggaatacagttgtagatcctttaaatggagactcatttattaaagttgctgaagttgatgaaacaggcattcagccctttgtagaaagcttgtccagctgtcncaaacatggtgcacacaatccttt

SEQ ID NO: 241273 - DNA, 484 bp, Glycine max
gggcgcttagtctcagctttacctgccagtgccggtcaggaattacccgggtcgacccacgcgtcagtacggctgcgagaagacgacagaagggatttgaagggtggtgccaagaaggttattatttctgcccccagtaaggatgcccccatgtttgttgttggtgttaatgagcacgagtacaagccagagcttgatattatttccaacgctagctgcacaaccaactgccttgctccactcgccaaggttatcaatgacaggtttggcattgttgagggtttgatgaccactgttcattccatcactgctacccagaagactgttgatgggccatcagccaacgactggagaggtggaagagctgcttcatttaacatcattcctagcagcactggagctgccaaggctgttgggaaagtccttcctgctttgaattggaaattgactggtatggcattccctgttcccaccgttgaagttt

SEQ ID NO: 241274 - DNA, 344 bp, Glycine max
gagttcaattccaatatattccattctctctgtgtatttccctacctctcccttcaagatgcagatcttcgtcaagcccctcaccggcaagaccatcacccttgaggtggaaagctctgacaccatcgacaacgtcaaggccaagatccaggacaaggaaggaatccccccggaccagcaacgtctcattttcgccggaaagcaacttgaggacggccgtacccttgctgactacaacattcagaaggagagtactcttcacctcgtcctccgtctccgtggtggcatgcagatcttcgttaagacactcaccggcaagaccataaccctagaggttgaaagct

SEQ ID NO: 241275 - DNA, 368 bp, Glycine max
gaatgccaaagttggtcacgctctctgaaaatgcagcaacagcaacagcagcagcaggcatgaagagcaacatacacaacaccactccttcaaatatcatcatcatttctcacttctcatccttcactctcttcttctctttcttcccttcactctctctttcgcttcatggctggtctcatcgatctcaacaacgccaccgaggacgatgaaacgccgtcgtctggctcctcctcctcctcctcctcctccaccgtctgccttgaactctggcacgcttgcgcgggtccaatgatttcattgcccaagaaagggagcgttgtcgtgtacttccctcagggacacttggagcaacacctccacgattt

SEQ ID NO: 241276 - DNA, 300 bp, Glycine max
ggttctagtgtatgtgattgttgtgactcgttcttcttcgtcgttatcttcttcttttgttgtttgtgtgtttgttttttctctcacctgaaaatgtcttgctgcggtggtaactgtggttgcggaagcgcctgcaagtgcggcaacggctgcggaggctgcaagatgtacccagacttgagttacaccgagtcaaccaccaccgagaccttggtcatgggagtggcaccagttaaggctcaattcgagagtgctgaaatgggtgttcccgctgagaacgatggctgcaaatgtggagct

SEQ ID NO: 241277 - DNA, 400 bp, Glycine max
ggccattgttgttgctattatcatccgcagctgcttttattcgcaccgcaaacagtgagccatggccgtcggaaagaacaagcgcatctccaaggggaagaagggtggcaagaagaagacagctgatccctttgccaagaaggattggtatgacattaaggctccttctgtttttcaagtgaaaaatgttggcaaaaccctcgtctctcgtactcagggtaccaagattgcttctgaaggactcaagcatagagtgtttgaggtctccttggctgatcttcaaggggatgaggatcatgcattcaagaagattaggttgagagctgaagatgtgcaagggaagaatgtcctgacaaatttctggggaatggatttcacaacagacaagctgaggtcattg

SEQ ID NO: 241278 - DNA, 352 bp, Glycine max
gtgaagtaaaagctgctaacccaaattcttgtcagtggtaaccatgacagttggttccttcttcatcaggacctccagggttctcaactcctccaactttctgcttctctgcactctcagtggtggtggtgtagtggcatactcagaatcacaatcaggagctgaacgtcctagtattgaagctaatgagcctgccaaaaagaaagtggtggttcttggaacaggatgggctgctaccagtttccttaaggatctggatgcttcattatatgatgttcaagttgtttcacctcgtaactactttgcatttactcccttattacccagtgtcacttgtgggacagttgaagca

SEQ ID NO: 241279 - DNA, 370 bp, Glycine max
gaacacgcaactgggtgttttgtccttccttgaattaaataaatactatgaaattgtagtttaaggaaggagatactctcactcgttcattccaacctacccttattcttcttcttcaattccacacccatcatggaccgttttccgatcctctttctcctcgccaccctcatcaccctcgcctccggtgcccgccacgatattctccggttaccctccgaagcatccacttttttcaaagcacccggtggcgattaaaacgatgagggcacgaggtgggccgttttaattgccggttccaatggctactggaattacaggcaccagtctgatgtttgccatgcgtatcaactactgaagaaaagtggtc

SEQ ID NO: 241280 - DNA, 365 bp, Glycine max
ggtaggcaaagagagagagagaaaagcgtgaatcatgtcggacgaagagcatcacttcgattctcaggcggatgcgggagcgtccaagacgtatcctcagcaggctggtaccattcgcaagaatggctacatcgtcatcaaatccaggccttgcaaggttgtagaggtctctacgtcaaagacaggcaagcatggacatgcaaagtgtcactttgttgcaattgatatttttaatgggaaaaagcttgaagatattgttccatcatcccacaactgtgatgttccacatgtgaatcgcactgactatcagcttattgatgtctctgaagacggctttgtgagtctgttgactgataatggaaata

SEQ ID NO: 241281 - DNA, 347 bp, Glycine max
gagagtggtggggtgtgcagaagagcgtcgcagttgtaaccctaatcagaagaagcgcagcttcaagcgagtgacagccaccagccatgggtcgtatgcacagccgcggtaagggtatatcctcttctgctttgccctacaaaaggacacctcctagctggctcaagatctcttcgcaagatgtcgaagaaaatatctgcaagtttgcgacgaaaggtttgaccccgtctcagattggtgtcattctcagagattctcacggtattgctcaggtcaatagcgtcactggcagcagaatccttcgcatcctcaaagctcacgggcttgcgccctgaaattccagagga

SEQ ID NO: 241282 - DNA, 351 bp, Glycine max
cgataagcaaagtccagcaccagcaccagcaccagcaccagcacctgcatcatcaccaattgataagcaaattccagctggaattcctggaagtctcaaaaacaattaccatcgtgctgatgggcaaaactgtggcaactttcttactgatcggccatctaccaaggttcatgctgccccaggtggcggatcttccttgaattacctctttggtggtcctccagggaactaattcatcattgtgattcaaacctaccatgtgatgtatcatgtgtaaaatagatagctgcattgttttagtccagtggactttgtttcttgtgcaattgaacctcctgacaatgttggtgt

SEQ ID NO: 241283 - DNA, 378 bp, Glycine max
caattgagttcacagtcaaggtgtgggactatcttgaggaagtggtggttgctgttctgaagcgtcactcagaacactaccaccaacttcagacaagtacaaaacgagcagggaagaacctcattgctaagatgaaggagaattctatgaaatatgtgatggaggttgtggaaatggaaaagctaactgattacactagtaatcctgaatacatgagtgagtataacgagctaatggccaaccaggatgaattcgtggagaaagttaatacaggcaactatcatgaagttgcccttgatggttttgaacaggcgattaaggttggtcatccgagtcagtactcaactttacttccgcaggcatttgacttgaaaatga

SEQ ID NO: 241284 - DNA, 385 bp, Glycine max
gggagatccgaattttgattatcgaatcgcaaaattctgaatcaatcaatcaatcaatcagtaatcagagccatcaacgactgcaatggtctgcgagaagtgtgagaagaaattatcgaaggtgatagtaccagacaagtggaaagaaggggccagcaatactaccgagggtggtggccgcaagatcaacgagaacaagcttctctccaagaaaaacagatggaccccttacggaaacactaagtgcaccatttgcaagcagcaagtgcaccagaatgctaagtactgccacacctgtgcctaacccaaaaggatttggtgcaatgtgtggcaagcaagttcttgataccaagttttacaagcaaagcaatgtgtaatggatact

SEQ ID NO: 241285 - DNA, 315 bp, Glycine max
gaccacttcacaacactcataacacaaagcacaaagcaaagctcatccttgagttaaaaaatggcagcagcttcttccatggctctctcatccccatccttggctggcaaggccgtgaagctgggcccatcagccccagaagtgggaagggtgagcatgaggaataccgtcaccaagcaggtctcctcaggaagcccatggtacggcccagaccgagtcaagtacttgggcccattctctggcgagcgcccgtcctacctaaccggtgagttcccaggctactactgctgggacactgctgggctttccgcagac

SEQ ID NO: 241286 - DNA, 346 bp, Glycine max
ggccacatgaatcattagttagggtttattctccaagaaaagcaatgagtgcgtccaggttcatcaagtgtgtcactgtgggtgacggtgccgttggcaagacttgcatgctcatctcctacaccagcaacacttttcctacggactacgtgccaactgtctttgacaatttcagtgcaaatgtagttgtggatggaagcactgtgaatcttgggttgtgggatactgctggccaagaagattacaatagattaagacccttaagctatcgtggagcagatgtattcctgcttgctttctctctcataagcagggctagctatgaaaatgttgccaagaaatggat

SEQ ID NO: 241287 - DNA, 371 bp, Glycine max
gggtggtaggggaagggcaaaaggttatggtataatccgcggaagcgcaagtgaaggtgctggtcttgtcgtcgtacgcgtagctataagcgcgtgggcaagcgctcttgaatatcgctgagtaagccgatggcttgcacgtgtcgggcgtgccgtacgcgccgctgcagcaatactgcggcgagttgaacgcctcgcaggcgctcttgcacgccaccacgccctctctcccatccgcgcccatcactttaagctccgaaggacacgcgccgttcagatctcccacgcaccccgtcgcggtgcacttctcgccggagccaccctgcggcaccaccagcatcggcacgttgtacccgtcgactaaactcacg

SEQ ID NO: 241288 - DNA, 305 bp, Glycine max
  unsure (1)..(305): unsure at all n locations
ggaacaagttgaacaaagaaatcatatcatggcttcttggaattcagttccactccatgtctcctatgaagttctgggttgggttgcttttgcttgctggtctatcagtttctacccacaagtcattttgaactttcgcaggaaaagtgtggtggggctgaactttgattttgtgatgctgaatttgacgaagcactcctcctatctcatatacaatgcttctctgtacttcagttctgctgttcagaagcagtacagagacaaatacggtcagaatgagatgatacccgtggcagcanatgatg

SEQ ID NO: 241289 - DNA, 310 bp, Glycine max
gaaattatggtccaatagatccgtgttgctaacccacagtccctccctcacccacgtctctccccgcttcagatcttaaacgtctttcgctgttccaagatgggtgtggctgagaacattcccgatatggaggagggtaccttggagattggaatggaatacagaactgtatctggagttgctggaccattggtcattcttgacaaagttaagggacccaaatttcaagagattgttaatattcgtttaagagatggaactactcggcgtggacaagttctagaggttgatggtgaaaaagctgttgttc

SEQ ID NO: 241290 - DNA, 408 bp, Glycine max
gatcgtcgccttgaaaagaaaaaccctaattacaagaagttgcaaaactaagtggaataagagctgaaaaaccctaataacaatgggaggaaaatgtccgcacaggaacgtgaagaagagaagatattctcacaagaccgcgcggcgaaccaaatttgagctgaaaggggacgacatggtttatgcgcagctcaacaaacccgatcaagagagaccccctttacccgtcgacgaagatttgcctgggatgggccagtactattgccttcactgcgatcggtactttgccaatataactgcgacggatgagcactttaagaacaaaccacacaagaaccgtataaaacaaatgatgggtcctgcaccacatactcaacttgatgccgatttagcttctgggatgggtat

SEQ ID NO: 241291 - DNA, 362 bp, Glycine max
acacttgattagctgaggaggaagagagaaaaaccatggcaataacactcaacaatggcttcaagatgcctatcattggattgggcgtgtggcgcatggaaggaaacgaaatcagggacctaattctcaattccatcaaaattggttatcgccattttgattgtgctgctgactacaaaaacgaagcagaagttggagatgcgcttaaggaggcttttgatagtagccttgtgaagagagaggatctcttcattaccaccaagctttggaattctgatcaaggccacgttcttgaggcgtgtaaagacagtctcaagaagcttcagttaacgtatctagatttatatcttgttcactttcct

SEQ ID NO: 241292 - DNA, 373 bp, Glycine max
  unsure (1)..(373): unsure at all n locations
gatgttattagactgctccactccttgtcatgtgccaagtacaagattcttaacaaggaaccaaacacaaaaacaatatcttctaccgactattttgaatttaattcaaaatttacggacaaaatgaggagaatcaagattcctcttcctcctgttgatgagaagaaaaaagtaattgaggatgttgacaaagacagaagatatgctattgatgcctcaattgtgcgtattatgaagagtcggaaggtgttaagttaccaacagttggtaatggagtgtgttgagcagctaggtcgcatgtttaagccggatgtcaaggcaattaagaagcggattgaagatttgatctctcgagactacctanagagagaca

SEQ ID NO: 241293 - DNA, 347 bp, Glycine max
ggcacaagtttgttgagatagctagaagcaataagatgaaaatgaaagtgcttgttttgtttgttgctacagttttggtagcatatgaatgccatggctcagactaccagaagttccctctccaaatgaaaactgggtttggtgggcaatacagcaatgaggtggcatgtgccagttggaggcttggcgtggaagcaaacaacgtagtcaagtggcaaactgttcctgcagcttgcggagagtacatagctgactacgttctaggagaccaatatagatcagattccaaaacagttaaccaacaagcttatttctatgctaaatccctcaaactcaccaacaaagat

SEQ ID NO: 241294 - DNA, 363 bp, Glycine max
gaggttgaaacttctgagaggcaccatggcgacactggattccgacgtgaccatggttccggccggcgaaccctccaccagcgccggtccttcttcgtccaccaagaagccgaagcgattcgagatcaagaagtggaatgccgtttctctctgggcttgggatattgttgtggataattgcgctatttgccgcaaccatatcatggatctctgtattgagtgccaggccaaccaggctagcgccactagcgaggaatgcactgtagcttggggagtttgtaaccatgcttttcacttccattgcataagccgatggctcaagacccgtcaagtatgtcctctagattatagccagtgggaatt

SEQ ID NO: 241295 - DNA, 401 bp, Glycine max
ggagaaagatttatagcagtggatgttacattcagaaacacagctggacccgaaaagcaccaagcagtggcagtgaggaacaatgctgatctctccacattctaccgttgcagttttgaaggatatcaagacacactctatgttcactccttgaggcaattctatagggaatgtgaaatctatggaactgtggacttcattttcggcaatgcagctgtggtcttccagggttgcaaaatctatgccagaaaaccattgccaaaccagaagaatgctgtcacagcacaaggaagaactgatccaaatcaaaacactggcatttcgatccaaaactgcagcattgatgctgcaccggacttggtcgcggacttgaaatccacgatgagtttcttaggccgtcc

SEQ ID NO: 241296 - DNA, 393 bp, Glycine max
gggcactcagtagagaattaaataaaatcaagaaagcatgcatatgatgaagaaggtgtgtgggtttgcaatagtggtgatggcagcactttttctggtggagatgagtcccatggcagaggctgtgacttgtagccctgtggagttgagtccctgtttgggggcaatcacgtcctcttcaccaccatcgacaacttgttgccagaaggtgagggaacaaaggccatgcctctgtggttacctcaaaaaccctagtctgaggccatatgtcaactctcctggttccagaagggttgctagctcttgtggggttcccttcccaacctgttagtcaactttttacttcatatatatgtaataaactccccctactgttggctggaaattatatat

SEQ ID NO: 241297 - DNA, 324 bp, Glycine max
catgggactcacagactgaaaccagacactgacgggacaagcaaccgataccatatcatgggttcgtccagcagtcacacttcgaccttcattcaacatcagtcacctgtcatcttcgcttcagatgctcatcagcaacatcgcctgtatgcaagtccgactctgcgactcatcgcgccacgttgaacgatgttttggccgacttcatctcaaccttcatcttcgtgttcgccggctcaggctccggcatcgcctatagcaagctcaacgacaacggagctgccactcctgccggcctcatctgcgcgtccatcggtcatgcat

SEQ ID NO: 241298 - DNA, 340 bp, Glycine max
gagagaaagagagagaaagatgtcgaagcgtggtcgtggtggttcggcggggaacaagttccgcatgtcgctgggtcttccagtggcggcgacggtgaactgcgccgacaacacgggggcgaagaacctctacatcatttcggtgaaagggatcaaaggccgtttgaaccgtcttccctcggcctgcgttggggacatggtgatggccaccgtgaagaagggaaaacccgatctgaggaagaaggtcttgccagctgtcatcgttcgccagcgcaagccatggcgccgaaaggacggcgtctacatgtacttcgaagataatgctggggttattgtcaat

SEQ ID NO: 241299 - DNA, 332 bp, Glycine max
  unsure (1)..(332): unsure at all n locations
gacaccccattctcccaaactaacanacaaatcccagggagccaccaaccatggcttccaagctctgcgactcatgcaaatcagccactgctaccttgtactgccgccccgacgcggccttcctctgcggcgcctgtgactctaaggttcatgccgccaacaagctcgcatcgcgccacccgcgcgtcgtgctctgcgaggtgtgcgagcaagcgcccgcgcatgtgacctgtaaagccgacgccgccgcgctctgccttgcctgcgatcgcgatatccactccgccaaccccctcgccagccgccacgagcgcatccccgtcacgccgttc

SEQ ID NO: 241300 - DNA, 395 bp, Glycine max
gacagccgcagcttgaaacagagcagagcgaccttgaagagctatggctgtcggaaagaataagaggatttccaagggaaagaagggtggcaagaagaaagccgctgatccctttgccaagaaagactggtacgatatcaaggccccttccctcttccaggtcaagaatattggcaaaaccctcgtctctcgtacccagggaaccaagattgcatccgaaggactcaaacatcgggtttttgaggtctcattggctgatctccaaggggatgaagaccactccttcaagaagattcgtttgagagctgaggacgttcaaaggaagaatgttctgacaaaccttcggggaaagggatttcacaactgacaagttgaggtctttggtgcgaaaatgg

SEQ ID NO: 241301 - DNA, 338 bp, Glycine max
ggaggaagccacatagagacacaatacagagtgagttgttgctccttcgccacaactctctgccaacatgggtatctccagagattctatgcacaagaggcgtgccactggtggcaagaagaaggcctggaggaaaaagagaaagtatgagcttggtcgccagcctgctaacactaagctgtcaagcaacaagacagtcaggaggatccgtgttagaggtggaaatgtgaaatggaaggcattgagaatgggtaacgggaaattactcctggggaagtgaagctgtaactcgcaagactcgtgtactagatgtggtttacaatgcctcaaacaatgag

SEQ ID NO: 241302 - DNA, 341 bp, Glycine max
gacaacacagaacaaaaacaaagaaaaaaaaaaacccttagccaacacaaccatcatggccacctctgctattcagcaatcagcattcactggtcaaactgctctgaagcagctcaatgagttcgtccgcaagaccggtggcgccggcaaaggtcgcactaacatgcgccgcaccgtcaagagtgctcctcagagcatttggtaactcaacattacccttcccactccactagttcaacttagtagttactgcttttaatataatactcgcttgacaacataaaataatactagtaattccacaaaacttagatgcaaaaccttttgtttttggtattgtg

SEQ ID NO: 241303 - DNA, 374 bp, Glycine max
atctagtgaaagtgaactattacaatatttgaggattgcttttgaatgtctggatgagagaccataccggcggccaactatgatacaagtgatggctatgtttaaagagcttcaggttgacacagataatgatatgcttgatagcttctctctcagagacaatgttattgatgaagcttgagaagaggatcttttctacaagactcaaagccctttgacagttgagaaggaaataaagaggttctcaaaatttggagtgttgctgactaaattgacaattctggtgacactgatctatatctatcctatctgaaattggaggaaggttctttcaactttttttgatgtatataagacacttaatgagaccaaga

SEQ ID NO: 241304 - DNA, 340 bp, Glycine max
ggcagaaatggggaataacagacaaaggagattcagaactcatcgcgcacaatcaagtcgacaccaccaccaacaactcttactagaggacgattctcaaagctctcttccagcagaaaatggtgagggcgaggaagaggaggaggaactcacggaacctaaaataaagcttgctatgtgggattttgggcaatgcgatgccaaaaagtgcactggacgcaagctttcaagattgggcatgctaaaagagttacgtgtgagtaatggtcttgggggcattgttttaagtccggctggaaatcaatgtgtctcaagagaagattactctttaatccagaag

SEQ ID NO: 241305 - DNA, 398 bp, Glycine max
ggtggataaaaagggtgggaatcggattaggttctgcgtgcacaggcgaaaaccctaatcctgaggcactgaaagtgtgatatggcaagagtcatttcctcttcctgcgcacgcctcgcaatgcgcctcttctccaccaccaccacagccaccgcgttcgccgtcactttacccaaaccctcatcactctccctctcatcgcgtcgattcctcttccctctctcccatgccatcgtccctccctccacccgcgtcgccggaatccggtgccgcgttaaccgcgccggagactcggcgtactcaccgctgaactcggggtcgtcctcttcgtcgttcaacgaacggccccccaacggaaatggcgccgctcttccccggctgcgactacaaccactggg

SEQ ID NO: 241306 - DNA, 393 bp, Glycine max
gactgcagaggtgtattttctcacttctcagcactcagcagcgatatcagttgaagaaacagaaacaaacaaaagaggcagaagatgttgtgggtggacaaatatcgtcccaaaaccctcgaccaggttatggtccacaccgacatcgctcgcaatctcaagaaattggtaacggaacaggattgcccccatttactcttctatggcccatctggctccggcaagaaaaccctaatcatggctcttctccgccaaatgttcggacctggtgccgaaaaggtgaaggtggataataggacctggaaagtggatgctgggagtagatctcttgatttagagctgacaacaataaccaattgcaaatcacattgaaatgagtccgagtgatgcagg

SEQ ID NO: 241307 - DNA, 381 bp, Glycine max
ggtctgcaacggcgtcgttatgatcagttgagaatccaaaggaatcgagtcgaatcatctgaccggcgacagttatgtacagagagcgaggaggcgtcggatccaaatcggaggtaacttccgttgatcggaagcgaatcaacgacgtcctcgataaacagcttgaacgttcctcgccttccacatccagagccgccgccatcaacggcaaggaccgctcctcctcttccctcttagccgccgccaaggactcccgctccgcctccgtcaccgcccctatctccaagaattccaacgcttccgacgaggaatctgaaacagacagcgaggagtctgatgttaattgggtccaacggagatgacacatcgtggatctcgtgg

SEQ ID NO: 241308 - DNA, 399 bp, Glycine max
ggagctttagattcttttcccctagattcagccacagttggaaaaaaaaaaaaagttgttcgagatggcacgtacgaagcaaactgctcgtaagtccacaggaggaaaggcacctaggaagcagctcgcaaccaaggctgcacgtaagtccgcaccaactactggtggtgtgaagaagccacatcgttatcgtcctggtaccgttgctcttcgtgagattaggaaataccagaagagtaccgagcttttgatcaggaagctccccttccagaggctggttcgtgaaattgctcaggacttcaagactgatctgcgtttccagagccatgctgtgcttgcaatgcaaagaagctgctgaggcataccttgttggactctttgaggatactaatctgtgtg

SEQ ID NO: 241309 - DNA, 395 bp, Glycine max
  unsure (1)..(395): unsure at all n locations
gaaaggggaatggcatggttgcagttgcagagaatcgtgaccaagggaggtgctaatttgatctcaccactcccactttcacgattcttctcgaaatcttcttccccctatgttgtgaaagttggaattccagagtttctaaacgggattgggaagggggttgagtcccacgttcctaagcttgaatccgaaatcggtgatttccagaagcttctcctcactcgcaccctcaaactcaagaagcttggcattccttgcaaacacaggaagttaatattgaaatacacacacaagtacaggctgggattatggaggccacgtgttgagtccatcaantgcctgtttggtttctaattagtaagtantcgctgtttgttagaccatattgcaaatgt

SEQ ID NO: 241310 - DNA, 273 bp, Glycine max
ggacgatcgctttctgagtcaaccctagaaccttacacgcgtctgggtaaagacttttccttatctctgcgtacacttcacccacccacttcctccgtgccaactgctcccccaggcgcattgcagcctccaccgtgctctccgcgctatcgtgcgccgaatccacgattcccatcctcaccgcctccgccgccgttagcttcgcgccgcccagcaccaagtcgcgcatcaccgccggggacctgatcttggaccttatgacggcggcgaagt

SEQ ID NO: 241311 - DNA, 391 bp, Glycine max
ccagaaggtggtggttaattactaccccaaatgccctcaacctgacctcactcttggcctgaagcgccacacggatccgggcactatcaccttgctgcttcaggaccaagtgggtggacttcaagccaccagggacaatggcaaaacatggatcaccgttcagcctgtggaggctgccttcgtcgtcaatcttggagatcatgctcattatctgagcaatggaaggttcaagaatgctgatcaccaagcggtggtgaactcaaaccatagccgtttgtccatagccacttttcaaaacccagcaccaaatgcaactgtttaccctctgaagataagagaaggagagaagcctgttaatggaggaaccaatcacttttgctgaaatgtacag

SEQ ID NO: 241312 - DNA, 398 bp, Glycine max
ggagtgagtgagagaaagaagagaaggagttgaagtggttgttgtattgtagtagtgtgtaaagtcttggtgatggatagacacaaatgcaagctttgttcaaggtctttcagcaatggcagagcccttggtgggcacatgaaggctcaccttgcttctctccctctccctctccctccaaagcttcactcttgtttctcttcctctgactcagaacaagaacaatctttaagggagaatcctaagaaaaccttgaggattctggatcctgaagacagagagagcgagacagagtctaataagaaaccgactcgtcaacgattcaagcgcaactggaattctacatgccaaagctcagcctcggacaccccgaagccgaacctctcagctccgtctcc

SEQ ID NO: 241313 - DNA, 360 bp, Glycine max
  unsure (1)..(360): unsure at all n locations
ggaagaagaagaatccaaaagcaatcccatctgtgtgtttgcacatcggaagggagggctatcaaactctaaggattgctctgaatcggtttcgtcttcttcgtttttcttcaaaatcctcgtgacagatctaatctaatcagccttttgggggtgtttcagacattgcatgcatatgggagcagtggttgtgttggatgctataaaaggccttcactgagtcccacagtggatgtgccatcaaaagggttggcaacacaaagtaacgtantgaggaaaccgagttcatcagangatttttggaccaccagcacgcatgatatggacaacagcgctgttcagtcacaaaggagcatctct

SEQ ID NO: 241314 - DNA, 398 bp, Glycine max
  unsure (1)..(398): unsure at all n locations
ggttcaatgctggtgttagagttggtgttggaattggccttgggatgtgtgtagggcttgggattggtgttggactgctcatgcgctcataccaaacaacaaccaggaacttcaggaggagatttttctaaactgctataaggaatttgctactctagtttaatgacaagcaagatatgttggagtttaatctaaggtgggacacctctggaggaagaacccaaattctacaagtctaatgcatgaagtgtaagttttgtagatgagtggaggttgtgcttcctctctgttttgtggcttacttgcagatacgttcaagtagatttgcagatttgcatttcctggtaaattttatctgatcctcggacaacaatagatatcaatanaagagaaataca

SEQ ID NO: 241315 - DNA, 393 bp, Glycine max
gagacacaactgcgacttagttcatcccttctcaagccaccgaagcctcactttttgaaattacttgcatagatagataatcatggctatgatgaaacgtgctgcttcctctgcgcttcgctctcttattgcctcatcctccaccttcaccagaaaccttcatgcctcaggtgaaaagaagaagattgtgggggtgttctacaaagggaatgaatatgctaaattgaatccaaattttgttggatgtgttgaaggtgcattgggaatacgtgagtggctggaatcacagggtcatcagtacattgtcactgatgacaaagaaggacctgattctgaacttgagaaacacattccaaaatgcaaatgtcatcatatctactccattccaccccg

SEQ ID NO: 241316 - DNA, 323 bp, Glycine max
gggattcaatgttaagaatgttgctgttaaggatttgaagcgtggttatgttgcctcaaacccaaaggatgaccctgcaaaggaggctgctaacttcacagcccaagtcatcatcatgaaccaccctggtcagattggaaatggctatgcccctgtcctcgactgccacacttctcacattgctgtcaagtttgctgaactcatgaccaagattgacaggcgatccggcaaagagcttgagaaggagcccaaatttttgaaaaaacgtaatgcgggttttgttaagatgagtccaaccaaacccatggttgttgaaactttct

SEQ ID NO: 241317 - DNA, 393 bp, Glycine max
gggaaacaagagtgatctgacagcaaatagagttgtctcatatgacacagctaaggaattcgcagatcaaattggcatacctttcatggaaacaagtgcaaaagatgctacaaatgtggaagatgctttcatggccatgtctgctgccatcaagaatagaatggctagtcagccttcagcaaacaatgcaaggcctccaacagtgcagatcagagggcaacctgttggacaaaaaagtggttgctgctcttcctaaccaggtggtgctgcttggtctacacttaccttttgcatgtaaggggcatatgctatttcactaaatagtggaccagtgtcacgtaatccaaactggttggttgggaaattggcctagatgattccattctttaccat

SEQ ID NO: 241318 - DNA, 390 bp, Glycine max
gatcttcaagcgttctactatttcgtcaattccaacaacaccacaatgggaagaagaccggcgaggtgttaccggcagataaagaacaaaccgtacccgaaatcccgtttctgccgcggcgtgccggagccgaagatccgaatctacgacgtgggaatgaagaagaaaggcgtggacgagttcccgttctgcgtgcacctggtctcgtgggagaaggagaacgtctccagcgaggctttggaggcggcgcgcatcgcatgcaacaagtacatggccaagttcgccggaaaagatgccttccacctgcgcgtgagggtgcatcccttccacgtgctccgcatcaacaagatgctaaccttccgccggggccgacaggctccagaccggcat

SEQ ID NO: 241319 - DNA, 382 bp, Glycine max
  unsure (1)..(382): unsure at all n locations
aagcccatggtggttgaaactttctctgagtatcctccccttggtcgttttgctgtgagggacatgcgtcaaactgtggctgtcggagtcatcaagagtgttgagaagaaagaccccaccggagccaaggtcaccaaggccgctgccaagaagaagtgattgcatttgggcaattttgctagcacatgtgatcatcatcgtggttactcctttatagtagttttatccttgcagagtcttaagtgttttgtttaagttatatttttaagtttctgccggtttcatgtagccgtaactttcaaaactaggttcttgatcggcggtggtcaattttcattgcnggtttgtttttgatgagtactgtttttggttttgatggtaa

SEQ ID NO: 241320 - DNA, 391 bp, Glycine max
gacaacaaaatttgccaattgccatttcaatcctcagtttctttcttcaacgtttccatcatacacagatcccaatcctctctcaagccctaatttcccctcatttccatggccacagaagagcccactgtcgcggtggaacccgctcccgaacctgcctccgccgatcctcccccggaggagaaggaggagaccaaacctgaagccaaggctaagaaaaccaaggagcccaaacctaaaaaggtttccagacctcgcaaccctcccactcatccttcctacgaagagacggttaaagatgcaattacctcgctgaaggagaaaaccggttcgagccaatacgcgattggcaagttcaaccgaggagaagcacaggcagcttccaccgaac

SEQ ID NO: 241321 - DNA, 301 bp, Glycine max
ggttctagtgtatgtgattgttgtgactcgttcttcttcgtcgttatcttcttcttttgttgtttgtgtgtttgttttttctctcacctgaaaatgtcttgctgcggtggtaactgtggttgcggaagcgcctgcaagtgcggcaacggctgcggaggctgcaagatgtacccagacttgagctacaccgagtcaagcaccaccgagaccttggtcatgggagtggcaccagttaaggctcaattcgagagtgctgaaatgggtgttcccgctgagaacgatggctgcaaatgtggagcta

SEQ ID NO: 241322 - DNA, 259 bp, Glycine max
aatgcccagatcgttacgagcgtttcgtcgtccctgaaggcaccaaaaaggtttcttatgagaaggacacgaagatcatcaatgcggcgtccttcaccatcgagagagaggagcacactatcggcaacatcctccgcatgcagctgcacagagaccccaatgtcttgtttgccggatacaagcttcctcatcctcttcaatacaaaattaatggcaggatacacaccactagtcagtcctcgccaatgcaggcatataa

SEQ ID NO: 241323 - DNA, 384 bp, Glycine max
  unsure (1)..(384): unsure at all n locations
ggcagcgcttgatttgaggccaggcaagccccactcaaccaccacacctctcctcgttcacgctacccctttctgctcttcttctacctttcaagttttaaaagtataaagatggcagagacattcctatttacctcagagtcggtgaacgagggacaccctgacaagctctgcgaccaaatctccgatgctgtcctcgacgcttgcctcgagcaggacccagacagcaaagttgcctgcgaaacatgcaccaaaaccaacttggtcatggtcttcggagaaatcacgaccaaggccaacgttgactacgagaagatagtgcgtgacnactgcaggaacatcgggttcctccaaaatgaattgggactggatgccgacaactgc

SEQ ID NO: 241324 - DNA, 383 bp, Glycine max
acaggaaaactatcaagtctgatggtattgctggcctttatcgtggtttcaacatctcatgtgttggaatcatagtgtaccgtggtctttactttggaatgtatgattctctgaaaccagtggtcttggttggtggattgcaggatagtttctttgctagttttcttttgggatgggggatcacaataggtgccggcttggcctcttaccccattgatactgtgcgtagaagaatgatgatgacatctggagaagctgtaaaatacaagagctctttggaagcattcaagataatcgtcgcaaaagagggtactaagtcactctttaaaggtgctggtgcaaacattataccttccggttgcaggtgctggagtgcttgctgg

SEQ ID NO: 241325 - DNA, 365 bp, Glycine max
gctgaaatagttgagttgacggaagttgaaaattttggttgagcaagagccttctctttgttccgttccgcgaccatgtctcatgagacatgcccttccgtaaagaacttccttcttttggattctgatgggaaacgtgtcgcagtcaaatacttctctgaagactgggcaacgaatagtgccaaggaaaattttgagaaagttgtcttcaacaagactcagaagaccaatgcccgcacagaagcggaaatagcaatgtttgagaataacattgttgtttacaagtttgtccaagatcttcacttctttgttaccggtggtgattaagaaaattaacctaaccttagccacagttctgcaggcat

SEQ ID NO: 241326 - DNA, 325 bp, Glycine max
caggataattcatgtgtatactccagaaatcatcaaaactgatgctgcaaatttcagagagttggttcaaaggctcacaggaaagccaaaagaagaaggaacaggtggaagcaagtccgaaactgcactaaccaaagaaccaatggattcacaccccaagaaggccatgatcatgcaagatgaagaggagtttctgagtctacaaaatgggacaaggctaaagaatgaacataaagaggaggaagttcaagatgatgtgtggaggtcaaagtcaaacgagaagttcagtggtttccttgatgggttctcagaattggatggtttt

SEQ ID NO: 241327 - DNA, 349 bp, Glycine max
  unsure (1)..(349): unsure at all n locations
gaagcagaagcaggtgagtgagtgagtgagcaagagtgaagagcgaagagaatggctcccaagggtttaatctttttggctgtgttatgcttctcggcactgtcactgagtcgttgtcttgcggaggataatggacttgttatgaacttctacaaggaatcatgccctcaggctgaagacatcatcaaagaacaagtcaagcttctctacaagcgccacaagaacactgctttctcctggctcagaaacatcttccatgactgtgctgttcagagttgtgatgcttcactgttgctggactccacaagaatgagcttgtctgagaanggaacagatagaagctttgggt

SEQ ID NO: 241328 - DNA, 392 bp, Glycine max
ggcagctagctgagaagcgaaaacccattattcttgttattaacagagtcacaaagaatcaaacttttctgttctctatagtaacgttctgggctaagaatatctggctttggttgaagtagtaatggttggcaaggagagtttgagaactcatgaggtcttgaactttagctttgagaagcttatgatggttgactgtggtggaaatagtgggaaaggagtgaactttaaagcgggggtgatcacagaatggaaggatattccagttgagcttttgatgcagattttgtcacttgtggatgatcaaacggttatgatagcttctgaagtttggccttggttggaaagaggcaatttgctttggcctgactcggttatcactctcatggtgt

SEQ ID NO: 241329 - DNA, 316 bp, Glycine max
gtatacaagggatggttctgtttggaagagtgatgagacttctgcccagtcatccagccatgtggtagatttgcttttcttatcacagaggtgtctagtatccaaagcagccaaacaattgatggagctagttcatcagacgctacaggatgtttgcctgtcatctacaagagttgcttttgaattttatcacacagctagagatgctgtactactttatgaagtagttgtccctgtcaagctagagaggcagctcaatggcatcaatcaagcagccattctgttgcataatgactgtctttatctctcccaggag

SEQ ID NO: 241330 - DNA, 324 bp, Glycine max
  unsure (1)..(324): unsure at all n locations
ggaacggaaaagcactggcgcagctaccctgaggcttctcttctcttctcttctctgtcgtgagtcaccatggtgagggttagtgtgctgaacgatgctctgaagagcatgtacaatgctgagaaaaggggaaagcgccaagtcatgattgggccatcctccaaagtcattatcaaattccttttggtgatgcaaaagcacggatacatcggagagtttgagtatgttgatgaccacagggctggtaaaatcgtggttgaattgaacggtagactgaacaagtgtggggttattagtcnccgttttgatgtgggcgtcaaagag

SEQ ID NO: 241331 - DNA, 384 bp, Glycine max
  unsure (1)..(384): unsure at all n locations
ggcaccatcgaggtcatgggcctcatgcagggcaagaccgacgccgacgccatcatcgtcatggacgccttcgccctcccagtcgaaggcaccgagactcgcgtcaatgcccaggccgatgcctacgagtacatggtcgattattcccagaccaacaaacaggctgggcggttggagaatgttgtgggatggtatcactctcatcctggttacggttgctggctgtcggggatcgatgtttcgacgcagatgctgaatcagcagtttcaagagccgtttctagcggttgtgattgacccgacgaggactgtttcggcggggaaggttganattggggctttcaagaattaacctggaaggggtataaccctccggatgagccta

SEQ ID NO: 241332 - DNA, 355 bp, Glycine max
ggctcacttggatctgatctgctgaaacacgccacactcttcttaccatgggcctcctcgatcacttgtgggatgacaccgtcgccggtcctcgcccggagaatggccttggcaagctccgaaagcaccacaccttcgctttccgatctgcctccggcacggaatcagacagcggaagcgtgaaatcgtacggtgaagatttgccggaggatgcggtgagagtgacgcgaagtatcatgatcgtgaaaccacctggtggtaatcagagtccgagcggatccgctccggcttcccacgccggttctactcctccggtgtctccttattcgggagctagatagtcctttcgttctcg

SEQ ID NO: 241333 - DNA, 366 bp, Glycine max
ggcagttcaattccaatatattccattctctctgtgtatttccctacctctcccttcaagatgcagatcttcgtcaagaccctcaccggcaagaccatcacccttgaggtggaaagctctgacaccatcgacaacgtcaaggccaagatccatgacaatgaaggaatccccccggaccagcaacgtctcattttcgccggaaagcaacttgaggacggccgtacccttgctgactaacacaatcagaaggagagtactcttcatctcgtcctcagtctccgtggtggcatgcagatcttcgttaagacactcaaccggcaagacataaccctagaggttgacagctccgacgacatcgataacgtc

SEQ ID NO: 241334 - DNA, 331 bp, Glycine max
  unsure (1)..(331): unsure at all n locations
gacacgcacacagttacgctcttcaaatctatctcttctcagcgattcttgcttcaagttccagaaatgggtgtggctcaaaacattcccgatgcggaggagggaaccttggagattggaatggaatacagaactgtttctggagttgctgggccattggtcattcttgataaagttaagggacccaagtttcaagagattgttaacattcgcttaggagatggtactactcggcgtggacaagtgctagaagttgatggtgaaaaggctgttgttcaggtctttganggtacatctgggattgacaattaattttacaactgtgcaattt

SEQ ID NO: 241335 - DNA, 389 bp, Glycine max
ggttctagtgtgtgattgtttgttgttgtaactcgttcttcttcttttgttgttctgtgtttgtgtttgttttttctctcacctgaaaatgtcttgctgcggtggtaactgtggttgcggaagctcctgcaagtgcggcaacggctgcggaggctgcaagatgtacccagacttgagctacactgagtcaaccaccaccgagaccttggtcatgggagtggcacctgttaaggctcaatttgagggtgctgaaatgggtgtgcccgctgagaacgatggctgcaaatgttggacaaactgctcctgcaacccctgcacttgcaagtgaggtgttgggagagcaagctttaagcaaagaatagcccttaattaggaataatgataaacta

SEQ ID NO: 241336 - DNA, 308 bp, Glycine max
gaatctagtggaagagtgaataagagatatcaatatattatgataatggagggatacaataagaaggttatgattgtggggatggtgttgggcatggccatgattgggatggccaatggccaatactcgttttgtcgcatgcccagcgatgggttggcggcatgcaagccgagtgtgagtggggactatcctgctgatccctccactgcttgttgctcagccattgccaaggctgatcttaaatgcttctgccgcttcaaggattcgggccttctctctatgtatggtgttgatcccaacaagtgcat

SEQ ID NO: 241337 - DNA, 338 bp, Glycine max
gagtgcagtatcgttgagaaataaggggaaaaaatggtgtcgctgaaactgcagaagcggctggccgcaagcgtgctcaagtgtggcagaggaaaggtgtggcttgaccccaatgaagtcaacgaaatctccatggccaattctcggcaaaacatcaggaagttggttaaggatgggtttatcatcaggaagccaaccaagattcactcacgctcgcgtgctcgtaggatgaaggaggcaaagaaaaagggccggcactctggttatggtaagagaaagggtacaagggaggcgaggcttcccaccaagatactttggatgagaaggatgcgtgtgct

SEQ ID NO: 241338 - DNA, 309 bp, Glycine max
gggatttagacgccattgtcaaacccttttcacttctctctagggttttagcactctctctctctctcgttttcgttcttcctttctgcctctctcagtcacacaccttctcgatgaccaacgacaacatcgccgtgacagatctcacttctgccctcaatgaagataatcgcgccgacctagtcaatgctctcaagagcaagattcagagtctggctggggcgcattctgatgttctagagactctatccccgaatgtcaggaagcgtgttgaatctcttagagaaattcagggtaaacatgatgaac

SEQ ID NO: 241339 - DNA, 405 bp, Glycine max
gagcctcatcagaagcagaacgatgagaagcagaaagatcaaaagcaatggcgccgaagaagccgagaaccactacaaggaaccctgatttggttacggggattggcaagtattcgaggtcgcagatgtaccacaagaggggcatctgggccatcaaggccaacaacggtggcgttttgccccgccacgatcacaagcccatgctcgaggtcccggaccagatgccgcacaagttctacccctcggacgatgttaagaagcccctcgtcaacaatcacaagcccaaacccgcgaaactcagggctatcattactccagtgactgtgttgatcctgccttcctgggacgttcatgggaaacagggttgttttcctgaagcagctccgatctggattgcttcttgta

SEQ ID NO: 241340 - DNA, 324 bp, Glycine max
ggggcaacacacccacaagtcatcaaacttcaattgagtttcaaagagatcagtggtagctagtgtggtgcaattgtgttgatcaaggatggaacaaaagaagtttgtggcactattaatggtggttgtggtaatggcttcttctatgtggaaagggtccaaaggtcttagtctctgtaacatggatgaaggtggattggaggcttgcaagccctcagtgactcagccaaacccagttgatccatcccctgattgctgcaaggctttggctggtgctgacttgaaatgcctttgctcttacaagaactcatcagagttgccttt

SEQ ID NO: 241341 - DNA, 389 bp, Glycine max
gagacagtgagaaatgatgatgaagcgtcggttccttttggttctcttggttctctatgtcacagtggagcagagtaagctactccaccacgtagaagccgatggtgggtttgtaaaaacaagaggagtgcagcttatgctgaatgggagtccctactatgctaatggctttaatgcctattggcttatgtaccttgcctctgatccttcccagagaaacaaaatctcatcggtatttcaacaggcttcaaatcatggactcaacattgccagaacttgggccttcagtgatggtggatatcaacccctacaatactctcctggattcaacaatgaccaaatgtttcagggcttggatttcgcaatagccgaagcaagaaaatatggga

SEQ ID NO: 241342 - DNA, 322 bp, Glycine max
gagggaagcacaaccaagcttctctgttaaaaaaaaattaggcgtctaaagggccaaagcttagaaagttgaagctttttttgttgaggtgaaagtgaaatggttggcaaggataatctgagggctgaggacttgaacttgtgctttaagaagcttatgatggtggccgggagtgggaacagtgagaaaggggtgaacttgaaggttggggtgatcaccgagtggaaggatattcctgtggagcttctgatgcaaattctgtcccttgtggatgatcagacggtgatcatagcttctggagtttgtcgtggatggagagatg

SEQ ID NO: 241343 - DNA, 320 bp, Glycine max
caaagcttgaaggagcatacacagcacttcaggcatggaaatctgcagtcactgaggaccctcttaagattttatcaagttggattggtcccaatgtgtgtgcttacaaaggagtcttctgtgctgcaaaccctcaagatgaaacggttggtgcatcagcagcattcccagttgtagtagcaggcatagatctcaaccatgcaaatctgaaaggaactcttgtgaaggagctctctctactcagtgatttgtcccttctccacctcaacagtaacagattcactggcactgttcctgaaacattcagagaccttgtgttt

SEQ ID NO: 241344 - DNA, 331 bp, Glycine max
gatacacgcgtttcgcatgctctagtcacagacaccgacacagatctgtcttccgaagcaggaactaaatatggctgacttgttggaatggtcaaagcaagataagaaacgaatgcttcatgtcgtctaccgtgttggtgaccttgatcgcaccatcaaattttacacagaatgtttaggaatgaagcttttgaggcaaagagatatcccagaggagaaatatgctaatgcttttcttggatttggccctgaagaacccattttgttgttgaattaacatataattatggggttacctcgtatgacattggcgatggctttggacattttg

SEQ ID NO: 241345 - DNA, 400 bp, Glycine max
ggcagcaacagcagcattcactgaaagcactcagtagggtttgcggtttcagagtttgtgacgcacgcatccatggccaccaccaccaacgccgccgcagccccgccgcgccagctctcccagaaggaagccgacatccagatgatgttagccgccgacgtccacctcggcaccaaaaactgcgacttccaaatggaacgttacatcttcaagcgccgcaacgacgggatttacattattaaccttgggaagacatgggagaagcttcagttagcagctagggttattgttgcaattgagaaccctcaggatatcattgttcaatccgcaaggccttatgggtcaaaaaccggtcctgaattttgctcagtacactggtgctcatgctattgctggaagg

SEQ ID NO: 241346 - DNA, 283 bp, Glycine max
tgggggagcgacacagagagtgatttcagtgagtgatcagtgttcacttgatctcatcataatcgtcagcgtcaactgacgaagatgccgatcagaaacatcgccgtcggaaagcctgaagacgcgactcactccgacacgttgaacgaggttttggctgagttcatctcaagcttcatcttcgtgttcgccggatcaggctccggcatcgcctagaacaagctcagcgacaacggcgctgcaacccctgcagggctcatctccgcctccatcgcctcatgca

SEQ ID NO: 241347 - DNA, 346 bp, Glycine max
gaacgcagccaaagaaaagaaaatcctcaattttctgagcagccaaacactctctctctgtctctcgaaaattctcagtttgcagagaaaatctgaatcatgtcgtggcaagcgtatgtcgacgatcaccttctgtgtgacatcgaaggtaaccacctcactcacgctgctatcatcggccaagacggcagcgtttgggctcagagtaccgacttccctcagttcaaacctgaggagataactgccatcatgaatgactttaatgagcctggatcacttgctccaactggattgtatctcggtgggcacaaatatatggtcatccagggtgaacccggtgctgtca

SEQ ID NO: 241348 - DNA, 383 bp, Glycine max
gacggaccagtttttatgggacttgagcagctttgagagtgaccctgaagagtttgccacagtcttcagcacggacaccggcactgcagatcctgaagttggtccagctattgcctttgctatcaggtagcatctttatgagattgcaattcaaagtgtggtttcagcagtacaaagcataacgagcaagcatggtcatcgaggggctgaatatactccagtcagtataggaggtgcagcaacaatggacttggccaagttgtttggtccgacatctaatgtagttcggaaaacatccgagtgggacgtacatgaacctaatgtggacctactatccaacgaggaagttgaggcccttgaaccgaatgaagagacaaatttca

SEQ ID NO: 241349 - DNA, 323 bp, Glycine max
gacagaacaatagtagcaagcagagccccaagatctgtgcttgaaccttcacgtgtgtttccttccttctgcagacgagcttcaccttgcgccgaagggccacagatggttgaaaccgatatggatgccgaaactgttgcaaatgtggttccaccaaaggagactccaaacagtgttcccatctcttatcattcctcacactcacaccctcctcttaatgagaggattatttcatccatgaccagaagatctgttgctgcacacccgtggcacgaccttgagataaggcctgatgctccaacgatcttcaattgtgtgattga

SEQ ID NO: 241350 - DNA, 381 bp, Glycine max
ggcacaagtttgttgagatagctagaagcaataagatgaaaatgaaagtgcttgttttgtttgttgctacagttttggtagcatatgaatgccatggctcagactaccagaagttccctctccaaatgaaaactgggtttggtgggcaatacagcaatgaggtggcatgtgccagttggaggcttggcgtggaagcaaacaacgtagtcaagtggcaaactgttcctgcagcttgcggagagtacatagctgactacgttctacgagaccaatatagatcagattccaaaacagttaaccaacaagcttatttccatgccaaacccctcaaactcaccaacacagatgtctttgtcctggacgttgacgacactactctct

SEQ ID NO: 241351 - DNA, 401 bp, Glycine max
gacattcagtcgttgcacaagtgagagaggttgaaggcggcgtgagaatgttggacatcaacctattcagagaggagaagggccgcaaccctgaactcatacgcgaatcccaacgccgtcgtttcgccagcgtcgaaatcgtcgacgaggtcatcaatctcgacaaagaatggcgaaaacgtcaattcgagttggaaaatctccgcaaggaattcatcaagatcaacaaggaagtctccaaactcaagcgtgctggggaggatgcttctaagttcattactgaatcagaggagaccaaaaaatcgatagccgcgaaagaggttgaagttccggaaaactccgaatcccttgaattccaagttggaaactattggaaacctcgtccacgattccgttccaat

SEQ ID NO: 241352 - DNA, 314 bp, Glycine max
ggaaaggagcaagagttggcgtgggcgaggaccacgacatgggtgacggaatgcaatgcagtgaccacccttacagaaacaaccctggcggtatctgcgccttctgccttcaagacaaactcggcaagcttgtttcctcttctttccctctccctctccttcctccttcttccccttcttcctcctccactctcccttccatctcctcccttcctccctcctcagcccccgctccttcctcctccaccgccgtttctcacttcaatcatccatactaccctcgtagaacgcgcctcccttttctcttgcccaag

SEQ ID NO: 241353 - DNA, 400 bp, Glycine max
ggaggagactgagaaaacagaagaaaacaaaatggaagacacagtttctgcgttgaggtctttgatggtttctcactctccgccgctggatgccttagtggtgccctctgaagattatcacctgagcgaatatgtgtctgcacgagacaagcgccgcgaattcgtttccggcttcactggaagtgccggcttggcacttataacaaagaaagaagcactgctgtggacggatggacggtattttttgcaggctgagaaagaacttagtgctgggtggaagctaatgcgaattggtgaagatcctgctgtagatatctggatggccgataatttgccaaaagaagcatccgttggggttgatccctggtgcatttcaattgatactgctcaaagatgggag

SEQ ID NO: 241354 - DNA, 418 bp, Glycine max
agcccacgcgtccgcccacgcgtccgcccacgcgtccgcggacgcgtgggggatcgaaagacgcatcttttgcttcactcgtcatcactacgcagatcgcagcaaaccagactaaactccgacgatgcctcccgtcgctcctcgatccggtgatgccatattcgccaacgtcgaacgcgtcaatgcggagctgtttactttgacgtatggcgcaattgtgcgtcaattgctcacggatctggaagaggctgaggaggttaacaagcagcttgatcaaatgggttacaatactggaatccgtttgattgatgagtttttagccaagtctaatgtctccagatgcaacgatttcagagagacgactgatgttattgcaaacgttggttttaaaatgttcctcggtgttactgcatccgtg

SEQ ID NO: 241355 - DNA, 290 bp, Glycine max
ggggttgggttatctgaagcttctcctgcggaggaaacataacagcgcttgtttgggaaccctagtttggcaaacatttcaagaatcagagtcttttaccactctcaggtttagcattattatctgaaatggcatcggtgtctagtcagcaacagttccgttacacgcagccaccgtcaaaggttcttcatttgagaaatttgccgtgggagtgtacagaggaggaactaattgagcttgggaagccatttgggaaagttgtgaacacaaagtgcaacgttggagcaaat

SEQ ID NO: 241356 - DNA, 318 bp, Glycine max
ggagcgaagaagatattaaggtttttgagtgcggtgcggcgatcctagcactctcttctgcagctttcgccgacagcttcattcaccatggctgagcaaaccgagaaggcttttttgaaacaaccaaaagtgtttctcagctcgaagaaaactgggaagggaaagagacccggaaagggtgggaaccgcttttggaaatccattgggcttggatttaagactcccagggaagccatcgaaggaacctacattgacaagaagtgccccttcactggcaatgtttccatccgtggccgtatcttggctggaacatgtcac

SEQ ID NO: 241357 - DNA, 293 bp, Glycine max
gaatacagtccagaaacacatgagaaccgaaagcaggagttagataaattggtacaagatcaggaaagattgagggcttctctgttgcaatggtgctataccagctatggagaggttttcagttcctggatgcacttttgtgctgtgcgtttatttgctgagagcattctgagatatggtctgccaccatctttcttggcatgtgttttagctccttctgtaaaatccgagaagaaagtacgttctatccttgaagggttgactgatagcacaaacagtgcatactggaagac

SEQ ID NO: 241358 - DNA, 386 bp, Glycine max
gatataacaatcattctttctcaaaacacttgctccattattattttctcattcattcgttcatcatggttcggttcagcaacaacgtggtcggactcctgaacttcctgaccttcctcctctccatcccgatcctggtggccggagtgtggctgagcaagcagggcgccaccgagtgcgagcggtggctggagaagccggtgatcgcactcggcgtcttcctcatgctcgtctcactcgccggcctcgtcggcgcgtgctgtcgcgtgtcgtggctcctctggctctacctcctcgtcatgttcgtcctcatcgttcttctcttcgccttcaccatcttcgccttcgttgtcaccaacaagggcgctggcgaagttgtgtctaat

SEQ ID NO: 241359 - DNA, 402 bp, Glycine max
gatggaaagctctgtcaacgaacgtcttgattttgggaagatgggatatgggtgcaatcattaccggagaagatgcaggattcgtgctccctgctgcaacgagatctactcatgccgtcactgtcataacgacgctgcgagcttgttgaagaatccctttgatcgccacgagctcgttcgccaagatgttaaacaagttgtttgttcagtttgtgacactgagcaacctgttgctcaagtttgcacaaactgtggcgtcaaaatgggagaatacttctgcaacatctgcaaattcttcgatgatgatgttgagaaagaacaatttcactgtgatgattgtgggatctgcacggtttgtggtcgagataattttttccactgcaagaagtgtggatcttgtta

SEQ ID NO: 241360 - DNA, 394 bp, Glycine max
gactgcgactggagtggttccctcagacatatctgtaacgctgcttcttctgtgaggcatcaatggagacaaaagctttgtccttcgctctgtctctcaatgacctcaccaacaaccgcttcacttccaatacgccacatgctgccgccaaagtttccgtctttaccgtcagatgctcttcttcgggtagtggagagaggccttggaagaattcagatgctagacttgtgcttgaagatggttcaatttggagagcaaaatcgtttggtgcttcagggacccaagttggcgaggttgttttcaatacatcattgacagggtatcaagaaattttgactgatcctagttatgctggccagtttgtgctcatgacaaacccacatattgggaatac

SEQ ID NO: 241361 - DNA, 394 bp, Glycine max
  unsure (1)..(394): unsure at all n locations
ggagttgaaggggttagggtttaggaagggatggaagcggcagtggtggacgtcggctctaagctcctcaaagcgggctttgcaattcctgaccagactcctgccatgataattcccactcagatgaagcaattactcgatgatggatccgtcgcagataattcactggctgacaatgtcaccgttgatcccgttgtgcgaggatttattagagattgggatgcaattgaggatttgttgcaccatgttttgtataccggcctcggatgggaaattggcaatgaaggacaaatactatttacagatccactttgtaccccaaaggcgaacanagaacagttggtgcaactaatgtttgaaacattcaatatatcaggattttatgcctcagaac

SEQ ID NO: 241362 - DNA, 388 bp, Glycine max
gaaagtcgaagaagcaaaaagggggtgggtcaaaattccgccggagaaaatctttgttcggtgtttgcaatcgggagagagagcaaggtcccttctcaaggatggcgatgactgtacacgtccttgctgggttggcttttatgttttcagctagcattttgcttcagattctggcatgtgcaatatataacaattggtggccaatgttatcagctctgatgtatgtgctggttcctatgccttgcttattctttggaggtggatccactcaatttctaatgagccgtgatggtggtggttggatagatgctgcaaaatttttgactggagcatcaactgttgggagcatagccattcctataatcctcaagcacgctcatatgattga

SEQ ID NO: 241363 - DNA, 308 bp, Glycine max
tgggatgtgattgttgtgacgcgtgcatcgtcgtcgttatcttcatcttttgttgtatgtgtgtaggttttttctcttaccagaatatgtcttgctgtggtggtaactgtggttgcggaagcgcccgtacgtgaggtagcggctgcggtggctggaacatatacccatgacgtgagctacacttagtcaaccagaatcgagaccttgatcatcgcagtggcatcagtttaggctcaattcgagtgtactgtactcggtgttttagctcagaacgatagatgcgcatgtggagctaactgtcagatgca

SEQ ID NO: 241364 - DNA, 386 bp, Glycine max
  unsure (1)..(386): unsure at all n locations
gacttgtaataattcttataacacaacacaacccatggccaccacctccgcattcctcctccttcccctcctcctgctgctccacctcgccatcgccgctcacggcatcggcatcaactacggcacgctcggcgacaaccttccaccgcccgcggcggtggcgaacttcctgaagacgaagacgaccatcgaccgcgtgaagatctacgacgtgaacccggacatcctgcgggccttcgccggcagcggcatctccgtgacggtgaccgcccccaacggcgacatcgccgccttaaccaaaatcgactcggcgaggcagtgggtggcgacgcacatcanaccctttcaccctcagaccaaaattaattacatcctcgtcggcagcg

SEQ ID NO: 241365 - DNA, 392 bp, Glycine max
gaaattcaagttcgcaccaaattttcctcccaaaatgtcaggccgtggaaaaggtgggaagggtttgggaaagggaggagctaagaggcacagaaaggttcttcgtgacaacattcaaggaatcacgaaacctgcgattcgtaggttagcgagaagaggtggcgtgaagaggatcagtggtttgatttacgaggaaaccagaggagttctgaagatattcttggagaacgtgattcgcgatgctgtaacctacactgagcacgctaggaggaaaactgttactgctatggatgtcgtttatgctctcaagagacaaggaaagaacctccaatgcctttggaggctaaagaatagaaccttaaggtttaatgacggtgttgcaggataaaaca

SEQ ID NO: 241366 - DNA, 279 bp, Glycine max
aggggatccttctacactaactaaagccgaacagcgagagagatataccctaccacaaatgccagctggtcacggtttgagattccgcaccagagattccttctctcgtcccttcatgaagaatggtaccatcgccctcaccacatacctcataacctaccacgtcggcgattatgtccacgtcaacgttaactgcgccgtccacaccggaatgcctcacaagttctaccatggccgcaccggtcgcgtctggaatgtcaccaaacgtgctgttggggt

SEQ ID NO: 241367 - DNA, 315 bp, Glycine max
ggcctaagttgaacactcttcaagatctgattcacatttgctgcattattatatggactgcttcagcactccatgcagctgtgaatttcggacaatacccttatggcggtttcatcctaaatcgtccaactctaaccagaagattgctcccagagccaggaaccaaagaatatggtgaacttaccagtaatcatcaaagggcttatttgagaacaattacaggaaagactgaggcccttgtggacctaacagtgatagagatattgtcaaggcatgcttctgatgaggtctaccttggacagaaggacaatccaa

SEQ ID NO: 241368 - DNA, 391 bp, Glycine max
gtggtttctgaggtttttggggatagaactgagcttggtttgtccataaagttcttttccatattggtgtgtttcttgttggcatttttgctgaatgtgcagtccataagatactatagccatgcaagcatcttaatcaacgtgcccttcaagaaagtgtccccaaacctaaggcatcaaatgctcacagctgagtatgttgccaacactgtgaaccgaggtagttacttctggtccctcggattgcgtgccttctacttctctttccctctcttcatgtggctctttggacccattcctgtgttcttctcttgctttgcccttgttttcatgctatacttcttggatgttacatttgagcgtggatgtgctggggtttctgatactgatg

SEQ ID NO: 241369 - DNA, 292 bp, Glycine max
ggcagtgatagagatcagaaaatgtggcttgtgcaactctcaatcccatttctgaacggacatgggcattccaccagccttctctccaagcacagttcggtggtgactcagacccactgggccccaccgagtttcctgcctcaaatcaatgcgatgaagacaatgcacgggagagtggtgtgctccaacagcgataagacggtggcagtggaagtggtgcggctggcccctcacccaaagtacaagatgcgcgtgaggaagaagaagaagtaccaggcccacgaccccgata

SEQ ID NO: 241370 - DNA, 398 bp, Glycine max
agatattattccacttaaactcaccaacggaactttaacacattccatgctcgccttcgggtgtggatatgatcaaactcatgttggtcataatccaccaccttccgcagcaggggttcttggccttggaaatggcagagcaagcattttgtctcagcttatttctaaaggcctaattcgtaatgtcgttggccactgcttaagtgggacaggagggggctttttattctttggagatcaactcattccacagtctggagttgtttggacacccatattgcagagttcctcttccttgcgaaaacactacaaaacaagtccagcagacaagttttttaaatgggaaaggctacttcggtgaagggtcttgaacttacctttgatagtgggagctccta

SEQ ID NO: 241371 - DNA, 384 bp, Glycine max
gacactgtacggtaacagagatcggaacgtggaactgcggaaaccggaatatctcacttctcagatcagatcaatccgacgtcgttgcagttataatggctccattcagcggcgatgagacggcaccgtttttcggcttccttggagccgcagctgccctcgtcttctcctgtatgggagctgcctatggcacagcgaagagtggcgtgggcgtggcttcgatgggtgtgatgagaccggagctggtgatgaagtctattgtccctgttgttatggctggagttttgggtatttatggccttattattgctgttattatcagtactggcattaatcccaaggccaaatcttattacctctttgatggttatgcacatctctcct

SEQ ID NO: 241372 - DNA, 394 bp, Glycine max
  unsure (1)..(394): unsure at all n locations
cggtttcgaagcagcgggaacaaacatgtcgtggtgttactgcgctaagcctatgactttgcagttgccgttgcaatcaagagcagcatcatcgttccattcccacgttggaggagtaacagtaacattctcaacactgtctcttcgaccctcttctcctcttgttctgacccacaacctccacttccaacccaaactcaaacgcgcttccacaaccattcgctgctcctctgcgttgactcctcaattgaagtctaccttggatcaagttattgcttcaaataaagtagttgtgtttatgaagggaactaaagactttccacagtgtggattctcaaacacagtggtgcaaatattgaagtctccaaatgtgccttttganaccataaatgtg

SEQ ID NO: 241373 - DNA, 390 bp, Glycine max
ggcacttctcaatcgcaaattttctcccccaaatcgtagatctacggttaaattggtgtagtgtggtaagatgggaggaggatttagagtgcttcacttagttaggccatttctctcgtttcttcctgaagttcaaactgctgacaggaaagtgccatttagagagaaggtcatatacactgtgatctctcttttcattttcctggtttgtagtcagctccctctatatgggatacactcaacaacaggtgctgatccattctattggatgcgtgttattctcgcttcaaaccgtggaactgtcatggaacttggaatcactccgattgtgacttctgggctagtaatgcaacttctggctgggtcaaagatcattgaagtggacaacaa

SEQ ID NO: 241374 - DNA, 391 bp, Glycine max
  unsure (1)..(391): unsure at all n locations
gaggtttttagggtttacaccgaggagacacaccttcagcagcagcagccatggttctcaaaaccgaactatgccgattcagcggtgccaagatctacccagggaaaggcatcagatttgttcgtggtgattctcaggttttcctgtttgctaactcgaaatgtaagaggtatttccacaacaggttgaagccatcaaagctcacctggactgcaatgtacagaaagcaacacaagaaggacattgctcaagaagctgtgaagaaaagaagacgtgctgccaaaaagccttactccaggtccattgtcggtgccactttggaagttatccagaannaagagagctgagaagccagaagttcgagatgcaaatagggaagctgcccttcgtg

SEQ ID NO: 241375 - DNA, 391 bp, Glycine max
gaactaagtagagaataaaatcaaatcaggagagcatgcatatgaacatgatgatgaagaaggtgtgtgggtttgcaatagtgatggtggcagtgcagcttctggtgggggtgagtcccaaggcagaggctgtgacttgtacccctgtggagctgagtccttgtttgggggcaataacttcctctcaaccaccatcaacaatttgttgccagaaggtgagggaacaaaggcaatgcctctgtggttacctcaaaaacccaagtctaaggccatatgccaattctcctggctccagaagggttgctacctcttgtggggttccctttccaacttgttaactaccttcatatcacatcatatatagtatgtaataaaccctgttggctggaaa

SEQ ID NO: 241376 - DNA, 400 bp, Glycine max
gatatcaccctttttgtttctcgccttgtcattgaaaccttttcacccccttcatatatccttaattcagcaatggcgagccacgacaaagcccaaagatctagcacaaccaaaaatggcatctcgcgaagcaacaaagctggtctccaattccctgttggtcgtgttgctcgataccttaagactggcaagtatgctgagcgtatcacttctgctgctcccgtgtatctctcctctgttcttgaatatcttgctgctgaggttttagagttggccggaaatgctgtaatggacaacaagaagactcgaattatgccacgccatatccaatttgcaattacggattgatgatgatttaaccaagcttctcggagatgtgaccacccctaatggtggtgtg

SEQ ID NO: 241377 - DNA, 297 bp, Glycine max
cgggaatagagactacagaagagagaggtgttggtgccctaatcgtgagaagaaaggaaagggaaaagaggaaagtggtgtgcataacgaatgcgacggtgaaggaccttctggcgatgcaggcgtgcaacctgttctgcctccctgagaactaccagatgaagtactacctctatcacatcctctcctggacccagctcctctacgtcgccgaatactacaactgccgcatcgtcggctacgtcctcgccaagatggaggaataaaccaccgactgccacggccacatcacctccc

SEQ ID NO: 241378 - DNA, 404 bp, Glycine max
  unsure (1)..(404): unsure at all n locations
ggcttgctgcaaccgaatccctcccccaacctctcaaacaaactttccctctctctctccctcacccaattcttgtaccaatggcaagagctcccactccacgcgaagagtccgtgtacatggcgaacctggcggagcaagccgagcgctacgaggagatggtggagttcatggagaaggtctccgcctccgccgagagcgaggagctgaccgtggaggagcgtaacctcctctccgtcgcctacaagaacgtgatcggcgctcgccgcgcctcctggcgcatcatctcctcaatcgagcagaaggaggagagccgcggcaacganggacacgtcgccgtcatccgcgactaacgctccaagatcgaggccgagctctccaacatctgcgacggaatcctcaaa

SEQ ID NO: 241379 - DNA, 389 bp, Glycine max
agaaatgtggtggcagcagtctttcagattgtgatcgaactgctattagtgctttattggataaactaatgagtaacgatatagaacagcaaagggcagctgctggtgagctcaggctgttggctaagaggaatgcagacaaccgagtatgcattgctgaggcaggagcaataccacctcttgtagatttgttgtcttcttcagaccctcgaactcaggagcacgctgttacagcacttctcaatctttccatcaacgagagtaacaaaggaactatagtaaatgctggagccataccggatattgtagatgtactgaaaaatggaagcatggaggctagagaaaatgcagctgcaactctcttcagtttatcggttctagacgagaat

SEQ ID NO: 241380 - DNA, 396 bp, Glycine max
ggttctagtgtgtgattgtttgttgttgtaactcgttcttcttcttttgttgttctgtgtttgtgtttgttttttctctcacctgaaaatgtcttgctgcggtggtaactgtggttgcggaagctcctgcaagtgcggcaacggctgcggaggctgcaagatgtacccagacttgagctacactgagtcaaccaccaccgagaccttggtcatgggagtggcacctgttaaggctcaatttgagggtgctgaaatgggtgtgcccgctaagaacgatggctgcaaatgtggaccaaactgctcctgcaacccctgcacttgcaagtgaggtgttgggagagcaagcttcaagcagagatagcccttaattaggaataatgataaactattaatgtg

SEQ ID NO: 241381 - DNA, 399 bp, Glycine max
ggcaccacaaaccacataattcgacaacactctctcctaattgttcaacttctggagctacttccaccccactagctaccttcattgtattttcagtctccaaactccaaagggaaaatgagcagaccaggagattggaactgcaggacatgcaaccacctgaacttccagagaagagagtcgtgccagcgatgcggggagcctaggagtggtggcggcggcgactacggcggaggcttcggtggtggcagaggctcttcctcctttggcttcaccactggcccggatgttcgccccggtgactggtactgcaccgtcggaaactgtggagcccacaacttcgccagccgctccagctgcttcaagtgcggtgcccccaaggaggactcctccgccgga

SEQ ID NO: 241382 - DNA, 325 bp, Glycine max
gacaacaacaatggctccgaagaaaggtgtgaaaggttccgttgtagcagcgaagaagaaggttcaggagaaggtgacgaatcctttgttcgagaagcgtccgaagcagttcgggatcggaggcgcgctgccgccgaagcgggacctgacgcggttcgtgaagtggccgaagaacgtccaaatccaacgcaagaagcgcatcctcaagcagaggctcaaggtccctcctgcactcaaccagttcaccaaaaccctagacaagaatctcgccacgaatctatttaagatgctgctcaagtacaggccggaggacaaggcggagaag

SEQ ID NO: 241383 - DNA, 394 bp, Glycine max
gtaacttggtaatatattttgttgcactctatggcctcagagacagaagctgctcttgctgccactccctctgatggtcccaccgtatttgacaagatcatcaataaggaaattccttctactgtggtctatgaggatgataaggtccttgcctttagggacatagatccacaagctcctacccatattctaatcattcctaaagttagggatgggttaactggtctgtccaaggctgaggagaggcactgtgagattctaggtcgacttttgtgcactgctaagctggctgcaaagcaagaaggtcttgatgatggcttcaagattgttaattaataatggacaagacgggggccaatcattttaccacattcatgtgcacctcattggggga

SEQ ID NO: 241384 - DNA, 319 bp, Glycine max
gaaggcatcttcaagctctgaatctgcaatggcttctctactcaacatggtttcggttccaccaagaatatcaccaacctcacacaccagaatcgcttcgcttcaagctcgacccgttttgccacccttttctgtctcattttccaggaggagactatcaattagagcaacagaaactgataccaatgaagttcaatctcaggcaccgggtgcagcgccatctaaagatggttcaagcttcaatcagcttcttggtatcaaaggagctgcccaagaaacaaataaatggaaaattcgtcttcaactcacaaagcctgtc

SEQ ID NO: 241385 - DNA, 367 bp, Glycine max
gaagaagaaaagagaaggtataagcagccgttttttctgttggaatatgaaggtggtgaagagagaagaagaaggagaatggtgacggaccaggatatagcgaaaggggtggagtctctactgcgtcactctgacccaaactccataactacggttaacggtgtcgttcagcagctggaggccaaactagggttagacctctctcacaaggccagtttcatcagagaccagatcgaccatcttctccggtcacagccacaggcatttgttcctcaccctcctccacttcacagagactattttgcccctcacccccaacggcactttccgaccacccactttcccttcccaattttgcctccatgac

SEQ ID NO: 241386 - DNA, 313 bp, Glycine max
gagagcgaaagagatgtcgttggtttcaagcatgttcgggtgtggagtggtgatggcggcgtcgcaagcaatgggaattggaaggagaagcgatggtggattgacgatagtgtgttcgtctaagccgcagaagaaagcgacggcgcatcacatgaagactcggcctcggaagacgcaggcatgggatagaaaccgcaagcccaccgtctacgatccactccctcctcatcctcctgattggaccctcgttattcccgctgacgcttcttctgctcccgttacgcctccgcctccaactccctctgcctagtca

SEQ ID NO: 241387 - DNA, 405 bp, Glycine max
cgaggattccaaagctgtgaagaaaaattccaggtttggctcagaaggtagcaatcagagatcagctgatcagccgaagttagcatctgactttctgagggaggatagtgtagactctaggaagggaaaagataaaaacattaaaaagaagaagaaaaaaggagcaaacaacaatgagtcaaagaatgagagtgagtataaaaagggtttaagacctgtgttgtggttgacgccagactttcctctgaaaactgatgagctgctgcctctgcttgacatcttagcaaataaggttaaggctattagaagactcagagagcttttgacaacaaagcttcctcatggaacttttcctgtcaaggtcgctatcccaatagttcctactattcgggtgcttgtcacttt

SEQ ID NO: 241388 - DNA, 395 bp, Glycine max
  unsure (1)..(395): unsure at all n locations
gagtggaagagtgaataagagatatcaatatattatgataatggagggatacaataagaaggttatgattgtggggatggtgttgggcatggccatgattgggatggccaatggccaatactcgttttgtcgcatgcccagcgatgggttggcggcatgcaagccgagtgtgagtggggactatcctgctgatccctccactgcttgctgctcagccattgccaaggctgatcttaaatgcttctgccgcttcaaggattcgggccttctctctatgtatggtgttgatcccaacaagtgcatggaactccctgttaagtgcaaggttgtcgactctttccactgctagattcattaganggggcactaatcaatataaactacacaagggcact

SEQ ID NO: 241389 - DNA, 394 bp, Glycine max
  unsure (1)..(394): unsure at all n locations
ggcacaagtttgttgagatagctagaagcaataagatgaaaatgaaagtgcttgttttgtttgttgctacagttttggtagcatatgaatgccatggctcagactaccagaagttccctctccaaatgaaaactgggtttggtgggcaatacagcaatgaggtggcatgtgccagttggaggcttggcgtggaagcaaacaacgtagtcaagtggcaaactgttcctgcagcttgcggagagtacatagctgactacgttctaggagaccaatatagatcagattccaaaacagttaaccaacaagcttatttctatgctaaatccctcaaactcaccaacanagatgtctttgtcttggacgttgacgacactactctctctaatctccagta

SEQ ID NO: 241390 - DNA, 393 bp, Glycine max
gacgcattttctgttctgttttgttctcattctgtgactctgtgcttagttaacgttaacagtgacttaagatggcggattctgcagatgtcacccacgatgttgtgtccctcctctcttctcctcaaagggactttcttcttcgaaacaacggcgatcaggttaaaattgacagcttgaagggtaagaaacttggtttgtatttttcggcatcctggtgtggtccatgtcaaacatttacgccaactttggtggatgtgtacaatgaggttgcaaaaaaaggtgacttccagatcgttttcattacggctgatgaagatgatgagtcctttaacggttacttttccaagatgccatggcttgcaatcccattttctgattcagacacacgca

SEQ ID NO: 241391 - DNA, 316 bp, Glycine max
gaaacacagagagcgcagtcgtagaagaaaagaaatcctcacaatgcattcattcggctacagagccaatgcgttgctaacctttgccgtcaccattttggctcttatgtgcgccatggcctctgtatccgacaacttcaacacccccactccctctgcacaagtccaggtgttgaacatcaactggtttcagaaacagcccaatggcaatgacgaggtcagcatgacactgaatatatctgcagatttgcagtcccttttcacatggaacacaaaacaggtttttgtttttctagctgctgagtatgaaactcct

SEQ ID NO: 241392 - DNA, 399 bp, Glycine max
gagttcaattccaatatattccattctctctgtgtatttccctacctctcccttcaagatgcagatcttcgtcaagaccctcaccggcaagaccatcacccttgaggtggaaagctctgacaccatcgacaacgtcaaggccaagatccaggacaaggaaggaatccccccggaccagcaacgtctcattttcgccgggaagcaacttgaggacggccgtacccttgctgactacaacattcagaaggagagtactcttcacctcgtcctccgtctccgtggtggcatgcagatcttcgttaagacactcaccggcaagaacattaacctaaaaggttaaaagctccaacaccatcgataacgtcaaggccaacatccaggacaaggagggtatccccc

SEQ ID NO: 241393 - DNA, 316 bp, Glycine max
ggaacctttgcattctattcattcaagattcagcaagtgcgttttggaagcagagaccgaaatacttcgagatggcccgtacaaagcaaactgctcgtaagtcaactggaggaaaagctcccaggaagcagcttgcaaccaaggctgcacgtaagtctgcaccaacaactggtggtgtgaagaagcctcatcgttatcgccctggaactgttgctcttcgtgagattaggaaataccagaagagcactgagctcctaatcaggaagcttcctttccagaggttggttcgtgaaattgcccaggatttcaagactga

SEQ ID NO: 241394 - DNA, 347 bp, Glycine max
agttccggtggccaaaagaccaccagaagggaacaaaggcaactccgaaatcccctcccaacaaaagaagattctccaaggccgacaatcaaaaccgggtccccaaccccgggcctcaccgccgatggccgcgtcctctcccgctacatgagatccgaatgcatcaactataattacacctacgagtcgccgctccccgtcggcagactagtcgttcagctcgccgataaggctcaggtttgcacacagcggtcttggaaacgtccttatggggttggactcctggtagctggattagatgaatcaggagctcacctctattacaactgtcccagtggaaactattt

SEQ ID NO: 241395 - DNA, 309 bp, Glycine max
ggttctagtgtatgtgattgttgtgactcgttcttcttcgtcgttatcttcttcttttgttgtttgtgtgtttgttttttctctcacctgaaaatgtcttgctgcggtggtaactgtggttgcggaagcgcctgcaagtgcggcaacggctgcggaggctgcaagatgtacccagacttgagctacaccgagtcaaccaccaccgagaccttggtcatgggagtggcaccagttaaggctcaattcgagagtgctgaaatgggtgttcccgctgagaacgatggctgcaaatgtggatctaactgcacc

SEQ ID NO: 241396 - DNA, 402 bp, Glycine max
gaaggttttgcgctgttgttgctgcgcatcctccgtaacctccgagctctgcaccgaagaacgaagccatggggaagacacatggaatgggatctgctcgcaagctcaagtcccaccgcaggaggcaaaggtgggctgacaagtcatacaagaaatcacatcttggaaatgaatggaagaaaccttttgctggttcatcccatgccaagggaattgtccttgaaaagataggtattgaggctaagcagcccaactctgccattcgtaagtgtgccagcgttcaacttatcaagaatgggaagaagattgccgcttttgtccctaatgacagttgcttgaactacattgaagagaatgacgaagtcctgattgctggatttggacgaaaatgtcatgctgtgg

SEQ ID NO: 241397 - DNA, 383 bp, Glycine max
catacagaagtgtcatattgacagcatattcacggagagtaaattcctgcaagctgaatctctattgcagctagcaagagcactcatttgggctgcggggagaccacaaaaagggaacagcacacccgaggatgaagatacagcagttttctgcctggagttgctgattgcaatcactttgaataacagggatagaattgggattctttggcagggtgtgtatgaacacatatccaacattgttcagtcaactgtaatgccctgtgccctggtagagaaggctgtttttggactcctgcggatttgccagcggttgcttccctacaaggagaacattgctgatgaacttctgaggtcattgcaacttgtcttgaagcttgatg

SEQ ID NO: 241398 - DNA, 385 bp, Glycine max
gaactaaggcaaaaccaaaactcatttcatgtaattcattttctctctccccccgaacactcaagttttatctctcagcctcagtttgctgctagaggttgcatatttggggtttcacacgtgcgcaatttgaaggtattattggaggagagagtgtaaatgaagaaaccaacaaccgacgcaattagtatgggaaaaaggagcctggagggtggagaagatgaccagcctgaacgaaagaggcctgctcttgccagtgtaattgtggaagctctgaaggtggacagtttgcagaagctttgctcatctttagaacccattcttcgtagagttgtcagtgaagaagtggagcgtgctttggcaaagttaggtcctgcaagactta

SEQ ID NO: 241399 - DNA, 391 bp, Glycine max
ctaacaagccggcagatcgagcgagggccaagtaccggcttgtccacgtcgtgaggactcatcgcggggccgacgacaaggcgttccggtgtgtttaccacgagcaggatgatgctgggaaaactggtgtttccttgtctaaggatttgatggcaattgctggtggagcattgaagactaacatcaccacacttggtcctctggtgctgccagttactgagcagcttctgtttttcgtgactctgctgatgaacaagttatcttaacgctggtgtgaagccttacataccggatttcaagcttgcatttgatcacttatgtatccatgctggtcgcagggctgtgattgatgagttggtgaacaacctgcagctgcttcctgatcatgtgg

SEQ ID NO: 241400 - DNA, 395 bp, Glycine max
gattggtgacaaagttagaaacaaggagaaagaaagaagatggcaggaaagaaaatcccagatgtgttgctgaattcaggacacaaaatgccagttataggcatgggaacttcagtggagaatcgtccatcaaatgagacccttgcttctatctatgttgaagccattgaggtgggttaccgtcattttgacactgctgcagtgtatggaacagaggaagccatacgcctagccgtggccaaagccatagacaaaggccttataaagagtagagatgaagttttcatcacttcaaagccttggaacacagatgcacaccgtgaccttactgtctcagctcttaagaccacattaaagaagctggggacggagtatgtggatcgttatctgattca

SEQ ID NO: 241401 - DNA, 388 bp, Glycine max
ggagactaagttgagctgagaagagaagctgggagcgaatggggcagaagcagcgttcgagttccgatgccgacaacgaagtcaagaaacgacgccgtgttggtttctcaggcgttgattctggagttgaggccaaagactgcatcacaatctatctagtttcaagcaaggaagaattcgatgctccagagagttttgtcattcatcctgtggatctgaatagcttttttgatgatgatgggaaaatttatggctatgagggtttgaagattaccatctgggttagcagcatatcattttatgcatatgctgatattacattccagaattcaaccgaatcaaggcaaaggggtcacagatttgaaatctgctcttcagacaatttttg

SEQ ID NO: 241402 - DNA, 314 bp, Glycine max
gagcgaaacagagagtggtttcagtgagtgatcggtgttcacttgatccttcataagtcgtcatcatcatcatcatcatcaccgttgattgaagaagatgccgatcagaaacatcgccatcggaaggcctgaagaggctactcaccccgacacgttgaaggcggggttggctgagttcatctccaccttgatcttcgtgttcgccggttcaggttccggcatcgcctacaacaagctcaccgacaacggcgccgccactcccgccggcctcatctccgcttccatcgcccatgctttcgccctcttcgtcgccg

SEQ ID NO: 241403 - DNA, 404 bp, Glycine max
gacaacacaacgcaacacaacgcgcactctctcttttctctcttaacacaaaaaccctatcgttcttcgcggtttcgccgattctcgccatgccgaaagccaaatccgacgccaaagccgccgatagccggttgaagcgcaagggcgctggtgctggaaggaagcaatcgaagaaagctgctaaggatcctaacaagccaaagagacctccaagcgctttcttcgttttcatgtccgagttcagagagcagtttaagaaggagcatcctaacaacaaatccgtcgctgttgtcggtaaagctggtggtgacaaatggaaatcgctgtctgaagctgaaaaggcccccttcgttgcaacggccgaaaagaagaaacaagagtatgagaaaactattttggcttac

SEQ ID NO: 241404 - DNA, 428 bp, Glycine max
  unsure (1)..(428): unsure at all n locations
gacaccaaaatttgccaattgccatttcaatccccagtttcttcttcaacgtccccttacgagcagatcccaattctccttcccagtttcanaccctaattccctcattcccatggcctcagaagagcccactgtcgcggtggaacccgctcccgaacctgccaccgccgagcctcccccggaggagaaggaggagcccaaacctgaagccaaggctaagaaaaccaaggaacccaaacctaaaaaggtttccagaccacgcaaccctcccactcatccttcctacgaggagatgattaaagacgcaattacctcgctgaaggagaaaaccggttcgagccaacacgcgattgcgaagttcatcgaggagaagcacaagcagcttccaacgaacttcaagaagcttcttctcttacatttgaagaaac

SEQ ID NO: 241405 - DNA, 428 bp, Glycine max
agacgacagaaggggaaagaaaaagattgttagtttttgtgttgtgttgtgtacagagagagagagagagagagagagagagagagagagaggctgctatggggaacagagctatgttaaccttgctactactcctcttcttctcgaccaatttggttccttccgcccttgctatctggctgacgttacccaccactggcactaagtgcgtctccgatgaaatccaacacaacgtcgtcgttttggccgactacgtcgttatccccagtgatcacgcccacaacctcagcatcgccgtcaaggtgacatcaccgtatggaaacaatcttcatcacaaggagaacacaacacatggtagtattgcatttacaactcaagatgctgggaactaccttgcatgcttctgggtggatagccctagtcaagga

SEQ ID NO: 241406 - DNA, 398 bp, Glycine max
  unsure (1)..(398): unsure at all n locations
ggtggccaatggtgcacgaggcagtagtggaccctacaaaggagcccttcgagagggcaaatggggagccagcatatggatactatctgaagcacccagagatgaatgacctaatggtgagggccatgtcaggggtgtcagtgcccttcattanggccatgttggagggctatgatggctttcaaggtgtggagaagcttgtggatgtgggtggtagtggcggtgattgccttcgtatgatcttggaaaaacaccccaccatcaaagaagggatcaactttgacctacctgaagttgtggccaaagccccacaaatcccatttgttacccatgtgggtggtgacatgttcaagtttatccccaaggagatgctatcttcatgaagtgggtgctaacaa

SEQ ID NO: 241407 - DNA, 406 bp, Glycine max
  unsure (1)..(406): unsure at all n locations
ggcatcactgtaagacaaggtaaaagcgggaccagagagaaaacagggggatttgtttctctctgcagttgcactcttgcaggcaggtgcagctgtttcccgttctgctcctctcccaacccctctgtttctttggagtgagaaagttttatactttagaaccagctagcgagcaagtgagccagtgtcatacatatatataaatagcgtgcgagaaatgcagcagcacctgatgcagatgcagcctatcatggcagcctactaccccaacaacgtcaccactgatcacattcaacagtacctggatgagaacaagtccttgatcctgaagattgttganagccagaattctggcaagctgagcgagtgtgcagagaaccaatcaaggctgcagagaaatctcatg

SEQ ID NO: 241408 - DNA, 393 bp, Glycine max
  unsure (1)..(393): unsure at all n locations
ggagcaagagtgaagagcgaagagaatggctcccaagggtttaatctttttggctgtgttatgcttctcagcactgtcactgagtcgttgtcttgcggaggataatggacttgttatgaacttctacaaggaatcatgccctcaggctgaagacatcatcaaagaacaagtcaagcttctctacaagcgccacaagaacactgctttctcctggctcagaaacatcttccatgactgtgctgttcagagttgtgatgcttcactgttgctggactccacaagaaggagcttgtctgagaaggaaacagatagaagctttgggttgagaaatttcaggtacattggagacatcanagaagctttggaaagggaatgnccaggagttgtttcctg

SEQ ID NO: 241409 - DNA, 330 bp, Glycine max
gacacacactctctctggtgttgttgagttttgaaaatggtgtcgtcgcaggttgtgaatacttacccgttgtccagctacacgttcggcacgaaggagcccaagatggagaaggatacctccgtcgcggatcgtctcgctcgcatgaaagtcaactatatgaaggagggaatgaggaccagtgtggaaggaattttactggtacaagagcacaatcatcctcatatacttcttctccaaattggaaacacattctgcaaactcccaggcggtcgtctcaaaccaggagagaatgaaattgagggcttgaagaggaagttgactagcaag

SEQ ID NO: 241410 - DNA, 399 bp, Glycine max
  unsure (1)..(399): unsure at all n locations
ggtgtctgtgactgtcagaaacaaacattatttggttttctgaattgtttggattgcgagaaaaaaaaagggggggaaatggcaaaggatattcgattcttcgacctcaacacgggcgccaagatcccttcagtcggcttgggaacttggcagtctgatcctggccttgttgctgaagccgtcgcggcggccatcaaggttggttaccgccacattgattgtgctcaaatctatggcaatgagaaggagattggctctttgttgaagaatctgtttgagganggtgtagtgaagcgcgaggatttgtggattacatctaaactctggaatactgatcatgctccagaagatgtaccactggcactggaccggaccttgaaagatttgcagctggattat

SEQ ID NO: 241411 - DNA, 410 bp, Glycine max
  unsure (1)..(410): unsure at all n locations
gggcggtgcgaaagcaaagttagttgagagagaggagctgaggagaatcaatcgagagaaatatgtctggtatcgctcgtggacgccttgctgaggaacgaaagtcatggcgcaaaaaccatccacacggtttcgttgccaagcccgagactctacctgatggcaccgtaaatttgatggtctggcattgcactattcctggcaagaccgggactgattgggagggtggatatttcccactgacaaggcacttcagtgaagattaccctagcaagcctcccaagtgcaaattccctcaaggtttctttcaccctaatgtgtatccatctggaactgtntgcttgtctatacttaatgaagatagtgggtggagaacaagctatacagtgaagcanattcttgtgggcatc

SEQ ID NO: 241412 - DNA, 421 bp, Glycine max
ggctgacaagccaatcctttgtgtaggtgctcaaccctagtaagccgcaatggtgaagtactcaagggagcctgacaatccaactaagtcttgcaaggctagaggcgccgaccttagggttcattttaagaacacaagggaaactgcctttgcaatcaggaagttgcccttggtcaaggctaaaaggtacttggaagatgttcttgcccacaagcaggcaattccattcagacgtttttgtcgaggtgttggaaggacagcccaggctaagaatagacactctaatggccaaggacggtggcctgtcaagtcagcaaaattcattcttgatttgctcaaaaatgctgagagcaatgctgaagtgaaaggtttggatgttgatgcactgtacatttcgcatatccaagtcaatcaagcacag

SEQ ID NO: 241413 - DNA, 412 bp, Glycine max
gctcactcaaaattaaccacaagcataagcacaagcacaagcacaagcacttctctaattccctttcacactctattacagatttcacaagtgcttacacttcaaatggctttggaagctcttcaatcacccaccacagccactccatcgtttagtccctttgaagaaaccagtctcagttacttagagacaccgtggacgaaaggaaagcgttctaagcgtagccgcacggagcaacaactgcaacacccttcatgcaccgaggaagagtacctcgctctttgtctcatcatgctcgctcgcggcggcgccggcagtgtctccaccgccaaacccgctgtctccgacaacaattctgcgccgctatccgccgccaaactgagctacaaatgttcggtttgcaacaaagcct

SEQ ID NO: 241414 - DNA, 343 bp, Glycine max
gacacacagtggtgttgaattttcctcagagagaagagagagagaggatgtggaaactcgtgcgatacgccgccgcctccaacctcgcccgatcgcggcggttctccgccgcgattcccggtccgtgcattgttcacaagcgcggtgccgacatactccacgatccctggttcaacaaggatactgggtttcctttgactgaaagggacagattggggcttcggggcctcttacctcctcgtgttatatcctttgagcagcaatatgatcgctttatgaattcattccgatctttggagaataatactcaggggcaaccagataaagtcgtttccctggccaa

SEQ ID NO: 241415 - DNA, 337 bp, Glycine max
gcaactaagtagagaataaaatcaaatcaggagagcatgcatatgaacatgatgatgaagaaggtgtgtgggtttgcaatagtgatggtggcagtgcagcttctggtggaggtgagtcccaaggcagaggctgtgacttgtacccctgtggagctgagtccttgtttgggggcaataacttcctctcaaccatcatcaacaatttgttgccagaaggtgagggaacaaaggcaatgcctctgtggttacctcaaaaacccaagtctaaggccatatgccaattctcctggctccagaagggttgctagctcttgtggggttccctttccaacttgtt

SEQ ID NO: 241416 - DNA, 398 bp, Glycine max
  unsure (1)..(398): unsure at all n locations
ggaaaggaagaaacataccgaatgagagcatcaaactctttttcttcgatttccattgcgaagcgttactttttcttcttctttctcttcattttcttcgctcttcgatcttcgtccggggactgctccgaataccaccaccaccactcgccgatggccacgatcggaggcttacacgactcccaaggctctcaaaacagcgtcgaaaccgaagccctcgctcgattcgccgtagacgaacacaacaagaagcagaattcgcttctggagtttgctanggtggttagggcacaggaacaggttgttgctggtaccctgcatcaccttactcttgaggctattgaggctggtgagaagaagctctatgaagccaaggtgtgggtgaaaccatggctgaa

SEQ ID NO: 241417 - DNA, 327 bp, Glycine max
ggaaaggaagaaacataccgaatgagagcatcaaactctttttcttcgatttccattgccaagcgttactttttcttcgtctttctcttcattttcttcgctcttcgatcgtcgtccggggactgctccgaataccaccaccagcactcgccgatggccaccatctgaggcttacacgactcccaaggctctcaaaacagcgtggaaaccgaagccctcgctcgattcgccgtacacgaacagcacacgaagcagaattcgcttctggagtttgctacggtggttagggcacaggaataggttgttgctggtactctgcatcagctt

SEQ ID NO: 241418 - DNA, 411 bp, Glycine max
ggggcgaggtagccagagagtgatacaatacagagtgcgttgttgctccttcgccacaactccctgccaacatgggtatctccagagattctatgcacaagaggcgtgccactggtggcaagaagaaggcatggaggaagaagagaaagtatgagcttggtcgccagcctgctaacactaagctgtcaagcaacaagacagtcaggaggatccgggttagaggtggaaatgtgaagtggagggcactgagattggatactggaaattactcctggggaagtgaagctgtaactcgcaagactcgtatactagatgtggtttacaatgcctcaaacaacgagcttgtgcgtactcagactcctgtaaaaagtgctattgttcaggttgatgctgctccattcaaacagtggt

SEQ ID NO: 241419 - DNA, 395 bp, Glycine max
gaaaaaagagtaaggattccagatcgatgaaattgttcaaagtttccattgcgaattttgtaaaggaggttttgaaaccatcatggcggcaaggtaatatgagtaaggtggctttcaaaaccattgtgaaaaagactgtggataaagtgtcaggagccatgaaaggccaccgtgtacccaagtcccaagtgaagataagtcaatatattgattcatcacagcgaaagttgactaaacttgtgatgggttatgttgacaagtatgtcaaggtatgaaagtgaagtatgcaaatgtttctccaacattaaatgtcaatataggtgcatcatttcaacaggaaacgtcaatgcttacttctctggagttgtctcctctcagttgaaggcgtactacgt

SEQ ID NO: 241420 - DNA, 340 bp, Glycine max
gactcctccctctctctaactttcacacgcagcgaggtagcgtcttcttcttccgtttctctgcatcggtgtgaacaatggctacatacgctgcgatgaagcccacaaagcccgggttggaggagtcccaagaacagatccacaagataaggatcaccctttcctccaagcacgtcaaaaacctcgagaaggtttgtgcggatttggttcgcggtgcaacggataagagactcagggtgaagggacctgttaggatgcccactaaggttcttcacatcactaccaggaaatcaccctgtggtgaaggtaccaacacatgggacagatttgaacttaaggt

SEQ ID NO: 241421 - DNA, 317 bp, Glycine max
ggaaatagagtgcgcagagagcattgtaataataccacattaccacttccaccctcaccttgctgtgcctctccctatggcggccataacccgactcgtaaagcgcacctcccccctctcttccgtggcgcgtgggttctcatctcacgcgcctccgtgcaaggaggagaggaatgtccagtgggtgttcctgggttgccctggcgtcggaaaaggcacctatgccagccgcctctgcaacctcctcggcgtccctcacatcgccactggcgatcttgtccgccacgagctcgcctccaacgggcccctttcctccc

SEQ ID NO: 241422 - DNA, 383 bp, Glycine max
gaatctagtggaagagtgaataagagatatcaatatattatgataatggagggatacaataagaaggttatgattgtggggatggtgttgggcatggccatgattgggatggccaatggccaatactcgttttgtcgcatgcccagcgatgggttggcggcatgcaagccgagtgtgagtggggactatcctgctgatccctccactgcttgttgctcagccattgccaaggctgatcttaaatgcttctgccgcttcaaggattcgggccttctctctatgtatggtgttgatcccaacaagtgcatggaactccctgttaagtgcaacgttgtcgactccttccactggcaaaatccaataaagggggcactaatcaatat

SEQ ID NO: 241423 - DNA, 304 bp, Glycine max
gaccgcacagaattagggttttccaattcacagagcaacacaacgaaccaacaatggcgcagcctcagccgcagtcgcagccgcagcacgggcaagcagcgctggagcaggtgcagtgcttcggtcgcaagaagaccgccgtggccgtgacctactgcaagcgcgggcgcggtctcatcaagatcaacggctgccccattgagctcgtggagccggagatcctccgcttcaaggccttcgagcctatcctcctgttgggtaagagccgcttcgccggcgtcgacatgcgcatccgcgttaaggg

SEQ ID NO: 241424 - DNA, 227 bp, Glycine max
  unsure (1)..(227): unsure at all n locations
gctaaaagtacttggaagatgttctgccacaagangcaattcattcagacgttttgtcangtgttggangacagcccaggctaagaatagacactctaatggccaangacngtggcctgtcaagtcagcaaaattcattcttgattttctcaaaaatgctgagagcaatgctgaagtgaaaggtttggatgttgatgcactgtacatttcgcatatccaagtcaatc

SEQ ID NO: 241425 - DNA, 415 bp, Glycine max
  unsure (1)..(415): unsure at all n locations
ggagtgagcaagagtgaagagcgaagagaatggctcccaagggtttaatctttttggctgtgttatgcttctcagcactgtcactgagtcgttgtcttgcggaggataatggacttgttatgaacttctacaaggaatcatgccctcaggctgaagacatcatcaaagaacaagtcaagcttctctacaagcgccacaagaacactgctttctcctggctcagaaacatcttccatgactgtgctgttcagagttgtgatgcttcactgttgctggactccacaagaaggagcttgtctgagaaggaaacagatagaagctttgggttgagaaatttcaggtacattgagaccatcaaagaagctttggaaagggaaatgccangagttgtttcctgtgctgatatcctcgttct

SEQ ID NO: 241426 - DNA, 350 bp, Glycine max
  unsure (1)..(350): unsure at all n locations
caagctccagaagcgtcttctcagaagaaaatgggaagagggaagattgaaatcaaacggatcgagaacaccaccaataggcaagtcaccttctgcaagcgccgcaacggtttgctgaaaaaagcttatgaattatcagttctgtgtgatgctgaagttgcccttgttgtcttctcaacccgtggccgtttgtatgagtatgccaacaacagtgttagggccactattgagaggtacaagaaggcaaatgctgctgcttcaaacgcagaatccgtatctgaagctaacacacagttttaccagcaagagtcatccanattgagaagacaaattcgagatattcagaatct

SEQ ID NO: 241427 - DNA, 406 bp, Glycine max
gagaagcatggtaacttcaccaccagccatgcccaccaagggtcgtgttctcatcatcggagcaacaggtttcataggcaaatttgtggccgaggaaagcctcatctcagcacaccccacttatttgcttgttcggccaggacctcttaacccttccaaggatgccattgttaaaaacttccaagacaaaggtgccattgtcattcacggtgtgataaataacaaggactttgtggaaaagattttgaaagagtatgaaatagacattgtcatttctgctattggggccaagagcttgctggatcagcttatacttgttgaggccatgaaatcggttaagactattaagaggtttttgccttcagagtttgggcatgatgtgtacaaagcagattctgtggagcca

SEQ ID NO: 241428 - DNA, 428 bp, Glycine max
cccacgcgtccgcccacgcgtccgctcctcgaggcggcggcatggaaagcattgccgcgcagctgaagcgcggcatctcgcggcagttctcgtcggggtcgctgcggaggaacctctcgtggcagttcacgcgccaggcctcgctggatcctcgccggaacaaccagcgcttcagcttcggccgccagtcctcgctcgatccgattcgccgcagcccctgctccggcaacgccgagctcaccgtgccggagaacctggactccaccatgcagctcctcttcatggcctgccgcggcgacgtcaagggagttgaggatttgctcaacgaaggcatcgacgtcaacagcatcgacctcgacggccgcaccgccctccacgtcgccgcctgcgaaggccacgtcgaagtcgccaggctacttctcagccgc

SEQ ID NO: 241429 - DNA, 409 bp, Glycine max
  unsure (1)..(409): unsure at all n locations
gggtgacaaagttagaaacaaggagaaagaaagaagatggcaggaaagaaaatcccagatgtgttgctgaattcaggacacaaaatgccagttataggcatgggaacttcagtggaggatcgtccatcaaatgagacccttgcttctatctatgttgaagccattgaggtgggttaccgtcattttgacactgctgcagtgtatggaacagaggaagccataggcctagccgtggccaaagccatagacaaaggccttataaagagtagagatgaagttttcatcacttcaaagccttggaacacagatgcacaccgtgaccttattgtcccagctcttaagnacacattaaagaagctggggacggagtatgtggatctttatctgattcattggccagtgaggctga

SEQ ID NO: 241430 - DNA, 403 bp, Glycine max
  unsure (1)..(403): unsure at all n locations
gaacaacaaagatcaccaacactttgctggtgccattctttctgacctctcttccaaaaacacttcctccacccaccttaaaaaaacagaggacagccatgagtcgcagaaacgaaagtggtccaaagcttgacttgaagctgaacctgtccccaccgagggctgatcggagactggattcgccgacacgatcggcgacggcgtctccgacgtcaccgccgagctcgtgcgtgtcttcggagctgaaccaagaggacaagagttactctaacagccctgaagccacttccatggttcttgtgggttgccctcgctgcctcatgtatgtgatgctctctgaggatgatccanagtgccccaaatgcaaaagcaccgttttgcttgatttcctcaatgacacaaa

SEQ ID NO: 241431 - DNA, 336 bp, Glycine max
gatgtgatagaacgctcaaacgggaatgtatattttagtgttgttagtacaaaatttgatcttcaagattggtatttggatgtgttagaggcaagacctcgtggacaagttctcaagtacaatcccacatcaaatgagactgttattgttcttgataatgttgcatttgccaacggcgttgcactctctaaggacgaagattatcttgtggtttgtgaaacttggaaatacaggtgtttgaggcattggttagaaggagcaaacaaaggcacaacagatattttcattgaaaaccttcctggtgcacctgataatatcaatcttgctcccgatgga

SEQ ID NO: 241432 - DNA, 330 bp, Glycine max
gcagacaccaaaactaaaatgaggttcagattcctttaccccatcagatcttcgagactttgccaaatctcaggctgattacgtattgggcaagaatcctatgcatatgagttttctggtgggctatggagataaataccctcaatttgtgcatcataggggtgcttcaattcctgctgatgcaaaaactggctgcaaggatggcttccagtggcttgagtcatctgatcctaatcccaatgtagctactggagcacttgttggtggacccttcttaaatgagactttcattgattccaggaacaattccatgcaaacagaaccaagcac

SEQ ID NO: 241433 - DNA, 549 bp, Glycine max
  unsure (1)..(549): unsure at all n locations
acgcggcaggtaccggtgaggaattcccgggaatcgacccacgcgctcaagttacgggggctgcgaaaagaaaagacgnaaacaganaggggggnggttgaaatcaagcaancaacaatttcaaccctggaagcctttttttggtgaagggaattccaanaagcaattggctttcccctttgcaagcaatccaactggctggcggccttcccttgggcaatgttcagaaaatgccttggaaacccaatcaacctcagtggtgccacaaagccagctccatctgcctctagccctgcctccttcaagactgtggctcttttctccaaaaagaaggctgcacctccaaaaaaagctgcagctgctgctcctgccaatgatgagcttgccaagtggtatggtcctgacagaaggatcttcttgcctgaaggtctcttggaccgatctgagattccagagtacttgaccggagaagtccccggagactatggttatgacccatttggtcttagcaagaagccagaagatttttcaaatatcaggcatttgaat

SEQ ID NO: 241434 - DNA, 395 bp, Glycine max
gggcaatggcaatggcaatggcacttggcaggctttcatcttccttcaacaagcctttacgtcctctcttcaatgctggctcagtttactacaagtcctctttgcctgctgaagctgcgtacgacaatgagaaaagctgtgatacggaattgaatgctccacttgaggttgttgatcctgagattgctgatataattgagcttgaaaaagctggacaatggaagggactggaactgataccctccgagaatttcacttctgtctctgtaatgcaagctattggctctatcattactaacactcggaatgaaggatatcccggtgcaagatattatgggggaaatgagtatattgacatggcagaaacactatgtcaaaaacgtgccttggaagca

SEQ ID NO: 241435 - DNA, 401 bp, Glycine max
gactaaagagcagctgcagacaaacaagctggtgagatccatggaagatataggtccgaattcatgcacaaggccagtgacagagaagaaagcaagaccccaagaacaattgaattgtccaaggtgcagttcaaccaacacaaagttctgttattacaacaactacagcctcacacagccaagatacttctgcaagacttgtagaaggtattggacagaaggagggtctctgagaaacgttcccgttggaggtggctctaggaaaaacaagagggtcacctcatcaaaggttcctgacttgaatccaccaattagcctctcatcagtctcagccatttcttcccaaaaccctaaaatgcaaggagtccaatgacttaatccggcttttcctgcagctatgg

SEQ ID NO: 241436 - DNA, 363 bp, Glycine max
gatcatttgtaagagaagggaaaagcgggaaaagagaaaaaacagagggttttgtttctcttttgcagttgcactcttgcgttgcaggcaggggcatctgtttcccgttctgctccgagcgatcaagtgagtgagtgagtgagtgtcatatatatatacatagtgcgttcgagaaatgcagcagcacctgatgcagatgcagcccatgatggctgcctactaccccaacaacgtcaccactgatcacattcaacagtacctggatgagaacaagtccttgattctgaagattgttgaaagccagaattctggcaagctgagcgagtgtgcccgagaacaatcaaggctgcagagaaatctcat

SEQ ID NO: 241437 - DNA, 410 bp, Glycine max
  unsure (1)..(410): unsure at all n locations
ggggcgaggtagccagagagtgatacaatacagagtgcgttgttgctccttcgccacaactccctgccaacatgggtatctccagagattctatgcacaagaggcgtgccactggtggcaagaagaaggcatggaggaagaagagaaagtatgagcttggtcgccagcctgctaacactaagctgtcaagcaacaagacagtcaggaggatccgggttagaggtggaaatgtgaagtggagggcactgagattggatactggaaattactcctggggaagtgaagctgtaactcgcaagactcgtatactagatgtggtttacaatgcctcaaacaacgagcttgtgcgtactcagactcttgtaaaaagtgctattgttcaggttgatgctgctccattcanacagtgg

SEQ ID NO: 241438 - DNA, 341 bp, Glycine max
gaaaaagtgttggaagagagaaggaaggccttccaagcactcaagactgaagagagaaaggtggacactaaagagtttgaatccatgcaggccttatcaagcaagaaagacaatcatgacatattcattaaactgggatctgataaagataagcgaaaagaggcttttgagaaggaagaaaaatccaagaagtctgtgagcatcaccgagtttctgaagcctgctgagggggaagcatactataacccaggacgtggtaagggccgtggccgtggttcacgaagcggaggcggttaccatggaagtgccaccaacaatgcacctgctccatccattgaaga

SEQ ID NO: 241439 - DNA, 347 bp, Glycine max
acatggtggctcaggtgttgggggccataagtggggtggggcttgtgaaggctttgcagaagagctactacaacaggtacaaaggtggcgtgaacatgctcgctgatggttacagcaaaggaaccggtttgggcgctgagattattggcacctttattcttgtctacaccgtcttctctgctaccgatcccaagagagtagcaagagactcccatgttcccgtgttggcaccacttccaattgggtttgcggtgttcatggttcacttggccaccatccctatcaccggcactggcatcaacccagctagaagccttgggcctgctgtcatattcaacaacgaaaaa

SEQ ID NO: 241440 - DNA, 327 bp, Glycine max
gctagccctcttctttctttctctctctctctctctctctctctgaagatggcttcacgcaggctcgtatcttctctgattcgatcctcccttcgtagatctcaatcgaagccctcaatttccgcatcgacatcgaggctcacgtcatccaaccgtgcctcaccgcacggatacttgctgaaccgcgtcgccgagtacgccaccgccgcggctgctgctaccactcctccctctcctcctcctccggggaagaaggagctcggcggcggcgggaagatcaccgatgaattcaccgggaagggcgcgatcgggcaggtctgccaagtc

SEQ ID NO: 241441 - DNA, 321 bp, Glycine max
gctagtggaagagtgaataagagatatcaatatattatgataatggagggatacaataagaaggttatgattgtggggatggtgttgggcatggccatgattgggatggccaatggccaatactcgttttgtcgcatgcccagcgatgggttggcggcatgcaagccgagtgtgagtggggactatcctgctgatccctccactgcttgttgctcagccattgccaaggctgatcttaaatgcttctgccgcttcaaggattcgggccttctctctatgtatggtgttgatcccaacaagtgcatggaactccctgttaag

SEQ ID NO: 241442 - DNA, 372 bp, Glycine max
  unsure (1)..(372): unsure at all n locations
gacagaacaatactgcaatagagaaagaggcagatagaaaaaaagagcgacttttgagttcaaaagatgactaacttcccattgatcaacttggagaagctcagtggtgaggaaagaaacgataccatggaaaaaattaaagatgcttgtgaaaactggggattctttgagctggtgaatcatggcattcctcatgacatattggacactgtggagaggttgaccaaagagcactacaggaaatgcatggaagagaggttcaaagaattagtggcaagcaaaggtctagatgctgtccaaactgaggtcaaggatatggactgggagagcancttccacttgcgtcnactccctgaatcaaacatctcagag

SEQ ID NO: 241443 - DNA, 410 bp, Glycine max
  unsure (1)..(410): unsure at all n locations
gacacttgattagctgaggaggaagagagaaaaaccatggcaataacactcaacaatggcttcaagatgcctatcattggattgggcgtgtggcgcatggaaggaaacgaaatcagggacctaattctcaattccatcaaaattggttatcgccattttgattgtgctgctgactacaaaaacgaagcagaagttggagatgcgcttaaggaggcttttgataggggccttgtgaagagagaggatctcttcattaccaccaagctttggaattctgatcaaggccacgttcttgaggcgtgtaaagacagtctcaagaagcttcagttaacgtatctagatttatatcttgttcactttcctgttgccgtaaggcatactngggttggtaatacttctagtcctttggg

SEQ ID NO: 241444 - DNA, 391 bp, Glycine max
gaccgcacagaattagggttttccaattcacagagcaacacaacgaaccaacaatggcgcagcctcagccgcagtcccaaccgcagcaagggcaagcaacgctggaacaaggggaattcctccggccccagaagaacgccgttggcgttaactaacggaagccccggccccggcccaaccagaataacggctgccccattgagctcgtggagccggagatcctccgcttcaaagccttcgagcctatcctcctgttgggtaagagccgcttcgccggcgtcgacatgcgcatccgcgtcaagggtggcggccacacctcccagatctacgccatccgccagagcatcgccaaggcgctcgtcgcgttctaccagaagtatgtccacgaaca

SEQ ID NO: 241445 - DNA, 323 bp, Glycine max
ggaggagactgagaaaacagaagaaaacaaaatggaagacacagtttctgcgttgaggtctttgatggtttctcactctccgccgctggatgccttagtggtgccctctgaagattatcacctgagcgaatatgtgtctgcacgagacaagcgccgcgaattcgtttccggcttcactggaagtgccggcttggcacttataacaaagaaagaagcactgctgtggacggatggacggtattttttgcaggctgagaaagaacttagtgctgggtggaagctaatgcgaattggtgaagatcctgctgtagatatctggatgg

SEQ ID NO: 241446 - DNA, 349 bp, Glycine max
caagagtgttgagaagaaagaccccaccggagccaaggtcaccaaggccgctgccaagaagaagtgattgcatttgggcaattttgctagcacatgtgatcatcatcgtggttactcctttatagtagttttatccttgcagagtcttaggtgttttgtttaagttatatttttaagtttctgccgatttcatgtagccgtaactttcaaaactaggttcttgatcggcggtggtcaattttcattgctgtttgtttttgatgagtactgttttttgttttgatggtaagaagagtctgagatatttcgaatttcacaagcagctatagggttttagtccatttccttt

SEQ ID NO: 241447 - DNA, 325 bp, Glycine max
ggacacggatttgcatcagattattaagtcttctcaagctttgtctaatgatcactgccagtatttcctccttcagttgctccgtggcttgaaatatcttcactcagctaacatccttcatcgtgacttgaaacctgggaatcttctaattaatgcaaattgtgacctaaaaatatgcgattttgggttagcacgtactaactgcagcaagaaccagttcatgaccgagtatgttgtcactcggtggtatagggcaccagagctcctactctgctgtgacaactatgggacatctattgatgtttggtcagttggatgcatcttt

SEQ ID NO: 241448 - DNA, 394 bp, Glycine max
  unsure (1)..(394): unsure at all n locations
gttcgctgtctcgtcaatcgccgcgggaattcaattcgggtgggccctacagctctctcttctgacaccgtacgtccagaccctcggcgtccctcacgcatgggcgtcgttcatttggctctgcggcccaatctctgggctgcttgtgcagcccattgtagggtacagcagcgaccgatgcagatcccgctttggtcgccgccgtcccttcatcttcgtcggagccatcgccgtcgcaattgctgtgttcctcatcggctatgcagccgatataggacacgcggcgggtgatgacctcacgaagaagacccgtccacgcgcggtggtggtttttgtggtcggcttctggattctggacgtggccaacaacttgctccagggtcnatgccgcgcc

SEQ ID NO: 241449 - DNA, 352 bp, Glycine max
ggtggtgatgggtgggtgagtccgaattgtgaaagtaagcaaagatggctttcacggaatcgtctctcctccttccttcggtttcaggaaccaagatgaacaagaacaatgttccagaagacaaatggtatttagcctacattgtgtattttaccctgggtctcggttaccttctcccatggaacgctttcatcaccgccgttgattacttctcctttctctaccctgacgccagcgttgaccgcatcttcgccgtggtttacatgatattcaggctggtggggatctccctcataatcctctacagccacaaatctgacgcctatgtgaggatcaacgttggattgggcct

SEQ ID NO: 241450 - DNA, 399 bp, Glycine max
gatcgcatttcatagcactcaccctcattaccaacacgaaagcatagccaaaaccttttttcgaagtctctgattttcctaatggctccggcaaaggcagagaagaagccggcggagaagaagccagcggcggagaaggcaccggcggggaagaagccgaaggcggagaagaagatctcgaaggaaggagggagcgagaagaagaagaagcgcacgaagaagagcgtggagacctacaagatctacatcttcaaggtcctcaagcaggttcaccccgacattggtatttccagcaaggccatgggcatcatgaacagcttcatcaacgacatcttcgagaagctcgcccaggaagcgtcgcgtttggctcgctacaacaagaagccaccatcacctcga

SEQ ID NO: 241451 - DNA, 307 bp, Glycine max
ggaagatattacggtttttgagtgcggtgcggcgatcctagcactctcttctgcagctttcgccgacagcttcattcaccatggctgagcaaaccgagaaggcttttttgaaacaaccaaaagtgtttctcagctcgaagaaaactgggaagggaaagagacccggaaagggtgggaaccgcttttggaaatccattgggcttggatttaagactcccagggaagccatcgaaggaacctacattgacaagaagtgccccttcactggcaatgtttccatccgtggccgtatcttggctggaacatg

SEQ ID NO: 241452 - DNA, 364 bp, Glycine max
ggtagggtttcgagttacagccgcaccttgattcagagcagagcgaccttgaagagctatggctgtcggaaagaataagaggatttccaagggaaagaagggtggcaagaagaaagccgctgatccctttgccaagaaggactggtacgatatcaaggccccttccgtctttcaggtcaagaatgttggcaaaaccctcgtctctcgtacccagggaaccaagattgcttctgaaggactcaaacatagagtgtttgaggtctcattggctgatctccaaggagatgaagaccatgccttcaagaagattcgtttgagagctgaggatgttcaagggaaaaatgttctgacaaacttttgggga

SEQ ID NO: 241453 - DNA, 330 bp, Glycine max
ggagctagataaggtcacatatatgaacaacatgttcggtcaatatcctttgttttcactggcttctctagccacattccttgtcttaacccacgccgccaccgcgccggagaatcctcctcctccgctcacagccgcggcgagggagttcttggaggcgcacaaccaggcaagagccgaagtgggcgtggaagcactcagctggagcgagaagctggggaacgtgtcgagtctgatggtccgttaccagcggaacaagaaggggtgcgagttcgcgaacttaacggcgagcaggtacggcgggaaccagctgtgggcacgggtgacgga

SEQ ID NO: 241454 - DNA, 400 bp, Glycine max
  unsure (1)..(400): unsure at all n locations
gggacagctcacagtgacagcaaattgcttatcttgttttgtttttcttttcctccttgctttccccttcaatagcaatggcctctgcaacagaagccattaataaattgttgttcatattcctctttcttcaacaatattccttattaataatggcggatgattcagtttcagttccagttccagctgattggccgcaacagttccactcggttctgttcataaaccgaagcggcgatctccagaaaacggacttgtggtacgactggcccaacggtcgcaacttcaacatcattcaacaccagttgggtgtgctcaaatacgacctcgaatgggacaatggaacctccttttactacaccctcgaacccttcgacaaaacctgcanaatcgtccattt

SEQ ID NO: 241455 - DNA, 406 bp, Glycine max
cttcccaaaaagtccacaaaaatactggtagcaggaagtcatgctaacaatttgggttatcaatgtggaggatggacaattacctggcaggggcttggtggcaatgatctcacttcaggtacaaccatccttgatgctgtgaaacaaaccgttgatcctgccactgaagttgtcttcaatgaaaatcctgataagaactttgtcaagtcatacaaatttgactatgccattgttgttgtgggagaacacacttatgccgaaacatttggtgacagtttgaatctgactatggctgatcctggtccaagtaccatcaccaatgtgtgtggggctattcgatgcctagttgttcttgtcactggccgcccagttgtgattaagccatatctacccaaaatcgatgcac

SEQ ID NO: 241456 - DNA, 407 bp, Glycine max
ggcacttcaattgcaatcaaattagttcattctctttgcgcagttccctacctctcctttcaagatgcagatcttcgtcaagaccctcaccggaaagaccatcacccttgaggtggaaagctctgacaccatcgacaacgtcaaggccaagatccaggacaaggaaggaattcccccggatcagcaacgtctcatcttcgccggaaagcagctcgaggacggccgtaccctcgccgactacaacatccagaaggagtcaacccttcaccttgtccttcgtctccgtggtggcatgcagatcttcgtcaagactctcactggcaaaaccataaccctagacgtcgacagctctgacaccattgacaacgtcaagggcaagattcaggacaacgagggaatccccccag

SEQ ID NO: 241457 - DNA, 362 bp, Glycine max
  unsure (1)..(362): unsure at all n locations
ggcggcaatagagagtagagagtaaacagaaaatctgaggcgcgagtggctggtgaaggcagcgactgcgagggaagggaagcatctttagctccaaatccaatggcggatacctcaagccgatcaagagacctcgacaagctccttctccgccctggcaatctcgtcggtcctaggttcgaacctggccctgagttgcgagatgaccttcaggccttcgccaattcttgttcagacttgaagatgtttggcaaaccaaagccgaggtagctgccaagcgtgtcatggagagaattagtggtgtgggaatcgtgcggcacttttgcaggatcgaggacanggaaattgaattttacaacaat

SEQ ID NO: 241458 - DNA, 344 bp, Glycine max
gacaccaaacgagccatttgggagttaggttctgcacgctctgcttccagcgagtgttctttcttcgtttcaacaccttaatttgcacacgctgcttcttcagcttgagaaatggcacaagaaacctttctattcacatctgaatctgtaaacgagggtcaccccgacaagctgtgcgaccagatctctgatgcagtgctcgatgcgtgccttgaacaggaccctgacagcaaggttgcctgtgagacatgcaccaagaccaacatggtcatggtctttggagagatcacaaccaaggccaacgtagactatgagaagattgtccgtgacacatgccgcgaaat

SEQ ID NO: 241459 - DNA, 183 bp, Glycine max
gctgagcaaaaccctaatccctatttttcttcctcagtagtgtcatttacgcttctcttctctgcagcaactatgcctaaccctaaggtcttcttcgacatgacgatcggcggtcaatctgctggccgcatcgtgatggaggctctacgccgacttcactccccgcaccgccgagaacttccg

SEQ ID NO: 241460 - DNA, 318 bp, Glycine max
ggaagcgcgagcaagcatcccaaaaccctagctcgcgttctgctttcgtcttttacatcaggatggagtctcaggtgaagcacgcacttgttgtcaaagttatgggtcgtactggatccagaggacaagtaacccaggttagagtgaaatttttggatgatcagaaccgtcacatcatgaggaatgtgaaaggacctgtgcgagaaggagacattctcaccctactcgagtctgaaagggaagcaagaagattgcgctagatggtttcttttggcttgcctccaaattcgaacaaaacagtgtgattttgttgaattt

SEQ ID NO: 241461 - DNA, 344 bp, Glycine max
gagaacagaacagaacagaactggtggttgcattgaatcggaggggtaagtgggaagacgtgtcttgttttgtagctttcccttccctctctcttttccccgccgcatgtgccggattagacgcgaactgcttccataattcacctcctccaatcaaccatcacaagatttcccactgattggatggaagaagcatgtgaatttcgaagttgggctgaattgattcctgatgccctgggggtaatcttcaccaatctttctcttcaggagagggtaacagtgatccccagggtgtgcaaatcatgggctaatgcagtaactggaccttactgctggcaagagat

SEQ ID NO: 241462 - DNA, 393 bp, Glycine max
ggcgtacacagcctcaacaaccctaacgcgtgcagagcagagagagacgcagccatggggcgaagacccgcgaggtgttataggcaaattaagaacaaaccataccccaagtcacggttttgccgtggtgttcctgatcccaagatcaggatttacgatgttggtatgaagaagaagggtgttgatgagtttcctttctgtgtccatctggttagttgggagaaggaaaacgtttctagtgaggccctggaagctgctcgtattgcttgcaacaagtacatggccaaatttgctggaaaggatgccttccacttgaaagtcaaggttgaaccaattcacagtcctaaggatcaacaagatgctttcgtgtgctggagctgataggctccaaac

SEQ ID NO: 241463 - DNA, 304 bp, Glycine max
ggccaacgccaacgccaattccattcagatcacagtcccttcaattcctgctgcagcatactgtgtgcaacaaagccctaaaatggaggggactgtcttcactcctgcactgcaagaaattgagcatgtaaagtctgatcaaggagaaattctgagcaagcctttcttggatgcgtgcaagcacatattgcctgtaatagataagtttggagctgctatggcccttgttaaatctgacataggtggtaacatatcgagattgggaactatgtattcttccaatccatccagatttaactacctg

SEQ ID NO: 241464 - DNA, 285 bp, Glycine max
  unsure (1)..(285): unsure at all n locations
ggcacaagtttgttgagatagctagaagcaataagatgaaaatgaaagtgcttgttttgtttgttgctacagttttggtagcatatgaatgccatggctcagactaccagaagttccctctccaaatgaaaactgggtttggtgggcaatacagcaatgacgtggcatgtgccagttggaggcttggcgtggaagcagacaacgtaatcaagtggcaaactgttcctgcagcttgcggagagtacatagctgactacgttctangagaacaatatagatcagatt

SEQ ID NO: 241465 - DNA, 323 bp, Glycine max
ggcagcgcttgatttgaggccaggcaagccccactcaaccaccacacctctcctcgttcacgctacccctttctgctcttcttctacctttcaagttttaaaagtataaagatggcagagacattcctatttacctcagagtcggtgaacgagggacaccctgacaagctctgcgaccaaatctccgatgctgtcctcgacgcttgcctcgagcaggacccagacagcaaagttgcctgcgaaacatgcaccaaaaccaacttggtcatggtcttcggagaaatcacgaccaaggccaacgttgactacgagaagatagtgcg

SEQ ID NO: 241466 - DNA, 313 bp, Glycine max
ggttcacaagtttcgtttccaggtttcggcgcaatcggcttctgcttcaaggaaggagagcttgttattctctatcaacaagtaaaatgtcaggtgaagagggtgtcattgcagttgagccagctgctgctgctgctgccatcccaggcgagccaatggatatcatgactgccttacaacttgtgctcagaaaatctctggcttatggtggtttgtcgcgtggccttcatgaaggtgcaaaagtgattgagaagcatgctgcacaactctgtgttcttgcagaagactgtgaccagcctgactatgttaaact

SEQ ID NO: 241467 - DNA, 327 bp, Glycine max
gattattatcatagtagatattcattccccttatctttctctcttctctctccccgcccaaaccctaactccctaccctattccgctttctctcatccatcatgaaaggaggaaagtccaagaccgaatctaagagagccgatgccaaacttgctgtgaataagaagggcgccgccaccaagactagggaacccgccggaaaggggaacgcagcgaaagatcctaacaggccaaagaggcctccaagtgctttcttcgttttcatggaggaattcaggaaggtgttcaagaaggaagatcccgacaagaaagcagtgtctgctgtgg

SEQ ID NO: 241468 - DNA, 139 bp, Glycine max
ggagagagagagaggcacttgggatccaaaaatgagagagatcatcagcattcacataggtcaggccgggatccaggttggcaactcctgctgggaactctactgcctggaacatgggatccagcccgatggcatgatg

SEQ ID NO: 241469 - DNA, 341 bp, Glycine max
ggaggaagaagggcggcggccctaagaagaagccggtttcaaggtccgtcaaggccggtctccaattccccgtcggaagaattggccgttatttgaagaaaggaaggtacgcccagcgtgtcggtaccggtgctcccgtttacttggccgcagttctcgagtacctagctgctgaggtgcttgagttggctgggaatgctgcacgtgacaacaagaagaacaggattattccgagacatgtgctattggctgtgaggaacgatgaggagttggggaaattgcttgctggtgtcaccattgcacatggtggtgtgcttccaaacattaaccctgttttgttg

SEQ ID NO: 241470 - DNA, 322 bp, Glycine max
gaatttaatgtggtgataggaagttcgaggcagtgattatttgtcagagtcagatgtagttcaagcatgccaaaggtcattggatgagaggcagagtttgaatgtgtggcggttccttgaagcaattaatgggagatatgacataagtgaaggattgagaaaattacagtgtcgttcactaatttttgttggggatatgtctcctttccacgctgaggctcttcatatgacgtccaagttggatagacgactcagtgccctagtcgaggttcaagcgtgtggatcaatggtaacagaggagcaacctcatgccatgttaata

SEQ ID NO: 241471 - DNA, 306 bp, Glycine max
ggacaaccccaacacttccgaaccttgcattgtatctacccacttctcaaccaacaatggcaatggcaacccaagcctctctcttcaccccacccctctccggtctcaaacccagcgaccgagccaccgcgccatggaaacaatcctccaccctctccttctccacctcgaagcccctcaagttctcgcgaacaatcagagcagcagccaccgaccagaccacagaggcaccggttgggttcaccccaccggaactggagccaaacaccccttccccgattctccgaggcagaaccgggggggctc

SEQ ID NO: 241472 - DNA, 259 bp, Glycine max
aggggttcccttgcgttggaaatattagtcacaggcttcactttacaggatgggacttctcactacatgaaaggccttgttctcctgctgtgctacattgttattggggcatgcttcttcgtacaaataacatcctgttactaatcatcctgatgttactaatatcacacttaaactatgctctagaccaatttgaaccgcttaattagtaggctttggcctatttgttgtcccttcctaacatgaagactggtgccat

SEQ ID NO: 241473 - DNA, 267 bp, Glycine max
ggtattggagttaagcagtcaacaagaatacttgaggctgaaagcacgttatgaagctctacaacgttctcaaaggaaccttatgggagaagatcttggccctctaagcagcagagagcttgaatcacttgaaaggcagctagattcgtctttgaagcaaatcagatcaatagggacccaagtcatgctggatcagctttctgatctacaacgtaaggaacactttctaggtgagtcaaacagagatctcagagcaaggttggaaga

SEQ ID NO: 241474 - DNA, 384 bp, Glycine max
  unsure (1)..(384): unsure at all n locations
cttgcaattcagcatattcttccttgtgtgaaggaattgtcatcagattcttcacagcatgtccggtctgctttggcttcagtaataatgggaatggctccagtgttgggaaaggaagcaacaattgagcagcttcttcctattttcctttcccttttgaaggatgaatttcctgacgtacgcctaaacattatcagcaagcttgatcaagtgaatcaggttataggaatcgatctgttatctcagtctttgttaccagccattgttgagcttgctgaggatangcattggagggtccggcttgcaattatagaatatatacccctaatgggaaatccatttgggggctaggttttttgatgacaagcttggtgccctttgcat

SEQ ID NO: 241475 - DNA, 388 bp, Glycine max
caccgtcattggccacaaaaaacagaccggaccatgtgacggcgttggccttctcggcatcgcatgggccttcggtggcatgatctttgtcctcgtctactgcaccgccggcatttctggtggacacatcaaccctgcggtgacttttggcctgttcctggcccgcaaggtgtctctcattcgtgccctgttctacatggtagcgcagtgtttgggtgctatctgcggtgtcgggttggtgaaggccttcatgaagcactcctacaactccctcggcggcggtgctaactccgtcagcgctggctacaacaaaggcagtgctccgggtgcggagattaaccggaacttcctccctgtgtcaacacggttttctcggctaccgacccca

SEQ ID NO: 241476 - DNA, 274 bp, Glycine max
ggtagctgaggatattattactcagcaaaaattcatggaagttccaatcaagtatccggcaaaactcacccttagggtggttcttacttgtatcatggcggccaccggtgggttgatttttggctatgaccatggtgtttcaggtggagtgacctccatggattccttcctgaagaagttcttcccagctgtatatgagaaggagtctaacgtgaagccttcttcaagccagtactgcaaattcaacagtcagatactgacactgtttacatct

SEQ ID NO: 241477 - DNA, 304 bp, Glycine max
ggttcccttgcgttggcaataatagtcacaggcttcactttacaggatgggacttctcactacatgaaaggccttgttctcctgctgtgctacattgttattggggcatgcttcttcgtacaaagaacaccctttaataatcaagctgatgttactaacatcacacttaaaccaaccactaatgcagttttaagcgcttaattagtatgctttggcctatttgttgtcgcttcctaagatgaagaatggtggcatcgatccaaaccaaaaatcagattcaaattcaatggattgattattgttt

SEQ ID NO: 241478 - DNA, 291 bp, Glycine max
  unsure (1)..(291): unsure at all n locations
ggagtgagcaagagtgaagagcgaagagaatggctcccaagggtttaatctttttggctgtgttatgcttctcagcactgtcactgagtcgttgtcttgcngaggataatggacttgttatgaacttctacaaggaatcatgccctcaggctgaagacatcatcaaagaacaagtcaagcttctctacaagcgccacaagaacactgcgttctcctggctcagaaacatcttccatgactggtgctgttcagagttgtgatgcttcactgttgctggactccacaagaagg

SEQ ID NO: 241479 - DNA, 277 bp, Glycine max
gacccaaaaccaacctactccaaggaagtccccgaatcagaaccagagatgggcaccaaacccaccgagatcagcagcggcaagatgttcggaggttacaacaagagattcaagcatttcagccttaccctgggatgctccatgaacttccacatctacttccctcgatctccttctccctctcacaaagtcccggtgctgtgctttcgctctggcctcacttgcaccgacgagaacgtcaggttcaagtcgggtgctcagcgtggggcttccgccg

SEQ ID NO: 241480 - DNA, 274 bp, Glycine max
gaatttatggcaagcaaaggtctagatgctgtccaaactaaggtcaaggacatggattgggagagcaccttccacgtgcgtcacctccctgaatcaaacatctcagagatccctgatctcattgatgagtacaggaaggtgatgaacgattttgctttgaggttagagaaactagcagagcagctgttggacttgttgtgtgagaatcttggcctagagaaagggtacctcaagaaggcgttctatggatcaagaggaccaacttttggcacca

SEQ ID NO: 241481 - DNA, 303 bp, Glycine max
ggattgagagtgggtatggcactcagactcagaggaaaatgggttttgattccattcttttggttctgcctgattccgttttgcttctcacaacagaagctgcgcttgcgctttggaaaaaatggagagttcaagatcttgcaaattgctgacttgcactttgccaatgggaagactacccactgcttggatgtgcttccttctcagtatgcttcttgctctgacctcaacaccaccgccttcatccaaaggatcatcctttctgagaaacctaaccttattgtcttcactggagataatata

SEQ ID NO: 241482 - DNA, 318 bp, Glycine max
gagcgaaacagagagtgatttcagtgagtgatcggtgttcacttgatctcatcataatcgtcagcgtcaattgaagaagatgccgatcagaaacatcgccgtcggaaggcctgaagaggcgactcaccccgacacgttgaaggcggctttggctgagttcatctcaaccttcatcttcgtgttcgccggctcaggctccggcatcgcctacaacaagctcaccgacaacggcgctgccacccctgccggcctcatctccgcctccatcgcccaagcattcgccctcgtcgtcgccgttcccgttgggcgccaaaatcc

SEQ ID NO: 241483 - DNA, 306 bp, Glycine max
gcaacaaaacaaccatcatcatggccacctctgctattcagcaatcagcattcgcaggtcaaactgctctgaagcagctcaatgagttggtccgcaagaccggtggcgccggcaaaggtcgcaccaacatgcgccgtaccgtcaagagtgctcctcagagcatttggtatggccctgatcgtcccaagtacctgggtccattctcagagcagattccgtcatacctgaccggagaattccccggtgactacggatgggacactgctggactatcagctgacccggaaaccttcgccaggaaccggg

SEQ ID NO: 241484 - DNA, 302 bp, Glycine max
ggaagtgatgggagattagcattgggcaaaattggagctctctgtgagcagcttagagaacttagcagtcaagggtatgaagtcatattggtaacttcaggtgctgttggtcttggcaggcaaaggcttagataccgcagattggccaatagcagcttttctgatcttcaaaagccacagggagagcgtgatggaagagcatgcacagctgttgggcagagtagtctcagggcgctgtatgataccatgttcagccagcttgatgtgacgtcttcggaacttcttgtgaatgatgggttttt

SEQ ID NO: 241485 - DNA, 202 bp, Glycine max
ggtagttccaccgagtagcaacaatgtcgaagcgaggtcgcggaggatcggcgggaaacaagttccgcatgtcgctgggtctgccggtggcggcgacggtcaactgcgccgacaacagcggcgcgaagaacctctagggcatagcagtgaaggggatcgagggtaggctgaacggggtgccgtcagcttgcgtcggagacat

SEQ ID NO: 241486 - DNA, 248 bp, Glycine max
gagataggtttgtgatagtgattgccgccctctgctgccgtccctaatctgaaggctcgcgccatctgcgatcggatttcatggctccaggcaaggacaaggctcccccaccttcatccaggcctgccaagtctggcggtggcaagcagaagaagaagaggtggagcaagggtgagcatgacgaaggcgtgaataacatggtgctcttcgatcagggtacctatgacaggccccgcgctgaggcaccc

SEQ ID NO: 241487 - DNA, 288 bp, Glycine max
ggagtgagagaagagagagaatatttctgttcgtgcagatagatagatagatggctcggagctccacaagaatgaaatgggtctccatcttcacacttctattcctctcccactcgcccctcacaaccttcgcagaagatgggctagtggcgaatggagattttgaggttagcccatcaggtgggttccctaacgaggcgattgtggagggccccagcgaggtcccagactggaagtcaaacggcaacgttgagctagtggaatcggggcaaaaacagggtgggatga

SEQ ID NO: 241488 - DNA, 307 bp, Glycine max
ggaacggaaaagcactggcgcagctaccctgaggcttctcttctcttctcttctctgtcgtgagtcaccatggtgagggttagtgtgctgaacgatgctctgaagagcatgtacaatgctgagaaaaggggaaagcgccaggtcatgattaggccatcctccagagtcattatcaaattccttttggtgatgcaaaagcacggatacatcggagagtttgagtatgttgatgaccacaggggtggtaaaatcgtggttgaattgggcggtagactgaacaagtgtggggttattagtccccgttttg

SEQ ID NO: 241489 - DNA, 268 bp, Glycine max
ggagacggtgacgctgttgctggtgaacctggcggggataatggagacggccgacgagtcgctgcttccgggagtgtacaacgaagttggcacggcgctccacaccgagcccaccggtttgggttacctcactctcttccgatccatcgtacagtcctcctgggagcccgtcgccgcgtagctcgccgtgcgccacaaccgcgcccacgtcaacgccgtcggggccttcctctgggccgccgccaccttcctcgtcgcgttctcctcc

SEQ ID NO: 241490 - DNA, 365 bp, Glycine max
ggagcgagctagataaggtcacatatatgaacaacatgttcggtcaatatcctttgttttcactggcttctctagccacattccttgtcttaacccacgccgccaccgcgccggagaatcctcctcctccgctcacagccgcggcgagggagttcttggaggcgcacaaccaggcaagagccgaagtgggcgtggaagcactcagctggagcgagaagctggggaacgtgtcgagtctgatggtccgttaccagcggaacaagaaggggtgcgagttcgcgaacttaacggcgagcatgtacggcgggaaacagctgtgggcaagggttaacggagttgcccccccccttgttgttggaggattg

SEQ ID NO: 241491 - DNA, 400 bp, Glycine max
gagtgagagagagagaaggcaagatgtcgaagagaggacgcggtggttcggcggggaacaagttccggatgtcgctgggtctgccggtggcggcgacggtgaactgcgccgacaatacgggggcgaagaacctctacatcatatcggtgaaagggatcaaagggcgtttgaaccgtctcccctcggcttgcgttggcgacatggtgatggccaccgtgaagaaggggaaacccgatctgaggaagaaggttttgccagctgtcattgttcgccagcgcaagccatggcgccgaaaggacggcgtctacatgtatttcgaagaatatggctggtgttaatggtcatccccaaaggagaaatgaaaggttctgctatcactggtcccattggaaaagagtgt

SEQ ID NO: 241492 - DNA, 291 bp, Glycine max
atgctttcatagtgtttgacaagtccacttctagcctttttgtggcttctgatcaagctggcaaggttcctctctattggggaatcacagctgatggttacgtagcatttgctgatgatgcagatttgcttaaaggttcttgtgggaagtcgcttgcttctttcgctcaaggatgtttctacgctagagcagttgggggattgagatgctatgagaatccagagaatgggattactgcagtccctgctgaggaggaggagatctggggtgcatttttcaagggggaaagga

SEQ ID NO: 241493 - DNA, 307 bp, Glycine max
gagcatccaaaatggcgcattcttctgttatagtcttcctctgcactctccttctcttcttttctccgtcaattcgtgcctccgacgatgacgtggcgctgcacgcgaagaagctcatcagagacctcaacttgttccccgacgctgacgtcaacatcgttcccgttgctaattgcaccctccaagcgcgcaggatcgtcgagaagcgcctgaggttcccgaagctgctagcttcggattccgagccttcggttgaggatttgggtcaccacgctggggattgacccatttaggattcacatgcggc

SEQ ID NO: 241494 - DNA, 289 bp, Glycine max
ggtatcagtgaattgaatctaacgagcatcgaagctcacgaattgaattgaattgagtttctttgtctccagagatgaagaagggcgtccatccacagaagcaatggatatcctacgttacacaaacggggtaggttgatgcatgtgatgatgacaaacatacaccctgttgggaaagtttaccacttccgagctaagcgccaaatggccgagagtttaggacagattgctaagttcagacatcgctttgggctagaaaatccagagggcaatgaaaaatgacgtgtcc

SEQ ID NO: 241495 - DNA, 311 bp, Glycine max
ggcatacaatacatacatcagtgccgtcgtttcggtgaataagtgtcgtttaaagatgcacagtctgcaacagaacgcttccgaatggagcggtgtttccatagacgacgctttcggcatcgacgacaccaatctcttccagaaactcggcctccataccttcattaacctctccaccaatttctacaacagggtttacgatgacgaggaagaatggtttcgttcaatattcgcgaattctgagaacgagaatgccattcaataccaatacgagttcttcgtgcagcgaatgggtggtcctcctcactttt

SEQ ID NO: 241496 - DNA, 309 bp, Glycine max
ggagagagagagagagaatctttcgaagttcgtttgcgtgtgttgtgtggtcagtcaccgatggcagcaccacctgcgagggcacgtgccgattacgattacctcatcaagcttcttcttattggcgatagcggtgtgggaaagagttgtctgcttttgcgattttctgatggttccttcacaaccagttttatcaccaccattggcattgattttaagataagaaccattgaacttgatggcaaacgcattaagttacaaatctgggatacagctggtcaggagcgatttcgaactattaccacagct

SEQ ID NO: 241497 - DNA, 310 bp, Glycine max
ggaagcaaactaacttgagctgagaaatgtccgaaaacggagaagagaaattactcgctgtggcgcggcacatagccaaaacgctgggccacaacaacaccatgtctgatgacatattccaaatactatcgaacttcgatggaagattctcgagagagaatctttctgagaagggcgcagatgtggatcccagaggctgcgccgcactggatcattccctcaaatccctagaccgccggatctctccctacgtctcctccgaccgcacaatctgggccgacgccgccgattctgctgccttcctcgacgc

SEQ ID NO: 241498 - DNA, 404 bp, Glycine max
gacggcactcgttttcgttctcgttctggtttatagatctttgcgaaggaggtttacagcgctcaaccaaagatgcagaacgaggaaggacagatcactgagctttacattcctaggaagtgctccgccacaaacagattgattactgctaaggaccatgcttcggttcagatcaacattgggcatgtggatgagaatggcgtctacaatggccatttctccacttttgccctctgcggattcatccgtgctcagggtgatgctgacagtgctctagaccgcttgtggcagaagaagaaagttgaagtttagcaacaattgacaaccacagaaaagttggttacttcgttatgtattaatttctactcttgctagagatatttgagtactatgattgtcgtttt

SEQ ID NO: 241499 - DNA, 399 bp, Glycine max
ggagcaagagtgaagagcgaagagaatggctcccaagggtttaatctttttggctgtgttatgcttctcagcactgtcactgagtcgttgtcttgcggaggataatggacttgttatgaacttctacaaggaatcatgccctcaggctgaagacatcatcaaagaacaagtcaagcttctctacaagcgccacaagaacactgctttctcctggctcagaaacatcttccatgactgtgctgttcagagttgtgatgcttcactgttgctggactccacaagaaggagcttgtctgagaaggaaacagatagaagctttgggtgtagaaaattccaggtaaattgagaccatcaaagaatctttggaaagggaatgcccaggagttgtttcctgtgctg

SEQ ID NO: 241500 - DNA, 395 bp, Glycine max
ggcacaagtttgttgagatagctagaagcaataagatgaaaatgaaagtgcttgttttgtttgttgctacagttttggtagcatatgaatgccatggctcagactaccagaagttccctctccaaatgaaaactgggtttggtgggcaatacagcaatgaggtggcatgtgccagttggaggcttggcgtggaagcaaacaacgtagtcaagtggcaaactgttcctgcagcttgcggagagtacatagctgactacgttctaggagaccaatatagatcagattccaaaacagttaaccaacaagcctaattccaagccaaattccctcaaactcaccaacaaagatgtctttgtcttggacgttgacgacactactctctctaatctccagta

SEQ ID NO: 241501 - DNA, 390 bp, Glycine max
  unsure (1)..(390): unsure at all n locations
ggtgtgattgtttgttgttgtaactcgttcttcttcttttgttgttctgtgtttgtgtttgttttttctctcacctgaaaatgtcttgctgcggtggtaactgtggttgcggaagctcctgcaagtgcggcaacggctgcggaggctgcaagatgtacccagacttgagctacactgagtcaaccaccaccgagaccttggtcatgggagtggcacctgttaaggctcaatttgagggtgctgaaatgggtgtgcccgctgagaacgatggctgcaaatgtggaccaaactgctcctgcaacccctgcacttgcaagttaagtgtttggaaaacaaagcttcagccagagatagcccttaattangaataatgataaactattaatgtgt

SEQ ID NO: 241502 - DNA, 379 bp, Glycine max
ggaggaaagaaggaatagtgagtgatgttaaagatcaaggcagctgcggatcatgctggacattcagcacaactggggctttagaagcagcctatgcacaagcatttgggaagagtatctctctttctgagcagcagctagtggattgtgctggccgtttcaacaactttggctgtaatggtgggttgccatcacaagcctttgagtacatcaaatacaatggaggacttgagacagaggaagcatacccctacactggaaaagatggtgtatgcaaattctcagctgaaaatgttgccgttcaagtcattgactcggtcaatatcaccttgggtgctgagaatgaattaaaacatgcaattgccattggttcggccgg

SEQ ID NO: 241503 - DNA, 319 bp, Glycine max
gggcatatatagcagtactatacaacggacagagcgagcgagctagataaggtcacatatatgaacaacatgttcggtcaatatcctttgttttcactggcttctctagccacattccttgtcttaacccacgccgccaccgcgccggagaatcctcctcctccgctcacagccgcggcgagggagttcttggaggcgcacaaccaggcaagagccgaagtgggcgtggaagcactcagctggagcgagaagctggggaacgtgtcgagtctgatggtccgttaccagcggaacaagaaggggtgcgagttcgcgaact

SEQ ID NO: 241504 - DNA, 403 bp, Glycine max
gatagcgaagtttcatttctttggattagaaatttttcccaaagctgatcgagaagccagccaggccaggagttgaagaatgggaagggggaagatcgaaatcaaaagaatcgagaacacaacaaatcggcaagtgaccttctgcaagagaagaaatgggcttctgaagaaagcttatgagctgtcagtgctgtgtgatgctgaagtttccctcatcgtcttctccagccgtggccgtctctatgagtattccaacaacaacataagatcaaccatagagaggtacaaaaaagcctgttcggatcattcaagtgcgaacactaacacaggaattccatgcccaattataccaacaagaatctgctaagctgcgacagcaaatacagatgctgcaaaattctaa

SEQ ID NO: 241505 - DNA, 400 bp, Glycine max
ggcagcgcttgatttgaggccaggcaagccccactcaaccaccacacctctcctcgttcacgctacccctttctgctcttcttctacctttcaagttttaaaagtataaagatggcagagacattcctatttacctcagagtcggtgaacgagggacaccctgacgagctctgcgaccaaatctccgatgctgtcctcgacgcttgcctcgagcaggacccagacagcaaagttgcctgcgaaacatgcaccaaaaccaacttggtcatggtcttcggagaaatcacgaccaaggccaacgttgactacgagaagataatgggttgaaaccggcaggaacatcggtttcgtctcaaatgatgtgggactggatgccgacaactgcaaggtcctcgtcaac

SEQ ID NO: 241506 - DNA, 399 bp, Glycine max
  unsure (1)..(399): unsure at all n locations
ggcagttcaaagcgaagaaagattcgaaacgaagaaagaaagcgttgtgaagaatggcggaagagggacaagtgatcggtgtccacagcgtagaggagtggaaggaacatctcaagaagggagaagagtccaagaaattgattgtggtggattttactgcttcttggtgcggtccatgccgtttcattggcccaattcttgcagagtttgctaaaaagttgccgaatgtcaccttcctcaaggtggatgtggatgaattggagactgtttccaaggagtggggaattgaggctatgccaancttcccggttcctaaaagaagggaaacctggtggacaaggttgtgggtgccaagaaagaggagctgcaattgacaatagccaaacatgccgcaattgc

SEQ ID NO: 241507 - DNA, 332 bp, Glycine max
ggcaagagtgaagagcgaagagaatggctcccaagggtttaatctctttggctgtgttatgcttctcagcactgtcactgagtcgttgtcttgcggaggataatggacttgttatgaacttctacaaggaaccatgccctcaggctgaagacatcatcaaagaacaagtcaagcttctctacaagcgccacaagaacactgctttctcctggctcagaaacatcttccatgactgtgctgttcagagttgtgatgcttcactgttgctggactccacaagaaggagcttgtctgagaaggaaacagatagaagctttgggttgagaaatttc

SEQ ID NO: 241508 - DNA, 427 bp, Glycine max
acgcccacgcctacataaggatgcaagaagatcacacacagagatgtcactcacacccgtgaataatcctctattaacattccacagtcaagttctagggttccgaaatggaatcaggaggggagatcaaggtaggcacgggaggtacaaagggcagaagcccatttcagagtccggtttcaacgtccgtcaaatccggtctcgaattcctcgtcgtaagaagtggacgtgaatgtaagaacagaatgtacgcacagcttctccgtaacagtgcgctcgtatacttgactgcagatctcgaatagcgatctacttaggtgcgagagttggatgtgaatgccgcacgtgacagcattaatcacaaggattatcctaggacacttacttatggcaatgaggaacgaaaatgacttgcggaaattgcatg

SEQ ID NO: 241509 - DNA, 352 bp, Glycine max
aacccagagcgtgctatagattacttgtattctggaatccctgaagcagcagaagttgctgtgccagttcctcaaacagctgggatttcttctggagcagttcctgtaggacctaattcatctcccttaaatatgtttccacaggagacgatttctagcactggtgctggacttggatcgctagacttccttagaaataacccccagtttcaagcattgcgttcaatggtgcaatccaatccacaaattctacagcctgtgcttcaggaacttggtaagcagaatcctggtcttttaagactgattcaagagcatcatgaggagtttctgcagttgataaatgaacctgttg

SEQ ID NO: 241510 - DNA, 346 bp, Glycine max
ggtgagagagcgagcgagcgagcagtttcaaagagaggatttgggattgggaaggcgagggattgcgctgcgtctcttcctcttctctttcgattcatccctcattcataatcttccaatccaacaacctcagcctcacactcacacatacacacatctgaacgcgtatcgtccctcccatggcttcaaagcgcatcctcaaggagctcaaggacttgcagaaagacccaccaacttcttgcagcgctggtccagtagctgaggacatgttccattggcaagcaacgattatgggtcctgctgatagtccttatgctggaggtgtattcctaatcactaatcaatt

SEQ ID NO: 241511 - DNA, 353 bp, Glycine max
ggtggtcgtgtttgttcaataatgctacaaaattcctccatgtcttccctcctcctccaccggatcaacggtggcggtggtgcaaccacggccaccaactgtcacgacaccgtctttatgacggtgccggatggcgtagcgcgctaccacacccacgcggtagcgccgaaccagtgctgctcctcggtagcgcaagagatcggggcctcggtcgccaccgtgtggtcagtgttgcgccgcttcgacaacccgcaggcctacaagcaacttttaagaacctgcaatttcatccgcggggacggcgacgtcggcacgctccgggaggttcacgtcatctccggcctgcccgctgc

SEQ ID NO: 241512 - DNA, 301 bp, Glycine max
  unsure (1)..(301): unsure at all n locations
ggggaagctctgggtatctggacatatacccagagaggaaagtctctgcctttcanaacccttacattatgggcttcactgctgtcgctagcattggtggattgctctttggctacgacactggtgttatatctggagcccttctctatatcaaagatgattttccggaggtcaggcacagtaattttctccaggaaacaattgtcagcatggcagtggctggtgcaattgttggggcagcagcaggtggttggattaatgacgtttatgggagaaagaaggcaaccctcattgcagatgt

SEQ ID NO: 241513 - DNA, 400 bp, Glycine max
gacagagagaggggtttgggattggagggattgacgctgcgtctcttcctcttctctttcgatccatccctcattcctaatcctccaatccaaccacctcagcctcacactcacatatacacatatctgaacgcgtatcgtccctcctatggcttcaaagcgcatcctcaaggagctcaaggacttgcagaaagacccaccaacttcttgcagcgctggtccagtagctgaggacatgttccattggcaagcaacaataatgggtcctgctgatagtccttatgctggaggtgtattcctagtcactattcacttccctccggattaacctttcaaggctcccaaaggttgcctttaggactaaggtgtttcacccgaacatcaatagcaatggtagcat

SEQ ID NO: 241514 - DNA, 402 bp, Glycine max
gagcctcagcagaagcagaacgaggagaagcagaaggagcaaaagcaatggcgccgaagaagccgagaaccacgacaaggaaccctgatttggttagggggattggcaagtattcgaggtcgcagatgtaccacaagaggggcatctgggccatcaaggccaaaaacggtggcgttttgccccgccacgatcccaagcccaagcccgaggccccggcccagaagccgcccaagttctaccccgcggacgatgttaagaagcccctcgtcaacaagcacaagcccaaacccgcgaaactcaaggctagcattactccaaggaatgtgttgattccggcttgctgggaggttcaggggaaagagggttgttttcctgaagcagctcccatctggattgcttctt

SEQ ID NO: 241515 - DNA, 368 bp, Glycine max
ggaaccgaaacgaacctcaacaacgctgagcgcagaaaggggaaaaggggattagggtttaggaagcagcgacaacaatggatttcacagtggagaagaaggaatcagagaacaacgccgaaaatgctcacccaacaacgttagattcttcttctcaattggcatcggcacttgattccaacaacaaagaaatcgaagaacgacaagctcgtgaactcaaagccggacttcaccccctaaagcacaagtttgtcttctggtacactcgtcgaacacctggagttcgaaatcaaacatcatatgaggacaacataaagaaaattgttgaattttgtaacggttgaaggattttgggtctgctactgcca

SEQ ID NO: 241516 - DNA, 337 bp, Glycine max
gattcttccaaacgtggagaatctcttgaccctgaagtgtaccctcgtcccacaggggaggtgtatatatgtgggatgtcgaaggaggaagaggtgccggatgatccagaggagataagaggaaaccctgaatcgattgcgatgcttaagaaagtgacgaagacggtgtcgagctatcttggggaaggagtggcacgtatgaaggcagagcaagcgtgtttcttgccgtgcacggatgatggggtacctgtcataggagaggttccaggggtgaaggggtgttatgtggcaacggggcataactgttggggtattctcaatggtcctgccactggtg

SEQ ID NO: 241517 - DNA, 348 bp, Glycine max
ggcattctattcattcaggattcagcaagtgcgttttggaagcagagaccgaaatacctcgagatggcccgtacaaagcaaactgctcgtaagtcaactggaggaaaagctcccaggaagcagcttgcaaccaaggctgcatgtaagtctgcaccaacaactggtggtgtgaagaagcctcaacgttatcgccctggaactgttgctcttcgtgagattaggaaataccagaagagcactgagctcctaatcaggaagcttcctttccagaggttggttcgtgaaattgcccaggatttcaagactgatctgcgtttccagagccatgctgtgcctgcattgcaagaa

SEQ ID NO: 241518 - DNA, 333 bp, Glycine max
gaccgcacagaattagggttttccaattcacagagcaacacaacgaaccaacaatggcgcagcctcagccgcagtcgcagccgcagcacgggcaagcagcgctggagcaggtgcagtgcttcggtcgcaagaagaccgccgtggccgtgacctactgcaagcgcgggcgcggtctcatcaagatcaacggctgccccattgagctcgtggagccggagatcctccgcttcaaggccttcgagcctatcctcctgttgggtaagagccgcttcgccggcgtcgacatgcgcatccgcgtcaagggtggcggccacacctcccagatctacgcca

SEQ ID NO: 241519 - DNA, 388 bp, Glycine max
gagtggaagagtgaataagagatatcaatatattatgataatggagggatacaataagaaggttatgattgtggggatggtgttgggcatggccatgattgggatggccaatggccaatactcgttttgtcgcatgcccagcgatgggttggcggcatgcaagccgagtgtgagtggggactatcctgctgatccctccactgcttgttgctcagccattgccaaggctgatcttaaatgcttctgccgcttcaaggattcgggccttctctctatgtatggtgttgatcccaacaagtgcatggaactcccctgttaaattccagggttgtcaatccttttcactgctagattcattagagggggcactaatcaatataaactacac

SEQ ID NO: 241520 - DNA, 406 bp, Glycine max
ggaaccactaaacgatgatcccaaacgttcaaatccctacctgggacgcggacggaggaggagcactctccccgtcgatctcttccaatgctgacacgtgctcattattctcctccgaccatttccgaatgttccagttcaaggtgcggaactgtccacgtggcaggtcccacgactggaccgagtgtccctacgcccaccccgccgagaaggctcgccgccgtgacccccgcaagtaccactactcaggcacctcctgccccgattaccggaaggggaactgcaagaggggcgacacgtgtcagttcgcgcaaggggtcctccaatgcgtggttcaacccttctcgctaccggacccagctctgcaaagacggaacaaattgccgccgcagagtgtgcttcttcg

SEQ ID NO: 241521 - DNA, 397 bp, Glycine max
ggatccaaagtcgcatcttttgcttcactctacgcagatcgcagcaaaccagagattgaactccgacgatgcctcccgtcgctcctcgatccggcgatgccatattcgccaacgtcgaacgcgtcaatgcggagctgtttactttgacgtatggcgcaattgtgcgtcaattgctcacggatctggaagaggttgaggaggttaacgagcagcttgatcaaatgggttacaatattggaatccgattgattgatgagtttttagctaagtctaatgtctcaagatgcaacgatttcagagagactactggtgttattgcgaaaggtgggttttaaaaggttccttggggttacggcatctgtgaccaattgggatgctgatggaacatgttgtagta

SEQ ID NO: 241522 - DNA, 313 bp, Glycine max
gtctcacatttttacagaacctcgttgtggacagacctattagttatgaggaggttgaggttgagacacgtctcattagactttgtcaggaggtgttggagttctatattgaagttgcaggttctggaacagtatctgaatcttctcatggtaaacagctgcattggttaattcctcttggctcggggaagcgaagagaattggctgcacgtgcaccgcttgttgtgaccactcttcaagctatttgtaatttgggagagatatctttcgagaagaacctggctcattttttccctctcctctcaagcttgat

SEQ ID NO: 241523 - DNA, 398 bp, Glycine max
gacgtcgagcaccatatcctcccctccaagctcttcctgaaaattcccatctcctgctcttgcgtcgacggcattcgcaaatccgtcgctactcactacaagacccgcccctccgacaccctctcctccatcgccgacgccgtctacgccggcctcgtctcctccgaccagctccgcgaggccaattccatctccgacccttcggttctcgatgtcggacagaacctcgtcgttcctcttccttgcacgtgcttcaacggctccgataactctctccccgcgatttacctctcttatgttgttcgccccgttgataccctcgctggcaatggcggcaaggtactctacaaccctcactgatttgatgaatgttaatgccatgggaagcactgctatta

SEQ ID NO: 241524 - DNA, 395 bp, Glycine max
ggagaagaagaagaagaagaagatggagaagtatcagatctggagcaggagaatagcgttggcagcgtttgcgtttgctctgctgttccaatcggcctcagcagacgacgtcgttgtgctctctgaagataacttcgagaaggaagttggtcaggacagaggagctctcgttgagttctatgctccttggtgtggacactgcaaaaagcttgctccagaatatgaaaagcttggtagcagcttcaagaaagccaaatctgttttaattggcaaggttgactgtgatgagcataagagtttgtgcagcaagtttggaatctccgggttacaaacaattcagtggtttccaaaaggatctcttgaagccaaaaagtatgaagggccacgcactgctg

SEQ ID NO: 241525 - DNA, 308 bp, Glycine max
ggagctgcacacaaggagcgttctggatttgagggtccctggacctctaatcctcttattttcgacaactcatacttcacggagttgttgagtggtgagaaggaaggtctccttcagctaccttctgacaaggctcttttgtctgaccctgtattccgccctctcgttgataaatatgcagcggacgaagatgccttctttgctgattacgctgaggctcaccaaaagctttccgagcttgggtttgctgatgcctaagcaacgtttaggggattgttgaagaggcatggtgcccataatatttctct

SEQ ID NO: 241526 - DNA, 363 bp, Glycine max
cagaatgctgacattcctatgtctgatgccgtttcggatgaatttgcatttggaagcaacgtgttggggcttgtcaagccttgggaaggagaaaggatccatgaggaatttggatcagatgatcttgaactcacacttgatgaagtcacaaatatgaattgaatgtgataatgtaaacattgacttttgttggttttgatcagtagatatgttagaaggtaagtgaggtggtgagtgcaggcagttgttttcttttatccttttatttatttttattttggtgactttcccttttcattctatagttctccagtaatatacatgcttatttagatgtggagtggatttgcaacccattcaatt

SEQ ID NO: 241527 - DNA, 432 bp, Glycine max
agcggacgcgtgggcggctccaaaaaaacaacagaagggggacatcataggcacccatttggttctaatcctcaaaatcagcttcagcctttctctctaactccctcactcacactcacagttaagcaatggcggggaaaggaggaaaggggcttcttgcagcgaaaaccaccgcggctaacaaggacaaagacaaggacaagaagagacctatttctcgttcatctcgtgccggaatccagtttcctgtgggacgtatccataggcagctgaaacaaagggtccaagctaatggacgtgttggtgccactgctgccgtatacttagcctcaattcttgagtatcctactgctgaaattccttgaacttgctgggaatgcaagcaaggatctgaaggtgaaaaggataacaccaaggcatttgcagcttgct

SEQ ID NO: 241528 - DNA, 396 bp, Glycine max
gtggtactggattggccaaggggttccaaaaagcatactacaacaggtatggaggtggtgccaactctgttgctgatggctacaacaatggtactgctttgggtgctgagattattggtaccttcgttcttgtctacactgtcttctctgccactgaccctaagaggaacgctagggattcccatgttcctgtactggcgccacttcctattggatttgccgtgttcatggttcacttggctacaatcccaattactggtactggcattaacccagcaaggagtttcggagcagctgtaatctacaacgaagacaaaatctgggaatattaattgaaaatcctgggttggaccaattgttggagcagcagtggctgcattttaccaccaatacatc

SEQ ID NO: 241529 - DNA, 400 bp, Glycine max
ggggcgaggtagccagagagtgatacaatacagagtgcgttgttgctccttcgccacaactccctgccaacatgggtatctccagagattctatgcacaagaggcgtgccactggtggcaagaagaaggcatggaggaagaagagaaagtatgagcttggtcgccagcctgctaacactaagctgtcaagcaacaagacagtcaggaggatccgggttagaggtggaaatgtgaagtggagggcactgagattggatactggaaattactcctggggaagtgaagctgtaactcgcaagactcgtatactagatgtggtttacaatggcttcaaccaccaaccttgtgcgtactcagactcttgtaaaaagtgctattgttcaggttgatgctgctccat

SEQ ID NO: 241530 - DNA, 412 bp, Glycine max
  unsure (1)..(412): unsure at all n locations
aaaaggggaatacccaaaaaaacaatttgggttaaatttgccttcccttttcaaggaacctcattgaaaaaacaaaaaacaatggctgaaacaaagttgagcatgatgaaggacaaaagatggtcactccgtggaatgactgctctcgtcacaggagccacccgaggcatanggcatgccattgttgaagaattggcagactttggagcaactgttcatatatgtgcacgtaatcaagatgatattgataagtgtttagaagagtggaaaaacgagggacttaatgtgactggctcagtatgtgatttacaatgttctgaacaacgtataagataaatggagtttgttggcccatccttcacggaaagctcaacatactagtgaacaatgctggaagatgtatagcaaagac

SEQ ID NO: 241531 - DNA, 401 bp, Glycine max
gctttttctgtgtagttccatcgcatcaaaccctggcaatggcagctacggccatacagaggttcccccaacacaaatacgtagacgcagttcgctggcttcccctacaatccgcattcgaccgattcgcagttttggcactcttcgacttcgattccgatgcttcctccatcgaaatccactctctcaacccaaaccccctctcattggaaccacactcttcgtggtcctctccttcccgcgtttcctccctcaaggcctcgcacttcctccagaagcccctcattgtcgcttccacttcctccggttctctccacttcctcttctccgattcctccgtcgcaacgctcgagtccgaggtctccattcccgagggcgcgctgcattccgttcccgcttct

SEQ ID NO: 241532 - DNA, 399 bp, Glycine max
ggaaaccaaaaggctctctcacgcagtcgcagtgagtgaaaaggaaaaccctaattgcggtattctcagtgccttcgagagaaagaaaaaatggcagataatcttgttctccgtggcaccatgcgcgcccacaccgacgttgtgacggcgattgccactcccatcgacaactccgacatgatcgtcaccgcctcacgcgacaaatccatcatcctctggcatcttaccaaggaggacaagacttacggtgtcccccgccgccgcctcaccggccattctcattttgtccaggacgtcgtcctctcttctgacggccagtttgccctaacccggttcctggaacggcaagctcggcctctgggaccttgctgctggcacctccgctcgccgctttgtggg

SEQ ID NO: 241533 - DNA, 359 bp, Glycine max
ggtagttccaccgagtagcaacaatgtcgaagcgaggtcgcggaggatcggcgggaaacaagttccgcatgtcgctgggtctgccggtggcggcgacggtgaactgcgccgacaacaccggcgcgaagaacctctacatcatatcagtgaaggggatcaagggtaggctgaaccggttgccgtcagcttgcgtcggagacatggttatggccaccgtcaagaaggaaaagcccgatctccgtaagaaggtgctgcccgccgtcatcgtccgccagcgcaagccttggcgccgaaaggacggtgtttacatgtacttcgaagataatgctggtgttatcgtgaatcccaagggtgaaatg

SEQ ID NO: 241534 - DNA, 427 bp, Glycine max
agaattaagaacaagccataccccaagtcacgtttctgccgtggtgttcctgaatccaagatcaggatttatgatgttggtatgaagaagaagggtgttgatgagtttcctttctgtgtccatctggttagttgggagaaggaaaatgtttcaagtgaggccctggaagctgctcgcattgcttgcaacaagtacatggccaaatttgctggaaaggatgctttccacttgagagtcagggtgcacccattccatgttcttaggatcaacaagatgctttcgtgtgctggtgctgataggctccaaactggaatgagaggtgcttttggaaagccacaaggtacttgtggcaaagtgggtaattgggcaggtccttctttctgtcggctgcaaggacagcaacagccatcatgctcaggaggctctt

SEQ ID NO: 241535 - DNA, 427 bp, Glycine max
cccacgcgtccggatagatagaaagcgcggaataacctaaacttacccttcttctctctgtgtgtgtgcgcatcaaacgcaaccagaagcagccatggccactgcaagaactgtgaaggacgtttctcctcatgagttcgtcaaagcttactcttctcacctcaagcgatctggcgagatggagctgccagagtggactgatattgtgaaaactgcaagatttaaggagttggctccttatgatcctgactggtactatgccagagctgcttccatggcaagaaagatctacttgagaggaggacttggtgttggtgcctttcagaagatttatggtgggagcaagaggaatggtaaccgccctcctcaattctgcaagagcagtggtgctgttgctcgtcacattcttcaacagttgcagaacatg

SEQ ID NO: 241536 - DNA, 399 bp, Glycine max
gaatcggagggcgttgaagagttgtgagcataataaattgagaagcaaaagcgaaagggtctgtgtcttcactcattcttctattctattccatcatcaatggagaacaccgagggatccggatctgcgacgaacggggtgctggctccgccgcgcaaggtggcattgataaccggaattaccggacaagacggttcgtacctgacggaattcctcctggacaaggggtacgaggtgcacggcctgatccgccgctcgtcgaacttcaacacgcagcgcatcgaccacatatacgtggatccccacaacgcccacaagggccgcatgaagcttcaactacgccgttctctccgacgcctcctccctccgccgctggctcgacaccatcctccccgacga

SEQ ID NO: 241537 - DNA, 401 bp, Glycine max
gagagaaagagagagaaagatgtcgaagcgtggtcgtggtggttcggcggggaacaagttccgcatgtcgctgggtcttccagtggcggcgacggtgaactgcgccgacaacacgggggcgaagaacctctacatcatttcggtgaaagggatcaaaggccgtttgaaccgtcttccctcggcctgcgttggcgacatggtgatggccaccgtgaagaagggaaaacccgatctgaggaagaaggtcttgccagctgtcatcgttcgccagcgcaagccatggcgccgaaaggacggcgtctacatgtacttcgaagataatgcttgtgttaatggccaatcccaagggaaaaatgaaaggttctgctatcactggtcccattggaaaagagtgtgctgat

SEQ ID NO: 241538 - DNA, 399 bp, Glycine max
tcagtcacattaaaacgattgggcgtgaaagatagtcgaggattggaacagttcaagaatgaaatagagttgctctgccagcttcgccaccctaattgtgtctctcttataggattttgcaaccacaaaaaagagaagattcttgtgtacgagtacatgtctaatggatctctacatcaacacctacgaggtggcctattgtcatggaagaaaaggctagagatttgtatagaagcagcgcatggactacactaccttcacactggagctaaacgcaccatcattcaccgtaacatcaaccctagcaacattcttttggataacaacatgaagtccaaaacttactgatttccgccttagcatacagggaccacgttatgggtcaaagccaaaaccaat

SEQ ID NO: 241539 - DNA, 346 bp, Glycine max
gaaggaaggcattgataatcatagctatggcaacggcgagtgcaagttgtgcggtatcatttagaaacagcttcggtgtgagtaaaccctcggatcttgggttcttgagctctcgtctgaacggcctcagaatctgcttccccaaattgccacccacacccctcactgcttctcccttccccacacccctccctatcgttgccaagagagtgtgtcccttcactggaaagaaatcaaacagggccaacaaagtatcattttcaaaccacaagacaaagaaactgcagtttgtgaaccttcagtacaagagaatttggtgggaagcagggaagcgctacgtaaagct

SEQ ID NO: 241540 - DNA, 398 bp, Glycine max
gaacgtaactcaactgaaaatggatcgagaatggggatcgaagccggggagcggaggtgcggcgtcggcgcagaacgaagccatagaccggcgagagcgtctccggcgactggctctggagaccatagacttggcgaaggatccctatttcatgcgcaaccacctcggaagctacgaatgcaaactctgtctcactctccacaacaacgagggtaactacttggcccacactcagggcaagcgccaccaaaccaacttggccaaacgtgccgctcgcgaggccaacgacgcccccgcccagccccaaccccacaagcgcaaagtcactcttcgaaaaacagtgaagattggacgccctgggtaccgtgtgaccaagcagtatgacccggagacaaaac

SEQ ID NO: 241541 - DNA, 395 bp, Glycine max
gatcaaaacacttctcaatctctctctctccaatggccaaagacctcgaaacggagattcaaagtgggttgcctcacaaggactaccacgacccaccccccgccccattctacgaccccgccgagctccgaaagtggtccttcttccgagccctcatcgccgagttcgtcgccaccctcctcttcctctacgtcaccatcctcaccgtcatcggctacaaccaccagacagccaccgccgccgagccctgcagcggcgtcggcgtcctcggcatcgcttgggcctttggaggcatgatttttgtcctcgtccaatgcaacgccgggatatcaaggggaacacataaacccgggggtgacgttcgggttgtttttggcgaggaaggtgtccctgac

SEQ ID NO: 241542 - DNA, 400 bp, Glycine max
  unsure (1)..(400): unsure at all n locations
agcgcacgcatcagcacacacggggataccaccgatttgcagaaagaaaagaccatcaaagtttcacttcagccttatccggtttagggtttcggtttttgacccaacctttgacgtatcgaaaccttgagtttcggatcaggtctgagcaatctggttggtagaacctttggtcttagagagtcaagttttatgtctgaattagacgatcaaattcctactgccttcgatccttttgctgatgcaaatgctgatggctcgggtgctgggtcaaaagagtatgtgcatattcgcgtacagcagcgaaatggaatgaaaagcctgacaaccgttcacggattgaaaaaangattcagctataacaggatacttacagatgttaagaaagagttctgttgca

SEQ ID NO: 241543 - DNA, 392 bp, Glycine max
ggttctagtgtgtgattgtttgttgttgtaactcgttcttcttcttttgttgttctgtgtttgtgtttgttttttctctcacctgaaaatgtcttgctgcggtggtaactgtggttgcggaagctcctgcaagtgcggcaacggctgcggaggctgcaagatgtacccagacttgagctacactgagtcaaccaccaccgagaccttggtcatgggagtggcacctgttaaggctcaatttgagggtgctgaaatgggtgtgcccgctgagaacgatggctgcaaatgtggaccaaactgctcctgcaacccctgcactttcaaattaagttgttggaaaaccagccttcaggcagagatagcccttaaataggaataatgataaactatta

SEQ ID NO: 241544 - DNA, 404 bp, Glycine max
  unsure (1)..(404): unsure at all n locations
ggaacttcaagggcaaaaaaagttgtgctgtgccgcctcttccgtaggcagcagcaatggcctcaaatcccaaaactttgacctttgaggaggtagctaagcacaacaacaaaaaggattgctggattattatcaatggaaaggtgtatgatatcacaccatttttggatgagcatccaggaggtgatgaagttttgctgacgtcaacagggaaggatgccaccattgattttgaagatgtgggccacagtgattctgctatagaaatgatggaaaaatacttcattgggaaggttgacacttccactcttccacccaaagttagccatagtctgccacaacctacacnaacacatggcgctggcaatcaatcttctggatttgttgtaaagatcttgcaattc

SEQ ID NO: 241545 - DNA, 378 bp, Glycine max
ggagaaagagagagatgggaagagaaaaggagacaacaaaggtagcttacacagtggagcagcttgtagccttcaatccatacaatcccgatattcttccagatctcgaaaactatgtcaacgaccaggtttcgtcgcaaacttacagcctggacgcgaatctctgccttcttcgcctctaccagtttgaaccagagaaaatgagttcccagattgtggcccgcatattggtcaaggctctcatggcaatgccggcgccagatttcagcctttgtctctttttgattccagaacgcgtgcaaatggaggagcatttcaagactttgattgtcctgtctcacaatttggagacaggaagatttcggcagttctgggatg

SEQ ID NO: 241546 - DNA, 373 bp, Glycine max
gggacaaaagacttacttgcccccagcaatcttgagtatccctccaaacccttgtatggctgaagcaaggaaagaagctgagcaagtgatgtttggagccattgaccagcttctggagaaaactggtgtgaaggctaaggatattgggattttggtggtgaattgcagcttgttcaatcccacaccttctctctctgcaatgattgtgaaccactacaagctgagagggaatatccaaagttataatcttggtggcatgggttgcagtgctggacttatctctatagaccttgccaaacagctcctccaggttcatccaaactcttatgccttagtggtgagcatggagaacatcactctcaactggtaattt

SEQ ID NO: 241547 - DNA, 360 bp, Glycine max
acgcacacgcgtccgaaggggggttcaaagcacgccgtgtttcgctgtctctcccatcctttcgcattctcaatacccttttgatttgtgaaaggaaagcaaacatggttgatcaggtccaacaccctacaatcatggacaaggttgctggtcagctccatctccgttctggtctttcatctggtattagaagttatgatggagcctaccgccacccagctatgtaccaaagaccctcttttgggaattactcgaatgctgcattgcagtttcctgtgatgcccacatgcaaagctaccatggatctgtctgctactgcaacatctgcctcacccgtctttgttgctgctccagcagaga

SEQ ID NO: 241548 - DNA, 381 bp, Glycine max
ggataacatgtggtggtgatttgaagatggcagacttaccagggtatcttcgtgcctgtttgaacacagggaagcttgcctccttggcaattttggtgtctggaggaattgtcttgcaaattttggcatgtgccttgtataataactggtggccgatgctgagtgtgttaacgtatgtgcttctgccaatgcctttgctgttctttgcggggtctgatgattctatattttctgaatctgataatagctgggtgaattttactaagttcttgactggagcctcaactgtgggaggtattgccattccaagcatattaaagcatgctggggttatcggttggggagcctttgtaatggaactctcttcctactttgtgtttg

SEQ ID NO: 241549 - DNA, 338 bp, Glycine max; identical to SEQ ID NO: 237649

SEQ ID NO: 241550 - DNA, 345 bp, Glycine max
gagtgccagacgcagtgactaaaccaaacctctcactcgccgtcgtagggtttctcctttcgtttagcaacaacaacaatggttgcagccaagaaaaccaagaagacccatgagagcatcaacaacaggctcgctcttgtcatgaagagtggaaaattcaccctcggttacaagacggttctcaaatcacttaggagctccaaagggaaattgattatcattgctaacaactgcccccctttgaggaaatcagagattgaatactatgctatgttggccaaggttggagttcatcattacaatgggaacaatgtggatttgggcactgcatgtggaaaatattac

SEQ ID NO: 241551 - DNA, 385 bp, Glycine max
ggggtttatatcgcgcatagtgtggtaccagcagcagagcttgtatacgtcgccgcttcagcgtagcaacatgatcattcccgagaagaaccgtaaagagatctgcaaatacctcttccaagagggagtttgctttgcgaagaaggacttcaatctggcgaagcacccggagattgatgtgccgaatctgcaggtgataaagctgatgcagagcttcaaatccagagagtacgtgagggaaacatttgcgtggatgcactattactggttcctcaccaacgatggaattgagttccttaggacttacctcaaccttccatccgaaattgtccctgccactctcaagaaaccaggcaagccccgccgggagaacattcggtggccc

SEQ ID NO: 241552 - DNA, 325 bp, Glycine max
  unsure (1)..(325): unsure at all n locations
ggttctagtgtgtgattgtttgttgttgtaactcgttcttcttcttttgttgttctgtgtttgtgtttgttttttctctcacctgaaaatgtcttgctgcggtggtaactgtggttgcggaagctcctgcaagtgcggcaacggctgcggaggctgcaagatgtacccagacttgagctacactgagtcaaccaccaccgagaccttggtcatgggagtggcacctgttaaggctcaatttgagggtgctgaaatgggtgtgcccgctgagaacgatggctgcaaatgtggaccaaactgctcctgcanaccctgcacttgcaag

SEQ ID NO: 241553 - DNA, 327 bp, Glycine max
ggtggtcgtcgaagcgcgagcaagcatcccaaaaccctagctcgcgttctgctttcgtcttttacatcaggatggagtctcaggtgaagcacgcacttgttgtcaaagttatgggtcgtactggatccagaggacaagtaacccaggttagagtgaaatttttggatgatcagaaccgtcacatcatgaggaatgtgaaaggacctgtgcgagaaggagacattctcaccctactcgagtctgaaagggaagcaagaagattgcgctagatggtttcttttggcttgcctccaaattcgaacaaaacagtgtgattttgttgatttt

SEQ ID NO: 241554 - DNA, 314 bp, Glycine max
gagtagctaatagctatactctctctagagtaattgcggaatcagctagaattttctaataatggccaaagacgttgagcaggttacagagcaaggtgaatactccgcgaaggattaccatgacccacctccggcgccgttgatcgacccagatgagctcactaagtggtccttgtacagagccgccatagctgagttcatagcaacactccttttcctttacatcaccgtgttgaccattattggctacaagagacagagtgacaccaaaatccccggtaacaccgagtgcgaccgcgtttgcattttgggca

SEQ ID NO: 241555 - DNA, 372 bp, Glycine max
gcagtttcaaattttcttttccttcactttcccgagaaaaaaataacacttttcactttcttcactacgttctcacttcgatatggctcgtacgaagcaaaccgctcgcaagtccaccggtggcaaggcgccacgtaagcagctcgccaccaaggccgctcggaagtccgctccggcgaccggaggagtgaagaagccccaccgcttcaggccgggaaccgtggcgctgagggaaatcagaaagtaccagaagagcaccgagcttctcatcaggaagcttccatttcagaggctcgtgagagaaatcccgcaggatttcaagaccgatttgcgtttccagagcagcgccgtttccgcgcttcaggacgctgc

SEQ ID NO: 241556 - DNA, 322 bp, Glycine max
aaggctcctttttgattacaaaaatgtggaagaaaacgggttttgaagaagaagcagttcaattgatcaactcagatttcagggacctaagtctagctgctaatagactcgcccatcatgccatcaaacttggtggcattggctttggagcctcttttttcggattgtttgctgccattgctgctatttatctgttgattttggatcgtacaaactggaaaacaaatattctcacagcactactcattccatacattttcttcagcttgccttcattaattttcgacgtcttcaagggagagcttggaaaatggattgctgc

SEQ ID NO: 241557 - DNA, 317 bp, Glycine max
  unsure (1)..(317): unsure at all n locations
ggttcaattttttgattgtttgttgttgtaactcgttcttcttcttttgttgttctgtgtttgtgtttgttttttctctcacctgaaaatgtcttgctgcggtggtaactgtggttgcggaagctcctgcaagtgcggcaacggctgcggaggctgcaagatgtacccagacttgagctacactgagtcaaccaccaccgagaccttggtcatgggagtggcacctgttaaggctcaatttgacggtgctgaaatgggtgtgcccgctgagaacgatggctgcaaatgtggaccanactgctcctgcaacccctgca

SEQ ID NO: 241558 - DNA, 306 bp, Glycine max
ggtatagtgaatggcaaacaaagatacgcaatcaatagtgtgtcttacgttgctccagacactcctcttaagctcgccgactactttaaaatccctggcgttttccgtgtcggaagcttttccgacaggcccactggcggtggcatataccttgacacatctgtgctgcaaactgactacagaacatttgtggagtttgtcttccaaaacgacgaagacatcattcagagctatcatctcgatggctactctttcttcgtggttggtatggatggaggacagtggacacctgctagcaggaacacg

SEQ ID NO: 241559 - DNA, 318 bp, Glycine max; identical to SEQ ID NO: 239438

SEQ ID NO: 241560 - DNA, 294 bp, Glycine max
ataagcgacaattattgaacatatttggaattgtttaccgatacaagaagatgaaagaaatgagtgctgcagaaaggaaagcaaattttgttcctagagtttgtatatttgggggaaaagcatttgctacatatgtgcaagccaagagaattgtgaaatttattacagatgttggggcaacagtaaatcatgatcctgaaataggagatctacttaaggttgtttttgtccctgattacaatgtcagtgttgctgatatgcttattccagcaagtgaattgtcacaacatatca

SEQ ID NO: 241561 - DNA, 379 bp, Glycine max
  unsure (1)..(379): unsure at all n locations
gagtggaagagtgaataagagatatcaatatattatgataatggagggatacaataagaaggttatgattgtggggatggtgttgggcatggccatgattgggatggccaatggccaatactcgttttgtcgcatgcccagcgatgggttggcggcatgcaagccgagtgtgagtggggactatcctgctgatccctccactgcttgttgctcagccattgccaaggctgatcttaaatgcttctgccgcttcaaggattcgggccttctctctatgtatggtgttgatcccaacaagtgcatggaactccctgttaagtgcaaggttgtcgactctttccactgctagattcattaganggggcactaatcaatataa

SEQ ID NO: 241562 - DNA, 369 bp, Glycine max
ggttcaagaggctgagaagtacaaatctgaggatgaagagcacaaaaagaaggttgaggccaagaatgctttggaaaactatgcatacaacatgaggaacactgtgaaggatgacaaaattggtgagaaacttgatcctactgacaagaagaagattgaggacgcaattgagcaagctatccagtggctagacagcaaccagctcgcagaagcagatgaatttgaggacaaaatgaaggaattggaaagcatctgcaatcctatcattgccaagatgtaccaaggtggtgctggtcctgacatgggtggtgctggtgctggggcagccgaagatgattatgctgctccttctggtggaagtggtgctgg

SEQ ID NO: 241563 - DNA, 280 bp, Glycine max
ggtcctgcaggcgaagagatggccaccgttccaaggcagctcgtgtgggagatcgtcaagaaaaacaattccttcctggtcaagcagtttggaaagggcacccagagcgtctaattcagcagagagagcaacaatctctacaacctcaattcgttcaagtactccggtttgggcaacaagaaaactgttactgttcaacctgaaggcaaagatcaagctgtgttgttggctacaaccaagaacaagaagcaaaacaagcccgctgcattgctccacaaat

SEQ ID NO: 241564 - DNA, 377 bp, Glycine max
gacgttcacattcaggaatcgttttcttcagaaaatttgccatcgttgagggaagcgcgagagccttcgttgttcaagatgagagctaagtggaagaagaagcgcatgaggaggttgaagaggaagcgccgaaagatgagacaaagatctaagtaggtgcttgaacaaggagtggagatgatgtgcttttccatctgctaccagcttcatgacattttatgctgtcatggctcttatgatgatcttgaggtctagtggcgaagggagcttccatcttgactttagtttagctttactggtctaaagattgctgttttagtgtgggttaagttatgatattgagagttttggtgtatctaattatgtactggtacgtt

SEQ ID NO: 241565 - DNA, 334 bp, Glycine max
gggcacgacgcacatgtggctatgcttatcggcgctgccaagattttgaaaactcgagagcatttattaaagggaactgtaattctgttattccagccagcagaggaagctggtaatggagcaaaaagaatgatgcaagatggtgctttggaggacgtggaggctatatttgcagctcatgtatcccatgaacatccaactggtataattggctcaaggcctggacccctccttgcaggttgtggattcttcagagctgtcattagtggcaaaaagggtcttgctgccaatcctcaccgttctgttgatccagttttggctgcttcagctgcag

SEQ ID NO: 241566 - DNA, 379 bp, Glycine max
gattttctctcgtcaaatttatccattcaccacagagtttcttcaatggcccagcctcaaccagagtcccacgccaccaatggctcacacgagccattgctcaaaatcccaaagctccaccaaaacggcgacgtttccgcaaccgctccctttctccgcgtcaagaagctctccgacaaggccgttttgccctctagggcttcccctctctccgccggttacgatctctctagcgcggtggagacgaaggtcccggcgagagggaaggctctggtggccactgacatcagcatcgcgattccagagggcacatatgctcgcgttgcgccgcgttcggggttggcgtggaagcactcgatcgacgtgggtgcgggggtga

SEQ ID NO: 241567 - DNA, 351 bp, Glycine max
gatggtaacatagtaacacatagtttcaggtgggttctaaaacaaaagaaaaaccgagaaagagttctaagctttgtctgtgactggtgagagccagtagcgaaagaaagtgaagatggcgctatggatggaaaagggtccagagccattaaccgaaagcgaaaaagcagaccttgaagccattgctgcactcaaagagtctgctgcttttgaattcaaggaaaagggtaaccaatatgtgaagatgggtaagaagcattactctgatgccattgattgctacacaagggcaattgatcagaaagccttgagtgactctgagaactctattctttttgcaaatagaacaca

SEQ ID NO: 241568 - DNA, 339 bp, Glycine max
ggacaagagtgtgaactgcaaagggcttctccagcctagtttgttctcagatcttcgtcttccatggaccagtacgagaaagtggagaagataggcgagggaacatacggcgtcgtttacaaagctcgcgaccgcgccaccaatgagacaatcgctctgaagaagattcgcctcgagcacgaggacgaacgcgttcccagcaccgccattcgcgagatttctcttctcaaagagatgcagcatatgaacattgttaggttgcaggatgtagtgcacagtgagaagcgattgtatctggtttttgagtatctggaccttgatcaaaaaaacacatggatt

SEQ ID NO: 241569 - DNA, 324 bp, Glycine max
  unsure (1)..(324): unsure at all n locations
gaagtgaggtggtgattgaaacgaaacgcacagggccatcggcgatgggagacgacagtggcagcaaccggtcaaagccggagtggctgcagcagtatgatctaatagggaagattggagaaggcatctacggtctcgtcttcctcgctcgcatcaagtcttccaccaatcgcggaaaatccatcgccataaaaaaattcaagcaatccaaggatggcggtggtgtctctcccancgccatacgtgaaatcatgttactcanggagataacgcacgagaatgttgtgaagcttgtgaatgttcacattaatcatatggacatgt

SEQ ID NO: 241570 - DNA, 343 bp, Glycine max
gattgtatatcatttacaatttcaatctctctctctctctgtctctctctctctagacttagattttgtgaatggctgaagtggaagagggacaggtcatcggcgtccacaccgttaatgagtggaagctgcaactccagaatgcaaaagactccaaaaaactgattgtggtggattttactgcttcctggtgtggtccatgccgttttatggccccagttcttgcagagattgcaaagaaaactcctgaattgatcttcctcaaagtggatgtggatgaagtgaggcctgttgctgaggaatattccattgaggccatgccaaccttcctcttcttgaaaga

SEQ ID NO: 241571 - DNA, 272 bp, Glycine max
  unsure (1)..(272): unsure at all n locations
ggcattttcaaatttccttttccttcactttcccgagaaaaaaataacacttttcactttcttcactacgttctcacttcgatatggctcgtacgaagcagaccgctcgcaagtccaccggtggcaaggcgccacgtaagcagctcgccaccaaggccgctcggaagtccgctccggcgaccggangagtgaagaagccccaccgcttcaggccgggaaccgtggcgctgagggaaatcagaaagtaccagaagagcaccgagcttctcatc

SEQ ID NO: 241572 - DNA, 365 bp, Glycine max
  unsure (1)..(365): unsure at all n locations
acgcggacgcgtgggttgaacgtgttaagcttttgatccagaaccaggatgagatgatcaaaactggtagactttctgagccctacaagggtattggtgattgctttaagagaacaatggcagatgagggtgttgtttctctatggagaggaaacactgcaaatgtcatccgttatttccctacccaggctttgaactttgcattcaaggactacttcaagaggctttttaactttaagaaggatanggatggctactggaaatggtttgctggcaacttggcctctggtggtgctgctggtgcttcatcccttttgtttgtttactctcttgactatgcncgtacccgtcttgccaatgatgct

SEQ ID NO: 241573 - DNA, 381 bp, Glycine max
gaaaagaggaaggttgtggtaaataaataacctaacctaacccttgcgacttgcgacttgcgagtgagactgaggttgggtttggaaggcaagggcttgtgttgtcacaatccaagagagaagtaatggcgaacatagacatcgaagggatcttgaagcagcagcagccttatgatgggcgcgttccgaagacgaagatagtgtgtactttgggccctgcttctcgatccgtagaaatgaccgagaagcttctgagggcagggatgaacgttgctcgtttcaatttctctcatggcacccacgactatcaccaggaaaccctcaacaatctcaagactgccatgcacaacactggcatactctgtgccgtcatgcttgaca

SEQ ID NO: 241574 - DNA, 264 bp, Glycine max
gaaaaaacgaatggtgtggtaaataaataacctaacctaacccttgcgacttgcgacttgccagtgacactgacgttgggtttggaaggcaagggcctgtgttgtcacaatccaagagagaagtaatggcgaacatagacatccaacggatcttgaagcagcagcagccttatgatgggcgcgttccgaagaccaagatagtgtgtactttgggccctgcttctcgatccgtacaaatgaccgagaagcttctgacggcacgga

SEQ ID NO: 241575 - DNA, 384 bp, Glycine max
gacagagtataaggccaaggaggtttcaaggcaaggagagccttgaccaggaaggaatatttcaaattcacccacttactgtcaatctccatgtgtatgatgacgagatttctgatcttgagtctgcaaaactcactactctaaagtttgagtacttgatgcagttgaatattatatgtgttggaaacaaagcatctaatgatggtcccgagaatgacatcttaagcgatttattccctgatgacacaggccttgagcttcctcaccagtcagctaagctctttgttggggatgctataatgttcaatggtgatagaacttcacgtccttacaaatgggctcagcacttagcgggtattgacttcatgcctgaggtggctccct

SEQ ID NO: 241576 - DNA, 309 bp, Glycine max
gaggctgggttcaaagaattcaaggatgattcggaaatcgaggatgttgatgacgaagacgatgaagacgaagaagagttgaagaagaagccctttgggttctctcgctccagcaacaaggctgcttctaagcctctctctcgtggatcagcaactgtggaatcaaaggggcaagctgagaagtgtgccaagagaaagaggaagaaccagtatcgtggaatccgtcagcgtccatggggaaagtgggctgctgagatccgtgacccaagaaagggggttcgtgtttggcttggaactttcagcactgct

SEQ ID NO: 241577 - DNA, 366 bp, Glycine max
atccaagtgaataaagagaataaggaattcaaggatcttgcacctgagcgcgcttttgcggattttgttctctgtaatttggtgcttcatttggtgatcatgaacttccttggttaaattgggtttgtgtggcggttgttgtttctgattgaacccttggataataaaaattaaatagtagtatacctagacttttgtaatagtatttatagacagtagccggcattctactaattgctttagctttatgttgattacccccaccccccatttttggttccctgttttgaacgaagagattttgccatcttttgaagtttaaagtacttttgaatggcgaaataaagaaagtaatggtaataatgc

SEQ ID NO: 241578 - DNA, 348 bp, Glycine max
gtcgtggagttgatcaatggatcatccgaagaaggccaggaaacaaccaatgatgacactcccgagaagaatcctcaatataccactgtttatgttggcaatcttgctccggaggttacttctgttgatctccatcaacattttcattctcttaatgccggaattattgaagatgttagggtgcaacgagacaaaggttttgggtttgtgagatacagtacccatgctgaagcagctcttgctatacagatgggtaatgcccgaattctatttggcaaacctatcaagtgttcatggggtagcaagcctactcctctgggaactgcctctactcctcttctgccaact

SEQ ID NO: 241579 - DNA, 312 bp, Glycine max
gaatctcaatgctattattagtgggaaagcaggcttttcttccaacacgccttcttcaattaatccaaacatatcatgtgaaagtaagactccacaagtagaggatatacaagatggttctagtgtgcttcacctggcatgcataattagtgattctgcaatggtagagctgctcctacagtatggtgcagacataaatgctattgattctagagggaggacacctctacattacagcactatgagagggaagaatgcaactgcaagagtgcttattacaaggggggccaatccacttgccgtagacaaaga

SEQ ID NO: 241580 - DNA, 342 bp, Glycine max
ggttctatctgtgacgagcatcatggcctcgagagcagtgctattgttggctatgtgtgtgcttccggccatggttgtggccattcgcccagcaaagaaccctttttgcgtgaagggtcgcgtctactgtgacccttgccgtgctggttttgagacctcagcaaccacctacattgccggtgctgagattatgttgcaatgcaagagcagggttagcaacgaggttgtgtacaccaagaaggggtacactgactcaactggagcatacacaatgtacgtggacgaggatcacgcagatcaaatatgcagtgccaagcttgtaagcagccctcaacctcaatg

SEQ ID NO: 241581 - DNA, 313 bp, Glycine max
gacggcgaggaaccacatagagacacaatacagagtgagttggttgctccttcgccacaactctctgccaacatgggtatctccagagattctatgcacaagaggcgtgccactggtggcaagaagaaggcctggaggaaaaagagaaagtatgagcttggtcgccagcctgctaacactaagctgtcaagcaacaagacagtcaggaggatccgtgttagaggtggaaatgtgaaatggacggcattgagattggatactggaaattactcctggggaagtgaaactgtaactcgcaagactcgtgtaccag

SEQ ID NO: 241582 - DNA, 336 bp, Glycine max
gaaattctatatgagctgaaagagcattcggtgggtctaaactgtgggcgttgggattacattttcagttatgttaaaaccttccagactcacccagatcgtctactaccagacagggtccaggttggcatgactcaacatttcatgaagagttactctgatctcctcatcaggacatgccacaggcgcggtgtgcatgctatgggaggaatggcagcacagattccaatcaaagatgacccagttgcaaatgaggcagcactggaacttgtaaggaaggacaagcttagagaagtgaacgcaggccacgatggaacttgggctgcacatcctggt

SEQ ID NO: 241583 - DNA, 373 bp, Glycine max
gacccttatttatccagattaaaatagccttcagcagaatataagaagctgcaaagttcccttcttttggggcagagtcaattcatcaattaggagttgggtgagagaatggaagcctcagagcagaacaattcaaaggtagtgttgattgattctttgcagtcatgggagttccacgtcaaccaagcctataatcagaatactcctgttgttgttcacttcactgcttcatggtgcatgccatcggcggctatgactcctgtttttgaagaactggcttcaagctatccggaagttctgtttctcactgttgatgttgatgaagtcaaggaggtagccaccaaaatggatgtaaaggcaatgccaacatttt

SEQ ID NO: 241584 - DNA, 378 bp, Glycine max
  unsure (1)..(378): unsure at all n locations
tggtccaagattgaaagcattctctgattggttactgaaaactatggtgttgggcaaacttgatgccatctttccagctgctactcgtgaatatgcaccattgattgaggaattatggaatgatgctgccattaaggctacatacgaaaggagaagcgaattagaaatgctgcctagtgttgccggttatttcttagagcgggctgttaaaatattaaggacagattatgaactctctgatttagatatcctttatgccgagggagttacttcatctaatggggtggcttgtgtggagttttcatttccccaatcagtgtctgangaaactgttgacactnacgatcgatatgattctttggtcaggtatcaactaat

SEQ ID NO: 241585 - DNA, 325 bp, Glycine max
ggaacctttgcattctattcattcaagattcagcaagtgcgttttggaagcagagaccgaaatacttcgagatggcccgtacaaagcaaactgctcgtaagtcaactggaggaaaagctcccaggaagcagcttgcaaccaaggctgcacgtaagtctgcaccaacaactggtggtgtgaagaagcctcatcgttatcgccctggaactgttgctcttcgtgagattaggaaataccagaagagcactgagctcctaatcaggaagcttcctttccagaggttggttcgtgaaattgcccaggatttcaagactgatctgcgttt

SEQ ID NO: 241586 - DNA, 345 bp, Glycine max
gattgtagaactgaacaagggtttctctttctctttctctgtctgcttcttcactttctctcgtttcaatcgaaaaaaatcatgggcagaaaattcttcgtcggtggcaactggaaatgcaatgggaccactgaggaggtgaagaagattgttactactttaaatgaagctaaagtccctggagaagatgttgtagaagttgttgtgagccctccttttgtgttccttccttttgtaaaaagtttgctgcgccctgatttccatgtctcggcccaaaattgttgggttcgcaaaggtggtgcttatactggagaagttagtgctgaaatgcttgttaatttggga

SEQ ID NO: 241587 - DNA, 381 bp, Glycine max
gacaccggatgaagattttggcattctcttagaagctgctgtaatgtatgatagacgtgttgctgccatattaggtgaagatgattcagtagatgaggaggtcatttggaaagaaatatccgatggaaaacaatgtttatatcccagattgttattcatcataactggcaaaggcccagaaaaagagaagtatgaggtaaaaataaagagaatgaaacttaaacgtgtggcatttcgtaccatgtggctgtcagctgatgattatccattactgctaggatcagctgatctaggtgtttgtctgcatacttcatcatcaggattagaccttccaatgaaagttgtggatatgtttggctgtggactgcctgtttgtgctgt

SEQ ID NO: 241588 - DNA, 357 bp, Glycine max
gacacctcagaagaacagaacagaaccaccagtgcttttcaaagacggatttgatctctagtctgtctaccaagtggaatgaaccagacaccccccctcagacttgatgctgtggagagtggagttcaaccacaagtccaaaacctttaatggtttcagcaatggcgttcttaaataaaattggaaatctggtcaagaattctgctgtcaagcacatcaatcaagatttttcagtgtctaccccatcacttttccaagcaattagatccatgtcatctgcaaagctttttgtcggaggtatttcttacagcactgatgatatgagtttgccagagtcttttgctcgccatggaaaag

SEQ ID NO: 241589 - DNA, 383 bp, Glycine max
ggttctagtgtgtgattgtttgttgttgtaactcgttcttcatcttttgttgttctgtgtttgtgattgttttttctctcacctgaaaatgtcttgctgcggtggtaactgtggttgcggaagctcctgcaagtgcggaaacggctgcagaggctgcaagatgtatccagacttgagctacactgagtcaatcatcaccgagaccttggtcatgggagtggcacctgttaacgctcaatttgagggtgctgaaatgggtgtgcccgctgagaacgatggctgcaaatgtggaccaaactgctcctgcaacccctgcacttgcaagtgaagtgttgggagagcaatcttcaagcatagatagcccttaattaggaataatgata

SEQ ID NO: 241590 - DNA, 320 bp, Glycine max
ggatccaaagtcgcatcttttgcttcactctacgcagatcgcagcaaaccagagattgaactccgacgatgcctcccgtcgctcctcgatccggcgatgccatattcgccaacgtcgaacgcgtcaatgcggagctgtttactttgacgtatggcgcaattgtgcgtcaattgctcacggatctggaagaggttgaggaggttaacgagcagcttgatcaaatgggttacaatattggaatccgattgattgatgagtttttagctaagtctaatgtctcaagatgcaacgatttcagagagactactgatgtaattgca

SEQ ID NO: 241591 - DNA, 337 bp, Glycine max
gtaagaagatcagagagtatgactcaaagaggttgttgaaggagcactttaagagactctctggcaaggagttgccgatcaagtctgcacaaattaccgcatcaactgatttcactgagctacaagagaaggaaccctggctttcatcttctaaattggttgttaaacctgacatgttatttggaaagcgtggcaaaagtggtttggttgccttgaatttggattttgcacaagttgtttcatttgtgaaggagcgtcttggaaaagaggttgagatgagtggatgcaaagggaccataacaactttcattgttgaacctttcatcccacacaaatg

SEQ ID NO: 241592 - DNA, 356 bp, Glycine max
  unsure (1)..(356): unsure at all n locations
ggaggcaatagtagcagcaattcacactggtctttgcttctcgttactcatttctcacctaactttctattcttctcagtctcagatcagaaccttagccatggcagcgttccagaagatcaaggtcgccaaccccatcgtcgagatggacggagatgaaatgactagggttatctggaagtcaatcaaggacaagctcattttgcccttcttggagttggacatcaagtattatgacttaggccttccttaccgtgatgagaccgatgatanagttacaattgaaagtgcggaagcaactctcaagtataatgtggcaattaagtgcgcaactattactccagatgaagctcgtg

SEQ ID NO: 241593 - DNA, 376 bp, Glycine max
gaatctagtggaagagtgaataagagatatcaatatattatgataatggagggatacaataagaaggttatgattgtggggatggtgttgggcatggccatgattgggatggccaatggccaatactcgttttgtcgcatgcccagcgatgggttggcggcatgcaagccgagtgtgagtggggactatcctgctgatccctccactgcttgttgctcagccattgccaaggctgatcttaaatgcttctgccgcttcaaggattcgggccttctctctatgtatggtgttgatcccaacaagtgcatggaactccctgttaagtgcaacgttgtcgactctttccactgccagattcattacagggggcactaat

SEQ ID NO: 241594 - DNA, 221 bp, Glycine max
tgggaatctagtggaagagtgaataagagatatcaatatattatgataatggagggatacaataagaaggttatgattgtggggatggtgttgggcatggccatgattgggatggccaatggccaatactcgttttgtcgcatgcccagcgatgggttggcggcatgcaagccgagtgtgagtcgggactatcctgctgatccctccactgcttgttgctc

SEQ ID NO: 241595 - DNA, 386 bp, Glycine max
ggaaaaaccgataatttccaatcacaatggcagatcaactcaccgatgaacagatctcggagttcaaggaagccttcagtttgttcgataaggatggcaatggttgcatcacaacaaaggagcttgggactgttatgcgttcgttgggtcagaatccaacagaggctgagctccaagacatgatcaatgaagtagatgctgatgggaatggcaccattgacttccctgagttcttgaacctcatggctagaaagatgaaggacactgattctgaggaggagctgaaagaggcgttccgagtgtttgacaaggaccagaatgggttcatttctgctgctgagctccgccaatgtgatgacaaccttggggagaagctcactgatgaa

SEQ ID NO: 241596 - DNA, 381 bp, Glycine max
ggttcacaagtttcgtttccaggtttcggcgcaatcggcttctgcttcaaggaaggagagcttgttattctctatcaacaagtaaaatgtcaggtgaagagggtgtcattgcagttgagccagctgctgctgctgctgccatcccaggcgagccaatggatatcatgactgccttacaacttgtgctcagaaaatctctggcttatggtggtttgtcgcgtggccttcatgaaggtgcaaaagtgattgagaagcatgctgcacaactctgtgttcttgcagaagactgtgaccagcctgactatgttaaactggttaaggccctttgtgcacatcacaatgttagcctgccgacagttccgagtgcaaagacccttggag

SEQ ID NO: 241597 - DNA, 409 bp, Glycine max
acgcccacgcgtccggagcgaaacagagagtgatttcagtgagtgatcggtgttcacttgatctcatcataatcgtcagcgtcaattgaagaagatgccgatcagaaacatcgccgtcggaaggcctgaagaggcgactcaccccgacacgttgaaggcggctttggctgagttcatctcaaccttcatcttcgtgttcgccggctcaggctccggcatcgcctacaacaagctcaccgacaacggcgctgccacccctgccggcctcatctccgcctccatcgcccatgcattcgccctcttcgtcgccgtctccgtcggcgccaacatctccggcggccacgtcaaccccgccgtcaccttcggcgccttcgtcggcggcaacatcaccttcctccgcggcatcgtc

SEQ ID NO: 241598 - DNA, 362 bp, Glycine max
ggcacccagagaggaggaagctttgagagagagagagggaggagggagagtgttgacgctccatcaagatgggtatttctagggattccatgcacaagaggcgtgccactggtggcaagaagaaggcatggagaaagaagagaaagtatgagcttgggcgtcaggccgcaaacaccaagttatcaagcaacaaaaccatccggaggattcgtgttcgaggtggcaatgttaaatggagggcattgaggttggataccggcaattactcatggggtagtgaagcagttactcgcaagactcgtattctagatgttgtttacaatgcctcaaacaatgagcttgtgccaactcagaccctggtc

SEQ ID NO: 241599 - DNA, 396 bp, Glycine max
gaccgaagaaaacatcactgcgccgcgctgccacaccaaatagacacaaacatggacgcatcaaaactcaatcaattgaagcatttcatcgaacagtgcaagtccaacccttccctcctcgctgatccttcactctccttcttccgcgactatcttcaaagtctcggcgcgaaacttcctgagtctgcttattccgaatcgacgggcgtggagagggatgaggacatagaggatcttacggaggagcacgagaaggtagaagaagaagaagaagaagaggacgatgtaattattgaatccgatgttgagcttgagggtgaaacctgtgagcctgatgatgatcctccacagaagatgggagacccctctgtcgaggttactgaatagaaccgtgat

SEQ ID NO: 241600 - DNA, 389 bp, Glycine max
gatagtaatacttactgagtgcttacagttgctgcgtcgcaaggtaccggcggcgacggagaactatcttctcaattttcgatcactgcattggttctgttgacaagggttttgttcttcctgacttgcatacttgatggcttcaaagttgcagaagttgcaggccacagcatctcaagcgtctcaatttgtatccagtcgtggaactaactactacaagcaattgctggaacagaacaagcaacacattcaggagcctcctacagtagagaaatgcaacctgttggcaaagcaattgttttacactcgccttgctagtattccgagtcgtaatgagtccttttggaaggaacttgattatgccaagaatttgtggaagaacaggaaag

SEQ ID NO: 241601 - DNA, 354 bp, Glycine max
gggggggccaattttttcatagaattttcagaggaacaatggcgggtagggtttcgacgtgcttcttcttcgtgtttgctctttctctccttcttccttttcagatctccgctgaggaatcatcggagaaagagttcgtactcacattggatcactctaactttcacgacactgtcagcaagcacgatttcatcgtcgtcgagttctacgctccatggtgtggccactgtaagaagcttgctcccgagtatgagaaagctgcttctatcttgagtagtcatgatcctccggttgttttggctaaaattgatgccaatgaggagaagaacacagaccttgcatctcaatatgatg

SEQ ID NO: 241602 - DNA, 382 bp, Glycine max
gggagtggaagtagtagcaagtacgtcgtatatgtggttgatcttttgctggttgtttgttttgttccttccaattgtcagatctgaatcaccggactcactcttcacactcactcacactgaatggcttctgaaggcgaccatcaccaccaccaccaccaccatcaagatcacgatcatcatcatcatgatcatgatcaccatcatcatcacgatggagagggagagaccaactcatgggtaggtaaggatgggaaggtgtaccatagccacgatggtctggcgccgcattctcacgaacccatttactcccccggctacttcaccacaagagctccaccgcttctcaacagaaacctcaacgaaagagccttcaccgtcg

SEQ ID NO: 241603 - DNA, 331 bp, Glycine max
ggatatcaaggactaaaaaccaccaatcaaaaaccatgaatgctaagagagaaaagggagagtgctttgaaaatgggaaagtttagttcaagttacagtacttctgattttgttcactttggagttctacttccctttcttctgttatcacagttgttctttcaacttgcatggtgtggctccatagtaaagttccttcctggattagagggaccccttccttttgttcttgaaaccgggtatgtgggagtgggtgaatcagaggatgtgcaggcattctactacttcattgagtcagagaacaatccaaaagaggattctcccatgcttt

SEQ ID NO: 241604 - DNA, 378 bp, Glycine max
gaccactgaagcgaagaaaggggcgtacggttctgttgtggttggagatccgaattttgattatcgaatcgcaaaattctgaatcaatcaatcaatcaatcagtaatcagagccatcaacgactgcaatggtctgcgagaagtgtgagaagaaattatcgaaggtgatagtaccagacaagtggaaagaaggggccagcaatactaccgagggtggtggccgcaagatcaacgagaacaagcttctctccaagaaaaacggatggaccccttacggaaacactaagtgcaccatttgcaagcagcaagtgcaccagaatgctaagtactgccacacctgtgcttactctaaaggagtttgtgcaatgtgtggcaagca

SEQ ID NO: 241605 - DNA, 318 bp, Glycine max
gaacccaattaatctttctttacaattccttctctcaataattctcctctgtttttcacaaagcaacatggctgcatacagagaacccatgaacatgaacatgagcgacagagccccggtttctccgcagcaaccacactctccgtggcattccccggttccgtacttgttcggagggttagcggcgatgttgggtctcatagccttcgctctattgatccttgcatgttcctactggaagctctcagggtacctcgaagggatcggggaaacagaacgggacctagaagctggcgaaacggagcaggaccagaaacc

SEQ ID NO: 241606 - DNA, 376 bp, Glycine max
gaaggaaacccaccgtaagcgataagcaatagaattcagagagagagagaaagagagtctcttgctctgtatctttgatttgatcattccaatcttcaatttttctatatatccatcaatccgctgagtgcaaagttctaatctttcgcctattgggttctactcctttctctcttcgtttccgatcgatccaattttcttcccatggctacgatcggacacaacaatctcaatgccaaattggttcttctcggggacatgggtgctgggaaatccagcctcgttttgcgctttgtcaagggtcaatttctcgaatttcaggaatcaacaatacgggcagcgttcttttcacagacgctggcagtaaatgacgcga

SEQ ID NO: 241607 - DNA, 385 bp, Glycine max
ggaaccactaaacgatgatcccaaacgttcaaatccctacctgggacgcggacggaggaggagcactctccccgtcgatctcttccaatgctgacacgtgctcattattctcctccgaccatttccgaatgttccagttcaaggtgcggaactgtccacgtggcaggtcccacgactggaccgagtgtccctacgcccaccccgccgagaaggctcgccgccgtgacccccgcaagtaccactactcaggcacctcctgccccgattaccggaaggggaactgcaagaggggcgacacgtgtcagttcgcgcacggcgtcttcgaatgctggctccacccttctcgctaccggacccagctctgcaaagacggaacaaattgccg

SEQ ID NO: 241608 - DNA, 394 bp, Glycine max
gaccgtttcggttaacactttccaatacaataatcactaactgaatattcgatcggagatgtctgccgccgccgaagaagctaacgctcccgccgtcgaaaagccggttgaggaggtgaaggcgccgaaccccgcgaaggagaagaaacctaaggctccgaaggaaaagaagccaaaacaggccaaaacagcttcacatcctccatattttcagatgattaaggaggctttgatcgctttgaacgagaaaggaggatcgagtccttatgcgatagcgaagtacatggaggagaagcacaaggcggtgctccctgcgaatttcaagaagattctaggtctgcaactaaagaaccaaactgcgagagggaaactcgtgaagatcaaggcttcgtac

SEQ ID NO: 241609 - DNA, 393 bp, Glycine max
gcacaaaagatggggttcactcccacaagtactgcaacatgctttctcataatagcacctctggttgtgctatggtgttggaagctactaaagtgggtgtggctgaggccaaagagattggagagagcattaagggcacagggccttcaggggaatccctacagcctcttgattggggacactaaggaaatgtacacagtgctcatgcaagctgccagatctcaacaatctacaagttcttttctctctaaggataaggatgcagcaccacatatcacaacctttaaccatcacattgtcaacaaattcggcaagaattcatttttttgggaaggtaccaaaccaaaagtggtaatcactgaccctgagcaaatcaaagaagtcttcaacaag

SEQ ID NO: 241610 - DNA, 328 bp, Glycine max
gaaggaatatggatatatttgttggcacctgttgtgggggccatagctggagcatgggtatacaacatcgttaggtacacagacaagccattgagtgagatcaccaagagtgcttctttcctcaaaggccgtgctgcctccaaataatttatatgagcaaatggagacactcaataatttcttccttgtaatagtaattaaaaaaaaataaatatgaatgaaagaaatcactcaaagaaactacgctatgctgtttcatttccttgttttatgaaaggtcatgcactaaaaaaaaaccaaaaacaaaaaaaaaaaaagcggccgctct

SEQ ID NO: 241611 - DNA, 370 bp, Glycine max
  unsure (1)..(370): unsure at all n locations
gggcgaggtagccagagagtgatacaatacagagtgcgttgttgctccttcgccacaactccctgccaacatgggtatctccagagattctatgcacaagaggcgtgccactggtggcaagaagaaggcatggaggaagaagagaaagtatgagcttggtcgccagcctgctaacactaagctgtcaagcaacaagacagtcaggaggatccgggttagaggtggaaatgtgaagtggagggcactgagattggatactggaaattactcctggggaagtgaagctgtaactcgcaagactcgtatactagatgtggtttacaatgcctcanacaacgagcttgtgcgtactcagactcttgtaaaaagt

SEQ ID NO: 241612 - DNA, 369 bp, Glycine max
ggagagagagagagagggaaactctggattccacctcttcccgtccttcgtgacggtcctcttccttcgacctcttcagggtgatcaggctttgaatcttaaggttcttgttatattttttgagacatggaaagaatttgtttcttgccaagttgcttccagaattggttgctttcattccaagaagtgcttgaccgcagattcctcatctttggagattatcttctggtttcctttgttaattgcacctagttttctgttctactttaaggatcagcacagtgcacttaatgcttgtttcttctgagactagtgctgcatctttaaggaacatatacaatgcattcctgaaccaacatcaagttgaaa

SEQ ID NO: 241613 - DNA, 359 bp, Glycine max
ggaaggggtgaggtagcaacagcactgccactgccactaccaatagcagaatgggaaccttgggcagagctttctacgccgtcggattttggatccgcgagaccggccaagccatcgatcgcctcggctctcgtctccaaggcaactacctctttcaagaacagctatctaggcatcgacctctgatgaatctgttcgacaaagctccctcggttcacagggatgcatttgtggcccccagtgcctccctcctcggcgatgtccacgttggcccagcttcctccatttggtatggatgcgttctcagaggtgatgttaacagcattactattggatcgggaactaatatacaagacaat

SEQ ID NO: 241614 - DNA, 392 bp, Glycine max
ggaaaccgagaagaagaagatggagatgtatcagatctggagcaggagaatagcgttgggagcgttcgcgtttgttctgcttttcctatcggcctcagcagacgacgtcgttgtgctctctgaagataacttcgagaaggaagttggtcaggacagaggagctctcgttgagttctatgctccttggtgtggacactgcaaaaagcttgctccagaatatgaaaagcttggtagcagcttcaagaaagccaaatctgttttaatcggcaaggttgactgtgatgagcacaagagtttgtgcagcaaatatggagtctctgggtacccaacaattcagtggtttccaaaaggatctcttgaacccaaaaagtatgaagggccacgcactgctg

SEQ ID NO: 241615 - DNA, 384 bp, Glycine max
ggcaggactgaagaagtgagggcaagaactttgcagcataccagcatgagcatgaagctcttccagctcttctccctactcccattcttcctctacttctacacaatagaagcagccgttggcccattgcaactgacacacccactggaccccttaactcagcaagaaatcaccctcgtcaaaaccatagtcctaaaaaagtaccccaagccagccaaccgcgtcttcttccactacgtcggcctcgacgatcctgacaaggccgccgtcctcaaatggctctcctccggcgcccggacgccgcgcaacgccttttccatcgccctcatcaatggccaaatccacgagctcaccgtcaaccttctctcgccgcgaaacgttgtc

SEQ ID NO: 241616 - DNA, 380 bp, Glycine max
gagagaaagagagagaaagatgtcgaagcgtggtcgtggtggttcggcggggaacaagttccgcatgtcgctgggtcttccagtggcggcgacggtgaactgcgccgacaacacgggggcgaagaacctctacatcatttcggtgaaagggatcaaaggccgtttgaaccgtcttccctcggcctgcgttggcgacatggtgatggccaccgtgaagaagggaaaacccgatctgacgaagaaggtcttgccagctgtcatcgttcgccagcgcaagccatggcgccgaaaggacggcgtctacatgtacttcgaagataatgctggtgttattgtcaatcccaccggagacattaaacgttctgctatcactggttcca

SEQ ID NO: 241617 - DNA, 388 bp, Glycine max
gatgtgggtgggatgccactgcgtgatgcatcaatctcccagcaaattcctgttggggctttagcaacagctctggctaatgcttctccagagcagcagaggacgatgctgggtgagaatctctacccccttgtggaacagttagagcctgacaatgctgccaaagtgacaggcatgcttcttgagatggaccagactgaagttctgcatttgctcgagtcgccagaagccctgaaagcaaaggtggcggaggcaatggacgtcctaagaaatgttgctcagcaacaggctggcggtactgcggatcagctggcttcattatctcttaatgacaaccttgtttcttaacgtttatattttggatttatttaatgacgatgggttgtta

SEQ ID NO: 241618 - DNA, 379 bp, Glycine max
ggttctagtgtgtgattgtttgttgttgtaactcgttcttcttcttttgttgttctgtgtttgtgtttgttttttctctcacctgaaaatgtcttgctgcggtggtaactgtggttgcggaagctcctgcaagtgcggcaacggctgcggaggctgcaagatgtacccagacttgagctacactgagtcaaccaccaccgagaccttggtcatgggagtggcacctgctaaggctcaatttgagggtgctgaaatgggtgtgcccgctgagaacgatggctgcaaatgtggaccaaactgctcctgcaacccctgcacttgcaagtgaggtgttgggagagcaagcttcaagcagagataccccttaattaggaataat

SEQ ID NO: 241619 - DNA, 331 bp, Glycine max
gagggagaattaggtttttagggtttacaccgagcagcgacacctccctcccgcagtagccatggttctcaaaactgaactatgccgattcagtggtgccaagatctaccccggaaagggcatcagatttgttcgtggtgattctcaggttttcctgtttgccaactcaaaatgtaagcggtatttccacaaccgcctgaagccctcaaagctcacctggactgctatgtacagaaagcaacacaaaaaggacattgctcaagaagctgtgaagaagaggagacgcgctgccaaaaagccttactctaggtccattgttggtgccactctg

SEQ ID NO: 241620 - DNA, 373 bp, Glycine max
ttcaccggcgtagaagaaccaccaaacaagcccaggaaatcctcgtcacggttcaatccaatatagactccgaaaaaactcgaaccggtttgctcgcgaagtccaccacgaacccggtttaccggctcagcgtattcgaaccgaaaacgggttcatggagcgagttacccttgggacccgaactcgccttcgggttacccatgttctgtcggatagcgggtgtcgggttcgaccttgtcgtaatgggcgggtgggacccagactcgtggaaagcgtcgaattcggtttttatctacaacttcctgtcggccaagtggcggcgtggggccgacatgccgggtgggccccgcacgtttttcgcatgcgcgtcgga

SEQ ID NO: 241621 - DNA, 377 bp, Glycine max
ggcctacgcagagagaaattgagtttctgagataaccacttttctctttgattcatcaatggcaaccgcgaggaccgtgaaggatgtttcgcctcacgatttcgtgaaggcttacgcctcccatctcaagcgttccggcaagatggagcttcctgagtggactgatattgtaaaaacagcaaaatttaaggaattggctccatatgatcctgactggtattatgttagggctgcctcaatggcaagaaagatttatttgagaggctgtcttggtgttggggctttccagatgatccatggtggaagcaagacaaatggaagccgtcgcccacatttccgcaacagcagttgggcctattgcagacacatttctgcac

SEQ ID NO: 241622 - DNA, 392 bp, Glycine max
gaattcctcgaattctagaatccctagaaagaaggcaaggatgtggatggtggtgctttcttccccgcaaaccctagcacaaacagcgttcctccgaaattcaattcccagcccaaccagagtgtccctttctctcaaaaccccgtgttcttcattaacagcaaaatgccagcaacaacaaaaaactcaagaagacggcattcccgcggacgaggttaaaatccttgcgaaattcaagtcccgccacaactacatccgcgttctagaagtttctagaaaagcagaacaccccttccgcggctccaggctcctccttctcgacacccccggaaacatccacagcatatctttcctcttcaagtccctcaccaatacttacttcgacgtcctcg

SEQ ID NO: 241623 - DNA, 328 bp, Glycine max
ggtagctaaacaaagggcaagagacggcgagttgagttttgaaagcgtgtgcgtgggagggtccgaagttggagatagtgattctggttctgttctgttcttctttctactcacaacaacatcagaatcagaaacaacaatggccatcactaacttggaagatgttccctctctggatctcatgactgagctccttcgtcttctcaagtgctcttccaaacctgacaagcgtcttattcgcattggcccacctggatctggacaatgcatccagtcaccaatcatatcagatgagtactgcttaggccacttagctaccagtgatatg

SEQ ID NO: 241624 - DNA, 364 bp, Glycine max
ggcaactaagtagagaataaaatcaaatcaggagagcatgcatatgaacatgatgatgaagaaggtgtgtgggtttgcaatagtgatggtggcagtgcagcttctggtggaggtgagtcccaaggcagaggctgtgacttgtacccctgtggagctgagtccttgtttgggggcaataacttcctctcaaccaccatcaacaatttgttgccagaaggtgagggaacaaaggcaatgcctctgtggttacctcaaaaacccaagtctaaggccatatgccaattctcctggctccagaagggttgctagctcttgtggggttccctttccaacttgttaattaccttcatatcatatcatatat

SEQ ID NO: 241625 - DNA, 392 bp, Glycine max
  unsure (1)..(392): unsure at all n locations
ggccctttcgcctacgcactgcggagagagaaattgagtttccgagataaccagttttctctttgattcatcaatggcaactgcgaggaccgtgaaggatgtttcgcctcacgatttcgtgaaggcttatgcttcccacctcaagcgttccggcaagatggagcttcctgagtggaccgatattgtaaaaacagcaaaatttaaggagttggctccatatgatcctgactggtactacattagggctgcctcaatggcaagaaagatctatttgagaggtggtcttggtgttggtgctttccagaggatctatggtggaagcaaaagaaatggaagccgtcccncacatttctgcaagagcagcggtgcaattgccagacacattctgcaac

SEQ ID NO: 241626 - DNA, 386 bp, Glycine max
ggttctagtgtgtgattgtttgttgttgtaactcgttcttcttcttttgttgttctgtgtttgtgtttgttttttctctcacctgaaaatgtcttgctgcggtggtaactgtggttgcggaagctcctgcaagtgcggcaacggctgcggaggctgcaagatgtacccagacttgagctacactgagtcaaccaccaccgagaccttggtcatgggagtggcacctgttaaggctcaatttgagggtgctgaaatgggtgtgcccgctgagaacgatggctgcaaatgtggaccacactgctcctgcaacccctgcacttgcaagtgacgtgttgggagagcaagcttcaagcagagatagcccttaattacgaataatgataaac

SEQ ID NO: 241627 - DNA, 378 bp, Glycine max
gattcaaaatggatcttattctatcgttgatcagagatttctctatgaaaaatatgaatcggagtttgaagaaggggggggagtcctcgacccacaacagatagaggaggattttttcaatcacatcgtttgggctcctagaatatggagcccttggggctttctattttattgtattgaaaggcccaatgaattgggatttccctattgggccaggtcatttcgggacaagcggatcatttatgatgaagaggatgagcttcaagagaatgattcagagttctcgcagggtggaaccatgcagtaccagacacgagatagatcttccaaagaacatggcttttttcgaataaaccaattcattttggaccccgcgga

SEQ ID NO: 241628 - DNA, 386 bp, Glycine max
gaattcagtcattcttattattattagggtttggcgattcagagagaaagagaaatgggagaacgaaaaggaatcccaattgctctggggctcttggcgatgctcctcttcttcattgcttcgtcctcttcctctcacctcgttcgtgcttccgatgacgccgacgacgcgatcttctacgagtcattcgacgaggattttgacgggcggtggattgtgtccgacaaggaggattacaacggtgtctggaagcatgctaagagtgatgggcatgatgattatggacttcttgttagtgaacaagcccggaaatatgctatagtcaaaaaacttgacgagcctgtcagtcttaaggatggaacagttgttcttcagtttgagactcg

SEQ ID NO: 241629 - DNA, 344 bp, Glycine max
gacttgcggctgcagtagagaagcactcttcgttcttcgactgtctacgatctgctttctctgaattgtgaaaatgtcgctcggagaaactgcttgttcatacgcagcgctcatccttcatgaagatggaattagtgtaactgctgacaagatcagcaccttgttgaaaactgcaaacgttccagtagactcttattggccaaccttgtttgctaaacttgctgagaagaaaaatcttggcgatttgatagcaaatgcggcatgttgtggtgcaccagttgccgttgcagctgccccagttgctgctgtctctggtggtgtcgctgccgcagctccagttgctt

SEQ ID NO: 241630 - DNA, 395 bp, Glycine max
ggagatagatagagcatagaaaggaaacgaaaaaacagagtacccgacagaatttgaaaacaaaggctgaaatttgaagaaactgagatcattgggtgtgaaatatatggcagaggttgtcttgctagtcgatgatttgaaactactttctgcgattcctcgctgtagaatttgtcatgaagaagagtttgaaagcgtagaaaccttggaagcaccttgtgcttgttctggaaccgttaagtttgctcatacagattgcatacatatatggtgcaacgaaaaacgaaatacaacctgtgaaatatgtctccagcaatacgaacccggatatacagctcctccgccaaagaactctaagataaatgatcaagcactgtctattaagggaggaggaa

SEQ ID NO: 241631 - DNA, 391 bp, Glycine max
gacacacacatattctttgttgcaatatcacaaacacctcgtccgtcacaatgcagctagctgtggcggccaacgctgtcgtttcaccgtcgccgttccgacctcatccccttctccggtcatccttctccggcgtctccgttaagctcactccccaatccataacgttttcacgcttgaagcccctcaccgtcttcgccgccaccaagaaggccgtcgctgtcctcaaggggacctccgccgtcgaaggcgtcgccactctcatccaagaagacgatggcccgacgacagtttctgttagcatcactggccttactccggggcttcatggttttcacctacatgagtatggtgataccacaaatgggtgtatatcaacacgagcacattt

SEQ ID NO: 241632 - DNA, 392 bp, Glycine max
gggcacaagtttgttgagatagctagaagcaataagatgaaaatgaaagtgcttgttttgtttgttgctacagttttggtagcatatgaatgccatggctcagactaccagaagttccctctccaaatgaaaactgggtttggtgggcaatacagcaatgaggtggcatgtgccagttggaggcttggcgtggaagcaaacaacgtagtcaagtggcaaactgttcctgcagcttgcggagagtacatagctgactacgttctaggagaccaatatagatcagattccaaaacagttaaccaacaagcttatttctatgctaaatccctcaaactcaccaacaaagatgtctttgtcttggacgttgacgacactactctctctaatctcca

SEQ ID NO: 241633 - DNA, 392 bp, Glycine max
gacacaccttcgaactttcttttccttcactttcccgagaaacaatcaacactctttcactttcttgactacggtctcacttcgacatggctcgtactaagcaaactgctcgcaagtccaccggcggcaaggcgccacgtaagcagttggcgaccaaggccgcccggaagtccgctcccgcgaccggaggagtgaagaagccccaccgcttcaggccgggaaccgtggcgctgagggaaatcagaaagtatcagaagagcaccgagcttctcatcaggaagcttccgttccagagactcgtgagggaaatcccgcaggacttcaagaccgatttgcgttttcagagtagcgccgtctctgcgcttcaggaagctgctgaggcctacctcgtt

SEQ ID NO: 241634 - DNA, 394 bp, Glycine max
gacaacacaacgcaacacaacgcgcactctctcttttctctcttaacacaaaaaccctatcgttcttcgcggtttcgccgattctcgccatgccgaaagccaaatccgacgccaaagccgccgatagccggttgaagcgcaagggcgctggtgctggaaggaagcaatcgaagaaagctgctaaggatcctaacaagccaaagagacctccaagcgctttcttcgttttcatgtccgagttcagagagcagtttaagaaggagcatcctaactacaaatccgtcgctgttgtcggtaaagctggtggtgacaaatggaaatcgctgtctgatgctgaaaaggcccccttcgttgccacggccgaaaagaagaaacaagagtatgagaaaactat

SEQ ID NO: 241635 - DNA, 395 bp, Glycine max
gactcaccacttcaaaacactcataacacaaagcacaaagcaaagctcatccttgagttaaaaaatggcagcagcttcttccatggctctctcatccccatccttggctggcaaggccgtgaagctgggcccatcagccccagaagtgggaagggtgagcatgaggaagaccgtcaccaagcaggtctcctcaggaagcccatggtacggcccagaccgagtcaagtacttgggcccattctctggcgagcccccgtcctacctaaccggtgagttcccaggcgactacggctgggacactgctgggctttccgcagacccagaaaccttcgccaagaaccgtgaactcgaagtgattcactccaggtgggccatgctcggagccttgggctgcg

SEQ ID NO: 241636 - DNA, 377 bp, Glycine max
ggtcttgcaggcgaagagatggccaccgttccagggcagctcgtgtgggagatcgtcaagaaaaacaattccttcttggtcaagcagtttggaaggggcacccagagcgtcgaattcagcagagagagcaacaatctctacaacctcaattcgttcaagtactctggtttggcaaacaagaaaactgttactgttcagcctgagggcaaagatcaggctgtgttgttggctacaaccaagacaaagaagcaaaacaagcccgctgcattgctccacaaatctgtgatgaagaaggagttcaggacgatggcaaaagctgttgaaaaccaggtggccaaaaattactacaggcctgatctcaggaaagctgcccttgc

SEQ ID NO: 241637 - DNA, 384 bp, Glycine max
ggccgaaaacctaatcagaaaaaaaatcgtagttggaggcgccgcactccactccactccaatcaatcagatactagcgatggggaggaagcgaaaggtagcaccggaatcttctgtatccgccgagcccccgctgaagcaacaccaaccaaaacccgaaaatgccgctcaggaatacgaagaagaggtcgaagaggaagttgaggaagaagaggtagaggaagaggtcgaagaggaagaagaagaagaggaggacgaagaggacgaggaagaagaagaagaagaccaaaaagaccaataccagcaccaacaacaacagcaagacgaagacgacgaaccgatctccaagcttctggaaccgttgagcaaggaccagctcctcat

SEQ ID NO: 241638 - DNA, 353 bp, Glycine max
ggttctagtgtatgtgattgttgtgactcgttcttcttcgtcgttatcttcttcttttgttgtttgtgtgtttgttttttctctcacctgaaaatgtcttgctgcggtggtaactgtggttgcggaagcgcctgcaagtgcggcaacggctgcggaggctgcaagatgtacccagacttgagctacaccgagtcaaccaccaccgagaccttggtcatgggagtggcaccagttaaggctcaattcgagagtgctgaaatgggtgttcccgctgagaacgatggctgcaaatgtggagctaactgcacctgcaaaccctgcacttgcaagtgaggtgttggagagctaaaagc

SEQ ID NO: 241639 - DNA, 394 bp, Glycine max
  unsure (1)..(394): unsure at all n locations
ggtgaagaaaaggtggtgcaaggtaaaacctttgtgcctttaaatcctcaatgtccaagtcttgcaaagggttggccatggagctagtcaagtgtctcagtgaatctgattgtgttaaggttgagaagagatcatataaggaatgtgttggagagaagagtccatgtataccaagtgagtgtgttggactcagggaaacctatttcaattgcaagagaggccaggttgacatgagagctaggattcgtggaaacaagggctattaatgatctcatcatacatttgaaaactctgaagttgttctgtccagttgaggttctttcaatttttagctcaagacgaagtcaacanaagtaagagatgacggtgaatcagagaaatgggaggccttgtt

SEQ ID NO: 241640 - DNA, 382 bp, Glycine max
gactcatccttcattaccaagcatatctcatttgaatacattccttgtagtttatactgaaagatgggtttgaagatggcgttactgatcctaggcctttccctcatgctccttttggtctcctctgaggtggcatccacgaatacaaaagaggaggcaaatggagtggatgatgccaaatatcccggtggaagctatggagggggttacccaggtcatggcggtggcggttatcctggccatggcggtggcggttatcctggccatggcggtggtggtggctatcctggtcatggtggtggccaccctggtcatggtggccggtaccctggccgtggtggtggatactgtacgcatggctgttgcggtggccggacattac

SEQ ID NO: 241641 - DNA, 390 bp, Glycine max
ggttctagtgtatgtgattgttgtgactcgttcttcttcgtcgttatcttcttcttttgttgtttgtgtgtttgttttttctctcacctgaaaatgtcttgctgcggtggtaactgtggttgcggaagcgcctgcaagtgcggcaacggctgcggaggctgcaagatgtacccagacttgagctacaccgagtcaaccaccaccgagaccttggtcatgggagtggcaccagttaaggctcaattcgagagtgctgaaatgggtgttcccgctgagaacgatggctgcaaatgtggagctaactgcacctgcaacccctgcacttgcaagtgatgtgttggagagctaaagcttcaagcagaaatggcccttagaaataatgataaaaac

SEQ ID NO: 241642 - DNA, 397 bp, Glycine max
gagtgcagcatcgtagagaaataagggaaaaatggtgtcgctgaaactgcagaagcgcctctccgcaagcgtgctcaagtgcggcagaggaaaggtttggcttgaccccaatgaagtcaacgaaatctccatggccaattctcggcaaaacatcaggaagttggttaaggatgggtttatcatcaggaagccaaccaagattcactcccgctcacgtgctcgtaggatgaaggaggcaaagaggaagggccgccactccggttatggtaaacgtaagggtacaagggaggcaaggcttcccaccaagatactctggatgagaaggatgcgtgtgctcagaccgttgcttcgtaagtacagggaatcaaagaaaattgacaagcacatgtaccatgat

SEQ ID NO: 241643 - DNA, 394 bp, Glycine max
ggcgtcacataaacaaaaaaataaactggggagaagcatgttgttgatgttgggactatgcttcctattgttctctgcatttccacttgcgttctctgagagatgccacccacaagacaagaaagcgttgctccaactccagaaggacctcggcaacccttatcacatcatatcctggaacgcaaaggaggattgctgcgagtggttctgctgcgttaagtgtgacgagaaaacaaaccgcgtcattagcgttgccttatcatccccttttccagacaccaatctctcggcccaaatacctccctctgtgggtgacctcccttacctcgagtccctcgtcttccacaaattccccaaactcgtgggcccaatccagcccgcaatcgccaaactc

SEQ ID NO: 241644 - DNA, 324 bp, Glycine max
gagagtggtggggggtgcagtggagcgtcgcagttgtaaccctaatcagaagaagcgcagcttcaagcgagtgacagccaccagccatgggtcgtatgcacagccgcggtaagggtatatcctcttctgctttgccctacaaaaggacacctcctagctggctcaagatctcttctcaagatgtcgaagaaaatatctgcaagtttgcgaagaaaggtttgaccccgtctcagattggtgtcattctcagagattctcacggtattgctcaggtcaatagcgtcactggcagcaaaatccttcgcatcctcaaagctcacggac

SEQ ID NO: 241645 - DNA, 393 bp, Glycine max
gagacaatcaaacctatggtggatggtgggactgaaggtttcaagggccatgctagggttatcatgccagggattacaccatgctttgagtgtactatctggctttttccacctcaagtgaagtttcctttgtgtaccctggctgaaacccctagaactgctgctcactgtattgaatacgcccacttgattaagtggaatgaggttcatggcggagtggcttttgatccagataaccctgagcatatgaaatgggtctatgacgaggctgtcaagagggctgagctttttggcattcctggggttacttattctcttacccagggtgtcgtgaagaacatcataccagctatagcttcaacaaatgcaattatatcagcagcatgtgcacta

SEQ ID NO: 241646 - DNA, 400 bp, Glycine max
gggagtcccacgaaattagataattttcgataaatttgaaggaattaagttctcttatgctgaggaatatttaggtcataaaaaacaagttggaaccctttctgtgtagttccatcgcatcaaaccctggcaatggcagctacggccatacagaggttcccccaacacaaatacgtagacgcagttcgctggcttcccctacaatccgcattcgaccgattcgcagttttggcactcttcgacttcgattccgatgcttcctccatcgaaatccactctctcaacccaaaccccctctcattggaaccacactcttcgtggtcctctccttcccgcgtttcctccctcaaggcctcgcacttcctccagaagcccctcattgtcgcttccacttcctccg

SEQ ID NO: 241647 - DNA, 446 bp, Glycine max
ggtaccggttaggaattcccggctcgacccacgcgtacggggagccactaaacgatgatcccaagcgttcaaatccctacctgggacgcggacggaggaggagcactctccccgtcgatctcttccaatgctgacacgtgctcattattctcctccgaccatttccgaatgttccagttcaaggtgcggaactgtccacgtggcaggtcccacgactggaccgagtgtccctacgcccaccccgccgagaaggctcgccgccgtgacccccgcaagtaccactactcaggcacctcctgccccgattaccggaaggggaactgcaagaggggcgacacgtgtcagttcgcgcacggcgtcttcgaatgctggctccacccttctcgctaccggacccagctctgcaaagacggaacacatttgcgccgcagagtgtgcttcttcgc

SEQ ID NO: 241648 - DNA, 391 bp, Glycine max
ggagttacagccgcagcttgaaacagagcagagcgaccttgaagagctatggctgtcggaaagaataagaggatttccaagggaaagaagggtggcaagaagaaagccgctgatccctttgccaagaaagactggtacgatatcaaggccccttccctcttccaggtcaagaatattggcaaaaccctcgtctctcgtacccagggaaccaagattgcatccgaaggactcaaacatcgggtttttgaggtctcattggctgatctccaaggggatgaagaccactccttcaagaagattcgtttgagagctgaggacgttcaagggaagaatgttctgacaaacttctggggaatggatttcacaactgacaagtttaggtctttggtgc

SEQ ID NO: 241649 - DNA, 250 bp, Glycine max
caacgttacaagcatcagctatagttattcaatcagggttgagagcattagcagcacgaaatgaatataggtacagaagaagaacaaaggcttcaacaaaaattcagacacaatggagaagagcccaagctctttctgattacaaacagcaaaagaaagcaactgttacacttcaatgtctatggagagctaaagtggcaaggaaagagctcagaaagcttccgatggctgcaagggaaactggggcact

SEQ ID NO: 241650 - DNA, 378 bp, Glycine max
gacaggcaaaaaccctagccttcgaaaaccctaatcctgaggcactgtgatatggcaagagccgtttcctcttcctgcgcgcgcctcacaatgcgcctcttctccaccaccaccaccaccaccaccaccaccgctgcgttcgccgttacattacccaaaccctcgtcactctcagtctcaacgcgtcgattcctcttccctctctcccatgccatcgtccctccctccacccgcgtcgccggaatccggtgccgtgtcaaccgcgccggcgactcagcgtactcgccgctgaactcagcttcgtcatcgtcgtcgtcgttcagcgaccggcctcccacggagatggcgccgctctttcccggctgcgactacaaccac

SEQ ID NO: 241651 - DNA, 344 bp, Glycine max
ggagttgagaggatcgtgagaggggcagtagccgagattccgtgagttgcaaaaatgaagacgattctttccaccgagaccatgaacatcccggacggcgtgagcatcaaagttcatgccaaggtcatcgaagttgagggcccccgcggaaaattggtgcgagacttcaagcatttgaatctcgattttcagctcattactgacgaaaacggtaaaagaaagctgaaaatcgacgcgtggtttggttctcggaaaacatccgccgccattcgcaccgccctgagccacgtggagaatcttatcaccggcgtcaccaaaggctaccgctacaaaatgaggttcgt

SEQ ID NO: 241652 - DNA, 320 bp, Glycine max
gcatgcatatgatcatgatgatgaacaacgtgtgtgggtttgcaatagtgatggtggcagtgcagcttctggtggaggtgagtcccaacgcagatgctgtgacttgtacccctgtggagctgagtccttgtttgggggcaataacttcctctcaaccaccatcaacaatttgttgccacaatgtgacggaacaaatgcaatgcctctgtggttacctcaaaaacccaagtctaatgccattatccaattctcctgtctccaaaagggttgctagctcctgtggggttccctttccaactttttaaattaccttcatatca

SEQ ID NO: 241653 - DNA, 384 bp, Glycine max
ggggcaaacacaattttttttatcttcttttttattttttgtagagagagagagagagaaaatgttggggatcttcagcagttcagtggtgtcgccgccggaggagctggtggccgctggcagcagaacgccgtcgccgaagacgacggcggggaagctgctgaaccggttcgtggagagcaaggcgtcggcggtgtcgctgcaggtgggggaacacgtgcagttggcttacacacaccacaacgaatcaccgtggcatcccagatcatttgctgttaaggatgagatattctgcttgtttgagggggctctagacaatttgggcagcctgagacaacagtatggactggccaagtcagccaatgaagtgattttggtgattga

SEQ ID NO: 241654 - DNA, 372 bp, Glycine max
ggattcgaccggttgctggagcaggtttcgcagatcgagatcaacggcctcgggagggctgagaatccaccggcgtctaaggcggctatagagtcaatgccgacggtggaaatcaccgagtctcacgtcgcgtcggagacgatctgcgccgtgtgcaaggaagccttcgagcttggcgcgttggcgcgtgagatgccgtgtaagcatctctaccactccgattgcattctcccgtggctttcgatgcgaaactcgtgtccggtgtgccgccacgagttgccgtcggagcaaaccgcgccggaaacaagaatctccggccagatcgaagaaggaggtgtagggtttaacatatggaggttgccgggcggggga

SEQ ID NO: 241655 - DNA, 350 bp, Glycine max
ggtgcatctcaccatcactctcgctcttgcaattattcctcttctcgcaatccgcactaaaattctagggttccgaaatggacgctgacggaaagatcaagaagggcgccggcggaagaaagggcggcggcccaaagaagaagccggtttcaaggtccgtcaaagccggtctccaattccccgtcggaagaattggccgttatttgaagaaaggaaggtacgctcagcgtgtcggtaccggtgctcccgtatacttggctgcagttctcgaataactagctgccgaggtgcttgagttggctgggaatgcagcacgtgacaacaagaagaacaggattattccaagacac

SEQ ID NO: 241656 - DNA, 350 bp, Glycine max
gacacacatactcgcttccctctctctgcgttcggcaccagcgaaacgctcttcgttatctttttctcgactccgcggcgtagatccgaggagttcgggaaaccctaactcatcttccttcacaacagaacaacgcttcttttccctatccatcatctcaactgaagtcatggctggactagcacctgaggggtcacagttcgatgctcgtcaatatgattccaaaatgagtgacttactttcatctgatggacaggacttcttcacatcctatgacgaggtttatgatagttttgacgctatgggtttgcaggagaatcttctcaggggaatttacgcatacggttttg

SEQ ID NO: 241657 - DNA, 378 bp, Glycine max
gacactcattatttctcatcatccttacccatctccacgcatgatatgatcactgtcacggttacatgcacatgagatttgacttttaacaccatctttgtgttacaggaaaagtactcttttaccatggcttccacttttgaaggtggctcagactcagagaaagagaacactgttgagagtgaagaagaagagtgtccagtaaaacaagttgaactcaccgttcctaaaaccgatgatcccaccatgcagcttctcacgttcagaatgtgggttctgggggttctttcatgcgtgttgttgtcctttgtgaatcagttcttttggtacagaacacagcctctgattgtaacctcaatttcagctcagattgctgtg

SEQ ID NO: 241658 - DNA, 393 bp, Glycine max
gatcgcatttcatagcactcaccctcattaccaacacgaaagcatagccaaaaccttttttcgaagtctctgattttcctaatggctccggcaaaggcagagaagaagccggcggagaagaagccagcggcggagaaggcaccggcggagaagaagccgaaggcggagaagaagatctcgaaggaaggagggagcgagaagaagaagaagcgcacgaagaagagcgtggagacctacaagatctacatcttcaaggtcctcaagcaggttcaccccgacattggtatttccagcaaggccatgggcatcatgaacagcttcatcaaacacatcttcgagaaaactcgcccaggaagcgtcgcgtgtggctcgctacaacaagaagcccaccat

SEQ ID NO: 241659 - DNA, 329 bp, Glycine max
ggaacttctcacgttcatttctacacatccctagctctgtcgttccgtcgttgacgatggcgtttcgggtgcgaagccctgacctccgctctctctttcttctctctctcttgtccatcgcttccgccaatgtcttcttcgaagagcgtttcgatgacgggtgggaaaatcgatgggttaaatcagattggaaaaaagatgagaacgtggctggggagtggaaccacacctctggtcaatggaatggagacgctaatggcaaaggtattcaaaccagtgaggattacagattctatgctatttcagctgagttacctgaattcaacaac

SEQ ID NO: 241660 - DNA, 315 bp, Glycine max
  unsure (1)..(315): unsure at all n locations
ggaccgcatagagtgagacacacacggtcactgcccaaattgatccacagaacacagaacacagcaaggtaaaaaaaattcgagctttatttgtctcaaatggcanaagaagaggagcaacaacaacaacaacaacaccaccttacgcatacaccttaattctgaacatcttcagcaagaggagaacatgggcatgtctatttctggttgtttacggtacccttttggcatcttcatggaacttactcaaatccacgctttcatggtacaatctgcaagttgaatcctccaccacctcggccgtggccggcgctc

SEQ ID NO: 241661 - DNA, 261 bp, Glycine max
caacaaaagggggaacctttgcattcaattcattcaagattcagcaagtgcgttttggaagcacagaccgaaatacttcgagatggcccgtacaaagcagactgctcgtaagtcaactggaggaaaagctcccaggaagcagcttgcaaccaaggctgcacgtaagtctgcaccaacaactggtggtgtgaagaaccctcatcgttatcgccctgaaactgttgctcttcgtgagattacgaaataccagaagagcactga

SEQ ID NO: 241662 - DNA, 318 bp, Glycine max; identical to SEQ ID NO: 239438

SEQ ID NO: 241663 - DNA, 315 bp, Glycine max
tggggcagttcaattccaatatattggagtcccactgtgtgattccctaccgctcccttcaggacgcagatcttcgtcaagacgcgcaccggtaagaccatcacccttgaggtggaaagtcctgataccatcgacaacgtcaatgccaagatccatgacaatgaaggaatcgccccgggccaccaccgtctcaatttcgccggaaagcaccctgaggacggcagtacccttgctgacgacatcattcagaaagatagtactcttcacctcgtcgtcggtcaccgtggtggtatgcagatcatcgataagacactc

SEQ ID NO: 241664 - DNA, 345 bp, Glycine max
ggttctagtgtatgtgattgttgtgactcgttcttcttcgtcgttatcttcttcttttgttgtttgtgtgtttgttttgtctctcagctgaaaatgtcttgctgcggtggtaactgtggttgcggaagcgcctgcaagtgcggcaacggctgcggaggctgcaagatgtacccagacttgagctacagcgagtcaaccaccaccgagaccttggtcaagggagtggcaccagttaacgctcaattcgagagtgctgaaatgggtgttcccgctgataatgatggctgccaagttggaactaactggtgctggcatccctgcaatttccggttagggttttgagaa

SEQ ID NO: 241665 - DNA, 291 bp, Glycine max
gaaagaacgaacaagaaagggggggttcctaagtggtgttgatttgttttgtttgtttgtaactccttcttcttcttttgttgttctgtgtttgtgtttgttttttctctcacctgaaaatgtcttgctgccgtggtaactgtggtttcgggagctcctgcaagtgcggcaacggctgccgaggctgcaagatgtacccagacttgagctacactgagtcaaccaccaccgagaccttggtcatgggagtggcacctgttaaggctcaatttgagggtgctgaaatgggtg

SEQ ID NO: 241666 - DNA, 374 bp, Glycine max
gaacatcgtcctaataacccccccttccctcttctaattcaaaacctcagcaatgttcagatacttttccgattccgtcgcgaatttccgattcatcgaagaagaagagaaaacctaaatcgcagatccgaacgcagtagaaaaaccatggcggaagaacaccgatgcgaaactcccgaaggtcacctactctgcgccaacaactgcggcttcttcggtagcaccgccacgatgaacctctgctcgaaatgctatggcgcgatccgcttgaaagagcaagaagaagccccgacgaaatctacaatcgaaaccgcgctctcttcttcctcgttgaaaccgtcgttcttcacgttaactccaacgttggtggatgt

SEQ ID NO: 241667 - DNA, 398 bp, Glycine max
cagaagggggaaaggatcttgaaaggggcattacccgaaattccgtgagttgcaaaaatgaagacaattctttccaccgagacaatgaacatcccggacggcgtgagcatcaaagttcaatgcaaagtcatcgatgttgagggcccccgcggaaaattggtgcgagacttcaagcatttgaatctcgattttcagctcattactgacgaaaacggtaaaagaaagctgaaaatcgacgcgtggcttggttctcggaaaacatccgccgccattcgcaccgccttgagccacgtggagaatcttatcaccggcgtcaccaagggctaccgctacagaatgaggttcgtttatgcgcattttcccatcaacgcaagcatcggcaacagcaacaagtctat

SEQ ID NO: 241668 - DNA, 345 bp, Glycine max
gagggttttgcgctgttgttgctgctcatcctccgtaacctccgagctctgcaccgaagaacgaagccatggggaagacacatggaatgggatctgctcgcaagctcaagtcccaccgcaggaggcaaaggtgggctgacaagtcatacaagaaatcacatcttggaaatgaatggaagaaaccttttgctggttcatcccatgccaagggaattgtccttgaaaagataggtattgaggctaagcagcccaactctgccattcgtaagtgtgccagggttcaacttatcaagaatgggaagaagattgccgcttttgtccctaatgacggttgcttgaactaca

SEQ ID NO: 241669 - DNA, 380 bp, Glycine max
  unsure (1)..(380): unsure at all n locations
gacacaacattgatttctgagattcagatgatggcgagtgagtcgcaaaactgggtgttcatggtcactgcacagacaccaaccaacattgccgttatcaagtattgggggaaaagagacgaaaccctcatcttaccggttaacgacagtatcagtgtcactctcgatcccagccacctctgcaccaccaccactgctgccgtcagtcccgctttccaccaagatcgcatgtggctcaatggaaaggagatttctctttctgggggcaggttccagagctgtttaagggagatccgtgctcgtgcttgtgatgttgaggatgaaacaaacggtatanagatcacaaacgaggattgggggcaaatgcatgtacacattgc

SEQ ID NO: 241670 - DNA, 281 bp, Glycine max
  unsure (1)..(281): unsure at all n locations
gatcagcacaagattgcaaaatgaagttcaacattgcaaatccaccactgggtgccagaagaagctggaaatcgatgacgacctgaagcttcgagcattttgggacaagaggatctcccangaggttcttggtgatgctctgggtgaggagtttaaaggatatgttttcaaaatcaccggtgggtgtgacaaacaaggattccctatgaagcagggagtgctgacccctggtcgtgttcgacttttgctccatagangaactccttgtttccgtggatatg

SEQ ID NO: 241671 - DNA, 395 bp, Glycine max
gaagggggggaacccccagcaagaatccccaattccaaaaattcccaattccccctttctccccgaaccccgattaatcccaggcgcccccatattcggccctccacggtcgcgctctcgaacaaccacaacaccatcgtcatcacatggcaaacgcagcatcgggtatggcagtccatgatgactgcaagttggggtttttggagctgaaggcaaagaggacacaccgtttcatagtttttaagattgacgagcagcagaagcaggtcattgtggagaagcttggtgagcctgcccaaggctatgaagatttcagtgccagccttcctggtgacgagtgccgttatgctgtttaagagtttgagtatcggactgaagggaaggtccctaaaagc

SEQ ID NO: 241672 - DNA, 364 bp, Glycine max
ggcatttcaattccaatatattcaattccccctgtgtatttcccaacctctcccttcaagatgcagatcttcgtcaagaccctcaccggcaagaccatcacccttgaggtggaaagctctgacaccatcgacaacgtcaaggccaagatccaggacaaggaaggaatccccccggaccagcaacgtctcattttcgccggaaagcaacttgaggacggccgtacccttgctgactacaacattcagaaggagagtactcttcacctcgtcctccgtctccgtggtggcatgcagatcttcgttaagacactcaccggcaagaccataaccctagaggttgaaagctcggacaccatcgataacg

SEQ ID NO: 241673 - DNA, 373 bp, Glycine max
  unsure (1)..(373): unsure at all n locations
ggtacttgtgttgtgtgagatagccagccatgtcgatcttttctattccctcaccaacgtaccgttgttcaatttcaatttcaatttctcggcagccattgccatgttctttcacggctcaagtgataagaagagggaaagggaaagtggtaatgagcatggaggcaggcattggagtgatgggcaccaagttgggtatgatgagctatttcgaatccgacggagaggttgttcctgtcactgtcgtgggtttcaaagaaggcaacatcgtcacccagatcaaaactgaggccaccgatggatacgacgccgtccaggttggttaccgaagggtcagagatcgcanattgaccaaacccgaaatcggtcatct

SEQ ID NO: 241674 - DNA, 325 bp, Glycine max
ggaacctttgcattctattcattcaagattcagcaagtgcgttttggaagcagagaccgaaatacttcgagatggcccgtacaaagcaaactgctcgtaagtcaactggaggaaaagctcccaggaagcagcttgcaaccaaggctgcacgtaagtctgcaccaacaactggtggtgtgaagaagcctcatcgttatcgccctggaactgttgctcttcgtgagattaggaaataccagaagagcactgagctcctaatcaggaagcttcctttccagaggttggttcgtgaaattgcccaggatttcacgactgatctgcgttt

SEQ ID NO: 241675 - DNA, 335 bp, Glycine max
agacgacagaagggggagaatatggagctattactagtgctgtagtgatgagagatgtagatggtaaatcaaaaggttttggttttgtcaattttgcgaatgtagaatatgctgctaaagctgtggaggctctaaatggaaagaattttgatggtaaggagtggtatgttggaaaagcccagaaaaagtctgaaagggagcttgaactgaaagagcgacatgagcagagtacgaatgagactgttgataaatatcatggtacaaacttgtatatcaagaacttggattatagtgttggtgatgaagaactcatggaactgttctctcagtttggt

SEQ ID NO: 241676 - DNA, 203 bp, Glycine max
gaagggcaaaataatggccttgttatgaacttctacaaggaatcatgccctcacgctgaagacatcatcacagaacaagtcaagcttctctacaagcgccacaagaacactgctttctcctggctcaggaacatcttccatgactgtgctgttcacagttgtgatgcttcactgttgccggactccacaagaaggagcttgtc

SEQ ID NO: 241677 - DNA, 390 bp, Glycine max
cgggtccctttgaaccacacaatagggagcccgagccctccactgccgattcaaagtgagatgggaggaaaaatgccatccgtcaagccaactgcattgcggttctatgggagttttaatccaacagttacaggcataacaattcaaaatagtccacaatgccatctcaagtttgacagctgtaatggggtcatggtccataatgtgaccatatcatctcctggggacagtcctaacacagatggaattcaccttcagaactccaaagatgtgttaatatacggcagcaccatggcctgccgagatgactgtatttcgatacaaactggatgctcgaacgtatacgtacacaatgtcaactgtggaccaaggcatggaatcagcattgga

SEQ ID NO: 241678 - DNA, 365 bp, Glycine max
gtcgcttggtagttgtgaatcccttacacggattagaatgggagagaactttttgaatggttccattccgagagggctttttggacttcccaaactaacacaggttgagcttcaggataattatctctctggagagtttcctgaggtgggttctgttgctgttaatcttggtcagattactctctctaacaaccagctttctggggttctacctccctccattggtaacttctccagcgtgcagaagctccttcttgatggcaacatgttcacgggtcggatacctccccagattgggaggttgcaacagctttctaagattgattttagtggcaacaagttctcgggtcctattgtgcctgaga

SEQ ID NO: 241679 - DNA, 347 bp, Glycine max
tggacaacaagggcttgttgatagtggatcaccaactagccaatgacaagaggaccaagccttatgtgaagaaaatggccaagagccaggactatttcttcaaggagttttctagagccattactttgctctctgagaacaaccctctcactggcacaaagggtgagatcagaaagcagtgcaatgctgccaacaagcaccatgaggagccttaattgcttcccgcttaatttgggccttgaattttcttccccttctctatgtggaggaaatctgtaagatattatgcaaaacataattaacgtgttttcctttaaacgggttggttgattggttcagtgaaccga

SEQ ID NO: 241680 - DNA, 333 bp, Glycine max
ggcttacaagaaagccgccatcaagaatcaccctgacaagggcggtgatcccgagaagtttaaagagctggcacaagcatatgaggttctgagtgaccctgagaagcgtgagatatatgatcagtatggtgaagatgcgcttaaggaacgaatgggtggtggcggtggccatgatccgtttgatatcttttcatctttctttggaggtgggagtccctttggatcaggtggaagtagtcgacgtaggatgcagaggcgcggaaaagatgtggttcaccctctcaaggtctctctggaggacctttatctcgggacttctaagaagctctccct

SEQ ID NO: 241681 - DNA, 352 bp, Glycine max
ggctgcagcaagggctcaacgcacgcaggaggaggagattgatcgagagaagagaagatgactacacgcttcaagaagaacaggaagaagagaggccacgtgagtgccggccatggccgcatcgggaagcaccggaagcaccctggaggacgcggtaatgccggaggcatgcaccaccaccggatcctctttgacaagtaccaccctgggttcttcggcaaggtcggaatgcgctattttcacaagctccgcaacaaattctactctccgatcctcaacatcgacaagctctgggtcccggtttcccaagaattgaagggaagggcctccaaggagaacagggcgccgctga

SEQ ID NO: 241682 - DNA, 380 bp, Glycine max
  unsure (1)..(380): unsure at all n locations
gtccgtcaaggccggcctcaaattccccgtcggaagaattggccgttatttgaagaaaggaaggtacgcccagcgtgtcggtaccggtgctcccgtttacttggccgcagttctcgagtacctacctgctgaagtgcttgagttggctgggaatgctgcacgtgacaacaagaagaacaggattattccgagacatgtgctgttggctgtaaggaacgatgaggagttggggaaattgcttgctggtgtcaccattgctcatggtggtgttcttccaaacattaaccctgttttgctacctaagaagactcaggttgctaaggaaccanaatctccatccaaggctaacaagtctccaaagaaagcttaaatgtttttat

SEQ ID NO: 241683 - DNA, 393 bp, Glycine max
gctaagctgaaagaagaaaaaatgtctggcgtgaagagagcactgaggcagttcaccttcggaaccggcaagaccgccggtcgcaactcggcggggcgcataacgtccttccaccgcggcggcggagccaagcgcttgcaacgaaccgtcgatcacaaacggaataccgcttcttctctcggcgtcgtcgaaaggatcgagtacgaccctaaccgctcctccaaaatcgccctcgttcgctggatcgaaggcgtccatcaccgtcgccgccgcgctgcctccgccaacgccgcttcgcccaagctcctccatctcgattccgccactaacgacgctaacagcattcgcggcgttttccctctcaattcgatgctgccgcacactcacgctgga

SEQ ID NO: 241684 - DNA, 381 bp, Glycine max
gacaatcgaacgggaaagggcgtcttcataaacgccgcccaaaacttctcatacccttttattcattccattcgtttctagggttttcttttctttgccgagaaaatgagagagtgcatttcgatccacattggccaggccggcatccaggttggaaacgcctgctgggaactctattgccttgaacacggcattcagcccgatggacagatgccgagtgacaagaccgttggcggaggagacgacgccttcaacacatttttcagcgagaccggcgccggaaagcacgtgccccgcgccgtcttcgtggatcttgaacccaccgtgatcgacgaagtccgaaccggtgcgtaccgggagctcttccaccggagcagctga

SEQ ID NO: 241685 - DNA, 385 bp, Glycine max
  unsure (1)..(385): unsure at all n locations
gattgaagaaaaaaggaagggtaagtaaattgggaatggtggtggtagtgccaggtgtctgtctgaggagaaaatagaataaaaagctatgaaattttggcacaaggtctgattgtagaattgaagaagatgactggggggggtatcactatgcaatcgacgccgggaagctcaagatacttggatttgtatccagagcggaagatgtcctttttcaaaaatccttacattctcggactggctgctgtcgccggcatcggtggtctcctcttcggctacgacactggtgtgatatcaagggctcttttatacattaaggatggttttgangaggttagaaacagcaatcttctccaggaaacaatagtcagcatggctattgccg

SEQ ID NO: 241686 - DNA, 386 bp, Glycine max
gaaagtactgcctaagtcgtcctcatatcttccaccctttggcttattagtgggagcaatacatatcattcattcagaggcaacacaggagttgtaaattaagagcatggctgcacaagctcttgtatcatcatcatctcttaccttctcagccgaggctacaagacaaagtcttggaccaagatcactccaatctccatttggcttctcaagaaaagcctcctttcttgttaaggcagctgctactccccctgtcaagcaatgatcagacagacctttgtggtttgcatcaaagcaaagtctttcctacttggatggcagccttccgggtgactatggatttgaccctctgggactttcggaccctgaaggaacaggatggttca

SEQ ID NO: 241687 - DNA, 436 bp, Glycine max
  unsure (1)..(436): unsure at all n locations
aattcncgagctcgacccaggcgtcagcccacgcaaccgcccacgcgtccgaagggggccgctctctgagaaaaacagatagtgtgggagagagaagagcggaagagaaaatgacgaccaggttcaagaagaacaggaagaagagaggtcacgtcagcgccggacacggccgtatcggaaagcaccgcaagcatcccggaggtcgcggtaacgccggtggcatgcatcaccaccgtatcctcttcgacaagtaccatcctggtttcttcgggaaggtaggcatgcgctacttccacaaacttcgcaacaaattctacaatccgatcatcaacatcgacaagctgtggtccctcctcccccaggaggccaaagacaaagccaacgccgacaaggaaccctgctcgatgtcacccagttcggttactttaaggttttg

SEQ ID NO: 241688 - DNA, 392 bp, Glycine max
gatgcatagcaattccaaattccaaattgtttaaacctaattctcatttcttcatcgttcgattcttctcctcctaaagatgcagatcttcgtgaaaactttgaccggtaagaccatcacccttgaggtggagtcctccgacaccatcgataacgtgaaagctaagattcaagacaaggaagggatcccacctgaccagcagagacttatctttgcgggtaaacagcctgaggatggtcgaacccttgccgactacaacatccaaaaggaatccactctccacctcgtgcttcgcctcaagggtggcatgcaaatctttgtcaagactttgactggcaagaacatcaccctcgaggtcgaatcctcggacaacattgataatgtcaaggcca

SEQ ID NO: 241689 - DNA, 382 bp, Glycine max
ggaggagatccttgtccaagagtcatgaagaaactctctgtggaggccatttgcacctgatcattttcaacatctgaaaataagtggaataaagtttccatattgatttattctgcaattgaatacatggtgttttgggtcagctaagtttacacttgtagaccaccactggcattaatttggctttaccaaggtgaaattgcaaatgaatacacaccatgtggttgaaagcctgctgggatgattgttgtggttttatgtgtatatatattggtgttgtggttgttatactgaagtggacgagagggtgaaaaagttacctgatgcacattgagacgacatcgattgagtccatgtgcaaaattggtttttgtttgtgtgg

SEQ ID NO: 241690 - DNA, 384 bp, Glycine max
ggagaaataaccaacagaatctactctctattttcctagcttagattccttctccaatggctcttgccgtttccactacttcttcctcttcagctgcagcagcagcagcagcgtcgagctctttcttctcgcgccttggatcttcatcggacgctaaagctccgcaaactggttcctttcggtttccggagaggcctcaagtttcgtctggtgttgttaatttaactcaaagacgctcctcggtgaggccactcaatgccgaaccgcaacggaatgattctgttgttcctcttgcagcaactatcgttgctcctgaggttgagaaggagaaagaagattttgagcaattagcgaaagaccttgaaaattcatctcctcttgaga

SEQ ID NO: 241691 - DNA, 353 bp, Glycine max
gagaccaaacaaaacactgcacctggttagggatggagtatagcatggcacagtctagttgcaaaactttggtgcagtggttggtagcagcattgctcattgccttgttgggtggtgcacaagctgttgcaatatgtaacatagactcaagtcaattaaacttgtgtcgtgctgcagttactggtcaaaaccctccaccaccggatgagaaatgttgtgcagttgttcgccaagccaatttgcgttgcctctgcagttacaagtctaccctaccttcatttggaataaaccccaaaaatgctttggccttgcctggtaaatgtggtctgcaatggcctcctaattgttgagtg

SEQ ID NO: 241692 - DNA, 314 bp, Glycine max
ggagtggaagtagtagcaagtacgtcgtatatgtggttgatcttttgctggttgtttgttttgttccttccaattgtcagatctgaatcaccggactcactcttcacactcactcacactgaatggcttctgaaggcgaccctcaccaccgccaccaccaccatcaagatcacgatcatcatcatcatgatcatgatcaccatcatcatcacgatggagagggagagaccaactcatgggtaggtaaggatgggaacgtgtaccatagccacgatggtctggcgccgcattctcacgaacccatttactctccc

SEQ ID NO: 241693 - DNA, 284 bp, Glycine max
gattgtgattcatttgcacatttggaaagtgttgtttttctttttttcatttgcattgcaaagcaaaaaccttgcaaattgcaatggcttccaacaaggttattgccaccatcttggttctttctctccttgcctactcaacatcattcaccaatgcatgtggcacatgccacccaaaacctactccttctccccctcctccatcagggaagtgccccaaggacacattgaatctaggggtgtgtgctgatgttctacgacttgttaatgttgttgttggttcc

SEQ ID NO: 241694 - DNA, 396 bp, Glycine max
gacaatcgaacgggaaaaggcgtcttcataaacgccgcccaaaacttctcatacccttttattcattccattcgtttctagggttttcttttctctgccgagaaaatgagagagtgcatttcgatccacattggccaggccggtatccaggttggaaacgcctgctgggaactctattgccttgaacacggcattcagcccgatggacagatgccgagtgacaagaccgttggcggaggagacgacgccttcaacacatttttcagcgagaccggcgccggaaagcacgtgccccgcgccgtcttcgtggatcttgaacccaccgtgatcgacgaagtccgaaccggtgcgtaccggcagctcttccacccggagcagctgattagcggcaaggaa

SEQ ID NO: 241695 - DNA, 355 bp, Glycine max
gagggcgcaatagaaaatacaaagccgtagaagagggctcgctcttttgtgtttgtccgcgaaggaaagaaactctatccttagctatcgcgatggatcggtaccagaaggtagagaagccaagagctgaaactccaatcgatgaaaacgagatccggattactagtcagggaaggatgcgtaactacattacttacgccatgagcttgcttcaggagaaaggttctaatgaaattgttttcaaagcaatggggagagctatcaacaaaaccgtgacaattgtggagttgatcaagaggaggattgtgggcctccaccagaatacagcatttggatcaactgatatcactgatac

SEQ ID NO: 241696 - DNA, 378 bp, Glycine max
  unsure (1)..(378): unsure at all n locations
gatcagagaaagtgaaagtgtctgagagtgtgtgtgtgacttatggagtccaattcagagttcgacgtgattatcatcggagctggcgtcatgggcagctccaccgcctaccacgccaccaaacgcggccttaaaacccttctcctggaacagttcgacttcctccaccactgtggctcctcncacggcgaatcccgcaccatccgcctcacctatccccaccactactactaccctttagtcatggactcttaccgcctctggcaagaggcgcaggcccaagtccggctacagatctacttccaagcccatcacatggacatggcccatcacaacgagcccgccatgcgcgccctcatcgactaatgcggcaacctc

SEQ ID NO: 241697 - DNA, 373 bp, Glycine max
ggggagagaatagagaagagagatggatccagacgcgttggcaaaggcattcgtggagcactactacagcaccttcgacaccaacaggaacggcttagcgaatctctaccaggagggttccatgctcactttcgaagggcagaagatccaaggcgcttccaacatcgttgccaagctcacctccctcccttttcagcagtgccaccactcaatctccaccgtcgactgccagccctccggcgtcaacgccggcatgctcgtcttcgtcagcggaaaccttcagctcgccggcgaacagcacactctcaagttcagccagatgttccatttgataccaacacctcagggaagctattaagtgttgaatgacata

SEQ ID NO: 241698 - DNA, 388 bp, Glycine max
gacggcactcgttttcgttctcgttctggtttatagatctttgcgaaggaggtttacagcgctcaaccaaagatgcagaacgaggaaggacagatcactgagctttacattcctaggaagtgctccgccacaaacagattgattaccgctaaggaccatgcttcggttcagatcaacattgggcatgtggatgagaatggcgtctacaatggccatttctccacttttgccctctgcggattcatccgtgctcagggtgatgctgacagtgctctagaccgcttgtggcagaagaagaaagttgaagttaagcaacagtagacacccaaggaaagttggtaacttcgtaaggtattaatttctacccttgctagagatatttgagtac

SEQ ID NO: 241699 - DNA, 327 bp, Glycine max
gggcacaacagtcagtggtccggctccagagtggagaagaaaagtatcacagggcatggcagcaaatttgtgatattagtcaggctgaatttgaaaaggtctatcaacgtcttggagttcgattggaagcaaggggagagagctactataatgatttaatccctcaaactttggagagattggataatttaggactgattgaagaagatgatggtgctcgtgtgatatttgttgagggtgtaaatataccaattattgctgtgaaaagagatggtggctacaactattcttcaactgatctagcagcactttggaatcgtccaaatg

SEQ ID NO: 241700 - DNA, 383 bp, Glycine max
ggattgattgaagccagcgagtgagtgagcgagccaggtagggttttcggtgttcccctctttgtgttcgttcgcgacgatggggtccatccccgatccaggcgagttgagcgagttgactcagccgagcttcgacgagttccagcgccaaacctctctcatgaccagctgcaccctcctctggaaggagctctccgaccacttctcctccctcgagcaagacctcaaccacaaatccgaagccctcaagcgcaagattcacaccctcgacaactccacctcggactccctccgcctcctcgaccaccgcgaaacctctctcgacgccactctccagatcgccctccgcacgctcgacacgcgccgcacgctgctctctccgc

SEQ ID NO: 241701 - DNA, 446 bp, Glycine max
  unsure (1)..(446): unsure at all n locations
caggtccaaccaacccttagttccggtgccagaagaagacaaaaagggggacaagtttggttagaaaaccaaaaacaataaagatgaaaatgaaagtgcttgttttgtctgttgctacagttttggtagcatatgaatgccatggctcagactaccagaagttccctctccaaatgaaaactgggtttggtgggcaatacagcaatgaggtggcatgtgccagttggaggcttggcgtggaagcaaacaacgtagtcaagtggcaaactgttcctgcagcttgcggagagtacatagctgactacgttctaggagaccaatataggtcagattccaaaacagttaaccaacaagcttatttctatgctaaatccctcagactcacgaacanagatgtctttgtcttggacgttgacgacactactctctctaatctccagtatttt

SEQ ID NO: 241702 - DNA, 400 bp, Glycine max
ggcacaagtttgttgagatagctagaagcaataagatgaaaatgaaagtgcttgttttgtttgttgctacagttttggtagcatatgaatgccatggctcagactaccagaagttccctctccaaatgaaaactgggtttggtgggcaatacagcaatgaggtggcatgtgccacttggaggcttggcgtggaagcaaacaacgtagtcaagtggcaaactgttcctgcagcttgcggagagtacatagctgactacgttctatgagaccaatatagatcagattccaaaacagttaaccaacaagcttatttctatgctaaatccctcaaactcaccaacaaagatgtctttgtcttggacgttgacgacactactctctctaatctccagtattttgc

SEQ ID NO: 241703 - DNA, 367 bp, Glycine max
gaccacaccgagtcgcagaaaaagaaaaaagcgatcatagtttcacttcggccttatccagtttagggtttcggttctctaccctatctttcacgtatcgaaaccttaaatttacgatcaggtctgagcaatctggttggtagaacctttggtcttagtgagtcaagttttatgtctgaattagacgatcaaattcctactgccttcgatccttttgctgatgcaaatgctgatgactcgggtgctgggtcaaaggagtatgtgcatattcgtgtacagcagcgaaatggtacgaaaagcctgacaaccgttcacggattgaaacaagaattcagctataacaagatacttaaagacgtcaagaaag

SEQ ID NO: 241704 - DNA, 367 bp, Glycine max
  unsure (1)..(367): unsure at all n locations
ggttcatcagcttattctcaaacctgatatggagtttgtggataccagaaaactacaattacaacatcaacaacaactgcaacaacagccgcaacattttcatgtgttggcagtggacgacagtgtcatagataggaagctattggggaggctccttagaggttcttcatgcaaagttacctgtgtggactctggagacaaggctttgaaatatcttgggctaatagatgagcttgatgatacttcttcaacctctttagaatcagaatcttctcatcctccacctcaaccattacaacgagagggaatcaaagtgaatttgatcatgacagactattgcatgcctgngatgagtggctatgattta

SEQ ID NO: 241705 - DNA, 293 bp, Glycine max
gggaggttgtttgcctttgccatttttcttcgaatccctggctgaacttgagacttgggagtgaactgaaaaagcataaagtatggcttcgacggcagcgtaccttgctcggcgcgcggcgcagaaggagagggttcggatcctctaccgccgcgccctcaaagacactctcaactgggccgtacatcgccacctcttctacgacgacgcttcaaacctccgcgaaaggttcgaggagaacagacacgtggaagaccctgataccattgacaggctcataacggatgctgaag

SEQ ID NO: 241706 - DNA, 323 bp, Glycine max
ggaacctttgcattctattcattcaagattcagcaagtgcgttttggaagcagagaccgaaatacttcgagatggcccgtacaaagcaaactgctcgtaagtcaactggaggaaaagctcccaggaagcagcttgcaaccaaggctgcacgtaagtctgcaccaacaactggtggtgtgaagaagcctcatcgttatcgccctggaactgttgctcttcgtgagattaggaaataccagaagagcactgagctcctaatcaagaagcttcctttccagaggttggttcgtgaaattgcccaagatttcaagactgatctgcgt

SEQ ID NO: 241707 - DNA, 332 bp, Glycine max
gaaactcaagtaggctatactaaggtgaaaaaggagagatggcagctgcaacatctagtgctgtgttaaacgggtttggatctcacttcttgtgtggaggaaagaggagccatgcccttcttgctgctagcattggagggaaagttggtgcttctgttagtcctaaaagagttattgtggcagttgctgctgcaccaaagaagtcatggatccccgctgtaaaaggtggtgggagtttcatagacccagaatggcttgatggctcgctaccaggtgactatggttttgacccactaggactaggaaaggacccggcattcctgaaatggtat

SEQ ID NO: 241708 - DNA, 439 bp, Glycine max
caggtccaaccaacccttaggccaagcattcggccaagccttcgccggtgccaaaagaacaacaaaagggaaattacaacgtcactcttaaaatcccagctcatagcattcatcttcttccaacgagaatcagtctttgtgttccaaatggctcgtacgaagcaaacagcaagaaagtccaccggaggaaaagctccaaggaagcagctcgccaccaaggcagcacgtaagtccgctccggcgacgggcggcgtgaagaagccccaccgtttcaggccggggacagtggctctgagggagattcggaagtacaagaagagcacggagcttctcataaggaagcttcctttccagaggctcgtaagggaaatcgctcaggacttcaagaacgatctacgcttccagagcagtgctgtctccgctcttcaagaagccgctg

SEQ ID NO: 241709 - DNA, 405 bp, Glycine max
gaaggggaactaagtagagaataaaatcaaataaggagagcatgcatatgaacatgatgatgaagaacgtgtgtgggtttgcaatagtgatggtggcagtgcagcttctggtggaggtgagtcccaaggcagaggctgtgacttgtacccctgtggagctgagtccttgtttgggggcaataacttcctctcaaccaccatcaacaatttgttgccagaaggtgagggaacaaaggcaatgcctctgtggttacctcaaaaacccaagtctaaggccatatgccaattctcctggctccagaagggttgctagctcttgtggggttccctttccaacttgttaattaccttcatatcatatcatatatagtatgtaataaaccctgttggctggaaattatatat

SEQ ID NO: 241710 - DNA, 378 bp, Glycine max
ggagtcagtgtgtgacatttttttcttcatttctctcttacaattttttgcaatggcacaaacacaaacccagagaccctgttcaagcgtcctcgattctctgggggaagaaattgtgagaatcgtcgcacccgtttcaatatgcatgttcctggtcgtaatcctggtctcaattctcaacaccgattcttctctcttcgtcgcatcgatgagcatggtcaccatcgcgtacaacgaaacaacctcggactccacctgggacaagttcctaggagcccttctgaactccttagccttcgtcgtccttgtcaccttcgcaaccttcgtcttggtcctcctcttccacttccgatgcaccaggttcttaaaactctacat

SEQ ID NO: 241711 - DNA, 381 bp, Glycine max
gctccgaaaaccctaacaacacaggcgcagacgcaaacgcaaacgcaaacgcaaacgcaaacgcagagcgtgatccattgacgaagatggtgcagcgtctcacctaccgcaagcggcacagctatgccaccaagtccaaccaacacagggtcgtcaaaacccctggtgggaagctcgtttatcagactaccaagaagagggccagcggacccaagtgccccgtcactggcaagaggattcaggggattccacacttgaggcctgcagagtacaagaggtcaaggttacccagaaaccgtacgactggtcaacgtgcatatggtggagttttatctggaagtgccgtcagggagaggggatatcgagccttcttagttgaag

SEQ ID NO: 241712 - DNA, 330 bp, Glycine max
gatagatagagagcgcggcataacctaaacttacccttcttctctctgtgtgtgtgcgcatcaaacgcaaccagaagcagccatggccactgcaagaactgtgaaggacgtttctcctcatgagttcgtcaaagcttactcttctcacctcaagcgatctggcaagatggagctgccagagtggactgatattgtgaaaactgcaagatttaaggagttggctccttatgatcctgactggtaatatgtcagagctgcttccatggcaagaaagatctacttgagaggaggacttggtgttggtgcctttcagaagatttatggtgggaa

SEQ ID NO: 241713 - DNA, 345 bp, Glycine max
aaaacaagggagcagcttctggtagtaagctgcaggagctcaacaatgcagtgattgtacaaagcttgactactcagctgactaaagaacacctttccaatttccaagctgttgtttttactgatatcagtcttgagaaagcctttgagttcaatgattactgccacagtcatcagcctcctattgcctttattaaaactgaagttagaggcctttttggttctgtgttctgtgattttgggcctgagtttactgttgttgatgtggatggtgaagaaccccatactggcattattgcatccataagcaatgacaaccctgctctagtatcctgtgttgatgatg

SEQ ID NO: 241714 - DNA, 395 bp, Glycine max
gggacaagtttgttgaaaaagccagaaagcattagatgaaaatgaaagtgcgtgttttgtttggttgctacagttttggtagcatatgaatgccatggctcagactaccagaagttccctctccaaatgaaaactgggtttggtgggcaatacagcaatgaggtggcatgtgccacttggaggcttggcgtggaagcaaacaacgtagtcaagtggcaaactgttcctgcagcttgcggagagtacatatctgactacgttctaggagaccaatatagatcagattccaaaacagttaaccaacaagcttatttctatgctaaatccctcagactcaccaacaaagatgtctttgtcatggacgttgacgacactactctctctaatctccagta

SEQ ID NO: 241715 - DNA, 390 bp, Glycine max
gagggttttatctcattaacgtttcttctcttcactctgcccgctgcatcaatggcttcagagaagaaactttcgaacccaatgagggagataaaagtgcagaagctcgtcctcaatatctctgttggcgagagtggagatcgtctcaccagagcctccaaggtgttggaacaacttagtggccaaaccccagtgttttccaaagcaaggtacactgttcgttcctttgggattagaagaaatgagaagattgcatgctatgtcactgtcagaggtgacaaggcaatgcaacttttggagagtggtttgaacgtgaacgaatatgaacttctcagaaggaacttcagtgatactggttgcttcggcattggtattcaggagcatattgat

SEQ ID NO: 241716 - DNA, 389 bp, Glycine max
gacggcaacagaagaataatcgagacacagatcatagtgatcattttttaatttctcagatttatccgacgtcgctgcagatccaccaaccgttatggctgccttcagcggtgatgaaacggcaccgtttttcggcttccttggcgccgcagctgccctcgtcttctcctgtatgggagctgcctatggcacagcgaagagtggcgtgggcgtggcttccatgggtgtaatgagacctgagctggtgatgaagtcgattgttcctgttgtcatggctggagttttgggcatttatggccttattattgctgttattatcagtaccggtattaatccaaaggccaaatcctattacctctttgatggttatgcacatctctcttctggtc

SEQ ID NO: 241717 - DNA, 384 bp, Glycine max
ggaggtgcagttgctgcagagtgaggcgttcgattaacgtttggcgatcacagaagagaagggaatggagttttctcaagatgattttgatcggttactgttattcgaacacacgcgaaagactgctgaagcaaactacgcagagaatcctcaagacgctgataatctgaccaggtgggggggagctttgatcgagttgtcgtcattccaagctcctagggatgccaaggcgatgattgatgatgccctttcgaagctggaggagtctttgctgatcaatccaactaagcatgacactctttggtgcttgggaaatgcaaacacgtcttatgcttttctaatccctgatataactgaggcaaagggttattttgacaaggcact

SEQ ID NO: 241718 - DNA, 391 bp, Glycine max
ggtcggaaaaagaagaagagaaaaaagatgagcgacggaggaaaacgacaaggtggaagagcgttgccgccgccgccaagaggccctccgcctcctcccccctctcgccctcgcctcgaacccgtcgatcgcgaaaagacatgtccgttactgctgcgagtgttcactaagattgggagtcaccattccatggaagactttgccgtcagaggcaaagagcccaaagacgaggttcagatttacacctggaaggacgctactctccgagaactcaccgatcttgtcaaagaagttgctccggctgcaaggagaagaaacgccaaactctccttcgcctttgtattccccgacaaaaactgccgtttcaaagttcaagaggtgggcaagacat

SEQ ID NO: 241719 - DNA, 348 bp, Glycine max
agacgacagaaggggaactaagtagagaataaaatcaaatcaggagagcatgcatatgaacatgatgatgaagaaggtgtgtgggtttgcaatagtgatggtggcagtgcagcttctggtggaggtgagtcccaaggcagaggctgtgacttgtacccctgtggagccgagtccttgtttgggggcaataacttcctctcaaccaccatcaacaatttgttgccagaaggtgagggaacaaaggcaatgcctctgtggttacctcaaaaacccaagtctaaggccatatgccaattctcctggctccagaagggttgctagctcttgtggggttccctttccaacttg

SEQ ID NO: 241720 - DNA, 189 bp, Glycine max
ggatagcaaaatcgtttctccaatttaatcaccattgtaaaaccaattcccttcgtcgttttcgattaagagagcaatggcacgtaccaagcaaaccgctcgcaagtccaccggaagaaacgcttcgaggaagcaattggcaaacaaagccgctcgcaagtcaaccccggcgaccggcggagtgaagga

SEQ ID NO: 241721 - DNA, 387 bp, Glycine max
tacgctcacgaattcccaggcccaaccaacccttaattccggcaccaaaagacgaacgaatggggaaacttgaacctttaaaggaccttaaaggcacaggttttcctcccctcaacgtcaaatccaatccaattcactttgattgtgtgtctctccgatcttcaaatccgcaacaaccatggtcaggggattgctcaacaagctcgtctctcgctccctctccgtcgccggaaaatggcagcacaaccaactccgccgcctcaacatccacgagtaccacggcgctgaattgatgagcaaacacggacttaatgttccgacaggcgtggctgtttcctctgttgaagaggttagaaacgccatcaaggaccttttcccaaatgaaaa

SEQ ID NO: 241722 - DNA, 392 bp, Glycine max
ggcagccaaagaaaagaaaatcctcaattttctgagcagccaaacactctctctctgtctctcgaaaattctcagtttgcagagaaaatctgaatcatgtcgtggcaagcgtatgtcgacgatcaccttctgtgtgacatcgaaggtaaccacctcactcacgctgctatcatcggccaagacggcagcgtttgggctcagagtaccgacttccctcagttcaaacctgaggagataactgccatcatgaatgactttaatgagcctggatcacttgctccaactggattgtatctcggtggcaccaaatatatggtcatccagggtgaacccggtgctgtcattcgagggaaagaagggtctggtggtgttactgtgaagaagacggtgcg

SEQ ID NO: 241723 - DNA, 388 bp, Glycine max
gataacagcaaggattccaaggccgctggcgacaagagattcaaaacgctgcccccagcagagtctcttcctaggaatgaaaccattggaggctacatctttgtttgcaacaatgataccatggctgagaatctcaagagacaactctttggtctgcctccacgatacagagattctgttcgggccattactccggggttgccccttttcctttacaactattccactcaccaactccatggaatctttgaggctgcaagctttggagggtcaaatattgattcatcagcttgggacgataagaagtgccctggtgaatctcgtgtctccgcccatgtacgagtgataactaggaaaacttgtgaaccactggaggaggattccttca

SEQ ID NO: 241724 - DNA, 390 bp, Glycine max
gggcacatgttcatcctttgattatatcacatactcaccatggaggctaagttggccaccaccataatacttattttctccgtaatttggcttatgagggtgaatggcatagacccttgtgcctctcaagcggataattccgacctgaacgtgattcccatctacagcaaatgctcaccgttcaaaccaccaaagtcagactcatcgtgggacaacagaattataaacatggcctcaaaagacccactccgattcaaatacttgtccaccttagtgggccaaaagaccgtgtccacggccccaatcgcttccggccagaccttcaacatcggcaactacgtcgtcagggtcaaattggggaaccctggtcaacttttgtcatggtcctcg

SEQ ID NO: 241725 - DNA, 317 bp, Glycine max
gacatcacgacatcacatcgcagagaagaacagagagagatccatccatcaattccaatggccgatcagctcaccgacgaacagatctccgagttcaaggaagccttcagcctcttcgacaaggacggggatggttgtattaccaccaaggaacttgggaccgtgatgcggtcacttggccagaacccaactgaggcagagctgcaggacatgataaatgaggttgatgctgatgggaatggtaccattgatttcccagaattcctgaatctcatggctcgcaagatgaaagacactgattcagaggaggagctgaa

SEQ ID NO: 241726 - DNA, 365 bp, Glycine max
gacagacaagggtttcttccgggttcacgtttcacaatcactttttgcgcttctctcactcactcactcttcttcttcctcttcgtgtggttttctttctcgaactcgaacgaagatgcgtgagattcttcacatccagggagggcaatgcgggaaccagatcggagccaagttctgggaggtggtgtgcgcggagcacgggatcgattcaacggggaggtaccaaggggacaacgagttgcaactcgagcgagtcaacgtctactacaatgaagcgagttgcggaaggttcgtgcctagggcggtgctcatggatctggaaccagggaccatggaaaacgttaggatctggtccctacggtcag

SEQ ID NO: 241727 - DNA, 339 bp, Glycine max
agagggagagatattcaagaggaagacaccaattatgaagagaaagatagtttgccaaaccctttgcaagcagcagcagcatcagctttggccttttctgttggtgcaatggtgccattgcttgcagcatcatttataagggaatataaggtgaggcttggagtgattgttgctgctgtgacttttgctttggtggtgtttggttggttaggggctctgtggggtaaggctccagtattgaggtctgctttgagggtcttgtttgggggttggatggccatggcaatgacttttgggctaaccaagttgattggatcaagtgcactttagtatagtttt

SEQ ID NO: 241728 - DNA, 323 bp, Glycine max
ggttctaatgtatgtgattgttgtgactcgttcttcttcgtcgttatcttcttctattgttgtttgtgtgtttgtttcttctctcacctgaaaatgtcttgctgcggtggtaactgtggttgcggaagcgcctgcaagtgcggcaacggctgcggaggctgcaagatgtacccagacttgagctacaccgagtcaaccaccaccgagaccttggtcatgggagtggcaccagttaaggctcaattcgagagtgctgaaatgggtgttcccgctgagaacgatggctgcaaatgtggagctaactgcacctgcaacccctgcac

SEQ ID NO: 241729 - DNA, 344 bp, Glycine max
aaccaagccttcaccgaagccttggccgctgccaaaagaccacagaaaggggaaccagaattaaaaaccaagaagaagctcccaaaggtttaaacttttggctgtgttaagcttctcagcactgtcactgagtcgttgtcctgcggaggataatggacttgttatgaacttctacaaggaatcatgccctcaggctgaagacatcatcaaagaacaagtcaagcttctctacaagcgccacaagaacactgctttctcctggctcagaaacatcttccatgactgtgctgttcagagttgtgatgcttcactgttgctggactccacaagaaggagcttgtctg

SEQ ID NO: 241730 - DNA, 295 bp, Glycine max
acgattgataaggtttggaggaacacgaaggttcgaaaatggtggtgaagattcggctatccccgttgggatgtaagaacaaacccttctatcgggtcatggccgctgatagcagatccctagagatggcaaacacctcgaagttctcggttactacaatcccttaccaggtcaagatggtggcaagagaatgggtctcaacttcgacagactgaagtattggctttctgttggagctcagccttcggaacctgttgaaccgcttctattccgagctggaatgctgcccccacct

SEQ ID NO: 241731 - DNA, 346 bp, Glycine max
acgcctgaaagaagataaaaaacagaggctgcacaagctccaagaattagcttctcagttgattgatctttggaatctaatggatactcatcccgaggaaaggagactatttgaccatgttacctgtaatatgtcagcttctgttgatgaagtcactgttcctggtgcccttgctctggatctgattgagcaggctgaagtggaagttgagagacttgatcagctgaaagccagcaggatgaaggaaattgctttcaagaagcaagcagagctcgaagagatatttgcccgtgctcatatagaagtagattcagatgctgcccgggaagaaagatatggcattgat

SEQ ID NO: 241732 - DNA, 389 bp, Glycine max
gatagctgagagagaaaggaaaggttaactaagaagcaatacttcaatggccacccttgttgttcataaccaaacttcttctgctcaagatgctgaggctctccaacaggctttcaaaggatggggggctgatgacaaggccattatagcaatactgggtcacagaaatgttcatcagaggcaagaaatcagaaaagcttatgaggagatttaccaagaggatctcatcaaacgccttgagtccgagatctctggtgactttgagagagctatgtaccggtggatgttgcagcctgcggatcgtgatgctgttttggtgaatgtggcaatcaagaatggcaccaaagactaccatgtgattgcagagattgcttgtgtcctatcagctg

SEQ ID NO: 241733 - DNA, 383 bp, Glycine max
  unsure (1)..(383): unsure at all n locations
gggtgagggtttggagcttgagggtttggtgagtgaagggtatgagttgttgggtgtttttaactggagtgaccattttccggttttggggtggttggatttgcagggtgtgaggaagaggtgtacgtgtttggttgaaaaggttaatgtttttgttggaggggttattaaggagcatagggtgaagagggagaggggtgagcgtgtgaaggatgaaggaactggggattttgttgatgttttgcttgatttggagaaggaaaacaggctcagtgaagctgacatgatcgctgttctttgggaaatgatatttaagggaactgacacngtggcaattctgctagagtggactctggctcggatggttctccaccctgaaatca

SEQ ID NO: 241734 - DNA, 366 bp, Glycine max
ggtgccgaaggataggaacgtgacgtgggatgctgaggaagaggaggaaaacaagaagaggttgctgaagggtgttgccaagaacgtgaaatggacggctgagatcacgggaaaaggggagaagagtgggagctcgagaaagtacacgtttcaggtgcagagtggggatgctgagaagaaaaaggagaaggagaaggagaaggagaagaagaagggaaatggatcgcgcattgtggagattcacgagccaagtggtcatagagatgtggttttgagacaggcatttgccaagaggttcggagctgttcaaaatgagaagggcaaaaagaaggacttgtccccctcaagatgctgcattgttgatcc

SEQ ID NO: 241735 - DNA, 376 bp, Glycine max
ggtttgattagggtttgtcattagcacttcttcttttcacactgccgctgcaacaatggcttcagagaagaaactttcgaacccaatgagggagataaaagtgcagaagctcgttctcaatatctctgttggcgagagtggagatcgtctcaccagagccgccaaggtgttggaacaacttagtggccaaaccccagtgttttccaaagcaaggtacactgttcgttcctttgggattagaagaaatgagaagattgcatgctatgtcactgtcagaggtgacaaggcaatgcaacttttggagagtggtttgaaggttaaggaatatgaacttctcaaaaaggaattcaattgatacgggttgcttcggctttgg

SEQ ID NO: 241736 - DNA, 255 bp, Glycine max
gaatctagtggaagagtgaataagagatatcaatatattatgataatggagggatacaataagaacgttatgattgtggggatggtgttgggcatggccatgattgggatggccaatggccaatactcgttttgtcgcatgcccagcgatgggttggcggcatgcaagccgagtgtgactggggactatcctgctgattcctccactgcttgttgcccagccattgccaaggctgatcttaaatgcttctgccgc

SEQ ID NO: 241737 - DNA, 432 bp, Glycine max
ccaacccttcgttccggcaccaaaagaacacagaaaggggaacggaacaatttgcaaaaagttgggctggatttgtggacgatgtaagaaaacacaaacaacacaaaattcattgcacagtgttattttcagtatcagcatcatggctccaattgcagtgggagatgtccttccagacggcattttggcttacttggatgaagaaaacaaaccccaaactgtctctattcactctctcgccgccggcaagaaagtcatcatctttggggttcccggtgccttcactcctacatgcagcttgaagcacgtgcctggcttcattgagagagcagaagagctgaaaggaaagggtgtggacgaaataatctgtatcagcgtgaatgattcctttgtgatgaactcatgggccaaaacgttcccagagaacaagca

SEQ ID NO: 241738 - DNA, 277 bp, Glycine max
aggggaaactttgcaatccaatcaatcaagattcagcaagtgcgttttgggagcagagaccgaaatacttcgagatgggccgtacaaagcaaactgctcgtaagtcaactggaggaaaagctcccaggaagcagcttgcaaccaaggctgcacgtaagtctgcaccaacaactggtggtgtgaagaagcctcatcgttatcgccctggaactgttgctcctcgtgagattacgaaataccagaagagcactgagctcctaatcaagaagcttccttt

SEQ ID NO: 241739 - DNA, 375 bp, Glycine max
ggcacatgttcatcctttgattatatcacatactcaccatggaggctaagttggccaccaccataatacttattttctccgtaatttggcttatgagggtgaatggcatagacccttgtgcctctcaagcggataattccgacctgaacgtgattcccatctacagcaaatgctcaccgttcaaaccaccaaagtcagactcatcgtgggacaacagaattataaacatggcctcaaaagacccactccgattcaaatacttgtccaccttagtgggccaaaagaccgtgttcacggccccaatcgcttcgggccagaccttcaacatcggcaactacgtcgtcagggtcaaattgggaacccctggtcaacttt

SEQ ID NO: 241740 - DNA, 333 bp, Glycine max
ggggcgaggtagccagagagtgatacaatacagagtgcgttgttgctccttcgccacaactccctgccaacatgggtatctccagagattctatgcacaagaggcgtgccactggtggcaagaagaaggcatggaggaagaagtggaagtgaagctgtaactcgcaagactcgtatactagatgtggtttacaatgcctcaaacaacgagcttgtgcgtactcagactcttgtaaaaagtgctattgttcaggttgatgctgctccattcaaacagtggtaccttcagcactatggtgttgagattggtaagaagaagaagacagctgccaag

SEQ ID NO: 241741 - DNA, 338 bp, Glycine max
gactgatattttatattttaaccagctatatatattacaagaaaacatagatagtgtgtgttcatcagcttattctcaaacctgatatggagtttgtggataccagaaaactacaattacaacatcaacaacaactgcaacaacagccgcaacattttcatgtgttggcagtggacgacagtgtcatagataggaagctattggagaggctccttacaggttcttcatgcaaagttacctgtgtggactctggagacaaggctttgaaatatcttgggctaatagatgagcttgatgatacttcttcaacctctttagaatcagaatcttctcatcct

SEQ ID NO: 241742 - DNA, 363 bp, Glycine max
ctctgaattgtaaaaatgtcgctcggagaaactgcttgttcatacgcagctctcatccttcatgaagatggaatcagtgtaactgccgacaagatcagcaccttgttggaaactgcaaaggttcaagtagatacctattggccaaccttatttgctaaacttgctgagaagaaaaatcttggcgatttgatagccaatgcagcaggcggtggtgcaccagttgctgttgcagctgcccctgttgctgcctcaggtggtggtggtgctgctgctgccgccccagctgctgaggagaaaaagaaggacgaatctgaatgaggagattgatgatgatatgggatttggcttgttcgattagggaca

SEQ ID NO: 241743 - DNA, 450 bp, Glycine max
  unsure (1)..(450): unsure at all n locations
taccggttaggaattcccggctctacgcaggcgtattggccggctgcaaaagaacaacgaaagggcacaagtttggtgagaaaactaaaacaataagatgaaaatgaaagtgcctgttttgtatgttgctacagttttggtagcatatgaatgccatggctcagactaccagaagttccctctccaaatgaaaactgggtttggtgggcaatacagcaatgaggtggcatgtgccagttggaggcttggcgtggaagcaaacaacgtagtcaagtggcaaactgttcctgcagcttgcggagagtacatagctgactacgttctacgagaccaatatagatcagattccaaaacagttaaccaacaagcttatttctatgctaaatccctcagactcaacaacanagatgtctttgtcttggacgttgacgacactactctctctaatct

SEQ ID NO: 241744 - DNA, 386 bp, Glycine max
tgaggacaaaatctcagggaggaacaagaattcaagccttaggaaccgtaatggaccggcgcagatgccctacactgtgcttcttcctaccagtggggaaggccttactttcagaggaattcccaacagcatctctatctaatgagagtgtgtggtgtgtggtgtgtggttttctttccttccaacgtacctctcattgacaaataaacgtgcaaacttatgtgtgcataattttcttatgtatgcttaagttttgtaattggatgctatctagtttttcatatctaatagggtgttgtgtcagtttttatgtatagtattgtgctcctatcatgttcacccgtatcatgttcacccgtatgtaagtctgatattctgatctatga

SEQ ID NO: 241745 - DNA, 384 bp, Glycine max
gatcgcatttcatagcactcaccctcattaccaacacgaaagcatagccaaaaccttttttcgaagtctctgattttcctaatggctccggcaaaggcagagaagaagccggcggagaagaagccagcggcggagaaggcaccggcggagaagaagccgaaggcggagaagaagatctcgaaggaaggagggagcgagaagaagaagaagcgcacgaagaagagcgtggagacctacaagatctacatcttcaaggtcctcaagcaggttcaccccgacattggtatttccagcaaggccatgggcatcatgaacagcttcatcaacgacatcttcgagaagctcgcccaagaagcgtcgcgtttggctcgctacaacaagaag

SEQ ID NO: 241746 - DNA, 381 bp, Glycine max
gactcacaactccataacacaaggcagaaagcaagctcatcctagagttttaaaaatggcagcagcctcctccatggctctctcttccccatccttggctggcaaggccgtgaagctgggcccatcagcccccgaagtcgggagggtcagcatgaggaagaccgtcaccaagcaggcctcctccggaagcccatggtacggcccagaccgcgtcaagtacttgggcccattctctggcgagcccccgtcctacctcactggcgagttcccaggtgactacggctgggacactgctgggctttcggccgacccagaaaccttcgccagaaaccgtgagctcgaagtgatccactccaggtgggccatgctcggggccttggg

SEQ ID NO: 241747 - DNA, 362 bp, Glycine max
agcccacgcgtccgaagggggaggtacaaaaccctaatcaccgcttcgagctctgtcattgtctcaagttccaggtttcagcgatttcgatctcgcatagcattctacaatggccactattccagttaaccccaagcctttcttgaacaatttgactgggaagcccgtaattgtgaaactcaagtggggaatggagtacaagggctatctcgtttccgttgattcctacatgaacttgcagctggccaacactgaagagtacattgagggacagtttactggaaatttgggagagattttaatcagatgtaacaatgttctctaccttcgaggagtaccggaggatgaggaaatcgaagatg

SEQ ID NO: 241748 - DNA, 401 bp, Glycine max
gattccatagaaatgtcaggtgttggccctctttctcaagattgggaacccgtcgtcctccgcaagaaggctcccactgccgccgccaagaaggatgagaaagccgtcaacgccgcccgccgctccggcgccgaaatcgaaaccctaaaaaaatataacgctgggacaaataaagcagcatctagcagcacttcattgaacactaagaggctggatgatgatactgagagtctagctcatgagaaggtaccaactgaacttaagaatgccataatgcaagctaggatggacaagaaacttactcagtctcagcttgctcaactgatcaatgagaagcctcaagtgatccaggagtacgagtcatgaaacgccattccaaaccagcagataattggcaagtt

SEQ ID NO: 241749 - DNA, 455 bp, Glycine max
  unsure (1)..(455): unsure at all n locations
taccggtcaggtattcccggctctacgtcntcnaactgcattctactaattagtttcacgagtgattctaacactacttgtgacttttgtacctctgtgtgtcattgtttccctgtgcagttaagaaagatactgctgcagaacttgccaagaaaagggaacaggagcggcagaggcaggaaaagcttgcagaaactagtagattgagtcggtatagatgccgcagccgcagcatgagtttcagcggttcccctccaagaagataccggcgcagtagaagtccaagtagaagcagaagttccagaagatattattctagttctcattcacggtccccttctcgcacacgttctccgtctccttactctcgatctcccaggataagaaatcgatcaaagcactgatggaatgctatatacgagtacaaggctgacgaagtttgtgtggcatttatt

SEQ ID NO: 241750 - DNA, 391 bp, Glycine max
  unsure (1)..(391): unsure at all n locations
gagggaacttcctcgaatcgcatctcgaatctcaatcacaatttcgctccctttgctcacatgcgacaaatggtcagggctagaacgctaatcaagatgtcaaagccacttgccgacgccggaggcgaaatcgacaccctaaaaaggatataacgctgggacaaataaagcagcatctagcagcacttcattgaacactaagacgctggatgatgatactgagagtctagctcatgagaaggtaccaactgaacttaagaaggccataatgcaagctaggatggacaagaaacttactcagtctcagcttgctcaactgatcaatgagaagcctcaagtgattcaggagtacgagtcangaaaggccattccaaaccagcagataattggc

SEQ ID NO: 241751 - DNA, 316 bp, Glycine max
gtccaaattccattttcttcgaagccatacacttttcactaaaacaaaattgattaatgttagggttttggaaagccaatttcagagcagactcgaaaccctagattccacaaatccatgccagcttgatctcgcagcttccgtcaatggcgatcatcggcgacgcgcttcgccaggcgttcatgccgaagcgcgagtacgagagcctcagagaagaagacaaggcgtggggcaagcttcagaggcccgtgacggtggcttccgttgccgtcatcgtgctcgcaatcgccgtgtccactgttatcagtttgaaaat

SEQ ID NO: 241752 - DNA, 365 bp, Glycine max
ggagagagagagagagagaggcacttggaatccaaaaatgagagaaatcatcagcattcacataggtcaggccgggatccaggttggcaactcctgctgggaactctactgcctggaacatggcatccagcccgatggcatgatgccaagtgactcctccttcggtgtagcccacgacgccttcaacaccttcttcagcgaaaccggatccggcaagcacgtccctcgcgccgtcttcgtcgatctcgagcccaccgtcatcgacgaagtccgttgtggcacttaccgtcaactcttccaccccgaacaactcatctccggcaaggaagatgccgccaacaactttgccagaggccactacaccg

SEQ ID NO: 241753 - DNA, 336 bp, Glycine max
ggagaatggagtttcaagggttaccggaaggttgcattgctagtatactctctcgcactacgccggcggacgtgtgtaggttttccgtcgtatcaaagattttccgttcggccgctgaatcggacgctgtgtggaaacgttttctcccttccgattaccattccatcatttcccagtctccttcgcctcgcaactatccttccaagaaggagctcgatctcgctctctcggatcgccctatcatcatcgatcagggtaaaaagagctttcaattggagaaaaagagtgggaagaagtgttacatgcttgctgctagagctctcagcattaattggg

SEQ ID NO: 241754 - DNA, 318 bp, Glycine max; identical to SEQ ID NO: 239438

SEQ ID NO: 241755 - DNA, 358 bp, Glycine max
  unsure (1)..(358): unsure at all n locations
gactgcaactttgctctctgtgaggcttcaatttctaattagggtttcgcttagagtaaccaataaccatgggagtcttcacctttgtcgtccgcaaatccggcagcgaatggagcgccaagcaacattccggcgacatcgaggcctccgccgattccaccttcgatctccaacggaagctcgtgcaagccgctctcgccgttgattcctccggtggagttcagtcctctttctctcccgtgtctcctacctccgctgtgttccaggtgatagtgggtggtgcagtattcgttggaggtggtggtggtgctgttgcagctgcnactgcangtggtgctgccgcagctgatgcctgccc

SEQ ID NO: 241756 - DNA, 353 bp, Glycine max
ggtctataaagtaagtttcattttatcctttgaagtgtgtgagagagtgaaaacatggccactatcaagccaactggaaagaaggcatgtgtgattggagggagtggatttatggcctctttgttgatcaagcagttgcttgaaaagggttatgctgtcaataccacagttagagacccagataatactaaaaaaatacctcaccttttggcactgcaaagtttgggcgaattgagcatatttggagcagatttaactggtgaaaaagattttgatgctcctatagcaggctgtgaacttgtcttccaccttgctacacctgtgaacctttgcctctgaagatcctgagaatg

SEQ ID NO: 241757 - DNA, 343 bp, Glycine max
aggctatgacttgcttaagaaaatcaaggaatcttcatctttgagaaacataccagtggtgattatgtcatctgaaaatgtgccgtcaatgattaacagatgtttggaggaaggagccgaataatttttcttgaagcctgtgaggttgtcagatttgaacaagcttaaaccccacatgaagaaaaccaagttcaaagatcacaagcaagaaacagtagaaatgtttgaagactcagaagttcaacagcaacagtcacaacaacaaatcatcatccaaaatgagcatcaccaagcaccaaaattacaagttcttcagccagagtcagaatcagagtcacatcca

SEQ ID NO: 241758 - DNA, 338 bp, Glycine max
gacaacacagaacaaaaacaaagaaaaaaaaaaaacccttagccaacacaaccatcatggccacctctgctattcagcaatcagcattcactggtcaaactgctctgaagcagctcaatgagttcgtccgcaagaccggtggcgccggcaaaggtcgcactaacatgcgccgcaccgtcaagagtgctcctcagagcatttggtatggccctgaccgtcccaagtacttgggtccattctcggagcagattccatcatacctgaccggagaattccctggtgactacggatgggacactgctggattatcagctgacccggaaaccttcgccaggaac

SEQ ID NO: 241759 - DNA, 416 bp, Glycine max
gatctggcagcagaagaacaagtagttgagaactaagaaggagaagcaaatggcttcctcaatgatctcttccccagctgttaccactgtcaaccgtgccggtgccggcatggttgctccattcactggcctcaagtccatggctggcttccccaccaggaagaccaacaatgacattacctccattgctagcaacggtggaagagtgcaatgcatgcaggtgtggccaccagttggcaagaagaagtttgagactctttcctacctgccagaccttgatgatgcacaattggcaaaggaagtagaataccttcttaagaagggatggattccttgcttgggattcgagttggagcacggtttcgtgtaccgtgagcacaacaggttcaccagatactacgatggacgctactgga

SEQ ID NO: 241760 - DNA, 361 bp, Glycine max
  unsure (1)..(361): unsure at all n locations
ggagtgagcaagagtgaggagcgaagagaatggctcccaagggtttaatctttttggctgtgttatgcttctcagcactgtcactgagtcgttgtcttgcggaggataatggacttgttatgaacttctacaaggaatcatgccctcaggctgaagacatcatcaaagaacaagtcaagcttctctacaagcgccacaagaacactgctttctcctggctcagaaacatcttccatgactgtgctgttcagagttgtgatgcttcactgttgctggactccacaagaaggagcttgtctgagaaggaaacagatagaagctttgggttgagaaatttcanggtacattgagacatcaaaga

SEQ ID NO: 241761 - DNA, 381 bp, Glycine max
  unsure (1)..(381): unsure at all n locations
ggtgctaatcttatcttatccctctaatcactctagctgttgcaaatttctactatttttcaatggcttctgcagatgttgagttccgttgctttgttggtgggcttgcttgggtcaccggcaacgatgccctcgagaaagccttttcaatctacggcgacatcgttgaatcgaaggttatcaacgaccgtgagactggaaggtccagaggattcggatttgtgaccttcgcctcagagcagtcaatgaaagatgcgatcgcaggaatgaacggccaggaccttgacggtcgtaacatcactgtcaacgaagctcagacccgcgccagccgtggtggtggtggaggcngtggtttcggaagtggtggtggatacaaacgcg

SEQ ID NO: 241762 - DNA, 358 bp, Glycine max
gaagaccaaacaaaacttggcaccaggttaattaaggagagggtatagtatggcccagtctagtggcaaaactttggtgcagtggttggtagcagcattgctcattgccttgttgggtggtgcacaagctgttgcaatatgtaacatagactcaagtcaattaaacttgtgtcgtgctgcagttactggtcaaaaccctccaccaccggatgagaaatgttgtgcagttattcgccaagccaatttgcgttgcctctgcagttacaagtctatcctaccttcattcggaataaaccccaaaaatgctttggccttgcctggtaaatgtggtctgcaatcacctcctaattgttgagtg

SEQ ID NO: 241763 - DNA, 195 bp, Glycine max
gacacattcatattttccttatctctatatataccccattcctctcgttcttgtttttccacattcatattttcctttcgttggctttcattttccctcactttctcgctccccaaatgctcctctctctcctccaatggccgaccatctcaccgacgaccagatctctcagttcaacgatgccttcaccctctt

SEQ ID NO: 241764 - DNA, 351 bp, Glycine max
gcaccacaaaccacataattcgacaacactctctcctaattgttcaacttctggagctacttccaccccactagctaccttcattgtattttcagtctccaaactccaaagggaaaatgagcagaccaggagattggaactgcaggacatgcaaccgcctgaacttccagagaagagagtcgtgccagcgatgcggggagcctaggagtggtggcggcggcgactacggcggaggcttcggtggtggcagaggctcttcctcctttggcttcaccactggcccggatgttcgccccggtgactggtactgcaccgtcggaaactgtggagcccacaacttcgccagccgct

SEQ ID NO: 241765 - DNA, 348 bp, Glycine max
ggcaactaagtagagaataaaatcaaatcaggagagcatgcatatgaacatgatgatgaagaaggtgtgtgggtttgcaatagtgatggtggcagtgcagcttctggtggaggtgagtcccaaggcagaggctgtgacttgtacccctgtggagctgagtccttgtttgggggcaataacttcctctcaaccaccatcaacaatttgttgccagaaggtgagggaacaaaggcaatgcctctgtggttacctcaaaaacccaagtctaacgccatatgccaattctcctggctccagaacggttgctagctcttgtggggttccctttccaacttgttaattaccttc

SEQ ID NO: 241766 - DNA, 353 bp, Glycine max
gaagagatttgggggacatattgtggctggatatgcgtgtcaggtcaatttttctccagatggacgatttgtcatgtcgggggatggtgaacggaactgttggttctgggactggaagacttgcaaggtctacagaactctcaagtgtcacgaacgtgtttgcattggttgcgagtggcatcccttggaacagagcaaggtacccacgtgtggctgggatgggatgattaagtattgggactagtttctcctgatcaacctgttgctggaatcagttggcacaagcagggcaaagaaaggcactacttcacgacaggacagataagaaacattgaattcaaaatgttgaaaaa

SEQ ID NO: 241767 - DNA, 357 bp, Glycine max
gactccagtgtggaaaatcaaaacaaggtgccatctttgtttgttagacatgaccatggccatgcccctgtgtctgatgttccttcttctgcacatagcttgggtggcatcgtcggatctccgacctgggttttactcaaaaacatgtccaaaagcggaactcatagtccgagatgtgatgaagaaggcccttatgagggaacccaaaagtgttgcctctgttatgcgcttccagttccatgattgctttgtcaacgggtgagatggttctatgttgcttgatgatacaccaacgattctgggggagaaattgagcctctcaaatataaattcgctgacatcgtatgaagttgtcga

SEQ ID NO: 241768 - DNA, 391 bp, Glycine max
ggttctagtgtatgtgattgttgtgactcgttcttcttcgtcgttatcttcttcttttgttgtttgtgtgtttgttttttctctcacctgaaaatgtcttgctgcggtggtaactgtggttgcggaagcgtctgcaagtgcggcaacggctgcggaggctgcaagatgtacccagacttgagctacaccgagtcaaccaccaccgagaccttggtcatgggagtggcaccagttaaggctcaattcgagagtgctgaaatgggtgttcccgctgagaacgatggctgcaaatgtggagctaactgcacctgcaacccctgcacttgcaagtgaggtgttggagagctaaagcgtcaagcagaaatggcccttagaaataatgataaaaact

SEQ ID NO: 241769 - DNA, 345 bp, Glycine max
ggcagtgatagagataagaaaatgtggcttgtgcagctctcaaccccatttctgaacggacatggtcattccaccacccttctctccaagcacagttcggcggtgactcagacccactgggccccaccgagtttcctgcctcaaatcaatgcgatgaagacaatgcaggggagagtggtgtgctccaccagcgacaagacggtggcagtggaggtggtgcggctggcccctcacccaaagtacaagaggcgcgtgaggaagaagaagaagtaccaggcccacgaccccgataaccaattcaaagtcggcgacatcgtccagctccagaagaccaggcccatcagc

SEQ ID NO: 241770 - DNA, 346 bp, Glycine max
gatagaaagagaaaatgaagtcggtgggtagggttggcggaggagaatcagagcaacgtggacattttcagatgccactgcactatccaaggtacacacaggctgactatgaaacaatgcctgagtggaggcttgattctttgctcaaagagtacggcttaccaatcattggagatcttcatcaaaagagaaactttgccatcggagcctttctttggcctcactgaacctcctttgtttgtaatcatcatcactaattaagcttattatctactatttttgtgtgatttggcagtgcggtacatattttcatttcttcgtttcagagatatatatgttagaaact

SEQ ID NO: 241771 - DNA, 363 bp, Glycine max
  unsure (1)..(363): unsure at all n locations
gagaagaaggttggttgattggtcncattgattccgaagagaaaagaaaagatgtttgagccacaacagctatacactcgcgcgaagaccgaggaattcgacctcgaatcaggagaaaccctctacccagagctgagcgtcggcgagaaccagctccgatggggtttcatccgcaaggtctacggcatcctctccgcgcagatcgtcctcaccaccctcgtctccgtcaccaccgttttctatactccaatcaatgacctcctcaagggcaattccaccctcctcctcatcctcctcttccttcccttcatctttttgattcccctgttgaagtaccagcagaagcatcctcataattacatc

SEQ ID NO: 241772 - DNA, 357 bp, Glycine max
ggagactgcttctgttttatatcacccaatgcaacactctcttctaattcccatctacagttagccccaaatctggggttagggtttcctctgcgtcgatggcttcgaattcgatcgacggcgacgccgttacggggtcgggactgtgcataaacgacgtgttaagggacgacgagctgcgttccattctggggcgagtggagagcgagaaggacaaggaaacgttcgggttggtctgcaagcgatggcttcggttgcagagcacggaaaggaagaaactcgccgcacgtgcgggtccccacatgctccgaaaaatggccgataggttcacacgcttagtcgaactggacctcgctc

SEQ ID NO: 241773 - DNA, 332 bp, Glycine max
ggtgctctttcgtggttgtgccacctctataattctcttccactgtcttgtgttctcctgcaagcctgcaaccacaaaaaccaaatagtttttttggtcaaactcaaagcttttaacttaacagaagcaagaatggtaaaacggagttaagcaagacaaaggaagaaagaatggtgagagagcataacattaacagtggatggccaccaataggggccccactactgaacgtgcagagagatgagtatgatcagcattggagcagcttcgatagctctgtgaatgctgtttcttttggctttgttgccactgccattcttgtttccatgttc

SEQ ID NO: 241774 - DNA, 343 bp, Glycine max
gacggcatttgtcggcggtgacgaaaggaaagaagaagaagaagcgttctttcggagagttcgaagatgtcgggcgttaccaacaacaacgaggaagacaagaagccaaccgaacagggagcacacatcaaccttacggttaaggggcaggatgggaatgaagtttttttcaggatcaagagaagcactcaattgaagaagcttatgaatgcttactgtgaccgacagtcggtggatttcaactccattgcttttctgtatgatggacgccgcctccgagctgagcagactccagatgagttggaaatggatgacggggacgagattgatgccatgcgttcac

SEQ ID NO: 241775 - DNA, 347 bp, Glycine max
ggttctagtgtgtgattgtttgttgttgtaactcgttcttcttcttttgttgttctgtgtttgtgtttgttttttctctcacctgaaaatgtcttgctgcggtggtaactgtggttgcggaagctcctgcaagtgcggcaacggctgcggaggctgcaagatgtacccagacttgagctacactgagtcaaccaccaccgagaccttggtcatgggagtggcacctgttaaggctcaatttgagggtgctgaaatgggtgtgcccgctgagaacgatggctgcaaatgtggaccaaactgctcctgcaacccctgcacttgcaagtgaggtgttgggagagcaagct

SEQ ID NO: 241776 - DNA, 347 bp, Glycine max
atttctagtgatattgttactttcatccgatctcaacacaaggataggaaactaaggctgcttaaaatggaggatgtaagcatgggaatgtgggttgagcgatataacaataccattgcagcagtccagtactcccacaattggaagttttgtcagtatggatgcatggagggctacttcactgcacattaccaatcaccaaggcagatgatctgtctttgggacaaattgtcaagaggtcgagctcgttgctgcaacttcagatgaccacacgaacaactttgcttcttggacgtgtcactgtatctctgtattctttatacccttgtgctgatcctaagttcacc

SEQ ID NO: 241777 - DNA, 308 bp, Glycine max
gacccccaaaccctgctgcataggaagaaaccctagcctctcaccctccctgcgacacgatgcagatcttcgtgaaaaccctaacgggtaagacgatcacccttgaggtggagtcttctgacaccatcgacaacgtgaaggccaagatccaggacaaggaaggcatccctccggaccagcagcgcctcatcttcgccggaaagcagctggaggacggccgcaccctcgccgactacaacatccagaaggagtccaccctccacctcgtcctccgtctccgcggtggcgccaagaagcgcaagaagaag

SEQ ID NO: 241778 - DNA, 382 bp, Glycine max
ggttctagtgtgtgattgtttgttgttgtaactcgttcttcttcttttgttgttctgtgtttgtgtttgttttttctctcacctgaaaatgtcttgctgcggtggtaactgtggttgcggaagctcctgcaagtgcggcaacggctgcggaggctgcaagatgtacccagacttgagctacactgagtcaaccaccaccgagaccttggtcatgggagtggcacctgttaaggctcaatttgagggtgctgaaatgggtgtgcccgctgagaacgatggctgcaaatgtggaccaaactgctcctgcaacccctgcacttgcaagtgaagtgttgggagagcaagcttcaagcagagatagcccttaattaggaataatgat

SEQ ID NO: 241779 - DNA, 352 bp, Glycine max
  unsure (1)..(352): unsure at all n locations
ggagttctctaaggatgttcttgatgaacgtgccaagaaagcagaagcttggcatcgtgattctgcagttcgtgcacagtacactaggccatcaccaccaatcacatgtgccactttcgcccaagatgttctagaaggaagagcaaaggcttcacaagaacacgatcacaagcatcaacccctaatatttggaccagctagccttgtaaatggaaacataacaactgagagagaaagaatggcagctcaggtcttccaacctagtcataggatgccaactatgagcattgacgangccgggctaaaagacatggacataatgaacacatggcacgagagaaatgtcaaactc

SEQ ID NO: 241780 - DNA, 339 bp, Glycine max
gaagattggatggtggaaatggaatcggcagctgaaaaccctaattacccggcggtggactacaagcgaccttccatcttgtcatttcctcggaggcccgccctcagagttacatccgagttcgatagtgaaagcgcagtcttcttccataagatttcctgcaagttgttggacagccttgccaagttcaagttttcgttcaaccacagcggtaagggcggcgacatctccgaacctcaattcagctttgtctccaagcaccttagcctccactacgacctcgaaggacataatgctctcgttaagacctccatcgatcttgctcccagtttgcaactc

SEQ ID NO: 241781 - DNA, 375 bp, Glycine max
gactgcagaggtgtattttctcacttctcagcactcagcagcgatatcagttgaagaaacagaaacaaacaaaagaggcagaagatgttgtgggtggacaaatatcgtcccaaaaccctcgaccaggttatggtccacaccgacatcgctcgcaatctcaagaaattggtaacggaacaggattgcccccatttactcttctatggcccatctggctccggcaagaaaaccctaatcatggctcttctccgccaaatgttcggacctggtgccgaaaaggtgaaggtggataataggacctggaaagtggatgctgggagtagatctcttgatttagagctgacaacattatcaagtgccaatcacattgaaatg

SEQ ID NO: 241782 - DNA, 372 bp, Glycine max
ggagttgagaggatcgtgagaggggcagtagccgagattccgtgagctgcaaaaatggagacgattctttccaccgagaccatgaacatcccggacggcgtgagcatcaaagttcatgccaaggtcatcgaagttgagggcccccgcggaaaattggtgcgagacttcaagcatttgaatctcgattttcagctcattactgacgaaaacggtaaaagaaagctgaaaatcgacgcgtggtttggttctcggaaaacatccgccgccattcgcaccgccttgagccacgtggagaatcttatcaccggcgtcaccaagggctaccgctacaaaatgaggttcgtttatgcccattttcccatcaacgcaagc

SEQ ID NO: 241783 - DNA, 348 bp, Glycine max
gaaccaagtttgcttgcgtgtatattcattttagcatcaaggttgaatctcagagaaaaagaaacatcgacaagcatgtctggaagaggaaagggaggcaagggtctcggaaagggaggagccaaacgacaccgtaaggttctgagggataacattcagggaatcaccaagcccgcgattcgccgtctggccagacgtggtggcgtcaagcgtatcagtggtcttatctatgaagaaactcgcggtgttctcaagatctttctagagaacgtcattcgcgacgctgtcacctacactgaacacgctcgccgcaagaccgtcactgccatggacgtttgtttacccctc

SEQ ID NO: 241784 - DNA, 331 bp, Glycine max
gaagcttgtctcttgggatgacatccactggggatacagttcacgtaccattgacctgcttgtaaccgttgccaagaagtctgtttaattaatgtggttcgaacattaagtgtcggtcaagctgcgatttattatcgtgcacatggaaatattgcgaagtctgaataaattggtttccggaacgagtgttgtcactcagtcatcaacagtacacccggttcttgttgcctcatccgtgtcagggatggacttttttggagtcctagacacgtgcagatgtagtcagggtttattgaatcagatagcagatatttgctctcaatatatcacc

SEQ ID NO: 241785 - DNA, 366 bp, Glycine max
gagggcgaggaagccacatagagacacaatacagagtgagttgttgctccttcgccacaactctctgccaacatgggtatctccagagattctatgcacaagaggcgtgccactggtggcaagaagaaggcctggaggaaaaagagaaagtatgagcttggtcgccagcctgctaacactaagctgtcaagcaacaagacagtcaggaggatccgtgttagaggtggaaatgtgaaatggagggcattgagattggatactggaaattactcctggggaagtgaagctgtaactcgcaagactcgtgtactagatgtggtttacaatgcctcaaacaatgagcttgtgcgtactcagactcttgtc

SEQ ID NO: 241786 - DNA, 377 bp, Glycine max
ggaagatggacaaaaatcggcgacgatccaaatccagttctttcatttacggtcctaagtgacacactcgattctggctccgcctcagacgaagaagctcgctctggattctcactcacctgaacggatccttcttcttccttatcgcgaaatccatacttcaaaccctaatcgcgactgcggtttatgatttgtgacacaacacaaagttgacgaaggtggtttttcagcatttgtattctagtattcttctacataagttgaagcgaaaatgaggattatgataaatggcggtgtttggaaaaacaccgaagatgaaatcctaaaagcagctgttatgaaatatggcaagaaccagtgggctcgaatctcttctc

SEQ ID NO: 241787 - DNA, 351 bp, Glycine max
  unsure (1)..(351): unsure at all n locations
gaaccattattccatttcattccttctcgatggctactactcaaggacaagtcattacatgcaaagccgcggtggcctgggaacccaacaagccattgtccatcgaggacgttcaggtggcgccgccgcagaatggagaggtccgtatccaaattctctacactgctctctgtcacaccgatgcttacacttggagcggcaaggatccagaaggtcttttcccatgtatacttggtcatgaggctgcggggattgtggaaagtgtangagaaggagttactgcagttcagccaggtgatcatgtcatcccttgttaccaggctgagtgtggagagtgcaagttttgcaaat

SEQ ID NO: 241788 - DNA, 356 bp, Glycine max
tatgaaagtgacgcctggttaaatgatttgtgtgatcaagttgatgaaaaagttgtttttaagccattcaactttgattctattgctgagaaagtaataaaaagcattgacacgcaatttcaaaagatgttaggatcagagtttatacttgaaattgagtatgaggtcatgacacagatacttgcagctgcttggtatcagacaagaaaaaagcagtggaggattgggttgaacatgttcttggcagaagcttagctgaagctcatcagaagtaccgctttgtacctgaatttgtgatgaaactggttaactgtgaaagaatttttttggaagaacaatctcctggagtatgcctt

SEQ ID NO: 241789 - DNA, 332 bp, Glycine max
ggacgaacctcaaattcaacatttgttacagtctgctgagaccatcagaaaagactaccctaatgaagattggctgcatttgaccgcactcatccatgatcttggaaagattcttgcgcttcctagctttggtgagcttcctcagtgggctgttgttggagatacatttcctctgggctgtgcctttgatgagtcaaatgttcatcataagtatttcaaggacaacccggattacaaatgccctgcttatagcactaaaaatgggatctacacagaagggtgtggattagacaacatagtgatgtcatggggacatgatgattacatgtata

SEQ ID NO: 241790 - DNA, 402 bp, Glycine max
gatgtaacatataatgatgttggcggttgtaaggagcagattgaaaagatgcgagaagttgttgaacttcccatgcttcatccagagaaatttgtcaagcttgggattgatcctccaaagggtgttctttgttatggccccccaggaactgggaaaacacttttagccagggctgtggctaataggactgatgcttgttttataagggttattggaagtgagctagttcagaaatatgttggtgagggggctaggatggttcgtgaactatttcaggtggctcgttcaaagaaggcatgcattgtgttttttgatgaagttgatgcaattggaagtgcacgatttgatgatggccttggtggtgacaatgacgttcagcggcacatgcttgaaattgtgaat

SEQ ID NO: 241791 - DNA, 282 bp, Glycine max
gaggcatgagatgtcagcttgataacgatgtctacacgacccctcaagtctccacctccatacttgagccatacagcatgtgggacgtgacaatctcacgtgaagtacaccgatgtcgccgtcagattgagagacgaagcgcacaatgacgatcagttggcgcacaccagacatagcacttcctagcgtgaacgaacctcgctggatctagtggctgcatgtgaggatcctcttagacagcatcccagatgtgtgctgaggactacaatgatgaagtcattg

SEQ ID NO: 241792 - DNA, 419 bp, Glycine max
aggtaacggtctagaattcccgggccgacccacgcgtccacggaggcgtgagggactttttcattgcaacgatcgattaatgacttgcttccagaatggttctgctagagaagctctgggatggcgttgttgctggccctcaacctgtgcgtggccttggcaagctcagaatactcaccaacctcaaaactattgatgaaggagacagtaacaagctgcagaagacgttgtcgatgccgtcgacaccgacaaccccgatgactcccacgactccaacgacaccgggatgcgcgcgtaaagctgacaacgtatggaggagcgtcttccatcctgtgagcaactccgccacaaatgacatcggtgctcatatgtgtgacataccacttcccaacactcctactgtctacgactggctgtac

SEQ ID NO: 241793 - DNA, 377 bp, Glycine max
gacagcatatatatcaataatctattttatactatacctacattttgataattttctttgtagttgatagccatggctacccgtggaaagcttgaggttgacattgatctcaagtccaacgcagacaagtactggcaaacccttaggaattctactgaaatattccctaaggccttcccacatgattacaaaagcattgaggttcttgagggtgatggcaagtctcctggttctatccgccacataagttatggtgaaggttcaccacttgtgaaatcatcctttgagaagattgaggctgttgatgaggaaaagaaggtagtgtcgtacactatcattgatggggaactcctccagcactacaaaacattcaaggg

SEQ ID NO: 241794 - DNA, 337 bp, Glycine max
ggcacatgttcatcctttgattatatcacatactcaccatggaggctaagttggccaccaccataatacttattttctccgtaatttggcttatgagggtgaatggcatagacccttgtgcctctcaagcggataattccgacctgaacgtgattcccatctacagcaaatgctcaccgttcaaaccaccaaagtcagactcatcgtgggacaacagaattataaacatggcctcaaaagacccactccgattcaaatacttgtccaccttagtgggccaaaagaccgtgtccacggccccaatcgcttcgggccagaccttcaacatcggcaacta

SEQ ID NO: 241795 - DNA, 333 bp, Glycine max
ggaggatttatggggacaaaagctcagcaaattgaatatcctgtgcgaactaaccagattcctaaggagattcctgcacgtaaatatccgtcatggcttcttgttcttggtgcaggaactcttccatttggaacccttttcattgagcttttctttatcctttccagtatctggcttgggaggttctattatgtatttggtttcttgttggttgttcttctattgctggttattgtttgtgctgaagtgtcagtggtcctcacatatatgcatctttgtgtggaagattggcagtggtggtggaagtcattctttgcttcaggctctgttgct

SEQ ID NO: 241796 - DNA, 381 bp, Glycine max
  unsure (1)..(381): unsure at all n locations
tcagtcgtgcagccagatgacgacagaagggggatcctttgtattctattcttcaagattcaggtactgcgtttcggaagcagacacagatggctcgtacgaagcaaaccgctcgtaagtccacaggaggaaaggctcctangaagcagcttgcaaccaaggctgcacgtaagtctgcaccaactactggtggtgtgaagaagccccaccgttatcgtcctggtaccgttgctcttcgtgagattaggaaataccagaagagtaccgagcttttgatccggaagctccccttccagaggctggttcgtgaaattgctcaggacttcaagactgatctgcgtttccagagccacgccgtgcttgcattgcangaagctgctg

SEQ ID NO: 241797 - DNA, 351 bp, Glycine max
ggaagccagcgagtgagcgagcgagcgaggtagggttttcgttgttcccccgtctttgaattcagttcgcgacgatggggtccatccccgatccaggcgagttgagcgagttgactcagccgagcttcgacgagttccagcgccaaacttccctcatgaccagctgcaccctcctctggaaggagctctccgaccacttctcctccctcgagcaagacctcaaccacaaatccgaagccctcaaacgcaagattcgcaccctcgacaacactacttccgactccctccgcctcctcgatcgccgcgaaacctccctcgacgccacgctccagatcgccctccgcacgctcg

SEQ ID NO: 241798 - DNA, 381 bp, Glycine max
gattcttatgaggccactttgtccatggctggtgcaaaagtaaaaggcatcactttgcgccctccagattttgctgtccctcttgaagagttgaagtccaccatctcgaagaatacccgtgccattcttataaacactcctcacaaccctactggaaagatgttcactcgtgaggagctcaattgcattgcatctctttgcattgagaatgatgttctggttttcactgatgaagtttatgacaagttggcttttgatatggagcacatatcgatggcttctttgcctggaatgttcgaaaggacagtgacattgaactccttggggaagacattctccttaacaggatggaagaatggttgggccatagcgaccccacac

SEQ ID NO: 241799 - DNA, 360 bp, Glycine max
ggcagttcaattccaatatattccattctctctgtgtatttccctacctctcccttcaagatgcagatcttcgtcaagaccctcaccggcaagaccatcacccttgaggtggaaagctctgacaccatcgacaacgtcaaggccaagatgcatgacaaggaaggaatccccccggaccagcaacgtctcattttcgccggaaagcaacttgaggacggccgtacccttgctgactacaacattcagaaggagagtactcatcacctcgtcctccgtctccgtggtggcatgcagatcttcgttaagacactcaccggcaagaccataaccccagatgttgaaagctctgacaccatcgat

SEQ ID NO: 241800 - DNA, 373 bp, Glycine max
gatgaacaaaataatacgtgcatacatagctatctagctagcaagtgggacaagagatatatatacgtggtaccctagagtgccattctgtagtttatttctgctcaccaaggcttatcacatcacaatttgtgcattgcctcgtgtcctttttcttctttgcgtgccagaaatcttacacacacaggtatctagcaaatgggttctcaccagcaagaaccatggctattggagaatgggaaaccgagggtgttgaccaaggagaataggcatggccgttctgcacacagcatgtcctccacgtctttgcgcatgaagtctagccgaactcttgtctccaagcttccatgtgccacactcagaagcatccttt

SEQ ID NO: 241801 - DNA, 342 bp, Glycine max
  unsure (1)..(342): unsure at all n locations
gattcttatgaggccactttgtccatggctggtgcaaaagtaaaaggcatcactttgcgccctccagattttgctgtccctcttgaagagttgaagtccaccatctcgaagaatacccgtgccattcttataaacactcctcacaaccctactggaaagatgttcactcgtgaggagctcaattgcattgcatctctttgcattgagaatgatgttctggttttcactgatgaagtttatgacaagttggcttttgatatggagcacatatcgatggcttctttgcctggaatgttcganaggacagtgacattgaactccttggggaagacattctcctta

SEQ ID NO: 241802 - DNA, 352 bp, Glycine max
gggtggggtaccagaaaatatagcaagaaaggctatttcaatagcatcatccaaaatgcctatacgaactcaattcattatttcagggtaataaattagaaccaaaggaaagaggtctttaagatgaaaacaaaaaatgcaaatgtaggttcctttttttgaacacaaaatatttttacttccattttttgactgaaagaataaaaaaatgatatgattcaacctcaaactcattcgaatgtagctgataatagcggagcacgcgaactgatgtgtattcgaatcctaggagctagtaatcgacgatatgcttatattggtgacattgttgttgctgtaatcaaacaagcag

SEQ ID NO: 241803 - DNA, 183 bp, Glycine max
ggagctttagattcttttgccccgagagtcagccacagttggaaaaaaaaaaaaggttgtccgagatggcacgtacgaagcagactgctcgtaagtccagaggagggaagggacctaggaagcagctcgcaaccaaagctgcacgtaagtctgcaccaactacgggtggtgtgaagaagccac

SEQ ID NO: 241804 - DNA, 202 bp, Glycine max
ggaagcagtggaacaaagcaaggaagagaaagaaatttgtttctctctaaatagtctccgctgaactttttggtttcttcaagatgtcggtacgctgggatcttagcaggcttaacgtctccgacatcaccgataaggtgatcgccgactacatatgggttgggtgatctggcatggatatgaggagcggagcagggactct

SEQ ID NO: 241805 - DNA, 309 bp, Glycine max
  unsure (1)..(309): unsure at all n locations
ggaagtgcttcataagcgtgttgtaggccaagaccctgctgttaaggcaattgctgaggctatccaacgttcaagagcaggtctttcggatcctcatcgtccaattgccagcttcatgtttatgggacctacaggtgtaggaaagacagagctggctaaggcacttgcagcctacttgttcaacactgaagaagctcttgtacggattgatatgagcgagtacatggaaaaacatgctgtttcaagattgattggggctccacctggatatcgttggtacgaggaangagggcaacgtactgagatagt

SEQ ID NO: 241806 - DNA, 352 bp, Glycine max
gaccgttccatttctcaacaacttctgctacttcctactccaaccgcacttctgctccgcaattatcatgggcaaggtcaagatcggaatcaacggatttggaagaattggccgtttggtagccagagtggctctgcagagagacgatgttgaactcgttgccgttaacgaccctttcatcaccaccgattacatgacatacatgtttaaatacgacagtgttcatggacactggaagcatcacgatgtcaccgttaaggacgagaagacccttctcttcggtgacaagccagtcactatttttggacacagaaaccctggagagatcccatgggggtcaactggagctgac

SEQ ID NO: 241807 - DNA, 352 bp, Glycine max
gactcacttagcaatcaatcaaaacattcccaataacaataatatacacatcttcaattaagctccttctcctatagccatggctctttctaagcttataattgcttcccttcttgcgtcgcttctccttcttcatttcgttgatgctgatcaatcggcacatgcacaaacgcaggggtctcttcttcagcagatagattgtaacggagcatgtgctgcgaggtgccgtttatcatctcgtccacgcctctgccaaagagcttgtggaacttgttgtagacgctgtaactgcgtgccacctggcactgctggaaaccaagaagtgtgtccctgctatgcaagtttgactact

SEQ ID NO: 241808 - DNA, 267 bp, Glycine max
gacggcaacagaagaataagcgagacacagatcatagtgatcattttttaatttctcagagttatcggacgtcgctgcagatgcaccaggcgtgagggctgccgtcagcggtgatgaagcggcaccgtttttcggcttccttggcgccgcagctgccctcgtcttctcctgtatgggagctgcctatgggacagcgaggagtggcgtgggcgtggcttgcaggggtgggatgagagctgagctggtgatgaagtcggattgttcctg

SEQ ID NO: 241809 - DNA, 332 bp, Glycine max
gaacacatttgattcaataaacaaatcgttagggtttttggttgtgagagtgaaagagaacaatggaaggcataacagagggtgtgaacaacatcaacattaacatctccgattcgtataagaagaatcgcattcaggtctctaacaccaagaagcccctcttcttctacgttaatctcgccaagagatatatgcaacagcatgatgaggtcgagctctcagctctaggaatggctattgccacagtagtaactgttgctgaaattttgaaaagcaacggacttgctgttgaaaagaaaatcacgacatcaactgtttacataaaggatgac

SEQ ID NO: 241810 - DNA, 290 bp, Glycine max
gggatttggagagcaagagtatcgttgaggatttgaaggttgacctcaagactgaggctgatgccacctccggtggtggtaacgccaacaagaggaaggttatttattgcacaagtttgaactggagtgcggatggaagcactttgtttagtggctataccgatggtgtggtcagggtttgggctattggacgttattaggttaaactttttagtgttttcacatgcgaatctgtttttgagttttgggacaaagttacttactgctttacggtggaattgatttttatg

SEQ ID NO: 241811 - DNA, 256 bp, Glycine max
ggtgatatgacttgtttcgtctctttcttccacctgtgattcttaactacgcgcacgttcctccggccaaggcaaatcggaaaatgggtgtggactattacaaacttcttcaagtggatcgaaatgtcagtgatgaggatctcaagaaagcctatcgcaagcttgctatgaagtggcaccctgataagaaccctaacaacagaagggatgctgaagccaaattcaagcaaatctcagaagcctatgatgttttgag

SEQ ID NO: 241812 - DNA, 370 bp, Glycine max
gcgcctgatttctcagttctctcacacactcattcggtgctccgaatctcagattctagggttagggttcccaatttctccaccgatcagaaaatgagttcaactggtggttctaccaagggcggaaggggcaagcccaaagcctccaaatccgtttcaagatcgcagaaagctggtctccaattccccgttggaagaatcgctcgattccttaaggctgggaaatacgccgagcgtgttggtgctggtgctcctgtgtacctctctgcagtgctcgaatatctcgctgctgaggttttggaattggctgggaatgctgctagggataacaagaagaatcgtattgttcctaggcacattcagcttgctg

SEQ ID NO: 241813 - DNA, 360 bp, Glycine max
ggcgcattttgtgaaaaaaaataaaaagtggggataggggtactatttgttgggtttttcttgctatcttgtgttgtgtgtgtggagggtgtggagccaaaagcctcacccacttgtacatttccggcagtttacaactttggggactcaaactcagacactggaggcatatcagcttcatttgtgccaattcctgcaccttatggcgagggcttctttcacaagccttctggaagggactgtgatggccgtctcattgtagatttcatagctgagaagctaaacttgccatacttaagtgcttatctgaattcccttggaaccaattaccggcatggggcaaattttgccactggggga

SEQ ID NO: 241814 - DNA, 407 bp, Glycine max
ccgggtcgaccaacgcgtccacccacgcgtccgaaggggaaaggagttaaagagtaaaagcaccgtctccgtctccactctcggcttcttcttcgttgcgctttttcccaaaaccaattgcatcactctcgtccgttaccgccgctgccctagaccaccgcaagcgacgtcgcacaccgccttcatccgttagggcaaaaatgagtcgaggaagtggaggtggatacgatcgtcacatcactattttctcccctgaaggacgtctctttcaagtggagtatgctttcaaggctgtgaaggctgcaggaatcacctcgattggtgtccgaggaaaggattcaatttgtgtcgttactcagaagaaggttccggataagcttttggacaacacaagtgttacacacctc

SEQ ID NO: 241815 - DNA, 308 bp, Glycine max
ggaggcacacagaaaaaatgggttcttcttcttctatgtggacggtgtgtgtgattttggcatcactggcctctgcagcactctgtgccaacgcacgcaggccagtgggatgtacaatttggccgaaactacgtgcccacatgggcctttgatcacatcaaatatttcaatggtggttctgacattcagcttcatcttgacaagtacactggtagtggcttcgagtccaaagggtcttacttgtttggtcacttcagcatgtacatgaagatggttcctggagattctgctggcacactcactgcttt

SEQ ID NO: 241816 - DNA, 156 bp, Glycine max
gagagtgaggcacacagaaaaaatgggttcttcttcttctatgtcgacggtgtgtgtgattttggcagcagtgagcgctacaggactctgtgtgaggggacgcaggcgagtggatctacaagttggccgaaacgacgtgcccagatggggctgtga

SEQ ID NO: 241817 - DNA, 353 bp, Glycine max
ccatggaggttggatgatgaaaattatctgctggtgccttctggtaatctttatgtttttcgttccaaatgagatcatcagcttctatgaaacaatatcaaagtttggctcgggcatgtttcttcttgttcaagtcatgctcttgttggattttgttcatggatggaatgacaaatgggttggatatgatgaacaattctggtacattgctctatttgttgtttcccttgtttgttatgtggcaacatttgcattctcaggagttctctttcacttcttcacgccatctggacaagactgtggactcaatgtctttttcattactatgaccatgattcttgcaattgtttttg

SEQ ID NO: 241818 - DNA, 357 bp, Glycine max
gagagcatagaaaggaaacgaaaaaacagagtacccgacagaatttgaaaacaaaggctgaaatttgaagaaactgagatcattgggtgtgaaatatatggcagaggttgtcttgctagtcgatgatttgaaactactttctgcgattcctcgctgtagaatttgtcatgaagaagagtttgaaagcgtagaaaccttggaagcaccttgtgcttgttctggaaccgttaagtttgctcatagagattgcatacagagatggtgcaacgaaaaaggaaatacaacctgtgaaatatgtctccagcaacacgaacccggatatacagctcctccgccaaagaagtccaagataaatga

SEQ ID NO: 241819 - DNA, 265 bp, Glycine max
gacacacagctattccgcgtaagcttgctactgagtttccacactgcataccttaggtcttccgacttcgaagttaatttgcaagacggctaagggaaaggctcagagtaggattgtggtggttgggcatgtggaccctgatgacgcaagcaccattaacgagctgaagaagcctgttgtggggaaaggagctccagcgcatgccatatgatggcatgcgcgtacggcctcggacgggaaccagaaaattatgttaacaaaataa

SEQ ID NO: 241820 - DNA, 325 bp, Glycine max
gacaatcgaacgggaaaaggcgtcttcataaacgccgcccaaaacttctcatacccttttattcattccattcgtttctagggttttcggttctttgccgagaaaatgagagagtgcatttcgatccacattggccaggccggtatccaggttggaaacgcctgctgggaactctattgccttgaacacggcattcagcccgatggacagatgccgagtgacaagaccgttggcggaggagacgacgccttcaacacatttttcagcgagaccggcgccggaaagcacgtgccccgcgccgtcttcgtggatcttgaacccaccg

SEQ ID NO: 241821 - DNA, 332 bp, Glycine max
ggagagtgatttcagtgagtgatcggtgttcacttgatctcatcataatcgtcagcgtcaattgaagaagatgccgatcagaaacatcgccgtcggaaggcctgaagaggcgactcaccccgacacgttgaaggcggctttggctgagttcatctcaaccttcatcttcgtgttcgccggctcaggctccggcatcgcctacaacaagctcaccgacaacggcgctgccacccctgccggcctcatctccgcctccatcgcccatgcattcgccctcttcgtcgccgtctccgtcggcgccaacatctccggcggccacgttaaccccgccg

SEQ ID NO: 241822 - DNA, 304 bp, Glycine max
ggggaaagagacagaaccgagaatggttgcgactttgagtcttccgatcatagacctctcgtcgccccatcgtcgttccacagccaattccattcgtcaggcatgggtggaatatggtttcttttaccttgtgaaccatggggtggacaccgattttgtgagcaaagtcgtcgagcagagttgcaagttcttctcgcttccggtccaacgcaaaatggacctggggcgcaagggagatagaggctacactcctctctaggctgagacacgtgatgcgacttcaggctgcaaaggtgatccaaaa

SEQ ID NO: 241823 - DNA, 254 bp, Glycine max
gaacgcgaaaggcctctcatattgaaaccagggcaacatatatgaatacgaatcgccacgccgctacgttttcgtcagctacatagctccatcacggcagcattagggtttatcatctgcttcaatggggaagggaacagggagcttccgtaagaggaggaacaagacccacactcgctgtgtgaggtgtggccgccgcagcttccagctccagaagagtcgcggcgccgcttgtgctttccccgctgcacgca

SEQ ID NO: 241824 - DNA, 294 bp, Glycine max
cggcaggatatgggcatgacgtggacgtcaattcttgtaccatctgctgagaagcggattatggaagcaattgctgatgctcattgctatcaggtgctccgggcaaatgaagttgagtttgaaattgtgtcaactgagaggaccaatattgtggatatacggagtcgtgagtgctcgtgtcgccgttggcagttgtatggcttaccttgtgcgcatgctgcggcggcacttatttcttgtgggcacaatgcccacatgtttgctgaaccatgcgtcactgggcaaagttacaga

SEQ ID NO: 241825 - DNA, 304 bp, Glycine max
ggttctagtgtgtgattgtttgttgttgtaactcgttcttcgtcgtttgttgttctgtgtttgtgtttgttttttctctcagctgaaaatgtcttgctgcggtggtaactgtggttgcggaagctcctgcaagtgcggcaacggctgcggaggctgcaagatgtagccagacttgagctacactgagtcaaccaccaccgagaccttggtcatgggagtggcagctgttaaggctcaatttgagggtgctgaaatgggtgtgcccagtgagagagatggcggcaaatgtggaccagactgctcc

SEQ ID NO: 241826 - DNA, 249 bp, Glycine max
gagaaaccagaacgctctctcacgcagtcgcagtgagtgaaaaggaagaccctaattgcggtagtctcagtggcttcgagagagagaaagaatggcagagaatcgtgttctccgtggcaccatgcgcgcccacagcgacgttgtgacggcgagtgccactcccatcgacaactccgagatgatcgtcaccgcctcacgcgacagatccatcatcgtctggcatcggaccaaggaggacaagacttacgg

SEQ ID NO: 241827 - DNA, 344 bp, Glycine max
ggttctggaaagattgcaatgcatgtcttagagaagctaattgcttatggtgctcttcccatttcagtatcagattctagaggatatttggttgatgaggatggatttgactacatgaaaatatcatttttgagagacatcaaagctcaacaaagaagtttacgagactattcaaagacctatgctcggtccaaatattatgatgaagcaaaaccatggagtgaaaggtgtgatgttgcatttgcttgtacttcacagaatgaaattgatcaatctgatgccattaatttggttaattcaggttgtcgtatactagtagaatgttcaaacatgccttgtacccc

SEQ ID NO: 241828 - DNA, 297 bp, Glycine max
gctagtggcagtgaccaaactccatttctcactcgccgtcgtctcttccgtctagggtttctcctcttcacaaaaatggttgccgcaaaaaaaactaagaagacccatgagagcatcaacaacaggctcgctctcgtcatgaagagtggcaaattcaccctcggttacaagaccgttctcaaatctcttaggagctccaaagggaaattgattatcattgctaacaactgcccccctttgaggaagtcagagattgaatactatgctatgttggcaaaggttggggttcatcattac

SEQ ID NO: 241829 - DNA, 369 bp, Glycine max
ggagcaaaaccctaatccctatttttcttcctcagtagtgtcatttacgcttctcttctctgcagcaactatgcctaaccctaaggtcttcttcgacatgaccatcggcggtcaatctgctggccgcatcgtgatggagctctacgccgacgtcactccccgcaccgccgagaacttccgcgcgctttgcaccggcgagaagggcgtagggcggagcggcaagcccctccactacaagggctcgtccttccaccgcgtgatcccgagtttcatgtgtcagggtggcgacttcaccgccggaaacggaaccggcggcgagtcgatttatggcgccaagttcgccgacgagaacttcgtgaagaagcacac

SEQ ID NO: 241830 - DNA, 272 bp, Glycine max
ggtatatcatttacaatttcaagctctctctctctctgtctctctctctctagacttagattttgtgaatggctgaagtggaagagggacaggtcatcggcgtcgacaccgttgatgagtggaagctgcaactccagaatgcaaaagactccaaaaaactgattgtggtggattttagtgcttcctggtgtggtccatgccgttttatggccccagttcttgcaggagattgcagagaaaactcctgaattgatcttcctcaaagtggatgt

SEQ ID NO: 241831 - DNA, 289 bp, Glycine max
  unsure (1)..(289): unsure at all n locations
gaccgcgaaacgcacatttcactattcattctcgtttccctttcgactgtgattgtttgttaactgaacttttcgagcaaaatgtctggacgtggaaaggggggcaagggtttgggaaagggaggagcgaaacgacaccgtaaggtgttgcgcgatagcattcagggaatcaccaagcctgcgattcggcgtttggctcgcangggtggtgtggggcgtatcactggtctcatctacgaggagacacgtggcgtgctcaagatcgttctggagaacgtgattcgtgacg

SEQ ID NO: 241832 - DNA, 308 bp, Glycine max
gatagtaacttcttgaacagtggtccgtgggctccaccaccagcaccgccacctctgccaccagcacagtttcagcggatgaggacatataccagggtagataaacgcggagctgtgggaaggtccatagacataacacgatattcaggttaggaggagcttagagaggatctagctcgtaggtttggcatagagggacagctggaggatcggcaaaggataggttggaaacttgtctatgtagatcatgagagtgatgttcttcgacgtggagatgatccttgggaggagtttgtgaactgtgtccg

SEQ ID NO: 241833 - DNA, 290 bp, Glycine max
cgggattgtgcctccgaaccaaaacctgaagcctagaaccttcgtccgtctcacagtttgccggaatcaacgatgggtcctcagccggagccagttagctacatctgcggagattgtggaatggagaatacgctgaagcctggtgacgttatacagtgccgtgagtgcggttaccgtatcctttacaagaagcgcactcgtcgcattgtccaatacgaggcacgctgaagaaaactgctctgacattggcaagtaagttccatggagagtgtgacaacatctgtgttgtg

SEQ ID NO: 241834 - DNA, 345 bp, Glycine max
ggctctttcgtggttgtgccacctctataattctcttccactgtcttgtgttctcctgcaagcctgcaaccacaaaaaccaaatagtttttttggtcaaactcaaagcttttaacttaacagaagcaagaatggtaaaacggagttaagcaagacaaaggaagaaagaatggtgagagagcataacattaacagtggatggccaccaatatgggccccactactgaacgtgcagagagatgagtatgatcagcattggagcagcttcgatagctctgtgaatgctgtttcttttggctttgttgccactgccattcttgtttccatgttcttagtcatggctatc

SEQ ID NO: 241835 - DNA, 326 bp, Glycine max
gagtgaagtgatgagccaagacctcaagcgagactacgtcgtttcggaggagatcggccggggaagattcggcaccgttttccgctgcgcctccgcagactccggtcactcctacgccgtcaaatccatcgacaaggtggcaataaccgccgccggagactccctcgacgcgcaatgcctattgacggagcccaagatcgttcagcttctctcccctcaccctcacatcgtaaacctccacgatctctacgaagacgaaaccaaccttcacatggttctcgacctctgttacgaatcgcagtttcaccaccgcgtcatgtccgaac

SEQ ID NO: 241836 - DNA, 295 bp, Glycine max
ggcacaagtttgttgagatagctagaagcaataagatgaaaatgaaagtgcttgttttgtttgttgctacagttttggtagcatatgaatgccagtggctcagactaccagaagttccctctccaaatgaaaactgggtttggtgggcaatacagcaatgaggtggcatgtgccagttggaagcttggcgtggaagcaaacaacgtagtcaagtggcaaactgttcctgcagcttgcggagagtacatagctgactacgttctagggagaccaagatagatgagattccaaaaca

SEQ ID NO: 241837 - DNA, 293 bp, Glycine max
ggagatttggatttgggggaacatttggttgattagggtttcttcgggtgctaatgctcttgttttctcacagtcacacagcagtggaagcagtcacagagggagtgaacaacatcaacatctccgattcttacaagaagaatcgcattcacgtctccaacaccagagagcccctcttcttctacgtcaatctcgccaagaggtatatgcaacagcataatgaacttgagctctcagcactaggaatggctattgctacggtggttactgttgctgaaatcctgaaaaacaat

SEQ ID NO: 241838 - DNA, 260 bp, Glycine max
ggaaagtgagggagagagaatggaggaagaggcagggatctaccgtctagcggaggacagcctccggcagatagtccgcaggctgccactgagggaaatagtgatgtgccgctcagtgtcaaaattcttcctgcagctgctctcaacaccgtcgttcctccaggtcctctccagcgccgatccacccctccagctcctggccctccgcagccgccgccacacgccgtctcacacctctctccccctcttcgaccccgcca

SEQ ID NO: 241839 - DNA, 268 bp, Glycine max
gatgcatagcaattcccaattcctaattgtttaaacctaattctcatttcgtcatcgttcgattcgtctcctcctaaagatgcagatcttcgtgaaaactttgaccggtaagaccatcacccttgaggtggagtcctccgagaccatcgagaacgtgaaagctaagattcaagacaaggaagggattccagctgaccagcagagacttatctttgcgggtaaacagcttgaggatggtcgaacccttgccgactagggcatccaaaag

SEQ ID NO: 241840 - DNA, 368 bp, Glycine max
ggcggcacaaagcattcactgtgtcggaaaaagaagaagagaaaaaagatgagcgacggaggaaaacgacaaggtggaagagcgttgccgccgccgccaagaggccctccgcctcctcccccctctcgccctcgcctcgaacccgtcgatcgcgaaaagacatgtccgttactgctgcgagtgttcactaagattgggagtcaccattccatggaagactttgccgtcagaggcaaagagcccaaagacgaggttcagatttacacctggaaggacgctactctccgagaactcaccgatcttgtcaaagaagttgctccggctgcaaggagaagaaacgccaaactctccttcgcctttgtattccc

SEQ ID NO: 241841 - DNA, 270 bp, Glycine max
ggtgaagagaatggctcccaagggtttaacctttctggctgtgttaatatgcgtttcagcactgtcactgagtccttctgttgcgggggaagggcagaataatgggcttgttatgaacttctacaaggaatcatgccctcaggctgaagacatcatcacagaacaagtcaggcttctctacaagcgccagaagaacactgctttctcctggctcaagaacatcttcgatgactgttgcggttcagagttgtgatgcttcactgttgctgg

SEQ ID NO: 241842 - DNA, 271 bp, Glycine max
gagatcgcacatcaattattctttcgcagcttcgaaaatcaattttctgtcttctcggcgtcgtcttcctctatcaatcgttttccatggatcgtaggaagcaaaccggtcacaaatcgagcggtgggaaggctcctatgaagcaactcgccagcaaggctgcaaggaaatctgcacgggcgaccggtggagtcaagaagccgcatcgctatcgccctggaagtgttggctcttcgtgagatccgaaggtaccaaaagagcacagagcttc

SEQ ID NO: 241843 - DNA, 290 bp, Glycine max
gagggggcagcgcttgatttgaggccaggcaggccccactcaaccaccacacctctcctcgttcacgctgcccctttctgctcttcttctacctttcaagttttaaaagtataaggatggcagagacattcctatttacctcagaatcggtgaacgagggacaccctgacgagctctgcgaccaaatctccgatgcggtcctcgacgcttgcctcgagcaggacccagacagcaggagttgcctgcgagacatgcaccaaaaccaacttggtcatgggcttcggggaaat

SEQ ID NO: 241844 - DNA, 273 bp, Glycine max
gtggtagtgtggcagcgacacgtagcaacttcaataatcgcatcgcagaagcagtttccggtgcatctcagcgtcgccgaaaatgaacgacgcagatgtctcgaagcaaatccagcagatggtgcggttcatccgccaggaagctgaggaaaaggccaacgagatctctgtctccgccgaagaggaattcagtatcgacaagctgcagttggtcgaagccgacaagaagaacatcaggcaagaatacgaaggcagagagcgccaagttgaaat

SEQ ID NO: 241845 - DNA, 295 bp, Glycine max
gacattagcattccacctcaaagcaacacaagaacactctcttgaacattcatggatccagtgagcgtgtggggtaacacgcccttggcgacggtggatcccgagatccatgacctcatcgagaaggagaagcaccgccaatgccgcggcatcgagctcatcgcctccgagaacttcacctccttcgcagtcatcgaggccctcggcagcgccctcaccaacagatactccgacggcatgcccggcaaccgctactacggcgggaacgagttcatcgaccagatcgaaaacctct

SEQ ID NO: 241846 - DNA, 294 bp, Glycine max
gagaagaagaagatggagatgtatcagatctggagcaggagaatagcgttgggagcgttcgcgtttgttctgcttttcctatcgggctcagcagaggacgtcgttgtgctctctgaagataacttcgagaaggaagttggtcaggacagaggagctctcgttgagttctatgctccttggtgtggacactggaaaaagcttgctccagaatatgaaaagcttggtagcagcttcaggaaagccaaatctgttttaatcggcaagggtgactgtgaggagcacaagagtttgtgc

SEQ ID NO: 241847 - DNA, 353 bp, Glycine max
  unsure (1)..(353): unsure at all n locations
catattgttcaatataagcatgcagtgggttgaacttgtgatagatttgctaaacctatatttcttactatatccattttagtatttagtatagtcacaccttcaataaagtagttttgtttgactgcattgacatcacattgttaagaggtatgctcaactttatgtttcttatcgtatccattttgctttttatatgcctttaacgctgttgctctttccaggattggttttctttactattcgatggtggaatcctgctacctttgaagccatgcatccagagggaactgctangagacctacgtggccttacgtcgaagataaatcctatctctggacatggctgtttt

SEQ ID NO: 241848 - DNA, 344 bp, Glycine max
ggcagcctcaagaatccacacaaactcagggtagggcagagagagagagagagagagagagagagagagagaatgggagggtgggctatcgcggtgcatggtggcgctggtgtcgaccctaatctcccactcgagcgccaagaagaagcgaaacaacttctcacgcgctgtctcaatcttggaatctctgctctaaattctaatcttcccgccatagatgtcgtcgaacttgtggtgagggaattggaaacggatccgctgttcaattcgggccgtggatctgccctgacagaaaaaggaacggtggagatggaggctagcatcatggatggtccaaaacgacg

SEQ ID NO: 241849 - DNA, 397 bp, Glycine max
gacactattcctgattccgaatccgagaacgtggttgtgacaggatcattgagctcggcaagaatggaagaacacaggttgagcttgagaatgagcacgcttgtcttcactctttccattatcatcatcgtactctcttacccagcacaaccacttgcgttgaaccattctccgaaattcctaggaaaattcgcagcaacagcacgaacccattcaaattccgagccaccgccgcaattccactacgaaaaaagatacttccaacagcgcctcgaccacttcagcttctcggagctacccacgtttcctcaacgctaccttatcagcaccgaacactgggtgggcccacatcgcctgggcccaattttcttctactgcggcaacgaaggcgacatcg

SEQ ID NO: 241850 - DNA, 382 bp, Glycine max
ggtccttctttgcgagattgaatcgtaagcagcggctaccctaatcctctcctcttcctctctactaatttcagctatggccgacgaagctgtggttgttccagatcccacccagatcgatgtcaagctctttaaccgctggagcttcgacgatattgagattactgacatttctctggctgattatatcggagtggcgacatccaagcacgccacgtatgtgcctcacaccgccggcaggtactcggtgaagcggttcaggaaggcgcaatgccccattgttgagaggctgaccaactctctcatgatgcacggtagaaacaatggcaagaaactcttggctgttaggatcatcaaacatgctatggagaatattcatttg

SEQ ID NO: 241851 - DNA, 360 bp, Glycine max
ggcgtcaattacgttatattgattgtgctgtacacgattctggtctctgcagagtaggtttgcattttccgaaaatcgaagttcgatttcaggacttgaccgttgagacttacgtacatgtcggtagcagagctctgccaacgattcccaatttcatttgtaatatgactgaggctcttttaagacagttgcggatgtacagaagaaagagaagcaaattgacaattctagcagatatcagtgggattattaaaccttcaaggctaacgttgctgttgggtccgccaagctctggaaaaacaacactactattagctcttgctggtacgctatgacctgggttgcagatgtcagggaaca

SEQ ID NO: 241852 - DNA, 389 bp, Glycine max
ggaaggaaagtgagtggaagccaggggcaatccgatagaaaagggttttatttctttttctcttcaattattttcttttcctgtccttgttgttcagttccgttgttgtgttgtgtgctgcaacacaatcggtggtctgagaaatcttgtttgtgttgggtttgttatggctcggagagcagaggaagagtacgattacctgttcaaggttgtactgatcggtgattccggtgttggaaaatccaatcttctgtcccgattcactcgcaacgagttttgcctcgaatccaagtccaccattggagtcgaattcgccactcgcactcttcatgtggagggaagatctgtgaaagctcaaatactggataccgccggacatgaacgattca

SEQ ID NO: 241853 - DNA, 267 bp, Glycine max
ggttctagtgtgtgattgtttgttgttgtaactcgttcttcttcttttgttgttctgtgtatgtgtttgttttttctctcatctgaaaatgtcttgctgcggtggtaactgtggttgcggaagctcctgcaagtgcggcaaaggctgcggatgctgcaagatgtacccagacttgagctacactgagtcaaccaccaccgagaccttggtcattggagtggcacctgttaaagctcaatttgagggtgctgaaattggtgttcccgc

SEQ ID NO: 241854 - DNA, 315 bp, Glycine max
gcccaaaatattttcatagcattttcagaggaaaatggcgggtacggtttcgacttgtttcttcttcgtgtttcttctttcgctccttcttccttttcagatctccgctgaggaatcctcggagaaggagttcgtactcacattggatcactctaactttcacgacactgtcagcaagcacgatttcatcgtcgtcgagttctacgccccatggtgtggtcactgtaagaagcttgctccggagtatgagaaagctgcttctatcttgagtagtcatgatcctcctattgttttgggcaaagtagatgccaatga

SEQ ID NO: 241855 - DNA, 311 bp, Glycine max
gaagctattggaaaagtgagtgagagatctcaatatcctcagataatggagggatacgttgcgaaggttatgaatgtgcggactggagttgggcatggccatgattgggatggccaatggcaaatactcctgttgtcgcatgccctgctataggttggcggcatgcaagccgagtgtaagtcgggatcagcctgcgtataccaccactgattgttactcacccattgctatggccgatcttaaatgcctctgccgcatcgaggattccggccctctctcgctgtatggtgttgatctgacctcctgcatgg

SEQ ID NO: 241856 - DNA, 401 bp, Glycine max
gtctgaagttaagggtaaggatatagttgagcttattgctgccggtagggaaaagttggccacggttccttctggtggtggtggtgccgttgccgtcgccgcagctcctgtgggaggtgctgctgctgctgctcctgctgctgaggcaaagaaggaggaaaaggtggaggagaaagaggaatctgatgatgatatgggtttcagtctcttcgattaattggtgtagtctattcagcttttttgttcagaacatattcttaattaacactagagcatgagtttgtcaaagttttgttctaaggagtaatttactgtgttttttaatatcaatgaccaaccaagttggatgaatttggtttgatattttagtgttttgatgttatggaatttcattttggtaa

SEQ ID NO: 241857 - DNA, 402 bp, Glycine max
  unsure (1)..(402): unsure at all n locations
ggcgcctgatttctcagttctctcacacactcattcggtgctccgaatctcagattctagggttagggttcccaatttctccaccgatcagaaaatgagttcaactggtggttctaccaagggcggaaggggcaagcccaaagcctccaaatccgtttcaagatcgcagaaagctggtctccaattccccgttggaagaatcgctcgattccttaaggctgggaaatacgccgagcgtgttggtgctggtgctcctgtgtacctctctgcagtgctcgaatatctcgctgctgaggttttggaattggctgggaatgctgctagggataacaagaagaatcgtattgttcctaggcacattcagcttgctgtgaggaacgatgangaactgagcaagctttt

SEQ ID NO: 241858 - DNA, 356 bp, Glycine max
gacacagaaaggaaagatgatgcatcctctgacaatgatgagaagaaaggtcaatattctaagttctggaatgagtttggtagatccattaaacttggtatcatctaggatgccaccaacagaaatcgtttggcagaactgctcagatttgagagcaccaagtctgagggtaaattgacatctctggatcagtacatatctacaatgaaaactgggcagacggatatcttttacataactggaaccagcaaagaacaactggaaaactcgcccttccttgagcggcttaagaagaaatattttgaggttattttcttcacggattcagttgatgagtacttgatgcaatacctgat

SEQ ID NO: 241859 - DNA, 386 bp, Glycine max
gacaaagaaaagaaagaagatgcatcctctgacaatgatgagaagaaaggtcaatattctaagttctggaatgagtttggtaaatccattaaacttggtatcatcgaggatgccaccaacagaaatcgtttggcaaaactgctcagatttgagagcaccaagtctgagggtaaattgacatctctggatcagtacatatctagaatgaaaactgggcagaaggatatcttttacataactggaaccagcaaagaacaactggaaaactctcccttccttgagcggcttaagaagaaaaattttgaggttattttcttcacggattcagttgatgagtacttgatgcaatacctgatggattatgaagacaagaagttcaaaatgtg

SEQ ID NO: 241860 - DNA, 340 bp, Glycine max
ggcagccaagaaaagaaaatcctcacccattttcttcgtagccaaacactctgaaattctcagttatgtcgtggcaagcgtatgtggatgatcacctactgtgtgaaatcgaaggtaaccacctcactcacgccgctatcatcggccaagacggaagcgtttgggctcagagcaccaacttccctcagttcaaacctgaggaaataactgccatcaataatgactttaatgagcctggatcacttgctccaactggattgtatatcggtggcaccaaatacatggtcatccagggtgagcctggtgctgtcattcgagggaagaagggtcctggtggtgt

SEQ ID NO: 241861 - DNA, 374 bp, Glycine max
catggctttgggaataaaaaggagaaatctccaaatcctcagaagagaaaccctcaggttgcaacacatggggatagctcttctggaatagcccaactctgtgttcgcataaatactttacaatggatcctgggtgaatttgatgttctggaacaaagaataattaccctattatggaactctgagtctgctcatgtataagatttttcaaatggattaacacagaagtctgaactatttccagccgcatgtcttgaaggaatccagcaactctgtgaggctgcatcatacagaaatgtcttccatgatctaagccaggctttatgggatggtttatatgttggggattcatcatcttcaagaatttagccatg

SEQ ID NO: 241862 - DNA, 371 bp, Glycine max
gatagaagaagcgcaaagagaagcattagcactaggagcagcaacaactagtctcagctgaaatggcctcttcagtgatggcatctgtggccctcaaacctgcccctttcactgttgagaagtcctcagtgagaggccttccctctctctcaaggaactcttcttcattcagagttgtggccagtggcaagaagatcaagactgacaaacttatggaattaatggtggcatggctttgagggatggaactgatgcatctggcaggaaaggaaagggaaagggtgtttaccagtttgtagacaaatacggtgctaatgtcgatagttacagtcctatctacgacaccaaggactggtctccaaccggtgatg

SEQ ID NO: 241863 - DNA, 311 bp, Glycine max
ggttcacgaggtggaggcggaggcggaggtgtttaccgtggaagttccaccaacaatgcacctgctccatccattgaagatcctgggcatttcccaaacttgggtgccaagtgaggccttgctagaacccttttgtcacatccctgtcctaatttcaattttgggttcgcttaggtgaacttaatcaggaaaataactatggtacttggatttcctggattggaacgttcacttaattttatgccttgaaagtgtaaatttatgttgttgttcttcatacagtcctgtacccttgaagcctgatccccctt

SEQ ID NO: 241864 - DNA, 280 bp, Glycine max
gactcacttcagtgtcattttttcttattctcttcctctctctctactctgagacacaaaggaaaattataagaaattatggctggttattcaaaagcttcagctctttggatcctttttcttctctttggcttctctgtagctaaggaaattttggttggaggtaagactgatgcatggaaagtttcagcctctgaatcagattcactcaaccaatgggcagaaaagtctcgtttccaagttggagactatcctgtttggagatatgatggtggaaaag

SEQ ID NO: 241865 - DNA, 375 bp, Glycine max
ggatgtgagcatgggaatgtgggtagagcaattcaacagttcaaggccagttgagtatgtgcacagcttcaagttctgccaatttgggtgcattgaagattacttcactgcacattaccaacctccaagacaaatgacctgtatgtgggataagttgcaacaaaagggacaacccctatgttgcaacatgagataataacatagtctatgatcataatattcgtattatatttatgtacataggcactgaggacctttatgatctccacatattcatttactgtttaacctctcttttttttttttcttttcgattctcccaaaaatagaaggcctaggtgtatcatataaagttggatactgcagctattgctg

SEQ ID NO: 241866 - DNA, 406 bp, Glycine max
gtcatcaagaagtcaaggatcaaagcctcttaatgatttagataagatgattcccaaagcaagggtaataagcaaggaggaaatttcagtgaaggaagccaaagagaagctattgcaagatatggaacagatgaaggagagattttccaaactgttgttgggtgaggacatgtccggtggatgaaagggtgtttcgtctgctttggcactgtcaaatgctttcacaaaccttgctgcttctatttttggtgaacaaaagcgcctagaaccgatgccggcagaaaggaaagcataatggagaaaagaaactgattggcttctatcagtcacggattacgttgttgaaatggttccttcacaacaaaagtctaatgatggttcaaatatggagattatgacgacacga

SEQ ID NO: 241867 - DNA, 343 bp, Glycine max
gagagttaataatccgaaactaggttaaatataaccttacctaaatactagagggaaagaaagatagaagttgagctgagtgagtcacagttgttctcattgaagcagaagaagaaatggcggcttctctgcaactgttccaatgcaaactagcgagaccctttcggtccttccctttgcgaaggtcaactccccctctgagtctgaggtgttgcgcttcgcccccttcttcctacagcatcactctcattcccggcgatggtatcggccccgaaatcatctctgtggccaaagacgttcttgtcctcgtgggttctctcgaagggatcaaattcgagttcca

SEQ ID NO: 241868 - DNA, 390 bp, Glycine max
  unsure (1)..(390): unsure at all n locations
gaatctagtggaagagtgaataagagatatcaatatattatgataatggagggatacaataagaaggttatgattgtggggatggtgttgggcatggccatgattgggatggccaatggccaatactcgttttgtcgcatgcccagcgatgggttggcggcatgcaagccgagtgtgagtggggactatcctgctgatccctccactgcttgttgctcagccattgccaatgctgatcttaaatgcttctgccgcttcaaggattcgggccttctctctatgtatggtgttgatcccaacaagtgcatggaactccctgttaagtgcaacgttgtcgactctttccactgctagattcattacanggggcactaatcaatattcactaca

SEQ ID NO: 241869 - DNA, 366 bp, Glycine max
gggggcattcttgtgcactcagttactctctctctctctggagcgtcgtcgtttcgttagggcacaaaaccccttttcggatcggtggagcaaggcctcgccggcgagattcccgaggctgttcaatcagcgatcgaacaccggcgaaaagcggcgaagatgaaggctttcgtgaagactctcaagggcacgcacttcgaaattgaagtaacccttcggacacgcttcctgaagtgaagaaacatatagaaactgttcagggtgcagatgtctatcctgctgcacagcatatgcttattcatcaaggacaagttctaaaggatggtactactttggaggaaaatcgagtagctgacaatagtttta

SEQ ID NO: 241870 - DNA, 373 bp, Glycine max
  unsure (1)..(373): unsure at all n locations
gacacaaggcaacattgttaggttgttgggtttctgttcanatcatgagacaaaccttttggtctatgagtacatgcccaatggaagtttaagtgaggttcttcatggaaaaaaggggggtcatttgcattgggacaccaggtataaaattgcggtggaagctgccaaggggctttgctatctgcaccatgattgttcgccactcattgtccatcgtgatgtgaagtcaaacaacatccttcttgattcaaatcatgaagcccatgttgctgattttgggcttgctaagttcctgcaagattctgggacatctgaatgcatgtctgctattgctggttcatatggatacatagctccagagtatgcctacaca

SEQ ID NO: 241871 - DNA, 361 bp, Glycine max
gattcaacatctcgcaaaacgattcaaaaccagacacacacacaaacaaacgctgaatctctcgtcgttctttttatttgcggtttcttcttcttctcacgttctacgtaacattttctaaaacatgtctggggaagaggaagaaaacgccgcatagctcaaaattggagaccagtttttgaatgcaaaatgcttaatgaactgtgaagtttcattgattcatgagcacaagtatgaacagcctcatcagacattcgatgatcccatgaatcaagtttctcaagtatttgaaaagtccctggagtatgtgaagcgttttacccgctataaaattcctgatgctgttagacgagttcgagaa

SEQ ID NO: 241872 - DNA, 394 bp, Glycine max
attgtacataaaggagaaactacagaagacattgccaagagagaagggcgcttcgcaagggaggtggcaatgttgtctagagtgcaacataagaatttggtgaagtttattggtgcgtgtaaggagccagtaatggtgatagtcactgagctgttattaggaggaacattgcgaaagtatttgtttagcatgcgccccaaatgcttggatagacatgttgcgattggttttgcgcttgatattgctcgggcaatggagtgcctgcattctcatgggatcatccaccgtgatcttaaacctgataacttgctattgactgaagaccagaaaacagtcaagctagcggattttggtttagcaagagaagagtcattaactgagatgatgactgctg

SEQ ID NO: 241873 - DNA, 388 bp, Glycine max
ggatttcagacacaacttcgcttatgaaatctcttcttccaattccttctttcattcattcccaggctgagatggcagcggcaccaacagctaccttcactattggaaccaccggttccctatgccagagaggaaactcgcttcctcaattaaagtcttctgggttgaaattcaactcccagaatcatttgaagagcttctgcggtctcaaggccatgtcatccgtgacatgtgagtcagaatcgtctttcttggttaacaaagctggtgctgctctgcgggcgtcttttgcatccaaggttcaaaaggaaaacgaccaacacttcaactacaactcgcagcctcaggcttcgtacaaagttgcagttcttggtgctgctggagggat

SEQ ID NO: 241874 - DNA, 368 bp, Glycine max
tggggtagctagaagactaaatcttggggaagtccttgctttgaggtcagacttgcagcatatcaataaaattgttctcatctttcacgcataaccttatctgaccttcgtcaatcctgtaagtagtagaagtatgaagatggtatagacattctgactcagatcaaagtcggtaaatgaaggacaagctgaagcgctctgcgaccagatctcaggagcagtcttcgagtcttgggtcgagcatgaaccagacagcatagttcactgcgagccattcatcaagacctacttgatcatgtgcatatgagaaatctcaatcagagccaatttctgaatgcatcaagatagtgcgtgacacatgcatgaac

SEQ ID NO: 241875 - DNA, 337 bp, Glycine max
ggaagcacaagagaagagaagagaagagaggagagggggggagaaggggttgcagagagagagagagagagatgtcatcatcttcagacctggacgggcaaatagagcagttgaagaggtgtgagcctcttaaggagtctgaagtgaaggcgctttgcctcaaagccatggaaatccttgtcgaagagagcaacgttcaaagggtcgacgcccctgtcaccatatgtggtgatattcacggtcagttttatgacatgaacgagcttttcaaagtacgacgggattgccccaaaactaactatttgtttctgggggattttgttgataaaaggtttta

SEQ ID NO: 241876 - DNA, 412 bp, Glycine max
  unsure (1)..(412): unsure at all n locations
ggcacaagtttgttgagatagctagaagcaataagatgaaaatgaaagtgcttgttttgtttgttgctacagttttggtagcatatgaatgccatggctcagactaccagaagttccctctccaaatgaaaactgggtttggtgggcaatacagcaatgaggtggcatgtgccagttggaggcttggcgtggaagcaaacaacgtagtcaagtggcaaactgttcctgcagcttgcggagagtacatagctgactacgttctangagaccaatatagatcagattccaaaacagttaaccaacaagcttatttctatgctaaatccctcaaactcaccaacaaagatgtctttgtcttggacgttgacgacactactctctctaatctccagttatttgctaancatggatt

SEQ ID NO: 241877 - DNA, 395 bp, Glycine max
  unsure (1)..(395): unsure at all n locations
ggaacctttgcattcaattcattcaggattcagcaagtgcgttttggaagcagagaccgaaatacttcgagatggcccgtacaaagcaaactgctcgtaagtcaactggaggaaaagctcccaggaagcagcttgcaaccaaggctgcacgtaagtctgcaccaacaactggtggtgtgaagaagcctcatcgttatcgccctggaactgttgctcttcgtgagattaggaaataccagaagagcactgagctcctaatcaggaagcttcctttccagaggttggttcgtgaaattgcccaggatttcaagactgatctgcgtttccagagccatgctgtgcttgcattgcaagaagctgctgangcataccttgttgggctctttgaggacact

SEQ ID NO: 241878 - DNA, 378 bp, Glycine max
ggaactcattaggaagggagataaggttggatcttctgaaactgcattgcttgccaggctaggcatattgcccttctcatatgggcatgtggttctctctgtttatgataatggttcagtgttcagccctgaggttcttgatcttactgaggattacctcattgggaagtttgctgctggtatctcaatggttacttcacttgcactggctatttcatatccaatacttgctgcatcaccatacatgtttgtcaatgcctacaagaatgttcttgctgttgcggttgagacagattattctttcccggaagcagacaaggtcaaggagtatctgaatgaaccaagtaaatttgccgttgccgccgtagctgctcctgc

SEQ ID NO: 241879 - DNA, 366 bp, Glycine max
gagaatagagagctcctccaattagggtttttgtgatctgcagctacgatgggtaagggaacggggagtttcggtaagatgaggaacaagacccacaccctctgtgtgaggtgtggccgccgcagcttccacccccacaagagtcgttgctctgcgtgcgcttaccccgctgcacgcaccaggaaatataactggagcgtgcatgccattacgagaaataccaccggaactggaacgatgaggtacttgcgtaacgtgcctcgcagattcaagagcggcttcagagagggtaccgaagctgcacccattaagagatgagctgctgcctctgcctaagctttgaatgaatgacagcaatttttgctg

SEQ ID NO: 241880 - DNA, 230 bp, Glycine max
ggagacgaacgccctagtatgctcagtaagatggcttcctttgtatccttcccactgccgcttcttgcagtccttatccgcatgcgggaatggcttgctacttactatcaggcgattaagaagccaccagtgtacatgcctccggtgtacaatccagcactgtacaatccatcggtttaccagccaaaatcaccggtttatacagcgaagccgcttgtttacgcgccacc

SEQ ID NO: 241881 - DNA, 353 bp, Glycine max
ggcagcgcttgatttgaggccaggcaagccccactcatccaccatacctctcctcgttcaggctacccctttctgcccttcttctacctttcaggttttaagagtatatagatggcagagacattcctatttacctcagagtcggtgaacgagggacaccctgacaagctctgcgaccaaatctccgatgctgtcctcgacgcttgcctcgagcacgacccagacagctaagttgcctgcgaaacatgcaccataaccaacttggtcatggtcttcggagatatcacgaccaaggtcaacgttgactacgagaagatagtgcgtgacacctgcaggaatatcagcttcgtctc

SEQ ID NO: 241882 - DNA, 374 bp, Glycine max
gacaacacaacacaacgcgcactctctctttttctctctgttttttgttctctcttcgcttaaaccctatcgttcttctcgttttcgccgattctcgccatgccgaaagctaaacccgacgccaaagccgccgatagcaggttgaagcggaagggcgctggtgctgggaggaagcaatcgaggaaagctgctaaggaccctaacaagccgaagagacctccaagcgctttcttcgttttcatgtccgagttcagagagcagttcaagaaggagcatcctaacaacaaatccgtcgctgttgtcggcaaagctggtggtgaaaaatggaaatcgctatctgatgctgaaaaggcccctttcgttgctactgctga

SEQ ID NO: 241883 - DNA, 336 bp, Glycine max
agtgcacctggttaacgatatagtatagcatggcacagtctagttgcaaaactttggtgcagtggttggtagcaacattgctcagtgccttgttgggtggtgcacaagctgttgcaatatgtaacatagactcaagtcaattaaacttgtgtcgtgctgcagttactggtcaaaactctccaacatcggatgagaaatgttgtgcagttgttcgccaagccaatttgcgttgcctctgcagttacaagtctatcccaccttcatttggaataaaccccaaaaatgctttggccttgcctggtaaatgtgatcagcaatggcctcctaattgttgag

SEQ ID NO: 241884 - DNA, 317 bp, Glycine max
ggaaaaaagttttcagtttcagaaagaaagcagaagcaatagcaatgggttggatcggtgagactgttgattccatcaaatctcttcagatccgccaggtcctcacccaggctgtgagcctacgcatgactgttacgtctgcactgataatatggacggcattgatgtgcgttactggcagtgaatctcccgttgttgttgttctttctggaagcatggaacccggattcaagcggggagacatcttgttcttgcacatgagtaaagatcctattcgggcatgggagaatgttgtgtctaatgttgatggacgtgag

SEQ ID NO: 241885 - DNA, 387 bp, Glycine max
atcttaaaagcatgttgaagcccctggtcacaattcttgtgttcttgatggttgccagtgctcaagatagtctgagtgataataccatttttgaagggaagcaaactgtgcgtgtctacaatggcatgaatgatggcattcttgtgtatctccattgtcgatccaaggacaatgatcttggccaacatgttcttgcctttggagagttcaaaaatggtccttcaatgataacctttttggcacaactcttttttggtgcacaatgaatgcaagcaatgtgcatgcaagttttgaagtttatcgtgccaaaactgaggaaaataagtgtgatacccaatgcaatagaattctaaaaaaagacggaggctatttttttaatcagttcgt

SEQ ID NO: 241886 - DNA, 394 bp, Glycine max
gaaaataacgaacgctagatagaattttatagagagagagagtttttagagagagaaaggatgaagatcacggcattgttggtgcttaaatgcacaggtgagggttccgatcccgttattctggcgaacgcttccgacgtcagccacttcggttacttccagcgttccagcgtcaaggagttcatcgtcttcgtcggtcgcaccgtcgcccgtcgcacccctcagggccaacgccaatccgtacaacacgaagagtacaaggtgcacacatacaacagaaatggtctttgcgcgttgggatttatggatgatcattacccgattcggagtgcgttttctcttctcaaccaggtaatagatgaatatcaaaaaaactttggcgagtcatggagaa

SEQ ID NO: 241887 - DNA, 366 bp, Glycine max
gaagatacgagagctagactgcaggctcagtttgctcaaatgcgacctgttggaatgccaccatctgttggtcctcgtgtgccaatgtatcccccaggtggtccaggtattggtcaacaattattttatagccaaggccctcctgctatcattccttcccagcctggatttggctatcaacaacaacttatgcctggtatgaggccaggtgcagctcctgtgccgaattttttcgtgccaatggttcagcagggacaacagggacagcgtctcggtggaaggcgtccaggtgcagttcagcaatctcagcagccagttcctatgatgccacagcagatgcttcctaagggacgtgtctatcgttat

SEQ ID NO: 241888 - DNA, 345 bp, Glycine max
agcaaaaaacccaatcaaaattctaagtctctttgtttacgttgttcgtttccctcattgctttgttctcttctctcttctctctcacattcaacttcaaaggcgtagagtgagatccgaacgatgaagagagtattcggcgtcaagaagaacaaggatcctcctccttccattcaagatgcttccgataggattactaaacgaagtgactcggtggatgacaagattaagaagcttgatgccgagcttagtagatataaggagcagattaagaaaactagacctggtcctgcccaggaagctgttaaagctagagccatgagagttcttaagcaaaaacgaatg

SEQ ID NO: 241889 - DNA, 362 bp, Glycine max
gagactagagagtgagaggtgggaaatggcgtacctgaacgctaggcgcaccttagcatctaccctgtcacgagctctttcttcttcatccgctagcgcctctcgctttcgcttcgcattcgcattcgcgttgctccccgccaaacaaaccgcacccaaccctcactgggcgagtttcgcggttcggactcaatcttcgggttcgggttactcgcccctggacgacccgtccccgaactggagcaaccgtcccccgaaggagaccattcttctcgatggctgcgactacgagcactggctcatcgtcatggagttccccgataaccctaaaccctctgaggaccacatggtcaacgcctatg

SEQ ID NO: 241890 - DNA, 222 bp, Glycine max
ggcacctgtgagtaatatttgagcttaaaccctaaccgctcttctcttcattactcactttggacacaatcataatggcgttctgtactaacgtcggaaatgtcttgaggcacgctgatgctcacagcacacatacacctgtcgcgtccatgcttacatacatcagcagacactcttcatgcaagcttttcagtgcaggcctattatacggattgatgacca

SEQ ID NO: 241891 - DNA, 406 bp, Glycine max
  unsure (1)..(406): unsure at all n locations
gggcctgggccgtggcccgctgtccttgctctcccaatccgggtcaaattactcgggcatcttctcttactgtctccctagcttcaagtcctactacttctctgggtcgctcaagctcgggcccgtgggccagcccaagagcattcgcaccaccccgcttcttcgcagccctcaccgtccttctctttactacgtgaacttcaccggaatcagcgtgggacgtgtcctggtaccctttcccagcgagtatcttgggtttaacccgaatacaggatccggaaccataattgattcgggcacggttataacccggttcgtggagcccgtttacaacgcggtgagggaggagttcaggaagcangtggggggcactacattcacgagcattggagccttcgatacgtgt

SEQ ID NO: 241892 - DNA, 385 bp, Glycine max
  unsure (1)..(385): unsure at all n locations
ggagtgcagtgatagagataagaaaatgtggcttgtgcagctctcaaccccatttctgaacggacatggtcattccaccacccttctctccaagcacagttcggcggtgactcagacccactgggccccaccgagtttcctgcctcaaatcgatgcgatgaagacaatgcaggggagagtggtgtgcttcaccagcgacaagacggtggcagtggaggtggtgcggctggcccctcacccaaagtacaagaggcgcgtgaggaagaagaagaagtaccaggcccacgaccccgataaccaattcaaagtcggcgacatcgtccagctccagaagaccaggcccatcagcaagaccaaggcctttctcgcactcnccgttcccaaa

SEQ ID NO: 241893 - DNA, 382 bp, Glycine max
ggttctagtgtgtgattgtttgttgttgtaactcgttcttcttcttttgttgttctgtgtttgtgtttgttttttctctcacctgaaaatgtcttgctgcggtggtaactgtggttgcggaagctcctgcaagtgcggcaacggctgcggaggctgcaagatgtacccagacttgagctacactgagtcaaccaccaccgagaccttggtcatgggagtggcacctgttaaggctcaatttgagggtgctgaaatgggtgtgcccgctgagaacgatggctgcaaatgtggaccaaactgctcctgcaacccctgcacatgcaagtgaagtgttgggagagcaggcttcaagcagagatagcccttaattaggaataatgat

SEQ ID NO: 241894 - DNA, 291 bp, Glycine max
tctcctcctttgtggtgtcgagctgagaataccagttgctccagtagccggcactaagcaacatggcggacaaggcagtcaccatccgaaccaggaagtttatgacaaacaggcttctctccagaaagcagttcgtcattgatgtccttcatccagggagggctaatgtttccaaggctgaactgaaggagaagctgggaagaatgtatgacgtgaaagacaccaacactgtatttgtcttcaagttccgaactcattttggtggtggcaagtccactgggtttggtttga

SEQ ID NO: 241895 - DNA, 318 bp, Glycine max
tggggtgatatatattgagattcgtaagttataactgacatagttttctgagacaatggtgattattattatcgagagaatggcaagctcctcggaggatggacaagtcattagctgtcacaccgttgacgcatggaatgatcaactccagaatggcaaccaatccaagagactcattgttgtggattttactgcttcttggtgtggaccatgccgtttcattgcaccattcttggctgagctggctaagaagtcacaagtgtcgtattcctaaaggtggatgtggacgaattaaagagtgtttctcaagactgggct

SEQ ID NO: 241896 - DNA, 372 bp, Glycine max
gactcacagcagagccaccaaatacttgtgttgtgtcgattctctgccatccatgatccatcacttacaaactagtactacttgctttcaataaaaacaaaaacacactctttggtgaccacaacaacaataacaatggctgcctcactacaagctgcagctaccttcatgcaacccaccaaggttggcatagcctctcgcaacctcaaatctacacaatgcatttctaaggcttttggcttggaacctgctgcagctaaactcacttgctcccttcagcctgatctcaaagaatttgctcaaaaatgtgtcgacgctaccaaaattgcatgattcgcccttgccacctctgctctcgttgtttctggagca

SEQ ID NO: 241897 - DNA, 368 bp, Glycine max
tcaggaatcgttttcttcagaaaatttgccatcgttgagggaagcgcgagagccttcgttgttcaagatgagagctaagtggaagaagaagcgcatgaggaggttgaagaggaagcgccgaaagatgagacaaagatctaagtaggtgcttgaacaaggagtggagatgatgtgcttttccatctgctaccagcttcatgacattttatgctgtcatggctcttatgatgatcttgaggtctagtggcgaagggagcttccatcttgactttagtttagctttactggtctaaagattgctgttttagtgtgggttaagttatgatattgagagttttgtgttatctaattatgtactggtacttttt

SEQ ID NO: 241898 - DNA, 367 bp, Glycine max
gggacgacgtgagtagctgaggaggaagagagaaaaaccatggcaataacactcaacaatggcttcaagatgcctatcattggattgggcgtgtggcgcatggaaggaaacgaaatcagggacctaattctcaattccatcaaaattggttatcgccattttgattatgctgctgactacaaaaacgaagcagaagttggagatgcgcttaaggaggcttttgatagtggccttgtgaagagagaggatctcttcattaccaccaagctttggaattctgatcaaggccacgttcttgaggcgtgtaaagacagtctcaagaagcttcagttaacgtatctagatttatatcttgttcactttcctg

SEQ ID NO: 241899 - DNA, 377 bp, Glycine max
gataaaaggagatccaaagtaaagaacacagatggcatgacaccacgaaaccaaattaaaaactgcgccttctctgtctctgtttgttcttctcactttatattctctctctgtgtatatctcttcactcttattattccttctcttctcaacgacgatggaggacccatcagcagcaacaacgttgttgctgaacagcgaatattcgaggctgttcgtcgaggacacggacttgtacaatcgcattgtgttgggaaccctcttgccgcacttcgtgtggggcccactcccgcacttcctccagacgtggcttcgcaattacctcggcggcgtcctcctctacctcctctccggcctcctgtggtgcttctacattt

SEQ ID NO: 241900 - DNA, 370 bp, Glycine max
gaattgtataatgggtatccttgttcttctttctctattgtctatagtcatctccattgttctcttcattacccacacacacaaaagaaacaacactccaagaggaccaccaggtcctccacctcttcctctcatcggcaaccttcaccaactccacaactcatccccacatctctgcctatggcaactcgccaaactccacggtcctctcatgtcgtttcgcctcggcgccgtgcaaaccgtcgtggtttcatcggccagaatcgccgaacaaatcttgaaaacccacgacctcaacttcgcttccaggcctctcttcgtgggcccgagaaagctctcttacgacgggttggacatgggcttcgcaccg

SEQ ID NO: 241901 - DNA, 372 bp, Glycine max
gaagacttaagagtgaagagtgaagagtgagagagagagagagagagaggcacttggaatccaaaaatgagagaaatcatcagcattcacataggtcaggccgggatccaggttggcaactcctgctgggaactctactgcctggaacatggcatccagcccgatggcatgatgccaagtgactcctccttcggtgtagcccacgacgccttcaacaccttcttcagcgaaaccggatccggcaagcacgtccctcgcgccgtcttcgtcgatctcgagcccaccgtcatcgacgaagtccgttgtggcacttaccgtcaactcttccaccccgaacaactcatctccggcaaggaagatgcccgcaacaac

SEQ ID NO: 241902 - DNA, 391 bp, Glycine max
gatcatcagaatccacagtttccgttaacgctctccaatacaaagtaaccactcactgaatattcggtcgaagatgtccgccgccgaagaagctaaagttcccgccgtcgaaaagccggtggaggaggtgaaggcgccgaagcttgccaaggagaagaaacctaaggctccgaaggaaaagaagccgaaacaggccaaaactgcttctcatcctccatatctccagatgattaaggacgctttgattgctctgaacgagaaaggaggatcgagtccatatgcgatagcgaagtacatggaggagaagcacaaggcggtgcttcctgcgaatttcaagaagatactacgtctgcaactgaagaaccaagctgcgagagggaaactcgtcaag

SEQ ID NO: 241903 - DNA, 363 bp, Glycine max
ggaacctcaaaatcagtctctaatatttttctcactgtcttgtctctccagagaactgtatagagagagatggcagctgcaacatctggtgctgtgttaaatgggttgggatcttccttcttgagtggaggaaacaggagccaaacccttctggccactgctattggaggcaaagttggtgctgctgctgttactgttagtcctagaagactcattgtggtagctgctgctgcaccaaagaagtcatggctccctggtgtcagaggtggtggcaacctcgtcgaaccagaatggcttgatggatcgctaccaggtgactatggctttgacccactaggccttgggaaggacccagcattcctc

SEQ ID NO: 241904 - DNA, 386 bp, Glycine max
  unsure (1)..(386): unsure at all n locations
gagaagctcagacctagggatttcggccgtttgctccccaaaaaggaaagaagcagattctgtcctttgaaatcaacaagaaaagatgtcaggtgaagaggtagctgttgcagttgaggtacctgctacttcaattccaggtgagccaatggacatcatgactgctctacagcttgtgctgagaaaatctctggcctatggtggtcttgcacgaggtcttcatgaaggtgccaaggtgatcgagaagcatgctgcacagctctgtgttctagcagaagattgtgaccgacctgattatgtgaaactggcgaaggctctttgtgcagagcacaatgttagtcctttgacagtctcaagtgcanagacccttggagaatgggctggtt

SEQ ID NO: 241905 - DNA, 390 bp, Glycine max
  unsure (1)..(390): unsure at all n locations
gacatcttcttttacgtattgaatctcagaattctctaaaagagatctttttctgctctttgaagaaagaagggtctttgcttgattttggagatgtctctgctctcagatctcatcaaccttaacctctccgataccaccgagaaggtgatcgcagagtacatatggatcggtggatcaggaatggacctgaggagcaaagcaaggactctcccaggaccagttagcgacccttcagagcttcccaagtggaactatgatggttccagcacaggtcaagctcctggtgaagacagtgaagtgattttatacccacaagccattttcagggattcattcanaaggggtaacaatatcttggttatctgtgatgcctacactcctgctgga

SEQ ID NO: 241906 - DNA, 396 bp, Glycine max
ggacacttctttagaacaagcatgcataactctgctaccctcttctctctctctcggatttcttgcgcggtttatcatgggggatagtcagtattcgttttctcgcaccacatttagcccttctggaaagcttgttcagattgagcatgctttgacggctgtcgggtctggataaacgtctttgggaattaaagctgcaaatggagttgtcattgctaccgagaagaaattgccatctatattggctgatgaagcatcagtccagaatattcagttattaacaccaaatataggtgtcgtatatagtggcatgggtcctgattttcgagttttggttcggaaaagcaggaaacaagccgatcagtatcgccgtttacattaagacacaattcctgt

SEQ ID NO: 241907 - DNA, 383 bp, Glycine max
  unsure (1)..(383): unsure at all n locations
ggttgtgtgagtgaagaagcagagggagtagcggcattaaaaatgcagatcttcgtgaaaactctgacagggaagactataaccctcgaggtcgagagcagcgacaccatcgacaatgtcaaggccaagattcaagacaaggaaggcattcctccggatcagcagcgtttgattttcgccggaaagcagcttgaagatggaaggaccctggccgattacaacatccagaaggaatcaacccttcatctcgtcctcaggcttcgtggtggcatcattgagccttccctcatggctttggctcgcaaatacaaccaggacaagatgatttgccgcaagtgctatgcccgtctgcatcctanggctgtgaactgccgcaagaaaaa

SEQ ID NO: 241908 - DNA, 410 bp, Glycine max
  unsure (1)..(410): unsure at all n locations
gacgccttgttcggtgaagtgagtagtgagtgctgaatcgaatcgaatcgattctccgaacatggcggcgagcgatcgcacagtgttgcaattctcttcatcatcttcttcttcttcgcagatcttgtccgcgaaggtccaccctctggtcatcttcaacatctgcgattgctatgttcgacgccctgaccaagccgaccgcgtcatcggaaccctactcggctccgtcctttccgacggaaccgtcgatatccgaaattcctatgctgttcctcacaacgagtctatcgaacaggttgcattggatatagagtacaccacaatatgttaatatcccaccanaaagtgaatccaaatgaaatcatagtaggatggtattcaaccggtcttggagtaactggtggtaatgc

SEQ ID NO: 241909 - DNA, 380 bp, Glycine max
ggcgtacacagcctcaacaaccctaacgcgtgcagagcagagagagacgcagccatggggcgaagacccgcgaggtgttataggcaaattaagaacaaaccataccccaagtcacggtttcgccgtggtgttcctgatcccaagatcaggatttacgatgttggtatgaagaagaagggtgttgatgagtttcctttctgtgtccatctggttagttgggagaaggaaaacgtttctagtgaggccctggaagctgctcgtattgcttgcaacaagtacatggccaaatttgctggaaaggatgctttccacttgagagtcagggtgcacccattccatgttcttaggatcaacaagatgctttcgtgtgctggagctga

SEQ ID NO: 241910 - DNA, 366 bp, Glycine max
acccacgagtcaaacgggtgccaaaagaagaaagaagggggttctagtgtacgtgattgttgttactcgttcttcatcgtcgttatcttcatcatttgttgtttgtgtgtttgttttttcactcacctgaaaatgccctgcagcggtggtaactgtggttgtggaatctcctgcagttgaggctacggctgcagaggctgcatgatattgccagacttgagctacagagagtcaaccatgactgagacgttggtcatgagagtggcaccatttaaagcgcagttcgagagtgctgaaatgggtgttcccgctgataacgatggctgtatatgtggatctaactgcacctgcaatacctgaacttgc

SEQ ID NO: 241911 - DNA, 358 bp, Glycine max
gacgcagtgttcggtaatgtgattactcagtgctcaaccgagtcaaatcgattctcctgatgatggtggctatggatcgcacagtgttgcggttctcttcatcagctgctgcatctgcggatatcttgtctgcgaaggtctacgctctggtcatcgtaagtatctgcgattgctatgttcgacgctctgactatgcagaatgtgtcataggttggttactcgactccgtcctttccgagtgaagcgtcgaaatccgaaattcctactttgttcctctaaataagtctatcgacgaggttggattggatatacagtaccatcacaatatgttaatatgctatcataacgtgaatctaaa

SEQ ID NO: 241912 - DNA, 376 bp, Glycine max
ggcagtttcaaattttcttttccttcactttcccgagaaaaaaataacacttttcactttcttcactacgttctcacttcgatatggctcgtacgaagcaaaccgctcgcaagtccaccggtggcaaggcgccacgtaagcagctcgccaccaaggccgctcggaagtccgctccggcgaccggaggagtgaagaagccccaccgcttcaggccgggaatcgtggcgctgagggaaatcagaaagtaccagaagagcaccgagcttctcatcaggaagcttccatttcagaggctcgtgagagaaatcgcgcaggatttcaagaacgaatttgcgtttcaagagcagcgctgtttccgcgcttcaggaggctgctg

SEQ ID NO: 241913 - DNA, 283 bp, Glycine max
gacacttactagtagtaagcatggagtcctcaaagatctatgcttacctcttcctctgcatgatctttctctcttccgccactcccattctcggttgtggctactgtggcaaatcccccaaaaagcacaagcctggtaaaacaccaaagacacccaaaacacccgttgttaagccaccagtcaccatccctcccattaatgttcctcccgttgttcttccaccaatagtgaagcccccaggtattctccctccaattccaattattaacccaccaaccacacc

SEQ ID NO: 241914 - DNA, 382 bp, Glycine max
gacaccaaaatttgccaattgccatttcaatccccagtttcttcttcaacgtcctcttacgagcagatcccaattctccgtcccagtttcaaaccctaattccctcattcccatggcctcagaagagcccactgtcgcggtggaacccgctcccgaacctgccaccgccgagcctcccccggaggagaaggaggagcccaaacctgaagccaaggctaagaaaaccaaggaacccaaacctaaaaaggtttccagaccacgcaaccctcccactcatccttcctacgaggagatgattaaagacgcaattacctcgctgaaggagaaaaccggttcgagccaacacgcgattgcgaagttcatcgaggagaagcacaagcag

SEQ ID NO: 241915 - DNA, 354 bp, Glycine max
ggggttgggttgggttgtcattgttggcatagcaacaagttgacactaatctaatcacctcctctgcctctctttgtattctacgatggacacgcactgccacgatgaggatgagccaccgaaacctgtggttctgatcacaggatgttccacgggagggataggccacgcgcttgcacgcgccttcgctgagaagaaatgcagggtggtagccatcagcacgtcgctgtcgagcatggcggagctggaacacgaccagatgttctttttggaagagttggatgttcagtccgatgagagcgtgcgtaaggtggttgatgctgttgtcgacagatacggtcgcatcgacgtgct

SEQ ID NO: 241916 - DNA, 379 bp, Glycine max
ggagagtggagagagagagaagtgagagtgtgagagggagcacagtgaagaagagaacgaaggaacgaagatggagactcctcctccgcaacaaggcgtggtgaagaagaaggagacaaggggccgaaaacccaagccgaaagacgaacacgccaaggcgttgaaggaagggagaaaaacacagcaacaacaacatgatcagcagcaacaacaacaacagcaacatcaaccttcggtggacgagaaatacacgcagtggaagtcccttgttcctgtcccctacgactggctcgccaaccacaacctcgtctggccctctctctcttgccggtggggccctcagcttgaacaagccacttacaagaatcgtcaaagactc

SEQ ID NO: 241917 - DNA, 348 bp, Glycine max
gaagaaaacatcgtgaagcatgtctggaacaggaaagggagggaagggtctaggaaagggaggagcgaaacggcaccgtaaggttctgagggataacattcagggaatcacgaagcccgcgattcggcgtctggcgcgacgtggtggcgtgaagcgtatcattggtctcatctatgaacaaactcgctgtgttctcaagatcttcctcgataacgtcattcgcgacgctgtcacctatactgagcacgctcgccgcaagaccgtcactgctatggacgttgtttacgctctcaagacgcaaggcaagaccctctatgggttccgggggtaaaagatttgggaattgga

SEQ ID NO: 241918 - DNA, 298 bp, Glycine max
ggttgttgtaaggcaagtgagcgtcggttggaagcagagagatggaaggttgggaccccaatacgaagtcgacgctgacacagatccctctgctgacgacgaaggcgggtccacgagacggagcggcatggacgcagaggcttaacgaagagtacaaggctctgatagcgtacacgcagatgaccaagtccaacgacaacgattggttccgtatctccgccgccaatctggaaggcactcgctggaccggtcaatgctggtacgttcacgatctcctcaagtacgacatcgacctcca

SEQ ID NO: 241919 - DNA, 382 bp, Glycine max
ggttctatctaattcagtttttttctcccatcataaaaaaccgaccctctccttgccctcttcaccaaccaatggctcccccaaaggccgagaataagcccgcggagaaaaagcccgcagagaatgctccggcggagaataagcccaaggtcgagaagaagatatcgacggaaggaggaagcgagaagaagaagaatagaacaaagaagagcgtggagacctagaagatttacatcttcaaagtgctgaagcaggttcaccccgacatcggaatctcaagcaaggccatggggatcatgaacagtttcataaacgacatcttcgagaagctcgcccaggagtcgtcgcgattggctaggtataacaagaagcctaccattac

SEQ ID NO: 241920 - DNA, 381 bp, Glycine max
ggaagtttggaaatttgacacctaccccacaccatcatggcctgcatcgacaaattttgggttttcgccctcgctcttctcctcctcgcttcccctctcctccaagttgctaggtgccagtcagactctgatgatgtagtggaggctgctgaagaatcaggtgatattggcattgttggtgatgatgtccaagactttggtgatgggactttcccttctgctccaggaattgaaacaataagtgtatttccgaaaaatagtgcaagattgataacagctggagaagagtcagagctgcttgttggtgttaaaaatgatggggattcaagcttgaatgttattgcgatcaaggctagtgttcaccttccttttgatcaccgt

SEQ ID NO: 241921 - DNA, 314 bp, Glycine max
gggatgcttgacacatacttaaatgtcttggctttgtggcttctgtttcttctttttgctagttgggtggcatatgtgttttttgaggatacaatacaggggaaaacagtattcacttcctatggtactacgttgtatcagctatttcttttatttaccacatccaataatccagatgtttgggttcctgcatacaagtcgtcacgttggtattgcctgtttttcgtactcattgtgctggtgggagtttactttgttacaaacttgatccttgctgttgtttatgacagtttcaagagtgagcttgtaaaaca

SEQ ID NO: 241922 - DNA, 375 bp, Glycine max
cttcattgtgcctccgaaccaaaacctgaagcctagaaccttcttccgtctcacagtttgccggaatcagcgatggatcctcagcctgagccagttagctacatctgcggagattgtggaatggagaatacgctgaagcctggtgacgttatacagtgccgtgagtgcggttaccgtatcctttacaagaagcgcactcgtcgcattgtccaatacgaggcacgctgaagaaaactgctctgacattggcaagtaatttccatggaaattgttactacatctgtgttgtgatattgaagaactacttttaattctacagtaccattgcttttgggtgatgtttagaaaaggataaaaactttgaaatgtgaatat

SEQ ID NO: 241923 - DNA, 373 bp, Glycine max
ggatccaaagacgcatcttttgcttcactcgtcatcactacgcagatcgcagcaaaccagactaaactccgacgatgcctcccgtcgctcctcgatccggtgatgccatattcgccaacgtcgaacgcgtcaatgcggagctgtttactttgacgtatggcgcaattgtgcgtcaattgctcacggatctggaggaggctgaggaggttaacaagcagcttgatcaaatgggttacaatattggaatccgtttgattgatgagtttttagccaagtctaatgtctccagatgcaacgatttcagagagacgactgatgttattgcaaaggttggttttaaaatgttcctcggtgttactgcatctgtgaccaa

SEQ ID NO: 241924 - DNA, 377 bp, Glycine max
ggtcttgcaggcgaagagatggccaccgttccagggcagctcgtgtgggagatcgtcaagaaaaacaattccttcttggtcaagcagtttggaaggggcacccagggcgtcgaattcagcagagagagcaacaatctctacaacctcaattcgttcaagtactctggtttggcaaacaagaaaactgttactgttcagcctgagggcaaagatcaggctgtgttgttggctacaaccaagacaaagaagcaaaacaagcccgctgcattgctccacaaatctgtgatgaagaaggagttcaggaggatggcaaaagctgttgaaaaccaggtggccaaaaattactacaggcctgatctcaagaaggctgcccttgc

SEQ ID NO: 241925 - DNA, 318 bp, Glycine max
gagtgcgatgaggataatgcagctggaagtgagattcgcagtgttgtcttggctgggcagcgcttttatgagaaagagggtctgcctgcagatcccatggctaaaattgatcagacccggatgtggaatgttggtgaccctgtctgttctacaaggccacctggtgatctacgtccatcatcaccatttactgctagggtctacctggcattgatgatggcccatattgacatcctgaggaagaacgtgcattcctactccgatactaataccgagagtgtcactgagtctgtcgattctctgaatcctatcaagcat

SEQ ID NO: 241926 - DNA, 380 bp, Glycine max
gacggcaacagaagaataatcgagacacagatcatagtgatcattttttaatttctcagatttatccgacgtcgctgcaaatccaccaaccgttatggctgccttcagcggtgatgaaacggcaccgtttttcggcttccttggcgccgcagctgcccccgtcttctcctgtatgggagctgcctatggcacagcgaagagtggcgtgggcgtggcttccatgggtgtaatgagacctgagctggtgatgaagtcgattgttcctgttgtcatggctggagttttgggcatttatggccttattattgctgttattatcagtaccggtattaatccaaaggccaaatcctattacctctttgatggttatgcacatctct

SEQ ID NO: 241927 - DNA, 315 bp, Glycine max
agggggagtcaatgcattcaggattcaccaattgcgttttggatccagataccggtattcttcgagatggcacgtactcacccaagtgctcgtatgtcaactggacgaaaagctcccaggaagcagcttgcaaccaaggctgcacgtaagtctgcaccaacaactggtggtgtgaagaagcctcatcgttatcgccctggaactgttgctcttcgtgagattaggaaataccagaagagcactgagctcctaatcatgaagcttcctttccagatgttggttcgtgaaattgcccaggatttcaagactgatctg

SEQ ID NO: 241928 - DNA, 365 bp, Glycine max
  unsure (1)..(365): unsure at all n locations
gagagtgaaattggaaattgcatttgaataatgatgtccatattccggcaatacaccttggacgactcattctcgcaagtgttggtgtccccgaaattcctgaaggagtaccaaatagccctgaccttcgcaagcgactacgacgacgacggcgtccccaccaacggggttttccggccaacctgggacctaaccaaggtgaccccggaatcaatcacgcgattcaaggataagaaccccgacgtggacatcaaagtcttcatcagcatcggcaaccgcggcacccagcaccccttcaaacccctcaacaaccaaacctggatccagaacgccaccatgtcnctcaccagcctcatcaacaacct

SEQ ID NO: 241929 - DNA, 388 bp, Glycine max
gaaaggacgaaattgagtttaagatctgattgggcggcgacgatggagaacaacgacagtatcatatcgcgggagaagatcgaccaggcggccgtgtggctcggctccgccgtctcttccgctttcttttcctctttggaacgcttttcctgcgtcaacgtcgccacctctgaccccgacaacgacgaagacgacgacgattattactccaccaccaccgccactcccaccgccgcatccaccaccaccactagccctccctccattcagatcgacgggaaaaaaacaaacgacgtctccaacctccccgtttgagacaatataacgacgacgtcgttgctgcgctgtgtatagacctttttccttttccttctttcgtgtgtgttat

SEQ ID NO: 241930 - DNA, 375 bp, Glycine max
ggaacttctcacgttcatttctacacatccctagctctgtcgttccgtcgttgacgatggcgtttcgggtgcgaagccctgacctccgctctctctttcttctctctctcttgtccatcgcttccgccaatgtcttcttcgaagagcgtttcgatgacgggtgggaaaatcgatgggttaaatcagattggaaaaaaggtgagaacgtggctggggagtggaaccacacctctggtcaatggaatggagacgctaatgacaaaggtattcaaaccagtgaggattacagattctatgctatttcagctgagtaccctgaattcagcaacaagggtaagacactagtctttcaattttctgttaagcacgaacaga

SEQ ID NO: 241931 - DNA, 384 bp, Glycine max
ggcacaagcaaagttctcccacaaacctcttctttctcttcctcccaaacatgtttctctttctctctctctctcttaattcctgaaaagcaagtagctaaggaaaacaaaaacatcatcacagaaactcacaaaggaaaaacaaacaaacaaacaaaatgtcttctccaagcaagcggcgagaaatggacttgatgaaactgatgatgagtgactacaaggtggagatgattaatgatggaatgcaagagttttatgtgcacttccatggacccaatgagagtccttatcatggaggtgtatggaaagtaagagttgagctgccagatgcgtatccttattaatctccttgcatatgctttatcaataagatctatcacccaa

SEQ ID NO: 241932 - DNA, 392 bp, Glycine max
gatagcgaagtttcatttctttggagtacaaatttttcccaaagctgatcgataagccagccaggccaggagttgaagaatgggaaaggggaagatcgaaatcaaaagaatcgagaacacaacaaatcggcaagtgaccttctgcaagagaagaaatgggcttctgaagaaagcttatgagctgtcagtgctgtgtgatgctgaagtttccctcatcgtcttctccagccgtggccgtctctatgagtattccaacaacaacataagatcaaccatagagaggtacaaaaaagcctgttcggatcattcaagtgcgagcactaccacagaaatcaatgctcagtattatcaacaagaatctgctaagctgcgacagcaaatacagatgctgc

SEQ ID NO: 241933 - DNA, 283 bp, Glycine max
gacctcacccagttgcagaaacaaaagaccatcaaagtttcacttcagccttatccggttcagggtttcggtttttgacccaacctttgacgtggcgaaaccttaagtttccgatcacgtctgagcactctggttggtataacctttggtcttagagagtcatcgttttatgtctgaattacacgatcaaattcctactgccttcgatccttttgctgatgccaatgctgatgactccggtgctgggtcaactgactatgtgcatattcgcgtacaacaacga

SEQ ID NO: 241934 - DNA, 363 bp, Glycine max
ggagtacagaaagaaaaggactatccatacaccgggagagatggcacctgcaaatttgacaaaaccaaagttgcggctactgtatctaattacagtgtggtttcccttgatgaagaacaaattgctgcaaacctagtaaagaatggccctcttgcagttgctatcaatgcagtttttatgcagacatatgttggtggcgtctcatgcccatacatctgtgggaagcatttggatcatggggttcttctagttggttatggtgaaggtgcatatgctcccattcgttttaagaacaaaccttactggatcattaagaattcatggggcgagagctggggagagaatggatattacaagatctgc

SEQ ID NO: 241935 - DNA, 367 bp, Glycine max
ggttctagtgtgtgattgtttgttgttgtaactcgttcttcttcttttgttgttctgtgtttgtgtttgttttttctctcacctgaaaatgtcttactgcggtggtaactgtggttgcggaagctcctgcaagtgcggcaacggctgcggaggctgcaagatgtacccagacttgagctacactgagtcaaccaccaccgagaccttggtcatgggagtggcacctgttaaggctcaatttgagggtgctgaaatgggtgtgcccgctgagaacgatggctgcaaatgtggaccaaactgctcctgcaacccctgcacttgcaagtgaagtgttgggagagcaagcttcaagcagagatagccctta

SEQ ID NO: 241936 - DNA, 231 bp, Glycine max
tgggggcgttcttcaattgaggcatgttattctctgctcactcttccaactactactgttgttcttcttcgtcgtcttggtcttcgcatcttcacaatcacatccaatagagacacgttgactttgctggaagaagaagatgaagagaatggaacaatcgcatttggatgacataatcaatcgcctcctcgaaattcctaccctaccggctaagcaggttcagctatccga

SEQ ID NO: 241937 - DNA, 377 bp, Glycine max
gatcacaacactaacacagattttgattcgattcgattcgattcagtcgaggttttaagcagcagcaagatgtctgggcgtggaaagggaggaaagggattgggaaaaggaggagcaaaacgacatcgtaaggtgctccgcgacaacattcagggaattacgaagccagcgattcgtcgtttggctcgcaggggtggcgtgaagcgtatcagcggtttgatctacgaggagactcgcggtgttctcaagatcttcttggagaatgtcatccgtgacgccgttacttacacggagcacgctaggaggaagaccgttacggctatggacgttgtttatgcgcttaagaagcagggaaggaccctctacggatttggtgg

SEQ ID NO: 241938 - DNA, 374 bp, Glycine max
ggatccatctctctaaacaacacattaacctttctcattccccatctcctcaccttattcagccactgctaatttctagggttccgaaatggacgctggcggaaagatcaagaagggcgccggaggaagaaagggcggcggccctaagaagaagccggtttcaaggtccgtcaaggccggtctccaattccccgtcggaagaattggccgttatttgaagaaaggaaggtacgcccagcgtgtcggtaccggtgctcccgtttacttggccgcagttctcgagtacctagctgctgaggtgcttgagttggctgggaatgctgcacgtgacaacaagaagaacaggattattccgagacatgtgctattggctg

SEQ ID NO: 241939 - DNA, 375 bp, Glycine max
ggcagttcaaagcgaagaaagattcgaaacgaagaaagaaagcgttgtgaagaatggcggaagagggacaagtgatcggtgtccacagcgtagaggagtggaaggaacatctcaagaagggagaagagtccaagaaattgattgtggtggattttactgcttcttggtgcggtccatgccgtttcattgccccaattcttgcagagtttgctaaaaagttgccgaatgtcaccttcctcaaggtggatgtggatgaattggagactgtttccaaggagtggggaattgaggctatgccaaccttcctgttcttgaaagaaggcaagctggtggacaaggttgtgggtgccaagaaagaggagctgcaattgacaa

SEQ ID NO: 241940 - DNA, 387 bp, Glycine max
gggcgacagaaactgcgaaggtgactgactgagagagaagagaaaaacaatgtcagggctgaaggaattgctgaagaaagggttaggtttaggcgacatggcgttcaacgccggcggcggagccataacctggttccccggccacatggccgccgctacacgtgctatccgccaccgcctcaaactcgctgacctcgtcatcgaagttcgcgacgctcgcattcccctctcctccgccaacgccgacctccagccacacctctccgctaaacgacgcgtcgtcgcactcaataaaaaagacctcgccaaccctaacatcatgcataaatggacgcattaattttgagacgtgtaatcagaattgcgttgcgatcaacgcgcacagca

SEQ ID NO: 241941 - DNA, 318 bp, Glycine max
gatctcgcgttggtgcaaagcatccttcgcttcaatctctctctctctctttgcgctttctgcaaaccgaacatttcatctccaaagggatcaacaggtcgaaggagaaatggggctgacattcacgaagcttttcagccggcttttcgcgaagaaggaaatgcgaattctgatggttggtcttgatgctgctggtaagaccactatcctctacaagctcaagctcggagagatcgttactacaattcctaccattgggttcaatgttgagactgtggaatacaagaacattagcttcactgtttgggatgttggtgg

SEQ ID NO: 241942 - DNA, 307 bp, Glycine max
gacaagaaaactgtagaaagagtaagaaggatttggaattgacaatttccatggcggcggcgacgaacttgttagcaacactgggggatctggagagggactccttcgtggctcttctttcgaagctgatcgctgaatccaagtacgtccagaacaacccgccggagctcattccccaagaggacagagtggtgaagcacgtcttggacgttctgttaccgttcagcaccaccatcggcggtggacccttgcccgttacacacgtcagctaacacgcccggcagagggaacctcatcgtggagtacc

SEQ ID NO: 241943 - DNA, 257 bp, Glycine max
gagagtagtttatctatctgcaacagcaacagggtgacagtgacactgtcgtaggatggagaaggtggtatgtgtgaccggcggcagtggctgcattggttcatggctcgtccatctcctcttggatcgcggctacaccgttcacgccaccgtccaaaatctcaacgatgaggccgagacgaagcatctacaatccctcgacggagcgtccacacgcctccgcctcttccagatggatctcctccgccacgacaccg

SEQ ID NO: 241944 - DNA, 367 bp, Glycine max
gataggaagtttatagcaaacatttcagtctcaaacggagtgttaagggaagaactcctcaaatggagacacctttagtgatccagaagttcacttcagaatctgactacttgccggtgaaaagcttgaaggatttgaagtttgttttgtggacagagacagtgaagatatggagaatagcattccctatggcactgtctgcactgcttcagtttctcacaatctcctcaacttccatctatgctggccatcttggagacactgaactttcttctatctctgtttaccaaggtgtcatcagtgccatctattttgacttgttgtttggtatgtcatctgcattggtaacactttgtggccaagcttt

SEQ ID NO: 241945 - DNA, 346 bp, Glycine max
gaacctcatgcattctattcttctctttctctctctctctctctcactttctctacctttctatgaatttctgttgcattaaattttctctgcagaaaaaaaagagcttccacaatggtaagcgctgcaattgctcgtaacgtcgtcggcgtaataggcaatatcatttcctttggcttgttcttttcacctgctccaactttctatggaattgtaaagaagaagacggtggaggagttcaagccagatccttatatagcaacggtgttgaattgtgcgttttgggtgttctatggaatgccttttgtgcacccaaacagcattttagttgtcactatcaacagcg

SEQ ID NO: 241946 - DNA, 333 bp, Glycine max
ggcagcgcttgatttgaggccaggcaagccccactcaaccaccacacctctcctcgttcacgctacccctttctgctcttcttctacctttcaagttttaaaagtataaagatggcagagacattcctatttacctcagagtcggtgaacgagggacaccctgacaagctctgcgaccaaatctccgatgctgtcctcgacgcttgcctcgagcaggacccagacagcaaagttgcctgcgaaacatgcaccaaaaccaacttggtcatggtcttcggagaaatcacgaccaaggccaacgttgactacgagaagatagtgcgtgacacctgc

SEQ ID NO: 241947 - DNA, 370 bp, Glycine max
gggtgacaagggagcaagggtcctttgattggttcaaaggggtgatgaatgaggtggctgaagaggatcataagggggtgattgagctccacaactattgcactagtgtctatgaagagggtgatgctcgctcagctcttattgctatgttgcaatctctaaaccatgccaagaatggcgtggacattgtctctggcacgcgtgtaaagtcccactttgctaaacctaattggcgcgctgtctacaagcgcattgcggttagtcatccacgagctcgtgttggggtattttactgtgggccaccagcgctaaccaaagagcttggtcagttagcttcggatttctctcacaacacaaacacgaaatatga

SEQ ID NO: 241948 - DNA, 383 bp, Glycine max
  unsure (1)..(383): unsure at all n locations
gaattcagagagagagagaaagagagtctcttgctctgtatctttgatttgatcattccaatcttcaatttttctatatatccatcaatccgctgagtgcaaagttctaatctttcgcctattgggttctactcctttctctcttcgtttccgatcgatccaattttcttcccatggctacgatcggacacaacaatctcaatgccaaattggttcttctcggggacatgggtgctgggaaatccagcctcgttttgcgctttgtcaagggtcaatttctcgaatttcaggaatcaacaataggggcagcgttcttttcacagacgctggcagttnatgacgcgaaggtaaagtttgagatatgggacacagcaggacaagag

SEQ ID NO: 241949 - DNA, 417 bp, Glycine max
  unsure (1)..(417): unsure at all n locations
ggaacaaaacaagtgtttcgaatagattatcctaagtctttgggaatagtgctgcaatggcttcaagtcaggaggaggtgacccttttgggagctactggaagcccatttgtgtgcagggttcatattgccctcaagttgaagggagttcaatacaaatatgtcgaagaaaatttgaggaacaagagtgaactgcttctcaaatccaacccagttcacaagaaggttccagtgtttattcacaatgagaagcccatagcagagtctcttgtgattgttgaatacattgatgagacatggaagaacaaacccatcttgccttctgattcttaccanagagccttggctcgtttctgggtcanattcattgatgataaggtttttggtgctgcatggaaatccgttttcacagctgatg

SEQ ID NO: 241950 - DNA, 390 bp, Glycine max
  unsure (1)..(390): unsure at all n locations
gaggcagtagtagtgttactttccaatttgaattgttccattttcatttctttcgcaaaagttgcaactacttcctcagaaaaaaagtttctaagttaaggaaatccagagagacaaaaatggccggtgacggtgcagctacatgcatagacatcctccttgccatcattctccctcctcttggagtctttctcaaatatggctgccaggtggagttctggatttgtttggtgctgaccctttttggttatatacctggaattatctatgctgtctatgctatcaccaagtgatcaccctttaactttgtgtggacaataaacaaatgtcatgggcgtttctgtcnttcaactcagatattagtgtttcttaatatatcgccaatgtgtc

SEQ ID NO: 241951 - DNA, 274 bp, Glycine max
gtggctggtgtcctttctacgcgtgtcatgcagctaagtcttcgttgtgaaactaagacaaaggacaatgtgtttgttaatgtggttgcctcaatccaatatcgagcattggcagaaaaggcatcagatgcttactacaaactcaccaataccaaagcacagatacaatcctatgtctttgatgttatcagagctactgttccaaagatggaacttgatgctgtttttgagcagaagaacacaattgcaaaagcagtggacgaagaacttggga

SEQ ID NO: 241952 - DNA, 352 bp, Glycine max
  unsure (1)..(352): unsure at all n locations
ggttgaagaaagaaacatgtacgagcagcattatatttctgcacttctaagagaaaagcatcatattagaagcatacgcaaaacattgacagaaatagatcaggaaggagaaattctgccagatggaacactttctgtggacggacaagaaatttcagttgtttacttccgggctggctacacaccaaaggactatccttcagaatcagaatggagagctaggctactgatggaacaatcttctgctatcaaatgccctaccatatcttatcatttggttggcgccaaaaagattcaacaggaacttgcaaagcctggtgttcttgagaagtttgtagaanacaaagaccac

SEQ ID NO: 241953 - DNA, 360 bp, Glycine max
gacacacagctattcctcttaagcttgctactgagtttccacactgcataccttaggtcttccgaattcgaagttaatttgcaagatggctaaggaaaaggctcagatcaacattgtggtggttggtcatgtggaccctgaggaggcaaccaccattaacgagctgaagaagcctgttgtggagaaagaagctccagggcatgccatatgagggcatgcacgtacggcctcggaggggaaccagaaaattatgttaacaaaataatctggaaccctaatgtatcagtgtcatcatcagtgtgtagtttaagctagctttgctatggttacgttctttgagatgagagtcttgatgaacag

SEQ ID NO: 241954 - DNA, 343 bp, Glycine max
gacctatcaagttaatttgcgtctatattcattttggcatcgaggttgaatctcatcggagagagaaaaaccataaccatgtctggaagaggaaagggaggcaagggtctcggaaagggaggagcgaaacgacaccgtaaggttctgagggataacattcagggcataacgaagcccgcaattcgccgtctcgcgagacgtggcggcgtgaagcgtatcagtggtctcatctacgaagaaacccgcggtgttctcaagatcttcctcgagaacgtcattcgcgacgctgtcacctacactgagcacgctccgcgaaagaccgtcactgccatggacgttgttt

SEQ ID NO: 241955 - DNA, 311 bp, Glycine max
  unsure (1)..(311): unsure at all n locations
ggttctagtgtgtgattgtttgttgttgtaactcgttcttcttcttttgttgttctgtgtttgtgtttgttttttctctcacctgaaaatgtcttgctgcggtggtaactgtggttgcggaagctcctgcaagtgcggcaacggctgcggaggctgcaagatgtacccagacttgagctacactgagtcaaccaccaccgagaccttggtcatgggagtggcacctgttaaggctcaatttgagggtgctgaaatgggtgtgcccgctgagaacgatggctgcaaatgtggacaanactgctcctgcaacc

SEQ ID NO: 241956 - DNA, 292 bp, Glycine max
ggcagttcaattccaatatattccattctctctgtgtatttccctacctctcccttcaagatgcagatcttcgtcaagaccctcaccggcaagaccatcacccttgaggtggaaagctctgacaccatcgacaacgtcaaggccaagatccaggacaaggaaggaatccccccggaccagcaacgtctcattttcgccggaaagcaacttgaggacggccgtacccttgctgactacaacattcagaacgagagtactcttcacctcgtcctccgtctccgtggtggcatgc

SEQ ID NO: 241957 - DNA, 393 bp, Glycine max
  unsure (1)..(393): unsure at all n locations
gaggggcttaatatctcccctcacttgtgcctagccttatgtcatagtattatcattcattctcatctttctctcttctctctccacccaaaccctaactcccgaccctgttcccctctcgtatccgtcatgaaaggaggaaagtccaagaccgaatctaagagagccgatcccaaacttgctgtgaataagaagggagccgccaccaaggctangaaacccgccggcaaggggaaggcagcgaaagaccctaacaagccaaagaggcctccaagtgctttcttcgttttcatggaggagttcangaaggtattcaacaaagaacatcctgaaaacaaagcagtgtctgctgttggcaaagctgctggagcanaattggaagacatgtctgat

SEQ ID NO: 241958 - DNA, 287 bp, Glycine max
gggaatcaacctcgatacactacgtcctgagccttgtgttgaggggtactcaactcctgagggttattctgcaaaggcagtccatcccatagcacttgggaaggtgatgagcattgcaaagatgatgaagtcagagtttgatagtgagaactatacactttctgccattggtggcgttgagacaggtggtgatgctgctgagtttatccttctcggggcatacactgttcatgtgtgcactggggttatgatgcatggctatggtctttgtaagaaactatgtcttg

SEQ ID NO: 241959 - DNA, 395 bp, Glycine max
ggaacctttgcattccattcattcaagattcagcaagtgcgttttggaagcagagaccgaaatacttcgagatggcccgtacaaagcaaactgctcgtaagtcaactggaggaaaagctcccaggaagcagcttgcaaccaaggctgcacgtaagtctgcaccaacaactggtggtgtgaagaagcctcatcgttatcgccctggaactgttgctcttcgtgagattaggaaataccagaagagcactgagctcctaatcaggaagcttcctttccagaggttggttcgtgaaattgcccaggatttcaagactgatctgcgtttccagagccatgctgtgcctgcattgcaagaggctgctgaagcataccttgttgggctctttgaggacact

SEQ ID NO: 241960 - DNA, 357 bp, Glycine max
  unsure (1)..(357): unsure at all n locations
gacagacaagggtttcttccgggttcacgtttcacaatcactttttgcgcttctctcactcactcactcttcttcttcctcttcgtgtggttttctttctcgaactcgaacgaagatgcgtgagattcttcacatccagggagggcaatgcgggaaccagatcggagccaagttctgggaggtggtgtgcgcggagcacgggatcgattcaacggggaggtaccaaggggacaacgagttgcaactcgagcgagtcaacgtctactacaatgaagcgggttgcggaaggttcgtgcctanggcggtgctcatggatctggagccagggaacatggacagcgtcagatctggtcccta

SEQ ID NO: 241961 - DNA, 372 bp, Glycine max
gaacacaacacaatactatgcattccctatgggcatagctttgagcagcaattgtgatcttatcagctatggcggagaaacacaaccttaagaatccagctgtgaagcggattctccaagagctcaaggagatgcaatcaaacccatccgatgactacctgagcctccctcttgaggaaaatatatttgaatggcaatttgctataagggggcctcgtgatactgaatttgaaggtggtatttatcacggacggattcagctgccttcagaatatcccttcaaacctccttcgtttatgttgctcacacctagtggccgttttgagacccaaaccaagatttgcttgagcatatcaaatcatcaccctgagc

SEQ ID NO: 241962 - DNA, 504 bp, Glycine max
  unsure (1)..(504): unsure at all n locations
cactgtaagcctgcaggtagcggtcaagaattcacgggtcgacccacgcgtccgataggctgcgagaagacgacagaagggatatggtagaatcgtaaccatagaatatgaccctaatcgaaatgcatacatttgtctcatacactatggggatggtgagaaaaaatatattttacaccccagaggggctataattggagataccattgtttctggtacagaagttcctataaaaatgggaaatgccctacctttgaccgatatgcccttaggcacggcaatacataacatagaaatcacactcggaaagggtggacaattagctagagcagcaggtgctgtagcgaaactaattgcaaaagaggggaaatcggccacattaaaattaccttctggggaagtccgtttgatatccaaaaactgctcggcaacagtcggacaagtgggaaatgttggngtaaaacacgaaaaattttaggtaaacccgggtcaaaaagttgggag

SEQ ID NO: 241963 - DNA, 349 bp, Glycine max
  unsure (1)..(349): unsure at all n locations
ggaggtanggtggaagctcgcgcagctggcggagaggatccacgtgcagttcgagtaccgcggcttcgtcgcaaacagcctcgccgatctcgacgcctccatgctggatctccgagaagacgagtccgtggcggtgaactccgtcttcgagtttcacaagctcctcgcccgccccggcgcggtggagaaagtcctctccgtcgttcggcagattcggcctgagatcctcaccgtcgtcgagcaagaagcgaaccacaacggactgagttttgtcgaccggttcaccgagtcactgcacttattatcaactcctatcgactcgctggagggtcgcctgtgaaccgaacga

SEQ ID NO: 241964 - DNA, 395 bp, Glycine max
gaatgccttaaacatttagctcactatcttctactaaatagttagcaataaactcttagcaatgccaaaacccaacccatatcgaataccaattcccaaataggagtaactttgcaatgccaattcgacacgatttttattattgtacccacaagtcatgaaaattcttaacctaagaaccacttattattatgtattaggtgcaaagctcacgagcaacaccaagccttgagttgggcacgtcgaagagcacacggtgggtttgctgttgcaagtttgcgattacgttcagcaccgagttcacattgtccggtggcggtgccatggccaagcacgtgacgctgccggcggtgctatgtatgaggatgttgtccggtgggagtgtcacgttcatg

SEQ ID NO: 241965 - DNA, 281 bp, Glycine max
gatactcaaaaccctaacacacggaggagaacacaaacagcgcgagacagaggcacagagagaaaatggtttcggggtcagggatctgtgccaagagggtaattgtggacgcacgacaccacatgctggggaggctggcatcgatcgtggcgaaagaacttctgaatgggcagaaggtggtggtggtacgctgcgaggagatttgcatctccggtgggctcgtcaggcagaagatgaagtacttgcgtttcctccgcaagcgcatgaacaccaagccctct

SEQ ID NO: 241966 - DNA, 403 bp, Glycine max
gagggaggaaaagaggtagagattagggtttggtattttccacatgagaggattggagtgaaagtgagaaaatggaggaatcaggatcagggggtgtgtggtggtgttgttccccattgaagatgatagtggagtcgctaaggattatgagctgcaacaaagtggtgttcgcatccatcatgctcctcaccacccttcctctatcgaccctggtaatttcccaatccatctccacccactccctcacctcccaaatccagcacctggaggccctcgcacacttcacctccacacgtttcgaggcccgccacgtctgccaagaatcccgccacgaagccctctccctcctccgcatcaaggccctcttctccctcccctcctacctcctcccccttcgcggcgc

SEQ ID NO: 241967 - DNA, 373 bp, Glycine max
ggctagtggagaacacagatatcaaacttgtaggaattgattacctatctgttgcttcttatgattacttgattccatctcaccttgtttttctaaaagacagggagatcattctcgtggaaggcttgaagcttgatgatgttccagcagggttatattcagtccattgcttacctcttaggttggctggtgctgagggatcaccaatacggtgcattctgattaaaaattagggtgtccacatgtctgtgttcggtgtccgcgtcggtgtcggtgcttcataggctggaactgataaattggcatgggggtgtggtgtccttatggagcaagatagtttcaatgttgtgcaacaacttttgtagcttatgtt

SEQ ID NO: 241968 - DNA, 416 bp, Glycine max
ggacgagtacctcagtgtgagcgttctgccatactcctgcgttcaatcgacttcaccatcttcttcttcttctgctgtctcccccatagatggattggcaagggcaaaagctagcggagcaactgatgcagataatgctgcttgcatttgctgtgattgcgtttgttggtggatatgtcatggcttctttccaaatgatgattctcatatatgctgggggtgtggttttcaccaccttgctcactgtccccaattggccccttttcaatcgccatccacttacgtggttggatccaactgaggtggaaaagcatcccaagccacaaccatctgtcaatgtaactcaaaagaagaaacccgttaagaagtaggttttttttattataaaccttttttgggggatgatatatctttga

SEQ ID NO: 241969 - DNA, 258 bp, Glycine max
ggcagttcaattccaatatattccattctctctgtgtatttccctacctctcccttcaagatgcagatcttcgtcaagaccctcaccggcaagaccatcacccttgaggtggaaagctctgacaccatcgacaacgtcaaggccaagatccaggacaaggaacgaacccccccggaccagcaacgtctcattttcgccggaaagcaacttgaggaccgccgttaccttgctgactacaacattcacaaggagagtact

SEQ ID NO: 241970 - DNA, 411 bp, Glycine max
gtggacgagctattcagaggtcttcttgctgctcaaagagattcctctgctggtggagttcacaacaagcaggaggaagagaaagcaattacggggttattggatggaagtggagagtatactcttgtttatgaggataatgaaggagacaggatgcttgttggggatgtgccatggcacatgtttgtatcaacagtgaagaggctacgagtgttgaagagttctgagctttctgcttttacccttgggagtaagcaagacaagataccccttgactcagcaatgaaatgaacagcggtttgaggttttgatcacctgctgaaaacttgaagactcttcctaatttgacgttttggttctattgtctgatgaaaagaacatggaatgaagctagttgcgtacatttacact

SEQ ID NO: 241971 - DNA, 322 bp, Glycine max
atggaggagaagcacaaggcggtgcttcctgcgaattttaagaagatactaggtctgcaactgaagaaccaagctgcgagagggaaactcgtcaagatcaaggcttcgtacaagttagccgaagccgcgaagaaggtgaaggagagcaccgccaaagcgacgaaggaatcgcgtccgaaacgaaacaaaatcgcaaccgccgttgctccgaagaaaaccgaggcggttaaaaagcccgcgaagaaggtcgggccgaagaaaacgaagaaagtgtcgacgcctgcgaagcccaagcaacccaagtccaataggtctccgacca

SEQ ID NO: 241972 - DNA, 367 bp, Glycine max
ggaaggcagagaaaatcaagaaccccaactataaaggaaaatggaaggcaccattgattgataacccagatttcaaggatgaccccgacctctatgttttccccaacttgaagtacgtggggattgaattgtggcaggtgaaatctggtactttgtttgacaatgtcttaattactgatgatcctgagtatgctaagcagctggttgaagaaacatggggcaagcacaaggatgctgagaacgcagcatttgacgaggccgagaagaagagggaagaggaggaatcaaaggatgacccagttgactctgatgctgatgatgaagaggaagatgctgatgaagctggcaatgactccgatgctgaatc

SEQ ID NO: 241973 - DNA, 319 bp, Glycine max
gctagaatcccagttcaaaggtaaggtacgttaacactcttcttcatcgtcgtcgcaatgggacgtgtgatccgtgcgcagcgtaagggagcacgctcggtcttcaagtcccacacgcaccaccgcaagggccctgcacgcttccggagcctggacttcggggagcgcaacggctacctcaagggcgtggtcaccgacgtcatccatgaccctggccgcggcgcgccgctcgccaaagtcgccttccgcaccctttcagatacaagaagcagaacgagctcctcattgccgccgatggcctctacaccggttagttcaa

SEQ ID NO: 241974 - DNA, 311 bp, Glycine max
tctgaagaagtgccctgatgccattccagaccctaaggccgtgcagtacgtgagaaacgaccgtggcacccccatgattctagacaacaattactacagaaatatattggacaacaagggcttgttgatagtggatcaccaactagccaatgacaagaggaccaagccttatgtgaagaaaatggccaagagccaggactatttcttcaaggagttttctagagccattactttgctctctgagaacaaccctctcactggcacaaagggtgagatcagaaagcagtgcaatgctgccaacaagcaccatg

SEQ ID NO: 241975 - DNA, 263 bp, Glycine max
gattttcgcggtgagttagaactgataatcaagagagtgactactggtcggcgacagcgaactacttccgtgtaatggcgacctccgtcgcagtcgccggcgctttgacggcgcatgatcgccggattctgacagcggtgaacgtcggagcgtcgagcctgtcgttggccggttccagcttcattgtagtgtgctacctcctcttcaaggagctccgcaagttctccttcaagctcgtcttctaactcgctctctctgatatg

SEQ ID NO: 241976 - DNA, 404 bp, Glycine max
  unsure (1)..(404): unsure at all n locations
gcacaagtttgttgagatagctagaagcaataagatgaaaatgaaagtgcttgttttgtttgttgctacagttttggtagcatatgaatgccatggctcagactaccagaagttccctctccaaatgaaaactgggtttggtgggcaatacagcaatgaggtggcatgtgccagttggaggcttggcgtggaagcaaacaacgtagtcaagtggcaaactgttcctgcagcttgcggagagtacatagctgactacgttctangagaccaatatagatcagattccaaaacagttaaccaacaagcttatttctatgctaaatccctcaaactcaccaacaaagatgtctttgtcttggacgttgacgacactactctctctaatctccagtattttgctaacc

SEQ ID NO: 241977 - DNA, 401 bp, Glycine max
  unsure (1)..(401): unsure at all n locations
gacaacaatctaagagtgagttttgtttatttgaaattaacaagtagcaaagatgtttggaatcatcggaggaaacaagggtcacaagataaaggggaacttggtgattatgcgaaagaatgtgttggatatcaacagcattaccagtgttaagggtgtcatcggaaccggcattaacatcattggaggagtcgtcgacaccgttactgctttggcgtcncacatctccatccagctcattagtgccacaaggctgatggacatgggaaaggaaaatttggaaagctacaaatttaagaggacaagtgtcgttaccaaccttgngagctggcgaagatgcatacgatgttcattttgaatgggacaatgacctcngaattcccggtgcattttacattaag

SEQ ID NO: 241978 - DNA, 403 bp, Glycine max
ggtctcgtggaagtgtaagcaagcaaaaccctagcggcgcctgctttctttgttcgtgttttgcatcaggatggagtctcaggtgaagcacgcacttgttgtcaaagttatgggtcgtactggatccagaggacaagtgacccaggttagagtgaagtttttggatgatcagaaccgtcacatcatgaggaatgtgaaaggacctgtgagagaaggagacattctcaccctactcgagtctgaaagggaagcaagaagattgcgctagatggtctcttttttttggcttgcctccaaattcgaacaaaagcaatatttttcttgatatttatggtagttagtcggtgctaaaggggttatagcaccctatcttattgttttggatcaaatttcattcgaatta

SEQ ID NO: 241979 - DNA, 363 bp, Glycine max
gatacattctcttgtcacagttttctgtgtcaccggaactcgtttctttcaaaacacttcaaacatctcgaacgctctctttccggcaactaggttaaagttcatcaatggcaggtcgcggcaaaaccctaggatctagcgccgccaagaaggctacctcaaggagcagcaaagccggcctccaattccccgtcggccgtatcgcccgtttcctcaaggccggaaaatacgctgagcgtgtcggcgccggcgcccctgtctacctcgccgccgtactcgaatatctcgcggctgaggttttggaattggctggaaacgctgcgggagacaacaagaagactcgaattgtgccgcgccacattc

SEQ ID NO: 241980 - DNA, 339 bp, Glycine max
  unsure (1)..(339): unsure at all n locations
gacatcacgacatcacatcgcagagaagaacagagagagatccatccatcaattccaatggccgatcagctcaccgacgaacagatctccgagttcaaggaagccttcagcctcttcgacaaggacggggatggttgtattaccaccaaggaacttgggaccgtgatgcggtcacttggccagaacccaactgaggcagagctgcaggacatgataaatgaggttgatgctgatgggaatggtaccattgatttcccagaattcctgaatctcatggctcgcaagatgaaagacactgattcagangaagagctgaaggaggctttccgcgtgtttgac

SEQ ID NO: 241981 - DNA, 419 bp, Glycine max
  unsure (1)..(419): unsure at all n locations
ggtggagaaaagggcaatgactcacacccacaatagtcgggggcagcttcaaagtacctccacattgtctcctactcttactgttctcttctcttctcatcatttttattttttccaatcaaaccaaacaaaacataagcaccgctcttttctctccgaaatccccatctcccttcacttctgagctctggacgagatcccagatctcaccatctttcacgcactcttccatcagattcaccctttcgtttaacgcaaactcataacttgaaggttaatggctgctccaccggcaaggctcgtgccgattacgattatctcatanagcttctcttgatcggtgacagcggtgttgggaaaagttgcctccttctgcgtttctccgatggttctttcaacactagtttcatcacaactat

SEQ ID NO: 241982 - DNA, 214 bp, Glycine max
ggagaacaaaacaagtgtttcgaatagattatcctaagtctttgggaatagtgctgcaatggcttcaagtcaggaggaggtgacccttttgggagctactggaagcccatttgtgtgcagggttcatattgccctcaagttgaagggagttcaatacaaatatgtcgaagaaaatttgaggaacaagagtgaactgcttctcaaatccaaccca

SEQ ID NO: 241983 - DNA, 353 bp, Glycine max
ggcagcgcttgagaccaagccccactcaaccaccacaccactctctctgctcttcttctacctttcaagtttttaaagtattaagatggcagagacattcctatttacctcagagtcagtgaacgagggacaccctgacaagctctgcgaccaaatctccgatgctgtcctcgacgcttgccttgaacaggacccagacagcaaggttgcctgcgaaacatgcaccaagaccaacttggtcatggtcttcggagagatcacaccaaggccaacgttgactacgagaagatcgtgcgtgacacctgcaggaacatcggctccgtctcaaacgatgtgggacttgatgctgacaa

SEQ ID NO: 241984 - DNA, 359 bp, Glycine max
  unsure (1)..(359): unsure at all n locations
gagttgtgcaaaggaggaagaggaaaaagaggattggagggtcgccacgtttagcaacaaccaaaccctctctactctttcttcttctcttcgctagggttttagcttcttcctcttcacttcgttcttctggcctctacaatgagcaacgacaaggacaccttcaacgtcgctgatctcacttccgctctcaacgaggacaatagagcagaccttgtcaatgctctcaagagcaagatacagagtttggctggacagcattctgatattctagagtctctgtcgcccaatgtcaggaagcgtgtggaggttcttaaagagatcagggtcaacatgatgaattanaggcaaaatttttt

SEQ ID NO: 241985 - DNA, 349 bp, Glycine max
gaaaaaatattgatggcaagtttcgtacagaggaggaaaacaaaaattaatttgaaaagcaagttgaaaaagaaagtagaagagtctccaccatgggtgaagaacttgctaagctttgttgaacttccaccaactgaagttatcctcagaagattgtttctctttggcttcatgggtggctggagtattatgaattctgctgaaactggacctgcttttcaagtggcaatctctttggctgcttgcatatattttctcaacgaaaagacaaagagcttggctagagcattcattattgggtttggagctctagtggctggatgggtctctggttcattgctggtaccta

SEQ ID NO: 241986 - DNA, 266 bp, Glycine max
aggggggagaaaatagagaagagagatggatccagacgcgttggcaaaggcattcgtggagcactactacagcaccttcgacaccaacaggaacggcttagcgaatctctaccaggagggttccatgctcactttcgaagggcacaagatccaaggcgcttccaacatcgttgccaagctcacctccctccctttccagcagtgccagcactcaatctccaccgtcgactgccagccctccggcgtcaacgccggcatgctcgtct

SEQ ID NO: 241987 - DNA, 238 bp, Glycine max
  unsure (1)..(238): unsure at all n locations
gacaacactcatagtagagtaaccaaaaggagagtgcaataactcgttgtacattcctagtgtgtgggagagacatggctaagatgtgtgttttggtgttggttcttgctctggctgtggccacaagtgccagaaacgttcccaaccccaaggatgctggtcttaanggacagaagaacttcatcagctatggtggaattggtggttattccgggattgggaacaatggactggcttt

SEQ ID NO: 241988 - DNA, 370 bp, Glycine max
  unsure (1)..(370): unsure at all n locations
ggccacaatggttgtccctcttaggcactttcttgttttctctctcaccctcatatccatcatcttccacacccatggagcgttctctgagcaatcaataatcaagttacccacagaccaaccaagggtagagaaactgacccacttgcattttttctaccacgacatcttagagggcaagaacatcacggtggtgaaaatcatcgagccatcagcgagcgaggttcgtggagcaactgggtttggaaccactttcatgatggacaatgttttgaccganggtccagagctgagctcgaagcacgttgggagggctcacgggctgtttggcttggcctctttggaggaccgtggaatggtgatgctcatt

SEQ ID NO: 241989 - DNA, 353 bp, Glycine max
gatgccgttaaagtaacaatgggccctaaggggcgtaatgtggttattgagcaaagttttggagcacctaaagtgacgaaagatggagtaaccgttgctaagagcattgaattcaaggacaaagtcaagaatatcggtgccagtcttgtaaagcaggttgctaatgctactaatgacgtggctggtgatggaaccacttgtgctacaattcttactaaagcaatatttacggaaggatgtaaatcagttgcagctggaatgaatgcggtggacctgagacgaggtataaatatggctgttgatgctgtggtgacaaatctgaaaagcagaacacgtatgattagcacttctga

SEQ ID NO: 241990 - DNA, 383 bp, Glycine max
  unsure (1)..(383): unsure at all n locations
gaggaagcaggaagccgacgtttgaggaaaatatataaagggtatggaatagggttgggagggatcaaaacccacaacacaacacggcactgagttattagtaattgtgttgtgttgtgttgagcagagagaaggatcaagaaaggataagaagaaagagggaatagggttagggttagggttagggttaggttgaggatgccgaagaacaagggaaagggaggtaagaacaggaagaggggaaagaacgaggcggacgacgagaagcgagagctggtgttcaaggangacgggcaggagtacgcgcaggtgctccggatgctgggtaacgggcggtgcgaggcgatgtgcatcgacgggacgaagaggctctgccacatccg

SEQ ID NO: 241991 - DNA, 343 bp, Glycine max
ggttttgggggatgggatatcagtaacttgaacctggcagatgccatggccagggccaaggtgtttgatatcgacctgcagaaacagttgaggccttacatggaatctatggttccactccccggaatctatgaccccgatttcattgctgccaaccaaggagaccgtgccaacaacgtgatcaagggcacaaagaaagaacaagttcaacaaatcatcaaagacattaaggagtttaaggaaagcactaaggttgacaaggtggttgtcctgtggacagccaacacagagaggtacagcaacctagttgtgggactaaacgacaccatggaaaacctctttg

SEQ ID NO: 241992 - DNA, 351 bp, Glycine max
gaccgatcgaagtagcagcacacagaaaatgggcactcgagaggtgtacgaagagaaactaaggaccggaaatctccaccacgatcccaccatcaaccctggcctcggttccgctcgatgccctcgctgtctctctctcctcaaccctaatttcgaaagaggcgagtggaccatcactcccgtcttgcacgacgccactgccgtcgctgggtcggggattggtggtatgcttggttttgttcatggtttcaatacaggtttacctcttcttcaaaatggtctgaagggaccgaagtggcttccttttgttgttgggattcctccattgttgatattctccggcctaagtgc

SEQ ID NO: 241993 - DNA, 274 bp, Glycine max
gacatagctgagagagaaaggagaggttaactacgaagcaatacttcaatggccacccttgttgttcataaccaaacttcttctgctcaagatgctgaggctctccaacaggccttcaaatgatggggggctgatgacaaagccgttatagcaatacttggtcacacaagtgttcatcagacgcaagaaatcagataagcttatgaggagatttaccatgaggatctcatcaaacgccttgagtcccagatctcgggtgactttgagagaacta

SEQ ID NO: 241994 - DNA, 298 bp, Glycine max
gatgtcaaattcctctacgctctcttgttcaagggctgtgcaaggatcctcccagagggacgccttgacaacttgtgcaacccacaactgatccaggcgcagagcatacttgcgagctgggctgttcaagttgtgctcatcgtgtctgttaattgtcatcgaattgatcgacgaccacttggtgatagacgtcaccccctctaccctggaggggcctttgaatcaccaggtacagctgatgaatctagatcattctctgaattctacgtcactgaggtcaagaacggtcccttggcta

SEQ ID NO: 241995 - DNA, 357 bp, Glycine max
gacaaacaacttctttcaaggaaaatggctcttcgtggatttcttctgggacttttcttaatggtcactcatgtcaaggggtatggttttggaggttggaccaatgcacattccaccttcgatggaggtggtgatgcttctgggacaatgggtggggcttgtggttatggaaatctgtatagccaaggttatggaactgatacaacagcactgagcactgctctgttcaacaatggcttaagctgtggtgcatgctatcaaattaaatgtgtgaatgatccacagtggtgccttcctggctccatcatactcactgtccacaaagttctgtccacctcgtggttggtgtgaccctcc

SEQ ID NO: 241996 - DNA, 327 bp, Glycine max
ggaaacagagagtgatttcagtgagtgatcggtgttcacttgatctcatcataatcgtcagcgtcaattgaagaagatgccgatcagaaacatcgccgtcggaaggcctgaagaggcgactcaccccgacacgttgaaggcggctttggctgagttcatctcaaccttcatcttcgtgttcgccggctcaggctccggcatcgcctacaacaagctcaccgacaacggcgctgccacccctgccggcctcatctccgcctccatcgcccatgcattcgccctcttcgtcgccgtctccgtcggcgccaacatccccggcgggcacgt

SEQ ID NO: 241997 - DNA, 363 bp, Glycine max
ggacgatccaagtgatagacactcgtcgcgatgggacgtgtagctgaatccgagcgaactctgtacccatacgtgactggatcctctgtagtcgctatcaaatacaaagatgggattctaatggccgctgacatgggaggttcgtatggatctaccctgcggtacaagagtgttgagcgtatcaagcctattggaaagcattctcttcttggtgctagcggggagataagtgactttcaggagattctgcgttaccttgatgagcttatcctatatgacaacatgtgggatgatgggaattctctagggccgaaggaggtgcataattatttaacccgtgtgatgtataatagacgtaacaag

SEQ ID NO: 241998 - DNA, 370 bp, Glycine max
aatgttaatgaggagtactttgatcactgtgattacactgtggatacctttaattccattgatgtggcttctgtatcgccaactttcggctgctaatagtcccgcaaggaagcagagaccaaatggtcagacagttggatttgatgatgtggaaggtgttgattctgcaaaagtagagctcgtggagatagtttcatgtctgcaaggggatataaattaccgaaagctaggggcaaagttacctagaggtgtgttgctggtgggtcctcctggaactgggaagacactacttgcgcgtgcagtggcaggggaagcaggtgtaccctttttcactgtatctgccagtgagtttgtggagttgtttgttgga

SEQ ID NO: 241999 - DNA, 320 bp, Glycine max
gagttcaattccaatatattccattctctctgtgtatttccctacctctcccttcaagatgcagatcttcgtcaagaccctcagcggcaagaccatcacccttgaggtggaaagctctgacaccatctacaacgtcaaagccaagatccaggacaaggaaggaatccccccggaccaacaacgtctcattttcgccggaaaacaacttgaggacggccgtacccttgctgactacaacattcagaatgagagtactcttcacctcgtcctccgtctccgtggtagcatgcagatcttcgttaagacactcaccggcaaga

SEQ ID NO: 242000 - DNA, 352 bp, Glycine max
  unsure (1)..(352): unsure at all n locations
gatcccatttgaaatcaaaatcaaaaacaccaaatcctctaattcaagtttgcaccaagttttcctgagaaaatgtctggtcgtggaaagggtggaaagggtttgggaaagggaggtgccaagaggcacaggaaggttcttcgcgacaacattcagggcattacgaaacctgcgattcgtaggttagcgagaagaggtggcgtgaagaggatcagtggtttgatctacgaggaaaccagaggggttctgaagatattcttggagaacgtgattcgcgatgctgtgacttataccgagcacgctangaggaagacggttactgccatggatgttgtttatgctctcaagagac

SEQ ID NO: 242001 - DNA, 362 bp, Glycine max
ggaacctttgcattctattcattcaagattcagcaagtgcgttttggaagcagagaccgaaatacttcgagatggcccgtacaaagcaaactgctcgtaagtcaactggaggaaaagctcccaggaagcagcttgcaaccaaggctgcacgtaagtctgcaccaacaactggtggtgtgaagaagcctcatcgttatcgccctggaactgttgctcttcgtgagattaggaaataccagaagagcactgagctcctaatcaggaagcttcctttccagaggttggttcgtgaaattgcccaggatttcaagactgatctgcgtttccagagccatgctgtgcttgcattgcaagaagctgct

SEQ ID NO: 242002 - DNA, 351 bp, Glycine max
gattgaaagaaactgttgaatcgcgtcgattaaggttttgagatttctaagctttcatctcagacagtgaaaaaatgatagatataagtacacttaatgctgcacagattactgtgctgggatctgccttttgtgctatgctttccatgcatttcacgtcgcagttactgtctcaacatctcttttattggaagaatccgaaagagcaaaaggctattatcattatcattctcatggctccaatctatgcagctgtctcctttgtgggtctcttggatatcagaggaagcaaggagtttttcacctttttggagtcagttaaagaatgttatgaagctttggtcattgcca

SEQ ID NO: 242003 - DNA, 351 bp, Glycine max
gaccgcacagaattagggttttccaattcacagagcaacacaacgaaccaacaatggcgcagcctcagccgcagtcgcagccgcagcacgggcaagcagcgctggagcaggtgcagtgcttcggtcgcaagaagaccgccgtggccgtgacctactgcaagcgcgggcgcggtctcatcaagatcaacggctgccccattgagctcgtggagccggagatcctccgcttcaaggccttcgagcctatcctcctgttgggtaagagccgcttcgccggcgccgacatgcgcatccgcgtcaagggtggcggccacacctcccagatgtacgccatccgccagagcatcgcca

SEQ ID NO: 242004 - DNA, 336 bp, Glycine max
ggagcaaagccctaatccctatttttcttcctcagtagtgtcatttacgcttctcttctctgcagcaactatgcctaaccctaaggtcttcttcgacatgaccatcggcggtcaatctgctggccgcatcgtgatggagctctacgccgacgtcactccccgcaccgccgagaacttccgcgcgctttgcaccggcgagaagggcgtagggcggagcggcaagcccctccactacaagggctcgtccttccaccgcgtgatcccgagtttcatgtgtcagggtggcgacttcagcgtcggaaacggaaccggcggcgagtcgatttatggcgccaa

SEQ ID NO: 242005 - DNA, 374 bp, Glycine max
ggactggaatgcaggatttgcttatgcaaagaatggagtgcctattggtcctagagctaattcttattggctttacaatgtaccatggggcatgtacaaatcattgatatacataaaggaacgttatggaaacccaactgttatcttatctgaaaatggcatggatgatccgggtaatgtgactcttcccaagggtttgcatgacaccacaaggataaactattacaaaggctatttgactcaactaaagaaagcagttgatgatggagcaaatgtggttgggtactttgcatggtcattgctggataactttgaatggaggttgggttacacatcaaggtttggcattgtctatgttgatttcaaaagcctca

SEQ ID NO: 242006 - DNA, 353 bp, Glycine max
ggtctaatatttgcagtgctgaaaatgtcgcagttgttggaaaaggccaaaaactatgttgcggagaaagtcaccaacatgcccaagccagaggcgagtgtcaccgacgtggacttcaagcgcgtgagccgcgacagcgtcgagtacttggccaaggtctccgttcagaacccttattccacttccattcccatttgtgagatcaagtactccctcaaaagtgctggcagggagatagcagcaggaacaatacctgacccagggtcattgaaggcaagcgacacaacaatgttggatgtgccagtgaaggtgcctcatagcatattactgagcttggcaaaggacattggtgc

SEQ ID NO: 242007 - DNA, 296 bp, Glycine max
gagggttttctgagttattgttaccatttgctcccagcactgagcttaacggagcttcacaaagatgaatcgggaaaaattgatgagtatggccggttcggttagaactgggggaaagggcaccgtgagaagaaagaagaaggctgtcgacaagactacaaccaggagtgatagaaggcttcagagcaccctgaagagaataggggtgagtgccatcccggctattgaggaggtcaatatcattaaggatgacgtagttatccagtttctaaatctcatcgttcaagcatccagtg

SEQ ID NO: 242008 - DNA, 355 bp, Glycine max
ggaaggagctagtccaaacttcaaagcaccttcactctcgtaaaaacattctcttcaactcttttccattttattattcttccaaaactggaccttactttacccgaatctaaatcccaacccgaaccaagcatgttcggaccaacccaaaccgcttcccaacctccgaaatccactctcaaattcctctgcagctacggcggcaaaattctcccccgctaccccgacggcaagctccgttacctcggcggccatacccgcgtcctcgccgtcgatcgctccattccattctccgagctattgctgaagctggaggagctctgcggcgcctccgtgaggtacctccgctgccaat

SEQ ID NO: 242009 - DNA, 366 bp, Glycine max
ggaaactcgttctagtgtgtgattgtttgttgttgtaactcgttcttcttcttttgttgttctgtgtttgtgtttgttttttctctcacctgaaaatgtcttgctgcggtggtaactgtggttgcggaagctcctgcaagtgcggcaacggctgcggaggctgcaagatgtacccagacttgagctacactgagtcaaccaccaccgagaccttggtcatgggagtggcacctgttaaggctcaatttgagggtgctgaaatgggtgtgcccgctgagaacgatggctgcaaatgtggaccaaactgctcctgcaacccctgcacttgcaagtgaagtgttgggatagcaagcttcaagcagagat

SEQ ID NO: 242010 - DNA, 368 bp, Glycine max
ggaatccgaggcgaagagaagagaaaaattaagatggaggggaaggagcaggatgtgtcgctgggagcgaacaagttcccggagagacagccgattgggacggcggcgcagagccaagacgacggcaaggactaccaggagccggcgccggcgccactggttgacccgacggagtttacgtcatggtccttttacagagcagggatagcagagtttgtggccacttttctgtttctatacatcactgtcttaaccgtcatgggagtcgccggggctaagtctaagtgcagtaccgttgggattcaaggaatcgcttgggccttcggtggcatgatcttcgccctcgtttactgcaccgctggcatctc

SEQ ID NO: 242011 - DNA, 336 bp, Glycine max
gatagcgaaacagagagtggtttcagtgagtgatcggtgttcacgtgatccttcataagtcgtcatcatcatcatcatcatcagcgttgattgaagaagatgccgatcagaaacatcgccatcggaaggcctgaagaggctactcaccccgacacgttgaaggcggggttggctgagttcatctccaccttgatcttcgtgttcgccggttcaggttccggcatcgcctacaacaagctcaccgacaacggcgccgccactcgcgccgggctcatctccgcttccatcgccgatgcgttcgccctcgtcgtcgccgtctccgtcggcgccaacatc

SEQ ID NO: 242012 - DNA, 342 bp, Glycine max
ggccgaggaaaagaaagaaagaagaaaaaaaacagcgccctagatttgctcttcgttgcttcggaagaaagagaaaaacaaataacaatggcgttcgcttctttcctcggcagagttctcttcgcttccgtcttcatactctctgcttaccaagaatttaacgaatttggagttgatgggggacctgcagcaaaagcactcagacctaagtttgatgcctttacacatcgagtgcattctcaagttggctttcaacttcctgagattgatctgaaatttttaattgctggggctattgctctgaaggggcttggaggggttcttttcatatttggcagctct

SEQ ID NO: 242013 - DNA, 359 bp, Glycine max
  unsure (1)..(359): unsure at all n locations
ggagaaataaccaacagaatctactctctattttcctagcttagattccttctccaatggctcttgccgtttccactacttcttcctcttcagctgcagcagcagcagcagcgtcgagctctttcttctcgcgccttggatcttcatcggacgctaaagctccgcaaattggttcctttcggtttccggagaggcctcaagtttcgtctggtgttgttaatttaactcaaagacgctcctcggtgaggccactcaatgccgaaccgcaacggaatgattctgttgttcctcttgcagcaactatcgttgctcctgaggttgagaaggagaaagaagattttgagcaattancgaaagac

SEQ ID NO: 242014 - DNA, 374 bp, Glycine max
gggaaggagccgtagcagcagcggaagctctagcttgggcagcgaatcacaatggcgagaggattgaagaagcatttgaagaggcttaatgccccaaagcattggatgcttgacaaactgggtggtgcatttgctcctaagccctcatctggaccacacaaatccagggaatgcctgccactcatactcattttgcgaaaccggctgaagtatgctctgacataccgtgaagtcattgctattctgatgcagcgacatgtccttgttgatggcaaagtcaggacagacaagacatatcctgctggtttcatggatgttgtatcaatccctaaaacaaatgagaacttccgcctgctgtatgacaccaaagggcg

SEQ ID NO: 242015 - DNA, 368 bp, Glycine max
gacaacagaatttgccaattgccatttcaatcctcagtttctttcttcaacgtttccatcatacacagatcccaatcctctctcaagccctaatttcccctcatttccatggccacagaagagcccactgtcgcggtggaacccgctcccgaacctgcctccgccgatcctcccccggaggagaaggaggagaccaaacctgaagccaaggctaagaaaaccaaggagcccaaacctaaaaaggtttccagacctcgcaaccctcccactcatccttcctacgaagagatggttaaagatgcaattacctcgctgaaggagaaaaccggttcgagccaatacgcgattgcgaagttcatcgaggagaa

SEQ ID NO: 242016 - DNA, 335 bp, Glycine max
  unsure (1)..(335): unsure at all n locations
gaccaacctactcatgtttacacatttatcctccgtccggatgcaacctacagcatcctgattgataatgtggagaatcacactggtattctctactctgattgggatattctccctccagagacaatcaaagatcccgantgctaacgaaacgacaagattgggatgacgaagaatttagtcctgatcccgacgataataaaccagatgggtatgatgacatcccaaaagagctcccagatcctgaagccaagagacctgacgattgggatgatgaggaatatggtgagtggacaccccctaccattgccaactctgattactatggcccatgg

SEQ ID NO: 242017 - DNA, 366 bp, Glycine max
ggctgggttaatgcacatgccaccttctatggaggaagtgatgcctcaggaacaatgggtggggcatgtggatatggaaacctctacagccaaggttatggaacaaatactgctgctttgagcactgctttgttcaacaatggtcttagttgtggctcatgctatgagataaggtgtgtgaatgaccataggtggtgcctccctggctccattatggtcactgccaccaatttctgtcctccaaacaatgctttaccaaacaatgcaggagggtggtgcaaccctccaatgcaccattttgacctctctcaacctgttttccttcgcattgcacaatacagagcaggaattgtgcctgtttcctac

SEQ ID NO: 242018 - DNA, 374 bp, Glycine max
caatcacatcagcatcactctcgtcgccgccgtcgtcgaccaccgcaagagccatcgcactccgccgtcatccgttagggcaaaaatgagtcgaggaagtggaggtggatacgatcgtcacatcactattttctcccctgaaggacgtctcttccaagtcgagtatgctttcaaggctgttaaggccgcaggaatcacctcaattggtgtccgaggaaaggattcgatttgtgttgttactcagaagaaggttccggataagcttttggacaacacaagtgttacacacctctttcccatcaccaagtaccttggtttattggctactggcatgacagctgatgctaggacactggtccaacaagcaagaaatg

SEQ ID NO: 242019 - DNA, 358 bp, Glycine max
ggcgtcgacaaaaaccctaactcttaatcttttttctcttcctttcacctcctcagcagtcgtcagaaagactccataacccaaaaatgcctttcaagaggtacgttgagattggaagggttgctcagatcaactatggcaaagagtacgggcggctcgtgatcattgtcgatgtcattgaccagaatagggctcttgttgatgctcccgacatggtgaggtcccaagtgaacttcaagaggctctcgctcactgacatcaagattgatattaagaggattcccaagaagaaggatctcattcaagccatggaggctgctgatgttaagaacagatgggagaagagttcttggggcag

SEQ ID NO: 242020 - DNA, 353 bp, Glycine max
gagggaagaataagagggatgtacaaagaacgagagcgagttggtgtttctgtttccgcttccaaatcggaggatcggaagcgaatcaacgacgttctcgataagcacttggaacgatcctctccttccacttctcgccccagcacctccgcctccaagaattccaacctccaagtggaggaatctgaaacggagagtgaagagtctgatgttagtggctctgatggggatgacacctcttggatctcgtggttctgtaatctcagagggaatgagttcttttgtgaggtggatgatgattacatacaggatgactttaaccgatgtgggttgagcagtcaagtggcctacta

SEQ ID NO: 242021 - DNA, 349 bp, Glycine max
gatcgcatagggtaaggtttgggttggtgtcgttcctttccgatgggttgtatggatttgtgattggtggagatttgacggcacacgcattatcaaaatccttactgtgtttctttcgcggtcattgcctcttttctgttcgtggcttcaggatttttttaattctgcagctccgaaatatagataaaccaatcatcaggctgtagaggagaatggcagaatctatatctagcttctggggtccagtcacgtccaccaaagagtgttgtgaaataaattatgcttagtcgtcttacattgctgaattttttaatacaatatgcaacattccaacaatacttttggctct

SEQ ID NO: 242022 - DNA, 329 bp, Glycine max
gagaacagaacccaaccaaagcagctatggcggcgatgcagaggccactcaagagaaccattgcaatcgccaagcaacgcgcgtgcttttcccctctcctaccctccgccgctgccgccgccgccgccgataccgtcgcgcctccgcagctccccccgttcgatcaccagccgcacccttacaacggtccctccgccgatgaagtcttcgccaagcgcaaaacgttcctcggtccttccgtcttccactactataagaaacctctgaatatcgtggaagggaagatgcaatatctttatgatgatagtgggaggcgttaccttgatgca

SEQ ID NO: 242023 - DNA, 368 bp, Glycine max
  unsure (1)..(368): unsure at all n locations
ggtctcgtggaagtgtaagcaagcaaaaccctagcggcgcctgctttctttgttcgtgttttgcatcaggatggagtctcaggtgaagcacgcacttgttgtcaaagttatgggtcgtactggatccagaggacaagtgacccaggttagagtgaagtttttggatgatcagaaccgtcacatcatgaggaatgtgaaaggacctgtgagagaaggagacattctcaccctactcgagtctgaaagggaagcaagaagattgcgctagatggtctcttttttttggcttgcctccaaattcgaacaaaagcaatatttttcttgatatttatggtagttagtcggtgctaaangggttatagcaccct

SEQ ID NO: 242024 - DNA, 348 bp, Glycine max
gacccaaacgtccagctgggagacaataaaggagagacaggcatatcatcagcagtctcgtcaacgcagtcgccaaccactatcaaagccatcacactccaccatcatctcgttagggcaactatgattcgacgaagtgatagtggatagcatcgtctcatcactagccgtctcctagtgaaggatgtcttcttcgactgtcgcagtatgccttcatagctgttaaagacacaggatttacctcaactgatgtcctatgtcacgagaccacttgtgttgttagacacaagattgtgtcggataagcttttggataacacaagtgttacgcacctcgttcccatcacca

SEQ ID NO: 242025 - DNA, 358 bp, Glycine max
aggcgtcagaacacgagtcagaggggaggattggggaggtgtcatcaggcggtggggcagagagatgtctcagtagttggagtgcttgaagtcgcttcactttcggcgtaggagttaagggatgcggatcttcaggttctagctcgttcgcgcggacacataggtcaagcactcaagctggagaagtgctctggattcgccagcgatggcctctacgatagcggtcgttagtggaggaacttaagagtcttgtttttagaggaaagctcacttgttgagaatgatggtgactgggctccatgagcttgctttgagtaatagagttcgggagacgcggaattttgacgggagtgatatt

SEQ ID NO: 242026 - DNA, 355 bp, Glycine max
ggagcaagagtgaagagcgaagagaatggctcccaagggtttaatctttttggctgtgttatgcttctcagcactgtcactgagtcgttgtcttgcggaggataatggacttgttatgaacttctacaaggaatcatgccctcaggctgaagacatcatcaaagaacaagtcaagcttctctacaagcgccacaagaacactgctttctcctggctcagaaacatcttccatgactgtgctgttcagagttgtgatgcttcactgttgctggactccacaagaaggagcttgtctgagaaggaaacagatagaagctttgggttgagaaatttcaggtacattgagaccatcaaa

SEQ ID NO: 242027 - DNA, 365 bp, Glycine max
ggtggttcttgtttgcgagatagaagcgtaagcagcggctaccctaacctcgtcttcctctctactaatttcaactatggccgacgaagctgtggttgttccagatcccacccagatcgatgtcaagctctttaaccgctggagcttcgaggatattgaggttactgacatttcactggctgattacattggagttgcggcatccaagcacgccacatatgttcctcacaccgccggaaggtactccgtgaagcggttcaggaaggcgcagtgccccattgttgagaggctcaccaactctctcatgatgcacggtagaaacaatggcaagaaactcttggctgttaggatcatcaagcatgcta

SEQ ID NO: 242028 - DNA, 369 bp, Glycine max
gacaccacaccgagtcgcagaaaaagaaaaaagcgatcatagtttcacttcggccttatccagtttagggtttcggttctctaccctatctttcacgtatcgaaaccttaaatttacgatcaggtctgagcaatctggttggtagaacctttggtcttagtgagtcaagttttatgtctgaattagacgatcaaattcctactgccttcgatccttttgctgatgcaaatgctgatgactcgggtgctgggtcaaaggagtatgtgcatattcgtgtacagcagcgaaatggtaggaaaagcctgacaaccgttcaaggattgaaaaaggaattcagctataacaagatacttaaagacgtcaagaaag

SEQ ID NO: 242029 - DNA, 328 bp, Glycine max
gagagtggtggagtgtgcagacacagcgtcgcagtcgcaaccctattcagaagacccgcagcttcaagctagtgacagccatcagccatgggtcatatgcatagctgccgtaaaggtatatcctcgtctgcattgccccacatacggacacctcctaactagctcaagcatctcattcgcaaggatgtcaaaaatgaatatctgctagtttgcgaagaaatgtttgactccctctcaaattcgtctcattctcagacattcacacggtattgctcaggtcattatcgtcactggcatcataatccttcgcatcctcaaagctcaggta

SEQ ID NO: 242030 - DNA, 359 bp, Glycine max
gagggaagcacaaccaagcttctctgttaaaaaaaaattatgcgtctaaagggccaaagcttagaaagttgaaactttttttgttgaggtgaaagtgaaatggttggcaacgataatctgagggctgaggacttgaacttgtgctttaagaagcttatgatggtggccgggagtgggaacagtgagaaatgggtgaacttgaaggttggggtgatcaccgagtggaaggatattcctgcggagcttctgatgcaaattctgtcccttgtggatgatcagacggtgatcatagcttctggagtttgtcctggatggagagatgctacttacgttggccttgctcgtttatcactctcatg

SEQ ID NO: 242031 - DNA, 310 bp, Glycine max
gactctctttcgtcagtttcgggggaagagatccagcagcaatggtgtacgtcaaggctcagaaatcaaaagcctacttcaagagatatcaagtcaagttcaagagaagaagagagggaaaaaccgattaccgtgccaggattcggttgattaatcaggacaagaacaaatataacactccgaaataccgatttgtggttcgctttagcaacaaggacattgttgcacaaataatatctgctagcattgccggcgatttagttcttgctacagcatattcacatgagctgccacgatatggtcttgaagt

SEQ ID NO: 242032 - DNA, 358 bp, Glycine max
ggttctagtgtgtgattgtttgttgttgtaactcgttcttcatcttttgttgttctgtgtttgtgtttgttttttctctcacctgaaaatgtcttgctgcggtggtaactgtggttgcggaagctcctgcaagtgcggcaacggctgccgaggctgcaagatgtacccagacttgagctacactgagtcaaccagcaacgagaccttggtcatgggagtggcacctgttaaggctcaatttgagggtgctgaaatgggtgtgcccgctgagaacgatggctgcaaatgtggaccaaactgctcctgcaaaccctggacttgcaagtgaggtgttgggagagcaagcttcaaacagaga

SEQ ID NO: 242033 - DNA, 354 bp, Glycine max
ggagtccgagaggcatcatggcgacactggattccgacgtgaccgtgtttccggccggcgaagcctccagcagcgccggtccttcttcgtccaccaagaagccgaagcgtttcgagatcaagaagtggaatgcggtttccctctgggcttgggatattgtcgtggataattgcgctatttgtcggaaccatatcatggatctctgtattgagtgccaggccaaccaggctagcgccactagcgaggaatgcactgtaccttggggagtttgtaaccatgcttttcacttccattgcataagccgatggctcaagacccgtcaagtatgtcctctagataatagcgagtgggaat

SEQ ID NO: 242034 - DNA, 349 bp, Glycine max
gagtgggagagagagaaggcaagatgtcgaagagaggacgcggtggttcggcggggaacaagttccggatgtcgctgggtctgccggtggcggcgacggtgaactgcgccgacaatacgggggcgaagaacctctacatcatatcggtgaaagggatcaaagggcgtttgaaccgtctcccctcggcttgcgttggcgacatggtgatggccaccgtgaagaaggggaaacccgatctgaggaagaaggttttgccagctgtcattgttcgccagcgcaagccatggcgccgaaaggacggcgtctacatgtatttcgaagataatgctggtgttattgtcaatcccaa

SEQ ID NO: 242035 - DNA, 364 bp, Glycine max
ggccgcaagcagagatgacaacccgatttaagaagaaccgcaagaagcgcggccacgtcagcgccggccacggccgtattggaaagcaccgcatgcaccccggcggccggggaaatgccggcggcatgcaccaccacacgatcctcttcgacaagtactacccggggttcttcgggaacgtatggatgatgtactttcataagctccgcaacaaattctactcgcacatcgtcaacatcgacaagctatggtctctgataccccaatacgcgaatgacaaagccctataatcgaaggacactgcccctctaatcgaggtcactcagcacgggtacttcaaggttctcggaaaaggtgtgctgcc

SEQ ID NO: 242036 - DNA, 292 bp, Glycine max
ggttctagtgtgtgattgtttgttgttgtaactcgttcttcttcttttgttgttctgtgtttgtgtttgttttttctctcacctgaaaatgtcttgctgcggtggtaactgtggttgcggaagctcctgcaagtgcggcaacggctgcagaggctgcaagatgtacgcagacttgagctacactgagtcagtcaccatcgagaccttggtcatgggagtggcacctgttaatgctcaatttgatggtgctgaaatgggtgtgcccgctgataatgatggctgcaaatgtgga

SEQ ID NO: 242037 - DNA, 376 bp, Glycine max
acgcgtccatggcggagagaggacgacagaaagggggattctagtcagtcaagattcagcaagtgcgttttggcagcagagaccgaaatacttcgatatgggccgtacaaagcaaactgctcgtaagtcgactggaggaaaagctcccaggaatcagcttgcaaccaaggctgcacgtaagtctgcaccaacaactggtggtgtgaagaagcctcatcgttatcgccctggaactgttgctcttcgtgagagtaggaaataccagaagagcactgagctcctaatcatgaagcttcctttccagatgttggttcgtgaaattgcccatgatttcaagactgatctgcgtttccagaggcatgctgtgcttgcagta

SEQ ID NO: 242038 - DNA, 289 bp, Glycine max
ggcagtttcaaattttcgtttccttcactttcccgaggaaaaaataacacttgtcactttcttcactacgttctcacttcgatatgggtcgtacgaagcagaccgctcgcaagtccaccggtggcaaggcgccacgtaagcagctcgccagcaaggccgctcggaagtccgctccggcgaccggaggagtgaagaagccccaccgcttcaggccaggaaccgtggcgctgagggaaatcagaaggtaccagaagagcaccgagcttctcatcaggaagcttccatttca

SEQ ID NO: 242039 - DNA, 350 bp, Glycine max
gaggctcctttttgattacgaaaatgtggaagagaacgggttttgaagaagaagcagttcaattgatcaactcagatttcagggaccgaagtctagctgctaatagactcgcccatcatgccatcaaacttggtggcattggctttggagcctcttttttcggattgtttgctgccattgctgctagttatctgttgattttggatcgtacaaactggaaaacaaatattctcacagcactactcattccatacattttcttcagcttgccttcattaattttcgacgtcttcaggggagagcttggaaaatggattgctggagttgctgttgtattacgccttttcctt

SEQ ID NO: 242040 - DNA, 374 bp, Glycine max
gaagctgaggggctggagaaaattgagaacctccagagtcatgacaacacagagatttatgaaaaggcggtcaagattcttgagacatactggttggaggaggaagatgagactatgcctccaggggatgcttctcagtcagggttcaactttggtagcagtgacgctcctactgtgccatccggtggattcaactttaattagaagatattcatgctctactggggagttttgggtggtctatccgtaaagtcctccattatgacgcgacagcagttgggggataagtcaacgtcgtgtcattgtcctaatgtccttgggtcgtacgaagtccagcaagttaatacatggttgctggaatggcttgggttttt

SEQ ID NO: 242041 - DNA, 353 bp, Glycine max
  unsure (1)..(353): unsure at all n locations
ggctctctcatccccatccttggctggcaaggccgtgaagctgggcccatcagccccagaagtgggaagggtgagcatgaggaagaccgtcaccaagcaggtctcctcaggaagcccatggtacggcccagaccgagtcaagtacttgggcccattctctggcgagcccccgtcctacctaaccggtgagttcccaggcgactacggctgggacactgctgggctttccgcagacccagaaaccttcgccaagaaccgtgaactcgaagtgatccactccaggtgggccatgctcggagccttgggctgcgtcttcncggagttgctgtcccgcaacggggtgaagttcggag

SEQ ID NO: 242042 - DNA, 363 bp, Glycine max
gactctcattgttgatatagagcctgatgttaatgtcaagagagcaatgaacgagattaacgcagctgctagattgaggttggctgcaaatgagaaggctgaagcagaaaaaatactgcagatcaaaaaagctgagggagaagcagaatccaaatatctgtcaggactcggtatcgctcgccaacgtcaagccattgtggatggactgagggacagtgtgcttgctttctctgagaacgtgcctgggacaacagctaaagatgtcatggacatggtgctggtgactcaatactttgacaccatgaaagagattggagcatcttcaaagtcctcatctgttttcataccacatggtcctggcgc

SEQ ID NO: 242043 - DNA, 266 bp, Glycine max
ggttgtgtgagtgaagaagcagacggagtatcggcattaaaaatgcagatcttcgtgaaaactctgatagggaagaccataaccctcgacgtctagagcagctacaccatcgacaatgtcaatgccaatattcacgacaaggaacgcattcctcctgtatagcaacctctgattttccccgtaaagcaccttgattattgaacgaccctggccgattacaacatccataatgaatcaacccttcatctcgtcctcaggcttcgtgg

SEQ ID NO: 242044 - DNA, 354 bp, Glycine max
  unsure (1)..(354): unsure at all n locations
ggtctgcgcctgatttctcagttctctcacacactcattcggtgctccgaatctcagattctagggttagggttcccaatttctccaccgatcagaaaatgagttcaactggtggttctaccaagggcggaaggggcaagcccaaagcctccaaatccgtttcaagatcgcagaaagctggtctccaattccccgttggaagaatcgctcgattccttaaggctgggaaatacgccgagcgtgttggtgctggtgctcctgtgtacctctctgcagtgctcgaatatctcgctgctgaggtcttggaattggctgggaatgctgctanggataacaagaagaatcgtattgttc

SEQ ID NO: 242045 - DNA, 385 bp, Glycine max
ggtatttgtgactgtgtgagagagagagcgagcagtttcagacacagagagaggggtttgggattggagggattgacgctgcgtctcttcctcgtctctttcgatccatccctcattcctaatcctccaatccaaccacctcagcctcatactcacatatacacatatctgaacgcgtatcgtccctcctatggcttcaaagcgcatcctcaaggagctcaaggacttgcagaaagacccaccaacttcttgcagcgctggtccagtagctgaggacatgttccattggcaagcaacaataatgggtcctgctgatagtccttatgctggaggtgtattcctagtcactagtcactttcctccggattatcctttcaggcctcct

SEQ ID NO: 242046 - DNA, 356 bp, Glycine max
  unsure (1)..(356): unsure at all n locations
ggcacaagtttgttgagatagctagaagcaataagatgaaaatgaaagtgcttgttttgtttgttgctacagttttggtagcatatgaatgccatggctcagactaccagaagttccctctccaaatgaaaactgggtttggtgggcaatacagcaatgaggtggcatgtgccagttggaggcttggcgtggaagcaaacaacgtagtcaagtggcaaactgttcctgcagcttgcggagagtacatagctgactacgttctangagaccaatatagatcagattccaaaacagttaaccaacaagcttatttctaagccaaatccctcaaactcaacaacaaaagatgtccttgg

SEQ ID NO: 242047 - DNA, 349 bp, Glycine max
gacaacaaaatttgccacttgccatttcagtcctcagtttcgttcatcaacgtttccatcatacacagatctcaatcctctctcaagctctaatttcccctcatttccatggacacataatagcccactgtcgcggtggaacacgctcccgaacctgcctccgccgatcctcccccggtggagaatgaggagaccaaacctgaggccagggctaagaatcccaatgagcccagacctatagaggtttccagacctcgcaaccctcccactcatccttcctacgaagagatggttaaagatgcaattacctcactgaacgagacaaccggttcgagccaatacgcgattg

SEQ ID NO: 242048 - DNA, 353 bp, Glycine max
gattctggatttcattgtttctatttatcaatatgtgtcagccaatccaaattgaatgatgcaagggctgatttcatgtgctctgataagctttgacctaatttggctacaagaattcatccattgtaaaagattgttaaatttaacgagtatctgagaagtattgctacttttatttattttttttctgtttgtgaccctatagattttatgaaagaaacactgttcaattttggtacgttttttgtaagtaccatcctgcttgcgtgggcatgactattgaagaagcaaagaaattggaacattttgtttgttcagaatgttcatctgatgatgacatgaagaaaccccat

SEQ ID NO: 242049 - DNA, 363 bp, Glycine max; identical to SEQ ID NO: 236029

SEQ ID NO: 242050 - DNA, 367 bp, Glycine max
  unsure (1)..(367): unsure at all n locations
gataataagagttttaatattattgtattgtagtagtagccatggggactttcaatcactatgtgattgttaagttcaaagatggtgtggcagttgatgatctcattcaagggttggagaagatggtctttgggattgaccatgtcaagtcctttgaatggggaaatgacattgaaagtcatgatatgctaagacaaggtttcactcatgctttcttgatgacattcaatgggaaagaggagttcaacgcatttcagactcacccaaatcatcttgagttctcgggagtgttttcacctgctattgagaagattgtggtgctggattttccatctaacctcgtcaaagcancagcatgattctcaac

SEQ ID NO: 242051 - DNA, 350 bp, Glycine max
gggttttggttgggattcaaacaaaccgcattcgcactgtgcatccctttcttccttcctcgtcttattctccaaccccctccaaaacctccttctcactcttcttctttctgctactctccctctaaacaacgtcgtttctcgtcgtacagccatgtcatacgactacctcttcaagtacatcatcatcggcgacacaggtgtagggaaatcgtgcctgctcctgcaattcaccgataagaggttccaaccggttcatgatctcaccattggtgtcgagttcggcgctcgcatggtctccatcgattctcgacccattaagcttcagatatgggataccgctgggcaag

SEQ ID NO: 242052 - DNA, 362 bp, Glycine max
taacttgagattattttttttctttccccaaacccaaagaggcatgagttgcaacgggtgccgcgtccttcgaaagggttgcagcgagtcttgtatcctgcggccgtgtctacagtggatcgatacgcccgaagcacaaggccatgccactgtcttcgttgccaaattctttggccgtgccgacctcatgtccttcatttccaacgtccctgaaccccaaaggcccgctctgtttcaatctctgttgttcgaagcgtgtggaagaacggtgaaccctgtcaacggtgctgttgggcttttatggaccggaaactggcacgtgtgccaagcggcggttgagacggtgctccgcggcggcaccg

SEQ ID NO: 242053 - DNA, 361 bp, Glycine max
ggagtgagcaagagtgaagagcgaagagaatggctcccaagggtttaatctttttggctgtgttatgcttctcagcactgtcactgagtcgttgtcttgcggaggataatggacttgttatgaacttctacaaggaatcatgccctcaggctgaagacatcatcaaagaacaagtcaagcttctctacaagcgccacaagaacactgctttctcctggctcagaaacatcttccatgactgtgctgttcagagttgtgatgcttcactgttgctggactccacaagaaggagcttgtctgagaaggaaacagatagaagctttgggttgagaaatttcaggtacattgagaacatcaaaga

SEQ ID NO: 242054 - DNA, 346 bp, Glycine max
ggagtgagcaagagtgaagagcgaagagaatggctcccaagggtttaatctttttggctgtgttatgcttctcagcactgtcactgagtcgttgtcttgcggacgataatggacttgttatgaacttctacaaggaatcatgccctcaagctgaagacatcatcaaagaacaagtcaagcttctctacaagcgccacaagaacactgctttctcctggctcagaaacatcttccatgactgtgctgttcagagttgtgatgcttcactgttgctggactccacaagaacgagcttgtctgagaaggaaacagatagaagctttgggttgagaaatttcaggtacat

SEQ ID NO: 242055 - DNA, 338 bp, Glycine max
cattgtactgatttgaaagtgcggtttggaataaactcaaagttttttgatagtgctggccggccacgattgagttttgtggttgatccatcaccaagtctatgtaatgttcttgatgcatgtgaccgtgtagcacagaagttaaccgtggattctggtagcagctctgattggaggcctgttgttattaggaaagaaggcttcttcaactatcctactgtcagattacacatacctactgcagtagtggcagacattgctatttatgccacggaaatatatcaaagagaatcatctggaacagtgcaaagacttctcttcagtaagtttgatgctgc

SEQ ID NO: 242056 - DNA, 355 bp, Glycine max
gagagaaagagagagaaagatgtcgaagcgtggtcgtggtggttcggcggggaacaagttccgcatgtcgctgggtcttccagtggcggcgacggtgaactgcgccgacaacacgggggcgaagaacctctacatcatttcggtgaaagggatcaaaggccgtttgaaccgtcttccctcggcctgcgttggcgacatggtgatggccaccgtgaagaagggaaaacccgatctgaggaagaaggtctcgccagctgtcatcgttcgccagcgcaagccatggcgccgaaaggacggcgtctacatgtacttcgaagataatgctggtgttattgtcaatcccaagggagaaatg

SEQ ID NO: 242057 - DNA, 382 bp, Glycine max
  unsure (1)..(382): unsure at all n locations
gatgtattagtattttcctaaaaaaaagattccaccaccaaattatatatgatattttaagcgttgtttggggaagggtgattagaccccgactcaattacaccacgcttctaaattctgagaatgaattcgtaagatcgaagcaatagcctttttctctgccgccactggtttcgatcccacacccacaaacgcaaaccctccatcctttgaatgctcttgcgttttcctttcactacctcattcctaactcacacacacacaacgggtgatatcaatgtcgactcctgctangaagaggctcatgagagatttcaagaggctgcaacaagacccgcctgcaggaatcagcggggcacctcaagataacaacataatgctg

SEQ ID NO: 242058 - DNA, 352 bp, Glycine max
  unsure (1)..(352): unsure at all n locations
gggtactgtctaacctttgattcctcggttctctgttttgttctgtttcgcgtattgtcttcatacaggaacttgaacaatgaagaatgcaaagggcaagggagcagcaagggcctcaaaagaatcactgaagcccgttgatgaccgaaaggttggaaagcggaaggcttccggtaagcctgggagaagtagtgcaccaaagaaggagaagaaggccaagaaagaccccaacaagcctaaaagaccacccagtgctttctttgtgttccttgaggagttcaggaagacctttaaggctgagaatcctaatgtgaaggctgtatcagttgttgggaaagctggangagagaaa

SEQ ID NO: 242059 - DNA, 341 bp, Glycine max
ggcattttcgtgtgaaaaaaaaaatcctcagaaccaaaatcggttttcttctgtctctgatctctcaaagcttcaaattctccttgtttggtttgtttgtgtgtttggagtatgatgtcgccgccggcggtggtaacggaggatgaggggcggagcaacgtgtcgtcgaccgtggcgtccggttcttcgcaatccttggaccgtttctctcagaatggggctggattgaaagaacgaaattacttagggttatctgattgctcatcagttgatagcagtgcctctactgtgccaagcttgtgtgatgagaaaaaggagaacatgaatttgtacgctacaga

SEQ ID NO: 242060 - DNA, 382 bp, Glycine max
ggggagtgggagagaaagatgccgaagaggacaacgcacacatactcaagcgaggatgcagctccggagggtcctcactccgatctctttgtatattactgcaaacattgcggatcccatgtcctcataacagatacccaattgcagaaaatgcctaaaaggaaaaccgacaaagcttatgtactggacaagagcaaacatctggccagattgaacatgaacgaaggcgggaaagtagtgttaaaacgaggggaggggaaaatggagaaacaattccgcatgaactgtatggggtgtggactgttcgtatgctaccgggcggaacaagagttggagttatcgtctttgatatatgttcttgatggtgccctcagtactgttg

SEQ ID NO: 242061 - DNA, 368 bp, Glycine max
gaacctcatgcattctattcttctctttctctctctctctctctcactttctctacctttctatgaatttctgttgcattaaattttctctgcagaaaaaaaagagcttccacaatggtaagcgctgcaattgctcgtaacgtcgtcggcgtaataggcaatatcatttcctttggcttgttcttttcacctgctccaactttctatggaattgtaaagaagaagacggtggaggagttcaagccagatccttatatagcaacggtgttgaattgtgcgttttgggtgttctatggaatgccttttgtgcaaccaaacagcattttagttgtcactatcaacagcgttgggcttgcgttcgagtttgt

SEQ ID NO: 242062 - DNA, 367 bp, Glycine max
caggaccagcaggcatggctccccgcggttccgccgccgccaccgctggcatgcgccgccgccgtctcggcggaggaaacagctccgccagcaccggcgtcggaggcggcagcagcaacatgctgaggttctacacggacgatgctccggggctgaagatttcgccgacggtggtgctggtgatgagcctctgcttcatcggcttcgtcaccgcgctccacgtgttcggcaaactctaccgctccaaatctggcggcaccgtttgatcttacgatcctcttttggatttgtagttctgatccgcatccgatcgctttggtttcggtttttaattccgtaattttgttaacacttgctattttgttgt

SEQ ID NO: 242063 - DNA, 354 bp, Glycine max
  unsure (1)..(354): unsure at all n locations
agggatctcattctcatcaagttattatcanataattaattaaattcctcgtggaatcttgttgaagccatgtctacagctggtcaggtcatcaagtgcagagctgcggtggcatgggaagcagggaagccactatcgatagaaaccatagaagtggcaccaccccagaaaggtgaagtgcgtttgaagatcctcttcaactccctttgccgtacagatgtttactggtgggatgctaagggccagactccgctgtttcctcgtatcttaggccacgaagcttcggggattgtggagagcgtgggcaagggtgtgacacatctgaaaccaggttgacatgctctcccaatattc

SEQ ID NO: 242064 - DNA, 353 bp, Glycine max
ggtaagataccgatccacttcgaaagggttaggtttacgaagaaacaccaatcctctccgagaagaaatcaacgatgcctcgctatgatgataaatatggtaatacccgcctctatgttggacgcttgtcttcgaggacacgttcccgtgacctggagcgtgtcttcagcagatatggaagaattcgaggtgtagatatgaagaatgattttgcctttgttgaatttagcgatcctcgggatgctaatgatgctagatatagcttggatggtcgtgatgttgaaggaagtcgtatcattgtggaatttgccaaggggggtcctcgtggttcccgggaaaacttgggtcggggt

SEQ ID NO: 242065 - DNA, 348 bp, Glycine max
  unsure (1)..(348): unsure at all n locations
ggggactacaatggtaatgttatagaattgtatgtaaaaaataaaaatggagaagaaagagaagcgggcctgagaagcgaaaagaaggcctgngcttagttgataagcataactgggtgaggaagaaagaaagagagtgaagaagatggcgtcgagcggagcggtaccgttttggagggcggcggggatgacgtacataacatactcaaacatatgcgcgaatctgctcaggaattgcctcaaggaaccctacaaggccgaatccctctctcgtgagaagctccattttgttctctccaaatgggtcgacgccaagcctgaaaaacctactattcgttcagacacccc

SEQ ID NO: 242066 - DNA, 378 bp, Glycine max
ggaagagaaatgggaggaagaatgcacacgatatcagactcggaggtgacgagcaacagcatggagcagtcgtcgccggcgcgttctcctccgcggcgggcactcgactacgtccagagtccttcagactacgacgtggagaaactgtcctacggctcaagccccatgggttcccgacaccaccatttccactactacctcgcttcccccatccatcactctcgcgaatcctccacctctcgcgtctccgcttcactcacagaccctcgcaacttctcctcctcctcatcctgtcagaagctctatcctcacctcaatcgcgacgttgaccccgacgactatgacgacgccgaccagcacctcatgcagtcctcccgc

SEQ ID NO: 242067 - DNA, 330 bp, Glycine max
ggaagagaaatgggaggaagaatgcacactgtatcagactcggaggtgacgagcaacagcatggagcagtcgtcgccggcgcgttctcggcggcggcgggcattcgattacgtccagagtccttcagactacgacgtggagaaactgtcctacggctcaggcctcatgggttcccgacacgatcatttcgacgactagctcgcttcccccatcggtcactctcgcgaatcctcaatctctcacttctctgcttcactgcacctacctcgcaacttctcgtcctcatcatcttgtcagatgcgctatcctcacctcaggtcgcgacgttga

SEQ ID NO: 242068 - DNA, 325 bp, Glycine max
gctcctacagattcttcagcaactgcgattttggatcggaacctcttctgcggcgtagcaatgggacactccaacgtttggaattctcacccaaaaaactacggtcctggttctcgcacttgccgagtgtgtgggaatccacatggattgatcaggaagtatggccttatgtgctgcaggcagtgcttccgtagcaatgccaaggaaattggcttcatcaagtatcgctaaaagagctgttgtcacctacggaccaatattatgttctggcactaagatgttttgaagatgttatgtttgaagaaacttgagacttgtttttttc

SEQ ID NO: 242069 - DNA, 390 bp, Glycine max
gaagcaactaagcaagatatcatcacattgcaaagaaaatacacattacattactaagtctttgttcatttgagtagtagtgatggctagcctcaaggttgcatgtgtggttgctgtgatgtgcatggttgtggtggccatgagtgctgcacccatggcacaggccgcaatcacgtgcgggcaggtcgccggcgacatgtctccgtgcttcagttatcttcgaagcggcggaaaaccgtcgcaggcctgctgcaacggagtgaagtccctcagcagcgcggcgaagaccaccgcggaccgccagggggcgtgcagttgcctgaaaaaccttgccaataatatgggacagagtttgaatgccggcaacgcagcctctctccctggcaaatg

SEQ ID NO: 242070 - DNA, 338 bp, Glycine max
gatctagagtttgtgaggaaggaagatgagtttgagggcatcagagatagcgaagaagttgaatctgcaacctcacccagaaggtgggttttacgtggagacattccgagaccattccgtccagctttcgacctctcagctcacccccgaatacaaagtggatcgccctgtatcgacctccatctattttctcgttccttctgggagtgtgtctcgcctccatcgcataccctgcgccgaaacctggcatcattacatcggcgaccctctcaccgtagtggaattgaatgagaaagatgggagcgtaaaattcacttgccttggatcagatctgactc

SEQ ID NO: 242071 - DNA, 352 bp, Glycine max
gatccccaatcagagagaaaagttagggttcacaacttttccttttccttttgcttgcgaatctgaatcaaataatcaatcatccattcattattcatcatgtcgtcggcgaagaaaatcacgctgaagagttcggacggcgaggctttcgaggtggaggaggcggtggcgctggagtcgcagacgataaagcacatgatcgaggacgactgcgccgacagcggcatccctctgccgaacgtgacgagcaagatcctggcgaaggttatcgagtactgcaagaagcacgtcgaggccgcgaatcccgaagacaaaccctccgaggacgatctcaaggcctgggacgctgaat

SEQ ID NO: 242072 - DNA, 390 bp, Glycine max
  unsure (1)..(390): unsure at all n locations
ggtccttctttgcgagattgaatcgtaagcagcggctaccctaatcctctcctcttcctctctactaatttcagctatggccgacgaagctgtggttgttccagatcccacccagatcgatgtcaagctctttaaccgctggagcttcgacgatattgagattactgacatttctctggctgattatatcggagtggcgacatccaagcacgccacgtatgtgcctcacaccgccggcaggtactcggtgaagcggttcaggaaggcgcaatgccccattgttgagaggctgaccaactctctcatgatgcacggtagaaacaatggcaagaaactcttggctgttaggatcatcaaacatgctatggagattantcatttgttgactga

SEQ ID NO: 242073 - DNA, 335 bp, Glycine max
  unsure (1)..(335): unsure at all n locations
gtggaattgacggtcgaggagcggaaccttctgtcggtagggtacaagaacgtggtgggtgctcgtanggcttcgtggaggattctatcgtcgattgaacagaaagaagaagctaaagggaacgatgtgagtgtgaagaggataaaggagtataggcagaaggtggagtctgagttgtccaatatctgcagtgatatcatgactgttattgatgaacaccttattccccctagctctgctggtgaacctagtgtctttttctacaaaatgaanggggactattaccggtacctcgcggagttcaagtccggtgatgagagaaaagaagctgctga

SEQ ID NO: 242074 - DNA, 382 bp, Glycine max
ggcacaagtttgttgagatagctagaagcaataagatgaaaatgaaagtgcttgttttgtttgttgctacagttttggtagcatatgaatgccatggctcagactaccagaagttccctctccaaatgaaaactgggtttggtgggcaatacagcaatgaggtggcatgtgccagttggaggcttggcgtggaagcaaacaacgtagtcaagtggcaaactgttcctgcagcttgcggagagtacatagctgactacgttctaggagaccaatatagattagattccaaaacagttaaccaacaagcttatttctatgctaaatccctcaaactcaccaacaaagatgtctttgtcttggacgttgacgacactactctctc

SEQ ID NO: 242075 - DNA, 343 bp, Glycine max
gaattctgaatcagaagaagcgagcgaagatgtcgggtcgtggaaagggaggcaagggtttgggaaagggaggagccaagaggcacaggaaggtgcttcgtgacaacatccagggtatcaccaaacccgcaattcggcgtttggctcgcagaggtggtgttaagagaatcagtggtctcatctacggggagacacgtggcgtcctcaagatcttcctcgagaacgttattcgcgacgctgttacctacaccgagcacgctagaagaaagaccgttaccgctatggatgttgtttatgctctcaagaggcaaggcaagactctctacggtttcggtggttaatt

SEQ ID NO: 242076 - DNA, 387 bp, Glycine max
acgaggaggctttctaaggggggcaccgaaatgaggtttgggatagtgcaaacactactgagttccatcaaacacaacgacgatgagctctgcccggacctaaggacatgatgtctgctaactcagtcggcatcattagcatgctccacagcgctctccgcgtctatgtcacgactctcttctgtgatctccgtgctgcttagaatgccatcgaactccacaatgaatctgatggaaatcagctccatgaatcagtactcttatggcatgactagcgaaccgttcagtacgtgtgtagcggtggaaaccacattggtggctgtgaaacaacaactgcccggcacacacattggaagctggttcctcagctgataccagctggagctg

SEQ ID NO: 242077 - DNA, 381 bp, Glycine max
gtggacgtccatttttgtgggtcgttagagaaaaggtaattaatggaaaaaaagaagaggaggatgagctttgttgtttcagagaggaattggagaagtgggggaagatagtgacatggtgttctcatgtggaggttctttcgcattcttctgtgggttgttttttaacacactgtgggtggaattcgaccatggaaagccttgtttctggggttccaatggtggcgtttcctcagtggactgatcagatgaccaatgcgaagctcatagaagatgtgtggaagatatgggtgagagtggatcatcacgtgaacgcaaatgggatacttgaaggaaaggaaattgatgcatgtttggatgtggtgatggggagtggtgaca

SEQ ID NO: 242078 - DNA, 320 bp, Glycine max
ggtcttgcacgcgaagagatggccaccgttccaaggcagcttgtgtgggagatcgtcaaggaaaacaactccttcgtggtcaagcagtttggaaggggcacccaaagcgtcgaattcagcagacagagcaacaatctctacaacctcaattcgttcaagtactctggtttggcaaacaagaaaactgttactgttcagcctgatggcacagatcaggcagtgttgttggctacaaccaagacagagaagcaaaacaagcccgctgcattgctccacaaatctgtgatgaagaatgagttcaggacgatggcaaaagctgt

SEQ ID NO: 242079 - DNA, 354 bp, Glycine max
ggcacaagtttgttgagatagctagaagcaataagatgaaaatgaaagtgcttgttttgtttgttgctacagttttggtagcatatgaatgccatggctcagactaccagaagttccctctccaaatgaaaactgggtttggtgggcaatacagcaatgaggtggcatgtgccagttggaggcttggcgtggaagcaaacaacgtagtcaagtggcaaactgttcctgcagcttgcggagagtacatagctgactacgttctaggagaccaatatagatcagattccaaaacagttaaccaacaagcttatttctatgctaaatccctcaaactcgccaacaaagatgtctttg

SEQ ID NO: 242080 - DNA, 373 bp, Glycine max
gatcgtagaactgaagattcagttcgggatttttgcgcttcgtcctcaatttgcagcgcgtgagtgagggaacatggacggtgccgaattgtccaacataaagaaatggattgtgatgtatcctgtttacataaactccaaaaaaacgatggccgaaggaagacgcattggcctcgccaaagcctgcgaaaaccctacttgcgctgaaatcggtgattgctgcagctatctgaagcttccttttgcaattgagatagacaaggcgtaccctcgtgatttcatgcagagagggcgcctgagggtgttgctgaagaaggaggatggaactctctttaattcaaacatctcatccaaaaataaaattttgaatgac

SEQ ID NO: 242081 - DNA, 337 bp, Glycine max
acagaacttttgttgagattgtcttccaaaacaacgagaaaatcgttcagagctaccatcttgatggctactctttctttgtcgttggtatggacgggggacagtggacacctgctagcaggaaccagtacaatctccgagatgcagttgcacgttgcaccacacaggtataccccttttcatggactgctatttatattgcccttgacaatgtgggaatgtggaacttgaggtctgagttttgggcacgacaataccttgggcaacagttatatttacgcgtttatacagcatcaacctcaatcagagacgagtttccctgttcaaagaatgcaat

SEQ ID NO: 242082 - DNA, 340 bp, Glycine max
cgcgtccactgagagatcacgacagaatgggtggaattgacggtcgaggagcagaaccttctgtctgtaaggtacatcaacgtggtgggtgctcgtatggcttcgtggatgattctagcgtcgattgaacagaaagaagaagctaaagggaacgatgtgagtgtgaagaggataaaggagtataagcacaatgtggagtctgagttgtccaatatctgcagtgatatcatgactgttattgatgaacaccttattccccctagctctgctggtgaacctagtgtctttttctacaaaatgaacggggactattaccggtacctctcggagttcaagtccg

SEQ ID NO: 242083 - DNA, 310 bp, Glycine max
ggggagttggatgatggtactaaaattgcagtgaaacgaatggaagcaggtgtgattagtagtaaggccttggatgaattccagtctgagattgcagttctatcgaaagtccaacaccggcatctggtgtctcttttgggttattctacagagggtaatgaaagaattctagtgtacgagtatatgccacaaggggctctcagtaagcatcttttccattggaagagccatgatctggagcccctctcttggaagaggagactcaatattgccttggatgttgccagagggatggagtatccccatactc

SEQ ID NO: 242084 - DNA, 373 bp, Glycine max
ggctgcagcaagggctcaacgcacgcaggaggaggagattgatcgagagaagagaagatgactacacgcttcaagaagaacaggaagaagagaggccacgtgagtgccggccatggccgcatcgggaagcaccggaagcaccctggaggacgcggtaatgccggaggcatgcaccaccaccggatcctctttgacaagtaccaccctgggttcttcggcaaggtcggaatgcgctattttcacaagctccgcaacaaattctactctccgatcctcaacatcgacaagctctggtccctggttccgcaagaagtgaaggacaaggcctccaaggagaacaaggcgccgctgatcgacgtcacgcagttcgggt

SEQ ID NO: 242085 - DNA, 386 bp, Glycine max
ggcacaagtttgttgagatagctagaagcaataagatgaaaatgaaagtgcttgttttgtttgttgctacagttttggtagcatatgaatgccatggctcagactaccagaagttccctctccaaatgaaaactgggtttggtgggcaatacagcaatgaggtggcatgtgccagttggaggcttggcgtggaagcaaacaacgtagtcaagtggcaaactgttcctgcagcttgcggagagtacatagctgactacgttctaagagaccaatatagatcagattccaaaacagttaaccaacaagcttatttctatgctaaatccctcaaactcaccaacaaagatgtctttgccttggacgttgacgacactactctctctaat

SEQ ID NO: 242086 - DNA, 283 bp, Glycine max
caggggcacaagtttgttgagataactagaatcattaagataaacctgaatgtgcttgttctgtttgttgctccagttttggtgacatatgtatgctacggctcagactaccatccgttccctctccatatcactactgggtttggtgggcattacagcactcacgtggcatgtgtcatttcgaggcttggcgtgctccattcaacgtcctcgcctggctgcccgttcttgcaccctccgcacagtacttcactcactacgttctacgataccaatatctcat

SEQ ID NO: 242087 - DNA, 356 bp, Glycine max
catgttgtcatgtttgacttccccttgaattccattgactaccttcatcgcactggtagaactgctcgtatgggtgcaaaagggaaggtaacaagtttagttgctaaaaaggacttggacttggccagcaaaatagaggacgcattaaggaagaatgagagtttggaggctatcacaaaagaaagtgtccgaagggacattgcaaggacccaaaatcaaagcactgagaagggaaagagcaaaagattggttaaagtttcaaaagttatgggcaaatctggtagtcgttttggttctgggaataatggatcaggtatgaaatctggtaaagggtcaccagtcaaatctatgaagaa

SEQ ID NO: 242088 - DNA, 253 bp, Glycine max
ggagtagcgatggagaagaagaagggtgagctaaagtcaattttccttcctttcctttccactagtcacataatcccgctagtggacatggccagactcttcgccttgcacgacgtcgacgtcaccatcatcaccaccgcacataacgccaccgttttccaaaagtccatcgatttagatgcgagtcgcggtcgccccatcagaacgcacgttgtcaacttccccgccgcacaagtgggtctccccgttggga

SEQ ID NO: 242089 - DNA, 356 bp, Glycine max
ggaacctttgcattctattcattcaagattcagcaagtgcgttttggaagcagagaccgaaatacttcgagttttctgaagttgttgttggttgttgattaagatggcccgtacaaagcaaactgctcgtaagtcaactggaggaaaagctcccaggaagcagcttgcaaccaaggctgcacgtaagtctgcaccaacaactggtggtgtgaagaagcctcatcgttatcgccctggaactgttgctcttcgtgagattaggaaataccagaagagcactgagctcctaatcaggaagcttcctttccagaggttggttcgtgaaattgcccaggatttcaagactgatctgcgtt

SEQ ID NO: 242090 - DNA, 386 bp, Glycine max
ggttctagtgtgtgattgtttgttgttgtaactcgttcttcttcttttgttgttctgtgtttgtgtttgttttttctctcacctgaaaatgtcttgctgcggtggtaactgtggttgcggaagctcctgcaagtgcggcaacggctgcggaggctgcaagatgtacccagacttgagctacactgagtcaaccaccaccgagaccttggtcatgggagtggcacctgttaaggctcaatttgagggtgctgaaatgggtgtgcccgctgagaacgatggctgcaaatgtggaccaaactgctcctgcaacccctgcacttgcaagtgaagtgttgggagagcaagcttcaagcagagatagcccttaattaagaataatgaataac

SEQ ID NO: 242091 - DNA, 319 bp, Glycine max
gaaacgaaaaggccaagcaaagaactccgtagcaagaagttgaatgagcgatgatgggtgctgattgaagcatgagaagccaagaagtccaaggagcatacatgcagttcactccaacatgatgtgagaactcctccttcaccatgtccaagtgaaagatgcacttgagcacgtaaagtaaagacaaagtagtggcagtgagcagtgccacacaccaaagtagtagaaacgcgatggaaggcatcaaattgaatccatgccagagagtttgtgagtccctgttgtgtttactcaaactctttcagagcaaagcttgtgc

SEQ ID NO: 242092 - DNA, 373 bp, Glycine max
gacagcttcaaactcaaactcacctcaacttccacttgctgttttccacgttatcctttccaaaaacctgttcttttctcaaatgggtggttcaggaagatggctcaagtccctcatttctctcagaaagccctccactattgatcaagagaagggtggtgacaagagtaagagaaagtggaagttatggaagagcacttcagaagggtttgggattggatcatcaatgcagaaggggcatggtggtggtggatcctttgtggtggacgatggagcatttgctgctgctttggctgctgtggtcagaactccactcaaagactttatggtcattaagcaggaatgggctgccattcgaatccaagcagtgttt

SEQ ID NO: 242093 - DNA, 367 bp, Glycine max
ggggtttggtgaatgagaatcggattgaagaagaagaagacgaccagcggtgcagcttcgaaattgctggccatggcgaagaagctaagctcgaagcccaccattttgttcatcttcgtctctttcatgcttttttgcgcctttcttcctgttttcgctcctcttccttctttctcctctcaccattctcatcgcaatacagttaacagaaagttcgagatcgccaacgataggttctggaaagatggtgaaccatttcagatcatcggtggtgacgtgcattattttcgagtgcatccagagtactgggaagatagactgctaaaagccaaggcattgggcttgaacacaattcagacatatgttc

SEQ ID NO: 242094 - DNA, 378 bp, Glycine max
gagagaaagagagagaaagatgtcgaagcgtggtcgtggtggttcggcggggaacaagttccgcatgtcgctgggtcttccagtggcggcgacggtgaactgcgccgacaacacgggggcgaagaacctctacatcatttcggtgaaagggatcaaaggccgtttgaaccgtcttccctcggcctgcgttggcgacatggtgatggccaccgtgaagaagggaaaacccgatctgaggaagaaggtcttgccagctgtcatcgttcgccagcgcaagccatggcgccgaaaggacggcgtctacatgtacttcgaagataatgctggtgttattgtcaatcccaagggagaaatgaaaggttctgctatcactggtcc

SEQ ID NO: 242095 - DNA, 370 bp, Glycine max
gacagcacaatatgctatgctatgctctctaatccgtatccgccgtcacgctcctttccaccacactctccgctctctcttgccgattaaccgtttctcctcctcctcctcctcctccgcctccgccgccgccgccgccgccatggttgctcacgcgaaggacgaggcgtaccttagcgcggcgattccgaagcgcgtccgtctcttcgagaccatccaggcggagcagcgcacgcagcgcctctcgctttcgccggatcctatcaaggtcactctccccgacggcaacgtcaaggacgcgaagaagtggctctcgacgccgctcgacgtggcgcgcgaaatctcgaaagatttggccaacagcgcgctc

SEQ ID NO: 242096 - DNA, 320 bp, Glycine max
  unsure (1)..(320): unsure at all n locations
ggcgctagttctgagtattctgatcgctccctgagagagctcgtcgcggcggttgcagaagaagattgcaagatgaagttcaacatcgcgaatcccaccactggatgccagaagaagctcgagatcgacgacgatctgaaactgcgagcattttgggacaagaggatctcacaggaggtcatcggagatgcactcggtgaggaatttaagggctatgtcttcaaaattaccggaggttgtgacaaacaaggatttccaatgaagcagggagtgctgactcctggtcgtgtnagacttttgcttcacaggggaactccttg

SEQ ID NO: 242097 - DNA, 352 bp, Glycine max
gcttttgtgaaacctagccagccagcgattgccgccatttgcttctcctccgaacgatccaacaattcaacggccctgtgtttgttaattgagattttagattcaacgctttaacattggtacaatggcttccaacatctcaccttctgcctttgataaagagcagatatttggaatggctgaaaaggagatggagtatcgggttgaattattcaacaagatgacccagacatgtttcaataagtgtgttgacaataggtacaaggaatccgagctaaatatgggtgaaaatagttgcattgaccgctgtgtttcaaaatactggcatgtgactaatctaattggtcagctg

SEQ ID NO: 242098 - DNA, 382 bp, Glycine max
ggagaagaaaaatgggaggaagaatgcacacgaaatcagactcggaggttacgagcaacagcatggagcagtcgtcaccgtcgcgttcccctccgcggcggccactctactacgtgcagagcccttcgaaccacgacgtggagaaaatgtcgtacggttcaagccccatgggttccccacaccaccatttccactactacctctcttcccccatccaccactcccgcgaatcctccacctctcgcttctccgcttccctcaaaaaccctcgcagcaacttctcctcctcctcctcctggaagaagctccacccacacgccaaccccgacgccggcctcgacgacgacgacgacgacgacgacggcgacgacgacctcaacac

SEQ ID NO: 242099 - DNA, 412 bp, Glycine max
  unsure (1)..(412): unsure at all n locations
gatcgcacaacattattctttcgcaccttgcagaatcaattttctctctcaatcgtctttcatggctcgtaccaagcaaaccgctcgcaaatccaccggtgggaaggctcctaggaagcaactcgccaccaaggctgcaagaaaatctgcacctaccaccggtggagtcaagaagcctcatcgctatcgtcctggaactgttgctcttcggtaatttgctcctttcagtaattgttttgttttttcttctccttcgcgttttgaattttcgcgaattattgttttttttttcgtggtttcagtgagatccgaaaataccaaaagagcacagagcttctgatccgcaagctcncctttcagcgtcttgttcgtgaaatcgcgcaagacttcaaggtatgttctaaattcaaaa

SEQ ID NO: 242100 - DNA, 404 bp, Glycine max
ggcacttcaattgcaatcaaattagttcattctctttgcgcagttccctacctctcctttcaagatgcagatcttcggcaagacactcacagggaagaccatcacacctgtggggggaaactctgagaccatagagaaagtttaagggcaaatttcaggacaagggagggattcccccggttatcaaagtctcaacttcgccgggaaacagctccacgacgggcgtagtctcgccgactacaacatccacaaggagtgaacccttcatcatgtcgttcgtccccgtggtggcatgcagatcttcgtcaagactctcactggcaaaaccataaacctacaagtcgaaagctctgacaccaatgacaacgtcaatggcaagattcatgacaaagaaggaatccccc

SEQ ID NO: 242101 - DNA, 333 bp, Glycine max
ggattacaattcttcaaatgaaaagccataactgtcccgaatgatagcttccggttaactttaatctttggttgcatgtacaagatacgccattatctgttttgcatattcatcatactacatggcctgaccatggagttcccaattatacatatgctgttcgtgaaatttttaaaagattatatcatttagaaccaaaccttggccccatagtggtgcactgcagtgccgatattggtagaactggaacatattgcacaaattcacaacacaattcagagaatacttgctggtgatatctctgctgtaaatattgctgacacagtcactacg

SEQ ID NO: 242102 - DNA, 358 bp, Glycine max
aagggcattcctactctgaaatcattaatgagagtgtcattgaggctgttgactctttgaatcctttcatgcatgctcgtggtgtttctttcatggttgataactgttcaaccacggctaggttgggttcaaggaaatgggctcctcgatttgactacatcctaacccagcaggccatggtggcggtggacaatggaacacctattaaccgggacttaatcagcaacttcctgtcagacccagtgcatggagccattaaagtttgcgctgaactgagacccacagtagacatttctgtgccaccagatgcagactttgttcgtccagagttgcgtttcagcaattagaacttaaaatc

SEQ ID NO: 242103 - DNA, 369 bp, Glycine max
gacggcaacagaagaataatcaaatttctaagatctatccgacgtcgtcgcagatccaccaaccgttatggctgccttcagcggtgatgaaacggctccgtttttcggcttccttggagccgcagctgccctcgtcttctcctgtatgggagctgcctatggcacagcaaagagtggtgtgggcgtggcttccatgggtgtgatgagacctgagctggtgatgaagtctattgtccctgttgtcatggctggagttttgggtatttatggccttattattgctgttattatcagtaccggtattaatccaaaggccaaatcttattacctctttgatggttatgcacatctctcctctggtcttgcctg

SEQ ID NO: 242104 - DNA, 355 bp, Glycine max
ggccacgtcatgacgagagtagcgatgatctagtgaggagattttggtgggaagatattttcgacgattttcgcggttgtgggcgaaagctggctgccagcgatagtgaatcagaatcgtaagttcgacaaagaagcaagcaaggttattattctttgtggttgcggaacgaagcatgctgttgctgttcgagaatggatgagttgaacggcgccatgacgacggagaatagcaatgcggaggtggttcgatgggagaggtttctgccgcggatggtgctcagagtgctgcttgtagaagctgatcattccacgcgccaaatcatcgccgcgcttcttcgcaaatgcagttacac

SEQ ID NO: 242105 - DNA, 395 bp, Glycine max
acacaccgtttgttctattcttaactcaacttctgctacccactctcttcttccaagtccaaccacgcttttctctacagtcatgggcaaggtcaagatcggaatcaacggatttggaagaattggccgtttggttgccagagtcgctctgcaaagagacgatgtggagctcgttgccgttaacgaccctttcattaccaccgattacatgacatacatgtttaaatacgacagtgttcacggacactggaagcatcacgatgtcaccgttaaggacgagaagacccttctcttcggtgacaagccagtcactgtttttggacacaggaaccctgaagagatcccatgggggtcaactggagctgatatcattgttgagtccacgggagttttca

SEQ ID NO: 242106 - DNA, 388 bp, Glycine max
ggaggcaaaggcatttggatccgacgacctcgttggttttcctttgtaagttgtaagcatttggcaccagcaagccctgtcttcttcttcgatcagattagggcatttcatttctgcgatggccgcagcacccgctagagctcgtgccgattacgattacctcatcaagcttcttcttatcggcgacagcggtgtcgggaagagttgtctgcttttgagattttctgatggctcattcacaaccagttttatcaccaccattggtatcgattttaagataagaaccattgaactagacggcaaacggattaagttacaaatctgggatactgctggtcaggaacggtttcgaactattaacacagcttattaccgtggagccatgggt

SEQ ID NO: 242107 - DNA, 404 bp, Glycine max
ggacgggggggttgttaaattaaagaaggaaggaacgccgcaatggcaatggcaatggagacgagaaggcgaggttgatgattgtgatggcggtagcagacacaaacaggaatggcagtggcatcctccttcatcatcatcatcgtcgtcatcatcgctctcatcttcttctccctaaaccctcctcctgcaccatcacgtaagtcacttctcctcaccacttcatcgtcttgctccaacgaatccaatggccttctcatctaccactgcatcttcccccaaacttcctctttctcaatcccctccctctcgctcgtcctcctcctccacttctacatcctcaacaccaccgcgcagcaccacttctccctcgtcaccacaaagctcgcctcccacctcaacct

SEQ ID NO: 242108 - DNA, 360 bp, Glycine max
ggcggtggccgtgacctactgcaagcgcgggcgcggcctcatcaagatcaacggctgccccatcgagctcgtcgagccggagatcctccgctttaaggccttcgagcccatcctcctgttgggaaagagccgcttcgccggcgtcgacatgcgcatccgcgtcaagggcggcggccacacctcccagatctacgccattcgccagagcatcgccaaggcgctcgtcgcgttctaccagaagtacgttgatgaacagagtaagaaggagatcaaggacattctggtgaggtacgatcgtaccttgctcgtcgcggattccaggcgctgcgagcccaagaagtttggtgggcgtggcgcacg

SEQ ID NO: 242109 - DNA, 370 bp, Glycine max
ggatttgatttgatcatttcaatcttcaatttttttttatatatccaccaatccgcaaagtgcaaatttctaatctttcacgtattgggttcttctcttttccctcttcgtctccgatcgatccaattctcttcccatggctacgatcggacacaacaatctcaatgccaaattggttcttctcggggacatgggtgctgggaaatccagcctcgttttgcgctttgtcaagggtcaatttctcgaatttcaggaatcaacaataggggcagcgttcttttcacagacgctggcagtaaatgatgcgacagtgaagtttgagatttgggacacagcaggacaagagaggtaccatagcttggctcccatg

SEQ ID NO: 242110 - DNA, 363 bp, Glycine max
gacatcgcacatcaattattctttcgcaccttcgaaaatcaattttctgtcttctctgcgtcttcttcctctatcaatcgttttccatggctcgtaccaagcaaaccgctcgcaaatccaccggtggaaaggctcctaggaagcaactcgccaccaaggctgcaaggaaatctgcaccgacaaccggtggagtcaagaagcctcatcgctatcgccctggaactgttgctcttcgtgagatccgaaaataccaaaagagcacagagcttctgatccgcaagctccccttccagcgtcttgttcgtgaaattgcgcaagacttcaagaccgatttgaggttccagggtcacgctgttcttgcgc

SEQ ID NO: 242111 - DNA, 355 bp, Glycine max
gtacatgaaggtgaaaggtaatgttttcaagaacaagagagtcttgatggagagcattcacaagtccaaggctgagaaggcaagagagaagactttgtctgatcagtttgaggctaagcgtgcaaagaacaaggctagcagggaaaggaaacttgctcggagggaggagcgcttagcccaaggtcctattgacaagacatctactgcacccagtgccccagctgccacagcaccccagtctacccaagcgccaaagaaattcaagaagtgagtagcatatcctggaattcaaaggacgtggagtctttaatagctctggcaaaatctttagtctgctaaagtagttgtgacgaat

SEQ ID NO: 242112 - DNA, 402 bp, Glycine max
gaatttatttcttgcttgagttatgcctatttaatttccattcacttggattttttttattctaagatcgatcatcttcaatttccctatattacttgcaatattgattgaacactactagatcatgtgtataacgttgtatagctagctagctagctttctattgtctaatatacctttgtctgtgttgtaaattaaggtgcaagaagcaagtaatccctcataatacacacacacacatatatatatatataatggcggattggggtccagtggtgatagcagtggtgctgtttgtgttgctaagccctggtcttgtgtttcaattgccagggaagagcagagtggtggagtttgggaacatgcaaaccagtgcagtgtctatcttggtccacacaatca

SEQ ID NO: 242113 - DNA, 398 bp, Glycine max
ggaaacagagagtgagagagagggcaaaaccctagctttggagtcttccctcccatctcccacttcatgcaatctctgcagccatggcgagtaccaaagttcagagggttatgacccaacctattaacttgattttcaggtttcttcagaacataacgcgcattcagatttggctttttgagcagaaggatttgaggattgaaggccgaatcatcggttttgatgaatacatgaatttggttcttgatgatgctgactaagtgcacgtcaataagaaaagcagaaagacattatggatgatccttcttaaaggagacaacataaccttgatgatgaacacggggaaatgattaacactctggcacagttgtaaactccgttcctattcaacaagaaag

SEQ ID NO: 242114 - DNA, 372 bp, Glycine max
ggccgcaaacagagatgacgacccgattcaagaagaaccgcaagaagcgcggccacgtgagcgccggtcatggccgtatcggaaagcaccgtaagcaccccggcggccggggaaacgccggtggcatgcatcaccacaggatcctgttcgacaagtaccatccgggcttcttcggtaaggtgggaatgaggtacttccataagcttcgcaataaattctactcccccatcgtcaacgtcgaaaagctatggtctctcataccccaagacgcgaaggaaaaagccctaaaatcgaaggacactgcccctctaatcgacgtcacacagcacgggtacttcaaggtcctcggaaaaggtgttctgccccaaaatc

SEQ ID NO: 242115 - DNA, 410 bp, Glycine max
ccgggccgacccacgacgtccacggacgcgtgggggactttttcttttcatccatcgattaaagacttgcttccaagatggttctgctagagaagctctgggatggcgttgttgctggccctcaacctgagcgtggccttggcaagctcagaaaactcaccaccctcaaaactattgatgaaggagacagtagcaagctgcagaagacgttgtcgatgccgtcgacaccgacaaccccgatgactcccacgactccaacgacaccgggatccgcgcgtaaagctgacaacgtttggaggagcgtcttccatcctgggagcaactccgccacaaagaccatcggtgctcagatgtttgacaaaccacttcccaacactcccactgtctacgactggctgtacagtggggag

SEQ ID NO: 242116 - DNA, 364 bp, Glycine max
  unsure (1)..(364): unsure at all n locations
gattcaaactgaacaagaaagataaagcattccatagcctcccataaaaatgaagaatactatcttctctgctctctttctactttgtgccttcaccacctcatacctaccttcaaccaccgcggtggtcgataccgacggtgatattcttcagaatcctggcacatactttatcttgtccgtttttcgacccggcggcggagtagaattcgccgccactggaaacgaaacttgccctctcactgtcgtgcagactctcttcgggaggggctttccagcaatattatcgtcncggttacgaatcnctttcatcggcgaaggacaactcttcagcatcctgttccgtantgtgccatggtgcgcc

SEQ ID NO: 242117 - DNA, 405 bp, Glycine max
gggtgctgtgagtgagattacccatagatagagagcgcggcataacctaaacttacccttcttctctctgtgtgtgtgcgcatcaaacgcaaccagaagcagccatggccactgcaagaactgtgaaggacgtttctcctcatgagttcgtcaaagcttactcttctcacctcaagcgatctggcaagatggagctgccagagtggactgatattgtgaaaactgcaagatttaaggagttggctccttatgatcctgactggtactatgtcagagctgcttccatggcaagaaagatctacttgagaggaggacttggtgttggtgcctttcagaggatttatggtgggagcaagaggaatggtagccgccctcctcatttctgcaagagcagtggtgctgttg

SEQ ID NO: 242118 - DNA, 369 bp, Glycine max
ggttctagtgtgtgattgtttgttgttgtaactcgttcttcttcttttgttgttctgtgtttgtgtttgttttttctctcacctgaaaatgtcttgctgcggtggtaactgtggttgcggaagctcctgcaagtgcggcaacggctgcggaggctgcaagatgtacccagacttgagctacactgagtcagccaccaccgagaccttggtcatgggagtggcacctgttaaggctcaatttgagggtgctgaaatgggtgtgcccgctgagaacgatggctgcaaatgtggaccaaactgctcctgcaacccctgcacttgcaagtgaagtgttgggagagcaagcttcaagcagagatagcccttaat

SEQ ID NO: 242119 - DNA, 387 bp, Glycine max; identical to SEQ ID NO: 235948

SEQ ID NO: 242120 - DNA, 402 bp, Glycine max
ggcaactaagtagagaataaaatcaaatcaggagagcatgcatatgaacatgatgatgaagaaggtgtgtgggtttgcaatagtgatggtggcagtgcagcttctggtggaggtgagtcccaaggcagaggctgtgacttgtacccctgtggagctgagtccttgtttgggggcaataacttcctctcaaccaccatcaacaatttgttgccagaaggtgagggaacaaaggcaatgcctctgtggttacctcaaaaacccaagtctaaggccatatgccaattctcctggctccagaagggttgctagctcttgtggggctccctttccaacttgttaattaccttcatatcatatcatatatagtatgtaataaaccctgttggctggaaaatatatata

SEQ ID NO: 242121 - DNA, 333 bp, Glycine max
gtagatccattggagaaatttctttctccctcaccaacaaataaatgctcagaggagctacaaagaaaaataaataaattcctggagtataagaaggctggaaaaagctttaatgcagaagttcgcaacaggaaggactatcgtaaccctgacttcttactgcatgcagtgaggtaccaggatattgatcaaatagggtcttgcttcagtaaagatgtatttgaccctcatggatatgatcaaagtgacttctatgatgaactagaagctgatatgaggcgcgaaagtgagaagaaagagcaagagaagaagaaagcacagaaggttgaattt

SEQ ID NO: 242122 - DNA, 386 bp, Glycine max
ggcgtcgctccgcaccagtttcaccgcacgactatcttgttgtttggagcgatccgagaaaaactctgtagacatgttgcgtattatcatgacctccttacacgtgatgagcttcactctgagtcgttccgttacaaggaaagtgagaatggaatgctgtgggaagttgaggggaagtgggttgttaaacgagcagttgatgtagacattggtgcaaacccttctgctgagggttgaggacaagatgacggacttgatgatgcagctatgaacgttgtagacatatgttgacacattgagacttcacgagcatatcgcattcggtaagaaccactttgtcacgttcagtaatatgtttatcaagaatttgactcccaagctctatg

SEQ ID NO: 242123 - DNA, 362 bp, Glycine max
gaaacaaaaaccatcagcaacataaaggaaaaaaatagaaagaaaaatgatgctcggagaacaccatcgcgggaatccgacggtcctcgtgccaccgtggccagcccacgacgatccgacggctgagatgtactccgcgttcttaacaaacgacgtcaatgctggtgagtactctccgtaccatcttcaagaagcactaacggcgctgcagcgttttctgccgtcaaacgaaacggacgcagactcggactcctcggaggcggctcagcccgacgcggcggtggacgcgtacacgtgcgaccatttccgcatgtacgagttcaaggtccgtcgatgcgcacgtggcaagtcacacgactgga

SEQ ID NO: 242124 - DNA, 395 bp, Glycine max
ggaagtttaacggctattcctggaatctcagatatgattgatgatactgtgaactcaattgttactgacatgctccaatggcctcataggattgtggctccacttggtggcattcctgttgataccagtgaactggagcttaaaccccagggaaaacttgcactgactgttgtcaaagcaactgctttaaagaatatggaaatgattggaaagtcagatccttatgtagttgtgcatattcgaccattatttaagtataaaaccaaggttattgataacaacctgaatcctatttggaatgagaaattcgagttgattgcagaagacaaggagaaccaatcactcattcttgaggttcttgataaagacattgggcaagataagcgattgggaat

SEQ ID NO: 242125 - DNA, 399 bp, Glycine max
gcggatggagttgtcgaaagtgggggcataatcaacatgatggggacctatcaaatagcattggttgctcacagtatgaataaaccagtttatgtcgctgctgagagctacaagtttgctcgcctttaccctcttgaccaaaaggatttagcccctgcattacgccctattgattttggcgtacctattccatcgaaggttgaggttgaaaggtccgcgcgggactacacccctcctcaatacctgactctgcttttcacagatttaggtgttcttactccatctgtcgttagtgatgagctcatccagctatacttatagtaatccatccatgtatatttttccccctattttccctatcaagatcatgtatttcacatgaaacaattttgtgacaag

SEQ ID NO: 242126 - DNA, 388 bp, Glycine max
ggggtgctggtggtgcagaaagggccattttctgaatgcgctctatctatctcttccgatctggctactaaccctaacccgcttcgaaccgtggcttcctcggcctcgcaggacctctctcgaagaaaatcttcttcttcgtcttcgttttctcaacaaacttccgggtcgacccggatcgtttaccgcgaacctcggatcccatcggaatccaattttccgatctggcagcagaactggttcatcgcattgctcttcctcatggctctcggattcttcgccctcgctctcttcctcttcatcactttcgactctgacatcgctccttcttccaccgcatccgccgcttcctccgaaggcgtcgaggttacttacggcacggttctga

SEQ ID NO: 242127 - DNA, 398 bp, Glycine max
gatagctgagagagaaaggaaaggttaactaagaagcaatacttcaatggccacccttgttgttcataaccaaacttcttctgctcaagatgctgaggctctccaacaggctttcaaaggatggggggctgatgacaaggccattatagcaatactgggtcacagaaatgttcatcagaggcaagaaatcagaaaagcttatgaggagatttaccaagaggatctcatcaaacgccttgagtccgagatctctggtgactttgagagagctatgtaccggtggatgttgcagcctgcggatcgtgatgctgttttggtgaatgtggcaatcaagaatggcaccaaagaccaccatgtgattgcagagattgcttgtgtcctatcagctgaagagctct

SEQ ID NO: 242128 - DNA, 378 bp, Glycine max; identical to SEQ ID NO: 241650

SEQ ID NO: 242129 - DNA, 363 bp, Glycine max
gattcctcaagaactagggtttgcagtcactgctctgtttcaccgagtttgggcgtttagatcagaaccaaatcgtgttctcttccattggcaaacatggcaactcaaatgagcaagaagagaaagtttgttgcggacggagtgttctttgccgaactgaacgaggttctgacacgtgaattggcggaggacggttactccggcgtcgaagttagggttacgccgatgcgcaccgagatcatcatcagagccaccagaacccaagccgttctaagtgagaagggaaggagaattagggaacttacctcagtggtgcagaagaggttcaaaattcccgaaaacagcgtcgagctttatgctgag

SEQ ID NO: 242130 - DNA, 406 bp, Glycine max
  unsure (1)..(406): unsure at all n locations
gttgatcggagattccggtgtgggaaaaagtagcctactagtcagctttatttcaagttctgttgaagatctttcccccaccattggtgttgattttaagatcaaaacgctcacagtgggtggcaagagattgaaattgacgatttgggatactgctgggcaggaaaggttcaggactctaaacagttcttactatagaaaagcacaaggaatcattctcgtttatgatgtcacaaggagagaaacctttacaaacttatcagaagtgtggtctaaggaagtggaactctactcaactaatcaggattgtgtgaagatactagttggaaataaagttgatagagatactgaaagggctgtgagcanggaaagagggttagcacttgctaaagatttggggtgtttg

SEQ ID NO: 242131 - DNA, 377 bp, Glycine max
gatagctgagagagaaaggaaaggttaactaagaagcaatacttcaatggccacccttgttgttcataaccaaacttcttctgctcaagatgctgaggctctccaacaggctttcaaaggatggggggctgatgacaaggccattatagcaatactgggtcacagaaatgttcatcagaggcaagaaatcagaaaagcttatgaggagatttaccaagaggatctcatcaaacgccttgagtccgagatctctggtgactttgagagagctatgtaccggtggatgttgcagcctgcggatcgtgatgctgttttggtgaatgtggcaatcaagaatggcaccaaagactaccatgtgattgcagagattgcttgtg

SEQ ID NO: 242132 - DNA, 362 bp, Glycine max
gaacccaattaatctttgttttcaattccttatctcaataattctctttctccttcttctataactctcctctgtttactctgtttttttcacaaaacaacatggctgcatacagagaacccatgaacatgaacatgagcgacagagccccggtttctccgcagcaaccacactcgccgtggcattctccggttccgtaccttttcggtggtttagcagcgatgttgggtctcatagccttcgctctgttgatccttgcatgttcctattggaagctctccgggtacctcgaagggaacggggaaacagaacgggacctggaagctggcgaaacggaacaagaccagaaacctgcgaaaccg

SEQ ID NO: 242133 - DNA, 441 bp, Glycine max
gcgtccagcacgagtccggggccataagtaagagcaagtcgaaaagttcctctctctctcacacacacacatcccagccatgagcctcttcggtataggcagaaaccagagaacattccgcccgaaaaaaagtactccttctggaagtaagggagctcaacttcgaaaacatattgatgccacgttaggtagtggaaatctgagggaagcagtaaagctacctcctggggaggatttaaatgagtggctagctgtcaacactgttgatttcttcaatcaggtgaatctgctttatggtacccttacagagttctgtactcctgagaattgtcggacaatgtctgcaggacccaagtatgaatatagatgggcatatggtgtacacattaagaaacctagtgaggtttctgcctcaaaatatgttgaatatccaatggactg

SEQ ID NO: 242134 - DNA, 401 bp, Glycine max
ggcacaagtttgttgagatagctagaagcaataagatgaaaatgaaagtgcttgttttgtctgttgctacagttttggtagcatatgaatgccatggctcagactaccagaagttccctctccaaatgaaaactgggtttggtgggcaatacagcaatgaggtggcatgtgccagttggaggcttggcgtggaagcaaacaacgtagtcaagtggcaaactgttcctgcagcttgcggagagtacatagctgactacgttctaggagaccaatatagatcagattccaaggcagttaaccaacaagcttatttctatgctaaatccctcagactcaccaacagagatgtctttgtcttggacattgacgacactactctctctaatctccagtattttgct

SEQ ID NO: 242135 - DNA, 456 bp, Glycine max
tcccgggccgacccacacgtccacccacgcgtccgggcagccaaagaaaagaaaatcctcaattttctgagcagccaaacactctctctctgtctctcgaaaattctcagtttgcagagaaaatctgaatcatgtcgtggcaagcgtatgtcgacgatcaccttctgtgtgacatcgaaggtaaccacctcactcacgctgctatcatcggccaagacggcagcgtttgggctcagagtaccgacttccctcagttcaaacctgaggagataactgccatcatgaatgactttaatgagcctggatcacttgctccaactggattgtatctcggtggcaccaaatatatggtcatccagggtgaacccggtgctgtcattcgagggaagaagggtcctggtggtgttactgtgaagaagaccggtgcggccttgatcattggcatttatgatgaac

SEQ ID NO: 242136 - DNA, 363 bp, Glycine max
ggggattggactagcagcagcatcgacatctattcctcccggtacctgtattgtatcagaaggaacgtgatatcatgatgctgtaaagagagagagatatgagataattcacaattcctcctttatcttgtttcatagcagtgaagaaaaaaacagagaaagcatgggcgtggacttctacaagattcttcaggtagatagaagcgccaaagatgaggatctcaagaaagcatatcgaaggctagccatgaagtggcaccctgataagaaccctaacaacaagagagaggctgaagctaaattcaagcaaatctctgaagcttatgatgttttgagtgatccacagaagcgaggagtgtatga

SEQ ID NO: 242137 - DNA, 371 bp, Glycine max
gaagccttatccaccctcaatctcttccttcccaacagttccacacgttttctttactcctcaagcccttcagtgccatttttttctagaaaaaaactgtttccagttttattcaatccacaactgaaaacagaggactctgtttttgtgctgagaaaacaaaaaaatggcttccctttatgatgtgcttggtatttcagtgggtgcaagctgcatcgaaataaaggctgcttacagaaagctggcaagaacataccatcctgatgttgtggccatgaatcagaaggaaagctcagcgaaccaatttatgatgatccattcagcttactcaactttattctgaccagagaagcgagctcaatatgacagag

SEQ ID NO: 242138 - DNA, 373 bp, Glycine max
gatccaactctctaaacaacacattaacctttctcattccccatctcctcaccttattcagccactgctaatttctagggttccgaaatggacgctggcggaaagatcaagaagggcgccggaggaagaaagggcggcggccctaagaagaagccggtttcaaggtccgtcaaggccggtctccaattccccgtcggaagaattggccgttatttgaagaaaggaagatacgcccagcgtgtcggtaccggtgctcccgtttacttggccgcagttctcgagtacctagttgctgaggtgcttgagttggctgggaatgctgcacgtgacaacaagaagaacaggattattccgagacatgtgctattggctg

SEQ ID NO: 242139 - DNA, 379 bp, Glycine max
gaacccagagaaaaaaaaacatcatttgaaccaagtgaagttgagttacaagcttataaaatgggtttttcttggataagagggaagtgcattggtaagggcgcgtttggcaccgtcagcgtcgcgcttcgcaaacgcgacgatcaaactcaaaatttcgcggtgaagtccgtggatttaaaaacgggtctcccgggtcagctcgaagcgttggagaatgagattcggattctccggcgcatgtcctctccgcacgtggtaacttttctcggcgacgacgccacgtgcgagcagcggaaccttcacatggagtacatgccacgtggtacgctcgctgacctggacgctgacgtggacgaagttttagtgagacgctaca

SEQ ID NO: 242140 - DNA, 387 bp, Glycine max
  unsure (1)..(387): unsure at all n locations
ggagatggaagaagagggttctcagcagccacagttggtgcttgccgagaagctattccttctccgacaacccgttcaagacattgacaaggttcgctacaaggaggatgttttcactcacatcaaggaaaacgagatggtccctttgtacgagaccctagtcgccgattccgtgttggacttggatcgtgcccttttggacttcatgcgcgctaaaattgaagacgagctcaccaagctcgacgaaaagattgctgatgctgaggaaaacttangagagagtgaagttcgtgaggctcacttggcaaaatccttgttttttatccggattatggacaaggagaaagccttggaacatctcaagataacagaaaccaagacagttgc

SEQ ID NO: 242141 - DNA, 388 bp, Glycine max
gaacccagagaaaaaaaaacatcatttgaaccaagtgaagttgagttacaagcttataaaatgggtttttcttggataagagggaagtgcattggtaagggcgcgtttggcaccgtcagcgtcgcgcttcgcaaacgcgacgatcaaactcaaaatttcgcggtgaagtccgtggatttaaaaacgggtctcccgggtcagctcgaagcgttggagaatgagattcggattctccggcgcatgtcctctccgcacgtggtaacttttctcggcgacgacgccacgtgcgagcagcggaaccttcacatggagtacatgccacgtggtacgctcgctgacctggacgctgacgtggacgaagttttagtgagacgctacacgttgtgcc

SEQ ID NO: 242142 - DNA, 353 bp, Glycine max
ggtagctgaggatattattactcagcaaaaattcatggaagttccaatcaagtatccggcaaaactcacccttagggtggttcttacttgtatcatggcggccaccggtgggttgatttttggctatgaccatggtgtttcaggtggagtgacctccatggattccttcctgaagaagttcttcccatctgtatatgaaaaggagtctaacgtgaagccttcttcaaaccagtactgcaaattcaacagtcagatactgacactgtttacatcttccctttatctaagtgctcttgctgcgggtcttggggcatccagcataacccgaatgttgggaagacgtgcaactatga

SEQ ID NO: 242143 - DNA, 344 bp, Glycine max
ggagacagagagaatgagtacggtgggagaagggaaggtgagtagtaatggtcatggatgttgcaaatcagggccaggctatgcttccccactggaagccatttctggtcccagagagtctctcatttatgtaacctctgtctacacagggaccggaatagagaagccagactatttggcgacagtggatgtggatccaaactctccaacttattccaaagtcatccataggcttcctgttccttatttaggtgacgaattgcatcacacaggctggaattcatgcagctcttgccatggagacccctcagcagaccgacgatttctcatcgtacctgcactcg

SEQ ID NO: 242144 - DNA, 348 bp, Glycine max
ggttggattgttgctagcagctatgggatttgacaatagcactcgtttatatcttgcctctcacaaggtctatggtggagaggcaaggatttcaactttgagggaattatttcctctgatggaaggcaagaagagccttgcttcatctgaagagcgttctcagataaagggaaaagcttctctattagctgcacttgactactatgttggcttgcatagtgacatcttcatctctgcttccccaggaaatatgcacaatgcattggttggacaccggacatacttgaacttaaagactataaggccaaatatggcattgatgggtcagcttttcctgaataaaaccat

SEQ ID NO: 242145 - DNA, 348 bp, Glycine max; identical to SEQ ID NO: 236846

SEQ ID NO: 242146 - DNA, 410 bp, Glycine max
  unsure (1)..(410): unsure at all n locations
gaccgcgaaacgcacatttcactattcattctcgtttccctttcgactgtgattgtttgttaactgaacttttcgagcaaaatgtctggacgtggaaaggggggcaagggtttgggaaagggaggagcgaaacgacaccgtaaggtgttgcgcgataacattcagggaatcaccaagcctgcgattcggcgtttggctcgcaggggtggtgtgaagcgtatcagtggtctcatctacgaggagacacgtggcgtgctcaagatctttctggagaacgtgattcgtgacgccgttacctacactgagcacgctangagaaagaccgttacggcaatggatgtggtttatgctctcaagagacaaggaaagaccctctacngatttggaggctattttgttttttttttttt

SEQ ID NO: 242147 - DNA, 390 bp, Glycine max
gtcagatgggagttcagcaaccccactccattcatcaggagtcgtgagtttctttggcaagaagggcacactgcttttgcttcaaaggaggaagcagatgcagaggttcttgagattctggaattatataggcgtatatacgaagagtatttggcagttcctgtcataaagggtaagaaaagtgagcttgagaagtttgctggtggactctacactactagtgttgaggcatttattccaaacactggtcgtggtatacaaggtgcaacttctcattgtttgggccaaaattttgctaaaatgtttgagataaactttgaaaatgaaaagggagagagagcaatggtctggcagaattcatgggcctatagtactcgaactatcggtgtc

SEQ ID NO: 242148 - DNA, 388 bp, Glycine max
gaaaactctgcatcggaagaaaccctagccactctcccggcgtcacgatgcagatcttcgtgaaaaccctaacgggtaaaacgatcacgttggaggtggagtcttcggacaccatcgacaacgtgaaggccaagatccaggacaaggaaggcatccctccggaccagcagcgcctcatcttcgccgggaagcagctggaggacggccgcaccctcgccgactacaacatccagaaggagtccacgcttcacctcgtcctccgcctccgtggcggcgccaagaagcgcaagaagaagacctacaccaagcccaagaagatcaagcacaagcacaagaaggtcaagctcggcattcttcagttctacaaggtcgacgattctggaaaagt

SEQ ID NO: 242149 - DNA, 406 bp, Glycine max
ggttggggtgttctgtcaaagtccaagacggaggtggtcctccttctcttccctcaaacacagacacagacacaagaacaagtttgcaagtcatgaaagctctaattttaatcctcacgctatgcagcttctcacaagcagcaacctccatagtcagtcaaccccaacccaaagagtctttcaagctcaaccaaaccaagccacagaatgatgaggctagtagttcctgtagttacacggtgagcataaaaacaagctgcagttctcccccctacaccagagattacatcagtcttgcatttggtgatgcttatggctaccaggttcagttcctacctacggatacatttgaaaaaaaatgaatgaatccactgcaggtttatgttccaagactggacggtcctcg

SEQ ID NO: 242150 - DNA, 403 bp, Glycine max
aacccagatgtgtgttcgcatcaatactatgcagcgcattcgcatggaattaggggttttggaaaagaggatagttgccaatctcagcagttctagatccactaatgcggatatagcaaatggggtgagcttgaagttcaagctttccgcatctgctgctgtggaaggcatccatcaactctgcgagtgcatagcatacaaaatcgttttccatgaactctggcatgttatttgggatggcctttatgttggagaagttgcatctgctaggattgagccttttcttcaggagcttgagcaatacttggagattgtatcatctacagtgcatgataaagttagaacacgtgtaattgttaaagtaatgcaggcttcttttgatgggtttctgttgggtttgtta

SEQ ID NO: 242151 - DNA, 371 bp, Glycine max
gcctacaagagttaacttggtaaaaaatcctggctttgaggagggtccattccccattttcaactcaaccaatggtgttttgctcacgcctcaacaacaagatggcttctccccactccctggttggattattgagtcactcaaggctgtgaagttcattgattcaaagcatttcaatgtcccatttgggctgggagcagcggagcttgtggcatgcagggaaagtgccattgcccaaatcatcagaacagttaccaacaaagtctacaacatcacattttcagttggagatgccaaaaatgggtgtcatggatcaatgatggttgaagcatttgccgctaaagataccttcaaagttcccttcaaatctg

SEQ ID NO: 242152 - DNA, 393 bp, Glycine max
ggagcaagagtgaagagcgaagagaatggctcccaagggtttaatctttttggctgtgttatgcatcgcagcactgtcactgagtcattgtcttgcggaggataatggacttgttatgaacttctataatgaatcatgccctcaggctgaagacatcatcattgaacaagtcaagcttcactacaagcgccacacgaacactgctttctcctgtctcaaaaacatcttccatgactgtgctgttcatagttgtgatgcgtcactgttgctggactccacaagaaggagcttgtctgataaggaaacagatagaagctttgggttgagaaatttcaggtacattgagaccatcaaggaagctttggtaaaggaatgcacaagaattgtttcctg

SEQ ID NO: 242153 - DNA, 273 bp, Glycine max
ggtgccacattgtcatattttattattacctaagcttttgtcacttagaacaaatttttggtcagttttgaaaaatgggttctggaaaccaggaggtatcaatgttggtggagaatggtggtggtgggaacaacaacgtgaagggattgctgagcaaggaaatgagacatggcagaacggcacataacatgtcatcttcttcgttgcgcaagaaatctgacctaactcttctgtctaaggttcattctgacaccctcaagaatttgttggtga

SEQ ID NO: 242154 - DNA, 388 bp, Glycine max
gtagactctatagtagaagctgatgatgcccgatttgattattttgttaaaaaggttttacccagaataaatgatttagatcagggagggaccatgttgtttaccaattcttattttgaatttattcgaatccgaaattttttgaagtcacaaaatgcctccttttgtctgcttggggagtaacaatccatgtccattattatgtcattagttgaatgtgattatttgatactagtgattttttctaaattcatattaggtagttcttatgttgcattttgatttatgagtggtcttttttgttaatttaggtatacaacccaaagtgatatttctcgtgcgcgtgtttggttctatgaaggaaaaataaaaattttggtttacactg

SEQ ID NO: 242155 - DNA, 390 bp, Glycine max
ggcggtgaaggcagcgagggaagggaagcatctttagctccaatggcggatacctcaggtcgatccagggacctcgacaagctccttctccgccctggcaatctcgtcggtcccaggttcgaaccaggcgctgagttgcgagatgaccttcaggccttcgccaaagtgttggtggtaggggccggtggcttaggttgtgagttgttgaaggatttagccctctctggtttccgaaaccttgaggtcattgatatggatcgcgtagaggttactaatctcaaccgccaattcttgttcagacttgaagatgttggcaaacccaaagccgaggtagctgccaagcgtgtcatggagagaattactggtgtcgaaattgtgccccacttttgc

SEQ ID NO: 242156 - DNA, 386 bp, Glycine max
  unsure (1)..(386): unsure at all n locations
gagtggaagagtgaataagagatatcaatatattatgataatggagggatacaataagaaggttatgattgtggggatggtgttgggcatggccatgattgggatggccaatggccaatactcgttttgtcgcatgcccagcgatgggttggcggcatgcaagccgagtgtgagtggggactatcctgctgatccctccactgcttgttgctcagccattgccaaggctgatcttaaatgcttctgccgcttcaaggattcgggccttctctctatgtatggtgttgatcccaacaagtgcatggaactccctgttaagtgcaaggttgtcgactctttccactgctagattcattaganggggcactaatcaatattaactacac

SEQ ID NO: 242157 - DNA, 335 bp, Glycine max
gaagaggttgagtgtcaaacaatctttttataaattgtaggaaaacaattgattgtcatgttactaaagccttattatgttttttgaaacacagtgggaggacttttgaatgcaacatgtgggaatgctacagagctcatcatagcaatttttgctcttagcaataacaaaattgcagtggtaaagtattctttgctgggttccataatttctaaccttcttctggttcttggaacctctctattctgttgtggcattgcaaacattagaaaggagcaaaaatatgatagaagacaggcagatataaacttgcttatgctgtttgtggcattgct

SEQ ID NO: 242158 - DNA, 254 bp, Glycine max
gaatctagtggaagagtgaataagagatatcaatatattatgataatggagggatacaataagaaggttatgattgtggggatggtgttgggcatggccatgattgggatggccaatggccaatactcgttttgtcgcgtgcccagcgatgggttggcggcatgcaagccgagtgtgagtggggactatcctgctgatccctccactgcttgttgctcagccattgccaaggctgatcttaaatgcttctgccg

SEQ ID NO: 242159 - DNA, 336 bp, Glycine max
gattgaagtatagattgaacacacacatagaaacccaacagcaagaatgaagaagatgattctaaccctcttcttcaatatcattttatctctcctctccctctcccacgcctccgtggtggatttctgcgtagcagactacacaggccccaatggccccgcagggtactcatgcaagagcccagcaaaggtcacggtggacgacttcgtctactccggccttggcaccgccggcaacacctcaaacatcatcaaagccgcggtgacgccggcgttcgacgcgcaattccccggcgtcaacgggcttggaatctccattgcacgcctagacctagc

SEQ ID NO: 242160 - DNA, 348 bp, Glycine max
ggactgtcagcagcgcattatagcacaccacacaaaaaagcaaaacagagagaacaactgttactcacacacgccatgggtaaatgaatggtttttgagcaacagcagttaaaagagaaaagggattcagcgaagatgacatcggttggtgtggcaccaacttcgggtttgagagaagccagtgggcatggagcagcagctgcggatagattgccagaggagatgaacgatatgaaaattagggatgatagagaaatggaagccacagttgttgatggcaacggaacggagacaggacatatcattgtgactaccattgggggtagaaatggtcaacccaagcagact

SEQ ID NO: 242161 - DNA, 404 bp, Glycine max
gggtcgagccacgcgtccagggaaaggagagaggagaagagaagctaaagaaagaaaggagatgggagtggagaagcagttgttgaggtctggcaccggtccgaagccaattcccggtcagaacgtaaccgttcactgcactggtttcgggaagaacggtgacctttctcagaaattctggagcacaaaggatcctggccagaacccattcactttcaaaatcggccaaggttctgttatcaaaggatgggatgaaggtgtgcttggcatgcaaattggtgaagttgctcgtctccggtgctctccggattatgcttatggtgctggtggctttcctgcttggggaatacggcccaactctgtcttggaatttgaaatccaagtcttaagtgcgcaatgaaaac

SEQ ID NO: 242162 - DNA, 289 bp, Glycine max
  unsure (1)..(289): unsure at all n locations
ggagcaaaaccctaatccctatttttcttcctcagtagtgtcatttacgcttctcttctctgcagcaactatgcctaaccctaaggtcttcttcgacatgaccatcggcggtcaatctgctggccgcatcgtgatggagctctacgccgacgtcactccccgcaccgccgagaacttccgcgcgctttgcaccggcgagaagggcgtanggcggagcggcaagcccctccactacaagggctcgtccttccaccgcgtgatcccgagtttcatgtgtcaaggtggcgac

SEQ ID NO: 242163 - DNA, 380 bp, Glycine max
ggagtttcagaatttagagagagaattttattttgttttttcggttatctttattggtttctcttacatcgtttttgtaggcgctgaggaagaagctttggcagcataactttgttggggagcataaaattcaggcaagcccttgaagttggagagtattagatgggaatcttagaattttctctctagaccaaagaaatggaggtatatggaaattctatggttgcagctccttcaaatgttatttatctgtccagtattttgggccaaggcggtccaattcccggtcacagatgcaactggaaatgtgaaaatgaacatgtttgtggaaacatgttacccctgaggctaacagggctgactcacatttgtgataaaaa

SEQ ID NO: 242164 - DNA, 314 bp, Glycine max
ggcccacttttccttcttccatggtttgcctctctctctctctctctctctactctcctttcatttcagaaatcatggggaaataaacataattaatctccgaaataaacaaaacatttttcgtgacattcgatgaatgatatgaaggtgagaagtgggttgtgcgtgtggccaaatttgagacaactttgctttagaaaaggcattctatatgggtttatgcgattgttttctactccgttgaaaacgctgcgtggagctagccgctcgctgagagtggctcaattttgcagtgttgccaatatgtcttcctc

SEQ ID NO: 242165 - DNA, 383 bp, Glycine max
  unsure (1)..(383): unsure at all n locations
gactctttctccgagaacannnnnnnnnnnnaaaaaaaaatccgcgattcgctcttctcttggaaaagtgaaaaccagaagtacgaacgaaagagaagagcgatttagaagtgagagaagatggggttgtcgttcacgaagctgttcagcacgttgtttgcgaagaaggaaatgaggattctgatggtaggtctcgatgctgctggtaagacaaccatcttgtacaagctcaagcttggagaaatcgtcaccactatccccaccatcggatttaatgttgagactgcggagtacaagaacatcagcttcactgtgtgggatgttggtggtcaagaacagattccgtcaactgtggaggcattatttccagaacactcagggtc

SEQ ID NO: 242166 - DNA, 352 bp, Glycine max
  unsure (1)..(352): unsure at all n locations
agcggacccttggccggtgccaaaaaaccaacaaaagggaaggcaaaagggcaaaaattttgaccacattggccccaacacaagcctttttccacaacaagcccctaacaatccaaccaaaaccttcaacaaagcgcccaattttgaacaacanaccanaccacattgtttgcaaggcaacacagaagcaggttactgtccaagagggtgangacactactactggccttgtctctcgcaagttggccctcactgtgctcattggtgctgctgctgttggctctaaggtggcacctgctgatgcagcctatggagaagctgccaatgtgtttggaaaaccaaagacaaacac

SEQ ID NO: 242167 - DNA, 284 bp, Glycine max
gaaactagaaaggagaataaagaaatgggcgcaacgaagagtggacgagttaaacttggagcacaaggccttgaggtttcaaagttgggattctgatgtctgggtcttactggagcgtataatgagcctctcccggaacaggatggcatagctattatcaagtatgcattcagtataggaatcacattttttgataccgctgatgtttatggagccggtgctaatgaaattttgcttggaaatgctctgaagcacctacctagagaagagatccagcttccccc

SEQ ID NO: 242168 - DNA, 336 bp, Glycine max
gaaagtgcttgttttgtttgttgctacagttttggtagcatatgaatgccatggctcagactaccagaagttccctctccaaatgaaaactgggtttggtgggcaatacagcaatgaggtggcatgtgccagttggaggcttggcgtggaagcaaacaacgtagtcaagtggcaaactgttcctgcagcttgcggagagtacatagctgactacgttctaggagaccaatatagatcagattccaaaacagttaaccaacaagcttatttctatgctaaatcgctcaaactcaccaacaaagatgtctttgtcttggacgttgacgacactactct

SEQ ID NO: 242169 - DNA, 328 bp, Glycine max
gaaagtgcttgttttgtttgttgctacagttttggtagcatatgaatgccatggctcagactaccagaagttccctctcgaaatgaaaactgggtttggtgggcaatacagcaatgacgtggcatgtgccagttggaggcttggcgtggaagcaaacaacgtagtcaagtggcaaactgttcctgcagcttgcggagagtacatagctgactacgttctatgagaccaatatagatcagattccaaaacagttaaccaacaagcttatttctatgctaaatccctcaaactcaccaacaaagatgtctttggcttggaccttgacgac

SEQ ID NO: 242170 - DNA, 323 bp, Glycine max
gactactacttgatcacatcgtattctctatgctattccgattaatcaatcatagatagatccattattcatagttaaacataataactgttgtgttacatctcgtgaattgttacaactgcttaaccattttctattgcagatggcttcgtcggttctctccgcagcttcacactctgtctcatcctcatgttctctgtccaccacgcacaagggaaagcccatgattagagacaacactttgggattccacagaggacccaattccttctctagttcaaggtctaaaggtcggatctctatggctgttgcagttaacgttt

SEQ ID NO: 242171 - DNA, 308 bp, Glycine max
  unsure (1)..(308): unsure at all n locations
gagagggtgtttatttttcagtgaacgtgcacttgctgtggctgcaacacaattgacttctcttangtacttgtgggtgcaaggttatggtgtatctccatctggacgtgatcttttggtaatggctcgacccttttggaacattgagttgattccttctagaaaggtggctacgaataccaatccagatgagactgtagttgttgagcatcctgctcatattcttgcatattattctcttgcanggcaaggatcagattttccagatactgttgtgcctttggacactgccacatgcgttgatacct

SEQ ID NO: 242172 - DNA, 386 bp, Glycine max
  unsure (1)..(386): unsure at all n locations
gagcctcagcagaagcagaacgaggagaagcagaaggagcaaaagcaatggcgccgaagaagccgagaaccacgacaaggaaccctgatttggttagggggattggcaagtattcgaggtcgcagatgtaccacaagaggggcatctgggccatcaaggccaaaaacggtggcgttttgccccgccacgatcccaagcccaagcccgaggccccggcccagaagccgcccaagttctaccccgcggacgatgttaagaagcccctcgtcaacaagcacaagcccaaacccgcgaaactcagggctagcattactccagggactgtgttgatcctgcttgctgggaagttcaagggaaaaanggttgttttcctgaagcagctccca

SEQ ID NO: 242173 - DNA, 199 bp, Glycine max
aaaaggggaatgaccctgggcgaattcaataaccacaaaggattcatccttcatcgcctcctcaaggctcgttgttgcatgggtagaccctggctcaaggccttggctcgcaaatactggcaagagaagatgatttgccgcaagtgctatgcacgtctgcatcctatggctgtgaactgccgcaagattaagtacggtc

SEQ ID NO: 242174 - DNA, 327 bp, Glycine max
ggagatatttcgaatttcgatactttgatcagatccacaacactccttcatccatgacgcttggctcttcaggatccagtgtcgtggttccaaggaacttcagattgctggaggagcttgagaagggagaaaaaggaatcggagatggaacagttagctatggaatggatgatggtgacgacatttacatgcgctcttggactggaaccattattggcccctataatactgtacatgaaggaagaatttatcaattgaagttgttttgtgataaagactacccagaaaagcccccaagtgttcggtttcattcacgaatcaatatga

SEQ ID NO: 242175 - DNA, 320 bp, Glycine max
ggtagttccaccgagtaccaacaatgtcgaatcgatgtcacggaggatccgcgggaaacaagttccccatgtccctgggtctgccggtgcctgcgaccgtgaactgcgccgatgccaccggcgcgaagaaccgcaacatcatagcactgaaagggatcaatggtacgctgaaccggttgccgtcaacatgcgtcagagacactcttatggccaccgtcatgatgggacagcccgatctccgtatgaaggtgctgctcgccgtcatcgtccgccatctcatgccttggcgccaaaaggacggtgtttacatctacttcaat

SEQ ID NO: 242176 - DNA, 325 bp, Glycine max
tggggtagttccaccgattaccaacattgtccattcgacgtcattgacgatacgccgtaaacaagttccccatgtccctcggtctgcaggttgctgcgacggtgaaacgtcccgttgctaccggcgcgaaaaatcggaacatcattgcagctgaaagcgatacattggtcgacttaacggttgctgtctgctacattccgataactcttacagtggaagtataaatgggaacgctcaatctgtgtatgatggtattgctcaccactttcatttgctttctcatacctttgagccaaaatgaccgtgtagtcttcggtttcaaaca

SEQ ID NO: 242177 - DNA, 320 bp, Glycine max
gacgaaaacggcgtcgccgccgtagctcctgcaaaaacgacgcgtcgtcgcacaagactccgtcgccacaagttgagcttgtgcagcaagaaacccctgcgtcgggttccgctctgtctgcctccgacggcctgtctcgaagcttctggaaagccggggactacgttgttggtccctcctcaaagcccactcccttccaaggtcacttggaacatgctcgggtgcaccccaagtttttgcattctaatgcaacttcccataaatgggcttttggagcaattgctgagcttgtggataatgctgttgacgagattcaaaat

SEQ ID NO: 242178 - DNA, 382 bp, Glycine max
ggcacaagtttgttgagatagctagaagcaataagatgaaaatgaaagtgcttgttttgtttgttgctacagttttggtagcatatgaatgccatggctcagactaccagaagttccctctccaaatgaaaactgggtttggtgggcaatacagcaatgaggtggcatgtgccagttggaggcttggcgtggaagcaaacaacgtagtcgagtggcaaactgttcctgcagcttgcggagagtacatagctgactacgttctaggagaccaatatagatcagattccaaaacagttaaccaacaagcttaattctatgctaaaatcctcaaactcaacaagcaaaaatgtctttgtcttggacgttgacgacactactctct

SEQ ID NO: 242179 - DNA, 314 bp, Glycine max
ggttctagtgtgtgattgtttgttgttgtaactcgttcttcttcttttgttgttctgtgtttgtgtttgttttttctctcacctgaaaatgtcttgctgcggtggtaactgtggttgcggaagctcctgcaagtgcggcaacggctgcggaggctgcaagatgtacccagacttgagctacactgagtcaaccaccaccgagaccttggtcatgggagtggcacctgttaaggctcaatttgagggtgctgaaatgggtgtgcccgctgagaacgatggctgcaaatgtggaccaaactgctcctgcaacccct

SEQ ID NO: 242180 - DNA, 361 bp, Glycine max
gattgtagattgtagatccatccactcgctcgcacaggcatcacgtgagtttgttgtgatttgaatggagggaagtggacgtggcggtggcagtggcggtggttcaccttctgcacctgtgaagcaatacttgcaggaattctcgaagctttttcagtactatctggataaatccactccccatgccctctacagatggattgggactttcgtgattgcatccatctacgttctgcgtgttgtttatttgcaggggttttacattgtctcctacggcctcggaatctaccttctcaatctcttgattggctttctctcccctttggttgatccagagctcgattcctccaacgcccctatg

SEQ ID NO: 242181 - DNA, 319 bp, Glycine max
gagtggaagagtgaataagagatatcaatatattatgataatggagggatacaataagaaggttatgattgtggggatggtgttgggcatggccatgattgggatggccaatggccaatactcgttttgtcgcatgcccagcgatgggttggcggcatgcaagccgagtgtgagtggggactatcctgctgatccctccactgcttgttgctcagccattgccaaggctgatcttaaatgcttctgccgcttcaaggattcgggccttctctctatgtatggtgttgatcccaacaagtgcatggaactccctgttaag

SEQ ID NO: 242182 - DNA, 313 bp, Glycine max
ggtggtggtggtcgcggtggtggagggggatacaaccgtagccgtggccgtggaggctatggccgcggctgtggatatggcggtggcggtggcggtggctatggcggtggcagagaccgtggttatggtggtggtggtgaccgtggttactctcgtggtggtgacagtggtgatggaggctggataaactatggcttgatgtcgttgattatggtttatgattatgctcactaattttagttgtgtttgagtttgagtatctttatggttttgtgtcaccgtagttcatgtttttgaccaataaatctggttg

SEQ ID NO: 242183 - DNA, 324 bp, Glycine max
gaataccaaattttcaattcctttggataaaaaattttccccaaagctgatcgagaagccagccaggccaggagttgaagaatgggaagggggaagatcgaaatcaaaagaatcgagaacacaacaaatcggcaagtgaccttctgcaagagaagaaatgggcttctgaagaaagcttatgagctgtcagtgctgtgtgatgctgaagtttccctcatcgtcttctccagccgtggccgtctctatgagtattccaacaacaacataagatcaaccatagagaggtacaaaaaagcctgttcggatcattcaagtgcgagcact

SEQ ID NO: 242184 - DNA, 367 bp, Glycine max
gataccatagaagaagcacaaagagaagcattagcactaggagcagcaacaactagtctcagctgaaatggcctcttcagtgatggcatctgtggccctcaaacctgcccctttcactgttgagaagtcctcagtgagaggccttccctctctctcaaggaactcttcttcattcagagttgtggccagtggcaagaagatcaagactgacaaaccttatggaattaatggtggcatggctttgagggatggaactgatgcatctggcaggaaaggaaagggaaagggtgtttaccagtttgtagacaaatacggtgctaatgtcgatggttacagtcctatctacgacaccaaggactggtctcca

SEQ ID NO: 242185 - DNA, 387 bp, Glycine max
  unsure (1)..(387): unsure at all n locations
gtttcaatgtgtgattgtttggtgttgtaactccttcctgctcctttgatggtccgtgattgggtttgtttttttcctaactgaaaatgtcgtgctgcagtggtaactgtggttgctgaaactcctgcaattgcaggaactgctgctgacgctgcaagatgtacccagacttgagctacactgagtcaaccaccaatgagaccttggtcatgggagtggcacctgttaaggctcaatttgagggtgctgaaatgggtgtgcccgctgagaacgatggctgcaaatgtggaccaaactgctcctgcaacccctgcacttgcaaatgangtgttgggagagcaagcttcaagcagagataacccttaattatgaataatgataaactat

SEQ ID NO: 242186 - DNA, 337 bp, Glycine max
ggaattcctgcccctgacaaacctcaaccacttggtaccatcgctgctgcaccatggggctcagcactcatattgccaatctcttacacttacatagccatgatgggttctaaaggactcaccgatgcatcaaagatagccattttgaatgcaaactacatggcaaaacgattggagaattattacccggttcttttccgtggagtcaatggaacagttgctcatgaattcatcattgacttgagaggctttaagaatactgctggaattgagcctgaagatgttgcaaagcgcctcatggactacggttttcatgcaccaacaatgtcatggcctg

SEQ ID NO: 242187 - DNA, 318 bp, Glycine max
ggttctagtgtgtgattgtttgttgttgtaactcgttcttcttcttttgttgttctgtgtttgtgtttgttttttctctcacctgaaaatgtcttgctgcggtggtaactgtggttgcggaagctcctgcaagtgcggcaacggctgcggaggctgcaagatgtacccagacttgagctacactgagtcaaccaccaccgagaccttggtcatgggagtggcacctgttaaggctcaatttgagggtgctgaaatgggtgtgcccgctgagaacgatggctgcaaatgtggaccaaactgctccctgcaaccctgcac

SEQ ID NO: 242188 - DNA, 304 bp, Glycine max
  unsure (1)..(304): unsure at all n locations
ggagtatcaacaaagaatactcaatataatatagtgggtaacaataagcttattataataataatattgttaagctagctctaaaccaatggtaaataacgtgatctgttctccgggagattgtgaaccgtggaattgaatcgtcangaccaaacgctgggtccttgacgttttcggtgagggtgagaangcgcttaccggattttcttcaatcggtgaaccttaagtacgtgaaattgggttaccattatctgataaaccatggcatatacttgttcaccataccggttcttctcgtggtgtt

SEQ ID NO: 242189 - DNA, 392 bp, Glycine max
  unsure (1)..(392): unsure at all n locations
tatggccagtgagaaagccatggcatctcaaactgctgaggcaaagaaggacaagagggaaactgggttggccattcctaaggatttggattctgcattggctattcctggagttggaagaagcagagatcaacatccacatgtgtatagggtttctcctgaacagaggaaggctcttggctctggttcaaccaaagctttgaaggaccatatgaagtcctctgcaactgatggtaaaatgcaacagtggttccgtgaaggtcttgcanggccaatgttaagttctggcatgtgcactgaagttttccagtttgatgcttctccaagtcctggagcaatagttcctgcaacatcagtacccaatgtttccaccgaaaaacatcagaatgcta

SEQ ID NO: 242190 - DNA, 382 bp, Glycine max
ggtactcatcgtgacgaaattaacccaacagcacacagcactttccccaaatcaaatcatcgaaaccctaactcgcgattcccgatcgaaaccctaactcgcgatggcgatcttgctgggcgaaattcttcaatcgctggagctgtggctgaagctgatcaagaacccgcagcctcagccctacgtgaaccctaatctggaccccgttttgctggtgcccggtgtcggaggctccatgctgcacgccgttgacgaatccgaaggaagccgagaacgcgtctgggttcgcttcctcaacgccgagtacacgctcaagaacaagctttggtcccctttacaatccttcaaccggaaaaaccgagtccatggattcaaattcaag

SEQ ID NO: 242191 - DNA, 374 bp, Glycine max
gggacctttcattggtgctgcacttgcagcactctaccaccaggtcgtaatcagggccattcccttcaagtccaagtgattcaatcaaaccgttcatgcttaatcaagttgggaacaacaaaaaaaatcaaaacaatgtttctgggtttcggtttcatttcatcaagatgatctgtttatctttttttttttaattttaatttaaagtctttgtattttgtatgtaaagatgtaaaattatgattattaggtggtgcatgtgttgcgtcatgggccaatgttatcctctgcttttaagttggaagaggcccagctcacgtgtgatgtacggctgtgattgtgtaatttgcaaaatcaaaaaatacccccgaatt

SEQ ID NO: 242192 - DNA, 325 bp, Glycine max
gtgggcggatgcgagaaggagagagaatgggggatcggagtaatgattaacatgggctctgttgactgtagaacgctgctgccgaaaaccttcccgatccccaaggtaagtgagtaagcggtggctgataatggtggagaaggcgaacggtacgaaggatgaggtggttaccatacagtacaccattaagctccacaaacgcctccatggctgcacatttaagaagaaagctcctaaagctattaaggagataaggaaatttgcccaaaaggccatggggaccaatgatgtgagggtggatgtgaagttgaacaagtttgtctgg

SEQ ID NO: 242193 - DNA, 339 bp, Glycine max
  unsure (1)..(339): unsure at all n locations
aaaaggggtcccctcccctgggaattttagcaagcaaaaacctaaccgggcctggcttccttggtcctgtttttcaacaaggatgagtcccaagttgaacacgcacttgttgtcaaagttatgggtcgtactggatccagangacaagttgaccaggttagagtgaagtttttggatgatcagaaccgtcacatcatgaggaatgtgaaaggacctgtgagagaaggagacattctcaccctactcgagtctgaaagggaagcaagaagattgcgctagatggtctcttttttttggcttgcctccaaattcgaacanaagcaatatttttcttgatat

SEQ ID NO: 242194 - DNA, 360 bp, Glycine max
cgatgcgacaggacgacagaaggggagcctcagcagaagcagaacgaggagaagcagaaggagcaaaagcaatggcgccgaagaagccgagaaccacgacaaggaaccctgatttggttagggggattggcaagtattcgaggtcgcagatgtaccacaagaggggcatctgggccatcaaggccaaaaacggtggcgttttgccccgccacgatcccaagcccaagcccgaggccccggcccagaagccgcccaagttctaccccgcggacgatgttaagaagcccctcgtcaacaagcacaagcccaaacccgcgaaactcaaggctatcattactccacagactgtgttgatcctgc

SEQ ID NO: 242195 - DNA, 322 bp, Glycine max
tgctactacaacagtaggtgttgagattggccaaggtttgagagatgtagatattaaaaattatattaaagttgagaaggtcccaggtgggcagctggaggattcgagagttctcaagggagtcatgataaacaaagatgtggttgcccctggcaaaatgaggagaaggattgttaacccacacatcattcttcttgattctccccttgagtataaaaagggtgaaaaccaaacaaatgccgaactgctcaaagaagaagactggagtctcttattgaagatggaagaagaatatattgaggagctatgcatgcagatattg

SEQ ID NO: 242196 - DNA, 359 bp, Glycine max
gaagaagaagaagaagaagatggcattgggtgttcctgctcttcccctgacatacgtggctcacgttctggcacttgttgccagcatcttggtcgtgctctgggtcctcaattttaggggtggcttggcttgggattctgataacaaggccctcatcttcaatcttcatccagttcttattgtcattggcttactagtccttgggggtgaagctattataagctacaaagcattacccctgaagaaggaagtgaagaaattgatacaccttgttttccatgccatcgcattaatacttggaatagttggaatttatactgccttcaagtatcacaatgaaagtgggattgccaatctct

SEQ ID NO: 242197 - DNA, 357 bp, Glycine max
cagggggcaatgaaaaagttcaggatcttctcctcctgaatgtcacgcctccgtcacttggtttggagactgccggtggtgtgatgactgtcctgatcgctacgaacactacaattccaacaaatatcgaacaagttttctcaacatactctgataactagcctgatgtgcttatccaagtctttgaaggtgaaagatcatagaccatagataacactttgttgggcaaatttgaactatctggcattcctcctgcacacaacggtgttcctcagattacagtgtgctttgacattgatgccaatggtatcttgaatgtctctgccgaatattaaaccactggccatataagtcaga

SEQ ID NO: 242198 - DNA, 344 bp, Glycine max
  unsure (1)..(344): unsure at all n locations
ggtattgagcgtggagaaagagaaagatgatgaggttaaggtggagtttagtcgtaacggtcacgttcgctgttttgctgttttggattggatcgctgcaagttcaagcctctaattctgtttccgccttcgttcaaaacgccatctactccaacagaatcgccgttttctccaaatcctattgcccctactgtttgcgcgccaaacgcttgcttgctgagttcaatgagaaaccgtttgtggtggagctcgatttgcgagatgatgggtatcaaattcagagtgttcttctggatttgataggtagaaggacagtcncgcaagtatttgtgaatggcaaacat

SEQ ID NO: 242199 - DNA, 364 bp, Glycine max
gaaggaaattgaggacaaaatctcagggaggaacaagaattcaagccttaggaaccgtaatggaccggcgcagatgccctacactgtgcttcttcctaccagtggggaaggccttactttcagaggaattcccaacagcatctctatctaatgagagtgtgtggtgtgtggtgtgtggttttctttccttccaacgtacctctcattgacaaataaacgtgcaaacttatgtgtgcataattttcttatgtatgcttaagttttgtaattggatgctatctagtttttcatatctaatagggtgttgtgtcagtttttatgtatagtattgtgctcctatcatgttcacccgtatcatgttcac

SEQ ID NO: 242200 - DNA, 330 bp, Glycine max
ggtctcgtggaagtgtaagcaagcaaaaccctagcggcgcctgctttctttgttcgtgttttgcatcaggatggagtctcaggtgaagcacgcacttgttgtcaaagttatgggtcctactggatccagaggacaagtgacccaggttagagtgaagtttttggatgatcagaaccgtcacatcatgaggaatgtgaaaggacctgtgagagaaggagacattctcaccctactcgagtctgaaagggaagcaagaagattgcgctagatggtctcttttttttggcttgcctccaaattcgatcaaaagcaatatttttcttgatattt

SEQ ID NO: 242201 - DNA, 413 bp, Glycine max
  unsure (1)..(413): unsure at all n locations
gcaaaagaccaccaaaagggggaagttaaaaaggttgaaacccttgggccggggaaaattgattgtgataatttcaaggcaaaccttctaatccacaagaataagccggaaattataaatgtgaacataggtacaacggtaaaaggggctgtggatgatcttgatctggtcatacngaaacttgaagaagctggattttcacatgacagattctacatccattgtgatggggctttgtttggtctcatgatgcctttcgtgaaactagctccaaaagttacttttaagaagcctattggcagtgttaatgtttctgggcacaaatttgtanggtgtcccatgccttgtggtgtgcagataacaagattggagtatgtaaatgctcttgccagggatgtggaataccttgcttc

SEQ ID NO: 242202 - DNA, 387 bp, Glycine max
gcacaagtttgttgagatagctagaagcaataagatgaaaatgaaagtgcttgttttgtttgttgctacagttttggtagcatatgaatgccatggctcagactaccagaagttccctctccaaatgaaaactgggtttggtgggcaatacagcaatgaggtggcatgtgccagttggaggcttggcgtggaagcaaacaacgtagtcaagtggcaaactgttcctgcagcttgcggagagtacatagctgactacgttctaggagaccaatatagattagattccaaaacagttaaccaacaagcttatttctatgctaaatccctcaaactcaccaacaaagatgtctttgtcctggacgttgacgacgctactctctctaaact

SEQ ID NO: 242203 - DNA, 391 bp, Glycine max
gacttgtcattgttatttttgttttacattttgtcacaatctgtgactgttcgagttatccgaggcccctcttttatatggtcgttaataaaaatggcttcgacccttttcacaaagatgcttttgggccaacgattgatccatccttattcgttcctcactcaccatccacatattctctcttctctattcagtaaacggctgttttgtagacgaactgtcccagtctcagcctatacatcccaaaacatcaaaacaactggttaggctccttgtatggcttcatcctcagttggtagaaaggctacatattcaacacaatctgtatcaacaaatgagccagttgtatctgtagattggctttatgataacctgaatgagccagatatca

SEQ ID NO: 242204 - DNA, 394 bp, Glycine max
gacatgacaatgtccaaaacagtaccttgccgtttattatcagacaagacagcattacccttctagtgttatcatcgacattcttaactcttaagaactgattcaccaacgacccctctgaatttcagaaactatcaatgaagggggaagtgcagcttcagcctccagcggttatgcaaaaccctagtgattcggaccctttgctccataaccaggaggaggaggaggaggatgagtcaccgggaagctctggtgagatcaagaatgaggaagaagacgttgaggctggattactcgcctgttgtcgaatttgcctcgaaagcgattccgacccagatgatgaattgatatctccgtgcatgtgcaaagggaaccaacagtttgtccatcgttc

SEQ ID NO: 242205 - DNA, 256 bp, Glycine max
ggaatccagaagccgaagctagggcaccaccagtgttcaacagagtacaagcagatgctgtttttgttcttcgcctctgagactaagcgtgtcgccaatgccttacgagattgaattcgccgctgcggtaaaagcagccactctcgctgctcgtctctgcaagaacgtacagaaggctcttcagcaatccgatgtgcagtcgccgtctgacctaagtcctgtcacaatgtgctgattatggttcacaagcattggt

SEQ ID NO: 242206 - DNA, 313 bp, Glycine max
ggagttgagaggatcgtgagaggggcagtagccgagattccgtgagttgcaacaatgaagacgattctttccaccgagaccatgaacatcccggacggcgtgagcatcaaagttcatgccaaggtcatcgaagttgagggcccccgcggaaaattggtgcgagacttcaagcatttgaatctcgattttcagctcactactgacgaaaacggtcacagaaagctgaaaatcgacgcgtggtttggttctcggaaaacatccgccgccattcgcaccgccctgagccacgtggagagtcgtatcaccggcgtca

SEQ ID NO: 242207 - DNA, 330 bp, Glycine max
gatcgaaaccgaaaatgaaaacccagagtgcttctctcctctgtctttttctctctcttgctatccttttggctaattttactgctgcaagtgcaactccaagaagcgcagtgccaagccaccatgtttcaacattcatcagaagcctttttccttccacttttctctttggaattggttcttctgcttatcaggcagaacgtagaccaagtgtacatgggagaggacgaagcatatgggacacctacactagacagcatactgaaaagatttcggatcatagcaccggtgacatgggagccgatttttagcatcgatatcatggtgacc

SEQ ID NO: 242208 - DNA, 382 bp, Glycine max
ggtacctgtgacaagaacttcgtccgagaaatattcagaattttgcatgccaacctcagatttgtctaaggagcaatgtaaatcatgtgatatttgcagacgatcagagtttattttaaaccctatcctagtgtgctctggttgcaaggtttcggtgcacttggattgttatcgtagtgtgaaagaaacaacaggtccgtggtactgtgagttatgtgaagatttgtcctctagaagctctggggcagctgctatcaatttctgggagaagtctgttgtagaatgtgctctctgtggtggtactactggtgcttttagaaagtcttctgatggtcaatgggttcatgccttctgtgctgagtgggtttttgagtctacattc

SEQ ID NO: 242209 - DNA, 349 bp, Glycine max
gacagaagatatcttgactgggttcaagatgcatgctcgtggttggatttccatctattgcatgccacctcgcccagcatttaagggttctgctcctatcaatctttctgatcgtctcaatcaggtgcttcggtgggccttgggttcaattgagatctttctaagcaggcattgtcccttgtggtatggctacaatgggaagttgaagcctctgatgaggcttgcttatattaacaccattgtctacccgtttacctcaatcccattgattgcttactgtacgcttcctgcattttgtcttctcacaaataaatttattattcctgagataagcaactttgccagtatg

SEQ ID NO: 242210 - DNA, 371 bp, Glycine max; identical to SEQ ID NO: 237876

SEQ ID NO: 242211 - DNA, 386 bp, Glycine max
tagtggagtgagtactgagaatggagtttcaacggtgtacggaacgttgcattgctagtatactctctcgcactacgccggcggacgtgtgtaggttttccgtcgtatcaaagattttccgttcggccgctgaatcggacgctgtgtggaaacgttttctcccttccgattaccattccatcatttcccagtctccttcgcctctcaactatccttccaagaaggagctctatctcgctctctcggatcgccctatcatcatcgatcagggtaaaaagagctttcaattggagaaaaagagtgggaagaagtgttacatgcttgctgctagagctctcagcattatttggggtgacactgagcaatactggaactggacaatcgat

SEQ ID NO: 242212 - DNA, 382 bp, Glycine max
ggttcaatggtagttaatggtggtaacccttccttcttcgtcgtaaccttcttcttttgttgtttgtgtgtttgttttttctctcacctgaaaatgtcttgctgcggtggtaactgtggttgcggaagcgcctgcaagtgcggcaacggctgcggaggctgcaagatgtacccagacttgagctacaccgagtcaaccaccaccgagaccttggtcatgggagtggcaccagttaaggctcaattcgagagtgctgaaatgggtgttccgctgagaacgatggctgcaaatgtggagctaactgcacctgcaaaccctgcacttgcaagtgaggtgttggagagctaaagcttcaagcagaaatggcccttagaaataatga

SEQ ID NO: 242213 - DNA, 370 bp, Glycine max
gacaaagcttacaaatgagaaagttccctttttcaatgctcctatatatctgaaaaacatgactcagattggaaaagttgatgaaatatttggtcccatcaatgaagcttacttctcaattaagatgatggaagggattgttgctacttcttattcatctggcgacaagttttatattgatccaaggaaactgttgcctcttgcaagatttcttccacaacccaagggacaatcagctggtagaggtggaggtggaggaggtcgtggtggaggtagaggtggccgtggaggcggtggttttcgtggaaggggcggtccaaggggtgggagaggtggtcctcctaagggtggtggtttcaagggaaagggg

SEQ ID NO: 242214 - DNA, 380 bp, Glycine max
gagggtattgcactgcggctgctacttcggctccatcttctccgatctcctcaaactctatcagcgcagaaccaagccgctatcaccatggggaagacacatggaatgggagctgcccgcaagctgaagtctcaccgtaggagacaaaggtgggctgacacgtcatacaaaaagtctcatctgggaaatgaatggaagaagccttttgctggttcatcccatgccaagggtattgttcttgaaaagattggtattgaggctaagcagcccaactctgccattcgaaaatgtgccatggttcaactcatcaaaaatgggaagaagattgctgcatttgtgccaaatgacggttgcttaaattatactgaatagaatgatga

SEQ ID NO: 242215 - DNA, 394 bp, Glycine max
tgatataagcagagttcgaggtgttgttgacaatgctaaccgaattttagcgattaacaaggactttggttcatttgacaaatacatttgggattttgtcaatcacaaacccatctccacgcaatacaagttcggccacaagataccagtgaagacatcaaagtcagagagcataagcaaagacatgatcagaaggggctttaggtgtgtaggtccaacggtgcttcattcatttatgcaagcagctggactcaccaatgaccacttaatcacttgccatagacacttgcagtgcaccttattggcatcaaccccccattgtaccacagagcactttctatagttccaatttcaattgagaaaaatgagattgatccagatgagatcaagacca

SEQ ID NO: 242216 - DNA, 345 bp, Glycine max
gacagcagataatagggtcaaagaataaaaaggaccgttagctgacacaaccatcatggccacctgtgctattcagcaatcatcagtcagtggtcaaactgtccagaagcagctcaatgagttcgtccgcaagagcggtggctccggcataagtctcatgaacattagctgtaccgtctcgagtgctccacagagcatttggtacggcgctgacagttccatggtactgggtccattgctggaccagtttctatcacatctgaccggagaattccctggtgactacggatgggacactgctggattattagatgatccggacatctttgccaggaaacggggaac

SEQ ID NO: 242217 - DNA, 361 bp, Glycine max
  unsure (1)..(361): unsure at all n locations
gactccaagccctcaccaaatacttctcttggcattttgtgtcccttctctctttctcttgctcgatattttccaaccaaaataattattaaaaccaaacgtagctaggcaccactgctangaatggcaagtgagatatttcttgcccttctgatcacaacctttgtggttgcagcctctgctggtaacttcaaccgagactttgagataacatggggtgatggtcgtgccaaaatcctcaatagtggggaacttctcaccttgtccctagacaagacctctggctctggatttcgttctaagaatgagtacttgtttggaaaaattgacatgcaactaaaactcgtgcctggtaactctg

SEQ ID NO: 242218 - DNA, 351 bp, Glycine max
ggaagtaaaaaacacagagcaaccaccgatcaaagaagaaacaaccgcaacagatctccgtttctcgccaaacaaacacaaaatggctgccttcagcggcgacgaaaccgcacctttctttggcttcctcggagccgccgctgccctcgttttttcctgtatgggagcggcgtacggaaccgcgaagagcggcgtcggggttgcgtcgatgggcgtgatgaggccggagctggtgatgaaatcgatcgtgccggttgtgatggctggtgtgttgggtatctacggtttgatcattgcggttatcataagtacgggcattaaccctaaggccaaatcgtactatctttttga

SEQ ID NO: 242219 - DNA, 394 bp, Glycine max
gagagagaagagggtcagagtgagaaagagagagagagagagagaaactgagagaaattcgcaaaccctaatttcggaaagatcggcgatggctgcctccaaggatcgcgagaacttcgtctacatcgccaagctcgccgaacaggccgagcgatacgaagagatggtggaatcaatgaagaacgttgcgaatctcgacgttgaactgactgtggaggagcggaatttactttctgttgggtacaagaatgtgattggtgctcggagagcatcgtggaggatcctgtcttccattgagcaaaaggaagaaacaaaagggaacgagttgaatgcgaagcggattaaggagtacaggcagaaggttgaattggagctttcaaacatctgtaatgat

SEQ ID NO: 242220 - DNA, 416 bp, Glycine max
cttcgttacggtgccaaaaaacaacaaaagggggcgccccccgaaaaaaaccaaatattttggaaaaaaaaaaaggggaaaaaaaaatgacaacaagtttcaaaagaaacaggaaaaaaaaaggtcacgtcagccccggacacggccgtatcggaaagcaccgcaagcatcccggaggtcgcggtaacgccggtggcatgcatcaccaccgtatcctcttcgacaagtaccatcctggtttcttcgggaaggtaggcatgcgctacttccacaaacttcgcaacaaattctacaatccgatcatcaacatcgacaagctgtggtccctcctcgcccaggaggccaaagacaaggccaccgccgacaaggcacccttgctcgatgtcacccaattcggttactttaaagttttgggt

SEQ ID NO: 242221 - DNA, 393 bp, Glycine max
  unsure (1)..(393): unsure at all n locations
gagaacangngcanagaagaaaaaaacccttagccaacacaaccatcatggccacctctgctattcagcaatcagcattcactggtcaaactgctctgaagcagctcaatgagttcgtccgcaagaccggtggcgccggcaaaggtcgcactaacatgcgccgcaccgtcaagagtgctcctcagagcatttggtatggccctgaccgtcccaagtacttgggtccattctcggagcagattccatcatacctgaccggagaattccctggtgactacggatgggacactgctggattatcagctgacccggaaaccttcgccaggaaccgggagctggaggtgattcacagcagatgggcaatgcttggtgcccttggctgcaccttcccag

SEQ ID NO: 242222 - DNA, 373 bp, Glycine max
agagcaactcaacacaacgaaccaaaccaacaatgtcgcagccgcagcctcagtcgcagccgcaacacgggcaagcggcgctggagcaggtgcagtgcttcggtcgcaagaagacggcggtggccgtgacctactgcaagcgcgggcgcggcctcatcaagatcaacggctgccccatcgagctcgtcgagccggagatcctccgctttaaggccttcgagcccatcctcctgttgggaaagagccgcttcgccggcgtcgacatgcgcatccgcgtcaagggcggcggccacacctcccagatctacgccattcgccagagcatcgccaaggcgctcgtcgcgttctaccagaagtacgttgatgaacagag

SEQ ID NO: 242223 - DNA, 293 bp, Glycine max
tcgggacgctgctgaagagtccactgacatcattcccctggatgtcgctctactcactctcggaattgaaactgttggtggagtcatgacaaagttcattcgcagaaatcctgttatcgcaagcatggagtctcacgtgttcagcaccctatcatgaccattagactacagtcgccattcatgttttcgaaagcgacacgagtctcacacaggacatgccgccttcgtgggaattttgatatgtccagacatcctcgatccccatcgggtacgcctcacattgaactgacctt

SEQ ID NO: 242224 - DNA, 389 bp, Glycine max
ggcagtggagagagagtgttagcactaaaaatgtcgaagttaatcttcgtgttccttgcactaattcctcttcgctgcatctccttctcgccagagaaaccctcagatcggcgcatcctcgttttgctcgatgacttcgccatcaaatcctctcactctctcttcttcaactccctcaaatctcgcggcttcgatctccaattccacgtcgccgacgaccccaaaattgcgctccagagatacggccagtacctctacgacgctctaattctcttttcccccaccattgaacgttttggaggattcattgacgcggctgcaattttggattttgttgattcgggtcatgatttgatcgttgctgctgatagcaatgcatctgaattaat

SEQ ID NO: 242225 - DNA, 381 bp, Glycine max
aatatagaaggatggattttgaagaattttgtgcagctgcattgagtgtgcatcaacttgaagctcttgatcgttgggaacaacatgcccgctgtgcatatgaactctttgataaagacggaaacagggctattgtcattgaagagcttgcttcagaacttggacttggtccctctatccctgtgcatgtcgttcttcatgattggatacgccatactgatggcaagttaagttatcttgggtttgtcaaattattacacggtgtgtctagccgaagccttgcaaaggttcaatgaaatttacagcagaagccctatggatatgctgaattttctctgccttgtgtggcccgaccatagttgaatttgtaactagtgcgtg

SEQ ID NO: 242226 - DNA, 380 bp, Glycine max
gctctggaagaggagtgaagcagcagagggaggagcggcattaaaaatgcagatcttcgtgaaaaccctaacggggaagaccataaccctcgaggtcgaaagcagcgacaccattgacaatgtcaaggctaagattcaagacaaggaaggcatccctccggatcagcagcgtttgattttcgccggaaagcaacttgaagatggaaggaccttggccgattacaacatccagaaggaatcaacccttcaccttgtcctcaggcttcgtggtggcatcatcgagccttccctcatggctttggctcgcaaatacaaccaggacaagatgatttgccgcaaatgctatgctcgtctgcaccctaaggctgtgaactgccgta

SEQ ID NO: 242227 - DNA, 391 bp, Glycine max
gttcaagcaggggcgctagaggagtcgacagccaacctctggaggatctgaatgacgtgtacagctatcatagaggaccagacggtgaacacgatgcccctcgacgtctaaagcatcgacacgattgacaatgtcagggctaagatgcaagacctggaaggcatcactccggatcatcagcatttgattttcgccggtaagcaacttgaacatggaacgaccttggccgagtacaagtatccagaaggaatcaacccttcaccttgtcctcaggcttcgtggtagcatcatcgatccttccctcatggctttggctcacacatacaaccacgacaccattatttgccgcaaatgctatgctcgtctgcagcctacggctgttaactgccgt

SEQ ID NO: 242228 - DNA, 393 bp, Glycine max
  unsure (1)..(393): unsure at all n locations
aaaagacgacagaaagggaatcccaatttgaatggttaacaaagggttccccggccggctcctcaacttccccccgttccaaccaaacccaaaccaaaatcatgggcaaaaaatcctccgccggtggcaactggaaatgcaatgggaccactgaagaggtaaagaaaattgttactactttgaatgacgctaaagtccctggagaagatgtcgtagaagttgttgtgagccctccttttgtgttccttcctgttgtanaaagtttgctgcgccctgattcccatgtttcggcacaaaactgttgggttcgcaaaagtggtgcttataccggtgaggttagtgctgaaatgcttgttaatttgggaattccttgggttattattggtcactctg

SEQ ID NO: 242229 - DNA, 371 bp, Glycine max
gcacaagaggaaggaggtcgtgcattgcgttccgcgtcaggagattgatgttctcacgagcagaacacagggatttctggctcttttcacaggggatccgggtgaaattcgtgcggaggtcagatagcacatttacagcagtgtggcagagtggagagaagaaggataggcagagattgtgcctggtgtacgtttcattgattaggtgcacatgcctgacagagagtgcttttcttgccttaatctggctctggagaataagatagctctcagaatagttgtggctagcacccgaaggatcagcactatcaggggaagtaattacatatccccacagtggattcccaatgatctgcttgaacgactcgtca

SEQ ID NO: 242230 - DNA, 393 bp, Glycine max
gaaaaggcattataatggtaacttccaaatttgaattgttcaatttcaatttcttccgcaaaagttgcaactacttcctcagaaaaaaagtttctaagttaaggaaatccagagagacaaaaatggccggtgacggtgcagctacatgcatagacatcctccttgccatcattctccctcctcttggagtctttctcaaatatggctgccaggtggagttctggatttgtttggtgctgaccctttttggttatatacctggaattatctatgctgtctatgctatcaccaagtgatcaccctttaactttgtgtggacaataaacaaatgtcatgggcgattctgtctttcaactcagatattagtgtctctttaatatatcgccaatgttg

SEQ ID NO: 242231 - DNA, 380 bp, Glycine max
gacaacaaaatttgccaattgccatttcaatcctcagtttctttcttcaacgtttccatcatacacagatcccaatcctctctcaagccctaatttcccctcatttccatggccacagaagagcccactgtcgcggtggaacccgctcccgaacctgcctccgccgatcctcccccggaggagaaggaggagaccaaacctgaagccaaggctaagaaaaccaaggagcccaaacctaaaaaggtttccagacctcgcaaccctcccactcatccttcctacgaagagatggttaaagatgcaattacctcgctgaaggagaaaaccggttcgagccaatacgcgattgcgaagttcatcgaggagaagcacaagcagct

SEQ ID NO: 242232 - DNA, 367 bp, Glycine max
gacttctaagctgtgataagaaaacatatacagaattgatatggaaggatatctgagtattagccaatgaagtgacccgtgcgtggatccccaccctatctgtgccttatcctatgtatgcgaattaaatgaagcaagcattcataaagcataactgaagaaaactaaggaaggaaggaaggaaggaagagtgagcgtgaaagatgccttcggcgaggctttcagggtcaccaaggctcgacgttgctattgacatgggcaatccatttctcaatctcactgttgatggtttccttaagatcggagctgtcgcagccacgcgatcagctgctgaagatacttatcatattatccgaaacgggaatat

SEQ ID NO: 242233 - DNA, 314 bp, Glycine max
ggggatcatgttgctgtaaaagcgcttccggctatgagtacacgcccttcatatgatgatggctccaatgctgagatgggcatattggggctatgccgacagaggcatattgttaggttcttgggctcctgttcaaatcatgacataaaccttctggtctatcagtacatgcccaatggaactttacgcgatgttctacatggaaagaacgggggtcattttcatttggatccacagtattcaattgcggtggaggcagtcatggtgctttgccactagtcttatgaatgtactccagtcactgtctatcgtga

SEQ ID NO: 242234 - DNA, 387 bp, Glycine max
  unsure (1)..(387): unsure at all n locations
ggcacaagtttgttgagatagctagaagcaataagatgaaaatgaaagtgcttgttttgtttgttgctacagttttggtagcatatgaatgccatggctcagactaccagaagttccctctccaaatgaaaactgggtttggtgggcaatacagcaatgaggtggcatgtgccagttggaggcttggcgtggaagcaaacaacgtagtcaagtggcaaactgttcctgcagcttgcggagagtacatagctgactacgttctangagaccaatatagatcagattccaaaacagttaaccaacaagcttatttctatgctaaatccctcaaactcaccaacaaagatgtctttgtcttggacgttgacgacactactctctctaatc

SEQ ID NO: 242235 - DNA, 375 bp, Glycine max
ttgggacagctatccctcatcagcatgctgctgagtatcctgcttgctttgtttatgtctaccgatttggaagtatatgtgcgccatggctcaggctaccgcacatatcctcaccgtgttagttcggcatttggagggcaatgaagcaatgaggtggcatgtgccaattaaacgcgtggtgtagaagcaaacaccatagtcaagtggcagactgttcctgcatcttgcctcgaatgcgtagctgactactttctacgagaccaatactgctcagattccataacagttacccaacaagcttatttctatgccaaatccctcaaactcaccatcacttatgtctttgtcttggacgttcacgaccctactctctct

SEQ ID NO: 242236 - DNA, 357 bp, Glycine max
gacacaccgtttgtccaattcttaactcaacttctgctacccactctcttcttccaagtccaaccacgcttttctctacagtcatgggcaaggtcaagatcggaatcaacggatttggaagaattggccgtttggttgccagagtcgctctgcaaagagacgatgtggagctcgttgccgttaacgacccttttcattaccaccgattacatgacatgcatgtttaaatacgacagtgttcacggacactggaagcatcacgatgtcaccgttaaggacgagaagactcttctcttcggtgacaagccagtcactgtttttggacacaggaaccctgaagagatcccattggggtca

SEQ ID NO: 242237 - DNA, 420 bp, Glycine max
ccaagccttcgatcaggcggcaaaagacgaacacatgggaactggaaggtgtgaccccaagagcccgcatggcaacgccgtcggttcaacggccgtcgtcgccgtcgtcacgccggacaaaatcgtcgtctcaaactgcggcgactcccgcgccgtcctctgccgcaacggcgtcgccatccctctctcctccgatcacaagccggatcgacccgacgaattactccgagtccaatccaagggagggcgcgtgatttactgggacggtccgagagtgcttggtgtgttagcaatgtctcgagccatacgtgacaattatctgaagccgtacgtgatttcagaaccggaggtgatggtgacggagcggacggatgaggacgagtgtttgatactggcgagtgatgggttgtgggatgtggt

SEQ ID NO: 242238 - DNA, 360 bp, Glycine max
gacaacttcaatcccccttttgctttacaaaattcaattttccaaatcaaaaccctaactccgttcgaagcaccaaatcgtgatggcaccaaaggcagagaagaagccagcagagaagaagcctgtggaggagaagaaatcgacggtgggagacaatgctccggcggagaagaagccaaaggccggaaagaagcttccgaaggaaggaggcgccggcggagaaggtaagaagaagaagagaaacaagaagagcgtggagacatacaagatcgacatcttcaaggttctgaagcaggttcaccctgacattggtatctcaagcaaggccatgggaatcatgaacagcttcatcaacgacat

SEQ ID NO: 242239 - DNA, 339 bp, Glycine max
gatgttaggaaggctctttatgcagccaaaatctgtagttatgcacagggaatgaatttgatccgtgcaaagagtattgaaaagggttgggatttgaagttgggtgaactggcccggatttggaaagggggttgcattattagagcaatattcttagacagaatcaagcaggcatatgaaagaaaccctaatctggcaaaccttcttgtggatccagagtttgcaaaggaaataattgattaccaatctgcctggaggagagttgtttgccttgctatcaattctggtattagcactccaggtatgtctgctagtcttgcttagtttgacacttacaga

SEQ ID NO: 242240 - DNA, 367 bp, Glycine max
gatgttaagaaggctctttatgcagccaaaatctgtagttatgcacagggaatgaatttgatccgtgcaaacagtattgagcggggttgggatttgaagttgggtgaactggcccggatttggaaagggggttgcattattagagcaatattcttagacagaatcaagcaggcatatgaaagaaaccctaatctggcaaaccttcttgtggatccagagtttgcacaggaaatcattgattaccaatctgcctgcaggagagttgtttgccttgctatcaattctggtattagcactccaggtatgtctgctaatcttgcttattttgacacttacagaaaggaacagtttccagccaatttggtgc

SEQ ID NO: 242241 - DNA, 359 bp, Glycine max
  unsure (1)..(359): unsure at all n locations
gaaccattcaaacgcacactctctctcaccaaagccttcctagaacgaaaaaaaaaagaagagcaattttccctcaccaaagaagaagaagcaaacaatggccgatcaacttaccgatgaacagatctccgagttcaaggaagccttcagcttgttcgacaaggacggcgatggttgcatcacaaccaaggagcttggaactgttatgcgttcattggggcaaaacccaactgaggcagagctccaggacatgatcaatgaagtggatgctgatgggaatggtaccattgacttccctgagttcctaaatctcatggccaggaagatgaaggacactgattctgaggangagctgaaag

SEQ ID NO: 242242 - DNA, 362 bp, Glycine max
ggatcctttgtattctattcttcaagattcaggtactgcgtttcggaagcagacacagatggctcgtacgaagcaaaccgctcgtaagtccacaggaggaaaggctcctaggaagcagcttgcaaccaaggctgcacgtaagtctgcaccaactactggtggtgtgaagaagccccaccgttatcgtcctggtaccgttgctcttcgtgagattaggaaataccagaagagtaccgagcttttgatccggaagctccccttccagaggctggttcgtgaaattgctcaggacttcaagactgatctgcgtttccagagccacgccgtgcttgcattgcaagaagctgctgaggcataccttg

SEQ ID NO: 242243 - DNA, 472 bp, Glycine max
ctccatagcgcgtcaggtactagtcaggccgggccgaccacgcgtccatacagctgcgagaagacgacagaagggaaaagctcgtagttggaccttgggttgggtcgatcggtccgcctccggtgtgcaccggtcggctcgtcccttctgccggcgatgcgctcctgtccttaactggccgggtcgtgcctccggtgccgttactttgaagaaattagagtgctcaaagcaagcctacgctctgtatacattagcatgggataacaccacaggattctgatcctattgtgttggccttcgggatcggagtaatgattaacagggacagtcgggggcattcgtatttcatagtcagaggtgaaattcttggatttatgaaagacgaacaactgcgaaagcatttgccaaggatgttttcattaatcaagaacgaaagttgggggctccaagacgatcagataccgtctagtct

SEQ ID NO: 242244 - DNA, 395 bp, Glycine max
  unsure (1)..(395): unsure at all n locations
gagggtttcattggggttaattcggtacccgcctagccattgatttggaaaagtcaaagcttcaaagatgagtaagcttcagagtgatgctcttagagaagctatctcaggaatcatgactgattccaaggaaaagaacaggaaatttgtggagaccattgaactccaaattgggctgaaaaactatgatccccagaaggacaagcgttttagtggctctgttaagttgcctcacattcctcgccccaagatgaagatttgtatgcttggagatgcccaacacgttgaagaggctgagaagataggattggactacatggatgttgaggccttgaagaagcttaacanaaacaagaaattggtgaaaaaactagccaaaaaatatcatgcctttt

SEQ ID NO: 242245 - DNA, 403 bp, Glycine max
cccatgcatccagttggaagagaccacaagaaggggtcaaggaagggatttacaaggaaaatgtggaaattccaagctataagaccaccattatgatgcttggcgatggaattgatgtctctttcataactggtaacagaagcgtcagtgatggctggaccactttcagatctgcaactctagctgtttctggtgatggttttctggcacgtgatatagccattgagaacagtgcagggccagagaagcatcaagcagtggcattgagagtaaatgcagacttagcagccttttacaggtgtgcaatttatggctaccaagacactctatatgttcactcctttagacaattctatagagagtgtgacatttatggcaccatagattacatatttgggaatgc

SEQ ID NO: 242246 - DNA, 200 bp, Glycine max
cctactcaacatcattcagcaatgcatgtggcagatgccacccagaaccgactccttctcccgcctcagcgatcagggaagtgccccaaggacacattgaaggctaggggtgtgtgctgatgttctaggacttgtgaatgttgttgttgggtcccctgtcgctagcaagtgttgtgcattgcttaaaggtttggctgatt

SEQ ID NO: 242247 - DNA, 263 bp, Glycine max
ggattaaacgaagttaacggattgagagtggatgcctgttctgtggagaccaatatggtagttattgacattgaagagggtacaaagactacagcagaaaagatatgcaagtagatggaagaacgtagtatccttgtgatgcacgagagttcatcaagaatgagagttgttctccatcagcagatatcagcaagtgatgtgcaatacgccttgtcatgcgttcagcaagctgtagctgttaaaggagtacagaaggaaatggg

SEQ ID NO: 242248 - DNA, 347 bp, Glycine max
ggctcattgagctaatattagggtttgtagtgtatcaagaacaagcatcactggcgccgaagatcacacgtaaggttagcagataccctgaagtgataatgggaatccgatagtactcgaggtcacacatgtatcacaagacgggtatttgggctatccaggccaattcaggtggcgttttaactcgccactatcctataaccaagcctgaaactctcgctaaaatagcgcccaaattttaccctgtccgatgatatcacgaagccccttgtcatcaagcacacaccgataatagctaagctcagggctagcagtactcacgggatagtgttgactcttcctgccgg

SEQ ID NO: 242249 - DNA, 343 bp, Glycine max
gggaccagaggaagaagaaaacaccaattatcgtttaaccagtacagttatgctgactctgactacaaataatgagtcatccggaactttcagtttatctggttcaattaggcgtcagatgagtatgaagctatcagttgctgatgggcatctttgtaacatgggaaggatgattgaagaaatggagagtaagctgaggaactcactagatcaggtatactttgggaaaacaagagaaatggtttgcacactgagaccaccatctgaagtggcacagttgagaatgcctgatagcgcctgagagctgatgtgccgttacttggtgtagcagagagaaatttac

SEQ ID NO: 242250 - DNA, 389 bp, Glycine max
gacggtgactgcggaaatggttgcatgtattgcagtcgagtccctgtcgatcctggagaagatgcatgcaagaggctatgtgcatggagatgtaaaaccagagaactttttacttggtcaaccttctacaccacaagaaaagaaattgtttcttgtagaccttggattagcaacaaagtggagagacacctccagtgggcagcatgttgaatatgatcaacgtcctgatatgtttagagggactgttcgatatgccagtgttcatgctcatttgggaagaactgctagtagaagggatgatcttgaatctcttgcatatacactcatcttccttcataaaggcaagttaccctggcaaggttatcagggtgatcataaatccttccttg

SEQ ID NO: 242251 - DNA, 194 bp, Glycine max
cgcatactatttcatgtggaagttgtctgctctagcagagcatggttccctacgcacagagaacgcatgggcaggaagatggtggacttggctagggacgtgggcaagggtggaacaccttcgtaccgtcgacacctgcatgttgttgttaccggttaggatgatgaggatagatacattgacatcccccaaat

SEQ ID NO: 242252 - DNA, 257 bp, Glycine max
ggatgctttgtattctattcttcaagattcaggtactgcgtttcggaagcagacacagatggctcgtaggaggcaaactgctcgtgagtcgagacgcggaaaggcgccgaggaagcagcgtgcaatcaaggctgcaggtaagtgcgcagcagctactggtggtgtgaggaagcccgagggttatcgtcgtgggaccgttgggcgtcgtgagattaggaagtaccatgaggggtacggagcttttggtccgggagctc

SEQ ID NO: 242253 - DNA, 368 bp, Glycine max
gggtgtgggcatatatccaaccaaaaagggacattttgcgggtatttgtgagtgtgtgagagagagagcgagcagtttcagacacagagagaggggtttgggattggagggattgacgctgcgtctcttcctcttctctttcgatccatccctcattcctaatcctccattccaaccacctcatcctcacactcacatatacacatatctgaacgcgtatcgtccctcctatggcttcaaagcgcatcctcaaggagctcaaggacttgcagacagacccaccatcttcttgcagcgctggtccagtagctgaggacatgttccactggcaagctacaataatgggtcctgctgatagtccttatgct

SEQ ID NO: 242254 - DNA, 224 bp, Glycine max
agggacagcgaaacagagagtgatttcagtgggtgatcggtgttcacttgatctcatcataatcgtcagcgtcaattgaagaagatgccgatcagaaacatcgccgtcggaaggcctgaagaggcgactcaccccgacacgttgaaggcggctttggctgagttcatctcaaccttcatcttcgtgttcgccggctcaggctccggcatcgcctacaacaagct

SEQ ID NO: 242255 - DNA, 378 bp, Glycine max
ggaaacaaaagaaaacaaaagattaggttttgtgatgtcgggcatggagaggcttcagaggatgttcgcgggtgcaggtggagcgctgggccatcccccaccggattcccccaccctcgattcctccgagcaggtctacatctcctccctcgcccttctcaaaatgctcaaacacggaagagctggggtacccatggaagtgatgggtctgatgttgggggagttcgtggatgagtacaccgttcgcgttgtggatgtgtttgcgatgcctcagagtgggaccggtgttagcgttgaagctgttgatcatgtttttcagactaatatgcttgatatgttgaagcaaactggaaggccggagatggttgtggggtggta

SEQ ID NO: 242256 - DNA, 251 bp, Glycine max
gatcttcctaattgtgatatacttccaaggatttcgtgtggttttgcctgtgagatgagggaatgcccgtggaccgcaggggtcgtagcgaatcaagttagtttagagctcgagcaatgggcattagtcgtcagtctgcgcttgtttccagtccctaagtcatttctcagcgtctacagagaaggtacagtgcaaacttcattgtggatctagtgggcagatggaaggattctgactatggaggtggtcag

SEQ ID NO: 242257 - DNA, 161 bp, Glycine max
ggaagaagcagagggaatagcagcattaagaatgcagatcttcgtgaaaactctgacaaggaagactagtaagcctcggagtcgagagcagcgaaggatcgacgatagtcaagagcgagggttcaagagaaggaggggagtcgggccgggtgagcagcgtg

SEQ ID NO: 242258 - DNA, 375 bp, Glycine max
ggcagtttcagattttcttttccttcactttcccgagaaaaaaataacacttttcactttcttcacgacgttctcacttcgatatggctcgtacgaagcaaaccgctcgcaagtccaccggtggcaaggcgccacgtaagcagctcgccaccaaggccgctcggaagtccgctccggcgaccggaggagtgaagaagccccaccgcttcaggccgggaaccgtggcgctgagggaaatcagaaagtaccagaagagcaccgagcttctcatcaggaagcttccatttcagaggctcgtgagagaaatcgcgcaggatttcaagaccgatttgcgtttccagagcagcgctgtttccgcgcttcaggaggctgctg

SEQ ID NO: 242259 - DNA, 238 bp, Glycine max
ggcagtttcaaattttcttttccttcactttcccgagaaaaaaataacacttttcactttcttcactacgttctcacttcgatatggctcgtacgaagcaaagcgctcgcaagtccaccggtggcaaggcgccacgtaagcagctcaccagcaaggccgctcggaagtccgctccggcgactggaggagtgaagaatgcccaccgcgtcaagccgggaatcgtagcgctgaaggaaat

SEQ ID NO: 242260 - DNA, 390 bp, Glycine max
gagagcgggtaccaccgacgatggatactggcggaggcggagcatcacctacagccgccatgtcgcggtggaagttcgcggcgtggcggcagtaccagcacctgctggacaaatcgacgccgcacgtcggacgccggtggctggggttcgcggcggtggcgcttttgtacttgctgcgcgtgtactttgtggaaggcttctacgtcgtttcgtacggcttaggcgtatacatcctcaaccttctgatagggttcctctcccctcaggtggaccccgagaccgcgattctcaacgccgacgaccctatactctccatcgccgcctcagacgagtttcgccccttcgttcgccgcctccccgagttcaagttctggtactcaatcacgaaag

SEQ ID NO: 242261 - DNA, 134 bp, Glycine max
gagaaatgtcaggtgttggccctctttctcaagattgggaacccgtcgtcctccgcaagaaggctcccactgccgccgccaagaaggatgggaacgccgtcaacgcgcgccgccgctccggcgccgagatcgaa

SEQ ID NO: 242262 - DNA, 251 bp, Glycine max
cgggaaattgaacctcggtagcctctatttggaggctggaactcaacctttgtcagtggttatgggctagcattgcaagacttcctttttgaatctccggatggcagaagatacctcaatttgtacttgtggttgccctcgtgtcgagagagtggttgcgaggttgagtggaaacattgtgctgcgagagggatgcaaggatgccagagttgagagtccttttgaagtgaagcaacatctagagatgaagt

SEQ ID NO: 242263 - DNA, 382 bp, Glycine max; identical to SEQ ID NO: 236163

SEQ ID NO: 242264 - DNA, 167 bp, Glycine max
ggtttatagatctttgcgaaggaggtttacaacgctcaagcagggatgcagaacgaggacagacagatcactgcgctttacattcctaggaactgctccgccacaggcagattgattagcacgcgcgaccatgcttcggtgcagatgaacagtgggcatgtgggtga

SEQ ID NO: 242265 - DNA, 182 bp, Glycine max
ggccattgttgttgcgattatcatccgcagctgcttttattcgcaccgcaaacagtgagccatggccgtcggaaagaacaggcgcatctccaaggggaagaagggtgggaggaagaaggcagctgatccctttgccaggaaggattggtatgacattaaggctccttctgtttttcaagtga

SEQ ID NO: 242266 - DNA, 380 bp, Glycine max
gaactaagtagagaataaaatcaaatcaggagagcatgcatatgaacatgatgatgaagaaggtgtgtgggtttgcaatagtgatggtggcagtgcagcttctggtggaggtgagtcccaaggcagaggctgtgacttgtacccctgtggagctgagtccttgtttgggggcaataacttcctctcaaccaccatcaacaatttgttgccagaaggtgagggaacaaaggcaatgcctctgtggttacctcaaaaacccaagtctaaggccatatgccaattctcctgactccagaagggttgctagctcttgtggggttccctttccaacttgttaattaccttcatatcatatcatatatagtatgtaataaaccctg

SEQ ID NO: 242267 - DNA, 399 bp, Glycine max
gggtgaataactaaagcgtgatcctaaagcagaagagcagcgaaatcagtgaaccacgaagatgaagatgaagacgaagacgccattgaagcagctgaagctcgcggttcctgctcaggaaacccccatcacgtctttcctgactgcaagtggaacattccatgatggagatctactcttgaatcagaaagggttgcgtcttatctctgaagaaaaagaatcacggccttcagatggtaaggaactggaatttgacttcttgctggacgatcttgagaccatcaaagtaattggaaaaggcagtggtggtgtggtacaacttgttcgccataagtgggttggaagattgtttgctttaaaggttattcagatgaatatacaagaggatattcgaaaaca

SEQ ID NO: 242268 - DNA, 313 bp, Glycine max
gaattcacttgcggctgcagcagagaagcactcagcagtcgtcggttgtcgaagatccgccttctctgaattgtaaggatgtcgctcggagaaactgcttgttcatacgcagctctcatccttcatgacgatggcatcagtgtgactgccggacaaaatgagcaccttggttggaactgcaaaggttcaagtagatacctattgggcaagcttatttggtaaacttgctgagaagaaaaatcttggcgatttgatagccaatgcaccaagcggtggtgcaccagttgctgttgcagctgcccctggttgctgc

SEQ ID NO: 242269 - DNA, 207 bp, Glycine max
ggagtcgaaatggctgaagcagagagtgtgcagattcctcaagtcaaacttgggactcaaggccttgtggtttcaaagttagggttggggtgtatgaggcttaggtggggctataatgatccacgtccggaggaggaagggagatctgttagtaagcatgcgttcagcgaaggaatcactttttttgagacatctgatgtctagggg

SEQ ID NO: 242270 - DNA, 359 bp, Glycine max
ggagtcgaaatggctgaagcagagagtgtgcagattcctcaagtcaaacttggaactcaaggccttgtggtttcaaagttagggttggggtgtatgacccttagtggacgctataatgatccacttcctgaagaggaaggcatatctgttattaagcatgctttcagccaaggaatcactttttttgacacatctgatctctatgggctcgaccatgctaacgaatttttgctcggaaaagctttgaagcagttacctagagaaaagatccaggtagccacgaaatttggcgttgcagtagcaaaatttcctaattttcaaatcaaagggacaccggagtatgtgccgtcgtgttgtga

SEQ ID NO: 242271 - DNA, 394 bp, Glycine max
  unsure (1)..(394): unsure at all n locations
gcaggaactatggttaggccttccataacaactaatgagattgataaagcagtgcaccagatgataattgatgctggtgcttatccctcaccccttggctatggtggatttccgaaaagcgtgtgcacatcagttaatgagtgcatgtgccatggaatacctgattctcggcagttacagaatggtgatattattaacattgatgtgacagtctacctggatggatatcacggagacacgtcaaagacatttttttgtggggaagtcagtgatgaactgaaaaatcttgtcaaggtaactgaagaatgcctggagaagggaatagctgcgtgcaaggacggtgctctctttangaaaattggaaagagaatcagtgagcatgctgaaaagtatg

SEQ ID NO: 242272 - DNA, 254 bp, Glycine max
gtggattagttcaccatccatgcaggagttcttctgagatacgttccattaacggctaagcgcatgacgggaatagtctcaagaggagggtctattcatgcagagtggtgcttagcttagcacacagagaattttgcttatgagcactgggatgagatagttgagatctgcagtcagtaggatgtgggcctatccattggggatggggtaagagctggatccatcgatgatgcgagtgagggcagggcagttcg

SEQ ID NO: 242273 - DNA, 379 bp, Glycine max
gagacgccattgtcaaacccttttcacttctctctagggttttagcactctctctctctctcgttttcgttcttcctttctgcctctctcagtcacacaccttctcgatgaccaacgacaacatcgccgtgacagatctcacttctgccctcaatgaagataatcgcgccgacctagtcaatgctctcaagagcaagattcagagtctggctggggcgcattctgatgttctagagactctatccccgaatgtcaggaagcgtgttgaatctcttagagaaattcagggtaaacatgatgaactagaggcagacttcttgaatgagagagaagctcttgaagcaaagtacaaaaactgtatcagccattgtacacaaag

SEQ ID NO: 242274 - DNA, 382 bp, Glycine max
ggcgtacgcagcttcatccctaacgcgtgcatagcagagtcagagacagagacgcagccatggggcggagacctgcgaggtgttataggcaaattaagaacaagccataccccaagtcacgtttctgccgtggtgttcctgatcccaagatcaggatttatgatgttggtatgaagaagaagggtgttgatgagtttcctttctgtgtccatctggttagttgggagaaggaaaatgtttcaagtgaggccctgaaagctgctcgcattgcttgcaacaagtacatggccaaatttgctggaaaggatgctttccacttgagagtcagggtgcacccattccatgttcttaggatcaacatgatgctttcgtgtgctggtgc

SEQ ID NO: 242275 - DNA, 362 bp, Glycine max
gacctccgtagggtttggttattagggttttcgctcacccgtgtgcagtcgagcctcccgaagaaaaagcgaaaatgccgtcgcacaagacattcagaatcaagaagaagttggcgaagaagatgaggcagaacaggcccatcccctactggatccgcatgaggaccgacaacaccatcaggtacaacgcgaagcgccgtcactggcgtcgcaccaagcttggattctgaggtgcttgctttgcctcgattcagtttatccaattaattagtgttttattttcttgagccaaaaacaatgctttggagtttttaatattttgcattttattccaagactatattgtgtaaggaatttattgt

SEQ ID NO: 242276 - DNA, 378 bp, Glycine max
ggagctgagctgagaaaacccccaaccccaacctcaaccttaacctctcctcactttcttttcaaccagaactatgattaagctttttaaagtaaaggaaaaacagagagaactggcagaaaatgcgagtggcggaccacccgttaagaagcaaagtgccggcgagttgcgtcttcacaaagatataagcgagctgaatctaccaaaatcatgtaccatgcaattccccaatggcaaagatgacctgatgaactttgaagtttcaattcgacctgatgatggatattacttaggtggcacatttttgttttcctttcaagtgtctcccatctatccacatgaagcaccaaaggttaaatgcaagacaaaggtctatca

SEQ ID NO: 242277 - DNA, 123 bp, Glycine max
aggaccaagaatgaagagcgaggagaatggctcccaggggtttaatcgttttggctgtgttatgcgtctcagcactgtcactgagtcgttgtcttgcgggggataatgggggtgttagcaact

SEQ ID NO: 242278 - DNA, 371 bp, Glycine max
ggaacttctcacgttcatttctacacatccctagctctgtcgttccgtcgttgacgatggcgtttcgggtgcgaagccctgacctccgctctctctttcttctctctcttgtccatcgcttccgccaatgtcttcttcgaagagcgtttcgatgacgggtgggaaaatcgatgggttaaatcagattggaaaaaagatgagaacgtggctggggagtggaaccacacctctggtcaatggaatggagacgctaatgacaaaggtattcaaaccagtgaggattacagattctatgctatttcagctgagtaccctgaattcagcaacaagggtaagacactagtctttcaattttctgttaagcacgaaca

SEQ ID NO: 242279 - DNA, 389 bp, Glycine max
gacactaaaaaaaaaaaagaaaaaaggagaagcatactcagcgcggcggtggaagatggtggcgacggcgatcgaggaagtgcgaaccctctggattggcgatttacagtactgggtggacgagtcctatctctctcagtgcttcgcccacaacggcgaagtggtttccattaaaatcatccgcaacaagctaacgggccagcccgagggctacggcttcgtcgagttcgtctcgcacgcctcggccgaagcctttctccgaacctacaatggagcccaaatgcccggcacggagcagaccttcaggctcaattgggcctcgttcggggactccgggcccgaccactccatcttcgtcggggatctcgcccccgacgtcaccgattttc

SEQ ID NO: 242280 - DNA, 371 bp, Glycine max
ggttctagtgtgtgattgtttgttgttgtaactcgatcttcttcttttgttgttctgtgtttgtgtttgttttttctctcatctgaaaatgtcatgctgcagtggaaactgtagttgccgaagctcctgcaagtacagcaaccgctgctgacgctgcaagatgtacccagacttgagctacactgagtcaaccagcaccgataccttggtcatgggaatggcacctgttaaggctcaatttgaaggtgctgaaaagggtgtgctcgctgagaacgatagatgcaaatgtcgaccaaactgctcctgcaacccttgcacctgcaattgaggtgttgggacagcaagcttcaagcatagatatcccttaatta

SEQ ID NO: 242281 - DNA, 388 bp, Glycine max
agaacaacagaagggggatcgagcgagcagcgtttgtttgttccttcctcagtcgttgtgacagtgtgtgtgagtgagtgagtgagagcgacgatgggcgcgagcagcgaccccacccaagacggttccgacgagcagcagaagcgttcggagatctacacctacgaggccccctggcacatctacgccatgaactggagcgtccgccgcgacaagaagtatcgcctcgccatcgcctccctcttatagcagtaacctaaccgcgtggagattgtccagctcgacgactccaacggcgagattcgttccgacacctccctctccttcgagcaaccttaccctcccaccaaagccatcttcatcccccgacaagactgccaccgccccg

SEQ ID NO: 242282 - DNA, 338 bp, Glycine max
gatctctcgttcgattcttgggattccacttctcgcccgcgttctttttttgcgttttcttcttcttcttcttcttcgtcttcttcttcgtctcactttttacctaagattttgtggaacatgtccggggaagaggaagaaaacgccgcagagctcaaaattggagacgagtttttgaaggcaaagtgcttaatgaactgtgaagttttattgaatcttgagcacaaatatgagcagcttcaacagacatctgatgatcgcatgaatcaaatttctcatgtatttgaaaagtcactgcaatatgttaaacgtttcagtcgctataaaaatcctgatgc

SEQ ID NO: 242283 - DNA, 334 bp, Glycine max
gagacgatcgctcattcttctctgaaggacctacatctcagttccgatcgtaaattacttgcccctctgggaagtggtggccctcgcaatgttcgggacatttcttcatcaatggtctgagcatcactaccagtgaaaatcacgaaacttttaactcttgcagattttctcaaaactatgacgagactctgatcctatatactgctgccatgacagatatacgtggaagcattatgacctgcattacacaaacatgggaaatgatggcatcaaagcatactatgcgatgataaactctctgcatttaatgtctcacctgaaggaaagtttcttg

SEQ ID NO: 242284 - DNA, 316 bp, Glycine max
gatagagaagagagatggatccagacgcgttggcaaaggcattcgtggagcactactacagcaccttcgacaccaacaggaacggcttagcgaatctctaccaggagggttccatgctcactttcgaagggcagaagatccaaggcgcttccaacatcgttgccaagctcacctccctcccttttcagcagtgccaccactcaatctccaccgtcgactgcctgccctccggcgtcaacgccggcatgctcgtcttcgtcagcggaaaccttcagctcgccggcgaacagcacactctcaagttcagccagatgtt

SEQ ID NO: 242285 - DNA, 180 bp, Glycine max
tggggcgttccttctccttctgtccgctgcgactctctttccttccctctttttccgaatctgaattggggagcgatccaatttctctttggattgagaagaccactgaaaaggagatttctgatgatgatgacgaggaagagaataaggattacgacggttaagttgaagatctggatg

SEQ ID NO: 242286 - DNA, 353 bp, Glycine max
gctcttccgccatccgttttctttgaaacgcacagcttcaatcaccgaccacaccacccatcaacgacatgcttcctctttcccttctcaagactgcccaaggccaccctatgttggtggaactgaaaaatggggagacatataacgggcatttggttaattgcgacacatggatgaacatccatctgcgagaagtcatttgtacatctaaagacggagatagattttggaggatgcctgaatgctacatacgaggcaatacaatcaagtaccttcgagtacctgatgaggttattgataaagttcaagaagaaaccaagagccgtgcagattcgcaaacacctggtgttggg

SEQ ID NO: 242287 - DNA, 361 bp, Glycine max
gaccgcgaaacgcacatttcactattcattctcgtttccctttcgactgtgattgtttgttaactgaacttttcgagcaaaatgtctggacgtggaaaggggggcaagggtttgggaaagggaggagcgaaacgacaccgtaaggtgttgcgcgataacattcagggaatcaccaagcctgcgattcggcgtttggctcgcaagggtggtgtgaagcgtatcagtggtctcatctacgaagagacacgtggcgtgctcaagatctttctggagaacgtgattcgtgacgccgttacctacactgagcacgctaggagaaagaccgttacggcaatggatgtggtttatgctctcaagagac

SEQ ID NO: 242288 - DNA, 362 bp, Glycine max
agggagccgtagcagcggaagctctagcttgggtagcgaatcacaatggcgagaggattaaagaagcatctgaagaggcttaatgccccaaagcattggatgcttgacaaactgggtggtgcatttgctcctaagccctcatctggaccacacaaatcgagggaatgcctgccactcatactcattttgcgaaaccggctgaagtatgctctaacataccgtgaagtcattgctattctgatgcagcgacatgtccttgttgatggcaaagtcaggactgacaaaacataccctgctggttttatggatgttgtatcaatccctaaaacaaatgagaacttccgcctgctgtatgacaccaa

SEQ ID NO: 242289 - DNA, 352 bp, Glycine max
gatgaagatgatgatgaggaaggcagtggcgaggaagaggatgacgattagagaatggactgataattgcatttatgtaggttctgatgattttgatcatctgttgcaggtggtctggtcatttcctgataaacatatttcttgcttccaaaaaatatttccctgctccctccgtaaattggttgtctttccaaaacgtgaatagtttaaagaagggagttctttatttgtacttctaaatccaactgtttagttaaggggtgtttatctcttgtagagcttttagtttgatttagagttttcttgttgaaatctggttaagtttgtaacaattataattgccttaccatcc

SEQ ID NO: 242290 - DNA, 315 bp, Glycine max
ggtgctaatcttatcttatccctctaatcactctagctgttgcaaatttctactatttttcaatggcttctgcagatgttgagttccgttgctttgttggtgggcttgcttgggtcaccggcaacgatgccctcgagaaagccttttcaatctacggcgacatcgttgaatcgaaggttatcaacgaccgtgagactggaaggtccagaggattcggatttgtgaccttcgcctcagagcagtcaatgaaagatgcgatcgcaggaatgaacggccaggaccttgacggtcgtaacatcactgtcaacgaagctc

SEQ ID NO: 242291 - DNA, 374 bp, Glycine max
gacgttcacattcaggaatcgttttcttcagaaatttgccatcgttgagagaagcgtgagagccttagtcgttcaagatgagagctaagtggtagaagaagcgcatgaggaggttgaagaggaagcgccgaaagatgagacaaagatctaagtaagtgcttgagcatgagttgagatgagctttccatctgctaccaacctcatgacattttaagctgttatggctcttatgatcttgaggtctagtctctaggggagcttcactcttgacgtagtttgctttactggtcctggtcctggtccaagactattgagtgtgggttaagttgtgatgtttagtgttttgtggtatctaattaggtactggtttttat

SEQ ID NO: 242292 - DNA, 372 bp, Glycine max
ggtcgattattttcttttcttcttcctctctcttcgttctctctctctctctcttattcctttctctccgaatccacgtcctagatccgttgttctcttcccacagttctcactgaatcaggatccattttgataccaagttgctgttgaatatcgagtttgctctttagagatctgtttccctctagacaacggtctgtgtgacctgttattttagttgaatcgaagccgcgaccaaatcttcctgatctttgcctgaggtgatggcatcggcgggtgtagcacctgcttctggagtaagagatgtgaatgcaaattcggttgctgttgaaaggttgcctgatgagatgaatggcatgaaaattagggatg

SEQ ID NO: 242293 - DNA, 286 bp, Glycine max
ggaaaccgagaagaagaagatggagatgtatcagatctggagcaggagaatagcgttgggagcgttcgcgtttgttctgcttttcctatcggcctcagcagacgacgtcgttgtgctctctgaagataacttcgagaaggaagttggtcaggacagaggagctctcgttgagttctatgctccttggtgtggacactgcaaaaagcttgctccagaatatgaaaagcctggtagcagcttcaagaaagccgaatctgctttaatccgcaaggttgactgtgatgag

SEQ ID NO: 242294 - DNA, 346 bp, Glycine max
gattgtgattcatttgcacatttggaaagtgttgtttttctttttttcatttgcattgcaaagcaaaaaccttgcaaattgcaatggcttccaacaaggttattgccaccatcttggttctttctctccttgcctactcaacatcattcaccaatgcatgtggcacatgccacccaaaacctactccttctccccctcctccaccagggaagtgccccaaggacacattgaagctaggggtgtgtgctgatgttctaggacttgttaatgttgttgttggttcccctgtctctagcaagtgttgtgcattgcttgaaggtttggctgattcggaggctgcactttg

SEQ ID NO: 242295 - DNA, 317 bp, Glycine max
gacggcaacagaagaataatcgagacacagatcatagtgatcattttttaatttctcagatttatccgacgtcgctgcagatccaccaaccgttatggctgccttcagcggtgatgaaacggcaccgtttttcggcttccttggcgccgcagctgccctcgtcttctcctgtatgggagctgcctatggcacagcgaagagtggcgtgggcgtggcttccatgggtgtaatgagacctgagctggtgatgaagtcgattgttcctgttgtcatggctggagttttgggcatttatggccttattattgctgttatta

SEQ ID NO: 242296 - DNA, 378 bp, Glycine max
ggtagaatagagagctcctccaattagggtttttgtgatctgcagctacgatgggtaagggaacggggagtttcggtaagaggaggaacaagacccacaccctctgtgtgaggtgtggccgccgcagcttccacctccagaagagtcgttgctctgcgtgcgcttaccccgctgcgcgcaccaggaaatataactggagcgtgaaggccattaggagaaagaccaccggaactggaaggatgaggtacttgcgtaacgtgcctcgtagattcaagagcggcttcagagagggtaccgaagctgcacccaggaagagaggagctgctgcctctgcctaagctttgaatgaatgacagcaatttttgctgggtcagtgaa

SEQ ID NO: 242297 - DNA, 380 bp, Glycine max
aaaaggggagaagtgagtgagtaatgagaaaggagtttcaaaggttaccggaaggttgcattgctagtatactctctcgcactacgccggcggacgtgtgtacgttttccgtcgtatcaaagattttccgttcggccgctgaatcggacgctgtgtggaaacgttttctcccttccgattaccattccatcatttcccagtctccttcgcctctcaactatccttccaagaaggagctctatctcgctctctcggatcgccctatcatcatcgatcagggtaaaaagagctttcaattggagaaaaagagtgggaagaagtgttacatgcttgctgctagagctctcagcattatttggggtgacactgagcaatactgg

SEQ ID NO: 242298 - DNA, 414 bp, Glycine max
ccacgcgtaagtacagccgtcagtagagcagagaaaggggcacaagttgggtgagatatcatgaagcaagtggataagtatgcaattgcatgttaagatcggcactaaaatctgggtagcaagccataagtactctatatgcagaactaaagtaagacagaagtgcatctgctatgtcaggcagtcaatcaatggcaatgatagataggcttcaatagaagaatgcagcaatgcacatggaagccttgcagtatcaaagaatgatggaagaacaatctgagtatgatcacgacgctttgcaacttttgaatgagctcatgatgaagagggacaaagagaagctagagctagaaaaggagattgaagtatatagaaagaaggttcatgaatatgacgtaagagataagatgatga

SEQ ID NO: 242299 - DNA, 333 bp, Glycine max
gagagaagcactcatcattcttcgtttgtctaagatccgccttctctgaattgtaaaaatgtcgctcggagaaactgcttgttcatacgcagctctcatccttcatgaagatggaatcagtgtaactgccgacaagatcagcaccttgttggaaactgcaaaggttcaagtagatacctattggccaaccttatttgctaaacttgctgagaagaaaaatcttggcgatttgatagccaatgcagcaggcggtggtgcaccagttgctgttgcagctgcccctgttgctgcctcaggtggtggtggtgctgctgctgccgccccagctgctga

SEQ ID NO: 242300 - DNA, 369 bp, Glycine max
ggagtgaggagactgagaaaacagaagacaacaaaatggaagacacagtttctgcgttgaggtctttgatggtttctcactctccgccgctggatgccttagtggtgccctctgaagattatcacctgagcgaatatgtgtctgcacgagacaagcgccgcgaattcgtttccggcttcactggaagtgccggcttggcacttatgacaaagaaagaagcactgctgtggacagatggacggtattttttgcatgctgagaaagaacttagtgctgggtggaagctaatgcgaattggtgaagatcctgctgtagatatctggatggccgataatttgccaaaagaagcatccgttggggttgatccct

SEQ ID NO: 242301 - DNA, 374 bp, Glycine max
  unsure (1)..(374): unsure at all n locations
ggttaaagccagcatcatataatttcatttcccattctactcactcacacacacacacactctctttccatgggtccgtttcgtaaacccttccttgcatttctctcggttgttctatttctgggtctctatgaggcagcagcagaacagactcagactcacaagagtacttacattgtacacgtggcgaaatcggagatgcccgagagcttcgagcaccacgctgtgtggtatgagtcgtcactgaagaccgtgtctgactcggcggagatgatttacacctacgacaacgccatccacggctacgcgacgagattaancgctgaagaagccccttttgctccaacgccaaacggggattctggctgttttgc

SEQ ID NO: 242302 - DNA, 312 bp, Glycine max
gacagacaagggtttcttccgggttcacgtttcacaatcactttttgcgcttctctcactcactcactcttcttcttcctcttcgtgtggttttctttctcgaactcgaacgaagatgcgtgagattcttcacatccagggagggcaatgcgggaaccagatcggagccaagttctgggaggtggtgtgcgcggagcacgggatcgattcaacggggaggtaccaaggggacaacgagttgcaactcgagcgagtcaacgtctactacaatgaagcgagttgcggaaggttcgtgcctagggcggtgctcat

SEQ ID NO: 242303 - DNA, 309 bp, Glycine max
ggggagataagaaaatgtggcttgtgcagctctcaaccccatttctgaacggccatggccatggctccagccttctctggaaacccagttcggccgtgactcagacccactgggccccgccgagtttgctgcctcaaatcagatgcgataaccaattcactgtcggcgacatcgtccagctccataagatcaggcccatcagcaataccaacgcctttctcgcactccccgtacccaagatgtcctccaccacgcacgagccccagcccgatgagctttccattcccttcgagtcccagccccaggcct

SEQ ID NO: 242304 - DNA, 374 bp, Glycine max
actccccatcaatgcagctatgtggagttagaagtgatatcgctaatgcagcgaaggcgttgttttggcaagcaagaaagggcctctcatttgtattaacctttgaatcagagagagacagaaatgcagccattatggttgccaggaaatatgctcttgattgcaatgtcgtgctcgctgggccagatgatctagtgtaggagcaaaatttaactgactgagtttttccatcaaacgtgagatttatcagattcttggtgtgagtatacatgtgtgcttgttttgttaaagatatgatttcatctttgtgattgggtttcactaattgagttgcattgttttaagcatgttttttatttgcctaatcatgttgt

SEQ ID NO: 242305 - DNA, 371 bp, Glycine max
  unsure (1)..(371): unsure at all n locations
gagtggaagagtgaataagagatatcaatatattatgataatggagggatacaataagaaggttatgattgtggggatggtgttgggcatggccatgattgggatggccaatggccaatactcgttttgtcgcatgcccagcgatgggttggcggcatgcaagccgagtgtgagtggggactatcctgctgatccctccactgcttgttgctcagccattgccaaggctgatcttaaatgcttctgccgcttcaaggattcgggccttctctctatgtatggtgttgatcccaacaagtgcatggaactccctgttaagtgcaaggttgtcgactctttccactgctagattcattananggggcactaat

SEQ ID NO: 242306 - DNA, 378 bp, Glycine max
  unsure (1)..(378): unsure at all n locations
tggatattgaggttccacaagcggtacttcctgatactgtatttgaagcagttgttcgaattccttatgatatgcaagtgaaacaagttcttgctaatggtaaaaagggagctttgaatgtgggggctgttcttattttaccggaaggttttgaattggcaccccccgatcgtatttcgcctgagattaaagagaagataggcaatctgtcttttcaaaactatcgtcctacaaaaaaaatattcttgtggtaggccctgttcctggtcaaaaatataaagaaataacctttcctattctttcnccggattccactactaagagagatgttccattccttaaaatatcctatatacgtaggtgggaacaggggaaggg

SEQ ID NO: 242307 - DNA, 374 bp, Glycine max
gatataagcggatgtgtgagtttgcatggttggatagcaatggcagcgaagaaggtgtgtgtaacaggtgctggaggattcgtagcgtcttggcttgttaagcttcttctttccaaaggctacattgtccatggaactgtgagagaccctgaacctgctactcagaaatatgaacacttgctcaaactccacggagcttctgaaaacctcactctcttcaaggcagatctcttgaactacgaatttcttcgctcagcaatttctggatgcactgcagttttccatcttgcttgccctgtaccctcaatcagtgttcccaaccctcaaggttaaatgaattgagcccgctgtgaaaggaacaactaatgtacttg

SEQ ID NO: 242308 - DNA, 312 bp, Glycine max; identical to SEQ ID NO: 237366

SEQ ID NO: 242309 - DNA, 363 bp, Glycine max
cacccttgaggtggaaagctctgacaccatcgacaacgtcaaggccaagatccaggacaaggaaggaattcccccggatcagcaacgtctcatcttcgccggaaagcagctcgaggacggccgtaccctcgccgactacaacatccacaaggagtcaacccttcaccttgtccttcgtctccgtggtggcatgcagatcttcgtcaagaccctcactggcaaaaccataaccctagaggtcgaaagctctgacaccattgacaacgtcaaggccaagatccaggaccaggatggaatccccccagaccagcaacgtctcatcttcgccggaaagcaacttgaggactggcgcaccctcgccga

SEQ ID NO: 242310 - DNA, 364 bp, Glycine max
ggtgtgagtgaagaagcagagggagtagcggcattaaaaatgcagatcttcgtgaaaactctgacagggaagactataaccctcgaggtcgagagcagcgacaccatcgacaatgtcaaggccaagattcaagacaaggaaggcattcctccggatcagcagcgtttgattttcgccggaaagcagcttgaagatggagggaccctggccgattacaacatccagaaggaatcaacccttcatctcgtcctcaggcttcgtggtggcatcattgagccttccctcatggctttggctcgcaaatacaaccaggacaagatgatttgccgcaagtgctatgcccgtctgcatcctagggctgtga

SEQ ID NO: 242311 - DNA, 378 bp, Glycine max
gcttcgggccagaccttcaacatcggcaactacgtcgtcagggtcaaattgggaacccctggtcaacttttgttcatggtcctcgacaccagcaccgacgaggccttcgttccatgctcgggctgcacgggctgctccgacaccactttctcgcccaaagcctccaccagctatggcccattggactgctctgttccccagtgcggtcaggtccgcgggctttcgtgccccgccacaggtaccggcgcgtgctccttcaaccaatcctacgcgggctcatctttctccgccaccctagtccaagactcgttaagattagccactgatgttatccccaactactccctcggctgcgtcaacgccatcaccggcgcctct

SEQ ID NO: 242312 - DNA, 288 bp, Glycine max
ggcgtgtgtgagagagaatcagaatcagaagatgaagaaagaagacacagtgaagctgatcagttccgaaggtttcgaatttgtggtcgacaaagaagctgcaatagtttcacagaccatacataacatgcttacttctccagggagtttcgctgagaggcagcacggcgaagttacctttcctgagatcagcaccaccattctcgagaagatttgccagtacttttattggcatctccaattcgccagtgggaaggagacggaattttccattgaacctgaattaac

SEQ ID NO: 242313 - DNA, 421 bp, Glycine max
cggctcgacccacgcgtacgccgatatctcttcttttctcgatcatgttctcactcctggctctgaagttcacgccaaattgtctgcgtatcttcccaaggatgatgatcatgagatggaagtggacgctgcaacatctgcgattcaaaccccagccaaacacttgttgcccgagctagaaatctactgttacctgcttgtactcctttttctgattgatcagaaaaaatacagtgaggccaaagcttgttcctcagctagcattgtttggctgaagaacataaacaggagaactgttgatgttattgcatccagactgtatttttactattcgtatagctatgaacttatgggagatcttgctgaaattcggggcaaccttcttgcattgcaccgaattgccaccttccgccatgatgag

SEQ ID NO: 242314 - DNA, 338 bp, Glycine max
acgcgtaagttacgctgccataatatcacaataagggacaactcacaagctcacaaagcaaaaacaatgttccaatactggatccaaagggatgcaaatcaaacatcctgaatcatgggttcaacaagttagaatcagattaccccaacccacgtatctgatgaacaagcaaatcttttcgacatgcaactagccagtgcttctgtccatcaatgattctcagatcaagacttgagcttgatctgttggaaatcagtatcaatgctgagacctggtgttcaactttcccccactgacatttcttcacagctcccaatacagaaccctgatgcacccgt

SEQ ID NO: 242315 - DNA, 348 bp, Glycine max
ggacattatcttttctcttcacaaaaacaaaaacaaagtaagagttcactcaatctcactgtgttgtgagttgtgtgtgagcaccaaccaacaatggtgtctctgactccgttatgtttctttattaccttgttgatcgctggtgcagacgcagcggcggagccccaaacggtgcgttttgacaccggggggttgagcagagacacctttcccaaaggattcttattcggaacggccacgtctgcgtaccaagtggagggtatggcccacaaagacggtcgcggcccaagcatttgggacgtcttcatcaaaaaacccgggattgtcgcaaataatggcacgggagaa

SEQ ID NO: 242316 - DNA, 366 bp, Glycine max
gaggctatcaatggattgacccctcggagggccgacacttttgagaagattgataagattgggcaaggtacatacagcaatgtttacaaagctagggatactttaacggggaaaattgttgctctaaagaaggtccgttttgacaatttagagcctgagagtgtcaagttcatggccagagagattttgattctccggcgtctggatcatcccaatgtcatcaaactggaaggcttagtgacttctagaatgtcatgcagtttatatcttgtgtttgaatacatggtgcatgatttggctggacttgccacaaacccagcaatcaagttcacagagtctcaggtaaaatgttacatgcatcagtta

SEQ ID NO: 242317 - DNA, 369 bp, Glycine max
ggactcactcttgttttcgcttcgctactcatcatcctaagaagtaccaggaagaaacaaacaatgtttctcaaagtccagctgcactggaatgtcatcatcgctgctgaaaatctgcaaccggaaggtctgatgcttcatagggcaatcattgtccgccttctgagtgactttgctgtgaagaaggccaccaaagatctgggatactttcttgcagtgaccacactggagaaaataggggaatgaaaggtcagacaacatactggggatgtgctcttccctgtggtttttaatgccatcaccttcaagtttttcaagggtgagatattacagggtgttgtccacaaggttctgaagcatggagttttc

SEQ ID NO: 242318 - DNA, 378 bp, Glycine max
gagggagaattaggtttttagggtttacaccgagcagcgacacctccctcccgcagtagccatggttctcaaaactgaactatgccgattcagtggtgccaagatctaccccggaaagggcatcagatttgttcgtggtgattctcaggttttcctgtttgccaactcaaaatgtaagcggtatttccacaaccgcctgaagccctcaaagctcacctggactgctatgtacagaaagcaacacaaaaaggacattgctcaagaagctgtgaagaagaggagacgcgctgccaaaaagccttactctaggtccattgttggtgccactctggaagttatccagaaaaagagagctgagaagccagaagttcgagatgc

SEQ ID NO: 242319 - DNA, 310 bp, Glycine max
gacggcactcgttttcgttctcgttctgatctttgcgaaggaggtttacagcgctcaaccaaagatgcagaacgaggaaggacagatcactgagctttacattcctaggaagtgctccgccacaaacagattgattaccgctaaggaccatgcttcggttcagatcaacattgggcatgtggatgagaatggcgtctacaatggccatttctccacttttgccctctgcggattcatccgtgctcagggtgatgctgacagtgctctagaccgcttgtggcagaagaagaaagttgaagttaagcaacag

SEQ ID NO: 242320 - DNA, 381 bp, Glycine max
ggggggatgggatatcagtaacttgaacctggcagatgccatggtcaaggccaaagtgtttgatatcgatctgcacaaacacttcaagccttacatggaatctatggttccactccccggaatctatgaccccgatttcattgctgccaaccaacgagaccgtgccaacaacgtgatcaaaggcacatagacagaacaagttcaacatctcatcaacgacattaaggagtttaacgaaagcactaacgttgacaacgtggttgtcctgtagacagccaacacagatacgtacagcaacctacttgtgggactaaacgacaccaatggaaatctccttgtcttccttggacaggaaccatgctgacatttccccttccacct

SEQ ID NO: 242321 - DNA, 308 bp, Glycine max
ggtggaagtatttgcagaactttgtttcccaacctccattgcctccgcttctacctcgctaccatgatcattcctgagaagaaccgcaaggagatctgcaaatacctcttccaagagggagtttgctttgcgaagaaggacttcaatttggcgaagcaccctgagattgacgtgccgaatctgcaggtgattaagctgatgcagagtttcaagtctcgcgagtatgtgagggagacttttgcttggatgcactattactggttcctcaccaacgatggaatcgagtttctcagaacttaccttaacct

SEQ ID NO: 242322 - DNA, 368 bp, Glycine max
ggggtttgatcttcttgatatatgcatcaatgggccaaaagaaaagttagattccaccgttattagccagcctgctatttatgtcacaagtcttgctgctatagagctacttcgtgcacgtgaaggaggtcagcagattattgactcagttgatgttacatgtggtttaagcctgggagaatatactgctctggcatttgctggggctttcagctttgaagatggactcaagttggtcaaactgaggggagaggccatgcaggatgccgctgatgctgctagaagtgctatggttagtgtgataggactggactcagagaaggtccaacaattgtgtgatgcagccaatcaggaagttcctgaagctg

SEQ ID NO: 242323 - DNA, 379 bp, Glycine max
aggggtggaacaataacaacagaacaaagagagcaaaaccctagagcatccatcacaagcagaggaagaagatggtgaagttcctgaagcctaacaaggcagtgatcgtcctgcagggccgctacgccgggcgcatggcggtgatcgtgacgaccttcgacgagggaaccagggagcgcccctacggccactgcctcgtcgccggaataaagaagtacccaagcaaggtcatcaagaatgactccgcgaagaagaccgcgaagaaatctatggttaaggccttcgtgaagctcgtgaactaccagcacctcatgcccacgcgctacacgctcgacgtggatctaaaggacgctgttacccccgatgttctagccaccaa

SEQ ID NO: 242324 - DNA, 369 bp, Glycine max
ggagtggaagtagtagcaagtacgtcgtatatgtggttgatcttttgctggttgtttgttttgttccttccaattgtcagatctgaatcaccggactcactcttcacactcactcacactgaatggcttctgaaggcgaccatcaccaccaccaccaccaccatcaagatcacgatcatcatcatcatgatcatgatcaccatcatcatcacgatggagagggagagaccaactcatgggtaggtaaggatgggaaggtgtaccatagccacgatggtctggcgccgcattctcacgaacccatttactcccccggctacttcaccagaagagctccaccgcttctcaacagaaacttcaacgaaagag

SEQ ID NO: 242325 - DNA, 359 bp, Glycine max
ggaggaagagggtgttgtagggaatgaatatatatatatacatatatatcctcatgttcttgttttccacattcatattttccttgcgtttccctttcattttccctcactttctcgctcgccaaacgcccctctctctcctccaatggccgaccagctcaccgacgaccagatcgccgagttcaaggaggccttcagcctcttcgacaaggacggcgatggttgtattactactaaggaacttgggactgtgatgcggtcactagggcaaaacccaactgaggcagaactgcaggatatgattaatgacgttgatgctgatggcaatggaaccatcgacttcccagagttcctcaacc

SEQ ID NO: 242326 - DNA, 362 bp, Glycine max
gaagtgtgagtgatatttgagcttaaaccctagccgctcttctcttcattcttcactttggaaacaatcataatggcgttctgtaataaggttggaaatgtctcgaggcagggtgctgctcgcagcacacatgcccctgttgcgtccatgcttaattacatccgctgcatgtcttcaagcaagcttttcattggaggcctttcatatggagttgatgaccagtctcttaaggatgcattttctggctttggagatgtggttgatgcaaaagttataactgatagagacagtggaagattaaggggatttggatttgtcaacttctccaatgatgagtctgcaagttcggcactctctgcaat

SEQ ID NO: 242327 - DNA, 365 bp, Glycine max
gagagctttagattcttttcccctagattcagccacagttggaaaaaaaaaaaagttgttcgagatggcacgtacgaagcaaactgctcgtaagtccacaggaggaaaggcacctaggaagcagctcgcaaccaaggctgcacgtaagtctgcaccaactactggtggtgtgaagaagccacatcgttatcgtcctggtaccgttgctcttcgtgagattaggaaataccagaagagtaccgagcttttgatcaggaagctccccttccagaggctggttcgtgaaattgctcaggacttcaagactgaatcgcgtttccagaaccatgcggtgcttgcattgcaagaagctgctgaggcatacc

SEQ ID NO: 242328 - DNA, 404 bp, Glycine max
ggcacaagtttgttgagatagctagaagcaataagatgaaaatgaaagtgcttgttttgtttgttgctacagttttggtagcatatgaatgccatggctcagactaccagaagttccctctccaaatgaaaactgggtttggtgggcaatacagcaatgaggtggcatgtgccagttggaggcttggcgtggaagcaaacaacgtagtcaagtggcaaactgttcctgcagcttgcggagagtacatagctgactacgttctaggagaccaatatagatcagattccaaaacagttaaccaacaagcttatttctatgctaaatccctcaaactcaccaacaaagatgtctttgtcctggacgttgacgacactactctctctaatctccagtattttgctaac

SEQ ID NO: 242329 - DNA, 404 bp, Glycine max
gatcccatttgaaatcaaaatcaaaaacaccaaatcctctaattcaagtttgcaccaagttttcctgagaaaatgtctggtcgtggaaagggtggaaagggtttgggaaagggaggtgccaagaggcacaggaaggttcttcgcgacaacattcagggcattacgaaacctgcgattcgtaggttagcgagaagaggtggcgtgaagaggatcagtggtttgatctacgaggaaaccagaggggttctgaagatattcttggagaacgtgattcgcgatgctgtgacttataccgagcacgctaggaggaagacggttactgccatggatgttgtttatgctctcaagagacagggaaggaccctctatggctttggaggctaaagagttgtttttcttgttgt

SEQ ID NO: 242330 - DNA, 406 bp, Glycine max
  unsure (1)..(406): unsure at all n locations
ggggcgaggtagccagagagtgatacaatacagagtgcgttgttgctccttcgccacaactccctgccaacatgggtatctccagagattctatgcacaagaggcgtgccactggtggcaagaagaaggcatggaggaagaagagaaagtatgagcttggtcgccagcctgctaacactaagctgtcaagcaacaagacagtcaggaggatccgggttagaggtggaaatgtgaagtggagggcactgagattggatactggaaattactcctgnggaagtgaagctgtaactcgcaagactcgtatactagatgtggtttacaatgcctcaaacaacgagcttgtgcgtactcagactcttgttaaaagtgctattgttcaggttgatgctgctccattcaaaca

SEQ ID NO: 242331 - DNA, 380 bp, Glycine max
gggtctcctttgaggcatgcaattgagtcttcgtgcgccaagactctggcaccggcaccgtttgtgtcttctcctgggtcggtgtcgccgcctctggagtctccgccgatgtcgccgatgactgtgagtgttaatgagatggtggcgtctttaaggaacttgcaactggggaaggtgaagtctttgccttcttcttggaatgtcatggggccttccgggttcggatctccgagagggcccatgatccgacccggattcttcagccttccgacaaccccgacccaggcaccgactcgcggtggggtcaactactttgacaagtgggatcagagttgcgaggaggagcctgttatggaaagggtggagtctggacgaaacat

SEQ ID NO: 242332 - DNA, 405 bp, Glycine max
  unsure (1)..(405): unsure at all n locations
ggcacttcaattgcaatcaaattagttcattctctttgcgcagttccctacctctcctttcaagatgcagatcttcgtcaagaccctcaccggaaagaccatcacccttgaggtggaaagctctgacaccatcgacaacgtcaaggccaagatccaggacaaggaaggagttcccccggatcagcaacgtctcatcttcgccggaaagcagctcgaggacggccgtaccctcgccgactacaacatccagaaggagtcaacccttcaccttgtccttcgtctccgtggtggcatgcagatcttcgtcaagactctcactggcaaaaccataaccctagaggtcgaaagctctgacnacattgacaacgtcaagggcaagattcaggacaaggagggaatcccccc

SEQ ID NO: 242333 - DNA, 364 bp, Glycine max
ggctgctattgcgttgtatgtcacacccttccagctgcctattcttctgactggattctacttgatgaggcaccccatgcttcgaagcaaggtgccgcctgctccggttaatttcttccgcaggttgccttctctcacagacagcatgctgtaaatggacactcttggtgtgttcttgaatcttgaaaacttatctgctgctgccagtgtttgaatctggcattagtttttggcagtggttgtagaatcattggagctatctcactttgtgttggtttattgagtgttgactgttgatgcaactgcatacttagtgtggtaaaactccaatgtagttttcatgttaatcagcgtttgtgaactt

SEQ ID NO: 242334 - DNA, 307 bp, Glycine max
  unsure (1)..(307): unsure at all n locations
ggaagttttgtggtgtggtttagtgtcaaatggcggcgagtagaagcacttttcctctgatgaaatacttgagagtgcgcgtcgacgctcttccccgcaacactcccctaaccctcgctcccaactttttgattcgccgcttctgtgaagaggttaggggttgttttctcgacaagtctgaggtcacagatcgcgtcatttcctgcgtcaaaaacttccagaaagttgatccttcaaaggttaaccctaatgctcacttccagaatgaccttggattggatagtttagattcggtanagattgtgat

SEQ ID NO: 242335 - DNA, 336 bp, Glycine max
  unsure (1)..(336): unsure at all n locations
gacagcacagatattttctcaaagggaaatagcaccatttggcattttacaatttccaagctatggccaaatcaactgggtcacttgtctttctctctattttcactttgctcctttcttgcaacttangagggcacttaaagtttgctaatggaatgctagaccaggaaagttggtgcgtagcaaaaccttcaacaagtgatgttgcactgaatgataacattcaatatggttgcattgccttgggtgattgcaaaatgatccaaccaggtggatcctgcttctacccaaacactctgttaaaccatgcctctgttgtcatgaatcagtactatg

SEQ ID NO: 242336 - DNA, 292 bp, Glycine max
gaacttgggatgcgccactggacaccccagttttgtgatgtcctgctccttcaccaaccaggtcattgctcagcttgagttgtggaaggagaagagtaccggcaagtacgagaagaaggtttacgttttgcccaagcaccttgatgagaaggtggctgcacttcacctgggcaaacttggagctaagctgacccagcttagcaagtcccaggctgattacatcagtgtgcctgttgagggtccatacaagcctgctcactacaggtactaagtgattgagatgatcaactga

SEQ ID NO: 242337 - DNA, 331 bp, Glycine max
  unsure (1)..(331): unsure at all n locations
gaatgcaacactctcttctaattcncatctacagttagccccaaatctggggttagggtttcctctgcgtcgatggcttcgaattcgatcgacggcgacgccgttacggggtcgggactgtgcataaacgacgtgttaagggacgacgagctgcgttccattctggggcgagtggagagcgagaaggacaaggaaacgttcgggttggtctgcaagcgatggcttcggttgcagagcacggaaaggaagaaactcgccgcacgtgcgggtcnccacatgctccgaaaaatggccgataggttcacacgcttagtccaactggacctcgctc

SEQ ID NO: 242338 - DNA, 401 bp, Glycine max
gagaaggactcaattgagagagagagatggagaagccaggaggaggaggagtgttatcggcgaaggaggcattcgagaagcttgaaaaggtgggagaagggacatatgggaaggtgtacagagcaagagagaaggccacggggaagatcgtggctctgaagaagactcgtctccacgaggacgaagaaggtgtccctcccaccactctccgtgaggtttccattctgcgaatgctctctcgcgatccccatgtcgttaggttaatggatgtcaaacaaggtcagaacaaggaagggaagacagtgctctacttggtccttgagtacatggacaccgatctcaagaaatcattcgctctttccgtcaaactggacaaaccgtttcaccccaaaccatcaaaa

SEQ ID NO: 242339 - DNA, 406 bp, Glycine max
  unsure (1)..(406): unsure at all n locations
ggggcgaggtagccagagagtgatacaatacagagtgcgttgttgctccttcgccacaactccctgccaacatgggtatctccagagattctatgcacaagaggcgtgccactggtggcaagaagaaggcatggaggaagaagagaaagtatgagcttggtcgccagcctgctaacactaagctgtcaagcaacaagacagtcaggaggatccgggttagaggtggaaatgtgaagtgganggcactgagattggatactggaaattactcctgnggaagtgaagctgtaactcgcaagactcgtatactagatgtggtttacaatgcctcaaacaacgagcttgtgcgtactcagactcttgtaaaaagtgctattgttcaggttgatgctgctccattcaaaca

SEQ ID NO: 242340 - DNA, 397 bp, Glycine max
ggcagcgcttgatttgaggccaggcaagccccactcaaccaccacacctctcctcgttcacgctacccctttctgctcttcttctacctttcaagttttaaaagtataaagatggcagagacattcctatttacctcagagtcggtgaacgagggacaccctgacaagctctgcgaccaaatctccgatgctgtcctcgacgcttgcctcgagcaggacccagacagcaaagttgcctgcgaaacatgcaccaaaaccaacttggtcatggtcttcggagaaatcacgaccaaggccaacgttgactacgagaagatagtgcgtgacacctgcaagaacatcgggctcgtctcaaatgatgtgggactggatgccgacaactgcaaggtcctcgtca

SEQ ID NO: 242341 - DNA, 367 bp, Glycine max
  unsure (1)..(367): unsure at all n locations
ggctgtgaagtgtgaattaaaatatattcaattttgcgtttctctgcctaaaaggattgaaagatgggtcaagcattcggttgctaccaagtcgatcagtcaaatgtggctatcaaggagcattttggaaaatttgatgatgtcctagagcctggatgtcactgcctgccttggtgtcttgggtaccagattgctggtagtctgtcgctgcgagtgcagcaacttgatgttcgatgtgagacgaaaaccaaggacaatgtctttgtcaatgtggttgcatctgtgcaataccgagctgtgtctgagaaagcatctgatgcattctataggcttaccancacaagggagcagatccaatcatatgttt

SEQ ID NO: 242342 - DNA, 315 bp, Glycine max
ggaggttttcttagttattgttaccatttgctcccagcactgagcttaaccgagcttcacaaagatgaatcgggaaaaattgatgaagatggccggttcggttagaactgggggaaagggcaccgtgtgaagaaagaagaatgctgtccacaagacaacaaccacagatgacaaaaggcttcagagcaccctgaagagaataggggtgaatgccatcccggctattgaggaggtcaatatctttaaggatgacgtacttatccagtttctaaatcccaaagttcaagcatgcattgctggctaatacttgggttg

SEQ ID NO: 242343 - DNA, 363 bp, Glycine max
  unsure (1)..(363): unsure at all n locations
ggaaaccaacttgctgaagctgacgaattcgaggacaagatgaaggagttggagagcatttgtaaccccatcatagcaaagatgtaccaaggagctggtggtgatgcgggtggagccatggatgaggatggtcctgctgctggcagtggaagcggtgctggacccaaaattgaggaagtcgattaagcagaccaattgtcatgggttgttcttgattttgcgaagacccttttgaagtttagataataacctgtcttgtcattatgttttggatttggattttacttttctcgtttttttaatgtacttttccccgtttcaacttaacaatgatataagttgcatatggtcccganaaanaaa

SEQ ID NO: 242344 - DNA, 188 bp, Glycine max
gagacacagagtgttggcaaatgggttcaagtccaggctttcaatgatttactttggaggtccacctttgagtgagaaaatagcaccattatcctctctcatgaaaggaaaagaaagtctatataaagagtttacctggtttgagttacacaaatcaatctacggttcaagattatctaaaaatagac

SEQ ID NO: 242345 - DNA, 195 bp, Glycine max
ggtctgcgcctgatttctcagtgctctcacacactcattcggtgctccgaatctcagattctacggttagggttcccaagttctccgccgatcataaaatgagttcaactggtggttctaccaagggcggaaggggcaagcctaaagccgccaaatccgtctcctgatcgcagaaagctggtccccaattcctcg

SEQ ID NO: 242346 - DNA, 324 bp, Glycine max
  unsure (1)..(324): unsure at all n locations
gggagcaagagtgaagagcgaagagaatggctcccaagggtttaatctttttggctgtgttatgcttctcagcactgtcactgagtcgttgtcttgcggaggataatggacttgttatgaacttctacaaggaatcatgccctcaggctgaagacatcatcaaagaacaagtcaagcttctctacaagcgccacaagaacactgctttctcctggctcagaaacatcttccatgactgtgctgttcagagttgtgatgcttcactgttgctggactccacaagaaggagcttgtctgagaangaaacagatagaagctttgggt

SEQ ID NO: 242347 - DNA, 295 bp, Glycine max
gtacttttgatgtctctttacttaccattgaggagggtatctttgaggtgaaagccacagctggggacacccatcttggaggtgaggattttgataacaggatggtcaaccactttgttcaggaatttaagagaaagaacaagaaagatatcagtggcaaccccagagcacttaggaggttgaggactgcctgtgagagggcaaagagaactctatcttcaactgcccaaaccaccattgaaattgattctctctatgagggaattgatttctactccagcattactcgtgctag

SEQ ID NO: 242348 - DNA, 315 bp, Glycine max
gagtggaagagtgaataagagatatcaatatattatgataatggagggatacaataagaaggttatgattgtggggatggtgttgggcatggccatgattgggatggccaatggccaatactcgttttgtcgcatgcccagcgatgggttggcggcatgcaagccgagtgtgagtggggactatcctgctgatccctccactgcttgttgctcagccattgccaaggctgatcttaaatgcttctgccgcttcaaggattcgggccttctctctatgtatggtgttgatcccaacaagtgcatggaactccctgt

SEQ ID NO: 242349 - DNA, 401 bp, Glycine max
  unsure (1)..(401): unsure at all n locations
ggaatttggcagattcattagaagaaaatggcgggtggtggaaaggtttcgttcaaagtcacactcacctccgatccaaagttacccttcaaagtgtttagcgttccagaggcggcaccttttactgccgttctcaaattcgccgccgaagaattcaaagtcccgccccagaccagcgctatcatcaccaacgatggtgttggcataaatccccagcagagcgcaggcaatgtcttccttaagcatggttcagaactgcgcctgattccgcgtgatanggtccgtgccttttagatgttaccggtgtctgacttgatattgaccttttttgcaaaatacatgaactgttgtagcttcctaagtagagtaatcaataaatacaatgttactgatttcatata

SEQ ID NO: 242350 - DNA, 393 bp, Glycine max
  unsure (1)..(393): unsure at all n locations
gaagggatcgagcctcggaggagggaatcgcagcgaagtccactatgccgaagcaaattcacgagattaaggacttcctcctcactgctaggaggaaggatgcacgctctgtgaaaatcaagcggagcaaggatgtggtgaagttcaaggtccgttgctccaagtacctttacaccctctgtgtgtttgattctgagaaggctgataagttgaagcaatcacttcctccaggtttaagcgtgcaggatgtgtgattcttactgctgtatgaagatcaggtttttctctggattttggggattcatagttagtaaaatggttcagagaattttcgtatttgttgttacattcgggatcatgtnagtattttgtttaagacggattcaacttgct

SEQ ID NO: 242351 - DNA, 318 bp, Glycine max
ggttctagtgtgtgattgtttgttgttgtaactcgttcttcttcttttgttgttctgtgtttgtgtttgttttttctctcacctgaaaatgtcttgctgcggtggtaactgtggttgcggaagctcctgcaagtgcggcaacggctgcggaggctgcaagatgtacccagacttgagctacactgagtcaaccaccaccgagaccttggtcatgggagtggcacctgttaaggctcaatttgagggtgctgaaatgggtgtgcccgctgagaacgatggctgcaaatgtggaccaaactgctcctgcaaaccctgcac

SEQ ID NO: 242352 - DNA, 407 bp, Glycine max
gaattccaagtagccacagctctcctctcactttcatttctacatccctggctctgttccgtcgatgacgatggcgtttagggtgcgaaaccctgacctccgctttctcattcttctctctctcttgtccatcacttccgccaaggtcttcttcgaggagcgtttcgatgacggatggggaaatcgttgggttaaatcagattggaaaaaagatgagaacctggctggggagtggaaccacacctctggccaatggaatggagacgctaacgacaaaggtattcaaaccagtgaggattacagattctacgctatttcagctcagttacctgaattcagcaacaagggattagacacttatcctccaatttcctgtcaagcatgaacagaagcttgactgcggtggt

SEQ ID NO: 242353 - DNA, 407 bp, Glycine max
ggagtgaaattggaaattgcatttgaataatgatgtccatattccggcaatacaccttggacgactcattctcgcaagtgttggtgtccccgaaattcctgaaggagtaccaaatagccctgaccttcgcaagcgactacgacgacgacggcgtccccaccaacggggttttccggccaacctgggacctaaccaaggtgaccccggaatcaatcacgcgattcaaggataagaaccccgacgtggacatcaaagtcttcatcagcatcggcaaccgcggcaaccggcaacccttcaaacccctcaacaaacaaacctggattcagaaacgcaccatgtccctcaccagcctcatcaacaacctccacgtcgtccacggcatcgacgtcctctacgaccacatcgat

SEQ ID NO: 242354 - DNA, 262 bp, Glycine max
ggcggtgagacgatgggggagaacgagaaaggagagcgatggagcggagcgatgacaaatctgacggagatggcctccaatctcgactctctccagaagcttctcctcaccaaagccgtcttcgtcgacgacgacaccttctccaaagcctccctcgccgccgaccaggcccgcacaatcaagctcctccagcaacgagtccagaccttggaaagaaaggtcgacgccgccatcacaaccgccgcccgggctcgctccaaaa

SEQ ID NO: 242355 - DNA, 400 bp, Glycine max
ggtgtggcactcaaacattgtttgttgtaggaagaggaatcttgagaaatggcaggggacagcaagagcaagattctgttcatcggagggactggttacatcggaaaattcatcgtggaagccagcgccaaagctggccacccaactttccttttggtgagggagtccactctctccaaccccgcaaaatcacccctcatcgacaatttcaaaggcctcggtgtcaatcttgttttaggagatctatacgatcaccaaagtttggtgagtgctataaagcaggtcgatgtggtaatttctactgtaggacacctgcagctagctgatcaagataagatcatttctgcaattaaagaagcaggaaatgttaagaagttctatccatctgagtttggaaatg

SEQ ID NO: 242356 - DNA, 323 bp, Glycine max
gaacaccaaaacagaaccaaagttatggataccctctctcagcttagccttctttgcctttgcctttccttctttccccttttcgcttcccctgctttgctgtttcaggggttcaactgggaatcaagtaagaaaggtggttggtacaactcgctgaagaacactattcctgaccttgcaaatgctggaattacacatgtttggctccctcttccctctcaatctgtttcacctgaacgttatcttccaggaaggctatatgatcttgatgcatcaaagtttggaacaaacgatcaattgaagtccttaaatgctgctttcca

SEQ ID NO: 242357 - DNA, 323 bp, Glycine max
ggcgcattgaacgaaaattaaggtttgtaatgtaacaagaagaagcaacaatggcgccgaagataacacgtaaggttagcagaaaccctgaattgataaggggaatcggaaagtactcgaggtcgcagatgtaccacaagaggggcatttgggctatcaaggccaaaaacggtggcgttttacctcgccacgaccctaaacccaagcctgaagctcctgctgaaaaaccacccaaattttaccctgctgatgatatcaagaagccccttgtcaacaagcacaaaccgaaaccagctaagctcagggctagcattactcccggg

SEQ ID NO: 242358 - DNA, 371 bp, Glycine max
  unsure (1)..(371): unsure at all n locations
agcttgaaagatgatataatgcgcttatatcaaccagttcatttactagttggaacaccaggaagaatattagatcttgccaagaaaggtgtttgtattctgaaagattgcgctatgcttgttatggatgaagccgataagcttctgtccccagagtttcaaccatccaatagagcagctgattcattttcttcctacaacccgtcaaatcctgatgttttcagccacatttcctgttactgtaaaggatttcaaagataggtatcttcaaaagccttatgtcatcaatcttatggatgagctaactctgaagggtattacacaattttatgcattcgtggnagagagacagaaagtccactgcctaaata

SEQ ID NO: 242359 - DNA, 367 bp, Glycine max
ggagagagagagagagagagaggcacttggaatccaaaaatgagagaaatcatcagcattcacataggtcaggccgggatccaggttggcaactcctgctgggaactctactgcctggaacatggcatccagcccgatggcatgatgccaagtgactcctccttcggtgtagcccacgacgccttcaacaccttcttcagcgaaaccggatccggcaagcacgtccctcgcgccgtcttcgtcgatctcgagcccaccgtcatcgacgaagtccgttgtggcacttaccgtcaactcttccaccccgaacaactcatctccggcaaggaagatgccgccaacaactttgccagaggccactacaccg

SEQ ID NO: 242360 - DNA, 330 bp, Glycine max
gcaagagttgagcccctagtcaacatgggtcagatcagcagggtgactgtacccatgaatctttcccttgctgtagttgcagagcttgatgatctaactgtcggtggtctcattaacggctatggtatagaaggaagctcccacaaatatggtttgttcgctgatactgttgtggcctatgaaattattttggctgatggcactcttgtgagagccaccaaggacaatgagtactctgatctatactatgccattccgtggtctcagggaacactcggccttcttgttgctgctgagatcaggcttatacccgttaaggagtacatgaag

SEQ ID NO: 242361 - DNA, 242 bp, Glycine max
atggagcttgatacatgatataatgcacttatatcaaccatttcatttaccaatctggcacaccaggaataatattacatcttgccagcacaggtgtttgtattctgaaacaattcgctatgcttgttatctgataagccgaataacttctgtccccatagtttcaaccatctatacatcacctgattcaatttcttcctacaacccctcaaatcttgatcttttcacccatatttcctgtt

SEQ ID NO: 242362 - DNA, 296 bp, Glycine max
agggataaagttgttgacttccactggaatgcatatgatccatggacgattgttagtgtgtctgatgactgtgaaagtactggaagaaggggaacgttgcaaatatggcgcaagaatgaatttatttacaaaccaaaagataaaggtttgggccaacctgagaaattccaatctcaagttgttgcgtgttcctctaagactggaaaattgatatatctcttgcgcaaaattaatttataataatagcgctgttgtataaaatttaacatttgctgtatatgtcacaggacatttta

SEQ ID NO: 242363 - DNA, 404 bp, Glycine max
  unsure (1)..(404): unsure at all n locations
gaatttttcctcgtgagtgtcactcttgaagacattccaaatcatggaaccattcactttgtttgcaactcatgggtttacaatgcaaaaagttacaaaagggatcgcattttctttgctaataagacatatcttccaaatgaaactccaactccactagtgaagtacagaaaagaagaattggaaaatctaagaggagatggaaaaggagagcgcaaggaatatgataggatctatgattatgatgtctataatgatttgggtaacccagacaagagcaatgatctagctcgtcctgttcttggagggtctaatgcctatccatatcctcgcaggggaagaactggtagaaaaccaacaacanaagactctaagagtgagtctacatccagcagcacctacat

SEQ ID NO: 242364 - DNA, 392 bp, Glycine max
ggttctagtgtatgtgattgttgtgactcgttcttcttcgtcgttatcttcttcttttgttgtttgtgtgtttgttttttctctcacctgaaaatgtcttgctgcggtggtaactgtggttgcggaagcgcctgcaagtgcggcaacggctgcggaagctgcaagatgtacccagacttgagctacaccgagtcaaccaccaccgagaccttggtcatgggagtggcaccagttaaggctcaattcgagagtgctgaaatgggtgttcccgctgagaacgatggctgcaaatgtggagctaactgcacctgcaacccctgcacttgcaagttaggttgttggagagctaaagcctcaagcagaaaatggccctagaaataatgataaaaact

SEQ ID NO: 242365 - DNA, 392 bp, Glycine max
  unsure (1)..(392): unsure at all n locations
gacccgagctagggtttctgagtttatgtggttgcgcctctgcctgtaagagtgaaaaaaccttctcttttccttctctcaagtctcaagagatttcatcatggctccaaagaaggacaaggctccaccaccttcctccaagcccgccaaatctggcggtggcaagcagaagaagaagaagtggagcaagggaaagcaaaaggagaaggtgaataacatggtgctgtttgatcagggcacctatgataagctcctttctgaagctcccaaattcaagctcatcactccttccattctttctgatcgtttgaggattaatggatcacttgcaagggaaggctaatangagaaatgatggctaggggttcaatcaggatggtgtctgcccatgc

SEQ ID NO: 242366 - DNA, 161 bp, Glycine max
aacgggaagttttcctcgcgagtgtcactcttgaaaacattccacatcatggaaccattcactttgtttgccactcatgcgttggcggggcaatcgcttaccacagggatcgcattttctttgctaacaagacatatcttccaaatgcaactccaactcca

SEQ ID NO: 242367 - DNA, 304 bp, Glycine max
ggactatgcttgtggagagggtggtgctgattgcatggagatctcaccgcagggaaactgttataatccagacaccttggttgctcatgcctcctatgctttcaacagttactggcagaagcacaagagaagtggtggaacatgcagctttggaggaactgccatgttgataaattctgacccaagtttccttcactgtcggtttattcttagctaagtgaatagaagtggcgtggcgactttctgtttttgttgcagatagtgtggaggattttatgttaaggtcacttttcttttggataac

SEQ ID NO: 242368 - DNA, 303 bp, Glycine max
ggagttgagaggatcgtgagaggggcagtagccgagattccgtgagttgcaaaaatgaagacgattctttccaccgagaccatgaacatcccggacggcgtgagcatcaaagttcatgccaaggtcatcgaagttgagggcccccgcggaaaattggtgcgagacttcaagcatttgaatctcgattttcagctcattactgacgaaaacggtaaaagaaagctgaaaatcgacgcgtggtttggttctcggaaaacatccgccgccattcgcaccgccttgagccacgtggagaatcttatc

SEQ ID NO: 242369 - DNA, 332 bp, Glycine max
  unsure (1)..(332): unsure at all n locations
atgactcaatattttgacacaatgaaggagattggtgcatcctccaaatccaatgctgttttcattccacatggacctggtgctgtgagtgatgttgcttcacaagtaaggaatggtcttctccaaggaaatgcaacaacagagtcttgaagacatacacatatatcatcataccatgatttcctcctccaggcacttgtagtttagctttgcaactaaatctttatatatgctactattatgaatcatccatggcaagttggcaactaatgccttctatatgtatatggtcttcctaatcaaccatggcaactttcgaaaaaaaaaannaa

SEQ ID NO: 242370 - DNA, 390 bp, Glycine max
  unsure (1)..(390): unsure at all n locations
gctctgaaaactgaaaagtaaaggcgaaagactttaggtttggaattgggaattanggttgttcgcgtcacgaagatgatcgaggtggtgttgaacgatcgattggggaagaaggtgcgcgtgaagtgcaacgacgatgacaccatcggcgacctgaagaagctggtggcggctcagacgggcacaagagccgacaagatccgcatccagaagtggtacaccatatacaaggatcacatcactctcaaggattacgagatccacgacggcatgggtctcgaactctactacaactaaacacaaggtctatacccatctcaattcctccttttaaagatactagctagggttttgttttttagggtcccaaattttgatttgtttttcggc

SEQ ID NO: 242371 - DNA, 391 bp, Glycine max
  unsure (1)..(391): unsure at all n locations
ggagaagtgagtgagtagtgagaatggagtttcaagggttaccggaaggttgcattgctagtatactctctcgcactacgccggcggacgtgtgtaggttttccgtcgtatcaaagattttccgttcggccgctgaatcggacgctgtgtggaaacgttttctcccttccgattaccattccatcatttcccagtctccttcgcctctcaactatccttccaagaaggagctctatctcgctctctcggatcgccctatcatcatcgatcagggtaaaaagagctttcaattggagaaaaagagtgggaagaagtgttacatgcttgctgctanagctctcagcattattttggggtgacactgagcaatactggaactggacaaccgata

SEQ ID NO: 242372 - DNA, 388 bp, Glycine max
gaccattcgccattccaatgtcaccttctttttgcacatccctcttcctcttcacactctcccttctcttcttcctattcttctccctctccgtctccgtccacagcggccaccacgacgacggtgacgccgactccgacgccacccccgacctccgtgctcggcccttgattctcgcgaaggtgtggtgcctgatcgtgatcttcatcgccaccttcgtctcgggcgtttccccctacattctgaaatggaacgaggggttcttggttctggggacccagtttgctgggggagtgtttctgggaactgccatgatgcattttctcagcgacgcctatgagaccttcggggacttgactcaaaaggagtaccctttcgccttcatgcg

SEQ ID NO: 242373 - DNA, 348 bp, Glycine max
cacactcacagacacagtctctctaatctaatggatgcaaagtctgctgaagctgttgttcccttagaaccattgaagtatcagacatggttcttgaaagtttcgatccactgtgaaggttgcaggaggaaagttaagaaggttctacagagcattgatggtgtttttaccacaacggttgacccgcaacagcaaaaagtaaccgtcactggaagcgttggagttgagacgctcataaggaaactggtcaaagccggaaaacacgccgagatttggccggagaatctcgccgccgggaagggaaagaactccggcaaagacaagaagcagcagcagcagcagaagaag

SEQ ID NO: 242374 - DNA, 407 bp, Glycine max
ggaacctttgcattctattcattcaagattcagcaagtgcgttttggaagcagagaccgaaatacttcgagatggcccgtacaaagcaaactgctcgtaagtcaactggaggaaaagctcccaggaagcagcttgcaaccaaggctgcacgtaagtctgcaccaacaactggtggtgtgaagaagcctcatcgttatcgccctggaactgttgctcttcgtgagattaggaaataccagaagagcactgagctcctaatcaggaagcttcctttccagaggttggttcgtgaaattgcccaggatttcaagactgatctgcgtttccagagccatgctgttcctggcatgcaaaaggctgctgaggcataccttgttgggctctttgaggacactaacttgtgtgcc

SEQ ID NO: 242375 - DNA, 354 bp, Glycine max
  unsure (1)..(354): unsure at all n locations
gataatttatttaattattttctccctacaaaatcttgatctctctgctgttgtggagtggtgttgtgttaatctcattcacacattcacagttatactctctctctctttgtcgctcggatcactgatctcatctcaattttcagatatgtcgacatctgataagccagaagtggtggaaaggggtagcaaggatgaaaaacacaaggaagatgatcaagaggaggggaagggtggattcattgagaaggtgaaggatttcattcatgacattggtgagaagattgaggaagctattgggtttgggaagcnaactgctgacgttactgcgattcacattcnatcgattaatct

SEQ ID NO: 242376 - DNA, 312 bp, Glycine max
ggcaggagggatacggtgagaaagaacagtccagtggtggcacagcgtttgtcaacagatcataatgtagctgatgaagaggtgagaaaagaagttgaagctctccatcctgatgactcgcacattgtggtttataaccgtggagtttggaggattaagggcattatacaggtgtcaagatctatcggtgacgtgtatttgaagaaacctgatttctaccgagacccggtttttcagcagtttggaaatcctattcctttgaagcgtcctgtaatgacagctgaaccatcaatcattattagggagcttgag

SEQ ID NO: 242377 - DNA, 352 bp, Glycine max
gacagcaagtgaagaggtggtgaagtgaacacaatggagagaagggttggctatgaggtgctggtggctttggtgacccgtttggttttctcatttgcttgtgccactgcttcatcatcaggaccaacaaaactccaccaccgtgtggagcaattcaggaggaatctgcttgctaatggccttggtagaactcctccaatggggtggaacagttggaatcatttcagctgtcaaattaacgaaaaaatgatcagagaaactgctgatgcccttgtttctactggtctgtcaaagcttggatacacttatgtcaatatagatgattgttgggctgaattaaatccggatgcta

SEQ ID NO: 242378 - DNA, 304 bp, Glycine max
gaccacacaccacacacatagtagctattatactctctagagtaattgcggaatctgctagaattttctaataatggcgaaagacgttgagcaggtcacagagcaaggtgaatactccgcgaaggactaccatgaccctcctccggcaccgttgatcgacccagatgagctcacaaagtggtccttgtacagagccgccatagctgagttcatagcaacactcctttttctttacatcaccgtgttgaccattattggctacaagagacagagtgacaccaaaatccccggtaacaccgaatgt

SEQ ID NO: 242379 - DNA, 130 bp, Glycine max
gctgctagcagagggaagttctacacttttttgtttggattgatcgagtgtactttttcttttcgagattggcttggtgtgcagtggaaaaagggtggaaaagagtggtaagggggaaggcggcgccctc

SEQ ID NO: 242380 - DNA, 404 bp, Glycine max
  unsure (1)..(404): unsure at all n locations
taccggtctagaattcncgggccgacccacgcgtcaaagacgacagaaggggaagagtgaagagcgaagagaatggctcccaagggtttaatctttttggctgtgttatgcttctcagcactgtcactgagtcgttgtcttgcggaggataatggacttgttatgaacttctacaaggaatcatgccctcaggctgaagacatcatcaaagaacgagtcaagcttctctacaagcgccacaagaacactgctttctcctggctcagaaacatcttccatgactgtgctgttcagagttgtgatgcttcactgttgctggactccacaagaaggagcttggtctgagaaggaaacagatagaagctttgggttgggaaatttcaggtacattgagaccatcaaag

SEQ ID NO: 242381 - DNA, 302 bp, Glycine max
ggttctagtgtgtgattgtttgttgttgtaactcgttcttcttcttttgttgttctgtgtttgtgtttgttttttctctcacctgaaaatgtcttgctgcggtggtaactgtggttgcggaagctcctgcaagtgcggcaacggctgcggaggctgcaagatgtacccagacttgagctacactgagtcaaccaccaccggagaccttggtcatgggagtggcagctgttaaggctcaagttgaaggtggctgaaatgggtgtgcccgctgagaacgatgggtgcaaatgtggaccaaactg

SEQ ID NO: 242382 - DNA, 289 bp, Glycine max
gtgcattgagatgttctttgaaattgctgagaacaaggaagactataacaagttttatgaagccttctctaagaatctgaaacttggtattcatgaggattctcagaacaagacaaaacttgctgaattgctcaggtatcactccaccaagagtggtgatgagatgaccagcctcaaggactatgttaccaggatgaaggaacggcagaatgacatctactacattactggtgaaagcaagaaagctgttgagaattcccctttccttgaaaagcttaagaagaagggg

SEQ ID NO: 242383 - DNA, 343 bp, Glycine max
ggagaagcattagcactaggagcagcaacaactagtctcagctgaaatggcctcttcagtgatggcatctgtggccctcaaacctgcccctttcactgttgagaagtcctcagtgagaggccttccctctctctcaaggaactcttcttcattcagagttgtggccagtggcaagaagatcaagactgacaaaccttatggaattaatggtggcatgggctttgagggatggaactgatgcatctgggaggaaaggaaagggaaagggtgtttaccagtttgtagacaaatacggtgcctaatgtcgatggttacagtcctatctacgacaccaaggactggt

SEQ ID NO: 242384 - DNA, 305 bp, Glycine max
gatacattctcttgtcacagttttctgtgtcaccggaactcgtttctttcaaaacacttcagacatctcgaacgctctctttccggcaactaggttaaagttcatcaatggcaggtcgcggcaaaaccctaggatctagcgccgccaagaaggctacctcaaggagcagcaaagccggcctccaattccccgtcgggccgtatcgcccgtttcctcaaggccggaaaatacgctgagcgtgtcggcgccggcgccccggtctacctcaccggcgtactcgaatatcgcgcggctgaggttttgga

SEQ ID NO: 242385 - DNA, 307 bp, Glycine max
gacatcgcacaacattattctttcgcaccttgcagaatcaattttctctctcaatcgtctttcatggctcgtaccaagcaaaccgctcgcaaatccaccggtgggaaggctcctaggaagcaactcgccaccaaggctgcaagaaaatctgcacctaccaccggtggagtcaagaagcctcatcgctatcgtcctggaactgttgctcttcgtgagatccgaaaataccaaaagagcacagagcttctgatccgcaagctcccctttcagcgtcttgttcgtgaaatcgcgcaagacttcaagactg

SEQ ID NO: 242386 - DNA, 375 bp, Glycine max
ggaattcacgagtgaaaattgctttggggattgcacgcgctttagagtacctacatgaagtttgttcaccatctgttgttcataagaatataaagtcggccaacatattgcttgatacagattttaatcctcatctttctgacagtggattggcaagctatattccaaatgcaaaccaggtattaaacaataatgctggatctggatatgaagctcccgaagttggtttgtctggtcattatactcttaagagtgatgtttatagcttcggagttgtcatgttggaacttcttagtggacggaaaccgtttgatagctcaaggccgaggtctgagcaagcgttggttcgatgggcaacacctcaactccatgata

SEQ ID NO: 242387 - DNA, 334 bp, Glycine max
  unsure (1)..(334): unsure at all n locations
gttcccgaagaaggagtancgtagaggaagagtgcgaaagaaagatcgttctcgatgacagaggggaacggtgacaaaactctgcgaaagatcgcagacgcattcaatgaccttgcaaacgttttcaccgattctcagagcgcagaagcagaggtcaaggttgctcccttctctcatgcctgctctctcgtctcccctctcttcggttgcttgggcgtcgccttcaagttcgccgaaatggattacgtcgccaaggttcatgatctggcagaggcgtccaagtctattcagaatctgcagtctctgattgagctggatgtgcaagctaacactg

SEQ ID NO: 242388 - DNA, 332 bp, Glycine max
cttacctgagcagattcagagtgcaaagtgtgagagaaagacaatgccgaagtctcaatttcgaaccccatttctggtttctcttccccttttgttattcatcttcaacctcaccccttcgcacgcactctatggagcatcctcacccgtgcttcaagtcactccctctaacttcaagtccaaggttctgaattcaaatggagttgttcttgttgaattctttgcgccatggtgtggacactgtcaggctctgactcctatatgggagaaggcagctacggtgttgaagggtgttgttactgtggcagcaattgatgctgatgcgcatccgt

SEQ ID NO: 242389 - DNA, 339 bp, Glycine max
ggggtggaaagtgaaagagtaggacaccacaaagtgtaacttgagtgattagatctgatgagtgcagaaagaaggaaggattgttggtgatcgatcatcgatcagcgatcatcgatggcgtctgctagccttggaagtggtggggtgggcagttccaggtctgttaatggtggcttcaggggttcttccagttccgtcgattggcttggcagaaagatgcttgagatgtctttgagagaccacgaggacgatagagatagtgagcctgacatcattgatgggttgggtgctgagacgggtcacgtgataagaaccagcgttggtggccgaaatggtcaa

SEQ ID NO: 242390 - DNA, 406 bp, Glycine max
attcccgggtcgacccacaacgtcagggggagcaagagtgaagagcgaagagaatggctcccaagggtttaatctttttggctgtgttatgcttctcagcactgtcactgagtcgttgtcttgcggaggataatggacttgttatgaacttctacaaggaatcatgccctcaggctgaagacatcatcaaagaacaagtcaagcttctctacaagcgccacaagaacactgcgttctcctggctcagaaacatcttccatgactgtgctgttcagagttgtgatgcttcactgttgctggactccacaaggaggagcttgtctgagaaggaaacagatagaagctttgggttgagaaatttcaggtacattgagaccatccaagaagctttgggaagggaatgccc

SEQ ID NO: 242391 - DNA, 240 bp, Glycine max
gtaacattggaaggcatcgatttcgacattgaacttggttccaacctctattggggcgaccttgccaaggaactagatgctctcaggcaccaaaacgaccactacttctacttgtccgcagccccacaatgttttatgcctgattaccacctcgacaatgccatcaaaactggtcttttcgatcatgtaaacgttcagttctacaataaccctccatgccaatactcacctggcaatact

SEQ ID NO: 242392 - DNA, 352 bp, Glycine max
gatccagatctggcagactagtatccgatcctctgtcctctcgaagctttcatcgttcaacatattctcaccatctcagtcatgggcctgctatcttgttttaggtctaccgtcctgagaaaatgttccaaaggaagctctggcatgtcaagattcctgtatacgaacaattttcaacgaaacttgatttcgtctggtggcaatgaatcgtattatgggtattttaacaggagattatacacttcactttatatgggaactggaactgtgggtgggattacaagtgctagaatcagggtgccaaatgtaggatgtgaaggattcatgtgctcaagtcatctgtcaatcactc

SEQ ID NO: 242393 - DNA, 350 bp, Glycine max
  unsure (1)..(350): unsure at all n locations
gaggaacaagaagcgaaaatataacaaataatttgtactttcatcaaaacaaaatcccgttgtagttttctcagatggctcgaacgaagcaaacggcccgcaagtccaccgggggcaaggcgccgcggaagcagctggcgactaaggcggctcgcaagtcggctccggcgaccggcggcgtgaagaagccgcacagattcaggccgggaaccgtggcgctgcgcgagatccggaagtatcagaagagcacngagctactcatccggaagcttccgttcaacgcttggtccgcgagatcgcgcaggacttcaagaccgacctccggttccagagctccgccgtctccgcgc

SEQ ID NO: 242394 - DNA, 384 bp, Glycine max
gagcgtttcacacctagacaattggctcagaagaaaagaaaagcaaccaaaaatggttctcacatccactgccacacacccagatgaacaagaccagagcctaaactatacttttgcttccagatatgtgcgtgaacctattccaaagttcaagatgccggagaaatccataccaaaagatgctgcttatcagataataaacgatgagttgatgttggatggtgcaccaaggctcaacttggcctcgtttgtgaccacttggatggagcctgagtgtgacaagctcataatggcttcacttaacaagaactacgttgacatggatgagtatcctggtcacactgagctcccagaacggtggtgttatatcatagcaaatctaat

SEQ ID NO: 242395 - DNA, 331 bp, Glycine max
gaaaccaacacaacaaagaggagttaataattgaagaaaatgtccaagtatggaacatctctattggtgccttctgttcatgaacttgtgaagcaacctatcaccaaagttccagatcaatatcttcatccaaatcaagatcctcctgatatatctaacacaaccttaccacaagttccagtcatcgaccttagtaaattgttatctgaagatgtcactgagctagagaagctaggcgatgcatgcaaggaatgggggttcttccagctgattaatcatggagtcaacccttcaatggtggaaaacgtgaagagagatgttcaagagtttt

SEQ ID NO: 242396 - DNA, 328 bp, Glycine max
gaccgtttcggttaacactttccaatacaataatcactaactgaatattcgatcggagatgtctgccgccgccgaagaagctaacgctcccgccgtcgaaaagccggttgaggaggtgaaggcgccgaaccccgcgaaggagaagaaacctaaggctccgaaggaaaagaagccaaaacaggccaaaacagcttcacatcctccatattttcagatgattaaggaggctttgatcgctttgaacgagaaaggaggatcgagtccttatgcgatagcgaagtacatggaggagaagcacaaggcggtgctccctgcgaatttcaagaag

SEQ ID NO: 242397 - DNA, 292 bp, Glycine max
ggcgtacgcagcttcatccctaacgcgtgcatagcagagtcagagacagagacgcagcgatggggcggagacctgcgaggtgttataggcaaattaagaacaagccataccccaagtcacgtttctgccgtggtgttcctgatcccaagatcaggatttatgatgttggtatgaagaagaagggtgttgatgagtttcctttctgtgtccatctggttagttgggagaaggaaaatgtgtcaagtgaggccctggaagctgctcgcattgcttgcagcaagtacatggccaa

SEQ ID NO: 242398 - DNA, 289 bp, Glycine max
gaatcattcattgatcgctgaaacgatacgatgacagggaaggcgaagccgaagaagcacacggcgaaggagatcgcggcgaaggtggacgcggcgaccacgaaccgcggcggcgggaaggcgggtatgaaggaccgaaccgggttggagaagggcgggcacgcgaaatacgagtgccctcactgcaaggtgacggcgccggacgtgaaatcgatgcagatccaccacgacgcgcgtcaccccaagatccccgtcgaggaggacaaagttgtcaatcggcacgccacca

SEQ ID NO: 242399 - DNA, 353 bp, Glycine max
ggttcaagaggctgagaagtacaaatcagaagatgaagagcacaagaagagggtagaggccaagaatgcattggagaactactcatacaacatgaggaataccattaaagacgagaagattggaggaaaacttgacccagctgacaagaaaaagattgaggatgccattgagcaggccatccagtggctagacagcaaccagcttggagaggcagatgaatttgaggacaaaatgagggagttgggaagcatctgcaaccctatcattgccaagatgtaccacgggtggtgctggtccagaactcggtggtgcaatggacgatgatgttcctgctgctggaaagcggtgcggg

SEQ ID NO: 242400 - DNA, 356 bp, Glycine max
tgatgtggtgattgcagacaaatttgctcctgatgctaatagcaaggtcgtgccagcatctgccatccctgatggctggatgggattggatattggtccagattctgttaaatcattcagtgaagcattggatactacccaaaccatcatatggaatggaccaatgggagtgtttgagtttgacaagtttgctgttggtacagaggctattgcaaagaagctggctgacctcagtggaaaagcggtgaccacaattattggaggaggagattctgttgcacctgtggagaaagtaggagttgctagtgtcatgagccacatatctactggtggtggtgccagtttggagttattgg
